United States Patent Application Publication US 2021/0199660 A1 - sequence listing, part 56

SEQ ID NO: 804225 - DNA, 120 bp, Artificial Sequence
  ENSG00000285492_6 (sequence is synthesized)
ctcacctgtgccctccgttggctggtggtgccatctgatctagagacccactggaacagggggctgtgtgccccccaggtcagtactgagagcctctgctgcccctttgtaaatgcacct

SEQ ID NO: 804226 - DNA, 120 bp, Artificial Sequence
  ENSG00000285492_7 (sequence is synthesized)
tagccgaaaacagagattctgactgaggaattccagacatctctggagagacctcatatgtggaaccttctcagtgtatttcatcaaccgtgtcctttccagcctaaatggtctccctga

SEQ ID NO: 804227 - DNA, 120 bp, Artificial Sequence
  ENSG00000285492_8 (sequence is synthesized)
ctcaggcattcccaaactgagaagcttcaggggatttggaaatagcctagaacccgaagccaagaagaccaacattggaatcctaaatctgtcttttcctgagtattttacccaggcaaa

SEQ ID NO: 804228 - DNA, 120 bp, Artificial Sequence
  ENSG00000285492_9 (sequence is synthesized)
tttcattcagtatcctcatccattaaggaagtagctttatctgcactacagaattttgaggaagaataaatgagctgctgtcacacatagtttagagaactaagaatgaggtagcttaaa

SEQ ID NO: 804229 - DNA, 120 bp, Artificial Sequence
  ENSG00000285492_10 (sequence is synthesized)
tagaaataactaacacagaatttctcgcacttagcaggtgtgtgatgcaagtgctggctgctaactggttttttgttttggttgggggaaggaagatccaggccagtgaagatggtcttc

SEQ ID NO: 804230 - DNA, 120 bp, Artificial Sequence
  ENSG00000285492_11 (sequence is synthesized)
acagccaagatgattgataaggttagaattactaagtttctgatctcagtccatctctgaggggtgacttgggaactctcccacaacctccctatttgcttcaaattgttctggcaaact

SEQ ID NO: 804231 - DNA, 120 bp, Artificial Sequence
  ENSG00000285492_12 (sequence is synthesized)
gcttaatggcaaagtgtggagaagggctttctactggagagcagatataaacacctgcaaaaggaggggccatgaagaaggctcactctgcagccttacagaggcccaaatgatagcaga

SEQ ID NO: 804232 - DNA, 120 bp, Artificial Sequence
  ENSG00000285492_13 (sequence is synthesized)
gaagcttgcagccacacgtaagaactgagaggttcactgagcatcacaataaaaaaccagctccgcaaagttcgtagccacagatgtagggctttggcaggaaatggttggggttgtgtc

SEQ ID NO: 804233 - DNA, 120 bp, Artificial Sequence
  ENSG00000285492_14 (sequence is synthesized)
atcttcttttactttctgaaatattctagaaaaatggcttctgttttatccttgcagtagataactgtggtcctataaacttcataggatcagctcatagtgtacaaggtaggaaccatc

SEQ ID NO: 804234 - DNA, 120 bp, Artificial Sequence
  ENSG00000285492_15 (sequence is synthesized)
attaatgtttgtgacactctttcttgacagagaaactttagaatactaataataataatggtccacagttacccagaactcgctatgcgcctgtcactcttctgagcacttgatatacaa

SEQ ID NO: 804235 - DNA, 120 bp, Artificial Sequence
  ENSG00000285492_16 (sequence is synthesized)
taagtcacccacttcctttctgacacagatgtcctagtcacatgtgaggtaagagtctttcaaactgggcgtcacaaatggattttctccttgcagaatggcttcctccaagttagaaaa

SEQ ID NO: 804236 - DNA, 120 bp, Artificial Sequence
  ENSG00000285492_17 (sequence is synthesized)
aattctttctcttactaatgtgggaagttccaccccctctaatatcagatgaccacaagaagccctggcatctccactcacgctggcctgagcatggctatgccctttgaactgtccctc

SEQ ID NO: 804237 - DNA, 120 bp, Artificial Sequence
  ENSG00000285492_18 (sequence is synthesized)
ccgttgtagtctctgggatatcatgcaatcctgtgactgctgtttttgattcattcagatgggttcgtttacaatgtcagcacaggccaaccagcatagacaacgcttcttttcataaaa

SEQ ID NO: 804238 - DNA, 120 bp, Artificial Sequence
  ENSG00000285492_19 (sequence is synthesized)
aggaacttcagatactgtgtttttaagagaattaaatgagataattcaggtaaacctctgagcatggcgcctgcccccagggaagggtttggatggtttgagaactactagagtggtcgc

SEQ ID NO: 804239 - DNA, 120 bp, Artificial Sequence
  ENSG00000285492_20 (sequence is synthesized)
tttgagaactactagagtggtcgcctgcgagggctgccattacaagggaccacagactgggtgggttaaatggcagaaatgtacatctcctggttctggaggctggaagtccaagatcaa

SEQ ID NO: 804240 - DNA, 120 bp, Artificial Sequence
  ENSG00000285492_21 (sequence is synthesized)
tgaggctgtgagagaagagtttgttccaggactctctcctcagctggtagatggctgatttctccctgcgtcttcacatcctcttccctctatacatatttgtgctcaaatttctagttt

SEQ ID NO: 804241 - DNA, 120 bp, Artificial Sequence
  ENSG00000285492_22 (sequence is synthesized)
ttgtgagtatatcagtcatcctggattgcccaccctaaagacctcactttaaccaaattccttctgtagcgatcctatctccaagtaaggccacaatctgaggtactggggactccaaca

SEQ ID NO: 804242 - DNA, 120 bp, Artificial Sequence
  ENSG00000285492_23 (sequence is synthesized)
cataaataaggttgggggcaggtgggcacgcaaatcaacccactgccaaggggctggtatcactgcactgcagtcagagagttcgccgtagggacagggggctaggggaccggccaagca

SEQ ID NO: 804243 - DNA, 120 bp, Artificial Sequence
  ENSG00000285492_24 (sequence is synthesized)
gatagataagacaaactgagcctgaaatctggctggagaccaagtcctcaagggctctaagtgctgatgaggacaacgggggtgcaaagaggataagcccctcacccagtgctgtctgaa

SEQ ID NO: 804244 - DNA, 120 bp, Artificial Sequence
  ENSG00000285492_25 (sequence is synthesized)
gtctaccagggaggttgggtgaggacgtcctaagacttgaagcaacaaagaagtctcagggctgagccagaatcaggctgacccagccatggaggggaggggctgccatggaggccaagg

SEQ ID NO: 804245 - DNA, 120 bp, Artificial Sequence
  ENSG00000285492_26 (sequence is synthesized)
aagtgctccagctccctctgagtcggtcaagtcccttcaggggcattaactcattggtgctccagcttcctcgtgcagtaccatgcagacattaccagagtaccaacccttcaggaatcc

SEQ ID NO: 804246 - DNA, 120 bp, Artificial Sequence
  ENSG00000285492_27 (sequence is synthesized)
tcgagagaggtggcatgagggcagtcaagctggatcctgccctctgggggttgtgatctggtagaaggcaaacgtgtgtgtgaaaaaataaaacatagtgtcagaactgatgggtctcaa

SEQ ID NO: 804247 - DNA, 120 bp, Artificial Sequence
  ENSG00000285492_28 (sequence is synthesized)
gagaaaataagatagaataataggagggttcaggaaaaggcagtgtattcatttccaggggcgctgtaacatattaccacaaacagctctgaggctagaagtccaaagtcaatggttccg

SEQ ID NO: 804248 - DNA, 120 bp, Artificial Sequence
  ENSG00000285492_29 (sequence is synthesized)
ctgggtgggtgcccctggaaggctctaagggagaacgtgtccgggccttctcctggcttccagtggtcctggcatcccctgtgctccttggcttgtagacatatcatttcagtctctacc

SEQ ID NO: 804249 - DNA, 120 bp, Artificial Sequence
  ENSG00000285492_30 (sequence is synthesized)
tctgtcctcacacggcttctcctctgtgaatcttctcctttttttattttaaagacacccatcattggattcggggcccaccctgatccaggatgatctcatctcaaaattctaacctta

SEQ ID NO: 804250 - DNA, 120 bp, Artificial Sequence
  ENSG00000285492_31 (sequence is synthesized)
attatgtcagcaaagattctatttccagatgagatcacctgcacaggtagtgtaggttaggacttagacatatctttctgagggacagccactgtagacaattaacctcattgagagaaa

SEQ ID NO: 804251 - DNA, 120 bp, Artificial Sequence
  ENSG00000285492_32 (sequence is synthesized)
cgggaggatttgggagtgaggggcagggggcattctgagctgggctttgtggggagaggcaggattgggcctttggagaagagtggaaaggacatttcagtagagggacaaaagggatga

SEQ ID NO: 804252 - DNA, 120 bp, Artificial Sequence
  ENSG00000285492_33 (sequence is synthesized)
aggcccagagatgcaaagcacccttcacccacagaaggcagcaggcatagcagaggagggctgaacgggatttggtatctgcccgtcccttcctttctgctccataagctactcccatca

SEQ ID NO: 804253 - DNA, 120 bp, Artificial Sequence
  ENSG00000285492_34 (sequence is synthesized)
tccccactgtcatggccatgaccgacactgagttaagcaacgcaacagaaaagttgaacaaggaatgcccaacctctccattcctgcagagcaattccagcttggcctactcctgagtta

SEQ ID NO: 804254 - DNA, 120 bp, Artificial Sequence
  ENSG00000285492_35 (sequence is synthesized)
tttcactccagttcacttgcaaacatgtgtgctcagtcaaaagcatccaagagattagcatgacccaggactaagcatctccctgcacctcaactttggtgatttgagagtgaaaaagta

SEQ ID NO: 804255 - DNA, 120 bp, Artificial Sequence
  ENSG00000285492_36 (sequence is synthesized)
ctctctttattatgaagacaaaccctggtatagtaagaaggagacttcagcagtgacacgggatcgtaagtaaaaagagaataataattcccacttctcaggtttacggttaggcacaaa

SEQ ID NO: 804256 - DNA, 120 bp, Artificial Sequence
  ENSG00000285492_37 (sequence is synthesized)
gaagatcaatttgtaaaatgtgtaacagagagtctgacctaggggaagaccccaataatggtagagaggggaaaacagagggcttgggagactctcttagactctcatttgtcattgtgt

SEQ ID NO: 804257 - DNA, 120 bp, Artificial Sequence
  ENSG00000285492_38 (sequence is synthesized)
ctcttcactagaaaaattttaggaagactggcccaaaaaaaggcaccagaggggtacagggatggaaaagcacagtgtgacctcatcatggaagggcttaaacatcagcccgaggaattt

SEQ ID NO: 804258 - DNA, 120 bp, Artificial Sequence
  ENSG00000285492_39 (sequence is synthesized)
ctacttgtcctgcagctaatgggaagctgatgtcacaaaaatcagtgaactcaatgtcttgtgccagattaatacaatgcaaagagttaacaattacttggtgcagttgtgccatgtcaa

SEQ ID NO: 804259 - DNA, 120 bp, Artificial Sequence
  ENSG00000285492_40 (sequence is synthesized)
taactgatgtattacatccactttttctgctctttgcagagtagtctagagccttgcagagtgtagtattattatctaactaattggaaacacgcatttcttttgccaccaaaagataag

SEQ ID NO: 804260 - DNA, 120 bp, Artificial Sequence
  ENSG00000285492_41 (sequence is synthesized)
gctgacatggtatttagaaaagttgtgtttgcaaaatgaaccatccatcctggctggcaagataatccttttcaaccagtcattttgttgctagtcattttgtcgcccacttgtgctctt

SEQ ID NO: 804261 - DNA, 120 bp, Artificial Sequence
  ENSG00000285492_42 (sequence is synthesized)
actgttaaaatttgttaatttctttttttaaaacccacattgagtcagactgagttaactctgttgtgggcatttccatcactcgacacagagcttcttagcaccaccagaggtgggact

SEQ ID NO: 804262 - DNA, 120 bp, Artificial Sequence
  ENSG00000285492_43 (sequence is synthesized)
tttggcaaatgctgtttatccacctttgaaattagacattcattgcaaatgaatttaaaatgaaattcctgtaaaaagcattttttctttcagtgatagtttttgcctttttttttcact

SEQ ID NO: 804263 - DNA, 120 bp, Artificial Sequence
  ENSG00000285492_44 (sequence is synthesized)
tgcccataactttctggaaatttctactttgggctgaattttctcataattgttttcagtataagtttgctttgttttttattaatggaaagtttaaggggaaaaatccctttggtaact

SEQ ID NO: 804264 - DNA, 120 bp, Artificial Sequence
  ENSG00000285492_45 (sequence is synthesized)
tttgagttatgagattattttttaaagtacactttttccaagtaaaagaaacctttgaacattttttaaaaatcgaaacctttgcatttgaggactatagtggactccaggcagtggttc

SEQ ID NO: 804265 - DNA, 120 bp, Artificial Sequence
  ENSG00000285492_46 (sequence is synthesized)
ccagtattgtcttcactttggaaccctttgacaaacttttaaaatactgatgcctgaatcaaagattctgaagcaattggacggggtccaacacaggccttaggatcactgggagctccc

SEQ ID NO: 804266 - DNA, 120 bp, Artificial Sequence
  ENSG00000285492_47 (sequence is synthesized)
ccaggtgattctcatgttccagattcactgagtagtatccttggacacaaccaccccaatatccaagctctaaaaaggatgcagaggtcttcgagggtgcagaaaggaaaatcaattctt

SEQ ID NO: 804267 - DNA, 120 bp, Artificial Sequence
  ENSG00000285492_48 (sequence is synthesized)
aggtcttcgagggtgcagaaaggaaaatcaattcttactgggaataattttctttccattaagagaaaaatagttggccaggcatggtggcttacgccggtaatcccagcactttgggag

SEQ ID NO: 804268 - DNA, 120 bp, Artificial Sequence
  ENSG00000285492_49 (sequence is synthesized)
gaaatatacagctctgaggaagatacgaaaaaaatttgactcataagtctttatataacccgcatccaactagtcaactatcaccaggtccatcactttctgttccttaaggagagattc

SEQ ID NO: 804269 - DNA, 120 bp, Artificial Sequence
  ENSG00000285492_50 (sequence is synthesized)
ccagccattgtcctggttctgtggccaccttttcccatcattcggggtcttttcctgggcttttgtaaaagtttttaagaaattcctctaccaagggcagctaggatagagttccaaaat

SEQ ID NO: 804270 - DNA, 120 bp, Artificial Sequence
  ENSG00000285492_51 (sequence is synthesized)
ggaagtatgacttccaaaatggaccacaggcaaaaccatactcactaccacagaggaaatacgtcctccctccgcatctgggtagagcctggtacataaagtcccagaaaccagaaggta

SEQ ID NO: 804271 - DNA, 120 bp, Artificial Sequence
  ENSG00000285492_52 (sequence is synthesized)
actctgcctcctcctcccttctgactcttggggctcatggatcccctgccctttaatgacatttcgtcaccgccagctgcagagccagagccacacatgcttcatgctcaaagatggacc

SEQ ID NO: 804272 - DNA, 120 bp, Artificial Sequence
  ENSG00000285492_53 (sequence is synthesized)
ctaccagaattcatctagtccatgagcctttactgaatgccaactatatgcgagtcctacggagaagatgtcaacattaacaggacacagcccctgccctcatggaaggacagtcaagca

SEQ ID NO: 804273 - DNA, 120 bp, Artificial Sequence
  ENSG00000285492_54 (sequence is synthesized)
gaccactgcaggggacacccttgttcaaggaccagagtgtctgaaagtcacaggaaagtttttttgatcactatgaaagtttaacacgttcgctgtaaaataacttggcaactttatgcc

SEQ ID NO: 804274 - DNA, 120 bp, Artificial Sequence
  ENSG00000285492_55 (sequence is synthesized)
agagcaaatagtaccatggagtagattccaacatagacaaatgtgagttgcaaatttgttgtaaatatggggagaaaatgtaaaactaagcaagttttctctaccaagttaaattggtct

SEQ ID NO: 804275 - DNA, 120 bp, Artificial Sequence
  ENSG00000285492_56 (sequence is synthesized)
gtggattgggaagagactgccatgcttgtgtttcgccgcagaacactgcagaccagctgagggacaccaggcagggctcccagaaagacatctgaggaccctctgctcttagacagtcac

SEQ ID NO: 804276 - DNA, 120 bp, Artificial Sequence
  ENSG00000285492_57 (sequence is synthesized)
actcacgccaagcaggtcccttcatcaccacagaagaaactcaggctcctgtgtgattgtgtgtctcagacacggctctctttcaggggaaaaagtggtttccctgttgagaaaaagcag

SEQ ID NO: 804277 - DNA, 120 bp, Artificial Sequence
  ENSG00000285492_58 (sequence is synthesized)
tacaggaaatgtttacatattttactaatttaatgagctctgagtaaaatgtataaatcttggcatccagggaccattgcagaaattcgcgcaagctcttggaatctgccttctttaaag

SEQ ID NO: 804278 - DNA, 120 bp, Artificial Sequence
  ENSG00000285492_59 (sequence is synthesized)
ctttcaatcccatcatgatcaaaacacaacaaacaaacaaaagtgtgcagaaaggcagactaactatagggctgaaaacctgcaggaagctgtcccactcaggactctctgggaacctag

SEQ ID NO: 804279 - DNA, 120 bp, Artificial Sequence
  ENSG00000285492_60 (sequence is synthesized)
gcagcatcccccagtctcctcatgttgacttctgcccatgggatgcagagtcttcaggatctgatgttttcatctggccatttttgctgacaattccactttcaggacttcgatgttaac

SEQ ID NO: 804280 - DNA, 120 bp, Artificial Sequence
  ENSG00000285492_61 (sequence is synthesized)
attgtctccctgtttgttcctgggttaggcttttcatatttcctttttaaaaccctgtcttctctcatccatggccatcaggagcacttcacctcctgctgtgatggctccagcccttcc

SEQ ID NO: 804281 - DNA, 120 bp, Artificial Sequence
  ENSG00000285492_62 (sequence is synthesized)
tggggaaggctgtgggaagtctcccctctggctggcttcaaaagcttctcccataaaagctgagcaaaggtctttgtcagacttatttggaaaaaggctcctcggacatgagtagtgagt

SEQ ID NO: 804282 - DNA, 120 bp, Artificial Sequence
  ENSG00000285492_63 (sequence is synthesized)
aaatcctagaaaacaatctgttgagtttgtaaatgaatacatgtttttggacttcatgcagacatcctcaatccctattctcagatgccgtagttatctgcagaattccccttcagttag

SEQ ID NO: 804283 - DNA, 120 bp, Artificial Sequence
  ENSG00000285492_64 (sequence is synthesized)
gaagtaggtttttcatgtctatctgataacctggctttttatttgaaatgcctccaatgacagaaaacaggaactaagtggcttttatttaaggaagcaaaactcctatctgcctatcac

SEQ ID NO: 804284 - DNA, 120 bp, Artificial Sequence
  ENSG00000285492_65 (sequence is synthesized)
agtctagagagtttaaaaatgagaagaaggaaaagagccgccaaaaaaaatgtaatttcctctttgacaattatttctgaataggaacttgagcaatcacactcgagaaggtgaggtttt

SEQ ID NO: 804285 - DNA, 120 bp, Artificial Sequence
  ENSG00000285492_66 (sequence is synthesized)
tgtcctacttaagttgctcagaagtgtgcaaactgatgccctcctgatgctgtggggctggcccacagctttgtgtggtccctggaagcaaagatttgagtttctgtcactactgccagc

SEQ ID NO: 804286 - DNA, 120 bp, Artificial Sequence
  ENSG00000285492_67 (sequence is synthesized)
tccagacttcctggagctttcctggtctctgccttcagcgattctgacttgagtctgacttgagtgtctattgctttcaaaccaccctcctgccccttccctttgtctgtatctgtcaca

SEQ ID NO: 804287 - DNA, 120 bp, Artificial Sequence
  ENSG00000285492_68 (sequence is synthesized)
tcgtagggtggtccacaaggcagagaactgataccaaccccctgacagagaaacaaaggcaggcatatttctggtcaacttaaaagtatatatatgtacacctatatgtgtattcatata

SEQ ID NO: 804288 - DNA, 120 bp, Artificial Sequence
  ENSG00000285492_69 (sequence is synthesized)
tacatatgtatatttataagctgaattgtgtctccccaaaattcctgtgtggaagccctagccctcagcacctccaaatgtgactgtgtttggagggaggctcttaaagaggtggtgaag

SEQ ID NO: 804289 - DNA, 120 bp, Artificial Sequence
  ENSG00000285492_70 (sequence is synthesized)
ttaaggtgaggcagttagagtgtgtcctactccagtccgactggcgcccctataagagggaatgtggtcacgagagaccccaggaatgtgcacacggagggaagactaaggcggggtgca

SEQ ID NO: 804290 - DNA, 120 bp, Artificial Sequence
  ENSG00000285492_71 (sequence is synthesized)
gtgaggatggccatctgcaagccgaggagagaggcctcggagaaagcaaccctgcccacaccttggtcactcctagaccccaggactggaaggaacacattcctattgtttaagccatcc

SEQ ID NO: 804291 - DNA, 76 bp, Artificial Sequence
  ENSG00000285492_72 (sequence is synthesized)
caggactggaaggaacacattcctattgtttaagccatccagtctgtggtattttgttgtggcagccccagcagac

SEQ ID NO: 804292 - DNA, 120 bp, Artificial Sequence
  ENSG00000285492_73 (sequence is synthesized)
aaggcaaagcctcctccctgaattaattctagatcgctgaatcacatggctgttgcccagtagaagccccttgtctacactgtcaaatgaaacgcgccacccctcctgactccgttctga

SEQ ID NO: 804293 - DNA, 120 bp, Artificial Sequence
  ENSG00000285492_74 (sequence is synthesized)
acggtgtgacagggcccttcctggtcacagcccaacacacgctccacagcatcctcctgggaaccttggctccctctttgcactgaagaaccacgatcatttccagaagaactaaatgtg

SEQ ID NO: 804294 - DNA, 120 bp, Artificial Sequence
  ENSG00000285492_75 (sequence is synthesized)
aatcccaactgttaggattgagaaatgcctgttgacagcagctaataacttggaaaactgaaaggatgagataggaacgtgaaacacaccttgagtttgggagccatgtccattttccaa

SEQ ID NO: 804295 - DNA, 120 bp, Artificial Sequence
  ENSG00000285492_76 (sequence is synthesized)
ctcaatacccagtaaagctccatgcaccttgtggggactcaaaaagtatttattgactgagtacaaataataatgaaattaagtttccagaagcatctcagttcaacttttcgagtaccc

SEQ ID NO: 804296 - DNA, 120 bp, Artificial Sequence
  ENSG00000285492_77 (sequence is synthesized)
aaagaatgtcagtctttctttggaatttctgaaagttctacccaaagttctggatactccaccctttagttttgcatcctgaaaattcccttgtatgtcatttgtatccataagcacaga

SEQ ID NO: 804297 - DNA, 120 bp, Artificial Sequence
  ENSG00000285492_78 (sequence is synthesized)
tttttttaacatccaccactgattgatttttattttacatctctctggtctatttaaactttattatcttaaacacactaaaaaatgcatcatgggctcactgtgagaaatactgtatca

SEQ ID NO: 804298 - DNA, 120 bp, Artificial Sequence
  ENSG00000285492_79 (sequence is synthesized)
gtagctcactaagatgctttaaaataaagctggattgcttccaccgagaacgaggctaaatcagtgctttttaaagttgcatttgcaatgcattgcaatgttaccctgggggtgcatgtg

SEQ ID NO: 804299 - DNA, 120 bp, Artificial Sequence
  ENSG00000285492_80 (sequence is synthesized)
caaaagtcatggtaacaatttatggagtcactatttgtttcaggcacctattgctgaataataaccaccaaaaactcagtctcctaaaacagcatcaatttctgatttagcaggattcta

SEQ ID NO: 804300 - DNA, 120 bp, Artificial Sequence
  ENSG00000285492_81 (sequence is synthesized)
cgggttggctgggcagttctactgttggtttcacacggtctcacttagatgacattcaggatcgcccaagacggccttacacacacgtctgagagttggtgttggctgtgggctgggcac

SEQ ID NO: 804301 - DNA, 120 bp, Artificial Sequence
  ENSG00000285492_82 (sequence is synthesized)
cttgtctctcctccacgtggtctctcatcctccaggaagcttgtatggcttcctcacatggctatctcagggctgcattcaagagggcaaaggtggaaactttgaggccattggagcaca

SEQ ID NO: 804302 - DNA, 120 bp, Artificial Sequence
  ENSG00000285492_83 (sequence is synthesized)
gtatccttttttctgcattctacaagtcatgagggcagcctcatataaagtggggaagtagactccgtgtcttgatagaagccgcctcaaagaattatggccacatttcattaaccacaa

SEQ ID NO: 804303 - DNA, 120 bp, Artificial Sequence
  ENSG00000285492_84 (sequence is synthesized)
gactgcagcagattctaagtcacctcagctctctcactttgtgggtgagaaggggtaagttagggaaatagtgctcctgagacgacgctgctcaatggagggacgctgaggctcagcttc

SEQ ID NO: 804304 - DNA, 120 bp, Artificial Sequence
  ENSG00000285492_85 (sequence is synthesized)
ccacccaggcggacaaggtacctgctgcttctaagattgcctggtgcctgtggttacagtggaaaaggatcccattataaaactgacagatcagttgaccccaaaaactgtggctgagat

SEQ ID NO: 804305 - DNA, 120 bp, Artificial Sequence
  ENSG00000285492_86 (sequence is synthesized)
cactggttaagctgcatgttggaattctctggagaattttttttaatcctgaaatcccgtcttcagaaatttccattttattggtcaaagattaggtgtgggcattgattattcttaaaa

SEQ ID NO: 804306 - DNA, 120 bp, Artificial Sequence
  ENSG00000285492_87 (sequence is synthesized)
agcttcccaggggattctcacgtgcagccaagtttgagaaggactgatatttaaactttaaactgccttttctcaattgtcagagagattcaactaacgccttatttactctgtcgacct

SEQ ID NO: 804307 - DNA, 80 bp, Artificial Sequence
  ENSG00000285492_88 (sequence is synthesized)
cagagagattcaactaacgccttatttactctgtcgacctggtcatttgtacatggtaaacatgcatcatgaaaggataa

SEQ ID NO: 804308 - DNA, 120 bp, Artificial Sequence
  ENSG00000285492_89 (sequence is synthesized)
gtgtttagggatcttccaaggggcatttgtggagagctgagctctctcacaaaaaacagacgccccgtggacatacagctggctcttaggttcaagacaagtttgtgcacctggtggtct

SEQ ID NO: 804309 - DNA, 120 bp, Artificial Sequence
  ENSG00000285492_90 (sequence is synthesized)
atttggcttccttaacccaggccattgaaagtgagtcgccaatagggaaataccacatttatttgaaaaaattaagtaaaattagcaaagcctctgttgagttagatctcggggctctaa

SEQ ID NO: 804310 - DNA, 120 bp, Artificial Sequence
  ENSG00000285492_91 (sequence is synthesized)
gtgagccaagcagtagatgccttctctcttctgtttagccacctggtgaaaggtctagggcttagtctcaacataaaagtgtaaacgattcctttggagtagccctcagcttttgtctgg

SEQ ID NO: 804311 - DNA, 120 bp, Artificial Sequence
  ENSG00000285492_92 (sequence is synthesized)
gaaaacatggttgagcatagcaatcagaagaagaaatgtgtccaaatatccaaaaaagcagaagtacagcttcaggctgggcacctgttttactcattcttaaaaatggatatttgtgta

SEQ ID NO: 804312 - DNA, 120 bp, Artificial Sequence
  ENSG00000285492_93 (sequence is synthesized)
cttcatactgtgcaccccaggcttgtcttggggtgtaagaatgaattgcttcaatttaaggacctgcactctaatttcaaggggcaagatagaacgtgaaagctagcaaggaatcatgga

SEQ ID NO: 804313 - DNA, 120 bp, Artificial Sequence
  ENSG00000285492_94 (sequence is synthesized)
ataacctagtgattataaaaatgccgttaaataaactactccaaagccaggaagcaggaatatattaaatacattttactttttactttttcatgatacagcaggccctcaaataacatc

SEQ ID NO: 804314 - DNA, 120 bp, Artificial Sequence
  ENSG00000285492_95 (sequence is synthesized)
attttgttcaatgtcatttcattatcacgtggatgaagaaaaacaatttcttcccggctacggccactctcagtgtggaatttccatgctctcccaacatccacatgggtctcctctggg

SEQ ID NO: 804315 - DNA, 120 bp, Artificial Sequence
  ENSG00000285492_96 (sequence is synthesized)
tcctctggtttcctcccacatcccaaagctgtgccattcggtgaactggcgtgtctatgtggtcccaggttgagtgagcttaggtgtgtgtgtgagtgtgccctgcgatggggtggcagc

SEQ ID NO: 804316 - DNA, 120 bp, Artificial Sequence
  ENSG00000285492_97 (sequence is synthesized)
tgagccgccaggatggtctcttgtcaccccagaccctgaactggaatgagcaggtaaataatgaacctctttgtttttattcatctttcctaaatgtacgtatagctcacacttatttca

SEQ ID NO: 804317 - DNA, 120 bp, Artificial Sequence
  ENSG00000285492_98 (sequence is synthesized)
atgtttaatatttgaagtgttatgggtctttactgaaaagttcagtgatccttttgtgaccagaaatatgccacaggaacttgactcttgtttacatcatcagttagcctatgggaaaat

SEQ ID NO: 804318 - DNA, 120 bp, Artificial Sequence
  ENSG00000285492_99 (sequence is synthesized)
tgttttcattatacgttgatttgcttagagtcacagtttccaagaatctatggatgacattaaatgaggtcttactgtgcttccacagccatccttcagagtgtggccctcagaccagct

SEQ ID NO: 804319 - DNA, 120 bp, Artificial Sequence
  ENSG00000285492_100 (sequence is synthesized)
gcatcagcgtcactgggtactcattacaaatgcacattttcaggcctctccccagacctgccgaatcagacgctccaaggtggaggccacagtctaggtttgaatgaacctccaggtgat

SEQ ID NO: 804320 - DNA, 120 bp, Artificial Sequence
  ENSG00000285492_101 (sequence is synthesized)
tctgatacgcgatcaacttggagcagcactgcactgcacatttgagaaatggttgctgtttgagatttatggaagatctcacaaaggctacaactcagagaaagggcttctgggctcagt

SEQ ID NO: 804321 - DNA, 120 bp, Artificial Sequence
  ENSG00000285492_102 (sequence is synthesized)
ggctcagttttccagttaacatatgcaaacttaggaaagatatggaaatttttttaaatatgtatcatggctgggcgcggtggctcacgcccataatctcagcactttgggaggccgaag

SEQ ID NO: 804322 - DNA, 120 bp, Artificial Sequence
  ENSG00000285492_103 (sequence is synthesized)
ccttctccccttggagacaggacctggtagaaagctcaggtcatgtgtgccagggaacgctttgtcacaccaaggccacctaatggttccttcacaagcgcctcacactttcagatccag

SEQ ID NO: 804323 - DNA, 120 bp, Artificial Sequence
  ENSG00000231383_0 (sequence is synthesized)
atggtataaattgggtttcatggattggtttcaattctgaatgcttttctggagccaaagctcacctcagcactcttgggctgcatgctgtaatcctgggggatgggggattagtcctgt

SEQ ID NO: 804324 - DNA, 120 bp, Artificial Sequence
  ENSG00000231383_1 (sequence is synthesized)
ggctttgctctctggccccttgagattaagcacctgctgtgctggaggtgctgaggtgttcccagttcacttgcaacaacactctggcaggggctgctggcaaaattgctccagtggggc

SEQ ID NO: 804325 - DNA, 120 bp, Artificial Sequence
  ENSG00000231383_2 (sequence is synthesized)
actggacagacttgtaaatggaagctcaaggaattcagtgagttgtctctggaaaagagcagagcagatgaacacaacagatgaagctattaatgcagctttaccttactgacccagagc

SEQ ID NO: 804326 - DNA, 120 bp, Artificial Sequence
  ENSG00000231383_3 (sequence is synthesized)
ccttcgagtctgagtttcctctggaccaagtggttatcttctctatacagactggggattctatctcccaagcatgcaattaactgccccttttgaatattctattccaagactcattgc

SEQ ID NO: 804327 - DNA, 120 bp, Artificial Sequence
  ENSG00000231383_4 (sequence is synthesized)
tgtaaatggaagctcaaggaattcagtgagttgtctctggaaaagagcagagcagcagatgcatctgtgtaagaggtagtaacatccgatgttatattcctccgtgttgggagttcactg

SEQ ID NO: 804328 - DNA, 120 bp, Artificial Sequence
  ENSG00000231383_5 (sequence is synthesized)
gtcactcaaactgcagagaccacaattgcaggcagtgctattcagatggactaaaaatcaaatgaagacccaggagttgtgtgatgcgatggcctcatataaagggaactgatgccttga

SEQ ID NO: 804329 - DNA, 120 bp, Artificial Sequence
  ENSG00000231383_6 (sequence is synthesized)
gcgaacaacagatgtcaccaagtttcaggtctacagaaattgcacagagagtgcagagagtatatactataaataaggcaccagatgtgattactcaggaagagcgaagagacatgtaga

SEQ ID NO: 804330 - DNA, 120 bp, Artificial Sequence
  ENSG00000231383_7 (sequence is synthesized)
gcttaatttctgcccatgaggcagtattacagtgtttcctagaatcaagaaatgctgtatgtgagggaaaaccgggagggacttcccagatgaagtggctcttggactggcctttgaaaa

SEQ ID NO: 804331 - DNA, 120 bp, Artificial Sequence
  ENSG00000277373_0 (sequence is synthesized)
accaccatgcccggccgtcagtagtctcttttaaaaataacttaatcctctaagacacaagtgtagttttattgtaaaagattcaaacaatacaacaaaggaaaaacccctttgagcacc

SEQ ID NO: 804332 - DNA, 120 bp, Artificial Sequence
  ENSG00000277373_1 (sequence is synthesized)
tattggtgttctgtgtaatggttttatgttggttatgtagcatcttgtaacttgcttttgtgcagttaatgattgtcctggcaatcttgccattatcaataaatcatttcttataattgc

SEQ ID NO: 804333 - DNA, 120 bp, Artificial Sequence
  ENSG00000274937_0 (sequence is synthesized)
acagaccaagctccagggtccctcaggtagccaggtgtgcggcacagctttgtccctcccagaactcagtttccccagcagggggcccggggactattccaatccagtactctggcctgc

SEQ ID NO: 804334 - DNA, 120 bp, Artificial Sequence
  ENSG00000274937_1 (sequence is synthesized)
ccctcccctcgctctcactgacctcccagcagccagaccaggtaggtatccaggctccttcctatcctgccccctgccccgctccatcctcatctttcccttaaagaaacctctctccaa

SEQ ID NO: 804335 - DNA, 120 bp, Artificial Sequence
  ENSG00000274937_2 (sequence is synthesized)
ggtccacggttacatcacatacagctttgcacacccagtgcccagcacagaacccccaccctctgtggttgtcctttcgcttctcgcaaggtccatgggagcaggggaccaggctgggac

SEQ ID NO: 804336 - DNA, 120 bp, Artificial Sequence
  ENSG00000274937_3 (sequence is synthesized)
aagaaaaattgcccttgttgccctttcactgtagtaaagtgctgcttccaacaaaccagcacacaaatgccaaccacaggtgcattccgcttgggaggatgggggagaaactagttgttt

SEQ ID NO: 804337 - DNA, 120 bp, Artificial Sequence
  ENSG00000274937_4 (sequence is synthesized)
gactctgtacaagaaccaatcaccaggtttccttaaatggcacactttctttgaaatctgaagcaagaaattacctctccggacacaaccaagttcatctcgtgtcctctcaggacatac

SEQ ID NO: 804338 - DNA, 120 bp, Artificial Sequence
  ENSG00000274937_5 (sequence is synthesized)
agccgggctccactagagggcagcagaaagatggagatgctcgagagaaaaggagacttaagttagttctcaccatccgtggagggtgtgaggaacccaataaaaaccgtactggtatta

SEQ ID NO: 804339 - DNA, 120 bp, Artificial Sequence
  ENSG00000231654_0 (sequence is synthesized)
ggcagccggatcccagctggaactccgccacatcccaggaatgtgaataccagtggaatccggataggacggtgtgacccaggcacagtggctcccaggggacgccaatgctgcgggctg

SEQ ID NO: 804340 - DNA, 120 bp, Artificial Sequence
  ENSG00000231654_1 (sequence is synthesized)
aggcccacgctggaggaacaccggccagtgggcagctttgggtgaacttcagagtgggtggaagcgcagctgccccgcctgcccccacggctgctgcgcgatcaggaaacacagcacact

SEQ ID NO: 804341 - DNA, 120 bp, Artificial Sequence
  ENSG00000231654_2 (sequence is synthesized)
tttggattcccactgccagttcctgtggagtcagagagatcttagctcagaagtgctgacagcaggggctggctggccactggccacatgggaagaggagaaaggcagcaggagccaccg

SEQ ID NO: 804342 - DNA, 120 bp, Artificial Sequence
  ENSG00000231654_3 (sequence is synthesized)
tgaggcaaatgagctacaagacgccgctccgtctgatttcccgccacagctcccaacacaggtgaaatggctcagaacagctcagcatgtcctactgaggggcaggaaggatgctgagaa

SEQ ID NO: 804343 - DNA, 120 bp, Artificial Sequence
  ENSG00000231654_4 (sequence is synthesized)
aatcccaggcagcggtctcagctgggatgtaatttgagggcgaaaaagttgtgttgcttgcggtttcttccttgctccttgcaggttatatttgaaatgaatgtcagagccatgcggccg

SEQ ID NO: 804344 - DNA, 120 bp, Artificial Sequence
  ENSG00000231653_0 (sequence is synthesized)
tcagctcagtgcaacctccgcctgctggattcaagcgattctcgtgccttagcttcctgagtttctgggagtacaaatgcgtgccaccacaccaagctaattctgttcctttctttgact

SEQ ID NO: 804345 - DNA, 120 bp, Artificial Sequence
  ENSG00000231653_1 (sequence is synthesized)
tcgctccctagaagcatgaactgcgatgagcactcccttcctgcctttgcttgtactgtcttctacccctgaaactgcactcctgaccctttggctttaggatacctgtacaactcgttt

SEQ ID NO: 804346 - DNA, 120 bp, Artificial Sequence
  ENSG00000231653_2 (sequence is synthesized)
ctggagttgtctggatttcctgaatttaaatgttgccctatcttgttaggttggggaacttctcctggatgatgtcctgaagtatgttttctccaaaggcatgagctcctcaaagttcag

SEQ ID NO: 804347 - DNA, 120 bp, Artificial Sequence
  ENSG00000231653_3 (sequence is synthesized)
gaagcaagtccaagacttcacccttgatctttttccacagccctatggggtgaatagaagcagacattagatacagctcacacatggagaaactgaagtacactccatcatttctgagca

SEQ ID NO: 804348 - DNA, 120 bp, Artificial Sequence
  ENSG00000179676_0 (sequence is synthesized)
attttgtcacccacgtatgaggcctacattttatgtactcactgcatacagcttaatgaattggattcttatggggttagaaaggataaaaaacatcacccctgttctcaggaagcttaa

SEQ ID NO: 804349 - DNA, 120 bp, Artificial Sequence
  ENSG00000179676_1 (sequence is synthesized)
aactgagttgatactatatgccatatacatgagaaaagagacaagaaaattcagtcagctatttaaatgtagaaattgcctttcttggatcactgcatatgagacactgccaggcagatt

SEQ ID NO: 804350 - DNA, 120 bp, Artificial Sequence
  ENSG00000179676_2 (sequence is synthesized)
aagaaaaaagggaactagcttcaaggtgtgagaacacaagacgaggagagtgtgttttctgtgggtgcttccactaacagcctgcatgcaaaccatggagcttcagggactctggccacc

SEQ ID NO: 804351 - DNA, 120 bp, Artificial Sequence
  ENSG00000179676_3 (sequence is synthesized)
aagaaagccacatggttgtcaaagagaagaggaaaggagatcactaagctggatgacgttttctgtttctttgaaaacagagaagatgacaagttagggagagatcagaggtcatactgt

SEQ ID NO: 804352 - DNA, 120 bp, Artificial Sequence
  ENSG00000179676_4 (sequence is synthesized)
gaagcacctttggataaacggcagggactttggattttctttttgaatataagcataatccattgaaaggtctcatgcagggaagtggcaaaacacttttaaaatttttcatcttttctt

SEQ ID NO: 804353 - DNA, 120 bp, Artificial Sequence
  ENSG00000179676_5 (sequence is synthesized)
tctgaagcagagttcactctccatttatttgtcttctttgatatctctcaatagaatgttgcagttttagtattctcctattaaacatttgtttaactttcttgttcttctaaataataa

SEQ ID NO: 804354 - DNA, 120 bp, Artificial Sequence
  ENSG00000179676_6 (sequence is synthesized)
acttcagttcaacagccatctgaagcccacctgtgagctggtccaggaaatgatggactctgatttccacacccctttcctgtgaacttgtctccaatttagtctgtcaaggtccctttc

SEQ ID NO: 804355 - DNA, 120 bp, Artificial Sequence
  ENSG00000179676_7 (sequence is synthesized)
ttattccaggaccactgaaaccagctgaggcatcctgaaagcctaagattgaccacaccagaggaaccagactgcccttcacaaggaaacctggcgtggaaacacattgcttccctaaca

SEQ ID NO: 804356 - DNA, 120 bp, Artificial Sequence
  ENSG00000179676_8 (sequence is synthesized)
ctttcctgaaggagcttggacgacttgactcaggcaggttgagagaccagaaagccatccagagagagcagggacccagccatccaccacctggttctactcccaccctaaggatggaaa

SEQ ID NO: 804357 - DNA, 120 bp, Artificial Sequence
  ENSG00000179676_9 (sequence is synthesized)
ttatctggttccacccctggatatgatcaaccttcatagactgtgcattatacatgccatctctgcgacctgcaaagatgaaaagggaaagcaggagatggaaactggtcagcagccttc

SEQ ID NO: 804358 - DNA, 120 bp, Artificial Sequence
  ENSG00000179676_10 (sequence is synthesized)
agccacacttacaaaggtcaaatgtgcaaagcgtcagaagacagtggttagagtgagattctacatgctctcaatgaagaataaagcatgcaggaagaacctttcaaaaggttacaacca

SEQ ID NO: 804359 - DNA, 120 bp, Artificial Sequence
  ENSG00000179676_11 (sequence is synthesized)
ctgagtgcttatttgatccatgattgtcaatcatccatccttgcaacatttaacaaaatacagacccactctgttctcagaaagcaccacacagagattctgaagcactaatcaggatgt

SEQ ID NO: 804360 - DNA, 120 bp, Artificial Sequence
  ENSG00000179676_12 (sequence is synthesized)
aaaatcctccactggcacctcatctcctatgcaaccagtgccaacctctgagactgctctgagacttccctctgaggcttctcaggtaatgagcaaagggatgtaaacaacccaaaattg

SEQ ID NO: 804361 - DNA, 120 bp, Artificial Sequence
  ENSG00000179676_13 (sequence is synthesized)
tctgaagtcccagctgttcccctggaaccatgtggaggaatcactaattctctcgactttgcttgtcagcacagctggccacacagccaggccctccatctttcctgactttattctggt

SEQ ID NO: 804362 - DNA, 120 bp, Artificial Sequence
  ENSG00000179676_14 (sequence is synthesized)
tgtgaagtcatgctgggatggtgtcaccctcaaaagactaaggcagaagccacccagagagtcctcagcacttcctgggcatgacacctcagccatttttccagcactgctatgcccaca

SEQ ID NO: 804363 - DNA, 120 bp, Artificial Sequence
  ENSG00000179676_15 (sequence is synthesized)
gcaaacaccccttgtcctctggtaggaaccaagaccttctcttctctgctcttcccagctccagagaggtcaggttgggcccaggagaatcatggagctgtggctaaactcatacactat

SEQ ID NO: 804364 - DNA, 120 bp, Artificial Sequence
  ENSG00000179676_16 (sequence is synthesized)
ggagccaggctacactgcatactaattcagaatctgccactcagtgggaatgtggtctaaagttaactttactaagctctgtattttgtgttttgtttttcttataaagggtgaatacaa

SEQ ID NO: 804365 - DNA, 120 bp, Artificial Sequence
  ENSG00000179676_17 (sequence is synthesized)
atgatcaaccttcatagactgtgcattatacatgttgttgccaccttgctctccactctcctgtcccttatctcagtagccatctctgcgacctgcaaagatgaaaagggaaagcaggag

SEQ ID NO: 804366 - DNA, 120 bp, Artificial Sequence
  ENSG00000179676_18 (sequence is synthesized)
aaggggaagactcctgaacttgcctcacccaaagatatgatgtacgcttcagacaatgctggactgatgtgttcaattaaacaaatgcaccaataaaatgctgcatgtaaaaagagtaaa

SEQ ID NO: 804367 - DNA, 120 bp, Artificial Sequence
  ENSG00000179676_19 (sequence is synthesized)
atacatatgtaaatatttgcctatttgaaaacttcacagtgctttctgtgcctgtaactgtgaccctgtccatgtccacagatcattctacattttttgaggctaaaattaacatcacca

SEQ ID NO: 804368 - DNA, 120 bp, Artificial Sequence
  ENSG00000230381_0 (sequence is synthesized)
ctgatcatcagtgagccaagcctggaagcctgagccatcaccagctgggtggtagccagctgtggctcagggccactctagaaacacttgccttgggctgcagctgccctgggctactac

SEQ ID NO: 804369 - DNA, 120 bp, Artificial Sequence
  ENSG00000230381_1 (sequence is synthesized)
cctgatccctaggaaacggggcatggggcattttcctgaacagagcccttgccaatgcccagcaagaaaccagtgtggcactgggattggaaagcctggagtgtgaatatggactctgat

SEQ ID NO: 804370 - DNA, 120 bp, Artificial Sequence
  ENSG00000230381_2 (sequence is synthesized)
tagtctctacatcaagctgagtccttgaagtggtcggagggacaaaacagaattcctggagacagtgtcctaagggagtgccagaggcactcatttgtttgacaactaattttggaggca

SEQ ID NO: 804371 - DNA, 120 bp, Artificial Sequence
  ENSG00000230381_3 (sequence is synthesized)
ggtgctcttccttgtcttaggatcttccagtcaacaaggctgaaaatctccctgcctcctggagcttgcttctgtggaagaaggcagtcagcaaacacatgaacaaagacaagttcaggg

SEQ ID NO: 804372 - DNA, 120 bp, Artificial Sequence
  ENSG00000230385_0 (sequence is synthesized)
agtttcctgggaccagcagggacccccccttgccttctttctcaaggccacacccttgtgcctagctgcctcatctccctcccagctgccagggagggacggctccatgggcagtgccac

SEQ ID NO: 804373 - DNA, 120 bp, Artificial Sequence
  ENSG00000230385_1 (sequence is synthesized)
gggtgccagctgcccagccaggatgcagaacctcccagtcgaacaggaaaatggggagagttggaaacagccttgttgacatggtctcattctctttctcaattcttctgctctatagtt

SEQ ID NO: 804374 - DNA, 120 bp, Artificial Sequence
  ENSG00000230385_2 (sequence is synthesized)
tttggacttagaaatcagtaattcacctggtctgtgggttcttcagagatccctgaacactgggtggtataagctgtctgggcagtggaaaaaaggtctttggggtataatgagcaaagc

SEQ ID NO: 804375 - DNA, 120 bp, Artificial Sequence
  ENSG00000230385_3 (sequence is synthesized)
tggcactcaatgggcatcaaagggaagcacatcagtgaagatggtgcggatcatcccaccacatcaaaaccctggaacgcgatatccgttaccagaattcagggccagggctttcttccc

SEQ ID NO: 804376 - DNA, 120 bp, Artificial Sequence
  ENSG00000230385_4 (sequence is synthesized)
ctgaacaggatgtccttccgttagccccgggagatcgtggtgtcctgcaggaccagctggaccctggaaggccggtgggccctgatgttcatgcggaattctttgatgacaaagtagtag

SEQ ID NO: 804377 - DNA, 120 bp, Artificial Sequence
  ENSG00000230387_0 (sequence is synthesized)
gcaaataccaaaagctgtcctcattgagtcatccctcccagagcaggaagagcagaggttctgggaaacaaccccaaggagagagacagggcatttataaaacagcatgtaagcatctct

SEQ ID NO: 804378 - DNA, 120 bp, Artificial Sequence
  ENSG00000230387_1 (sequence is synthesized)
gcagttgctgtccccagagcccacttcctggatattgccagctgcctggaccaacctttccgaaagatcagccaggtcacagtgagggtcaaaggtgaggcaacacccggcctgcttcag

SEQ ID NO: 804379 - DNA, 120 bp, Artificial Sequence
  ENSG00000230387_2 (sequence is synthesized)
ccaaccagtcccaatgagatgaaccagaacattggcaagcacgttgatagagtgcccacattgtactgaactctgaggggaatagtctcgtccccatcactcaggtggggaaactgagga

SEQ ID NO: 804380 - DNA, 120 bp, Artificial Sequence
  ENSG00000230387_3 (sequence is synthesized)
cccatcactcaggtggggaaactgaggaggccactggaggctccaagggctctgaaatgttgagaacttccctgcaggtaccagcgaagagggcaagaacacagcactacttccttggat

SEQ ID NO: 804381 - DNA, 120 bp, Artificial Sequence
  ENSG00000230387_4 (sequence is synthesized)
actgtttccctcctcagaggggttttctgagctgccctgggtcctgtgaggaagatctccccttcctgtaaagacaccagtcctactggatcagggcccacccgtgtgacttcactttta

SEQ ID NO: 804382 - DNA, 120 bp, Artificial Sequence
  ENSG00000230387_5 (sequence is synthesized)
cttgagtacctctcacagaccctaactccaaatcaggtcacttgctgaggtactgcatgtgaagactttgacatttgaattttgagggggccaccgtttaacctgaaccaccaaggacag

SEQ ID NO: 804383 - DNA, 120 bp, Artificial Sequence
  ENSG00000230387_6 (sequence is synthesized)
ctcttctttaggggagagagggaaatgggagccaccactggcagagcctgaaggcagggcagccagaaagaagctgtgggagtccccaccatggaagaccctgccgagcatcctgtgtct

SEQ ID NO: 804384 - DNA, 120 bp, Artificial Sequence
  ENSG00000230387_7 (sequence is synthesized)
cctgaagcagaccctgacatgaggactgggggcacgtgtttattaagggcgatccccggaaggaggagataaccaggcagaagtcctagcagagtatgcccacgctggttagtgctgctg

SEQ ID NO: 804385 - DNA, 120 bp, Artificial Sequence
  ENSG00000230387_8 (sequence is synthesized)
caaagatgagccgaagaccatgagagacctccaggtggtccttctggggagaagaaatgggttttggccccaaatccttctgctgcatttttcccctatccctgggaagccatgagacct

SEQ ID NO: 804386 - DNA, 120 bp, Artificial Sequence
  ENSG00000230387_9 (sequence is synthesized)
caaacctgtgttcccaaggaggcgagctgctgttcccaggtgatgatatgatgtgcttggggaaagtaagtggctgccagacatggctgagagctgttgtcactgccgtcaagtgcatgt

SEQ ID NO: 804387 - DNA, 120 bp, Artificial Sequence
  ENSG00000230387_10 (sequence is synthesized)
ctccaagccatatcacacggcgtccctcgatgtgaggccacatggcaagtgggccgtggatctccctctgccctttgcaagcacgtaagacagcagattttgcagataccttgtggcgca

SEQ ID NO: 804388 - DNA, 120 bp, Artificial Sequence
  ENSG00000230387_11 (sequence is synthesized)
ggggaatttcctttggccaggtctgaagaaataaagcagcaggcaccgagaacaaagccaaggctttcaaaagacaaggagccaaaaaacttactcaaaataaaagtagttttaaaatgt

SEQ ID NO: 804389 - DNA, 120 bp, Artificial Sequence
  ENSG00000230387_12 (sequence is synthesized)
cgtgggactcaggaagtgacgttctctccccgcccagcccccttcctcagtctattgctccgaatcctggaccacacactgcgtgctgaggctccatcgctgtgctgggtgaggggtgga

SEQ ID NO: 804390 - DNA, 120 bp, Artificial Sequence
  ENSG00000230387_13 (sequence is synthesized)
ggactgtccagctgacagccacccaggaggcctgcccaggagacccagcccagcctctccttggaacctgaagaactccaggcagctgatgggacactggggcccagcaggaggccactg

SEQ ID NO: 804391 - DNA, 120 bp, Artificial Sequence
  ENSG00000230387_14 (sequence is synthesized)
acacacctccctgcagcctggcactggaaactgctgagccatgcagggcagcctggtggcggctaggacacttctgcagaggacctggagttgggctgctcccggggctcccatctcttg

SEQ ID NO: 804392 - DNA, 120 bp, Artificial Sequence
  ENSG00000230387_15 (sequence is synthesized)
ctgggtctgttttcaggtgcaccctcctcctccaggaggcaggggcaagaccagcttcagcccttcttgctctccatggcagaagtcctagcagagtatgcccacgctggttagtgctgc

SEQ ID NO: 804393 - DNA, 80 bp, Artificial Sequence
  ENSG00000230387_16 (sequence is synthesized)
tcagttggaaatgtggaaattacccatcttctctgtcaatcatgctgggagcggcagactggagctgttcctactcagcg

SEQ ID NO: 804394 - DNA, 120 bp, Artificial Sequence
  ENSG00000230387_17 (sequence is synthesized)
ctaactctgatgcttttctgagttcttacctaaatttccccttctccttctgtggccctgccagttttgttttgttttgttttgttttgtccttatcactacccttgctgcctcctcaaa

SEQ ID NO: 804395 - DNA, 120 bp, Artificial Sequence
  ENSG00000230387_18 (sequence is synthesized)
ttatccagagccactgttgttttctagaacattggcaagcacgttgatagagtgcccacattgtactgaactctgaggggaatagtctcgtccccatcactcaggtggggaaactgagca

SEQ ID NO: 804396 - DNA, 120 bp, Artificial Sequence
  ENSG00000230387_19 (sequence is synthesized)
ccagagcaggaagagcagaggttctgggaaacaaccccaaggagagagacagggcatttgtgagctgtgcagcctccctgctgggacatagggaactctagctggagatgagcagggcct

SEQ ID NO: 804397 - DNA, 120 bp, Artificial Sequence
  ENSG00000230387_20 (sequence is synthesized)
gagtctgagggtggccctgctgaaagcacagtaataggagttataatcagctaagagcaggaaatctactttatttttctaatgttattctttgctttctagataaaacagcatgtaagc

SEQ ID NO: 804398 - DNA, 120 bp, Artificial Sequence
  ENSG00000230387_21 (sequence is synthesized)
atgacacaaacaagagctcaaggatggtggctggggttcagtctgccgctgcaaataccaaaagctgtcctcattgagtcatccctcccagagcaggaagagcagagataaaacagcatg

SEQ ID NO: 804399 - DNA, 120 bp, Artificial Sequence
  ENSG00000230387_22 (sequence is synthesized)
tggtgtgtgcattgtgtgtgtggggggggttgtctgtgtgtctgtgaatatttgtgtgatatgtgtgtagtatgctcatgtgtcatgactctgtgagggtgtgatggaagagtgtgtgta

SEQ ID NO: 804400 - DNA, 120 bp, Artificial Sequence
  ENSG00000230387_23 (sequence is synthesized)
agagagaagtttgagtgtgtgtggtgtgtgcatctggtgtctgtgggtgatgtttgtgtacatagtgtctgtgtgtgtgatgtcggtgtgttgtgtgggtttgtgtgtgtatatagtgtc

SEQ ID NO: 804401 - DNA, 120 bp, Artificial Sequence
  ENSG00000230387_24 (sequence is synthesized)
tgtgtgtgtgatgtcagcgtgttgtgtaaggatttatgtgtgtgtgtggtgtctgtgtttgtgatgttggtgtgttgtgtgtgggtctatgtttgtgtgtgatgttggtgtgtgtgatat

SEQ ID NO: 804402 - DNA, 120 bp, Artificial Sequence
  ENSG00000230387_25 (sequence is synthesized)
cagtgtgttgtgtgtgggtttatgtgtgtgtgtgtgatgtctgtgtctgatggtgtgttttgtgtgggattgtgtgtgtgtgtgtggtgtctgtgtgtgtgatgtcagtgtgttgtgtgt

SEQ ID NO: 804403 - DNA, 120 bp, Artificial Sequence
  ENSG00000230387_26 (sequence is synthesized)
gggtttatgtgtgtgatgtcggtgtgtgtgatgtcagtgtgttgtgtgtgggttgatatgtgtatgtgtgatgttggtgtgttgtgtgtgcatttatgtgtgtgtggtgtctgtgtgtgt

SEQ ID NO: 804404 - DNA, 120 bp, Artificial Sequence
  ENSG00000230387_27 (sequence is synthesized)
gatgtcagtgtgttgtgtgtgggtgtatatttgtgcatcatgtcagtgtgtgtgatgtcagtgtgttgtgtgtgggtttatgtgtgtgtctgattttggtgtgttgtgtatgggtttatg

SEQ ID NO: 804405 - DNA, 120 bp, Artificial Sequence
  ENSG00000230387_28 (sequence is synthesized)
tgtgtgtggtgactgtgtgtgatgttggtgtgttgtgtgggtttatgtgtgtggtgtctgtgtgtatgatgtcagtgtgttgtgtaggtttatgtgtatgtgatgttggtgtgtgtaatg

SEQ ID NO: 804406 - DNA, 120 bp, Artificial Sequence
  ENSG00000230387_29 (sequence is synthesized)
agtgtgcatggtgtctgtgtgatgttggtgtgttgtgtgggtttgtgtgtgtggatgtggtttctgcctatgggaggaggtttgctcacagatggaggagaaggagctctataggcaaag

SEQ ID NO: 804407 - DNA, 120 bp, Artificial Sequence
  ENSG00000230387_30 (sequence is synthesized)
atcccagggccgtggaggaggagacacagtcctgagaactccttcctctgaatcagaaggacaggaaaggtgggattttaaaggaacagagaaccctggtgggagaggtgaatctgagct

SEQ ID NO: 804408 - DNA, 120 bp, Artificial Sequence
  ENSG00000230387_31 (sequence is synthesized)
cctcgggccatcgggtgtcctgtggagcagaggcaggcccgtgagggtgattttcagaatgctgcctgcttctgagagtgagatgaagaccctctggggtcccgttgatgtcaccaatgt

SEQ ID NO: 804409 - DNA, 120 bp, Artificial Sequence
  ENSG00000230387_32 (sequence is synthesized)
cgcctgtcttgaggcatctctggtccagacctggctgggagagagagctatgggtggagatgcactgggtgggtgctggtgggaggggagggctggcttttcctcagcccccagacttag

SEQ ID NO: 804410 - DNA, 120 bp, Artificial Sequence
  ENSG00000230387_33 (sequence is synthesized)
agaagatcacacgcaagagcttggaagtcctgggaggaagtatgatcccgaatcctggcacacttgatcatgcgtgacagggacttaagaaagcccctaattatagccgtgtggggtttg

SEQ ID NO: 804411 - DNA, 120 bp, Artificial Sequence
  ENSG00000230387_34 (sequence is synthesized)
tctcccttctgaagcttggcgcccgtgtgctcaaggcaagggcgtgaccaaggtaagagaccccttctctcccttaggcagaagtcctagcagagtatgcccacgctggttagtgctgct

SEQ ID NO: 804412 - DNA, 120 bp, Artificial Sequence
  ENSG00000230387_35 (sequence is synthesized)
tgttgttaaagaaaaaaagaaagaaaaagaaaccaggattgtacctgaggtcaggcagacagtgctcaactcagcactgggaagattgctagaagccttgggcctatctaggaagactgg

SEQ ID NO: 804413 - DNA, 120 bp, Artificial Sequence
  ENSG00000230387_36 (sequence is synthesized)
gccaacatgcgatcccctctgcaaggtggaggccatgcacctgcctcctgctcctgagctccggtatcctcactgtgacccaggccccactgcagcaaagagacactgggaattagccct

SEQ ID NO: 804414 - DNA, 120 bp, Artificial Sequence
  ENSG00000230387_37 (sequence is synthesized)
tctgtcccctccttgccagaaggtaccagcgaagagggcaagaacacagcactacttccttggatactgtttccctcctcagaggggttttctgagctgccctgggtcctgtgaggaaga

SEQ ID NO: 804415 - DNA, 120 bp, Artificial Sequence
  ENSG00000230387_38 (sequence is synthesized)
ccagggtcacctccttgcctgaggccccaccatcccatcagcctggatgggcctgctcagcagccacactcgcccctaggccgagaaggggtggggctcggttccacagagtctcccagg

SEQ ID NO: 804416 - DNA, 120 bp, Artificial Sequence
  ENSG00000230387_39 (sequence is synthesized)
gcctcaggcaggtactctaggctgattccatctccaggttcgcaagtaaaaaaaaagtcaactgcccaaaagacttctcttagaactcacagcaggttaggctggcaggtggagtctatg

SEQ ID NO: 804417 - DNA, 120 bp, Artificial Sequence
  ENSG00000230387_40 (sequence is synthesized)
ctcgggtggtcccatctgccaggcctgatgttccaggtgaagagattggtgagcaccaggtgaccccacccaggtgcacgtggctctgtcgggtacaggcaagtctctgcccaccaaagg

SEQ ID NO: 804418 - DNA, 120 bp, Artificial Sequence
  ENSG00000230387_41 (sequence is synthesized)
gacaccacaagggcccaggcaaagcagagcctttctcactgggtgtctgctggtgctgatgtcaccaaggaacacaccccgggcagcttaaaccacagacgtttattcttgcatagggct

SEQ ID NO: 804419 - DNA, 120 bp, Artificial Sequence
  ENSG00000230387_42 (sequence is synthesized)
ggaggtcacaagtctgagatcaaggtgctggacagcctggctcttcctgagggtggctggcaggtccagtgcaggcctcccaccttggctggtggacagccatctgctccctggctctcc

SEQ ID NO: 804420 - DNA, 120 bp, Artificial Sequence
  ENSG00000230387_43 (sequence is synthesized)
cagagaaccctggtgggagaggtgaatctgagctcctcgggccatcgggtgtcctgtggagcagaggcaggcccgtgagggtgattttcagaatgctgcctgcttctgagagcagaagtc

SEQ ID NO: 804421 - DNA, 120 bp, Artificial Sequence
  ENSG00000248783_0 (sequence is synthesized)
cggttacaggattcccatttcagaactacgaccatttgaaaaatagaagatttaaagattgacgcaaagtgcatgtaccatgatacaccagacggagtctcactctctcgcccaagctgg

SEQ ID NO: 804422 - DNA, 74 bp, Artificial Sequence
  ENSG00000248787_0 (sequence is synthesized)
ggagagttcaggttggcgggtcctggggcggggccaggacagggcgatcctggaagcggggcttcggaagcgtc

SEQ ID NO: 804423 - DNA, 120 bp, Artificial Sequence
  ENSG00000248787_1 (sequence is synthesized)
agaaaaaaaaagtaacaaacagaaccgcaagagctcctgtgacaatgctgagcctgatcactgcgccttgcagagcagatgccctctgcacctccgctcctgttaagaaaccagagggtt

SEQ ID NO: 804424 - DNA, 81 bp, Artificial Sequence
  ENSG00000248787_2 (sequence is synthesized)
gccctctgcacctccgctcctgttaagaaaccagagggtttttaattgtctgttcccatctagccgctacccagtaaaggc

SEQ ID NO: 804425 - DNA, 120 bp, Artificial Sequence
  ENSG00000248787_3 (sequence is synthesized)
agacaaggtctagctggagtacagtgatgcagtcatagcccactgcagcctcaaaattcctgggctcaagcaatccacccacatcagcttcccaagtagttgggactacaggcccacact

SEQ ID NO: 804426 - DNA, 120 bp, Artificial Sequence
  ENSG00000248787_4 (sequence is synthesized)
attctagcatataagaaatgtgatgctctctgtacattgaagagttggtctaatatttggcctggtggatacagaaattgcctgtctgctccgctctggttgaagaaaccagtccgactg

SEQ ID NO: 804427 - DNA, 120 bp, Artificial Sequence
  ENSG00000248787_5 (sequence is synthesized)
tgaagaaaccagtccgactgtctctgaggctatggagcagtccatcaagaatgaaagccctcggctggcacgttggctcacacctgtaataccagcgctttgggaggctgaggcaggtgg

SEQ ID NO: 804428 - DNA, 120 bp, Artificial Sequence
  ENSG00000248787_6 (sequence is synthesized)
gcaggtggatcacttgaagtcacgaattcgacaccagcatggccaacatggtgaaaccctctctctacagaaaatagaaaaattagctgggcctagtgacgtgtgcctgtaatcccagct

SEQ ID NO: 804429 - DNA, 61 bp, Artificial Sequence
  ENSG00000248787_7 (sequence is synthesized)
agaatcacttgatcctgggaggcagagcttgcagtggggagctgagatcacaccactgcct

SEQ ID NO: 804430 - DNA, 120 bp, Artificial Sequence
  ENSG00000248789_0 (sequence is synthesized)
tgaagggtgaatttgagaccacttacaactccatcatcaattttaaagaacagtgactcttcattggccagtggaagaaattaacccacaatgatgttgatgctatttctaagaggcctg

SEQ ID NO: 804431 - DNA, 120 bp, Artificial Sequence
  ENSG00000248789_1 (sequence is synthesized)
caattgttaaagagctttggtgatgccagacctaagagatgcaaatgaaacagaactttagaagaaacacaggcccagactgaatacgaaatcacggaagctattgacagaaactgtctt

SEQ ID NO: 804432 - DNA, 120 bp, Artificial Sequence
  ENSG00000248789_2 (sequence is synthesized)
ggtgaaggttgtttctttctctatacagagctcaccagagtaccacctgtcattttcaaaagcaaagtcagttttgccaaccagccgtgaatgacaaataaagctttatatgaaacacaa

SEQ ID NO: 804433 - DNA, 120 bp, Artificial Sequence
  ENSG00000248789_3 (sequence is synthesized)
aacagtgactcttcattggccagtggaagaaattaacccacaatgatgttgatgctatttctaagagtctcatatccaatggatcttgagaattttgaagtggcacgccttcaccttgac

SEQ ID NO: 804434 - DNA, 120 bp, Artificial Sequence
  ENSG00000248789_4 (sequence is synthesized)
tgctttatcccagagaatctctgttgttggctgtgatgctgtttgcagaataatccatctcaaagttaaggaaacaaatgtttcattacttttttcagaagtgatcataaattaaccagt

SEQ ID NO: 804435 - DNA, 120 bp, Artificial Sequence
  ENSG00000248789_5 (sequence is synthesized)
tttggatttctgttttagctcagctctctggtatcagaatggaccttttataagtctgtggacattgtcaagctttctactacttttcagtgaattaaatacctgcagacttttctttgc

SEQ ID NO: 804436 - DNA, 120 bp, Artificial Sequence
  ENSG00000268509_0 (sequence is synthesized)
gcccacggccgcggcagtggatggggttgagctcgtcctgggggaaggcgtgagccatgtagttgtcgtagccaaagacgaacatgccccgtgccaggtcgcgcatctgggcacgcagct

SEQ ID NO: 804437 - DNA, 120 bp, Artificial Sequence
  ENSG00000268509_1 (sequence is synthesized)
gcggagggaaggcgccgctgtagcgcttctcgtactcgtccgggccgcggccccggccgcccagcacgtagccccagttggctgggccgcacatccccggcccaggacgccgcggagcct

SEQ ID NO: 804438 - DNA, 120 bp, Artificial Sequence
  ENSG00000268509_2 (sequence is synthesized)
cggcggctgcagccacgacggcccggatacccccccaggccggcccacgggccccgaggtgggcgacgcggggccgtcggggctcctcagacgctggaagccgaagctgagcggaaagcg

SEQ ID NO: 804439 - DNA, 120 bp, Artificial Sequence
  ENSG00000268509_3 (sequence is synthesized)
gctggaagccgaagctgagcggaaagcgctggtagaagcccatgctgggccccagcccgaagacgagccacaatactccatggaggccaagccggaggagcaccagccccaggacgagcg

SEQ ID NO: 804440 - DNA, 120 bp, Artificial Sequence
  ENSG00000268509_4 (sequence is synthesized)
gcgggggcctccccgccgaccaccgcaccccgcgctcgccccgtagcccggctcgcttcccctttaaggaactcccccgtgacgcaccaggaactagcccatcgtccccaacccccaggc

SEQ ID NO: 804441 - DNA, 80 bp, Artificial Sequence
  ENSG00000268509_5 (sequence is synthesized)
ccgggattggcccggcctgggcccggcctcgcggggcgcggcccaggactccctcccacgcagtaggccgccaggacgtc

SEQ ID NO: 804442 - DNA, 120 bp, Artificial Sequence
  ENSG00000268509_6 (sequence is synthesized)
tcacccgggccccgccccaactcccaagccccgcccccctgggcggtccgtagcccgatgggctggcgtggcgagcaggagccgcgccggcccgcgagggaacttccagccaatgggaga

SEQ ID NO: 804443 - DNA, 120 bp, Artificial Sequence
  ENSG00000268509_7 (sequence is synthesized)
cgcgagggaacttccagccaatgggagagcggcacggcagcgcccgccggacgctggacacagacgtgaccccagaccgcctggccttgggtggatcgggtctctgggcagagcgtgtgt

SEQ ID NO: 804444 - DNA, 120 bp, Artificial Sequence
  ENSG00000268509_8 (sequence is synthesized)
ccggcagagctaggaccggaaaaagccactctaggtctaggttaggagtgatgacagttaaaagatatataaggaaaagaaggaaaggatcgtttctgtataaaacgagctatttttgca

SEQ ID NO: 804445 - DNA, 120 bp, Artificial Sequence
  ENSG00000276422_0 (sequence is synthesized)
agtgctgaaagagtgagccaggacagcctttcgacattgaacaaggcaattcccaatctcttgagccctggctgtgttcactgaatggatctagtctctgaaaattcaccgacatttttg

SEQ ID NO: 804446 - DNA, 65 bp, Artificial Sequence
  ENSG00000276422_1 (sequence is synthesized)
atcccagcactttgggaggttgagacgggaagattacgaggtcaagagatcaagactatcctggg

SEQ ID NO: 804447 - DNA, 66 bp, Artificial Sequence
  ENSG00000276422_2 (sequence is synthesized)
caaggtggcgccaccactctccagcctggcaacagagcgtgactccgtctcaaaaaaagaaaaaaa

SEQ ID NO: 804448 - DNA, 120 bp, Artificial Sequence
  ENSG00000276422_3 (sequence is synthesized)
cattggtaccaaaacttatctgtgacaatatcttgaacattaatgcctttaagagaaatgcccttaaaaatacctttagcaagcatttccttagcaaacacgctcctagcaacagagagt

SEQ ID NO: 804449 - DNA, 120 bp, Artificial Sequence
  ENSG00000276422_4 (sequence is synthesized)
aagttttgtaagggcatgtgaatacgaaggcagagactggagtgatgccaagaaatgtgaaagatttccaggagccatcagaagcaaggaaaaacgcatggaaaagattccgagtgctca

SEQ ID NO: 804450 - DNA, 120 bp, Artificial Sequence
  ENSG00000276422_5 (sequence is synthesized)
ccacctgatttggacttctaagctccagaactaagcgaagaggacgtaaatattcccatttagaagcccaaagtcagtgagatgaaacccaacatcaagaaattgaagcaaagttacttg

SEQ ID NO: 804451 - DNA, 120 bp, Artificial Sequence
  ENSG00000276422_6 (sequence is synthesized)
tggataaacaaagcattagatattcccctgaagaaatttggaaagaaattgaaattgcctgtggttgtagccagttcacctgtaaagaatataaaattctccccatgaactggtcatccc

SEQ ID NO: 804452 - DNA, 120 bp, Artificial Sequence
  ENSG00000276422_7 (sequence is synthesized)
aattattccagaacttaaaaaaaaagaagaaacaaaacagagtaagtacattagctttattcaacatagcatcttgtctagtagtaaactactaaaaacagtctcctgagtggaaaaaat

SEQ ID NO: 804453 - DNA, 120 bp, Artificial Sequence
  ENSG00000276422_8 (sequence is synthesized)
ataaatttttgtctatagcatcagcgttgtcctgcgtgttctcattattttctccaaataaattggctcaatatgctgctaagtattaccatttatgtttattttgaagttctatatctt

SEQ ID NO: 804454 - DNA, 120 bp, Artificial Sequence
  ENSG00000276422_9 (sequence is synthesized)
gtctttcctgtttcatctgtaaacaggcaattattgcctcagtgtgtattctgatacattttctctctaaatctattgtccaacatcttgcatataaaatctggcttttctctcatatat

SEQ ID NO: 804455 - DNA, 120 bp, Artificial Sequence
  ENSG00000276422_10 (sequence is synthesized)
caaaatcacaggtcacatagtctcagtgccaagagttataagaacaactactttatttcactcccatctctgtgaatacaaaacttcaatctctaaagtattttgtatctatttataaca

SEQ ID NO: 804456 - DNA, 120 bp, Artificial Sequence
  ENSG00000276422_11 (sequence is synthesized)
ctatgttcctggtttattattatattatttcattattagttcttaaaaacttaacaaggtgctgaataattttgtgaaatattccatggagaactaccattaaaatagtgattactttaa

SEQ ID NO: 804457 - DNA, 120 bp, Artificial Sequence
  ENSG00000253879_0 (sequence is synthesized)
gtaacatgagatgaaaactggagaagcatccctaaaatatatgaaccaatctgcctagaaatagctaggaatctgccaccagaaagatgaataaaataaaagattgaagaagtagcaagt

SEQ ID NO: 804458 - DNA, 120 bp, Artificial Sequence
  ENSG00000253879_1 (sequence is synthesized)
agcagtatggaagacttgtggctaagatatgtgtcttgggaaaaagaagggctgaatgttaacacaactaagggtctcactgattccccaatgaagcaacttcacgggggaacccctcta

SEQ ID NO: 804459 - DNA, 120 bp, Artificial Sequence
  ENSG00000253879_2 (sequence is synthesized)
agagattttctctctgcattcacagaagacacttcgcactgttatgcaccaggaggattgactgtctctgtggcttggaggcagttatacgtagcagcagcagcagcagcagcagcaaaa

SEQ ID NO: 804460 - DNA, 120 bp, Artificial Sequence
  ENSG00000253879_3 (sequence is synthesized)
tactgcctagggacttcctaagtagaggtcaaggtcccactgttatacaggaaccccgcctttttgtgtaacagttggccataaagaaattaagaccttcattccagagagtcctattgc

SEQ ID NO: 804461 - DNA, 120 bp, Artificial Sequence
  ENSG00000253879_4 (sequence is synthesized)
atgcctgagagggaggaaggctgcacagagacgccaagaagctggacagtccttgctgggtttccccactcagtctttaagcattcgatcataccccttctgtccagttgtattttacat

SEQ ID NO: 804462 - DNA, 120 bp, Artificial Sequence
  ENSG00000253879_5 (sequence is synthesized)
ggctgtccatacatcattgaatgtcagtgtaaaaatggattgttttccctgtatctttgggtctttattctgaagtctcttttaaaactatgatcaaataaatttgtatgccttttctcc

SEQ ID NO: 804463 - DNA, 120 bp, Artificial Sequence
  ENSG00000253879_6 (sequence is synthesized)
ctgttatacagtgtataaattcacagaagtcagaagctgaatgcagtcacaaagagagcaaagcactttgtaaagtgaactcaatacccccgttggggctcagaaaacagtaccccaaag

SEQ ID NO: 804464 - DNA, 120 bp, Artificial Sequence
  ENSG00000253879_7 (sequence is synthesized)
tgaagtcctcagaagcagccccaaaagtaaagtctctgaccttctcctaccctcccatcctctctcccttccttctccactgaggcaagatagaaactaaaattcctcttccccaaggaa

SEQ ID NO: 804465 - DNA, 120 bp, Artificial Sequence
  ENSG00000253879_8 (sequence is synthesized)
gtaacatgagatgaaaactggagaagcatccctaaaatatatgaaccaatctgcctagaaatagctaggaatctgtgtttagtgtaatactgtaaaccttgaatcgtactatgcgaccta

SEQ ID NO: 804466 - DNA, 120 bp, Artificial Sequence
  ENSG00000253879_9 (sequence is synthesized)
catgaagtgtcaccagtgatgctggaagtgctcccaaaaatcggagaaaagtcagaaaagaaaaagttgaattgcttgatgtgtattgtaggtttagatctgcaattgcagttgcttgcc

SEQ ID NO: 804467 - DNA, 120 bp, Artificial Sequence
  ENSG00000253879_10 (sequence is synthesized)
tagctatgccagtaggtgcaaaatgcttgtactttttgtgaaatatctttttatcttgtattgaaaatgcagtttttatgtgagtgcagaattgctgtaagaaaagcatctctagactaa

SEQ ID NO: 804468 - DNA, 120 bp, Artificial Sequence
  ENSG00000253879_11 (sequence is synthesized)
tatgatttgagaaaaagtgaagtcattatatgacaacttaaagcaaaaggaaggtgaagaatctaaagctggataatctaatgccagcaaaggatggtttgatcatttggcttaaaacat

SEQ ID NO: 804469 - DNA, 120 bp, Artificial Sequence
  ENSG00000253879_12 (sequence is synthesized)
gtagcatgagtgcgagcttgaaatttgtaacatgagatgaaaactggagaagcatccctaaaatatatgaaccaatctgcctagaaatagctaggaatctgaagacacttcgcactgtta

SEQ ID NO: 804470 - DNA, 120 bp, Artificial Sequence
  ENSG00000253879_13 (sequence is synthesized)
tctttagtacccacaggctaatgaagtctggggtcatttgggttatattaacatgaaacaaagtggaattttaggccaaacgcatttaccagaataaagagagcaattttcctgattaaa

SEQ ID NO: 804471 - DNA, 120 bp, Artificial Sequence
  ENSG00000253878_0 (sequence is synthesized)
ataggcgaggcacaagggactgcgagaccaggcctgaaggcagagaggtcagcaggctcgggggcctctgctccagcggacaacaagcgcaccgggcgggaacggccgcctccccaggcg

SEQ ID NO: 804472 - DNA, 120 bp, Artificial Sequence
  ENSG00000253878_1 (sequence is synthesized)
ctgcagcctagctctcatgtgacccacggaacttagcccctctgttctgtttgcatacctgcaaattgtgggcattcacgccgggactgccaactcaccaggttatttatagtgacaaga

SEQ ID NO: 804473 - DNA, 120 bp, Artificial Sequence
  ENSG00000253878_2 (sequence is synthesized)
attcagaaccaagaatgtggcagaaagaatgttctaggacttccaagcctcgtcattaagcaaaagcattaagcaaaccccacagcttctgctttgtactctggaaaatgccagccaccc

SEQ ID NO: 804474 - DNA, 120 bp, Artificial Sequence
  ENSG00000253878_3 (sequence is synthesized)
atgaggagagaccaccctgctagccacagggagaggctatgtgaaaagaaagagatgcctggccagctctagctcttcagctcatcccagctgagctaccagacacatgagtggaaaagc

SEQ ID NO: 804475 - DNA, 120 bp, Artificial Sequence
  ENSG00000253878_4 (sequence is synthesized)
ccttaggaagttccagctccagcagacaccatactgaacagaggagagataagccatccccacggagcactgccaaaatgacggcattgtgaacaaataaatgatcattgttttaaggca

SEQ ID NO: 804476 - DNA, 120 bp, Artificial Sequence
  ENSG00000253871_0 (sequence is synthesized)
aacaaccttcagtcacaactgagaaggtcacatggtgcatcactgccgctcagtctccccaagcccagtgatttcttcacaattagggatctgagacccgcagtatggcagtgacaagat

SEQ ID NO: 804477 - DNA, 120 bp, Artificial Sequence
  ENSG00000253871_1 (sequence is synthesized)
ccaagtcttgggacacctagccaggagggaagaatttgagggagaggtggaaaatatgcgaggctgaactgaccttcaaggacaagaaggctgtgttcagatagacagagtttgtcttct

SEQ ID NO: 804478 - DNA, 120 bp, Artificial Sequence
  ENSG00000253871_2 (sequence is synthesized)
gggagaggagtgggcttatccaggatgatcccaaaggcagattgaggaccagtgggaggacatcctgagaaagcagatccagctttaggcaaggaaggacttcgtaacaggcagagagcc

SEQ ID NO: 804479 - DNA, 120 bp, Artificial Sequence
  ENSG00000253871_3 (sequence is synthesized)
catgttggaaacaagcagctctgcaaggtgtgggcccactgtctgactccctgcggggctgctgccttggaagagcctcctgcttagagaggttctcctgccgccagctgtctctcctga

SEQ ID NO: 804480 - DNA, 120 bp, Artificial Sequence
  ENSG00000253871_4 (sequence is synthesized)
gtcctgagcaccacatctctggaccgtctggagcctcccctcccttggcttactgctcccaccaccctctctctccaccttgcaagagacactctccctcatcctgggtcatcaccctct

SEQ ID NO: 804481 - DNA, 120 bp, Artificial Sequence
  ENSG00000253871_5 (sequence is synthesized)
ttagaggcgccgcctggccacgaggcatcagatggagtgcagccgggagcaagattctcatagcaattacaaagattcacaagaaaatgtgccctccactacacagctgtaatttacatg

SEQ ID NO: 804482 - DNA, 120 bp, Artificial Sequence
  ENSG00000253871_6 (sequence is synthesized)
atatggaatgactgtggtttcccctgaaagaagcatcactgatctctgcacaggagaaacaagggtgtgttaggagttacatccactaacctctggggctagaatgttcctcctaatccc

SEQ ID NO: 804483 - DNA, 120 bp, Artificial Sequence
  ENSG00000253871_7 (sequence is synthesized)
ctggggctagaatgttcctcctaatcccggattaccagcttacaaccccaatgcccactttctcaaacaagcctcgtctttttaaagacaggatcttgctctgtcacctaggctggagtg

SEQ ID NO: 804484 - DNA, 120 bp, Artificial Sequence
  ENSG00000253871_8 (sequence is synthesized)
ctcagcctcctgagtagctaggaccacagcacaggcccagacacaaagcagatgtgcagtggagtgtgaaagaggcagccaactcactggggagcttcagagggagatggcccaaattgc

SEQ ID NO: 804485 - DNA, 120 bp, Artificial Sequence
  ENSG00000253871_9 (sequence is synthesized)
ggggagcttcagagggagatggcccaaattgctggggcctaagaatctcccggaatgaaggaacagtagaaagaactggaagccaaatatggtgatagagactctcatcaaggacactga

SEQ ID NO: 804486 - DNA, 120 bp, Artificial Sequence
  ENSG00000253871_10 (sequence is synthesized)
gtaaaccagaaacctgcttgggctcacgttccttgtctcttcttctcagatccaggaaaggagctgtccaggacaatgaggataggctgaggaaagacaggccacggccttgcctctgtg

SEQ ID NO: 804487 - DNA, 120 bp, Artificial Sequence
  ENSG00000253871_11 (sequence is synthesized)
ccagctctcatgggccaggcagagtatcccaggacaactgcctccacaaccagctccatccttcatcagcaattcagtacctgattaacaaatctgtaccccaggaggttatgccaagtc

SEQ ID NO: 804488 - DNA, 120 bp, Artificial Sequence
  ENSG00000253871_12 (sequence is synthesized)
caacttcttccagagaccacaacaataaatccaagccactgctaatgtcatttataagctgtgggattaaaacagagaagcaatcaattaattaaaattagctctttattgaaactataa

SEQ ID NO: 804489 - DNA, 120 bp, Artificial Sequence
  ENSG00000253871_13 (sequence is synthesized)
tacagtgccatcgccatgactgaggtgggggttggcaagcttctgcacaaataatgtatgttttctgaaccatctgagggcgagttatcaacacttactctccaatgcgtcatcaccccc

SEQ ID NO: 804490 - DNA, 120 bp, Artificial Sequence
  ENSG00000253871_14 (sequence is synthesized)
tctgaaataagattaattcaaaatggtcttagcctaaaaaaaattatctttattcactaggaagaaaacacctcttattacctatgttacatttgtcaagttacattagcaatctgagtc

SEQ ID NO: 804491 - DNA, 120 bp, Artificial Sequence
  ENSG00000253871_15 (sequence is synthesized)
ttagtctccatatttgtaaaatggaaaaaaataatgtatcccccacctggctattgtgaagataaagtaagaggacacataccaagtgcctaatacagggcctggaatatggaagtaccc

SEQ ID NO: 804492 - DNA, 120 bp, Artificial Sequence
  ENSG00000253871_16 (sequence is synthesized)
agcaaatattccatctctccattgggcaaggcagtactggacagtaccaaaaggagtattaaaggtgggaggaagaaaataagatcttgaagcagtcatacacaacagaattccaaagtt

SEQ ID NO: 804493 - DNA, 120 bp, Artificial Sequence
  ENSG00000253871_17 (sequence is synthesized)
ataaccaaaaggggttaggtatgttttacagaaaatgtttaagaaggataagtgaaaagtattatgtagatatatttgtgtatgatacgcttctgtaatagatacaatctgaatatgaaa

SEQ ID NO: 804494 - DNA, 120 bp, Artificial Sequence
  ENSG00000253871_18 (sequence is synthesized)
gagagcgcgtgcgctgggcgggaggcagagccaaaaccgtaacagccagagctagagactccggcctggggttctggctctgtcccgtatcagctaggaaacccagggcaagctacttaa

SEQ ID NO: 804495 - DNA, 120 bp, Artificial Sequence
  ENSG00000253871_19 (sequence is synthesized)
actctcagaggctcagctttttcatgagcaaacaggaaaacagggctaatgattagtccttggcttaaaatacataccgcgtgtgaaattgcaggtatataatagattcactaaatgaga

SEQ ID NO: 804496 - DNA, 120 bp, Artificial Sequence
  ENSG00000253871_20 (sequence is synthesized)
ggctagagatcttgaatgtgggtttctgaacacagcatggggctgtgactgggcgtccctaagaagagtggtcagcatgccgtgccccatcaccagggggttagatgttgtgggtccagc

SEQ ID NO: 804497 - DNA, 120 bp, Artificial Sequence
  ENSG00000253871_21 (sequence is synthesized)
tgaggcagagaggagctgggaatataagacaggccagctcctggcctggcagctgaggcctgcaggctgcctggccatgagtttgggggaccatgtcaggccggtaggccacctttcctt

SEQ ID NO: 804498 - DNA, 120 bp, Artificial Sequence
  ENSG00000253871_22 (sequence is synthesized)
acagagacaccctgtgacagtggccactgcaacagaccctcagatgaggtgctgtgactaggacttgaccttttggacttggaaagcatccattgggctggggggctcttggagttattt

SEQ ID NO: 804499 - DNA, 120 bp, Artificial Sequence
  ENSG00000253871_23 (sequence is synthesized)
agaaggaggaccccgagattcccttgaaagagatgatgtaatcccaaatgctagagaatgtgacctcattttatgctccaagtagctgacattggaattgggttataaatgcatttttgc

SEQ ID NO: 804500 - DNA, 120 bp, Artificial Sequence
  ENSG00000253870_0 (sequence is synthesized)
atggacatgagggtccctgctcagctcctggggctcctgctgctctggctgacatgcagatgacccagtctccatcctcgctgtcttcctgtctaggtgagagtcaccatcacatgccag

SEQ ID NO: 804501 - DNA, 120 bp, Artificial Sequence
  ENSG00000253870_1 (sequence is synthesized)
tgatctacgatgcatccaatttgcaaacctgggtcccattgcagttatgtggcattggatccaggacagatttgattctcaccattagcatcctccagtctgaagttgctgcaacttctt

SEQ ID NO: 804502 - DNA, 120 bp, Artificial Sequence
  ENSG00000253872_0 (sequence is synthesized)
gtacatcagttaaggtctggttctagaacatccagactcacttgtgtattccaacttccactctgaatctgcaggggagatgtgacgtgaaatgaaatgatttgtgcttgcaggcaaaca

SEQ ID NO: 804503 - DNA, 120 bp, Artificial Sequence
  ENSG00000253872_1 (sequence is synthesized)
gcagtctcctcagttatcagaaaagcagtgaagtcccacactgaggggatccctgtacacaaaagcagatagtaagtctctgcaggagaccccatggcaggtacctcagaagttgctgga

SEQ ID NO: 804504 - DNA, 120 bp, Artificial Sequence
  ENSG00000253872_2 (sequence is synthesized)
agacccctctgtgaagggattatgccaggaaaagatccagaagcctgcaatccttacatttttggtaaaagcagcaaatgtctatacattattgttgaatcttcctgctctttatcaagt

SEQ ID NO: 804505 - DNA, 120 bp, Artificial Sequence
  ENSG00000253872_3 (sequence is synthesized)
cctccagctacaaattttcagcaatagcatcaaaaattaaaagcttactgtgaaacctatgaaaacacagttcagctggaaccacaatgaaccttttctgcttcccttggattcatctga

SEQ ID NO: 804506 - DNA, 120 bp, Artificial Sequence
  ENSG00000253872_4 (sequence is synthesized)
atttggtgagcttaagcactgttgaacaattttccaagggaagttgaacgagattcttccagtcattgcacaaaatgtggtaagaatctgagagttacttaaactaagaatagataatag

SEQ ID NO: 804507 - DNA, 120 bp, Artificial Sequence
  ENSG00000253872_5 (sequence is synthesized)
gaaaataatatatcacaatagatgagatgcaggttagagcaaaggtatcacatgtattttctattaagttactgaaataccaaattataaaattaaaagaggccccaaatacttctcttc

SEQ ID NO: 804508 - DNA, 120 bp, Artificial Sequence
  ENSG00000253872_6 (sequence is synthesized)
tgacatgttaaacctgcaagttagagtgtaatttgctgataggtaacgagattcttaaaaacctcaatattctcaaccagtaacttcattgctatttattcattctgaagaaaaatataa

SEQ ID NO: 804509 - DNA, 120 bp, Artificial Sequence
  ENSG00000253872_7 (sequence is synthesized)
aattcagaaaatggtctttgcacagagatgcttaccatagtgttagttgtaacagaaagaaaaacaatttaaatttccccaaataggaaacaattgagatgatgctaaatctcacataaa

SEQ ID NO: 804510 - DNA, 120 bp, Artificial Sequence
  ENSG00000253872_8 (sequence is synthesized)
tatattaagtatatacacaaaatcatgtataaattgtcatttcaactatgtaaaataatcattgaaaaaagcctaagaagaaatatatagttgtaccatataaagttgccgatttttacc

SEQ ID NO: 804511 - DNA, 120 bp, Artificial Sequence
  ENSG00000253872_9 (sequence is synthesized)
tatagaagaactatttcacatggttcaatctgatactaacacatgaatatctttggaaagtgataaaatttccggtaatattccatgaatttttgtaatttcccacttttgcagaaacat

SEQ ID NO: 804512 - DNA, 120 bp, Artificial Sequence
  ENSG00000253872_10 (sequence is synthesized)
tataaaaagaatttttaataaatagtctaaagaaacatttataatttaggcaaatgttttaaaattagattttcatttttggcaatattacaaatttgataccccaaaaagctttgcact

SEQ ID NO: 804513 - DNA, 120 bp, Artificial Sequence
  ENSG00000253872_11 (sequence is synthesized)
caaaaagctttgcactaaaatacaatccaagatactttataaagtgtttggaagaactttttaatgcacggctgagctggcaacagagtaaggaaatctccagcagccaaacatgaagca

SEQ ID NO: 804514 - DNA, 120 bp, Artificial Sequence
  ENSG00000253872_12 (sequence is synthesized)
aaagcataaatcctgtgagagaagcctatgactgctctcagggcatctacggatttctggagatccagagattaggttttaatggcctcatagcaggcacagaacaaattttagtgtcca

SEQ ID NO: 804515 - DNA, 120 bp, Artificial Sequence
  ENSG00000253872_13 (sequence is synthesized)
tatagtgaaggagtcagattaaagacctccatgtgaagccaagaccctacctatccaaaagagccacaacttcagtgaacagcaaactagagggaaatcttactttacaaggggaactta

SEQ ID NO: 804516 - DNA, 120 bp, Artificial Sequence
  ENSG00000253872_14 (sequence is synthesized)
agagggaaatcttactttacaaggggaacttacctattttaacttcagctccaggtggagagaaaaacaaagttgtagaaacaaaatagttttaggctgggcgtggtggctcatgcttgt

SEQ ID NO: 804517 - DNA, 120 bp, Artificial Sequence
  ENSG00000253875_0 (sequence is synthesized)
aatctatcaacagaacacaacccatagccctacagtcatccatgaaaccgcccaggaagtcttcacatttgcaggcttgccttggccaaaatttcaggcagacccccaggaattttggga

SEQ ID NO: 804518 - DNA, 120 bp, Artificial Sequence
  ENSG00000253875_1 (sequence is synthesized)
gagcagagggtcaagctgtaaactccaagtactagtgttcaaatattgtggcctttcagctctgggttcttcaatcctcctcctggaattcttgggcgaccttccctttactaggatttg

SEQ ID NO: 804519 - DNA, 120 bp, Artificial Sequence
  ENSG00000253875_2 (sequence is synthesized)
ctcctctcctcctgctgtgactgtgtgaagggcaggcatcatcacatggggagccaagtacctccgtctccccacttgcctaaaacaagcaggcacatcccatcagtgagactggaactt

SEQ ID NO: 804520 - DNA, 120 bp, Artificial Sequence
  ENSG00000253875_3 (sequence is synthesized)
gcaggagaaaataagaagtgaaatctctctcacacacacagttctactcaaactataagcttttattattgtattttacagatcattcattcaggacatgctgcatctggggttggcatc

SEQ ID NO: 804521 - DNA, 120 bp, Artificial Sequence
  ENSG00000253875_4 (sequence is synthesized)
atttcccttttgaatgacagaatgtgcataaaagtctcttgcccacgctgaactcacacgtgcccggcaggaaggagctctcacgaagtgccagctggatgtgagcttgctctggcagca

SEQ ID NO: 804522 - DNA, 120 bp, Artificial Sequence
  ENSG00000253875_5 (sequence is synthesized)
gcagtgctgtccttgtttctgagctgccacctattcactggagttagaaaccttgtgggaaaatggtgcctatttttgacaactggatgtcttcgtggccgaggtccctatgaccttcct

SEQ ID NO: 804523 - DNA, 88 bp, Artificial Sequence
  ENSG00000253875_6 (sequence is synthesized)
aatgtgatcatggctcactgaagcctcagcctccgcctcctgggctcaagtgagcctcctacctcagcctcccgagtaactgggacca

SEQ ID NO: 804524 - DNA, 120 bp, Artificial Sequence
  ENSG00000253875_7 (sequence is synthesized)
cagcctcccgagtaactgggaccacagcatgttcttttaaacttcctaaagaagcccatgataactgggaacacgggcccttcactgaggcaggagaatcacatgagccacacatgatat

SEQ ID NO: 804525 - DNA, 120 bp, Artificial Sequence
  ENSG00000253875_8 (sequence is synthesized)
gagccacacatgatatccactggaggagacagaaagtctgggagtgtcaactgaattgaaagaaaaggaaagcagagatgacagacagcacaccggaagtgacaggataagcagtgcatc

SEQ ID NO: 804526 - DNA, 120 bp, Artificial Sequence
  ENSG00000253875_9 (sequence is synthesized)
tagctgggaaatatgtacactgcctccttctatatctcaaaaatcatctagaatgttagagtgattttctgggtcagagggaagacacgtcttcatttgttaacttttagatttgcgtac

SEQ ID NO: 804527 - DNA, 120 bp, Artificial Sequence
  ENSG00000253875_10 (sequence is synthesized)
caacttattactgtaagcaatttaattgcaaaggataaagaacaagatatgatgcatcatcaggagaaaagtcaagaatccatgtttaaattcagttaccttatgtaatcgaaggtatac

SEQ ID NO: 804528 - DNA, 120 bp, Artificial Sequence
  ENSG00000253875_11 (sequence is synthesized)
atgagccgaagagagtttgtccacatgaaacctacaaagaatgaaaaccacttttagcaagaggtacaagacaatcatctcctcaggccacatgccatttaaagcattctgttctaaaaa

SEQ ID NO: 804529 - DNA, 120 bp, Artificial Sequence
  ENSG00000253875_12 (sequence is synthesized)
gtcttcactccatgcctgccacatgtgaagcatcatgaggagtataaagcacagtcaccacctccaaagggctccccatcaccatgaagaggtacgagaaacactgaattatggagctgt

SEQ ID NO: 804530 - DNA, 120 bp, Artificial Sequence
  ENSG00000253875_13 (sequence is synthesized)
gatgagtagagatactaaatattaactgtactgggaagggtgatttttcaagatataaaaagaactatcagtgatcaaaggcttcatgataaaaaggaggcagtgagatttggttggccc

SEQ ID NO: 804531 - DNA, 120 bp, Artificial Sequence
  ENSG00000253875_14 (sequence is synthesized)
ctgactgaagcataggacttagagcaaaaccaaggaaaggaatttcaggtgaaaagagtgggggatgaaagaagtcagcaagtctccaatgctgccagcctgggagattagcagaaccac

SEQ ID NO: 804532 - DNA, 120 bp, Artificial Sequence
  ENSG00000253875_15 (sequence is synthesized)
agtttggcggaaacagatgacagtttcgtttgtgacatcccaaatttcaagttatagcaaaacaatccaaagagaatgtcgaatagagagctggaagagttaggtggggcctaaagacgc

SEQ ID NO: 804533 - DNA, 120 bp, Artificial Sequence
  ENSG00000253875_16 (sequence is synthesized)
taagcagaacacgtcattaaatgggtcacaattcaataatgtaacccaataattcacaagcacaacagttcatccggccctatattctgacagtgataccaatatatgtctcttgggtga

SEQ ID NO: 804534 - DNA, 120 bp, Artificial Sequence
  ENSG00000253875_17 (sequence is synthesized)
gcactgccctttactgacattgtcctaaaaacattcagaatgtcccccaccccttaaatttacctttcatgatggatctatcatctatcaatttaattaaaccttttaaaatctatgcaa

SEQ ID NO: 804535 - DNA, 120 bp, Artificial Sequence
  ENSG00000253875_18 (sequence is synthesized)
cattcaggatatgagattttcatgttttcaattcacccaatgaacttgactttctctttccaatacccagaaatgccccctccgcatcccagcatcacacaacaaacaaggtaacactat

SEQ ID NO: 804536 - DNA, 120 bp, Artificial Sequence
  ENSG00000253875_19 (sequence is synthesized)
cgccacttcgtgattctgttaactttagttgatatgatttggatttgcgtccccaccaagtctcatgtcgaattgtaatccccagcgttagaagtggggcctggtgggaggtgactggat

SEQ ID NO: 804537 - DNA, 120 bp, Artificial Sequence
  ENSG00000253875_20 (sequence is synthesized)
catgggggtggattcttcatgaatgggttagcaccatccctttggtgctattcttatgatagagttctcatgagatctgtttaaaagtgcacagccccggcaccctgctcctgccatgta

SEQ ID NO: 804538 - DNA, 120 bp, Artificial Sequence
  ENSG00000253875_21 (sequence is synthesized)
agccgcctcgcttcccctttgccttctgccatgattaaaagttctatgaatgaggcctcccagaaacagacactgccatgcttcctgtatagcctgccaaaccatgagccaattaaacct

SEQ ID NO: 804539 - DNA, 120 bp, Artificial Sequence
  ENSG00000253875_22 (sequence is synthesized)
tacaaattacccagtctcaggtatttctctatagcaatgcaagatggactaatacattagtcatactgcttccttggtccttacctttccagactgaagaatgttcagaaaatcctaaag

SEQ ID NO: 804540 - DNA, 120 bp, Artificial Sequence
  ENSG00000253875_23 (sequence is synthesized)
tcctaaagaggcatcattacatcccattatgtttctctagccattttcttaagcactaataaatgttttagaggtgaaaatggtcaccttcacacctagtacaagatgtagactgtatga

SEQ ID NO: 804541 - DNA, 120 bp, Artificial Sequence
  ENSG00000253875_24 (sequence is synthesized)
ttctatataaaagtgccctctttaaagaggttagtcatcttgctattcactatgcatacagaaaaatattaggcacttttggcacacagtttatgatgactcgaggttttactcttaatc

SEQ ID NO: 804542 - DNA, 120 bp, Artificial Sequence
  ENSG00000253875_25 (sequence is synthesized)
attagtgatagccagaaatggacataacatcttatttgacttacatttctccaagtggttcacttactcatttgcattcccatgtgagagattcatactaattatcaccttcagctggac

SEQ ID NO: 804543 - DNA, 120 bp, Artificial Sequence
  ENSG00000253874_0 (sequence is synthesized)
tcaccctttgtcctgattcctcacccacgatcatctttgcttgcaggttccctctctcagcctttgcttattcagctgccctccctctctgcacatctgagaaatgctataagacttccc

SEQ ID NO: 804544 - DNA, 120 bp, Artificial Sequence
  ENSG00000253874_1 (sequence is synthesized)
actcaagtaagcaccaggactctggggtccccagtcacttctgtgaatccaaagatccctcgggcaatgtgcagggattctgcacatttctgagcagcctgagatcaagtccgactatta

SEQ ID NO: 804545 - DNA, 120 bp, Artificial Sequence
  ENSG00000253874_2 (sequence is synthesized)
ctattttacatatcacagcaacagtggcactttcactgtgctccagacttacggggaagtgagattagaacctcccctgcattctctctgccttgtgcaggcaacaatacactgtctggg

SEQ ID NO: 804546 - DNA, 120 bp, Artificial Sequence
  ENSG00000253877_0 (sequence is synthesized)
cttcacatcaataatggcatccagcatgaaagctgtaatataatagtttgattgttccctttccagtcttccttacagtcccctctaaagcaattattctgttcaaaagaggatttgttt

SEQ ID NO: 804547 - DNA, 120 bp, Artificial Sequence
  ENSG00000253877_1 (sequence is synthesized)
gtgatattcctttaagaatctttatttattcccccaacagtttctttttctgcatccgctgctctgttaagtgatcaccacattcattgttctcgtttctattatttctgaaaaaaatct

SEQ ID NO: 804548 - DNA, 120 bp, Artificial Sequence
  ENSG00000253877_2 (sequence is synthesized)
tcaggattctgcttgtgggagtggatgacatttttacagtgtttacagctttatctattccagaatgtcatatagctggtataagaacctgaagattggatcttctgagaacatcagaga

SEQ ID NO: 804549 - DNA, 120 bp, Artificial Sequence
  ENSG00000253877_3 (sequence is synthesized)
aagactgtccttgccatccatactacagcaaaactttgggaccttgaactttgggttcacaatctcacaaccaagaaggatccctctacaattttggaacagtacacccattggaaacct

SEQ ID NO: 804550 - DNA, 120 bp, Artificial Sequence
  ENSG00000253877_4 (sequence is synthesized)
taagcatttcctgaacagggaaaagttgaaagcattcccactgagaaatggaacaagacaaggaggcccactcttaccacttctgttcgacataatactagaagtcctagacagagctat

SEQ ID NO: 804551 - DNA, 120 bp, Artificial Sequence
  ENSG00000253877_5 (sequence is synthesized)
cagaaaagagaaagaaataaatggcattcaaatcggtaaagaggaagtcaaactgttgctatttgctggtgatatgatcatatatcagaaaactctaaagactcctctaaaaagttcctc

SEQ ID NO: 804552 - DNA, 120 bp, Artificial Sequence
  ENSG00000253877_6 (sequence is synthesized)
ctctaaaaagttcctcaactggtaaaggaattcaggagagtttcaggatacaaaattaatgtacacaaatccattgctctgctatacaccaatagcaaccaagctgagaatcaaatcaag

SEQ ID NO: 804553 - DNA, 120 bp, Artificial Sequence
  ENSG00000253877_7 (sequence is synthesized)
caatagctgcaaaaagtaaaataaaatacttaggaatacatctaactaaggacatgaagggcctgtacaaggaaaattaaaaaacaccactaaaagaaataataaatgatacaaacaaat

SEQ ID NO: 804554 - DNA, 120 bp, Artificial Sequence
  ENSG00000253877_8 (sequence is synthesized)
atcatttttcacacttcttgattcatggaaggaggtcaaaacaagagcttggaagtagttgatttcaaccctcatggatgactttgagggtttcaaaacttcagtcacggaagtaactga

SEQ ID NO: 804555 - DNA, 120 bp, Artificial Sequence
  ENSG00000253877_9 (sequence is synthesized)
gaattagaagtggagcctgaagatgtgaatgaattagtgcaatctcatgacaaaacttgaatggatgaggaattgtttcttatggatgaggaaagaaactggtttcttgagatggaatca

SEQ ID NO: 804556 - DNA, 120 bp, Artificial Sequence
  ENSG00000253877_10 (sequence is synthesized)
aagaaactggtttcttgagatggaatcaactcccgatgaagacacggcaaacgttgttgaaatggcaagaaaagacttggaatattacataaacttagttgaaaaagcattagcagggtt

SEQ ID NO: 804557 - DNA, 120 bp, Artificial Sequence
  ENSG00000253877_11 (sequence is synthesized)
tgagagaattggctcaaattttgaaagaatttctactataaataaaatgctatcaaacagcatcacatgttacagataaatctttcattgaaggaaaagaaaataaatgccacaaatttc

SEQ ID NO: 804558 - DNA, 120 bp, Artificial Sequence
  ENSG00000253877_12 (sequence is synthesized)
atctttgtcttatatttgaaattatcacagtcatcccaaccttcagcaatcaccaacctgatcaacagccatcaacattgaagcaagacttttcatcagcaaaaatattattactcacta

SEQ ID NO: 804559 - DNA, 120 bp, Artificial Sequence
  ENSG00000253877_13 (sequence is synthesized)
aaggctcagataatcattagcatgttttatcaataaagtattttttaattaaggtatttctattggcttttttggccctgccaagtcttatgttgaaacttgatctccagtgtaggaggt

SEQ ID NO: 804560 - DNA, 120 bp, Artificial Sequence
  ENSG00000253877_14 (sequence is synthesized)
gtttggattgtggaggaacatccctcatgaatgacttggtgtcattcttgcagagtgagttttcttgttcccatgagaactggttgttccaaaagactgttacctcctcctctttctttt

SEQ ID NO: 804561 - DNA, 120 bp, Artificial Sequence
  ENSG00000253877_15 (sequence is synthesized)
ttgcttcctctcttgccatgtgatctctgcagacaagctccccttccaccatgagtaaaagcagcttgagaccctcaccagatacagatgaaaaagccatgcttcttctacagcctgcag

SEQ ID NO: 804562 - DNA, 120 bp, Artificial Sequence
  ENSG00000253877_16 (sequence is synthesized)
aaatgaacaagatgtctgtggcaaccctcagaccattgacgccttctctcctatgtatcaaatcacacatttggacgttgactgaaccctcacatgtcagatgctcaatattgaggtata

SEQ ID NO: 804563 - DNA, 120 bp, Artificial Sequence
  ENSG00000253877_17 (sequence is synthesized)
gtaaaagggagcatgaacttgagaaaatacgctttcaacacaaagctgtaataatataaggtcaaataagattctgcattggagatagaaaactctgaaggaagctttatctattccaga

SEQ ID NO: 804564 - DNA, 120 bp, Artificial Sequence
  ENSG00000253877_18 (sequence is synthesized)
tgcagcagtgatgccttatgacaagtcagcacctggtctgaactctgctctctttgcactgaattctttgagtttttattccaagttcagtcattggttttagtattggttcccatctgc

SEQ ID NO: 804565 - DNA, 120 bp, Artificial Sequence
  ENSG00000253877_19 (sequence is synthesized)
ttggcatccttggtggaattgggcttcttttttcaatttctttttgctgtctttttgttttactgtgttgagtagtgctatctaaatgtgtttatcataaaagaagcagcacatgatcat

SEQ ID NO: 804566 - DNA, 120 bp, Artificial Sequence
  ENSG00000253877_20 (sequence is synthesized)
aggcccatgagcctgtttttcaagccagccaaacagcacatttagtttgacattcacactggacctctgtccatttttataaacttcgctttgggtcatcaataaaactaaatgaagttc

SEQ ID NO: 804567 - DNA, 85 bp, Artificial Sequence
  ENSG00000253877_21 (sequence is synthesized)
actgccttcatgagctgtaacactcaccgggaaggtctgcaacttcactcctgagccagcgagaccacgagcccactggaaggaa

SEQ ID NO: 804568 - DNA, 90 bp, Artificial Sequence
  ENSG00000253877_22 (sequence is synthesized)
cttcatgagctgtaacactcaccgggaaggtctgcaacttcactcctgagccagcgagaccacgagcccactggaaggaacaaactcccg

SEQ ID NO: 804569 - DNA, 120 bp, Artificial Sequence
  ENSG00000253877_23 (sequence is synthesized)
gggagtggatgacatttttacagtgtttacaggctgaaaatttttcgagcttttatgctctgcttccgttataaggaggaggcctcacaatcctggtggaaggcaaggaggagcaagtca

SEQ ID NO: 804570 - DNA, 120 bp, Artificial Sequence
  ENSG00000253877_24 (sequence is synthesized)
ttgatgtgaacagcttttcccaagaacatgaattctctactgttatgagactcttatcttagaatattttccttgtttatgactctatgaacaatagaatgaaatgaaaagggggtttgt

SEQ ID NO: 804571 - DNA, 120 bp, Artificial Sequence
  ENSG00000253877_25 (sequence is synthesized)
ttgttttgtgcacttatggggtataattttatgtgtgaatgattttgcacccagccttatacatggataaacttatactttaatagataaaaaataaaggtccagtgtaagtgagaaact

SEQ ID NO: 804572 - DNA, 120 bp, Artificial Sequence
  ENSG00000253877_26 (sequence is synthesized)
acagaataagtgaaatgatgcttgagaataaagacaataggcatccagtcctgtcggtatgtagacacgtattttttgtgcgtacaaaactctaaattgagttattcactaatacagttt

SEQ ID NO: 804573 - DNA, 120 bp, Artificial Sequence
  ENSG00000253877_27 (sequence is synthesized)
ttacaaagttcagatttttaaaatattttttctgatgaaaaatacctcaggatatacatgtaaaaagtatctttaatgcggaaagaggaatgtataaacagttctttccacttaaagacc

SEQ ID NO: 804574 - DNA, 120 bp, Artificial Sequence
  ENSG00000253877_28 (sequence is synthesized)
tcttgtttttaaggccaaataaagttatattttattgttgatacacacatctacatctttactattgtgtttggctaaaattgtgtctttgaattttaagtgaactaggcaagaaaaaaa

SEQ ID NO: 804575 - DNA, 120 bp, Artificial Sequence
  ENSG00000253877_29 (sequence is synthesized)
gtgtattcctcatttctattattaatgaaataaagactgaatgtagaggagctagatttaagaccattgcttgaaatgtcaactaatatcaatggaccatggaatgtgcaaagttgtaaa

SEQ ID NO: 804576 - DNA, 120 bp, Artificial Sequence
  ENSG00000253877_30 (sequence is synthesized)
aaaaagcttgctttgaaatctaccaacaaaatattattttaaaaaatcatccctaaatcactctataagattttacagtggcttctagcataaatagacatgccacatattgtccctcct

SEQ ID NO: 804577 - DNA, 120 bp, Artificial Sequence
  ENSG00000253877_31 (sequence is synthesized)
aaaacactctcattttgtatcactcacaggtatagtaaaagggagcatgaacttgagaaaatacgctttcaacacaaagctgtaataatataaggtcaaataagattctgcattggagat

SEQ ID NO: 804578 - DNA, 120 bp, Artificial Sequence
  ENSG00000253877_32 (sequence is synthesized)
agaaaactctgaaggaaggtaaagctgttttgtccgtatcctaagtgtcagtagctctgtgactttgtgtattatttaaattctctaagcattttgtttttcaacaaatagttttaaaaa

SEQ ID NO: 804579 - DNA, 120 bp, Artificial Sequence
  ENSG00000253877_33 (sequence is synthesized)
taaggaagaaaattaacaacgccgtgagttataatatctggctgaaactgaaggagctctgtgtaattaaaagtcctttctgccctgcctggccatggttctgtatgcattgatgtctta

SEQ ID NO: 804580 - DNA, 120 bp, Artificial Sequence
  ENSG00000253877_34 (sequence is synthesized)
caaactgaaaaaaaaaaaagttattttctcatctccattccctagcatagacatattacatgatgtggaattgaaacaagaaaattgcattttaatcttccactcagaacatagaagaat

SEQ ID NO: 804581 - DNA, 120 bp, Artificial Sequence
  ENSG00000253877_35 (sequence is synthesized)
gaaacaaacaaacaaaaaatactctgttgtcttagtctaccacaagcaaaatctggcagtctctttgctttggtaatggcataaattccttgattagcctataggatagcccattgttct

SEQ ID NO: 804582 - DNA, 120 bp, Artificial Sequence
  ENSG00000253877_36 (sequence is synthesized)
gctcttttagtggaatagctagcaattgctttgtcattttttccccatggttcctaccattagtgttgggaggtttcttctttgtttttttgagaaagaggaaaaagttgttatattttc

SEQ ID NO: 804583 - DNA, 120 bp, Artificial Sequence
  ENSG00000253877_37 (sequence is synthesized)
ataaaaacttaaatttcatccaaaatacttgattttcatgaagaaagtaaatatctctgcccctagtatacatgtgtggaaactttcagaaccctgaagataaatacatttcaaacaagt

SEQ ID NO: 804584 - DNA, 120 bp, Artificial Sequence
  ENSG00000253877_38 (sequence is synthesized)
gagtttgaaaatatcaatagcaaaataggaagtaagctaattagagaggtaagaactagatggcttagcattccaataataatatataaccttctttaagagtaaaatcttggtcaaaag

SEQ ID NO: 804585 - DNA, 120 bp, Artificial Sequence
  ENSG00000253877_39 (sequence is synthesized)
gaaaactccaataaaatttcacaactcatggaaaagtctatcttcgtaattctttatgaagcaaactatatatatataaaacatatatatatatatatttgagacagagtttcgctcttg

SEQ ID NO: 804586 - DNA, 120 bp, Artificial Sequence
  ENSG00000253877_40 (sequence is synthesized)
tgtctcccgggttcaagtgattctcctgacacagccttgtaagtggttgggattacaggtgtgtgctatcatgcccggctaattctgtattttgagtagagacgggggtttctccacgtt

SEQ ID NO: 804587 - DNA, 120 bp, Artificial Sequence
  ENSG00000253877_41 (sequence is synthesized)
tggtctcgaactcccgacctcaggtgataccctcgcctcgacctctcagaatgctgggattagaggcttgagccaccacgcctagctgcaaacatatttcttatattttccaacatcaca

SEQ ID NO: 804588 - DNA, 120 bp, Artificial Sequence
  ENSG00000253877_42 (sequence is synthesized)
gctgcaaacatatttcttatattttccaacatcacaaaattttactgagctatgatatgtactaaaagctgataaagatggtgttgttatatttaacagtactctgaattttgttgccat

SEQ ID NO: 804589 - DNA, 120 bp, Artificial Sequence
  ENSG00000253877_43 (sequence is synthesized)
ttctaaaattgtattcagaggaaattatgcccatgtttctatagagagaattttaaaaaatacatgagcatagaaatttgagcaacattgattaaggttccataaaattgaagcaggaaa

SEQ ID NO: 804590 - DNA, 120 bp, Artificial Sequence
  ENSG00000253877_44 (sequence is synthesized)
tagtatagaatatacttttgctcactctattaaaataagtctctcataagtatgcttcagttaagttcgaagggtaggaaaattaacctggaacggggcattcagatataagtaagttta

SEQ ID NO: 804591 - DNA, 120 bp, Artificial Sequence
  ENSG00000253877_45 (sequence is synthesized)
ttttggagaaatttctatgtcagctgagattattttctataaaaacagaagaaagatgaatatcactaatgatagcacaaaccactaattagaaggcagtatgtagaatttttctggaaa

SEQ ID NO: 804592 - DNA, 120 bp, Artificial Sequence
  ENSG00000253877_46 (sequence is synthesized)
aataaaactataaatgacaaattaattttagcagaaattgtaagaaaatgcaatgagggtaataggaatgttatctttgaatacaatggacagcaaattgtaaactgaatgtattcacta

SEQ ID NO: 804593 - DNA, 120 bp, Artificial Sequence
  ENSG00000253877_47 (sequence is synthesized)
acacaaaagagaaaattacttttaatgattgcctattgtttctctctacataaagtttgagtttcatgtctgatgaccttatggctttttaaatagacacttcatgtgacatcattaaat

SEQ ID NO: 804594 - DNA, 120 bp, Artificial Sequence
  ENSG00000253877_48 (sequence is synthesized)
gctactgcgcacttcatagactacagtatagtataaacataacttttaaatgcactgggaaaccacacaatttatgtcacttgctttacagcagtatttactttgttgctgtggtctgaa

SEQ ID NO: 804595 - DNA, 120 bp, Artificial Sequence
  ENSG00000253877_49 (sequence is synthesized)
attgaacctgcaatatctagaggtgtgcctgtacctataggtaagtgcactgggaaaccacacaatttatatgactttctttatggcaatatttgctttattgtaggggtctggaactga

SEQ ID NO: 804596 - DNA, 120 bp, Artificial Sequence
  ENSG00000253877_50 (sequence is synthesized)
ttgctttattgtaggggtctggaactgaactatcaatatctcagaggtgtgcctgtatctgaacctgaacctggagctgttctacacacagacacacagagacacacacacacacacaca

SEQ ID NO: 804597 - DNA, 120 bp, Artificial Sequence
  ENSG00000253877_51 (sequence is synthesized)
ttattacatgtaaaaatctgataaaggactatgcaaaaaggaacaattatatttaaaatactgcaatgatagaatatgccatctgaccccagtgatgttctttcctttctaccaagctat

SEQ ID NO: 804598 - DNA, 120 bp, Artificial Sequence
  ENSG00000253877_52 (sequence is synthesized)
caacttatagaattagaaaacaaataatctaagatgcaatgtttagatgctgccataaaattctattttaatttgataactgaaattctcagatatagagaagcatttaattatctttgt

SEQ ID NO: 804599 - DNA, 120 bp, Artificial Sequence
  ENSG00000253877_53 (sequence is synthesized)
cactttctcagtttcctttacttgcatggaaaccaatcaatgagaagtgaacagaagttggctaattaaaattaaatttaaaaaataatattattataaaaagagacaaagtttaccgaa

SEQ ID NO: 804600 - DNA, 120 bp, Artificial Sequence
  ENSG00000253877_54 (sequence is synthesized)
tggtataagattacctatcatccatggccaagaattaagtagttgattggctctccaatgagtaacaattctatctcttcattttttatatatgaagttttcattttggttgttgatact

SEQ ID NO: 804601 - DNA, 120 bp, Artificial Sequence
  ENSG00000253877_55 (sequence is synthesized)
ttttgagctattttatttcattggtccatttatctgtacatgcatcaataaaatattttctttaaagaattgtaattatcaaatgtcatatatatgtctattcacactttgtctattctc

SEQ ID NO: 804602 - DNA, 64 bp, Artificial Sequence
  ENSG00000253877_56 (sequence is synthesized)
atcttatgtggatggcagcaggcaaagaaagcttatgcaggtaaactcgggaaaagacctgcct

SEQ ID NO: 804603 - DNA, 120 bp, Artificial Sequence
  ENSG00000253877_57 (sequence is synthesized)
ccaaaccatatcagtatatgaatttattattttcagaggctgtaaaaacatgtagcagaggattaggattcccaagttatggaaagcaggcaagataaaccctagagtcacagaacacac

SEQ ID NO: 804604 - DNA, 120 bp, Artificial Sequence
  ENSG00000253877_58 (sequence is synthesized)
aaagggctaaaagatgcttatgttagaatttgcaaatgtaaagacacctggacatttagtgaaaacttcacagttgcaatgtttcagttgtacagctaaaatagtccaagtcagctgtta

SEQ ID NO: 804605 - DNA, 120 bp, Artificial Sequence
  ENSG00000253877_59 (sequence is synthesized)
ctaaaacactttaggaaaacttaaaaaaattcaatcaattcacaaataaattgtcagtagaagcaaagaacatcaccatttacaggaaaaaaaaacacaatcactcaaaagtataatagt

SEQ ID NO: 804606 - DNA, 120 bp, Artificial Sequence
  ENSG00000253877_60 (sequence is synthesized)
tgggagtggatgacatttttacagtgtttacagagtaagcagattggactgggacatgatcttctcttcaagagggcagaagcacaaggcccaatgtataattgctattcataactctac

SEQ ID NO: 804607 - DNA, 120 bp, Artificial Sequence
  ENSG00000253877_61 (sequence is synthesized)
ttatgtgatatttgttacctgggtccctacattagccaaggcagaacacatggtcaagctgaggtgcagagaattacaccttgactacacaagagtataaatacaaggaggagtgaaact

SEQ ID NO: 804608 - DNA, 120 bp, Artificial Sequence
  ENSG00000253877_62 (sequence is synthesized)
ccagggccattactgttgccaatctaacacaaataggacactccattttttaagattgtaagttctgcaggaaaaatgcctgagtcaatatcctggccctaccaggagctctgtaacctt

SEQ ID NO: 804609 - DNA, 120 bp, Artificial Sequence
  ENSG00000253877_63 (sequence is synthesized)
ggaaaaattactaagcctggtttctcattttaataaggaaagacagcaaaactatacctcatatcattaatgagtacacatttgtgagccctatatctaacacaaaatatgtaccaaaaa

SEQ ID NO: 804610 - DNA, 120 bp, Artificial Sequence
  ENSG00000253877_64 (sequence is synthesized)
gagagagaggtcctgctgggccccacacaactcccaagagccaagcacctgaagcatgctgccattttagagcccagactccaccagactgcaccgtgccctggggcctaacagcccctg

SEQ ID NO: 804611 - DNA, 120 bp, Artificial Sequence
  ENSG00000253877_65 (sequence is synthesized)
catctccacatcccaagatccctgctgacatctcaccacatccactccaagagctgcagcatcacaatgccagctcaactgagcactgcagctgcgttacatactaagcagagatccatg

SEQ ID NO: 804612 - DNA, 120 bp, Artificial Sequence
  ENSG00000253877_66 (sequence is synthesized)
aaaaatctttctaccaaattcattgatacaattgcaattcatgccatgtttgagttacctatatatacaaatgcatttccttccttcttgttttctttcttccttcctttctctattcat

SEQ ID NO: 804613 - DNA, 120 bp, Artificial Sequence
  ENSG00000253877_67 (sequence is synthesized)
tccttccttccctttcttccttctgtttctttttcttccttctttccctcctctctctctatattatttccttccttccttcccattctctctctacttccttccctttctttactttct

SEQ ID NO: 804614 - DNA, 120 bp, Artificial Sequence
  ENSG00000253877_68 (sequence is synthesized)
tccttcctttcttttccttccttctttcttttttctctttctttcattctaccttcctttctctccacccttctttctctctcttcctttctttcttactaccttctctcttttttcttt

SEQ ID NO: 804615 - DNA, 120 bp, Artificial Sequence
  ENSG00000253877_69 (sequence is synthesized)
attttctgtcttcttttcttccttcctttctctctctttctttcttgcttgctttctttctctctcaattcctttcttttttatgttccttcatttgtttcccttttccttccttctttc

SEQ ID NO: 804616 - DNA, 120 bp, Artificial Sequence
  ENSG00000253877_70 (sequence is synthesized)
tttcctttctctttctttctctcttttttgtctcttttctctttcctttcttccttcctttctttcttctctttccttctatctttcttttcgtttcttttctttttatttttatttttt

SEQ ID NO: 804617 - DNA, 120 bp, Artificial Sequence
  ENSG00000253877_71 (sequence is synthesized)
ctttctttcttttcttctctttcccttccttcctttctctctctctcttttctctcttacttttttccttccttccttcctcccttcctcccttcctccctccctcccttcctccctcac

SEQ ID NO: 804618 - DNA, 120 bp, Artificial Sequence
  ENSG00000253877_72 (sequence is synthesized)
tccctccttttctctatctctttctttctttgctttattgttctttttcttttctaatacttcaattatcttgttaattcagtgtgctacctgaaaggtaatttcattgtctgtgttctg

SEQ ID NO: 804619 - DNA, 120 bp, Artificial Sequence
  ENSG00000253877_73 (sequence is synthesized)
tcttcctctttccctccctctcttccatcatgctctttgattcccttaatacatttattgctgcatatctttagaaaactgaagtagccaaaaaaaaaaaaagacagcttatagaaattt

SEQ ID NO: 804620 - DNA, 120 bp, Artificial Sequence
  ENSG00000253877_74 (sequence is synthesized)
tatgcagcacttctatgacctgccaagtagggatcagcattgaatatggtcaatataaagataatctctcattatgaaggctctgtaataaacaaattaagaaaaaatggaatatgttcc

SEQ ID NO: 804621 - DNA, 120 bp, Artificial Sequence
  ENSG00000253877_75 (sequence is synthesized)
tttcatttcccattgcatgatattattttgtttttctcgagtatgatttgttggcttgtttatttttatttatttctttttacattctcaagtctcttgatgttgaattagtatgaactt

SEQ ID NO: 804622 - DNA, 120 bp, Artificial Sequence
  ENSG00000253877_76 (sequence is synthesized)
tcagattgtttttacttccagatttctgctcttttgttttatatctttatttaaaatagtcttaggtattttatttgaagcttgtttttaaatctaatgttttcatttttttttatcata

SEQ ID NO: 804623 - DNA, 63 bp, Artificial Sequence
  ENSG00000253877_77 (sequence is synthesized)
acaggtttgtcaaacatcagatggttgtagatatgcggcattatttctgaggactgtgttctg

SEQ ID NO: 804624 - DNA, 69 bp, Artificial Sequence
  ENSG00000253877_78 (sequence is synthesized)
cccatttcttatttttgacaggtttgtcaaacatcagatggttgtagatatgcggcattatttctgagg

SEQ ID NO: 804625 - DNA, 120 bp, Artificial Sequence
  ENSG00000253877_79 (sequence is synthesized)
tctctgtttgtctgttattggtgtataatatttccattttttaaaaggaggaggtcccgttctcttttcttgaaaagtacctctcaaactgacaacttgtgttgttagaaatagcctgtg

SEQ ID NO: 804626 - DNA, 120 bp, Artificial Sequence
  ENSG00000253877_80 (sequence is synthesized)
agcctgtgttggtaatatagtaatctgcatgccatttaaaccccccccctctgctccactaatatttatgaaaacttatactgcatatcctatttccactatttgtttttttatagtact

SEQ ID NO: 804627 - DNA, 120 bp, Artificial Sequence
  ENSG00000253877_81 (sequence is synthesized)
gtcatctcaagaccttctaattccacctcaaattgtccaaccatatcatgcattttgtgattgttgttgttgttttaaaaaaataactgtcataatggggagaaaaataaattgtagagt

SEQ ID NO: 804628 - DNA, 120 bp, Artificial Sequence
  ENSG00000253877_82 (sequence is synthesized)
ttgagctttatctattccagaatgtcatatagctggtataaggtatgtactcttttcagattggcttctttcatttagtaacatgcatttaaagtccttcaatggcttgagaactcattt

SEQ ID NO: 804629 - DNA, 120 bp, Artificial Sequence
  ENSG00000253877_83 (sequence is synthesized)
ctttttagcactgaatagtaatagttcatattctagaagtaccgtattttatgtatccattcatctcctaagtgtatctttgttgccttcatgttagggcaattatgaataaaactacta

SEQ ID NO: 804630 - DNA, 120 bp, Artificial Sequence
  ENSG00000253877_84 (sequence is synthesized)
tagagcacacttggtggactgaatgctaagagtatgtttatttttataaaaaactaccaatctcttcaaaagtgactgagccattttacattgcgaccagcaataagtgatgcttttgtt

SEQ ID NO: 804631 - DNA, 120 bp, Artificial Sequence
  ENSG00000253877_85 (sequence is synthesized)
ccacatccttgctagaatgttgtggtgtctgtgttctagattttggttgttctaataggaatgaagcaatatctcatggttgttttaacttttatttccctttattatgacataaggtgg

SEQ ID NO: 804632 - DNA, 120 bp, Artificial Sequence
  ENSG00000253877_86 (sequence is synthesized)
gaattatttcatatgtttatttgctacctttatgtattttcgataatatgtctgtcaaggcccgttttttaatcaagtgtttttgttttcttattgttgagttttgaaaactcttggtat

SEQ ID NO: 804633 - DNA, 120 bp, Artificial Sequence
  ENSG00000253877_87 (sequence is synthesized)
cttttagataacagtcctttattatatatttcttttgcaactactttttcccagtctataatgtcttcttgttctcttgacattgtcttttgcagagcagacatgtttaattttaatgaa

SEQ ID NO: 804634 - DNA, 120 bp, Artificial Sequence
  ENSG00000253877_88 (sequence is synthesized)
atccagcttatgaattattttttcatgaatcatgcttttgatgtagtatctaagaagtcattaccatatctaaggtcatctaagtttttctgctatgctatcttctaagagtcctatagt

SEQ ID NO: 804635 - DNA, 120 bp, Artificial Sequence
  ENSG00000240063_0 (sequence is synthesized)
acgaaagggggtgcgcggaccgaggggggcctggcgcgccccgccgccgttccgagttggggggtttctgtgttgtgggtccgggaagaagcgagcgtggaaaggtgccgggttctcgaa

SEQ ID NO: 804636 - DNA, 120 bp, Artificial Sequence
  ENSG00000240063_1 (sequence is synthesized)
cgctgtttctgtccactgccaccctcctccccgttctgggagtgggattaagtcgtgtctgtgggtctggccatctccggagtctgcagcttggggccgattcctcggtctctacctcct

SEQ ID NO: 804637 - DNA, 120 bp, Artificial Sequence
  ENSG00000240063_2 (sequence is synthesized)
gttgcaggtccttaatcattcaacagagacataataactttattggatggagcaatacttcttgctaatcagcatatacacacccagtgaccttgcatgaagaagcagcctgtctgcaga

SEQ ID NO: 804638 - DNA, 120 bp, Artificial Sequence
  ENSG00000240063_3 (sequence is synthesized)
agattgcatctcatctatacaaagcaggagtgatgttgtcaatgtgtgtgtgtgcatgcatttatgtatctgtatgcttgtgcagagaggggaagatgggggaggggatgtggctttgtt

SEQ ID NO: 804639 - DNA, 120 bp, Artificial Sequence
  ENSG00000240063_4 (sequence is synthesized)
acttagcttgcttgatttttatccacagttattaagaggtaaaacattgtagctcaacccctagaagtggtcgtttgctttacagagaggaaaatctctgcccccttaccatggcttgca

SEQ ID NO: 804640 - DNA, 120 bp, Artificial Sequence
  ENSG00000240063_5 (sequence is synthesized)
tttccagccccaaaaggcaaaaacagggagcacgtaactcagtggaatcaatagcacgaccagaaagtcaattcagtcatatgatggtggatcagtatcatcattgtaaaggagaggaga

SEQ ID NO: 804641 - DNA, 120 bp, Artificial Sequence
  ENSG00000240063_6 (sequence is synthesized)
tcactgtactgtcagatgcatcactctgactttcccccatcactgtggaaaaaggagggaaaaaagccttcaatcataataggaaaggtaaacagtttttcaaacttacaaacatatgta

SEQ ID NO: 804642 - DNA, 120 bp, Artificial Sequence
  ENSG00000240063_7 (sequence is synthesized)
ccttgagtaatataataatacatgtgaattctaattttagttccactaagtattaataattaatggtaacttcgttgagtgtgagaattccacaaggttgcgttagaattctgaatgaca

SEQ ID NO: 804643 - DNA, 120 bp, Artificial Sequence
  ENSG00000240063_8 (sequence is synthesized)
ttttgtttttgctttattgggctttgatatgtcagacaagagaattcaacttttctcctgtgtgaatgaattcaatagtctgttgagagagatgccagtttttaggttgcatccaccatt

SEQ ID NO: 804644 - DNA, 120 bp, Artificial Sequence
  ENSG00000240063_9 (sequence is synthesized)
tttatttttagctccatctgttgtctttaatcaagttgctgttaaaactctgataaaatacttggtttgtagcattggtattgtccccaccagcttccctaaaatgagcgctccgattct

SEQ ID NO: 804645 - DNA, 120 bp, Artificial Sequence
  ENSG00000240063_10 (sequence is synthesized)
aatccccaaagatgtttgaatttgtctccagttgacatccaaaagtctcatcttcctggatttccttcctcctcttgccccctctgccctttcccactatcccagttcctagcatctccc

SEQ ID NO: 804646 - DNA, 120 bp, Artificial Sequence
  ENSG00000240063_11 (sequence is synthesized)
tgacccttgggttagagcccagggagatggaccactgaatccaacctgggaaaatgacaggaagtacgtgcattcttcaaagtgaggcatttgctgttattgagcatctattttaacata

SEQ ID NO: 804647 - DNA, 120 bp, Artificial Sequence
  ENSG00000240063_12 (sequence is synthesized)
actcagatgcagtggtattaatttgtatatgaatatttcatttaataataatgattgagactgtcctctatatcagaggtaagcatatacagtacagcctgttctttaactcctttttcc

SEQ ID NO: 804648 - DNA, 120 bp, Artificial Sequence
  ENSG00000240063_13 (sequence is synthesized)
tcacctgactcaattttctgttgattaaatgttagactgagaatgaaagtatacttgttagatttggctacttattgaaagctgcagttttggctaggcatagtgtggcttatacctgta

SEQ ID NO: 804649 - DNA, 87 bp, Artificial Sequence
  ENSG00000240063_14 (sequence is synthesized)
gctgcagttttggctaggcatagtgtggcttatacctgtaatcccagcacactggaaggctgaggtgggaggatggcttgagaaaga

SEQ ID NO: 804650 - DNA, 120 bp, Artificial Sequence
  ENSG00000249781_0 (sequence is synthesized)
catgagaacacattgcctcatacttgctgcaatagagttgaataagtaacagcttttaaattggattatcaactcacattgctaccaaatacgagcatatcaatagcaagtcatttgggg

SEQ ID NO: 804651 - DNA, 120 bp, Artificial Sequence
  ENSG00000249781_1 (sequence is synthesized)
catgtaaaactgtcaacgttccaagccactgactgacagggtaagaagagtgagtctcaagagagtgaggaacggtgaatctttggcagactctgtgtgtgcccatggaagagacagtga

SEQ ID NO: 804652 - DNA, 120 bp, Artificial Sequence
  ENSG00000249781_2 (sequence is synthesized)
cagaaattatgtaatgaaaaaaatgtagcacaagccttatgaatttttacttttcactccatgggattcccatatcaaaagacctattctacacaaaataaagttctctatgaagaattg

SEQ ID NO: 804653 - DNA, 120 bp, Artificial Sequence
  ENSG00000249781_3 (sequence is synthesized)
ggcttctgctcatggatttctgctccaatgcaacaggaaggtcctcacaagatggctgaacagatgcaggtgctgtgcctctggactgcctagcctccagaactgaggtgttggaagctg

SEQ ID NO: 804654 - DNA, 120 bp, Artificial Sequence
  ENSG00000249781_4 (sequence is synthesized)
gaatctaaagtcatgcacttgcaagggagtcagaggaagagaggtaagaaggaaaatggttcattgtttccatcatgtactctatggaatacaaagctctgaaacctgttggctactgga

SEQ ID NO: 804655 - DNA, 120 bp, Artificial Sequence
  ENSG00000249781_5 (sequence is synthesized)
agtgtacaagaaaaagactctcaagctagaggtggggtagagctggagccagccatgtcaagatctttcgaggacatgaacattttttatgcttattaaaagatgatgtggttttaaaat

SEQ ID NO: 804656 - DNA, 120 bp, Artificial Sequence
  ENSG00000249781_6 (sequence is synthesized)
gagagtctggctggaggccaaacaacacaaaaccagcacacttaacaaaaatataaccaatgacccttgcagagtccacttaactcccctccaccagagcaggtgctggtatccacagct

SEQ ID NO: 804657 - DNA, 120 bp, Artificial Sequence
  ENSG00000249781_7 (sequence is synthesized)
gagagacctgaagatggatcacatcacaggactccttgcagacattctccagtaccagcccagagcctggtaggtctgttgggtggctagaccagtattctaagtgaagtaactcggaaa

SEQ ID NO: 804658 - DNA, 120 bp, Artificial Sequence
  ENSG00000249781_8 (sequence is synthesized)
tggaaaaccaaacatcatctgttctcactcatcagtaggagctaagctatgagaacacaaagacctgtccacgctgagtttatagcaactgtcaattacggttcagattttcctacccca

SEQ ID NO: 804659 - DNA, 120 bp, Artificial Sequence
  ENSG00000249781_9 (sequence is synthesized)
agaactgatacatatgcaggatgtgcagctttgttacacagtatgaagcatgtctttaggactttctgtgccatctggtatccatcaaggggagagtcccaaactgcactggaaggcatc

SEQ ID NO: 804660 - DNA, 120 bp, Artificial Sequence
  ENSG00000249781_10 (sequence is synthesized)
ttccagatggtggtgggcgctaaagatcagctgtgtgggtgtgagcttcccatgcctgtggagaagcagcaattgaattgctcatctggaatgaagtttcgtggattttttttttttttg

SEQ ID NO: 804661 - DNA, 120 bp, Artificial Sequence
  ENSG00000249781_11 (sequence is synthesized)
aacagatcactgactacttccaatatgcaataccaagtaaagactgcaaatgactgtgccacagggaggaaaagcagtcaacctgtctttagggacctgttcaaatttctggtgtctcag

SEQ ID NO: 804662 - DNA, 120 bp, Artificial Sequence
  ENSG00000249781_12 (sequence is synthesized)
actgtaggaggcatttgctgtgagccagtgtttggtctttagctgaaacagacatttagccataaaccaccaaccagaaagatcaataagacacggttcctcttctggtgggccacataa

SEQ ID NO: 804663 - DNA, 120 bp, Artificial Sequence
  ENSG00000249781_13 (sequence is synthesized)
aggaagttgtcatgttccaacttaatgtgtgggttgagagggatctgcacaaacgagcgtcatcggggagaaaaatatatcccagtctgcgtggtcacggggagcttcctgggcaagcaa

SEQ ID NO: 804664 - DNA, 120 bp, Artificial Sequence
  ENSG00000249781_14 (sequence is synthesized)
catctagactggtgtttgaccaaactactgggcaccataccccagccaagtcagcatataatgtgaaccatcacagtgggagacatgtcacaaagtggtaagacagcaagaattggtggt

SEQ ID NO: 804665 - DNA, 120 bp, Artificial Sequence
  ENSG00000249781_15 (sequence is synthesized)
ctgggctggattccagagaacctggactgtgcctatgaagcaccactgccctgtagacctgggataataaacactgatgcctaaagggaccaggcaggaactccttcatagatgaatgct

SEQ ID NO: 804666 - DNA, 120 bp, Artificial Sequence
  ENSG00000249781_16 (sequence is synthesized)
tggtgttattcattacccagtcttgagggactcactggtgagctcggggctcagggagtagacctgactggggagctaagtgatctcgtgtgactctctatgcctcgttgccaccagcgt

SEQ ID NO: 804667 - DNA, 120 bp, Artificial Sequence
  ENSG00000249781_17 (sequence is synthesized)
gggccatctccaggggctctcaaaccgatagaagaccttgcggtgtgggaaaacagctccagagcttctaagctgagcggattgttcctagtgaggaaggtcttgtcccatctgttccaa

SEQ ID NO: 804668 - DNA, 120 bp, Artificial Sequence
  ENSG00000249781_18 (sequence is synthesized)
ttctgttttctcctttccactaagggaagatgcaacaggaaggtcctcacaagatggctgaacagatgcaggtgctgtgcctctggactgcctagcctccagaactgatacatatgcagg

SEQ ID NO: 804669 - DNA, 76 bp, Artificial Sequence
  ENSG00000249781_19 (sequence is synthesized)
gatgatgtggttttaaaataaatctaaggctgggcgcagtggctcatgcctggtcagtaattcaagaccagcctgg

SEQ ID NO: 804670 - DNA, 120 bp, Artificial Sequence
  ENSG00000249782_0 (sequence is synthesized)
gccgacaggaaggtgaagaagtcatctgcgtgctgtgagggtggcgcaccccaactccatggggacagaaggtcctgcatttaggacccttccagacctcacacctatgtatctcttcat

SEQ ID NO: 804671 - DNA, 120 bp, Artificial Sequence
  ENSG00000249782_1 (sequence is synthesized)
ctgcagccctgagccactccttggaggtgaggagcaccattcacctgagcagctccccgccctggtgtctgagaaataaatctgccttcagtcatacggttctaccaatctgagcacacg

SEQ ID NO: 804672 - DNA, 120 bp, Artificial Sequence
  ENSG00000249782_2 (sequence is synthesized)
gaggacagccacatccctcaaattacaaacatctaaaatgtccattaactgttgagtggatatataaattctgatgttttataaaatggcataccctacatcaatgaagatgaatgaatt

SEQ ID NO: 804673 - DNA, 120 bp, Artificial Sequence
  ENSG00000249782_3 (sequence is synthesized)
acttctgcataaaacaatatacatgcatctaaccaatatgacactgagtgaaaaaagacatccatagaagagcacagctcaccattcaggagcatcaccctggtccaagccaccttcagc

SEQ ID NO: 804674 - DNA, 120 bp, Artificial Sequence
  ENSG00000249782_4 (sequence is synthesized)
tctcacctagactaacacagttcttcctgtctccatgagcctcctctccagttgctgtattgcaaataacaatcaaaacagcatttaaaagcaaaacaacaacagcaaacaaatgataaa

SEQ ID NO: 804675 - DNA, 120 bp, Artificial Sequence
  ENSG00000249782_5 (sequence is synthesized)
ccttctacctccccaagtttctaaaggcacacatctctttgggatttaacagagcatcatcacttagccaagcaaactgcatgctaaacagatccagctgaataaattggaccacttgat

SEQ ID NO: 804676 - DNA, 120 bp, Artificial Sequence
  ENSG00000249782_6 (sequence is synthesized)
gattatacaagctttggtgactaaatacttaaaaatgtctgaactagatgaaataatcaagattgtcgtttggggaagaaacgcctgagtgtttcaagtgttgacaaatccatgtccact

SEQ ID NO: 804677 - DNA, 120 bp, Artificial Sequence
  ENSG00000249782_7 (sequence is synthesized)
cacatccatgggagccccttctttcttattggtttcatcacttcctataattcatctctctcagcttctccagagcctgacataagctgacagagtcatgaatttaataaactagaataa

SEQ ID NO: 804678 - DNA, 120 bp, Artificial Sequence
  ENSG00000249785_0 (sequence is synthesized)
atggtcaaggttcttttgaacattataacagagagcaggagagttaacagacctgtgacaaaaacaattaaaagtttaagaactgagtggtggaagtaggatagtccttatcaacatctt

SEQ ID NO: 804679 - DNA, 120 bp, Artificial Sequence
  ENSG00000249785_1 (sequence is synthesized)
tctccctgacctacagataaatatatgttcctgtcaccacacacttagaccgaagtaagtcctgaagcaggaaatcagtgagtttcacagctttctgagccactacgcaacccaggaagc

SEQ ID NO: 804680 - DNA, 120 bp, Artificial Sequence
  ENSG00000249785_2 (sequence is synthesized)
ccagatggcccctcctttcagtatcatcaatcagagcttaaggagggcaagatacttgaagtctaactcaccaagaggatgaagttctcatcattccatctgacgaacaagcgagaacta

SEQ ID NO: 804681 - DNA, 120 bp, Artificial Sequence
  ENSG00000249785_3 (sequence is synthesized)
gccaagtgctggccaaaggtgagtcaaatctagaatgactgataaaggaagaagatgataaatatcagttttgcttctgggaccacctgcagtaacaaggactccatcttgtttgctaac

SEQ ID NO: 804682 - DNA, 120 bp, Artificial Sequence
  ENSG00000249785_4 (sequence is synthesized)
tctctggaggagactgaaattgacaactactttgaagaactgaacttgttccttcttttctgagaaagaagcaagggtctctttttctaataacagctttgggtaccatataaaggcata

SEQ ID NO: 804683 - DNA, 120 bp, Artificial Sequence
  ENSG00000249785_5 (sequence is synthesized)
agtgctatttaattggtatgaagggtaaactaataaagattcagttcacgtaccacccagaataacttggatctcattcattttcctgccttagctgcagtgactgactctcatctctga

SEQ ID NO: 804684 - DNA, 120 bp, Artificial Sequence
  ENSG00000249785_6 (sequence is synthesized)
acacgaggagcggtctcggagtagtcatggacccagaaatgggtctcaggcaaggccactgttgtgccctcctaagcatgagctgtagcaacgtcagcatccagtccaactgggctaaac

SEQ ID NO: 804685 - DNA, 120 bp, Artificial Sequence
  ENSG00000249785_7 (sequence is synthesized)
tcgggtccagctgggaacttctgtgcccctaggggcccagatctggtgaattatttttctacaaagatttttattaataagagactggagatactacatagatgcgtctttctcttcttc

SEQ ID NO: 804686 - DNA, 120 bp, Artificial Sequence
  ENSG00000249785_8 (sequence is synthesized)
cctcaaggaactgatctgctatctgtggttctgagtaaactcatagacatatcacacgacagagaaatcctatttgttttctttgaaactatgctcagtttaataaaaccctacctttta

SEQ ID NO: 804687 - DNA, 120 bp, Artificial Sequence
  ENSG00000249786_0 (sequence is synthesized)
ggactggttctgatgctttcaccagtaacagaagctcaagctgtgctcaactgacccccaaggatccagcctgtctctgggattctctaggccgtcccggaactcctaccatgaccaggg

SEQ ID NO: 804688 - DNA, 120 bp, Artificial Sequence
  ENSG00000249786_1 (sequence is synthesized)
aagtgtagggttggggtttggccctagacctcttatctgtccacctgcaaagccgttttagtaacagatttggaagcaaagtaaggtttttgatggcagcttggtcaccagcacttcact

SEQ ID NO: 804689 - DNA, 120 bp, Artificial Sequence
  ENSG00000249786_2 (sequence is synthesized)
taggaaccagtgctggggaagcggatgggacaatttctgagtgtctcctgggacagacacataggccatcgctccgctaggggcatggagggtatgtgtgggtcaaattgctaaataatc

SEQ ID NO: 804690 - DNA, 120 bp, Artificial Sequence
  ENSG00000249786_3 (sequence is synthesized)
gagccaatttaaattttcaatgcagttcttcagcacttgtgtgatgataatcagcttacaggtcaaggaccttggcaattcaccaaggagattgttacatttgagcaattcaccattaca

SEQ ID NO: 804691 - DNA, 120 bp, Artificial Sequence
  ENSG00000249786_4 (sequence is synthesized)
agattgttacatttgagcaattcaccattacaatccatgggcccagaggttccaggagcctgcttccagccacctccaccaggatgccaggcatggtctcgccatgttgcccaggctggt

SEQ ID NO: 804692 - DNA, 120 bp, Artificial Sequence
  ENSG00000249786_5 (sequence is synthesized)
gctgggattacaggcatgagtcaccacagccagcccagtacctgcttttaaggagctcataccgaccagagttcaagcaaaaaaaaaaaaaaaaaaaaaaggtctacttaaactttgaaa

SEQ ID NO: 804693 - DNA, 120 bp, Artificial Sequence
  ENSG00000249786_6 (sequence is synthesized)
tacttaaactttgaaagatgagattgttcaaaaatgacacgagaaaatcacccatcaccactaagttaaagacttgaatatgtgagagttccagagcctcaaactcctactacagtcact

SEQ ID NO: 804694 - DNA, 120 bp, Artificial Sequence
  ENSG00000249786_7 (sequence is synthesized)
ttaactcagtctgactggaagaatttaggaccactgcatcctgtcttaatccaagggtggatccttagggtgttgactgctgcagtttcaagcttacatctgcaccctgcagaatccaga

SEQ ID NO: 804695 - DNA, 120 bp, Artificial Sequence
  ENSG00000249786_8 (sequence is synthesized)
aggctggtggagatgacatggagcagagctgttgcccccactctgctggccaaagccatcctagatcagctgaacctcagtcaactgccaggcctatgagggagccaatcaagaccagaa

SEQ ID NO: 804696 - DNA, 120 bp, Artificial Sequence
  ENSG00000249786_9 (sequence is synthesized)
actgccaggcctatgagggagccaatcaagaccagaactgtccagctaaggccagtctaaagccaactcagacttgtgagcaaaataaatgcttattagtcattgagttttgggatggtt

SEQ ID NO: 804697 - DNA, 120 bp, Artificial Sequence
  ENSG00000249786_10 (sequence is synthesized)
tgttacagaacattacagtggcaatagttaactgaagataaaactcccttcagtgatggacaccaccacttccccactgagatggttcaagtctaactcctattaccatctgagggaaca

SEQ ID NO: 804698 - DNA, 120 bp, Artificial Sequence
  ENSG00000249786_11 (sequence is synthesized)
agcacattgcagaattaagtagcagaggatttctagacttaacacgtaatttaattcaatccaaatatattgagcacccattagagacactacagcgaattaaaaaggaatatggccact

SEQ ID NO: 804699 - DNA, 120 bp, Artificial Sequence
  ENSG00000249786_12 (sequence is synthesized)
gactgcacctccttatgtcccctcaggctgtcaccgtgcctactgtggagatggtcaccggcatgagggtgtggaggactgtgacggctctgactttggctacctgacatgcgagaccta

SEQ ID NO: 804700 - DNA, 120 bp, Artificial Sequence
  ENSG00000249786_13 (sequence is synthesized)
tctccctgggtcatatggagacctgcaatgcacccagtactgctacatcgactccacgccctgccgctacttcacctgagggccgtgaggagaaggtgggctgcgccccacagaactggc

SEQ ID NO: 804701 - DNA, 90 bp, Artificial Sequence
  ENSG00000249786_14 (sequence is synthesized)
gtggagtggcgtacaccttcacgatcgcttgggcccagcaggttcaggctgcagtgagccataatcacaccacaggactccagcctgggt

SEQ ID NO: 804702 - DNA, 120 bp, Artificial Sequence; identical to SEQ ID NO: 752070
  ENSG00000249786_15 (sequence is synthesized)

SEQ ID NO: 804703 - DNA, 120 bp, Artificial Sequence
  ENSG00000249786_16 (sequence is synthesized)
cattggcaacggcaggcctactgttgtagggctgctggtgtgaaggctgcggaggagaggctgggccattgtcctcgcctccactgctggagctatcgtcatcacttcccgaagagctct

SEQ ID NO: 804704 - DNA, 120 bp, Artificial Sequence
  ENSG00000249786_17 (sequence is synthesized)
cagagtctgaagagctgctcccactgctgctgctcatttgttcaataatgtcaacttcagccctcagctctggaataaaggatatgacatggatcagcacagcagcccttttcaaggcag

SEQ ID NO: 804705 - DNA, 120 bp, Artificial Sequence
  ENSG00000249786_18 (sequence is synthesized)
tgcattggagcttctataaatagtaaatcagcaaaaccaacagcaataagaaataatttaaaacaaagtcctacttctcaataccttaaaaaatgtacaaacaaaattaccaaaacaaaa

SEQ ID NO: 804706 - DNA, 120 bp, Artificial Sequence
  ENSG00000249786_19 (sequence is synthesized)
ctacaaaaacaggttactccatactgattacaggatgatttatcacacattcattaaatatagaacattgactagcaaccagtttcctccaacaacagatccatttggaaatggcacact

SEQ ID NO: 804707 - DNA, 120 bp, Artificial Sequence
  ENSG00000249786_20 (sequence is synthesized)
caaaaagtaggtttcgaaagatccagcactagtcatcactgtcactgccagactcactcaactgcaagtcatttcctatttaaaaaaaaaaataaagtaaaatcatagaatcaaacaaaa

SEQ ID NO: 804708 - DNA, 120 bp, Artificial Sequence
  ENSG00000249786_21 (sequence is synthesized)
ctacagtaaaaccttgttaattcaacttagggaagaaaatcaaattggctcactgaaacaaaatggtgcttttggttatctacaaagcacaacaatactgcatattagggtagagcaaag

SEQ ID NO: 804709 - DNA, 120 bp, Artificial Sequence
  ENSG00000249786_22 (sequence is synthesized)
acaacaatactgcatattagggtagagcaaaggagaagtaagctggataacttttaaatggtttaataaatagcaagaaaatatttaaaatatgtctgggcgcagtggctcacgcctgta

SEQ ID NO: 804710 - DNA, 60 bp, Artificial Sequence
  ENSG00000249786_23 (sequence is synthesized)
atcccaacactttgggaggccaaggcagggagatcatttgaggccagcagttacgtgtag

SEQ ID NO: 804711 - DNA, 120 bp, Artificial Sequence
  ENSG00000249786_24 (sequence is synthesized)
agtggagaatggaagcaggaggtcaggatttctagccaaatgtcagctgggagtcagagaacttctatctagattctgatttttagaaacttactgctggttcatttgttcggagaggtt

SEQ ID NO: 804712 - DNA, 120 bp, Artificial Sequence
  ENSG00000249786_25 (sequence is synthesized)
tcttcacacctctcttccactcctacctccccttgctaaaatccactgactgaagaatacttagtatggatccacatggaaccaaaatccccaactgaatggagtcacatgcatcagcac

SEQ ID NO: 804713 - DNA, 120 bp, Artificial Sequence
  ENSG00000249786_26 (sequence is synthesized)
agtggctaccggtttcatctgctcacccagcctcatgtatttagggactgaattcaagctagaagcacccaacacttttgtcttttggaatctaatccaagtgccaatgtacatctaaaa

SEQ ID NO: 804714 - DNA, 120 bp, Artificial Sequence
  ENSG00000249786_27 (sequence is synthesized)
ggcaatcttgtgacttccttctagttgtatataaaaaatacaaatcggtcagggagtcaggtacaaaacagtggtacaaaagcatgaatagatacgccttatcaaagaatgtgctcattt

SEQ ID NO: 804715 - DNA, 120 bp, Artificial Sequence
  ENSG00000249787_0 (sequence is synthesized)
ggaagggagtgggaaggtgaagattgaggatccttttaagtagtttttgctcagctagcaaaacaagctgggacatgcaagacagataaacacagctgtttggggctgtcacttggggct

SEQ ID NO: 804716 - DNA, 120 bp, Artificial Sequence
  ENSG00000249787_1 (sequence is synthesized)
caggagccaaggtgtcctgctgtagtgaaaagtgcaccggaattaaatagctaggcttctaagccctaccacagagagtcaacagacaaactgcccagggaaaagttatgacctcaggca

SEQ ID NO: 804717 - DNA, 120 bp, Artificial Sequence
  ENSG00000249787_2 (sequence is synthesized)
aagtgaatttctacagctaaggcagatcctgaagaagctcacaaataaaggctgcatactcacacattccctgaagcttgacagtgccagccaccatactgtgagggagctgaagtaagc

SEQ ID NO: 804718 - DNA, 120 bp, Artificial Sequence
  ENSG00000249787_3 (sequence is synthesized)
ccacatgaggaagaattgaggtcccaagccaacagctgcagctaagatccaagctctcaaccagtaccagttcatccgttatagagaaaatgtcatgcctgtgggatctagaagacatac

SEQ ID NO: 804719 - DNA, 120 bp, Artificial Sequence
  ENSG00000249787_4 (sequence is synthesized)
cccctttgtattctacaaagttcccaacaatatcaatgaataagaaggaagtcttaaggctccaggaatcccctcagggagactagctttcagaattttaggcacactaagatatggaag

SEQ ID NO: 804720 - DNA, 120 bp, Artificial Sequence
  ENSG00000249787_5 (sequence is synthesized)
ctaaaagaggactaagaggattctggggatattacaagatattgcagactatcttgttttcctggaaaaggattttacctcagtcgactgaattacttttttcactgtgtcttgccactc

SEQ ID NO: 804721 - DNA, 120 bp, Artificial Sequence
  ENSG00000249787_6 (sequence is synthesized)
ttcgtgcatgcatcaaagaccctaatatgacttctggtggcctgggactccttgggaaaacagaaaaggggccacaaatcccattttgggaacaatctgttttactcatggaacccctgg

SEQ ID NO: 804722 - DNA, 120 bp, Artificial Sequence
  ENSG00000249787_7 (sequence is synthesized)
aattagagcacttacaacagtatctacctttaagaatatattcaaaaaactgttacatggcttctgagaaaacaacaaattagccatttaacctgaatattttgaagcttatggatgaag

SEQ ID NO: 804723 - DNA, 120 bp, Artificial Sequence
  ENSG00000249787_8 (sequence is synthesized)
aatattttcatgatggaaacaacatgaggtaaattagcagcagagattcatctggaagtatgatatattgtttaaaaaaactttttaaagtcatttctgtccaaatataaaacattatgt

SEQ ID NO: 804724 - DNA, 120 bp, Artificial Sequence
  ENSG00000249787_9 (sequence is synthesized)
ctttttatgaggccctggaatttgtagtcctagccctgttcttagagtgtctcactaggaggcgtaataatccaattaggaaactagccaatgaaaaatctcataactactggatcttct

SEQ ID NO: 804725 - DNA, 120 bp, Artificial Sequence
  ENSG00000249787_10 (sequence is synthesized)
tctgtttatctgtgtggttacatatgtgttatgtgtgtaatatctattaaaaagggctctaattaattggcctaagaacagtaagcacttaaataaaatatttttaagggaaaagtaaaa

SEQ ID NO: 804726 - DNA, 120 bp, Artificial Sequence
  ENSG00000249787_11 (sequence is synthesized)
agtatatgctttctggtggacactaatatggaacacaaagatcttctcacattgcagctgctcccatatatccattgatatatgcctctaactccagacctttttgtccttaatcttcta

SEQ ID NO: 804727 - DNA, 120 bp, Artificial Sequence
  ENSG00000249787_12 (sequence is synthesized)
catcaagctttaaatggtgtggcaaaaggagctgaaaattaaactgaccttctactgcatacccttaaattgacccaggaggagccctagctgctattcccatgccacgcccctctccag

SEQ ID NO: 804728 - DNA, 120 bp, Artificial Sequence
  ENSG00000249787_13 (sequence is synthesized)
caggaagtagccagagtaagtcgacgcccaattccccgtaacagcagttaggaatttcattcctgaggggggtgtttgttataggagataaaaataaattatttgggtagacagagtaaa

SEQ ID NO: 804729 - DNA, 120 bp, Artificial Sequence
  ENSG00000249787_14 (sequence is synthesized)
ttgaaattgaagatacatatgctactcttcgccaacatcctagcctagtgcactgcaacctcaagaaagagatttgatttacaataccatattattaactatagtcaccccactgtgcaa

SEQ ID NO: 804730 - DNA, 120 bp, Artificial Sequence
  ENSG00000249787_15 (sequence is synthesized)
cagaacaccagaacttattctaattgtaatttggaatatctctgcatagctagaagacagaaatttgaatgttcccaccacacacacaaaaataaatgtttgaggtgattaatatgctaa

SEQ ID NO: 804731 - DNA, 120 bp, Artificial Sequence
  ENSG00000230525_0 (sequence is synthesized)
aatggttattctggaagtacatcagtacgttcagatcactcagtatgggaaatggattgtggagtaatcagagtggctgtggggagacctcttaggaagaaattacagttcagtattcta

SEQ ID NO: 804732 - DNA, 120 bp, Artificial Sequence
  ENSG00000230525_1 (sequence is synthesized)
aataggaggagtagccacagagatgggaaaaaagtgaatgaagtcaaaacataattcagaggagaggcctccctttgttcttcatagccacctttggatttgtgagccctcacatcagga

SEQ ID NO: 804733 - DNA, 120 bp, Artificial Sequence
  ENSG00000230525_2 (sequence is synthesized)
gcagatataaaggatgaagttgtagggcaggaagtcttatgtaacttggagcagctactcaatggaaatcacaaacagaatgagtttcatccacatgtcaagacactactaccaacagag

SEQ ID NO: 804734 - DNA, 120 bp, Artificial Sequence
  ENSG00000230525_3 (sequence is synthesized)
ctatttcaggacacctacctaaataactagctgtctcttccacttaaagcaaggagagtcttctcttatcttcaagaagaataaaaagtgaagctgacattacttggaaagagaataaac

SEQ ID NO: 804735 - DNA, 120 bp, Artificial Sequence
  ENSG00000230525_4 (sequence is synthesized)
aaaatctgtcatgaggactgcagggatgaatgacacaaaccagccatttctttgagagtcaggaaatatctagtttatacaataagctgatctaccaataaaatacaattggtgttgaaa

SEQ ID NO: 804736 - DNA, 120 bp, Artificial Sequence
  ENSG00000230525_5 (sequence is synthesized)
gggatttccaagaatagccatttcatagttcagctgtgaaataaaatcctcatatcaccatccagggatgttgaaccataactaaggggagctagaaaatgtacaatttgctctaatggc

SEQ ID NO: 804737 - DNA, 120 bp, Artificial Sequence
  ENSG00000230525_6 (sequence is synthesized)
ttccactatgatcttgtgaggtttttattattattactatttttagtaatcatctcggcaatataatcagagcaaaaaagattctaaaggcacaaatcaaagaggaatcttagtttccag

SEQ ID NO: 804738 - DNA, 120 bp, Artificial Sequence
  ENSG00000230525_7 (sequence is synthesized)
taggaatagcttctcagtcagtcgcctttcttcaatcttctggtttcatgaaagaggtgaagcatggcagctgagtcccagtgtgaaggttcagtgctagcagaaagaagagcaaggaga

SEQ ID NO: 804739 - DNA, 120 bp, Artificial Sequence
  ENSG00000230525_8 (sequence is synthesized)
taaagcaagatgagagcaaaactgaatggggggcagttgtttggagcatcttctgaggacagcactgtctaatggaaatcaccttacctttttgtttctgctgcacctcaataacactgg

SEQ ID NO: 804740 - DNA, 120 bp, Artificial Sequence
  ENSG00000230525_9 (sequence is synthesized)
ggcagatgttgaaagcccctgccaccctcttccattcctctctgcccatcttcagcaaatatttacaaagcagttggtgtgtgctcagcagtgtgagagagatacagaggtgactgatgt

SEQ ID NO: 804741 - DNA, 120 bp, Artificial Sequence
  ENSG00000230525_10 (sequence is synthesized)
gtacctgccctcaaggaacatatagcccagaagaggataaaacataagaggatataactgcaatgtgagaagctctatctataccagaagaacaaacaagggtccaacatatacaggaaa

SEQ ID NO: 804742 - DNA, 120 bp, Artificial Sequence
  ENSG00000230525_11 (sequence is synthesized)
ggctgattaattcagacttatgggatctgggtgggtttttatagcaaaagtattatttaattaagccagaagtctgagtagacatttttatagtggtaaaatatacgcaatataaaattt

SEQ ID NO: 804743 - DNA, 120 bp, Artificial Sequence
  ENSG00000230525_12 (sequence is synthesized)
gttaggatgactggatacacatgtaagtcatcatctttacgtgcttattgtcacttggatctggcaggttgactattgaatagtacccgactggcactaataaaattgctaaactgctgt

SEQ ID NO: 804744 - DNA, 120 bp, Artificial Sequence
  ENSG00000230526_0 (sequence is synthesized)
cacagacacctcctcctccggatgaccaggattgcctctgggtttgtcacaagctggaacagggtcctttggaggatggggctctgtgaagaaaaagaggtgaagtgtttggattcagtc

SEQ ID NO: 804745 - DNA, 120 bp, Artificial Sequence
  ENSG00000230526_1 (sequence is synthesized)
tgagccaaaggccgctttatctgggtttaaggacacaagactccgtgaaagacaagctagttcttcttcctgccccggcagtccactgcaggccgatgcagacgcaaccacttcctcagc

SEQ ID NO: 804746 - DNA, 120 bp, Artificial Sequence
  ENSG00000230526_2 (sequence is synthesized)
gggtatggagaggagggtatgacatagcccctgccctcagagttttttcctactcattatccctgctgtctctggggacttcttaaatgtcagcaatcattgtcatcttcactgttgcct

SEQ ID NO: 804747 - DNA, 120 bp, Artificial Sequence
  ENSG00000230526_3 (sequence is synthesized)
ccgcagccaccgcacatggctgcacctgggccatctcctctgatgtaaaggctgtgcagccaaaatttgcaattcttcccccagcttttaaaattgtagtaaaatatatataacataaaa

SEQ ID NO: 804748 - DNA, 120 bp, Artificial Sequence
  ENSG00000230523_0 (sequence is synthesized)
gggacgtcccggaagcgactggctctttttttctggtcgctgcagagtgagggtgtgacgggccagcaaggacagcaacagtcgaggagaaaggagagaatgccagagagatggagccca

SEQ ID NO: 804749 - DNA, 120 bp, Artificial Sequence
  ENSG00000230523_1 (sequence is synthesized)
aacctgaacccaggatcaaagggcaactgagtagcactcgctctggagttctcggtcggctgcgccgctgacttgccaaatttgcctaagcccgtttgttggtgtttgcaggtcctaact

SEQ ID NO: 804750 - DNA, 120 bp, Artificial Sequence
  ENSG00000230523_2 (sequence is synthesized)
gatgcggtgccatttttcaagtacagaattggataagcgttggagacagggagcagccagcaggtgcaagcacttctgtggatccagtccctttccttctgattctgtctccgtgtacac

SEQ ID NO: 804751 - DNA, 120 bp, Artificial Sequence
  ENSG00000230523_3 (sequence is synthesized)
ttcgtatcacaaatcagggtcttgccctggaaaacatctcccgacccctcttgctggcctggcacctgcacataagtgctccagtgcatgcaagattcatcccacaccacagtccttgcg

SEQ ID NO: 804752 - DNA, 120 bp, Artificial Sequence
  ENSG00000230523_4 (sequence is synthesized)
ggcatcattactggtgtaatcatggtcaggtgcaggagtcacctgagttcccaagacacttgctccagttggcattgcaccaaaatccattacaggcgttctcagctcctgcgctcccgc

SEQ ID NO: 804753 - DNA, 120 bp, Artificial Sequence
  ENSG00000230523_5 (sequence is synthesized)
tgactcaggccaccctcacggtgagaatgcagcagactaggatgatcaggcagtgtttcaagccggccctggacctggagaggctgttgatggtgaggcacagtggagatgagcccagct

SEQ ID NO: 804754 - DNA, 120 bp, Artificial Sequence
  ENSG00000230523_6 (sequence is synthesized)
agggcagggttgggagagcagcctggctgagggttgagagcagcctcaagcagctggtgtggtgcaggcatagactggctgttgtttgcatgagcaccggctttggagtcagtcccaagt

SEQ ID NO: 804755 - DNA, 120 bp, Artificial Sequence
  ENSG00000230523_7 (sequence is synthesized)
tctagtccagagactgaatcttttctagctgtgacattgagagctctgccctcatttctctgagcttcagctttcttgcctgctaaatgggcttggtgatacccacctctcaggatgctg

SEQ ID NO: 804756 - DNA, 120 bp, Artificial Sequence
  ENSG00000230523_8 (sequence is synthesized)
aagccaccagcctcagacacccgatgcttaggccaatggcctggaccccactgagcaatgtcagccccattgtctgagggatgttgaacctgatgctgtcctacttagaatgagctccta

SEQ ID NO: 804757 - DNA, 120 bp, Artificial Sequence
  ENSG00000230523_9 (sequence is synthesized)
gaaagcacctagctctgcctcctcatggacaaatcaggagactgagccccagatgtttgctcaatgccacacagcatggtggtagctgagccagcattggaacccagcctcatgacttca

SEQ ID NO: 804758 - DNA, 120 bp, Artificial Sequence
  ENSG00000230523_10 (sequence is synthesized)
agccatgtggtcatccaaggactaaaaattatgtgcttaagagtataggctttggagccagacagacctgagctccagtcccagctctgcaactttcattcattcaacaaatactcgttg

SEQ ID NO: 804759 - DNA, 120 bp, Artificial Sequence
  ENSG00000230523_11 (sequence is synthesized)
agttcttgtcatgtgccaggcaccatgcccagtgcaacagacacaggaggacaagacctacatggccctggcctctcgctgctcagtctggtgagaagaaatacccagtgaatgaacaag

SEQ ID NO: 804760 - DNA, 120 bp, Artificial Sequence
  ENSG00000230523_12 (sequence is synthesized)
ctcatcacccactgtgagaaagcagcaaggcacagacacaggatgggccctgaaagacacagggacagtgggtgctggagggccactcagggcattcagggagggcatctcaggaagggg

SEQ ID NO: 804761 - DNA, 120 bp, Artificial Sequence
  ENSG00000230523_13 (sequence is synthesized)
acatctgatctgggaactggacaccaggcaagagccaggtatgcaggaccggagaagggtgtccatgcaaagagctcagaatgatgggggaagaagagcctggagtgcgcaggagcgtgc

SEQ ID NO: 804762 - DNA, 120 bp, Artificial Sequence
  ENSG00000230523_14 (sequence is synthesized)
aggagggacgtggacagacagggtagagccaggacaggtgggcctcagaggtcatggtcaggagcacagtgctcatgcacacagcagcaggaggcactggagggtttgagcaggtgagtg

SEQ ID NO: 804763 - DNA, 120 bp, Artificial Sequence
  ENSG00000230523_15 (sequence is synthesized)
atgggatctggcctgttttttcaaacgatcacactggttgctgttgtttgtgtgaccttgttggctctctgacctggggcaagttgcttaagctctctaagcctcagtctcctcatctgt

SEQ ID NO: 804764 - DNA, 120 bp, Artificial Sequence
  ENSG00000230523_16 (sequence is synthesized)
aaaatggcgatgatcatagtacctacctcacaggtggaactggagactgacatatgacagtctacagagagcactgagcaatgtgcatttcagtgccgaataaagctttgctttcttaca

SEQ ID NO: 804765 - DNA, 120 bp, Artificial Sequence
  ENSG00000278907_0 (sequence is synthesized)
aggtggacaccagcttgaaggggacgtggggcgtcagggagcaggtaacctgcccgttggcatctgcgtctaggtcgatcacactaatcagggcaataactgtccccagttgtgcgtcct

SEQ ID NO: 804766 - DNA, 120 bp, Artificial Sequence
  ENSG00000278907_1 (sequence is synthesized)
cttttacaggaaccgagagcgttttgatagtcaactgtggagcattgtcatttacatccacaacttccacaagaagtgtacaatgaccagccaggggtgggaagcctttatcgacagcct

SEQ ID NO: 804767 - DNA, 120 bp, Artificial Sequence
  ENSG00000278907_2 (sequence is synthesized)
actggagaaggagtaaataatatccccattcaagccttcgtctaaatctgaggcattggggtgaatcaccagcgttccgatagaaacgttttctggtaatttcaccgtatacagggttct

SEQ ID NO: 804768 - DNA, 120 bp, Artificial Sequence
  ENSG00000278907_3 (sequence is synthesized)
gtcgaacactggggcattgtcattgttgtccagtaccgtgatgagtaattgaacggtgccagtcagctcgggtttgcctccatcggtggccgtgagcaataaatgaagctccggagtttc

SEQ ID NO: 804769 - DNA, 120 bp, Artificial Sequence
  ENSG00000278903_0 (sequence is synthesized)
gtctctcgctggtgctggcacaggagcttgggatctgtctcctctttcgcctcctgcaccttgagagccctgggctactctgtcacagcccctgttgccctgcgatctgtaggtccttgg

SEQ ID NO: 804770 - DNA, 120 bp, Artificial Sequence
  ENSG00000278903_1 (sequence is synthesized)
ggacgcatagttaaggtgccaggacatcctggaagctgggaaatgatttcttccagaccatggctggagaaggaaagaaggtgtgttttgcctgattcagggactatagagagaaccaag

SEQ ID NO: 804771 - DNA, 120 bp, Artificial Sequence
  ENSG00000278903_2 (sequence is synthesized)
tggctaagtggtgagccttggtgagacgcagaaaggatccatcccaggcacttggctagagggcaagaaagctttctaagaccccgaactccagatatgcgatggggcaaatcctgaagc

SEQ ID NO: 804772 - DNA, 120 bp, Artificial Sequence
  ENSG00000278903_3 (sequence is synthesized)
gtacatggctatctctcacagctaaagcatccctcacccctatccagcgcttcttacccctggcgcaagagaatcacctgcggggaggaaaactttcaaaatcccttaaacccaagttgt

SEQ ID NO: 804773 - DNA, 120 bp, Artificial Sequence
  ENSG00000278903_4 (sequence is synthesized)
aaccgcacaactaaatcagaatccttggagctggatctgaaaaaaatatggttgaaagtcgtgcaggtgattacaatgtgtaggcaagccagaaaaccatggctttaacgagcagctttt

SEQ ID NO: 804774 - DNA, 120 bp, Artificial Sequence
  ENSG00000278903_5 (sequence is synthesized)
catttcgtaccaccgtagtggaagagagactatccctatcaatacacctggtaacattcccaacagtaagtcgtgagattctgcttgaaatcacctctcagacaaataaaaaacagtcct

SEQ ID NO: 804775 - DNA, 120 bp, Artificial Sequence
  ENSG00000278903_6 (sequence is synthesized)
gggaaatgtacgacactcattctgctaaagaaataggcatcatagctggggaacagggattcaaaagacccaggctgttccctacatatgtttcctcctcagacatcagttaatcagtca

SEQ ID NO: 804776 - DNA, 120 bp, Artificial Sequence
  ENSG00000278903_7 (sequence is synthesized)
atcaagtcaagtgagagtggaggccatgtattccctcttattcttgggcactctcctccaaggaggaaaaggccaggaggtcctgttagaggatgcactctgagagcccgggctccctaa

SEQ ID NO: 804777 - DNA, 120 bp, Artificial Sequence
  ENSG00000278903_8 (sequence is synthesized)
ggtatgagagttctaaccagcaggtgtagacttttcaggagtgaggaatgaggcaggcattccaaacctggagcttcatcaccttttgtttcatctcaagacaattctgaggggctgttt

SEQ ID NO: 804778 - DNA, 120 bp, Artificial Sequence
  ENSG00000278903_9 (sequence is synthesized)
tggagcgtgtctggaaggtgaacgttgaagaagagtgtgggctttgatgtgactcagatgagatctttcatggggaggcaggaattcaatgcccagaatctgggctggtgtctttgaggt

SEQ ID NO: 804779 - DNA, 120 bp, Artificial Sequence
  ENSG00000278903_10 (sequence is synthesized)
cagtaggttgcctctttgtatccaagtccattgttactaaattggaggctggagattctaaatggcttccagaccatctctctgattctctttgggagattgggtctgaaaaagacaatg

SEQ ID NO: 804780 - DNA, 120 bp, Artificial Sequence
  ENSG00000278903_11 (sequence is synthesized)
tcagtatttttgggaaattctagaaagtctgcttggaaacctgggaagacctcttgcctagtgcctaaatattcaatgtgcagctctagccatgtagatgcttggtaggtatagagctgg

SEQ ID NO: 804781 - DNA, 120 bp, Artificial Sequence
  ENSG00000278903_12 (sequence is synthesized)
tctagcctgatgactcttggcaatgagtgttgggtcctggctaaagtgccttgaatgcagcatgaggccaatccatgaatccaacttccaatggagaaatgttaatattttttcagtttg

SEQ ID NO: 804782 - DNA, 120 bp, Artificial Sequence
  ENSG00000278903_13 (sequence is synthesized)
aatcaatcagggtgaaattaccttgctattggtttgcttactttttattatttcatataaaatctaagacaaaatacattaaatgcttattgatatatgtatttattcttcacctggctc

SEQ ID NO: 804783 - DNA, 120 bp, Artificial Sequence
  ENSG00000278903_14 (sequence is synthesized)
ataatatttgcctaattttaaactttcttctattttgtaggtttcaacttatttcattgtaagatattgttaaatctaatacgggcattgtcacttttacaaataattttattttatttc

SEQ ID NO: 804784 - DNA, 120 bp, Artificial Sequence
  ENSG00000278903_15 (sequence is synthesized)
atgtatttcctattcactttttacatttaaattatggaccatttcatcatataaaaagctccatttctattttaaaaataagtctttgggtttttttgtcttgtaatttccatattacat

SEQ ID NO: 804785 - DNA, 120 bp, Artificial Sequence
  ENSG00000278903_16 (sequence is synthesized)
agtaatgagataaacgttaatgttttcagggtattttaaattttaaataattactcattatatccacgtgaaatttgtttttactgcatgtgtgagttggagaaccgttttcacttctga

SEQ ID NO: 804786 - DNA, 120 bp, Artificial Sequence
  ENSG00000278903_17 (sequence is synthesized)
ctcatctttactgtgatctcctcagaactcatacctcttgtagttgggagattgcagtatataattccaataaatggggcaaattcaataataacataatacaaatgagtttgaaagcag

SEQ ID NO: 804787 - DNA, 120 bp, Artificial Sequence
  ENSG00000278903_18 (sequence is synthesized)
gacatgtcttcaaagcatacacaacatgggcctatatatgtacaacaataataatttataagttacagtttggatgggaattaaaagtacagaaaatttgttaaaataaattaaaatgga

SEQ ID NO: 804788 - DNA, 120 bp, Artificial Sequence
  ENSG00000278903_19 (sequence is synthesized)
gatcacgtctcaataatctctgagcagacgaaattagttaggtctcataagtgatctcaaccttgcttgatttgcaaatacaagcaaaacttaaatatttcttgtagctgcctatttaaa

SEQ ID NO: 804789 - DNA, 120 bp, Artificial Sequence
  ENSG00000278903_20 (sequence is synthesized)
aaagagaaatgaagctcaaccaatcaggagtagccaacatccttatataaatagaaactgtccaacaagataaacagacgaacaaaaaacaataaaaaagttgtgctaccaccaatcaaa

SEQ ID NO: 804790 - DNA, 120 bp, Artificial Sequence
  ENSG00000278903_21 (sequence is synthesized)
aaactctgaactggattccaaggctttcatgaatgcacttatgtttgctgtggcagctgcattatgtcgtgggggatgtggatgcagaacctcccattctgtcgtcttgcttatgttact

SEQ ID NO: 804791 - DNA, 120 bp, Artificial Sequence
  ENSG00000278903_22 (sequence is synthesized)
aaaataaattgctcaaatttacacattatgtaagctgttaataaaatttcttgtaggtgctacatatttattaaaatttttggttgtaattttaagctcactgtaggcagaaaggaatca

SEQ ID NO: 804792 - DNA, 120 bp, Artificial Sequence
  ENSG00000278903_23 (sequence is synthesized)
aggaatcattaagatttctattcttttttagtctgtatctaaatgaccatatattttaattccaaatatttactttatacttcagtaatgctcattgtattttgcaaaatttatattgtt

SEQ ID NO: 804793 - DNA, 120 bp, Artificial Sequence
  ENSG00000278903_24 (sequence is synthesized)
tgaaaatataaggctttttttagctcctgaaatctatattatagtcatatagttttattatagtatttgataagaagagcagcaacatattgagaacagaataaaattctgctgtctttt

SEQ ID NO: 804794 - DNA, 120 bp, Artificial Sequence
  ENSG00000278901_0 (sequence is synthesized)
tccctcaccttcacctccacatggaaaacctgcagaggcctgtccacgatcacctccaggtggatgctgcactccgcgctccgcccacacagctcctcgcggtcgatccgagaattcaca

SEQ ID NO: 804795 - DNA, 120 bp, Artificial Sequence
  ENSG00000278901_1 (sequence is synthesized)
gccattctgcagatttacctccagaaggtccccgtgtcttttggacgccacccggaacaggcgcggcaccagctccgccagctccagccccaggtcctgagcgatgcggcccacgaaggt

SEQ ID NO: 804796 - DNA, 120 bp, Artificial Sequence
  ENSG00000278901_2 (sequence is synthesized)
tgcttcctcggggacggagtagtggagctggccactacccgtctcccaggctgcgaggatcagaagccagagcagtagttgccgcggtcttgggcctccttgccaggaagacagcatggt

SEQ ID NO: 804797 - DNA, 120 bp, Artificial Sequence
  ENSG00000278901_3 (sequence is synthesized)
acactccaaaaacctcagagctatctgcaatatatacaacgccttacctcaaactgtctctcaaggcccaatttttatggcttcctagtgcggaaggattcgcaagaggtattccgcttt

SEQ ID NO: 804798 - DNA, 120 bp, Artificial Sequence
  ENSG00000278901_4 (sequence is synthesized)
ctgctatattttctgcaggaagaaagaaacggcggctttcttcgcggaaacgttctcagtgaagagcgacaccatgcgcatgaacgtgtaagtgttcatcagtcatataaaatattatag

SEQ ID NO: 804799 - DNA, 120 bp, Artificial Sequence
  ENSG00000272426_0 (sequence is synthesized)
aagtgattacttaacctgtgtcctgcggaggacccttctggcgggcagctggaagcctgtgcacccgtcttcaaataatggcttttaatagcagactggaacgtttcggattacaaagca

SEQ ID NO: 804800 - DNA, 120 bp, Artificial Sequence
  ENSG00000272426_1 (sequence is synthesized)
aaatcatgtctatgaaactagagaagctgctcagataactgcaaaccagccatccttactggttttacgagtagtagtgttataaagaaagttgtccagttttatgagtcttgtaggttt

SEQ ID NO: 804801 - DNA, 120 bp, Artificial Sequence
  ENSG00000272426_2 (sequence is synthesized)
gtttttttgtttttcaaatacagtagtgtacaaaaaggaagcagaatgtggttgctgtctcaatgtaatgcctcgctgggcctgagaatttgaaaataaaaaagttctcttctttcccca

SEQ ID NO: 804802 - DNA, 120 bp, Artificial Sequence
  ENSG00000272428_0 (sequence is synthesized)
tgtttattaactacaaaccgtgaggtacttgccaactctgaccataaaatgttctattctgaggctgtctctctgtttctgaggagaataagaagtcaaatgtcttgaaaataaccaatc

SEQ ID NO: 804803 - DNA, 120 bp, Artificial Sequence
  ENSG00000272428_1 (sequence is synthesized)
ctcctcggattttgtttttttaattaaaacaagctaaagtgaaataaataaaacaaaatgatctgtaatggtggaggcaagtggaatgaaagtacattttccattcaaaacaatgtacac

SEQ ID NO: 804804 - DNA, 120 bp, Artificial Sequence
  ENSG00000272428_2 (sequence is synthesized)
atgaatgtttaaattcatcagcctttcactgtgtaataatgtgacatgtttacagtgttgaaggaaatcaggtgttttcatgctaaatgaaaataaaatttatgtactgttattaccata

SEQ ID NO: 804805 - DNA, 74 bp, Artificial Sequence
  ENSG00000227012_0 (sequence is synthesized)
ccggagacggggacatttgagctgagatgcaaaagatggtagacacacaaagagcagagaaggagagcagggga

SEQ ID NO: 804806 - DNA, 120 bp, Artificial Sequence
  ENSG00000227012_1 (sequence is synthesized)
caggtgatttctgcatttccatctgaggatcctacaggacattcaatcatcacgtctccttaggcccctctcaactgtggcagtttctcagacttcgttgtttttgctctttctctttca

SEQ ID NO: 804807 - DNA, 120 bp, Artificial Sequence
  ENSG00000227012_2 (sequence is synthesized)
gttgtttttgctctttctctttcacgtggggagagtgtggaacggctcagtttctccagcaaggaatcctcctgtcctgtctaaaaggcaacctgcatcctaggagcaaagagagggaaa

SEQ ID NO: 804808 - DNA, 120 bp, Artificial Sequence
  ENSG00000227012_3 (sequence is synthesized)
agcactgaggagtacggccatgccataggcagatttgcaattaattctctcgcttgcagccctatgactaattctgggccaggccgtgcatattgtctccaaatcctgaggctcttgcct

SEQ ID NO: 804809 - DNA, 120 bp, Artificial Sequence
  ENSG00000227012_4 (sequence is synthesized)
gggggtgattacacagctgctagggttctatgcctgagccgtaagtgaggtacacagactgtttcccatgttaacatattcttcagtttattcccacactctctgctgtactggattcct

SEQ ID NO: 804810 - DNA, 120 bp, Artificial Sequence
  ENSG00000227012_5 (sequence is synthesized)
cagtttcggagcttctccaggagtctacaggactaacttattgtctccttgttagtaccaacttcttgcttgtcctttaagatatgatatcctcaatctggttatatcagacacctttcc

SEQ ID NO: 804811 - DNA, 120 bp, Artificial Sequence
  ENSG00000227012_6 (sequence is synthesized)
tacattcctttcctgtcttttgaaatatgattgaaatatttcatcaattaatgtcttctctcctattctctttgtacttgcaagcttaagcctcttttatcttttcaaatattttagcag

SEQ ID NO: 804812 - DNA, 120 bp, Artificial Sequence
  ENSG00000227012_7 (sequence is synthesized)
gctctctgaaaggagaggctataaacttctatgtctattcttctatctttaaattcaacaagaggcagaacactttcatggttaagttaggcctgcatttaaatcctgcctctgtcacat

SEQ ID NO: 804813 - DNA, 120 bp, Artificial Sequence
  ENSG00000227012_8 (sequence is synthesized)
acttttctaagacttagaaatttgctaacctctggaaaccttgacctcctttctgtaaaatgagaacctacctcattgggttgttgtgaggatcaaataaaatatgtatggttggcacgt

SEQ ID NO: 804814 - DNA, 120 bp, Artificial Sequence
  ENSG00000248254_0 (sequence is synthesized)
tgccatagaaagagaaatctacatttcagtttttataaagcagagtggagtaaagcagcaagctgagctactggagcactgggggctctcacacacctgggagacctcttcctccacagg

SEQ ID NO: 804815 - DNA, 120 bp, Artificial Sequence
  ENSG00000248254_1 (sequence is synthesized)
tgaagctggtttcattcgactaaagagagggagtctgctcacaaaggcgtttggaactccagaagatggctctttcccactgttaagcgatggagaacttgatcttcggacagaccatct

SEQ ID NO: 804816 - DNA, 120 bp, Artificial Sequence
  ENSG00000248254_2 (sequence is synthesized)
tggaaaagacttttaatctcttccaaagacttaatgggcaacccccccagtgaagggtgtctgatctatgaaagacaatttagaaagattctacaagtttgttactttgaattttctttt

SEQ ID NO: 804817 - DNA, 120 bp, Artificial Sequence
  ENSG00000248254_3 (sequence is synthesized)
aaatggaccagtaagcaaagtagcttcatcaagaagagttatcaatatcataatgtggatttgaatttctattttcatagaactttttcttatttgtaccctggtttctcttaaatctta

SEQ ID NO: 804818 - DNA, 120 bp, Artificial Sequence
  ENSG00000248254_4 (sequence is synthesized)
acttttatcagtgactaaactgagaaattcacattaatcatggaaggccaattaattggatggaaaaattttctcattcagaaatgctcaataaatgaaaaagttttcccctaaaaataa

SEQ ID NO: 804819 - DNA, 120 bp, Artificial Sequence
  ENSG00000248256_0 (sequence is synthesized)
gggctgtaaatactactataagaagaaaatactactacattttacagactgaaagtttttcagggacaagaaccaagtgttattcatcttcttccacgtctagcagagtccttgacacct

SEQ ID NO: 804820 - DNA, 120 bp, Artificial Sequence
  ENSG00000248256_1 (sequence is synthesized)
aatgaagaaacaaatgaacaaacatgctgagtttaggttgatgattgatggtagaacacacaggtgatatccagcagaaaaggtcatcaaataaagtttatacatacgttggaccataaa

SEQ ID NO: 804821 - DNA, 120 bp, Artificial Sequence
  ENSG00000249128_0 (sequence is synthesized)
catgcttattgatttggaaatagatattgtgaaggtttttcttttggcctaggcgtgactgtgaaaaatatactgaatcactaagggcactaagtttctgaaagtgagaaagtttgaaac

SEQ ID NO: 804822 - DNA, 120 bp, Artificial Sequence
  ENSG00000249128_1 (sequence is synthesized)
catctgcctcagaggtttacagaaaagaaaatatctaagagatttcagcctagatatgctggagtgttgtgatacgaggatggacgttcacatggagtaagtcagtcactgtactggaca

SEQ ID NO: 804823 - DNA, 120 bp, Artificial Sequence
  ENSG00000249128_2 (sequence is synthesized)
cattgtgggtgtggcgatgcttagcaggtactctgacatcatatcttctgccatgtggaagaattctgtgtataaacggactcaaaaataactacaattattgtaatacctgaattattt

SEQ ID NO: 804824 - DNA, 120 bp, Artificial Sequence
  ENSG00000249128_3 (sequence is synthesized)
agtgctcaaagaatttcaagagagacaaagaaagaggcagaaagaaccatggcatacctgagttgaaaggacctgggacatctaaaaaacaatgaaggaatgaaaataaacctgctacac

SEQ ID NO: 804825 - DNA, 120 bp, Artificial Sequence
  ENSG00000249125_0 (sequence is synthesized)
cgcgcccggtcgagttttcttctttaatctggtgttgatcctgagagtgctttgttaaaaaacattctccatgctgacctccgttttcgagtccgcttcctggggaaacctgaaacagga

SEQ ID NO: 804826 - DNA, 120 bp, Artificial Sequence
  ENSG00000249125_1 (sequence is synthesized)
cttgatgctagcagctgcccagaagaaccagatgggccactgtccttgccagaagatctgatatcctgtgtatggccaccacctaacactgctcacttctacatgtaaacctcaggatgg

SEQ ID NO: 804827 - DNA, 120 bp, Artificial Sequence
  ENSG00000249125_2 (sequence is synthesized)
ttctacatgtaaacctcaggatggtagagtgcagccccaagtctgtatgctaccacttattccagcagtccctaatctttttggcaccagtgactggttttgtggaagacaatttttcca

SEQ ID NO: 804828 - DNA, 89 bp, Artificial Sequence
  ENSG00000249125_3 (sequence is synthesized)
tttccaatacaattcaccataatgtagaatcagtgggacccctgagcttgttttcctgcaaccagatgggaccatctgggagtgatggg

SEQ ID NO: 804829 - DNA, 79 bp, Artificial Sequence
  ENSG00000249125_4 (sequence is synthesized)
caattcaccataatgtagaatcagtgggacccctgagcttgttttcctgcaaccagatgggattagattctcaggagct

SEQ ID NO: 804830 - DNA, 120 bp, Artificial Sequence
  ENSG00000249125_5 (sequence is synthesized)
ctgctgtgtggcccagttcctagcaggccacggaccagtaccagtatgtggcctgggggttgggaacccctgagttattcagttccactagaaagcaagaatggctttattctaataatt

SEQ ID NO: 804831 - DNA, 120 bp, Artificial Sequence
  ENSG00000249125_6 (sequence is synthesized)
tcagcaaaagttcccggctatcatgagatcaacttggttcatatgcctgttcctgaaacttaccactatagactgaataggctgatggcagtcacatgtttactgctggaaataggaagg

SEQ ID NO: 804832 - DNA, 120 bp, Artificial Sequence
  ENSG00000249125_7 (sequence is synthesized)
actgcatgtgatgtgaagtgtacaaagccccagctgacaaggcagtgcaaccctggctattttctgggcaaggctggtgctctggtgctggacttcatttgcctgaaggaagcagtgcat

SEQ ID NO: 804833 - DNA, 120 bp, Artificial Sequence
  ENSG00000249125_8 (sequence is synthesized)
ttttctaacttgtgtgaagacattgtatggactagctgtggccctggagccatgtatgtggatggggtcggcctcactgaaccactgagactgtgagtgggagagggatagtcctctgaa

SEQ ID NO: 804834 - DNA, 120 bp, Artificial Sequence
  ENSG00000249125_9 (sequence is synthesized)
tgaaaattaggttcaccttctataagggagaatggatgcgcaagcagaactattggatatacattacagaaagtaatgccattactgtaattctgaatcttgccttgtagagcaactcga

SEQ ID NO: 804835 - DNA, 120 bp, Artificial Sequence
  ENSG00000249125_10 (sequence is synthesized)
ctctttaagtctactcaactcagctcaacgcaatccaacaattattttttataggccaaagtgtgtgtgtgtgtgtgtttgcacacacacctgtgtgctgggtagggaggtgttaccaaa

SEQ ID NO: 804836 - DNA, 120 bp, Artificial Sequence
  ENSG00000249125_11 (sequence is synthesized)
agaaaagacctaccttcaaaaagcataaagtattctgattttaagccacgccaactatgaaagtttttcttaaattcgactctgttataccaaataaattaaaaattatgcaaaattaaa

SEQ ID NO: 804837 - DNA, 120 bp, Artificial Sequence
  ENSG00000249125_12 (sequence is synthesized)
acatggtatcaagaaatttctggcatctgaaacaactctgagtctaggtttcagaaaaccaagtgaacaaatggaacaagcgccaattgtttaagatgaaatcactgataactgcagcca

SEQ ID NO: 804838 - DNA, 120 bp, Artificial Sequence
  ENSG00000249125_13 (sequence is synthesized)
tgttgattaattcaacctgatctaaaattatttaccctctcttttgtttagaaaccttagagtctgttccaacacatataatctatgttcttgatgttctaaattagaaaaatgatacaa

SEQ ID NO: 804839 - DNA, 120 bp, Artificial Sequence
  ENSG00000254693_0 (sequence is synthesized)
gcacaaagtcagctgagggtccccgaccaggtgcacccagcctgcgtgccccgagagatgctctccacccgatgttacggccagcgccgcggtcaggctgcactcggctggatgagagga

SEQ ID NO: 804840 - DNA, 120 bp, Artificial Sequence
  ENSG00000254693_1 (sequence is synthesized)
aatgggcaggcagctgcggagggatccgtactcaccagccccagcaggcagcggacctcgttgacggcgccgatgcagcccaggaagcccatgagcatagtgactgcccccacgccgatg

SEQ ID NO: 804841 - DNA, 120 bp, Artificial Sequence
  ENSG00000254693_2 (sequence is synthesized)
atcagtgggcacagcaggacctgaggtgcatgagggcagaagcttcactttattcctggggaacccccagctcgaacagcgcctctcgcagtgaggtgctgtgcacagtgaatatctgcg

SEQ ID NO: 804842 - DNA, 120 bp, Artificial Sequence
  ENSG00000254693_3 (sequence is synthesized)
gaattgacagacaagaggctggctggttctccaggggccactgacattaagattccaagctgatttttaacccgccttccttcttgtccatataataacaaacaccagcctttcttgccc

SEQ ID NO: 804843 - DNA, 120 bp, Artificial Sequence
  ENSG00000268996_0 (sequence is synthesized)
gtccggcagcgcctgcccaggtgtgctacgagcgtagctgtagcaacggggcgggccttggttcgcctggggcgtggtcgctgtctggggctcccacgtggttcgcctcatgggcctgga

SEQ ID NO: 804844 - DNA, 120 bp, Artificial Sequence
  ENSG00000268996_1 (sequence is synthesized)
gctgggcttctctcgcctcctgtcgtctggctgcaccgactttgcccacgccctcacgggagacgcagacactagggacccggggaggcgcccgggcggggccgccatgttggcagagag

SEQ ID NO: 804845 - DNA, 120 bp, Artificial Sequence
  ENSG00000268996_2 (sequence is synthesized)
tcccagcgtcccgcgcctcggttccggaacccgcggcgcggggatggagctgggctgcccttgggcgccgtcctgggctggtgcccaccctggccgcgtggtcaccggcaagaagcccag

SEQ ID NO: 804846 - DNA, 120 bp, Artificial Sequence
  ENSG00000268996_3 (sequence is synthesized)
ggcctcacccaggcgtgggggccgggggaaggaccggaccctcccgaagtcgcggaccaggccgggcggcacccgggctggggtggctgctaccccgagctaagctggctgcgccgcatc

SEQ ID NO: 804847 - DNA, 120 bp, Artificial Sequence
  ENSG00000268996_4 (sequence is synthesized)
tcacggtccccggggcccgagcgctgcgcctggaccggcgccgagcgaggcggccaatcggccggctggacccacagtccccgcgccataggcgggtcggggctttcagacccggctccc

SEQ ID NO: 804848 - DNA, 120 bp, Artificial Sequence
  ENSG00000268996_5 (sequence is synthesized)
agccctcgaactcggtaaccttggaggtcagcttgagatgactgcgcttcctgcacgcgttgtcctccccagaaacgcccaaaatggcaaagcggcgtccgtggccgcccgaggccctcc

SEQ ID NO: 804849 - DNA, 120 bp, Artificial Sequence
  ENSG00000268996_6 (sequence is synthesized)
ctgcctgggttctccccagccgaacctcacgcccggcccctccttcattctctcctggccaggctgctcctgcccttgggcgaatccgctgcgtcccacggtcctgactgtggcatttct

SEQ ID NO: 804850 - DNA, 120 bp, Artificial Sequence
  ENSG00000268996_7 (sequence is synthesized)
ctcctgctcttctaggggtcatctttaggtttctgctggtctctgccccctgtgacacttgctggtacccaaatgaagtcgtttatgtcacactctaacaagaggccctgaagaagccct

SEQ ID NO: 804851 - DNA, 120 bp, Artificial Sequence
  ENSG00000268996_8 (sequence is synthesized)
cacaaaaacattagcaacggagcgcctgcggcaaacccttctaacctttggtctttatggtttcaaagcagtttatgggaacttctcttttttaaaagattccccttggggccaggcgcg

SEQ ID NO: 804852 - DNA, 70 bp, Artificial Sequence
  ENSG00000268996_9 (sequence is synthesized)
gacacccgtctctacaaaaaacacaaaaaaattagcagggcatggttggtggcaggcacctgtagtccca

SEQ ID NO: 804853 - DNA, 80 bp, Artificial Sequence
  ENSG00000268996_10 (sequence is synthesized)
aacatggtgagacacccgtctctacaaaaaacacaaaaaaattagcagggcatggtaggcaggagaattccttgaaccca

SEQ ID NO: 804854 - DNA, 82 bp, Artificial Sequence
  ENSG00000268996_11 (sequence is synthesized)
aaaaaaaaaaaaaaaaaagaaatttcccgtgggcggggcacagtgactcatgcctgtaccctgagctcaggagtccaacctg

SEQ ID NO: 804855 - DNA, 120 bp, Artificial Sequence
  ENSG00000268996_12 (sequence is synthesized)
gaggccaaggtgggcagatcccctgagctcaggagtccaacctgggcaacatggtgaaacccctgtctctacaaaaaataaaaaaatgagtccagtgtggtggtgtgcacctgtggtccc

SEQ ID NO: 804856 - DNA, 120 bp, Artificial Sequence
  ENSG00000268996_13 (sequence is synthesized)
aaaattccccctttcctcaatccccaccccacccccccaccacatgcctgtgacccactgaggcttgcatactctgcattgcaattatgtgttattcttgattaaattcatttattctgg

SEQ ID NO: 804857 - DNA, 120 bp, Artificial Sequence
  ENSG00000241336_0 (sequence is synthesized)
atccaaggagagtgtgggcagctggagccagttagcactgcctctaaggtctcctgcaactcacccacccacccctcttactccatggtattcaacttctaaactaagaggaaagcccga

SEQ ID NO: 804858 - DNA, 120 bp, Artificial Sequence
  ENSG00000241336_1 (sequence is synthesized)
gctagaggtcctatgcatcaatcagggaagagatattgagaagaataaacagagaaactgagttcaagcttaactcccaaccccttgagtgtgggctagacttagtgacctgcttctaag

SEQ ID NO: 804859 - DNA, 120 bp, Artificial Sequence
  ENSG00000241336_2 (sequence is synthesized)
cactggtaataactcttgttgatatcatgtgcccccaatacagtatgatgaaaagacccatcatctcggtgatatttatcctcaaaatctataatcttacaacaattatgagaaaatata

SEQ ID NO: 804860 - DNA, 120 bp, Artificial Sequence
  ENSG00000241336_3 (sequence is synthesized)
gacaaacccaatttgaaaggaagcaagtctacaagatacttaaccagtactttacaaaagtgacaaggtcacaaaagacagcacaagactgagaaactcacagattggaggaagccaaag

SEQ ID NO: 804861 - DNA, 120 bp, Artificial Sequence
  ENSG00000241336_4 (sequence is synthesized)
agacatcatggctgagatcatggtggtggaaccctggtttggatcctggaacagaaaaaaagaacactaagtggaaaaactgatgaaatataaataacataataaaaatctataatttaa

SEQ ID NO: 804862 - DNA, 120 bp, Artificial Sequence
  ENSG00000241336_5 (sequence is synthesized)
acaggctgcccagtatcttagttcttctaagactgcttgcaaaccagaaagtgtgaacagtgtgatgacgaatgctcttaagaccaggagttcaagcttaactcccaaccccttgagtgt

SEQ ID NO: 804863 - DNA, 120 bp, Artificial Sequence
  ENSG00000241336_6 (sequence is synthesized)
aataaacagagaaactgtattttttctctcaactaaaacatccattttaatcaatatttggcaagaaaatatatacctgtttcatcttcactggttatttccataaactggaaagaagga

SEQ ID NO: 804864 - DNA, 120 bp, Artificial Sequence
  ENSG00000241336_7 (sequence is synthesized)
ctgtctaaatggtagttatgtcccatgagatgtttaagcaaaagggaaaattatacaaaaaagaatgccatattttgtctgcgccaccagaatgacaataaaaatttatcatgctagaaa

SEQ ID NO: 804865 - DNA, 120 bp, Artificial Sequence
  ENSG00000241336_8 (sequence is synthesized)
agcatccaaggagagtgtgggcagctggagccaggtcctcctcctcctccttctcctcttcttcctccttcgtttcttcctttcctcctccacctgcctattgcagagcagcagaaagca

SEQ ID NO: 804866 - DNA, 120 bp, Artificial Sequence
  ENSG00000241336_9 (sequence is synthesized)
aaggagctagaaaagggtgaaatcaattctttttctgtaacctttttgctttgcttttattaagttcttaaggcttttggtcttgagtcctagataagatgcaaataattctgaagggat

SEQ ID NO: 804867 - DNA, 120 bp, Artificial Sequence
  ENSG00000241336_10 (sequence is synthesized)
cataacttttaatattatcagtggatatttaagaaaaaaataaaaccataagatagactgatagatagtagagaataaaaagaagattcaggagaggccatggggaggcaaaggaagaga

SEQ ID NO: 804868 - DNA, 120 bp, Artificial Sequence
  ENSG00000241336_11 (sequence is synthesized)
agggtgggggagggagggagagagagagtgagagagggagaaagagtggaaattctagaaagaaattgcctcttcttctgttcaactacttcactgttttgtcaaaagttagcactgcct

SEQ ID NO: 804869 - DNA, 120 bp, Artificial Sequence
  ENSG00000266922_0 (sequence is synthesized)
aatgtgctaggaaaacccgttggcatgtatggattaactggcagaccatgtgtgcatgtgtgtttattccttataaatatttatctccatgtgattagatgttgctttttactgattaac

SEQ ID NO: 804870 - DNA, 120 bp, Artificial Sequence
  ENSG00000266922_1 (sequence is synthesized)
atcggtgttgagcattttttctgtatggcctttcatctactgtgaaataattttcagccattttctcattaattaattaattaatttttaagtcagggtcttgcactatcacccaggttg

SEQ ID NO: 804871 - DNA, 120 bp, Artificial Sequence
  ENSG00000266922_2 (sequence is synthesized)
tgggatcatggctcaccacagcctcagattcctgggctcaaacaatcctcctgccttcgtctcctatgtagctggaactacaggcatgcgccaccacatcttgctatttttttttttttt

SEQ ID NO: 804872 - DNA, 87 bp, Artificial Sequence
  ENSG00000223597_0 (sequence is synthesized)
aaaagaatgttgtggttcttggttcctgataggcccctcaaggctgaacctcctcacatgttggagctttaaagatacagctgtatc

SEQ ID NO: 804873 - DNA, 120 bp, Artificial Sequence
  ENSG00000223597_1 (sequence is synthesized)
gcgagactccatctaaaaaatacagctgtatcaaatctgcttgtgctttggccatctgagagatcttaagtgtgcaatgcaatgaggatggagcaacgtatacaccaatcaagagaaaga

SEQ ID NO: 804874 - DNA, 120 bp, Artificial Sequence
  ENSG00000223597_2 (sequence is synthesized)
acatgtccattaccccaaaaagttctcttacacccgcttccaggtgatgcccctggcaaccatgagtttggcttgtagcatcaagactttacctgttcttgaatttcaatatatggaacc

SEQ ID NO: 804875 - DNA, 120 bp, Artificial Sequence
  ENSG00000223597_3 (sequence is synthesized)
tgatcctgagcacacgtctccatggcggcaggagtcattgctttttagatcacgttctccgagcaagagccgagaaatcgatatctctcacaaggctgtagacgtgctggaactgattag

SEQ ID NO: 804876 - DNA, 120 bp, Artificial Sequence
  ENSG00000223597_4 (sequence is synthesized)
tcattaacctattgtcactcctcccagcgctcatggaaggagttgcagcatgtcaatggattttaaaagagtaccaggattaaacttctccatggcagtgggcatttgtgaaaggtctgt

SEQ ID NO: 804877 - DNA, 120 bp, Artificial Sequence
  ENSG00000223597_5 (sequence is synthesized)
tctgaaataccagtaccatcttctcacatgttaagggccaaaaatctcagtaagtcactccaaatcaggttttacagatgattttttgaaatattgattctggtattgtccctgaaaatt

SEQ ID NO: 804878 - DNA, 120 bp, Artificial Sequence
  ENSG00000223597_6 (sequence is synthesized)
taatttatcaaataagccaattaagaagcgtcttttaaaggcacgtagggaccattcagcactggatggacaagaaaatgaacatattaatcttacagtcagcaacgttttgttgatgct

SEQ ID NO: 804879 - DNA, 120 bp, Artificial Sequence
  ENSG00000223597_7 (sequence is synthesized)
ttggaaactgaactgcaaaggagtacttaaatgaactgaaagagttaatttgacttctaagagccataaactggcttgggttgggtggattctgtattcccagactctggttcaataaaa

SEQ ID NO: 804880 - DNA, 120 bp, Artificial Sequence
  ENSG00000180846_0 (sequence is synthesized)
gggaggccagggacctcactgggctgggcaggtgcaggccaccgccgtcccagtgccctcagaggcacctagactcatgtggacccggccgcagaccgttctgggcagctctgtccaggc

SEQ ID NO: 804881 - DNA, 120 bp, Artificial Sequence
  ENSG00000180846_1 (sequence is synthesized)
cggccctgccctctgacctggggccgcaggggctggccactgtgggctcggttccctgccaccccaattcatctgcaccccaaggaaagaaaatgaggggttgcagcgccccaggaccca

SEQ ID NO: 804882 - DNA, 120 bp, Artificial Sequence
  ENSG00000180846_2 (sequence is synthesized)
agagcccccgaacaccagggcagcacatacttccagtgccagggccacagcagagaggggcgcaggagctgccgcggccaggacaaaccaacctcaggctgacctaggccggtaatgggt

SEQ ID NO: 804883 - DNA, 120 bp, Artificial Sequence
  ENSG00000180846_3 (sequence is synthesized)
ttaacgcatcaggtgcaaaagagaaacaccccacaaatcagggagaggagggaagccgcccaccccatgggaggaagctgaggagtgaacgccagggatgggcagggccggtcctcggag

SEQ ID NO: 804884 - DNA, 120 bp, Artificial Sequence
  ENSG00000180846_4 (sequence is synthesized)
cactgcagacaccagaccaagggcgactgtcatcaccacgagaaggccccgtccatggcagaagccaacctcaccgcgccgactgcaccggagacgcccacgaggacagccggcctctga

SEQ ID NO: 804885 - DNA, 120 bp, Artificial Sequence
  ENSG00000180846_5 (sequence is synthesized)
tatgcaaacggaggcaaggctgccatggactccagagcctcagacgccatcaacaaaagcaaagtggacacatctgcatcaaatccatcacaaagacggccttccagactccgggggaaa

SEQ ID NO: 804886 - DNA, 120 bp, Artificial Sequence
  ENSG00000180846_6 (sequence is synthesized)
cggagtctcgctctgccacccagactggagtgccttttcccctcatcgtgtgggagccgccgggcgacatcccgccccggtttccctccactcgaaggcagtcacctcggttgccagctc

SEQ ID NO: 804887 - DNA, 120 bp, Artificial Sequence
  ENSG00000180846_7 (sequence is synthesized)
ctgcctctgtgatgatccccacgagggctgcagagtgaagggcacagcagggttcggcctaactccccggggagccctaggcgagagggcttggtcctggggagctgcccaggtcttcta

SEQ ID NO: 804888 - DNA, 120 bp, Artificial Sequence
  ENSG00000180846_8 (sequence is synthesized)
tatcccctggcctccatccagtcccgcacgactcagctcctggccctgtgcaccgggcgacgcctgctaggcgcatgaccctcagagtcaggcctgtactcacctcagcatctatcaagg

SEQ ID NO: 804889 - DNA, 120 bp, Artificial Sequence
  ENSG00000180846_9 (sequence is synthesized)
caggcctgtactcacctcagcatctatcaagggccttcaaggatcgggtttttttaatcatcgtcaaatatatcgttactaaaaagatacgtacactttgggaggccgaggtgggaagat

SEQ ID NO: 804890 - DNA, 120 bp, Artificial Sequence
  ENSG00000223598_0 (sequence is synthesized)
gctgcacacagggccatgcccaaccagcaggctctcagaggactcttgaggtggaaatgaaaacaggtactttgttaaccagtggaagcacaaagatgaacaaaccatactcctcccctc

SEQ ID NO: 804891 - DNA, 120 bp, Artificial Sequence
  ENSG00000223598_1 (sequence is synthesized)
aagacaactctttcgtgagggagataacccaggaaataggagtctattcatgagaccgctgctctaactagaagaataggaagtaccagaaggtcacaaaagaggagctgattagctcaa

SEQ ID NO: 804892 - DNA, 120 bp, Artificial Sequence
  ENSG00000223598_2 (sequence is synthesized)
cctgagaaagtctcccaaagcttcacagcggaaggaatgctgaagtggggatgaagaggtgttgatcagaaaaaaaagacagtctcactgtgtcacccaggttggagtacaatggcatgc

SEQ ID NO: 804893 - DNA, 120 bp, Artificial Sequence
  ENSG00000223598_3 (sequence is synthesized)
cagcctcaacttccctaactcaagtgattctcccacctcagcctgttagctgggattacagggttctgtcaaagcagatgactcccaaaggtttcataaatcttccggaaaataagctcc

SEQ ID NO: 804894 - DNA, 120 bp, Artificial Sequence
  ENSG00000223598_4 (sequence is synthesized)
ttcagctatataatcatggcacccacggcttaaaagttgacagtgagaacagcattgaacagcctgctgcattcagcaaaagatgggagaaaaatgagttcaatcagtagactcccatga

SEQ ID NO: 804895 - DNA, 120 bp, Artificial Sequence
  ENSG00000223598_5 (sequence is synthesized)
ccccttcaagtgacgcaatcatctcttccaagaagtgcagctacttatttgggataagcgacgacagacgagaaaccacaaagaatctgcagacgcgagactccctgacctgcagatata

SEQ ID NO: 804896 - DNA, 120 bp, Artificial Sequence
  ENSG00000223598_6 (sequence is synthesized)
cagccatctccaataagtctacatttaaactaaaacttctcctgttgagcaagcataatgtggaattatgttagcaagaccttatgcattcccacaaattttctcccaataaaaaaaact

SEQ ID NO: 804897 - DNA, 120 bp, Artificial Sequence
  ENSG00000235545_0 (sequence is synthesized)
aatcccggcgggaaccccggctgcggaaggcggctgcggccggcgggagccgaggggaagaatggagcgctgaggaagcgaggcgccagccccagccgcttcgctgccgcggagcctgca

SEQ ID NO: 804898 - DNA, 120 bp, Artificial Sequence
  ENSG00000235545_1 (sequence is synthesized)
cgaccgagaggtcgcggagagaagccagagacaggccagcgacctggcgagagagaagatctagctatgttacccaggctggatttgacctcctgggctcaagggatcctcctacctcag

SEQ ID NO: 804899 - DNA, 120 bp, Artificial Sequence
  ENSG00000235545_2 (sequence is synthesized)
ccccccacacagcagggactacagctgcacaccactacccagctcccttcttcatgtcttacctgtccttattatcacagtgaataatgcctaatctattagtgaataatgcctaatcta

SEQ ID NO: 804900 - DNA, 120 bp, Artificial Sequence
  ENSG00000235545_3 (sequence is synthesized)
ttaagagctatgtgaaaaacctaaactctttccatttgcaacccttttggtatggtcaagtcagtggatctggctatcatacaaactcaaatcaactactacaaattcagattggctaag

SEQ ID NO: 804901 - DNA, 120 bp, Artificial Sequence
  ENSG00000235545_4 (sequence is synthesized)
cagattccagccattttaaaagcttgtctctgctctatcctgtatctttctgcatttacatgtaacttcactgtgggtgtccttacagtatatatttttatgagacatcaaacttactaa

SEQ ID NO: 804902 - DNA, 120 bp, Artificial Sequence
  ENSG00000235545_5 (sequence is synthesized)
cttaggggtcagaattaagacattgttactatgtcaccttgagtattttgtttaacttcacaacccttcagtttcctgatcagttaaataattatgataatacaagacatagtagcatca

SEQ ID NO: 804903 - DNA, 120 bp, Artificial Sequence
  ENSG00000235545_6 (sequence is synthesized)
caggattattatggggcctaaatagataatgtatataaagtatttatcacagtgcctggtacagatgttagcttctgttactactctgattctagcctccctaattctcattcttttttg

SEQ ID NO: 804904 - DNA, 120 bp, Artificial Sequence
  ENSG00000235545_7 (sequence is synthesized)
ggggttgcaggggagttcactgtgctgtttgctatatttcaagcctcaaaagacaatgaagttcccaaatgctcttcaaggcagaacaaatataaataatgattctcacaccaaatgtgt

SEQ ID NO: 804905 - DNA, 120 bp, Artificial Sequence
  ENSG00000235545_8 (sequence is synthesized)
gcaaagttcaaatattgcattaatggtgctttttattgtgcaaatcatacgactaacccatcatgtcctttctgtgtcaggaagaacatggatgggaatagaaggatctttgaaatccta

SEQ ID NO: 804906 - DNA, 120 bp, Artificial Sequence
  ENSG00000235545_9 (sequence is synthesized)
ccctctgtgtaaatcagtatctgtgaatttttctcttgttagtactgatttatttactctttctggtgtatctgctctttcccttaaaacctttatgataaaaacatatttgaatgccca

SEQ ID NO: 804907 - DNA, 120 bp, Artificial Sequence
  ENSG00000234634_0 (sequence is synthesized)
gcactatggctcccccttctggttctgcaatgagtagttacattgttcctcagagtgctgaattttgagagcaaagcattacagaaatgtaaaaaaatcttgaaggccaggtgcggtgtc

SEQ ID NO: 804908 - DNA, 120 bp, Artificial Sequence
  ENSG00000234634_1 (sequence is synthesized)
gtaatcccagcactttgggaggctgagtgcttcctgccaatcccggcatgctcaacataaccagatggttgccactccactcagccacccccatttcacctagcagtgacatgtccctga

SEQ ID NO: 804909 - DNA, 120 bp, Artificial Sequence
  ENSG00000234634_2 (sequence is synthesized)
cctcctgagtagctgggactacagaaaacaagctcatattaccaagtgtgaaattacagcaagtcttacaggctgggaactggaaaagagcttccccatcatggtggattatacaaccag

SEQ ID NO: 804910 - DNA, 120 bp, Artificial Sequence
  ENSG00000234634_3 (sequence is synthesized)
ttatacaaccagtggtggagagtaactccaaaatatagcatctttctactcatcttactaaagctcaaagaaggtgatctacaagataatgaaaacaaggctcaaaataaaaacaagaaa

SEQ ID NO: 804911 - DNA, 120 bp, Artificial Sequence
  ENSG00000234636_0 (sequence is synthesized)
gcactggggccatggcggcgcaggaccgggcttggcgcaacggcacacgatgcggtcctcgagcctcccgggcgctcggtcaccgcgccgaaacgggagcgggcagagtcgccaccgcct

SEQ ID NO: 804912 - DNA, 120 bp, Artificial Sequence
  ENSG00000234636_1 (sequence is synthesized)
accgccgggccgcctcagaacaggaagccgtgcgccgaccgcggaagcccgcccccatgtagcgagaagtccgccgaccccagggacaggagcgaggggcggggggaggcggggatgggg

SEQ ID NO: 804913 - DNA, 120 bp, Artificial Sequence
  ENSG00000234636_2 (sequence is synthesized)
gggaagcagggcggccccgcagaggggaagctgcgcctccgcaaacgctcagaagcagcttcgccagacagccgcaacgtacatgttgactgcccgaggcggaagtcgatcggcagagcg

SEQ ID NO: 804914 - DNA, 120 bp, Artificial Sequence
  ENSG00000234636_3 (sequence is synthesized)
tctcgacttcactatgaatgccgcatctgttgaatgaatgcagtttctgctcttgcttttggatagaagtgattgcaaatcttatcaaaataatgaaaaaaattacttttcaattccttt

SEQ ID NO: 804915 - DNA, 120 bp, Artificial Sequence
  ENSG00000234636_4 (sequence is synthesized)
tcaacccttttgagtctgaggggcagctgtacattaaatgaaaccatatgtatcataatttcatttttccatcaaaagagctttaaaggaaattcccctttttctccatgttttcaatat

SEQ ID NO: 804916 - DNA, 120 bp, Artificial Sequence
  ENSG00000234636_5 (sequence is synthesized)
tttttgttccttttgttaaaatcagattaatctcatgaaacatctgaagcatttaagtcaatttaagagctgagaaaatatcatgctgctagttctgaaacgatctgaagtgtgaatcag

SEQ ID NO: 804917 - DNA, 120 bp, Artificial Sequence
  ENSG00000234636_6 (sequence is synthesized)
gtgatcaccaaataggggaacaactgaaaaatgtgaatgaaagaagtatgtacctatactatagtgtcaaatattgtactgtaagctttaaaatgataaattggaaactttccaaaagtg

SEQ ID NO: 804918 - DNA, 66 bp, Artificial Sequence
  ENSG00000234630_0 (sequence is synthesized)
ggaaaggccagtgcagagccaggaaagggtctgggtctgaacaaggcagagcagggccagggccat

SEQ ID NO: 804919 - DNA, 86 bp, Artificial Sequence
  ENSG00000234630_1 (sequence is synthesized)
ttgacaggaccaggttccaggccagggctagggcagcagcaggggcagggcctggataagggcagggcagtacagggccagatcca

SEQ ID NO: 804920 - DNA, 86 bp, Artificial Sequence
  ENSG00000234638_0 (sequence is synthesized)
gaggggaggactgatagtttgggagaccgaggcaggtggatcatgaggccaggagttccagaccaccctgaccaacatggtgaaac

SEQ ID NO: 804921 - DNA, 120 bp, Artificial Sequence
  ENSG00000228944_0 (sequence is synthesized)
tcctgctctactgccctgaggatgactgatgtacctccagcatcaagctcaaattctagtcaagaagaaagaagcagcagaagaagcccagccaacttgggattgtttcattcatcagat

SEQ ID NO: 804922 - DNA, 120 bp, Artificial Sequence
  ENSG00000228944_1 (sequence is synthesized)
ctaccattgtctctgctagctgcaaaaaagtctgggaaggaagaagcaaagaagtctaagttctttggagtaagatgctctcaaatgcctaggaacactgatctcctaacttgtcttcct

SEQ ID NO: 804923 - DNA, 120 bp, Artificial Sequence
  ENSG00000228944_2 (sequence is synthesized)
aatggtaagtacaaaatcaatgttagttcctgaccgctccccctctctgtgtattggtcaatcactgtctgatcatactgtactgaaattaattcttggaatgtctgtcttcccctagac

SEQ ID NO: 804924 - DNA, 120 bp, Artificial Sequence
  ENSG00000228944_3 (sequence is synthesized)
tataagcctctctgggcaagatccacgtcttactcatttttgtgtctgcagtttagttcctggttcattgtaggttctcaataaacgtttgttagaatgagttgatctcttggatccagt

SEQ ID NO: 804925 - DNA, 120 bp, Artificial Sequence
  ENSG00000261348_0 (sequence is synthesized)
gtaagaaaatgcctgcagccccttgcactcgcggagtcatctacgcaaggtcgggctctgcaggcagcagcttctggtctcaccccgggcttgtgcgcacacctggggacatgtgggaag

SEQ ID NO: 804926 - DNA, 120 bp, Artificial Sequence
  ENSG00000261348_1 (sequence is synthesized)
gtcgctcttgcggccactgagcggcctggcctcagggaacgagccccgcgccgggaagaaagctgcctgccgggagcgcagcctattggggacccgggacccgagccaccgcggctcacc

SEQ ID NO: 804927 - DNA, 120 bp, Artificial Sequence
  ENSG00000261348_2 (sequence is synthesized)
aagaggcggtggggccctgcggtgcgtgtgggacgccgggcaggcagactctgagcacggccaggaggcaagaagagattgaagggaaatctcaaggggctccagagactactacgatgg

SEQ ID NO: 804928 - DNA, 120 bp, Artificial Sequence
  ENSG00000261348_3 (sequence is synthesized)
tgcaaagtcacagaagccctgggaaaagcaggtagaatggagttgccatgacattgagcctcacctagatgccagttccagatattggcagactgctggcctcctgaggagcacaggaag

SEQ ID NO: 804929 - DNA, 120 bp, Artificial Sequence
  ENSG00000261348_4 (sequence is synthesized)
gggcctggcagactggtgatcctggttggagatgaagaggggctgattaagaggagctgactgaggctgggaggtttcctgcccgggagtggcgagcctgtcagagctgcacctgggcct

SEQ ID NO: 804930 - DNA, 120 bp, Artificial Sequence
  ENSG00000261348_5 (sequence is synthesized)
ggagagattcagggttcccttcaaattaagtcatctcttcttcaaggctcagtcatataaatttcaaaggacacgtggccatgctccataccagaaaggtttgaaggaggtttaacaacc

SEQ ID NO: 804931 - DNA, 120 bp, Artificial Sequence
  ENSG00000261348_6 (sequence is synthesized)
tcaagaaactcagacaatcatccagtgcctcgcccagcaggaaagtgctgaagcgggtggggtgactggtcaccaagcaaggctcatgcggatgggcatcgataaagacatcgataaaga

SEQ ID NO: 804932 - DNA, 120 bp, Artificial Sequence
  ENSG00000261348_7 (sequence is synthesized)
cgtggttaccatggcaaccatcacttctaacttcttatcaaaccacatcctgtgaacatgagggagcagagccgaagtgagagccagagaccctgcatccttccttattctactcttgct

SEQ ID NO: 804933 - DNA, 120 bp, Artificial Sequence
  ENSG00000261348_8 (sequence is synthesized)
accattccgcaccactaccgtgcctcagtttcccccaatttaaagtgagacaatacttctttacctttcatctgaccacggacacttgggaagccatgcctagaggaggcttcacccctc

SEQ ID NO: 804934 - DNA, 120 bp, Artificial Sequence
  ENSG00000261348_9 (sequence is synthesized)
agtgaaaagagacctcagggagaccttgttctccctgagccttgtacattcagattttctaggagttgaacaggtaagaggtacctgagtaagaggtataatattaataattctaccgcc

SEQ ID NO: 804935 - DNA, 120 bp, Artificial Sequence
  ENSG00000273464_0 (sequence is synthesized)
tcatttgacatgcctctcagcgttaggaaagagatattaaaatgcagcgaataaacagccaacaggacagctgttattgcaaaaagaaccctggggtcctccaggtacacattttatttg

SEQ ID NO: 804936 - DNA, 120 bp, Artificial Sequence
  ENSG00000273464_1 (sequence is synthesized)
ccttgaatttactagaaatggaaattaagaaacgagtccagtcattgatcattggcctgtcaactttgtggacactcacccaggtgaatgaaaaacatcttgataagaacaacaaagtca

SEQ ID NO: 804937 - DNA, 120 bp, Artificial Sequence
  ENSG00000273464_2 (sequence is synthesized)
acagcaccaaaggcggtgcttttaaagcagttgttcttgtgatggtctttaagcagctgagaccagtagccctgtcgtctaattgtcgcatactttgtaaataaaacgattgcattccca

SEQ ID NO: 804938 - DNA, 120 bp, Artificial Sequence
  ENSG00000261347_0 (sequence is synthesized)
ggaccggatgataggacaatagtcaataacaggagaccaagaagcaaagaccacctatgccacggaagaaacttgcaatgtatgaataaggaaagtggccattgcaggaattatccagcc

SEQ ID NO: 804939 - DNA, 120 bp, Artificial Sequence
  ENSG00000261347_1 (sequence is synthesized)
caggcgtcaaggtgtctaggaagacatgagacctacgtctgggcaggggctccggggccgcctttgaaactctctccaatgcacacacacccactgtgagcctctggacgcactcctgcc

SEQ ID NO: 804940 - DNA, 120 bp, Artificial Sequence
  ENSG00000261347_2 (sequence is synthesized)
gctccctgatggaagaaagacagttccagaacacgtgacggtgaggacaagaatttcaagccagggggaagacatgaaggaaggaccggacacctggaggtggaaatcgcagacaagggc

SEQ ID NO: 804941 - DNA, 120 bp, Artificial Sequence
  ENSG00000261347_3 (sequence is synthesized)
tgagctggagggggctttggggtgactggatcacagagggtagaaaggggtgaagcaagcctgggtcataagttggggctccttcaaagcagccacagacccagggggagaggctgtggg

SEQ ID NO: 804942 - DNA, 120 bp, Artificial Sequence
  ENSG00000261347_4 (sequence is synthesized)
cacagctaagcccctcgtttggttggtgaactctgaccctcctgaggcaatcctagtaatcatagcagcaatacgcattgcattttcggggtgggccaggccgggcactacccacattcc

SEQ ID NO: 804943 - DNA, 120 bp, Artificial Sequence
  ENSG00000261342_0 (sequence is synthesized)
cagcacatgtccatgttggggtaaagacgtggagtggtcgtctcgcccatccgatatagagtccagaggcgcagggctcattcccaaggtcccttggccgacggcggccgggtccggcct

SEQ ID NO: 804944 - DNA, 120 bp, Artificial Sequence
  ENSG00000261342_1 (sequence is synthesized)
agaccaggctcctgtgaggcagcccagcgactctgtctcctctggctctgcccacagacacactgtcacccaatgctaggagccactgcttgaggaagcctgggtttgtcactgcctgca

SEQ ID NO: 804945 - DNA, 120 bp, Artificial Sequence
  ENSG00000261342_2 (sequence is synthesized)
gccacagactactcctgcctcaaaacgacgtcacgacactgcagagcaggccagctccagctgcacatggccgcctccatctctacacaactttgagtcacagaaatgtcacgtgacctg

SEQ ID NO: 804946 - DNA, 120 bp, Artificial Sequence
  ENSG00000261342_3 (sequence is synthesized)
cagaagccaagggtcctcctccttgggggtctcttttactgactctgtgactcccagccggggatcttctgcccccaggggacaccgggccatgtctggggacatctgtggttgtcttga

SEQ ID NO: 804947 - DNA, 120 bp, Artificial Sequence
  ENSG00000261342_4 (sequence is synthesized)
ctaggggagctcctggcatggagtgggtggaggccagggatgctgctcggcaccctgcagtgcccaggacggccccacccttgagaacggttcagtcccaatgtccacagggcccagggg

SEQ ID NO: 804948 - DNA, 120 bp, Artificial Sequence
  ENSG00000261342_5 (sequence is synthesized)
gagacacccagcccaactcacagaagacccaggacaggtgatggtggtctatgtcaaccacctgttcatgagagagacacagggaggagagggggcacctgccaaccgtttcatgcgctg

SEQ ID NO: 804949 - DNA, 120 bp, Artificial Sequence
  ENSG00000261342_6 (sequence is synthesized)
tgcgctggtagagaccgggaatagcttggacagattgttcctggataacacaagacagcttcctgtttaaaaaacaaaactccggcccggagcaggggctcacgcctataatcccagcac

SEQ ID NO: 804950 - DNA, 63 bp, Artificial Sequence
  ENSG00000261342_7 (sequence is synthesized)
ggaggctgaggcgggcagattacttgagcccacaagttggagaccagcctcgcaggtgcctgt

SEQ ID NO: 804951 - DNA, 73 bp, Artificial Sequence
  ENSG00000261342_8 (sequence is synthesized)
ggtctcaaaaacacacacaaaaaaccaaaactccaagcgcagagcacccagtgccatcttcgtccgaatgcag

SEQ ID NO: 804952 - DNA, 120 bp, Artificial Sequence
  ENSG00000261342_9 (sequence is synthesized)
caagcgcagagcacccagtgccatcttcgtccgaatgcagcactcctggctgggtcacggccacccctaggccagtgcctggccaggggcttctcttgtctatgaccaggcaggtcacag

SEQ ID NO: 804953 - DNA, 120 bp, Artificial Sequence
  ENSG00000261342_10 (sequence is synthesized)
gcgggagggacccaggtcaggctcagctgctgccccaccggaaacagacccagcagccttgcctagaccccaggtgggtccaggtttttctattggggcagagagagtgggccaggatgg

SEQ ID NO: 804954 - DNA, 120 bp, Artificial Sequence
  ENSG00000261342_11 (sequence is synthesized)
gggcgtctctcagctctgcaagctggagaattaactccgggacttgagctcggggtccccgctgggcgcaggcgtgggctccagcgggaaggaagcccctcgttgggttctcagcatgga

SEQ ID NO: 804955 - DNA, 120 bp, Artificial Sequence
  ENSG00000261342_12 (sequence is synthesized)
cagctggatggcatcactggattccctcacctggatccggagacaaaaggggagaaaatgatgaggcagcgcccaggcctgcggggttgagtcagccgtaataacagcctgttggcccta

SEQ ID NO: 804956 - DNA, 120 bp, Artificial Sequence
  ENSG00000273461_0 (sequence is synthesized)
tgggattgcaagctagcttcaaccaggcactttcctgtgggggaggagaaatgctgctaaggctatattagtgttcctgagcctgcctggcagctggcataaattcacttactgaagaga

SEQ ID NO: 804957 - DNA, 120 bp, Artificial Sequence
  ENSG00000273461_1 (sequence is synthesized)
agtcacatcttatgtggatggcagcaggtcactcattctgggaaaagccagctgccatgtcatgaggatataccaaacagtatatggagaggccatatgcagattcagttgtgctcaaga

SEQ ID NO: 804958 - DNA, 120 bp, Artificial Sequence
  ENSG00000273461_2 (sequence is synthesized)
tcagttgtgctcaagacttccagccatccttcctgatagccagttctacagatttcagactggcctagccagctcctatacctgctcaagacaattctctgcaataaatctcttaatata

SEQ ID NO: 804959 - DNA, 120 bp, Artificial Sequence
  ENSG00000273461_3 (sequence is synthesized)
tgggattgcaagctagcttcaaccaggcactttcctgtgggggaggagaaatgctgctaaggctatattagtgttcctgagcctgcctggcagctggcataaattcacttactttccacg

SEQ ID NO: 804960 - DNA, 120 bp, Artificial Sequence
  ENSG00000261340_0 (sequence is synthesized)
ttctcagaggatctctataggcagttaatagtagttgaaaaaggaactgtttttgaatttttgagttaaacagtaaaactagtttctttgtggtacttctcagagcctacaatctgctaa

SEQ ID NO: 804961 - DNA, 120 bp, Artificial Sequence
  ENSG00000261340_1 (sequence is synthesized)
tgtgtgtagtgaatttccatgaggatgatgtgtggactttctcacatttttaaatgtaacccctcctccttttattttttggcagagtatcttattggatttttgtttcatagaatttgg

SEQ ID NO: 804962 - DNA, 120 bp, Artificial Sequence
  ENSG00000261340_2 (sequence is synthesized)
tcaatgatatttacaggattagaaataagcattcttgaattttttttgaaattctatgaaatagctcttggatctgggcttctaagagtatagttaatgcttctaaaactttaatatgcc

SEQ ID NO: 804963 - DNA, 120 bp, Artificial Sequence
  ENSG00000261340_3 (sequence is synthesized)
tgtacatttgctgggtatcttgttaatatgcggaatttacttcagttggtctccatgggggcagtgattttgcatttctaacgtgttcccaggtgatactgatgctactggtgttttagc

SEQ ID NO: 804964 - DNA, 120 bp, Artificial Sequence
  ENSG00000261340_4 (sequence is synthesized)
agtcttcgagcagtaaggctccagatgtatttaagtgctttcctaggtgaaaagtgttaaagataacctctgccacctggcctggaggtaaggtgtttagagaggcttcaccttagggca

SEQ ID NO: 804965 - DNA, 120 bp, Artificial Sequence
  ENSG00000261340_5 (sequence is synthesized)
ctggaagttggagctgagtaagtagttatacaagccagatgatctacttgtatattactaataatctgtttatttttcattgtatactttttcctggctatgagagatacacaaacatat

SEQ ID NO: 804966 - DNA, 120 bp, Artificial Sequence
  ENSG00000261340_6 (sequence is synthesized)
tttcagaataaaatagcaaatacctatatgctttgacacttgctatgtgtccaaaatatcccatggccttttgagaggtccttggtaggggagtttagatctctgttctgtaagcaataa

SEQ ID NO: 804967 - DNA, 120 bp, Artificial Sequence
  ENSG00000261340_7 (sequence is synthesized)
tattgaatgggaaatacacatgtggaatgcttagttagacctcatttaaccccttccctatctcaacattcatgtcctcagccgaggacaaagacttaactgactttctatgtgaaaatg

SEQ ID NO: 804968 - DNA, 120 bp, Artificial Sequence
  ENSG00000261340_8 (sequence is synthesized)
tatcagtgattcagaaggggttttaattgtttaaggctgggataacaattaaggtttgccttttgtgttaactctatacatttgttcttcaatatctaaagggatgtctatagaaagatt

SEQ ID NO: 804969 - DNA, 120 bp, Artificial Sequence
  ENSG00000261340_9 (sequence is synthesized)
caaggctatggtctgagcttgacgagagtgacacattagattaatgatctctctcctgggcatgggaaggaaaatatcctcacaggagctgagctgcatatttgacacccctgataaagc

SEQ ID NO: 804970 - DNA, 120 bp, Artificial Sequence
  ENSG00000261340_10 (sequence is synthesized)
attaggttatgctgacaccacattgtctacagatgatctttgcaccttctgatttgcttagtatccattgtcaaacacttaaatatgggttaaggctactataaaaattatttacttaat

SEQ ID NO: 804971 - DNA, 120 bp, Artificial Sequence
  ENSG00000261340_11 (sequence is synthesized)
tatttacttatgccattttttttcagtactaaaactgcattttaggttgtgtgctcagagtaattgggccaagattccagtgaaatacctgaatggtgctaaaaataaattcaatgaaat

SEQ ID NO: 804972 - DNA, 120 bp, Artificial Sequence
  ENSG00000261340_12 (sequence is synthesized)
tcctttaagtcctttctcagtggttagattgtttactcctcaaattccttgctaacaaattcttcctaatagaggtcctgttagagtcaattagttaagatttatttataattagaaact

SEQ ID NO: 804973 - DNA, 120 bp, Artificial Sequence
  ENSG00000261340_13 (sequence is synthesized)
cctatttgcacgcaattgactctttcaaagtctttcagtaggttaagtttgttttctgcagttttgattacaaatacttcatttttgttacaaagttaagctttagtttaattcttggtc

SEQ ID NO: 804974 - DNA, 120 bp, Artificial Sequence
  ENSG00000261340_14 (sequence is synthesized)
atatcaaacattttaaattcattgagtctaaatcatgagttgattatattagatttgtgtaataaagcattaacaatcatgacagttaagatgattcttttatgtgttagttcattgggg

SEQ ID NO: 804975 - DNA, 120 bp, Artificial Sequence
  ENSG00000261340_15 (sequence is synthesized)
cagaagacagcataatacagatgcccagtgtaaagaagttagcagattcaaattatccagtggttcactcaactagaaactctaatttttaaagaatgatgtaaaatttgctgggcactt

SEQ ID NO: 804976 - DNA, 120 bp, Artificial Sequence
  ENSG00000261340_16 (sequence is synthesized)
gtgtgtactcgcgtgcatatgttcttgtgttgttggtgtatattgttctgctttgttttgttgttcttcatatacattcaaataagagcttttctgacttggtagtagtaggtcaggata

SEQ ID NO: 804977 - DNA, 120 bp, Artificial Sequence
  ENSG00000261340_17 (sequence is synthesized)
aagagctggggtgtgctatcccctacttgtgagttgtatataatttgttaggattcttttgtgtccacctttttttaagtttagatggctggctctgactgctataacaaggtatgtatc

SEQ ID NO: 804978 - DNA, 120 bp, Artificial Sequence
  ENSG00000261340_18 (sequence is synthesized)
acagctatgtaatgtaagaatgcaaaatctactatagttgtactataaattcagcacctgttactgtataattaagatactgcatttgaagacaataaaaaagctaattcaaatacgtgt

SEQ ID NO: 804979 - DNA, 120 bp, Artificial Sequence
  ENSG00000264196_0 (sequence is synthesized)
gaatgggctcattaagacttaggaattctttagaggctcaaacacagaaagccagtgatgggaaataaggatgacacagctgatagcccatgggagtcccagggtgagactaagactcca

SEQ ID NO: 804980 - DNA, 120 bp, Artificial Sequence
  ENSG00000264196_1 (sequence is synthesized)
taagagccaggcttagacttataaaggaatgctggctgctgaagacatttcagaactcaagctaagaatctctggcctgcattcagaagatacctttggtctctgtggttggccaaatga

SEQ ID NO: 804981 - DNA, 120 bp, Artificial Sequence
  ENSG00000264196_2 (sequence is synthesized)
attatcctggataatctgggtggtccctcaatgcaaccacaagaatctttataaaaaggcagagggagatttggcacagaagagaaagcagtgatcctggaggtactgattggagtgatg

SEQ ID NO: 804982 - DNA, 120 bp, Artificial Sequence
  ENSG00000264196_3 (sequence is synthesized)
tggccacaagccaaggaatgcctgcagcctgcagaagctggaagaggccaggaatggattatcccctagagcccccggcaagaacacggcccttccaaccccttgactttatcacagtga

SEQ ID NO: 804983 - DNA, 120 bp, Artificial Sequence
  ENSG00000264196_4 (sequence is synthesized)
aactgatgtcagacttctggcctccagaactgcaggagaataaatctggattgttttaagccactaagtttgtgataattggttacaccagccaaagaaaaccaaggcagtccttcattc

SEQ ID NO: 804984 - DNA, 120 bp, Artificial Sequence
  ENSG00000264448_0 (sequence is synthesized)
cgagtggaaggtgtggctgcgcggcgctagggagcggtggtctgtggagctcggcggtgttggctgagcaggctgcggggtcgggagaggggaggcgcctgggccggctccaatgtcttc

SEQ ID NO: 804985 - DNA, 120 bp, Artificial Sequence
  ENSG00000264448_1 (sequence is synthesized)
gcgtgcatggggcccgaggaacgggctgctcccctgtcgtgcaggcttcctagaatctctggcacctctgcggggatgcggtggtgtgggtggccggcccagcggccaagcctcccctgc

SEQ ID NO: 804986 - DNA, 120 bp, Artificial Sequence
  ENSG00000264448_2 (sequence is synthesized)
gcctcgcggttgggtgcgggcttcccagggtaggctgcgggagcggctcccagcctcacgggaacctcaactccctgcggctcaccccagcctgcggtacaaggcgtagcaaagaacctc

SEQ ID NO: 804987 - DNA, 120 bp, Artificial Sequence
  ENSG00000264448_3 (sequence is synthesized)
agagggagttgtgatgagggaattatctctgtagcgtagatgtgtgctcacgttctctgaggagttttgaaatcagtattgtttccgttgccctgaatggttacaaggagagaacactgg

SEQ ID NO: 804988 - DNA, 120 bp, Artificial Sequence
  ENSG00000264448_4 (sequence is synthesized)
acttggagtcagaaaactttcatccaagtcattccctgctctaagtcccatttctgttccatgagattgtttccacctcagatgagattagacttaaggtggcattggtattgtctgtgg

SEQ ID NO: 804989 - DNA, 120 bp, Artificial Sequence
  ENSG00000264448_5 (sequence is synthesized)
taaaacaagatatcttcgagggctcttcagtgacttacatccatacatcccttttatgggatagtggcttctgaaagcttccttggcagtggcagatagagcattgcacttatcttccct

SEQ ID NO: 804990 - DNA, 120 bp, Artificial Sequence
  ENSG00000264448_6 (sequence is synthesized)
agtgttcaccaataagttgactttgatttattacacataacttcttactagccagtcaggttcacaaaatgatgtggagtgaatttctttttatgtaataaaaaacgttatatacccaaa

SEQ ID NO: 804991 - DNA, 120 bp, Artificial Sequence
  ENSG00000224066_0 (sequence is synthesized)
ggctgaggcacagtgagggtcaggggcttgccctgatctttgcagagaggtacctggattctccatccttgtcgtgtctctggtcttctcttggctgggtttcctgttctgcttcatctg

SEQ ID NO: 804992 - DNA, 120 bp, Artificial Sequence
  ENSG00000224066_1 (sequence is synthesized)
aagccaggagctgtgatctctgcagaggcttccttgatttgctgagctctctcctgacttcttcagcaccatctcctcccaggtctgatgggattttgccttctgagaaacaagagagat

SEQ ID NO: 804993 - DNA, 120 bp, Artificial Sequence
  ENSG00000224066_2 (sequence is synthesized)
gtgagagccccagggctaaacccttccaagtatctgggcaccatgatctagcagacaagttggtgagggttaaggagtggggtgtgaggaggtgtgttctacctctgggaggaatcgcgg

SEQ ID NO: 804994 - DNA, 120 bp, Artificial Sequence
  ENSG00000224066_3 (sequence is synthesized)
ctcatactcagctcgcaggctctggaactggcgtcggaccaagaagccccggacgcaggcctggtatggagaacgagaggaaagaagtcccttatcacggaaaaatcctgtgaaccccgc

SEQ ID NO: 804995 - DNA, 120 bp, Artificial Sequence
  ENSG00000224066_4 (sequence is synthesized)
gcccgcccccgcacctgcaatgcagacaccttccgaaccagcagctctggctccatgggcgccaactgccaggcccgcccgcgcgcctgcgaagtacgtcattggtcggcgtcgctcctg

SEQ ID NO: 804996 - DNA, 120 bp, Artificial Sequence
  ENSG00000224066_5 (sequence is synthesized)
agcatgcgcgggcgtgggctttgccccagccgttcccacggcaacctcctaccgtccagggtagaggcgtcctggcgacaggcgtacctgcgtccccccagcccccgactgcccctccca

SEQ ID NO: 804997 - DNA, 120 bp, Artificial Sequence
  ENSG00000224066_6 (sequence is synthesized)
tggcgtcggaccaagaagccccggacgcaggcctggtatggagaacgagaggaaagaagtcccttatcacgcacctggggggccgcagaacacccgcccgagtctgtaaaaagtcacagt

SEQ ID NO: 804998 - DNA, 120 bp, Artificial Sequence
  ENSG00000224066_7 (sequence is synthesized)
ttgaagagaatgagaggggcagtgtgggcctgcgtgggacgcctacgcagcggactgctcctcaggctcggcgttctcggccaggtgcagcttctggctgtgcccgtcaaggatcgtggc

SEQ ID NO: 804999 - DNA, 120 bp, Artificial Sequence
  ENSG00000224066_8 (sequence is synthesized)
cacaggtttagttccctcacctgtgcaaagggccggggacgagggtctcgggccgtctgtggactgaggttgcagtccccgcctgccctctctcaccccctctctcttcatccagatcgt

SEQ ID NO: 805000 - DNA, 120 bp, Artificial Sequence
  ENSG00000224066_9 (sequence is synthesized)
gcaggtcagacacactggggtgtgtgcgcgcgcactcgcgctgtttctgactgaggaccaggtgaggtggtagtgtaaattagtaaaaataattgttcaatgctgaaaggataggaggac

SEQ ID NO: 805001 - DNA, 120 bp, Artificial Sequence
  ENSG00000224066_10 (sequence is synthesized)
atcggacaagctttgctatgattgatgtcagctaaagtactcacaaagattttgatcagtagtaaaacatcccctacaaccacttttcttctaattttggggaaattctaaattcctgta

SEQ ID NO: 805002 - DNA, 120 bp, Artificial Sequence
  ENSG00000237975_0 (sequence is synthesized)
tcatgagtgctcacctggtagagggaagaccctgaacgtccagaccgttcccctgaccggccacgtgtggactcttggtggctctgctgtctcagcccagcctttccgtggcctgacact

SEQ ID NO: 805003 - DNA, 120 bp, Artificial Sequence
  ENSG00000237975_1 (sequence is synthesized)
gattgtgtgtctgagttttctgaatgtccctcactgtcactggcctgactaccgctagacccccggtgtccacgatcgctgactgcagatgaagcttgcccgcgcccagtggctgagtgt

SEQ ID NO: 805004 - DNA, 120 bp, Artificial Sequence
  ENSG00000237975_2 (sequence is synthesized)
ctggagctgtctgctgactgctggtggccggatccatgtctttctcctggacttgatcttgcctgttcatgggatgatgcagtctgtccacgagaggaagtctctgcgtgacgagtgcct

SEQ ID NO: 805005 - DNA, 120 bp, Artificial Sequence
  ENSG00000237975_3 (sequence is synthesized)
gattgtctggagctgtctgcagagtgcccatgactggctctgtcttcatcatgggacctggggtgtctggagccatctcttgactgctcccacgcagatccatgatggtttctggaagcc

SEQ ID NO: 805006 - DNA, 120 bp, Artificial Sequence
  ENSG00000237975_4 (sequence is synthesized)
gacccagagtgcctctcagagtcttctgagtgtccctcactgtccctgtcctggctaactctggatcccctacgctttcttgtcctggactcctgcaatgactcataatatgcttgagcc

SEQ ID NO: 805007 - DNA, 120 bp, Artificial Sequence
  ENSG00000237975_5 (sequence is synthesized)
aacttgaataccatcagaagaaactcagtgaagtcaattttcttgttgtggtctatatccaagtgatccatgaagacatcaaccatatctgggtcatctggattctgtacagagggaagt

SEQ ID NO: 805008 - DNA, 120 bp, Artificial Sequence
  ENSG00000237975_6 (sequence is synthesized)
cacagagggagactgcatcagacagaatcacattatcagccaattaattcaaagttaatttaaggaacctgatctttgagtattaaaaagtgggacaaaatcttttttttttttaagact

SEQ ID NO: 805009 - DNA, 120 bp, Artificial Sequence
  ENSG00000237975_7 (sequence is synthesized)
tttttgtctcatcctcattcaggtgttatatgtgaacaaagatgtagactagtaaggtatcaagatttgatggggatatccagacaacttggagccaagtccccacagctggatcagaca

SEQ ID NO: 805010 - DNA, 120 bp, Artificial Sequence
  ENSG00000237975_8 (sequence is synthesized)
acttttggtgacatctcacagtgtggattatcaagccagtgtatcagtctggagcctaggttttttgcctttagctttgctcaggatgacttctgctcttctatggcaatacttgagaag

SEQ ID NO: 805011 - DNA, 120 bp, Artificial Sequence
  ENSG00000237975_9 (sequence is synthesized)
ctacagctttgattagacgagaggctatttcaataactttctcctgataagaagaccaccgaccgtggacggattctggccagtttacaaaggctgcataccatagggcagggcacccca

SEQ ID NO: 805012 - DNA, 120 bp, Artificial Sequence
  ENSG00000237975_10 (sequence is synthesized)
ctatggcaaacactaataatgatattgctcctgattttgtttctgaagggaatgcctctaagatttcttcattaattataagagactgggtctcactctgttgcccaagctggagaacag

SEQ ID NO: 805013 - DNA, 81 bp, Artificial Sequence
  ENSG00000237975_11 (sequence is synthesized)
tcaagtgctgaaattgaaggccagcttttggaactcaaccttcaaaggaacttaaaatttccattatgtagagtccctgag

SEQ ID NO: 805014 - DNA, 120 bp, Artificial Sequence
  ENSG00000237975_12 (sequence is synthesized)
atgctctcaccccaggatttcatttttattttaccacatcattgttggtatcttaagatcaatgtactggagcagcggggtctcacaaagaggatacctggtgacacgcccaggctttca

SEQ ID NO: 805015 - DNA, 120 bp, Artificial Sequence
  ENSG00000237975_13 (sequence is synthesized)
gaatgcactatagggctttagtgacttgtccaggttcagctgaaatgtgccatctgggacctactaatgcttgttgaactttactggatctcagaagctgggtctcagaagctcagatgt

SEQ ID NO: 805016 - DNA, 120 bp, Artificial Sequence
  ENSG00000237975_14 (sequence is synthesized)
tcctcagagctacgatatcaacaacctgtgatgacagagagaaggttgctccatgatggatttggaaacttactggctagctaaacctgactgaatgggaaggaatgtggatagctttgg

SEQ ID NO: 805017 - DNA, 120 bp, Artificial Sequence
  ENSG00000237975_15 (sequence is synthesized)
aactctagtttcactagatgagctggaatttgtattttgacaaattgcacgttatgattattaagtaatgcaactgatttttttttcccttaaaacaaacaatctagaatctgtgtaatc

SEQ ID NO: 805018 - DNA, 120 bp, Artificial Sequence
  ENSG00000237975_16 (sequence is synthesized)
aaaataatttctctaaaaggctgcaagtatatgcttaaagtgttggggcattcagagcatttggaacattacattcttttgaatgtcaattggtagatgaaaataccagcttttaagtca

SEQ ID NO: 805019 - DNA, 120 bp, Artificial Sequence
  ENSG00000237975_17 (sequence is synthesized)
tacatttgattttttgaaacaatatgcatttagagtttgtaagtcaagtgaataactgataaggtaaaaaaaagggggagttcattgttgagtatgaatttaaagtaaccagactgcctt

SEQ ID NO: 805020 - DNA, 120 bp, Artificial Sequence
  ENSG00000237975_18 (sequence is synthesized)
ttgtccagtggctgtcagtaatttacttcagcaggcatttttttttttttgaggctgttctatgatatcatgacccttcttgtaggaatgtgcttccagtggtgaggcagtctgagaatg

SEQ ID NO: 805021 - DNA, 120 bp, Artificial Sequence
  ENSG00000237975_19 (sequence is synthesized)
agtctgagaatgtgtgaagcagtataatgaagccagaccaagatggaagcttggcctgggatttgagcatcaggaaaactgttgaagggttatgtatacatcacacacacacacacacac

SEQ ID NO: 805022 - DNA, 120 bp, Artificial Sequence
  ENSG00000237975_20 (sequence is synthesized)
acacacacacacacactctcttccatactcctataacaacgtatagtatttactatacctggtgacaggtatttactatacattgttgaagatctataacatggaatgcctagtgctaag

SEQ ID NO: 805023 - DNA, 120 bp, Artificial Sequence
  ENSG00000237975_21 (sequence is synthesized)
tgcagtgtccttagtgaaattgtattggtttggaattatttatgagtttgggattatttgtcactacccttaaatgatcttgacactcacctatttgaaaagatattgaggatttgccat

SEQ ID NO: 805024 - DNA, 120 bp, Artificial Sequence
  ENSG00000237975_22 (sequence is synthesized)
ttgatattgaccagggtgtattgtgcacaaatattgtgaatatacatctgtctgtccttaaatcactgtaagttttaactggaatagatttgctccacattactcggtagggctgatatt

SEQ ID NO: 805025 - DNA, 120 bp, Artificial Sequence
  ENSG00000237975_23 (sequence is synthesized)
tcatgcctcatggatgagaaaagaataggcaaaaattatatctcgggctgcctcacacatcttttaacaggataagggaaaaataaatataagacctatgagttatggcatcaggcttga

SEQ ID NO: 805026 - DNA, 120 bp, Artificial Sequence
  ENSG00000237975_24 (sequence is synthesized)
atggcatcaggcttgaactttaatttatgaattaaaccaacaatattattgattattgcaattatctatcttaatttcatttgttctccttttaaaaattaattatgtttattttaccta

SEQ ID NO: 805027 - DNA, 120 bp, Artificial Sequence
  ENSG00000237975_25 (sequence is synthesized)
atcagtctacgcaaatgtgtttgggtgcaatgtacctggcaatttcatggggcagtcgggaggacagtgtggctgaagcacagtgagtgagaggaaaacagcaatgaagtgaatgcaact

SEQ ID NO: 805028 - DNA, 120 bp, Artificial Sequence
  ENSG00000237975_26 (sequence is synthesized)
gatgcctcctcaaaagtttgctacctgccaagactttcaagcatgaaaatatctttatttttcccttttaaaattgatgggtaggccatatgggagagagggaaatactgacaaagaggg

SEQ ID NO: 805029 - DNA, 120 bp, Artificial Sequence
  ENSG00000237975_27 (sequence is synthesized)
agagcaagtggtgactttagtgtgtggctgtgctcatgcatatggaccttacacaactgcaatcagcatctgcatacctacacccagtaacctgctttctctacctaatatgatataatg

SEQ ID NO: 805030 - DNA, 120 bp, Artificial Sequence
  ENSG00000237975_28 (sequence is synthesized)
agcatttttctatattgctacatagtctttataattactttaaatgactgtataatattccattcattatatcactgctgaatatttaggttgcttgtagtttttcctttgctcattttt

SEQ ID NO: 805031 - DNA, 120 bp, Artificial Sequence
  ENSG00000237975_29 (sequence is synthesized)
atgaattaacaaatgtaaagtatttcacccactaccttcaaattatatatacttggtcggcactttatttccttcccgttctgcccctttatataaataaagaaaagtatgaaagattca

SEQ ID NO: 805032 - DNA, 120 bp, Artificial Sequence
  ENSG00000237975_30 (sequence is synthesized)
ctgagagaaaagacagtgaagtgggatctgtggaaaaacacatctgcaaatgtctcatttttttcttcagggatcagtctacgcaaatgtgtttgggtgcaatgtacctggcaatttcat

SEQ ID NO: 805033 - DNA, 120 bp, Artificial Sequence
  ENSG00000237975_31 (sequence is synthesized)
ggggcagtcgggaggacagtgtggctgaagcacagtgagtgagagggcctgaaggtcaggagtctaaaactgaggtggcagaagggctatgttacttctgaaggctctagaggaaagtgt

SEQ ID NO: 805034 - DNA, 120 bp, Artificial Sequence
  ENSG00000237975_32 (sequence is synthesized)
tattctccacacattctttggctcatagcacatggctacagccgctggtttcatcaccacacttccttttactgactttgatcctcttgtctcactcttgtaaggaaccttgtgattata

SEQ ID NO: 805035 - DNA, 120 bp, Artificial Sequence
  ENSG00000237975_33 (sequence is synthesized)
ttggactcacccagataatccagaataaccccccaccatctcaagattcctaacttaatcacatctgtgaagtccctttcttgccatataaagtgacatattcacaggtttctgagatta

SEQ ID NO: 805036 - DNA, 120 bp, Artificial Sequence
  ENSG00000237975_34 (sequence is synthesized)
gcacttccggggcccgcgtcccccggcggcttcgccgagaaggggctttgggagcttaagggcgccggcacgcgttcccctggcgcagagctcgctagccggggcgcgggctgcctcctt

SEQ ID NO: 805037 - DNA, 120 bp, Artificial Sequence
  ENSG00000237975_35 (sequence is synthesized)
cagtcgggaggacagtgtggctgaagcacagtgagtgagagggtcctaggaacatggatgctgagatggtgtcttctccatattttcatggccagacttcctgttaaggctggaggtgag

SEQ ID NO: 805038 - DNA, 120 bp, Artificial Sequence
  ENSG00000237975_36 (sequence is synthesized)
gaaaatcatgtaccttggagttgtggaggcatgtttataagcagatctgagttttgccacactggaatttatttattcattgaacaaatatttaatacctactacaattcttagccgtct

SEQ ID NO: 805039 - DNA, 120 bp, Artificial Sequence
  ENSG00000237975_37 (sequence is synthesized)
gttagagattgctggaggtccactacagacactgttttcctggatatccccagcagaggctacagaacagcaaagattcctgcctgccccttcctcttgaaggtttgttccagagggaca

SEQ ID NO: 805040 - DNA, 87 bp, Artificial Sequence
  ENSG00000237975_38 (sequence is synthesized)
atgtgttgatccctgctgggaggtgtctccagtcaggaggcatgagggtcagggaactacttgaggaggcagtctgtcccttagcag

SEQ ID NO: 805041 - DNA, 78 bp, Artificial Sequence
  ENSG00000237975_39 (sequence is synthesized)
tgctctcttcagagccagcaggcagcacccaggtgctctgtctcagggagaagggagttttatctataagcccctgac

SEQ ID NO: 805042 - DNA, 120 bp, Artificial Sequence
  ENSG00000237975_40 (sequence is synthesized)
gagttttatctataagcccctgactgggtctgctgcctttctttcagatatgccctgcccagtgaggaggaatgtagagaggcagtctggccacagcggctttgccatgctgcagttagt

SEQ ID NO: 805043 - DNA, 120 bp, Artificial Sequence
  ENSG00000237975_41 (sequence is synthesized)
cagttagtcttgcccagtccgaaattcctggcagctttgtttatactgtgaggggaaaaccacctattcaagcctcagtaatggcaggtgcccttcccccaatgaagtcgtatcatccaa

SEQ ID NO: 805044 - DNA, 120 bp, Artificial Sequence
  ENSG00000237975_42 (sequence is synthesized)
ccaaggtcgacttcagactgctgtgctgacagcgagaatttcaagcgagtggatcttagcttgctgggctccataggggtgccaccagttgaacaagaccacttggctccctggcttcag

SEQ ID NO: 805045 - DNA, 120 bp, Artificial Sequence
  ENSG00000237975_43 (sequence is synthesized)
tgcttgaaacccagggccctagctgtacaggcacccgagggaatctcctggtctgtgggatgtagaaactatgggaaaagtgtagtatctgggccacagagcacagtccctcatgacttc

SEQ ID NO: 805046 - DNA, 120 bp, Artificial Sequence
  ENSG00000237975_44 (sequence is synthesized)
ccttggttggggaggaagttctccagccccttgtgcttcctgggtgaggcaatgcctcctgctccccctccatgggctgtacccactgtctaaccaatcccaatgagaggaaccaggtac

SEQ ID NO: 805047 - DNA, 120 bp, Artificial Sequence
  ENSG00000237975_45 (sequence is synthesized)
tgcattggtctcactgggagctgcagaccggagctgttcttcagccatcttgcccgctcatctctaaaattactttcttgattacttttttttccgtaaatattagctgcttttccattt

SEQ ID NO: 805048 - DNA, 120 bp, Artificial Sequence
  ENSG00000237975_46 (sequence is synthesized)
tttttccgtaaatattagctgcttttccatttatttagatcttttatttctttcaaaaaaaattttaactttacagtggataaatcttaaaattcttttgttttgctgttgttgtttact

SEQ ID NO: 805049 - DNA, 120 bp, Artificial Sequence
  ENSG00000237975_47 (sequence is synthesized)
tttattttagatacaggggtacatttgcatgtttgttatataggcaaatttgagaatatgtagtatttggtattcctggtcctgtgttagtttgcttacaataatggcctccaactccct

SEQ ID NO: 805050 - DNA, 120 bp, Artificial Sequence
  ENSG00000237975_48 (sequence is synthesized)
ccatgttgctacaaaggacataatattgttcttttacatggctgtgtagcataccatgctgtacatgcatcacattttctttatctagtctaccattggtggacatctaggttgattcca

SEQ ID NO: 805051 - DNA, 120 bp, Artificial Sequence
  ENSG00000237975_49 (sequence is synthesized)
tatatctgcaattgtgaatagtgctgcaacaaacatatgcatgcatgtgtctttatggcagaatgatttctattcctttggatatgtatgaatccattattacattgctataaagaaata

SEQ ID NO: 805052 - DNA, 120 bp, Artificial Sequence
  ENSG00000237975_50 (sequence is synthesized)
ctggccagtttacaaaggctgcatacgtgaaattgaaggccagcttttggaactcaaccttcaaaggaacttaaaatttccattatgtagagtccctgaggaaactggatccactagcta

SEQ ID NO: 805053 - DNA, 120 bp, Artificial Sequence
  ENSG00000237975_51 (sequence is synthesized)
ccggactgaggttgtgcttggcttgaggggcgggctggtaggtcagcccccttggggcgtcgttggtcctctccaggcgtgtcacattctgcccgcacatggtgccttggtactccccaa

SEQ ID NO: 805054 - DNA, 120 bp, Artificial Sequence
  ENSG00000237975_52 (sequence is synthesized)
aagtcatgccttgatttttcttactaataatagtttacactgttttaccgcttcactgcttcacgatttttcctcttaggatttatttccctggagacctcatgaagaatgatgtgggtt

SEQ ID NO: 805055 - DNA, 120 bp, Artificial Sequence
  ENSG00000237975_53 (sequence is synthesized)
aaatcatgtaccttggagttgtggaggcatgtttataagcagatctgagttttgccacactggaatttatttattcattgaacaaatatttaatacctactacaattcttagccgatatc

SEQ ID NO: 805056 - DNA, 120 bp, Artificial Sequence
  ENSG00000237975_54 (sequence is synthesized)
ttgaaaaagtgatactagatcaccatttggcaagataattacaaaaggcagatagagtaattattttacatagctgttatagggtgactaagatctcagggaatgactgtgttctgtaat

SEQ ID NO: 805057 - DNA, 120 bp, Artificial Sequence
  ENSG00000237975_55 (sequence is synthesized)
ccacttgccccactcaataccccaagttttatacaagccaaagatgcttggagcagaatctgctacctgaggctccagggccttggcctagggaaactaatacttaactttttaagtggt

SEQ ID NO: 805058 - DNA, 120 bp, Artificial Sequence
  ENSG00000237975_56 (sequence is synthesized)
cattgatgacatcccactcctttctgagatgggtatgatttgaaaggcaggtgtattcatggagagcagggcttgggacctttgctgcaagaggaggaactattagcctagacttttcta

SEQ ID NO: 805059 - DNA, 120 bp, Artificial Sequence
  ENSG00000237975_57 (sequence is synthesized)
ataaggactttctcatacctgtttcctagatctggtccacatagaagaaatcagggaacacacagggtaggactcttaaaggagtatgtttcttggctttttcctaaaaactaaaacaaa

SEQ ID NO: 805060 - DNA, 120 bp, Artificial Sequence
  ENSG00000237975_58 (sequence is synthesized)
aacattcatagcaaagcagtttagcccagtgactaagagtatagacattggaatctgaaagatctgggttggaattctgcttcagccatttactaattatgtaacttcacatctctgaga

SEQ ID NO: 805061 - DNA, 120 bp, Artificial Sequence
  ENSG00000237975_59 (sequence is synthesized)
atgggggaaattttctttgcagggttgttacaaagcttaaaagagttaagtcaagtgcctggaacagaacagccattcaataaatcatagaaatttttgtttttacacaaatttttaaaa

SEQ ID NO: 805062 - DNA, 120 bp, Artificial Sequence
  ENSG00000237975_60 (sequence is synthesized)
agtaatattttttgcatttgttagaaagactatattttctgtttagtggatgacatcatcatcataaaaatcactgttacaagttttgttttgagaattaaaatcatatattaatcccaa

SEQ ID NO: 805063 - DNA, 120 bp, Artificial Sequence
  ENSG00000237975_61 (sequence is synthesized)
aaatgctccacatggccccagtcaccctgcagaaaagaaatcatcagctttctgcagcatcagacttagcagcatcttcctgtcccaagagaagaggggatgggaggatggcatggttca

SEQ ID NO: 805064 - DNA, 120 bp, Artificial Sequence
  ENSG00000237975_62 (sequence is synthesized)
gggcttaggggaggataggggagaaaaagtggaagcaaagggagaggcccaggaaggattttgttgcgacatgttacctgggctgcacctgctgtatgcaagagaagaggctgggagtcc

SEQ ID NO: 805065 - DNA, 120 bp, Artificial Sequence
  ENSG00000237975_63 (sequence is synthesized)
gtgaccagcctgtccatggcctgacactgactgtgtgtctgagtcttctgaatgtccctcactgtcagtggcctgactaccactggaccctcggtgtccactgtctctgactgcagatga

SEQ ID NO: 805066 - DNA, 120 bp, Artificial Sequence
  ENSG00000237975_64 (sequence is synthesized)
agcttgtccgtgcccagtgcctgagtgtctggagctgtctgctgactggagctggtggcgggatccatgtctttctcctgcacttgatcttgcctgttcatgggatgacgcagcctgtcc

SEQ ID NO: 805067 - DNA, 120 bp, Artificial Sequence
  ENSG00000237975_65 (sequence is synthesized)
actagaggaattctgtgtgtgacgagtgcctgattttctggagctgtctgcagagtgcccatgaccagctctgtcttcgtgatgggacctggggtgtctggagccatctcttgactgctc

SEQ ID NO: 805068 - DNA, 120 bp, Artificial Sequence
  ENSG00000237975_66 (sequence is synthesized)
ctgagcagatccatgatggtttctggaagcagacccagaccacctctcagagtcttctgagtgtccctgactgtcactgtcctggctaacactggatccctggttcctacttgtcctggg

SEQ ID NO: 805069 - DNA, 120 bp, Artificial Sequence
  ENSG00000237975_67 (sequence is synthesized)
ccccgatgattgtccctggcccacctgtgagtgtctagagctgtcagcctgagaggaagcttcatgatgacgtgaccctgagtgcctggtgccgtctcctgattgttcctcatttcgtgt

SEQ ID NO: 805070 - DNA, 120 bp, Artificial Sequence
  ENSG00000237975_68 (sequence is synthesized)
ttgtctgcttgcacttctggatcctgactgcccatgggaggcatcagaccttccctgggatgtggtgtggctgtgatgggaacctgagtgtccagacctatttaccgattgctcgtggtg

SEQ ID NO: 805071 - DNA, 120 bp, Artificial Sequence
  ENSG00000237975_69 (sequence is synthesized)
ggatccctgccttcctcctctgcttgaccccgggtgtccacgaatggtgtcctgaccctcttgggacgctgaatgcctggagctgtctcgtgcctgctcgtggtgcgatccttgtcttcc

SEQ ID NO: 805072 - DNA, 120 bp, Artificial Sequence
  ENSG00000237975_70 (sequence is synthesized)
actaaaaataatgctgcgacgaacatcctcttacatatgtccattatggatctctgggagacatttttgggggtcataaacacagaagtagaatttctgggtggtaggctatatgtatac

SEQ ID NO: 805073 - DNA, 120 bp, Artificial Sequence
  ENSG00000237975_71 (sequence is synthesized)
ttgatattgactagatactgtcagataactctccagaacagctttactttcttaccaggagtacatgagatttcctaaacccacatcccagccaacacctagcaatatctagtttcctaa

SEQ ID NO: 805074 - DNA, 120 bp, Artificial Sequence
  ENSG00000237975_72 (sequence is synthesized)
ctttttccagctcatttcactgttattttgattttgatttcccttatccatgagtttgaacatctttatgtatatttgtaagccattttgattaccctattctatacattgcctgttcaa

SEQ ID NO: 805075 - DNA, 120 bp, Artificial Sequence
  ENSG00000237975_73 (sequence is synthesized)
atactttgtccatttttctgttaattttcttttttactttaagaagttcattgtatgttctagacgttagtacattgttatttttagacactgcaaataatttcaatgtgtcttctctct

SEQ ID NO: 805076 - DNA, 120 bp, Artificial Sequence
  ENSG00000237975_74 (sequence is synthesized)
gttaactttgttcgtggtgtctttcactgaacagaaatctttaattatgatgtaataaaagtcatcactagttttgtattatgtgtgcctgtaaagttctatctacaatgttctttcctg

SEQ ID NO: 805077 - DNA, 120 bp, Artificial Sequence
  ENSG00000237975_75 (sequence is synthesized)
tgctgagattactaaggtattttcccatattttcttctctttactttgttgttttaagcttcacattcagatatttatttcatttgcagtctatctttgtatgtgactttaggtaaatat

SEQ ID NO: 805078 - DNA, 120 bp, Artificial Sequence
  ENSG00000237975_76 (sequence is synthesized)
ccaattttgtttttatctatggcatgagccaggtttgcaactccttctattaatctgcccttttcccattgatatatggtacccactttactatatattaagttcccatataaacatact

SEQ ID NO: 805079 - DNA, 120 bp, Artificial Sequence
  ENSG00000237975_77 (sequence is synthesized)
taatttctaagctccttatcatgtttcactgatctttttgtcattgcaataatatcacattgttattattacttgactgtgtagtatgtcttaatacttggaagggcaagtacccattct

SEQ ID NO: 805080 - DNA, 120 bp, Artificial Sequence
  ENSG00000237975_78 (sequence is synthesized)
ttgcctttttcttgaaatgttgacttacctgttcgtggatctttattcttccataaaaacttgaggttattgaacttctcaagaaattcaacacaaatattttgaagtatttgtgattgt

SEQ ID NO: 805081 - DNA, 120 bp, Artificial Sequence
  ENSG00000237975_79 (sequence is synthesized)
gttgaatgtatagattaatatgaactgacatgtttataatattaagtcatctcccccaagatatggaatgtcactccatttattcagataatcttctatgtcatttattagatttaaaaa

SEQ ID NO: 805082 - DNA, 120 bp, Artificial Sequence
  ENSG00000237975_80 (sequence is synthesized)
ttttctccatggaagtattatatgttgtcattattttctagttatttaacattttttgttgctgttctgaatgatatcttatttttaaatacattttgtaattggttattgttggagaga

SEQ ID NO: 805083 - DNA, 120 bp, Artificial Sequence
  ENSG00000237975_81 (sequence is synthesized)
aaagtgcttttaatttttgtaacttgattgtttctgataaacttgctgaattatcttattagttgtaatactttgttgattaggtgcttttttctagctagagagtcatattatcttacc

SEQ ID NO: 805084 - DNA, 120 bp, Artificial Sequence
  ENSG00000237975_82 (sequence is synthesized)
tgcaaataatgtcatttgttttctttttttttttctaccaatgtatttatttctctttctttccttatagcatagggcagggcaccccactatggcaaacactaataatgatattgctcc

SEQ ID NO: 805085 - DNA, 120 bp, Artificial Sequence
  ENSG00000237975_83 (sequence is synthesized)
tgattttgtttctgaagggaatgcctctaagatttcttcattaattataaggtatactgtattttttgatatattaataaatttccatttatttctagtatgagtttttatctttgatat

SEQ ID NO: 805086 - DNA, 120 bp, Artificial Sequence
  ENSG00000237975_84 (sequence is synthesized)
gcattgagatttgtcaaatgtatttcctgcattgagatgaacatgttattttaatttttttagtatattaatgtgacaaattttaaagataggttatgtgatttttaatagtttttgcat

SEQ ID NO: 805087 - DNA, 80 bp, Artificial Sequence
  ENSG00000237975_85 (sequence is synthesized)
tattttgtagacaacatgttgaatcttttttgtagtttttatcaactataaatgtctctgttatttcattagtttaggct

SEQ ID NO: 805088 - DNA, 120 bp, Artificial Sequence
  ENSG00000237975_86 (sequence is synthesized)
actataaatgtctctgttatttcattagtttaggctatttacatttttgaaattatgttattttaattatgttcatttaactaacatagtatttctgccatcctgtttcatactttgcct

SEQ ID NO: 805089 - DNA, 120 bp, Artificial Sequence
  ENSG00000237975_87 (sequence is synthesized)
ggcagatcttggtgatgcattggaagtggactatgagagaaggtgcagaacaagagggaataggttagcggcctggcaagcagttggtgttgggcaggttagggagggcaacccaatgaa

SEQ ID NO: 805090 - DNA, 120 bp, Artificial Sequence
  ENSG00000237975_88 (sequence is synthesized)
gtagactctgacaggtggacagaactcaatgatggagaaggcaggaataggagatttcagtaggcagtgggtaatggagagttggtatcaacaatatcatgtcactaggtagcaggacct

SEQ ID NO: 805091 - DNA, 120 bp, Artificial Sequence
  ENSG00000237975_89 (sequence is synthesized)
tagggctcatattttaggccaggactttaatcttgtaagtagggaagactaaagaacaaagaaggtttatatcatgaccaggcagagacttttatcataactgagaaagatcaaaatcag

SEQ ID NO: 805092 - DNA, 120 bp, Artificial Sequence
  ENSG00000237975_90 (sequence is synthesized)
attaccagcataattgaactgatactaattcatgagctttaggtaacttctattcttaaattcttcctgctgaagaccagtacttattctggatgatggggaccctcaccaagcttccaa

SEQ ID NO: 805093 - DNA, 120 bp, Artificial Sequence
  ENSG00000237975_91 (sequence is synthesized)
ttcctgaagacccctctatctactcagcactaactttttatcaacttagactttattctctcatcgtaagtctcctggttactcattcttcataattcaccacctacaccttgtagatta

SEQ ID NO: 805094 - DNA, 120 bp, Artificial Sequence
  ENSG00000237975_92 (sequence is synthesized)
ggcagatgtttgattgatatctccatgactattggtatagcacaacaccagactacaccacactcctcttacccaggtgtagttaggggagggctcagaatagtatatgtggtttagctg

SEQ ID NO: 805095 - DNA, 120 bp, Artificial Sequence
  ENSG00000237975_93 (sequence is synthesized)
taggagcacaagggttgcataatctagtagtttgagaactagatgagttcagaaggtgaacatcagaaccactctggagttgtatttacatgttatttacaatttctgctcataacaaaa

SEQ ID NO: 805096 - DNA, 120 bp, Artificial Sequence
  ENSG00000237975_94 (sequence is synthesized)
gttaaaaaaattattaaagaccctaaactaccatatttccagaagaatcactgagacccaaggctccaaagtccttcaagtgttaatttatgagactaatgatgctcgtttttgttaacc

SEQ ID NO: 805097 - DNA, 120 bp, Artificial Sequence
  ENSG00000237975_95 (sequence is synthesized)
tcatggattctcacatcagtggtgaccttgttgaggtagaggtggactcacaccaccaacatttccactcattttatcagcattccctaaagtatggcttcctccatttcttagagcact

SEQ ID NO: 805098 - DNA, 120 bp, Artificial Sequence
  ENSG00000237975_96 (sequence is synthesized)
tttcccagaatctacctctttctttacctcattctatcatttttctaatcaggccatcagttagttactcttgcaacgtgtactctaacagcatttcatgtatatgcttaaactaattca

SEQ ID NO: 805099 - DNA, 120 bp, Artificial Sequence
  ENSG00000237975_97 (sequence is synthesized)
tagaacatggttactattaatatttgcatttcttttcacagtatgcatctagaaatcctcagctattttttgttttcttcatgaaatttttaattctaggaacttttcatatgagatatg

SEQ ID NO: 805100 - DNA, 120 bp, Artificial Sequence
  ENSG00000237975_98 (sequence is synthesized)
aaaaatggttaaattcaaataacaccatgtccaccatattggccccctaattagagccaagatcacaaaatccatggtgtagtgttgagagcacaatctcacacacctcacagacttgcc

SEQ ID NO: 805101 - DNA, 120 bp, Artificial Sequence
  ENSG00000237975_99 (sequence is synthesized)
tttgactactggctcctccagttgccagctctatgactttgagcaaatttcttaacctttctgggtctgtttcctcatctatagagtaaagataataatacttcattttgatagttcttc

SEQ ID NO: 805102 - DNA, 120 bp, Artificial Sequence
  ENSG00000237975_100 (sequence is synthesized)
agtatattaaatgaattatatgtcaatggtctgacactttgcctagcatgatagcaaggtattcagtaaatggtaattattagttttatataactatgaagtcttacagaattggtaaac

SEQ ID NO: 805103 - DNA, 120 bp, Artificial Sequence
  ENSG00000237975_101 (sequence is synthesized)
tcaatatgagacacttattgcaattgaatttttgcatgtgtgtttgtttccatcaagagagaagagcaagaaacatacatcttttcctttttcttttccaagaattttttttaattgagt

SEQ ID NO: 805104 - DNA, 120 bp, Artificial Sequence
  ENSG00000237975_102 (sequence is synthesized)
ccctctctgtgtgattatggaggtttttaaatgtcctttagggttcagtgtgatcatctctagaagatcggggagaaggttttcatctgttttaggaaaagagtagcttcaggagaatat

SEQ ID NO: 805105 - DNA, 120 bp, Artificial Sequence
  ENSG00000237975_103 (sequence is synthesized)
tgaatgttgaatacaaatactacaaaaaaagtagcaaaaattgctctagtacatttattgttttcctccattgtatacattccacttttttttttttctggcaacagtccctgattttca

SEQ ID NO: 805106 - DNA, 120 bp, Artificial Sequence
  ENSG00000237975_104 (sequence is synthesized)
tttaagaatccaaccattgcccattcttactccttgtggtcagggtgagggggtgagtttatctttgacttatgagggtgaagatgttgcttggatgttagtggacagggatgggtaagc

SEQ ID NO: 805107 - DNA, 120 bp, Artificial Sequence
  ENSG00000237975_105 (sequence is synthesized)
atgtgacctgggatgtctaaggcagagtgaatctcaggactattgtgtgaactaccaataaagacatagcattcctcctccacctctccccccaaccccttggcccctgcaccttgagat

SEQ ID NO: 805108 - DNA, 120 bp, Artificial Sequence
  ENSG00000237975_106 (sequence is synthesized)
ttgaacagggaagaatgtaggccaagctgctgcagccatctcatgactacatgtcaaaactgtagtcaacagagggaaaagcagagctgagagattgagagactcacccaatcttgatga

SEQ ID NO: 805109 - DNA, 120 bp, Artificial Sequence
  ENSG00000237975_107 (sequence is synthesized)
tatactttgagccttggagtgagtacagcctgctagccccatttcaagacttttcaattacgtgaaccaatacattctccctttaatttaataagctttgagttgttctattacttgaag

SEQ ID NO: 805110 - DNA, 120 bp, Artificial Sequence
  ENSG00000237975_108 (sequence is synthesized)
cagaattagaactgatataattgctatttactttttgctgtgttctgcattcataataaatataaaaaacatagcaagataaccaggggcatgttaatgcaagggtggtaatagagaaag

SEQ ID NO: 805111 - DNA, 120 bp, Artificial Sequence
  ENSG00000237975_109 (sequence is synthesized)
ccagtatcatcacattatacttttctaagttttattttgtttttaactgacatctagtaattgtgcatgtttatatttaagtgatgtttctatacatgtttacattatgtaatgatcaaa

SEQ ID NO: 805112 - DNA, 120 bp, Artificial Sequence
  ENSG00000237975_110 (sequence is synthesized)
tcagggtaattagcatatcaatcacttcaaacatttgtcatttctttatggtgagaatattcaaaattctctcttctattaatagctattttgaaatatagtatatgatattgttaactg

SEQ ID NO: 805113 - DNA, 120 bp, Artificial Sequence
  ENSG00000237975_111 (sequence is synthesized)
tggttaccccactgtgcagtagaacagtcagataagaggaatattatacttttaaaaggataaattcctttgggggcaagagcagggtcctggctaagtacatgaggcctgcctgaggaa

SEQ ID NO: 805114 - DNA, 120 bp, Artificial Sequence
  ENSG00000237975_112 (sequence is synthesized)
tttctatggaaacaggagtgtgtgtctgtggccctagccctgctcagcattggaaactatttggtagtctgaacatggttcctcctgtaaactaaaaataaatcttaaagccctcaactg

SEQ ID NO: 805115 - DNA, 120 bp, Artificial Sequence
  ENSG00000237975_113 (sequence is synthesized)
actgaacagaccctccccaccccaatcttggccaaatggaccctagataaatcttaaaaactgagttcccagccatgatggctcaggaagtcagacatatcttgttatataccctccctt

SEQ ID NO: 805116 - DNA, 120 bp, Artificial Sequence
  ENSG00000237975_114 (sequence is synthesized)
ttgcagtgtttagacacaactggccagcattgatgtgaaaatagagaatgtaagactgatagaacagactctttgtggcagtaagataccaaattgtaaacaggagctaagaccatgcca

SEQ ID NO: 805117 - DNA, 120 bp, Artificial Sequence
  ENSG00000237975_115 (sequence is synthesized)
gtcaagggttaagtcacacacttctgcacttaaagaataaactatgttctaaatgccataaggtttctatttttcttcagcagctaaacaagcactggccttcaggtaagcaatatgaaa

SEQ ID NO: 805118 - DNA, 120 bp, Artificial Sequence
  ENSG00000237975_116 (sequence is synthesized)
tggtgccctttcttatctgtgaggtttgacctgacactgagttgagagtccgaggacctgggtttagtcctatttctgcctctttctttctaactgcataacttttgacaacactaaaga

SEQ ID NO: 805119 - DNA, 120 bp, Artificial Sequence
  ENSG00000237975_117 (sequence is synthesized)
aactccattttcttatttgctatgagcttgattatgtctatgtttccacagtcacatgtctgtgtagggattatgttaatttatgtatgtgacaggaaagattaggatattcaattcctt

SEQ ID NO: 805120 - DNA, 120 bp, Artificial Sequence
  ENSG00000237975_118 (sequence is synthesized)
taacaaataattattgaatgctaggcactacttcagacaccaaagcaacagcaggaacaaaacaggcacatgtagtattgctgaactgtaccaaattcctctccactgaggctcattttg

SEQ ID NO: 805121 - DNA, 120 bp, Artificial Sequence
  ENSG00000237975_119 (sequence is synthesized)
cattcccaccagaaggtgtgaaaatgcctgctttacctcatcatcatctattctcaaacttgtagatttttgtcaagctgatagtgagaatggtatctcaaactagtatagttttggttt

SEQ ID NO: 805122 - DNA, 120 bp, Artificial Sequence
  ENSG00000237975_120 (sequence is synthesized)
gtgatccgaatgtaacggagcggactttgggatccagaaccccggactgaggttgtgcttggcttgaggggcgggctggatttttcctcttaggatttatttccctggagacctcatgaa

SEQ ID NO: 805123 - DNA, 120 bp, Artificial Sequence
  ENSG00000263878_0 (sequence is synthesized)
acaaaacctactgatgtgggtacccaagcaggaacccccctcttgcaccggcgactcacgtgggaagaagaattcactgagctgaaatggagtgagagctaagatgctctcagaatattc

SEQ ID NO: 805124 - DNA, 120 bp, Artificial Sequence
  ENSG00000263878_1 (sequence is synthesized)
ttaaaatgactgtgctgcaaagaagcccgggtgaatagaagaaaatagaaggaatggtggatacaagtgaaggttaaaatgagaccccatttatcgcaccagctgttggtgatttcagcg

SEQ ID NO: 805125 - DNA, 120 bp, Artificial Sequence
  ENSG00000263878_2 (sequence is synthesized)
cacctttccaagcctcttgagagttctgctctaaccacactgccccctagtgttctctcgctttggtgcaacgtttctcatacttccggagaaatagaaagcaccagatgacagccacca

SEQ ID NO: 805126 - DNA, 120 bp, Artificial Sequence
  ENSG00000263878_3 (sequence is synthesized)
aacaatcgtaaaattatgaaacactgaattccttaaaagttgtccatttgtggatttatctgatggtaactattaaatatttaaaagtaactttaatgaatctacttatgatgattgagt

SEQ ID NO: 805127 - DNA, 120 bp, Artificial Sequence
  ENSG00000263878_4 (sequence is synthesized)
aatctattctctgaattccaccaaaaaaccattttatgaccacagtcataacgaacatatttctatagtcctaagctggcaagataaatagagaacagttcataatataaacaatatatt

SEQ ID NO: 805128 - DNA, 120 bp, Artificial Sequence
  ENSG00000263878_5 (sequence is synthesized)
tatttattcctaaactaataagatgactatcaatctgtaagagactatgaaaatcaataccgtatacttggtatagttggtgagaatttcaggagcatgtttgttcttttatttgtgttt

SEQ ID NO: 805129 - DNA, 120 bp, Artificial Sequence
  ENSG00000263878_6 (sequence is synthesized)
gagaattgatccaatgactgctggtgtgtagaatgaattgcgatgaaacatctcatcctacctgctcctcattcccttttctgccaacgatttatcttcagaagacaagcagatgaggag

SEQ ID NO: 805130 - DNA, 120 bp, Artificial Sequence
  ENSG00000263878_7 (sequence is synthesized)
ttaaggacaagtccagccatccttatccttcacagcaaataacaaacatagtgatttgtgggggtgaagagatgttggtcaaggggtatgaaagtacagtcagataaaaggaatgtgtcc

SEQ ID NO: 805131 - DNA, 120 bp, Artificial Sequence
  ENSG00000263878_8 (sequence is synthesized)
tagatttgatagaatactagggaaattacagttaacaaaaatttattgtacacttcaaagtagctagaagcaaagaactgtaatgtccccaacacaaagaaaagataaatgtttggggtg

SEQ ID NO: 805132 - DNA, 120 bp, Artificial Sequence
  ENSG00000263878_9 (sequence is synthesized)
ataatatctcaattactctgatttgatcattacacattgtatgcaggtatcaaaatatcacatatccccccaaaatatgtacaactgttgtatattaataaaaataaatacaaacaaaaa

SEQ ID NO: 805133 - DNA, 120 bp, Artificial Sequence
  ENSG00000263878_10 (sequence is synthesized)
atagttattaattatagtgtaaatattagactagagccattctggacaagcacctgttcaacaccatatcctcattttctggcacccagtagacactgcggaagtatttttgattggtcc

SEQ ID NO: 805134 - DNA, 120 bp, Artificial Sequence
  ENSG00000263878_11 (sequence is synthesized)
tgcagaggttctaccccaacctcaccaggtgcaggtggatgccaggtgccagcctgggagaggctctaagttctaaagagtgtgtcggtggatggtgtgctttcatcttttagttcatat

SEQ ID NO: 805135 - DNA, 120 bp, Artificial Sequence
  ENSG00000263878_12 (sequence is synthesized)
ggccctgccttttattaacagcacagaacactgggcccagactcttgcgagaacatgcctttgaactgtttgctgctcaccttttagtgaaagctcttgacagaaatattaaagagaaag

SEQ ID NO: 805136 - DNA, 120 bp, Artificial Sequence
  ENSG00000263878_13 (sequence is synthesized)
tcccaagtagctgggattgcaggtgtcatctagttcaacaacacgcttttcaaataggagatggaagaccactgaagtcacctgaagctgtttaggagacacaggctggagcaaaactgg

SEQ ID NO: 805137 - DNA, 120 bp, Artificial Sequence
  ENSG00000263878_14 (sequence is synthesized)
agacacaggctggagcaaaactggaatggcctagcattgaatctggtttctcttttctttttatttattaatgtaataaaaaaaattttggtttctattctgcttagtagaaaaggttta

SEQ ID NO: 805138 - DNA, 120 bp, Artificial Sequence
  ENSG00000263878_15 (sequence is synthesized)
tatatggatcacatgtctgtgtgtgtatctctgtgtgaaagtgtctgttttttgtaaagtttatgtatttttcttcccctctctcattggcatttatctcgatgtaattgacttgaggtt

SEQ ID NO: 805139 - DNA, 120 bp, Artificial Sequence
  ENSG00000263878_16 (sequence is synthesized)
tctggtcttggtaaatttcctattatttcaaaagctttgaaaaattattaaatctaatttagaagtgtaaaattccaactcaaactttggaagtcaaattaaaactcctctctttggtaa

SEQ ID NO: 805140 - DNA, 120 bp, Artificial Sequence
  ENSG00000262693_0 (sequence is synthesized)
ttcccgcggggaccgtttgcgcgacccttttaactctcccaacccgcatcgttcttatcccatccttcctttccacagactccgtgggtctgataagcacagggctgcagatcctgggaa

SEQ ID NO: 805141 - DNA, 120 bp, Artificial Sequence
  ENSG00000262693_1 (sequence is synthesized)
caggtctctcctcggcgggagcgaagggagacatgctttgagttccggaagggcttgcaggagtgacgtttggcctgaaatctcaagattgcgtgggaattaccaaggcccagaaatcac

SEQ ID NO: 805142 - DNA, 120 bp, Artificial Sequence
  ENSG00000262693_2 (sequence is synthesized)
cctactcagcttgtctaccattttccacggttgccattgcaaccttcctcactctgctcaaaactttctccaagccgtgatccaagaaaagtccatttccatcaaaatcattgcaagcta

SEQ ID NO: 805143 - DNA, 120 bp, Artificial Sequence
  ENSG00000262693_3 (sequence is synthesized)
catttatcccaaggaaagacgcccagactacaaaaatatcctgccgcagaaccaagggtggaagatatttggttttactgagctttatctagtacacctgcattaatgggtgtctgcctc

SEQ ID NO: 805144 - DNA, 89 bp, Artificial Sequence
  ENSG00000244203_0 (sequence is synthesized)
ttttttaatgtagagataagagtctcactatgttgcccaggttgatctcaaactcctggtctcaagagatcctcccacctcagcctccc

SEQ ID NO: 805145 - DNA, 120 bp, Artificial Sequence
  ENSG00000244203_1 (sequence is synthesized)
gagatcctcccacctcagcctcccagagtcagaacccagatcctggaactcttcttttcttcttctataccactgcttccttgcagataccaggtttcgccatgttgaccaggctggtct

SEQ ID NO: 805146 - DNA, 120 bp, Artificial Sequence
  ENSG00000244203_2 (sequence is synthesized)
atatatacaaattagtctttgaaagatctttcaccttgttcaaagttaagatcctgtgaacaccagaattgttccatggcctcttcactattgattgcaacagtatcatttacctgaagt

SEQ ID NO: 805147 - DNA, 120 bp, Artificial Sequence
  ENSG00000244203_3 (sequence is synthesized)
tacacagtgaccacaaaaaccatgtccaggacaccaaatttctactgcgaactctaggtcctcacgagcctttctctgcgagtccaaaattcagccacatttcctaagaggcacctgtac

SEQ ID NO: 805148 - DNA, 120 bp, Artificial Sequence
  ENSG00000244203_4 (sequence is synthesized)
ttgtctatttcaatgcagccagaagctgacaacggcccaggaaccaggactgctttcaggaggcgctcagaagggcagcaaagtaccctctcaacattagtaaaatgaaacaaaagtgtc

SEQ ID NO: 805149 - DNA, 120 bp, Artificial Sequence
  ENSG00000269802_0 (sequence is synthesized)
aagtcggagattaagagccgaggagcagagaagggtgttcccacagctcatcttggaagaggggtcccagagaggacttagcctgggtcttggccttgaagagcttccagcctggtgtgg

SEQ ID NO: 805150 - DNA, 120 bp, Artificial Sequence
  ENSG00000269802_1 (sequence is synthesized)
ccgacttctactgagacctcctcattcattttttggccacctgtggagtagattgtgggagcccagagaagggtgttgtggattcttcctggagatcagaccggaaagcattcctaggag

SEQ ID NO: 805151 - DNA, 120 bp, Artificial Sequence
  ENSG00000269802_2 (sequence is synthesized)
ccaaagcgctgagatgtcaacagagggaaagagttgaaggcagggctgctctgaataatcttgtaccagaatcctgggtccatttgtgggagtttctcagggggacataaatccaggaga

SEQ ID NO: 805152 - DNA, 120 bp, Artificial Sequence
  ENSG00000269802_3 (sequence is synthesized)
tgagttgctggttgtaggacatgttcatttgcacctttactgaatgtgatggaggcagcctgttgtggtttaaagattcaggctcccttcccacagggtaaagtggataccaggaagtgg

SEQ ID NO: 805153 - DNA, 120 bp, Artificial Sequence
  ENSG00000240198_0 (sequence is synthesized)
ttcaactgtactgagaaatggaaaaagtcagttggccaagcaaaagtgctaagagcagagaggagtcaagaatcctcatgggcttccagtgcctggttcaaggtgtcaggatctatacag

SEQ ID NO: 805154 - DNA, 120 bp, Artificial Sequence
  ENSG00000240198_1 (sequence is synthesized)
caatctggcattctgaccccaaagcatataccttttcaccatctaagcatttgttatggctgccaagcactgtccaccaaactcagactctgggctgaccaataaaactgctaaccccaa

SEQ ID NO: 805155 - DNA, 120 bp, Artificial Sequence
  ENSG00000240198_2 (sequence is synthesized)
gacacagaagagccagggcaactcaccaaaactatgggaactcccacctgatgtgcctttaaaccaggccccctcctgcctcaacctcctcttcacccacacgtaagcaataaaaaccca

SEQ ID NO: 805156 - DNA, 120 bp, Artificial Sequence
  ENSG00000240198_3 (sequence is synthesized)
ggctaataagatcgcaagacagagaacatgtgggtggttatttatgtttcatacccttctccattaagttacatgttggcctaagtccttctgaaaataaatgtctgttttaaaacaaaa

SEQ ID NO: 805157 - DNA, 88 bp, Artificial Sequence
  ENSG00000269807_0 (sequence is synthesized)
ggggttgtggcctctgggagagaaaaaggcagggtcagtccctccccagcccaagttagaacaaattaggtggccatgctgaagcagg

SEQ ID NO: 805158 - DNA, 120 bp, Artificial Sequence
  ENSG00000269806_0 (sequence is synthesized)
aaaacagaaacaggctccatccaggaagcagaccatccagggaagagagtgggggctctgccacttagcagctgtcgggctctgggcaagtcacttaatcgctctgtgcctcagtttact

SEQ ID NO: 805159 - DNA, 120 bp, Artificial Sequence
  ENSG00000269806_1 (sequence is synthesized)
cgtgtaaaatcggggtgctccctgcacctacctcctccagtccttctgtgagtgaaggagctgatgcttgtaagtggcctagaccagaaccaagctggggcgagccaaggaagacaatgg

SEQ ID NO: 805160 - DNA, 120 bp, Artificial Sequence
  ENSG00000269806_2 (sequence is synthesized)
gcagcatcatttgctagttcctgaaagcgactgcctgcccagcttggcagaacattgcttcgttcagcctcacagcagaccctacgagggaggcatcatgggcccattttatagacaagg

SEQ ID NO: 805161 - DNA, 120 bp, Artificial Sequence
  ENSG00000269806_3 (sequence is synthesized)
aaactgaggccatgcaaaggaattgcttgcccagggtcacactgcaattaagcagagaagccagcattccatccaacacctgccaattaagggggtcacagtccccaggagaaataaact

SEQ ID NO: 805162 - DNA, 120 bp, Artificial Sequence
  ENSG00000265313_0 (sequence is synthesized)
gttatgcctgatgcaggacccaccccttggacttcccatttccaggagctaaaactagactgagttgagtttctgtcactgacagttgacagaaaatatcaacaatccagccacatggag

SEQ ID NO: 805163 - DNA, 120 bp, Artificial Sequence
  ENSG00000265313_1 (sequence is synthesized)
cctcatggcagtaccactaaccctggtcaccacatgaatactgaccagaggcatttcacctgaatcaactgtttgtgttcttaactccatctcctcatctgcttcctggaagacccaact

SEQ ID NO: 805164 - DNA, 120 bp, Artificial Sequence
  ENSG00000265313_2 (sequence is synthesized)
gacatagatggttacaagaaatgatttcctccttataaaactctagttgctgtctccttgatctggaagcttgtccctccttgtaacacctggcaggcattgtctcttctggaaagactt

SEQ ID NO: 805165 - DNA, 120 bp, Artificial Sequence
  ENSG00000265313_3 (sequence is synthesized)
tacgccactgccctcttttgctgccctttgacaactgcaactgaactcctctgttctgataaattatattgccccagcttcctcattttatattgctgaccatgtatcttctcctgaaga

SEQ ID NO: 805166 - DNA, 120 bp, Artificial Sequence
  ENSG00000265313_4 (sequence is synthesized)
ccaaatacgaagaaatacacaagcttcttgtatagaagatacctaaaaagtgtttgctgaatgaagaaataaaggattgctcaggcaccactggcactttaagttgttcagcaagtactc

SEQ ID NO: 805167 - DNA, 80 bp, Artificial Sequence
  ENSG00000265313_5 (sequence is synthesized)
tcaggcaccactggcactttaagttgttcagcaagtactcgtgcctcttaagaactggccaagggcccgccgaggcgggc

SEQ ID NO: 805168 - DNA, 82 bp, Artificial Sequence
  ENSG00000265313_6 (sequence is synthesized)
ggcaacagggcaagactctgtccgaggtcttagctggagcactctctctaccctgcatgtttgactgcatttctgtccattt

SEQ ID NO: 805169 - DNA, 120 bp, Artificial Sequence
  ENSG00000265313_7 (sequence is synthesized)
tctctctaccctgcatgtttgactgcatttctgtccattttcaatccgttttggttatacgttttttcacacaggtctgttgaacttagaacaccgaaggcctgtgtattttcatggctc

SEQ ID NO: 805170 - DNA, 120 bp, Artificial Sequence
  ENSG00000265313_8 (sequence is synthesized)
acagatagcttaggtttatttggtgacttgcgccacatactttgcgaatatcatctcagtcatccttttagcatctctctcaggcacatactctcctctgtggtggctcatgccggtaat

SEQ ID NO: 805171 - DNA, 74 bp, Artificial Sequence
  ENSG00000265313_9 (sequence is synthesized)
ctgcaccattgcacttcagcctgggtgagaccccatctcaaatcaatcaatcaatcaatcaatcaatcaatcaa

SEQ ID NO: 805172 - DNA, 120 bp, Artificial Sequence
  ENSG00000265313_10 (sequence is synthesized)
atctcaaatcaatcaatcaatcaatcaatcaatcaatcaataagggaaaagctatcacacagcagaatacagtccaagggtaactactgaagggccagatcaaggagcaaagtctatcat

SEQ ID NO: 805173 - DNA, 120 bp, Artificial Sequence
  ENSG00000265313_11 (sequence is synthesized)
gtatcaacctttacagtgtccccaagggtcagctgtgtataggggcccacacagaatttggaatccaaatacatctctggatccccaggcctgtgtttgactcgccaggtagtaatgaga

SEQ ID NO: 805174 - DNA, 120 bp, Artificial Sequence
  ENSG00000265313_12 (sequence is synthesized)
tgtctccattttctgcaggctgaatgattccctcagagcagaagtataagcatatttattgtttttccttctatcataaacagttattagttgtggccctttctcccttccaaataggtg

SEQ ID NO: 805175 - DNA, 120 bp, Artificial Sequence
  ENSG00000265313_13 (sequence is synthesized)
cccaaatttctggaagtggaaagggcccaactttcccatatcagggggtgggccccactgggcgtgagccaatcagtgtcttctgtcctgtgagctcccgatttatgctggtctataacc

SEQ ID NO: 805176 - DNA, 120 bp, Artificial Sequence
  ENSG00000265313_14 (sequence is synthesized)
tgagatggccttctcaggatggacctccagggattgctggaacttggactcttgtcagcctggtaaatggtatgtcttagatctgctgcagccgtcgtggaaaacttgaagctgccagga

SEQ ID NO: 805177 - DNA, 120 bp, Artificial Sequence
  ENSG00000265313_15 (sequence is synthesized)
gagaggggttccaacatgtggtggctaaagaatgaatccaactcaaaggaagcagagccaagaaatggatccatgctgtttgaatcttggatcaaattgtgcctggatctccagtgagac

SEQ ID NO: 805178 - DNA, 120 bp, Artificial Sequence
  ENSG00000265313_16 (sequence is synthesized)
gacataatctaaattctttccaaagatggatgcaaatgctgggaaagcaagagttgaattgctagccatgaggaaaacgtaagcctgagctgtttgctggccatctttgcttccacatgg

SEQ ID NO: 805179 - DNA, 120 bp, Artificial Sequence
  ENSG00000265313_17 (sequence is synthesized)
aattcacaccgtggaaaagaactaaagtcccatcctaattcatcagagccttctgtttcctgtaacaaagaagaactcacaagatcaggattccaaggtatatatctagaagtggaagtg

SEQ ID NO: 805180 - DNA, 120 bp, Artificial Sequence
  ENSG00000265313_18 (sequence is synthesized)
aatgatttcctccttataaaactctagatctagtgggtttgcaagaaaccctcccagggcagcagccttagaggaagtgcctgctaatgcaagaaggagggcaagggggacagcaagctg

SEQ ID NO: 805181 - DNA, 120 bp, Artificial Sequence
  ENSG00000265313_19 (sequence is synthesized)
gagcctggagctgctcatgcgcttggaatcctcggcgggcgcaggcggggatttacggacctgccttttccctcatcattccgcaggaagcttctttaaatgagcctcagcccagcagct

SEQ ID NO: 805182 - DNA, 120 bp, Artificial Sequence
  ENSG00000265313_20 (sequence is synthesized)
ctcatggggcctggtgtttatagtggagactgagataaaagaaccgtggagatgccagccctggatatcgaccccacggtccaggaatcatcaactgggcccgagggcaaattgtgttct

SEQ ID NO: 805183 - DNA, 120 bp, Artificial Sequence
  ENSG00000265313_21 (sequence is synthesized)
gttttctctgtgcgaaatgccagaatgctcctgcctcgaagaggttgactctgttgtcagctgtgggaaaaaacagccagagttgctatttacaccctgaactgcaagctgggtaaaaat

SEQ ID NO: 805184 - DNA, 120 bp, Artificial Sequence
  ENSG00000265313_22 (sequence is synthesized)
agcgctagcagcttggtccagcttcaaaccccactgcagagagattatttttggaagagaagattttcctccccacccacagatctgaaaatggtcacctccccggaagaaagggggaga

SEQ ID NO: 805185 - DNA, 120 bp, Artificial Sequence
  ENSG00000265313_23 (sequence is synthesized)
gatgatcccacgcaaaggtgaaacctacccccttcccactttccctgcccaggacagcacatcaagagacagacaagaaatgccctcccctgacagcaggtcaggcccagcacagccctg

SEQ ID NO: 805186 - DNA, 120 bp, Artificial Sequence
  ENSG00000265313_24 (sequence is synthesized)
cagctgacctagttcaaggtacagtgagaattaattaactttgactaagtgagaggaggcagctttctgaacctggatgctgcaccatcctgttgcttgttatggctaaaggcagaaaaa

SEQ ID NO: 805187 - DNA, 120 bp, Artificial Sequence
  ENSG00000265313_25 (sequence is synthesized)
ataattgatcaaaagagtacgcaagaccccaaaacaatagctcagagcctgagggtcaggaaattactctccagccctcccactccggataggccgtgatacggctgtacaatgatgaac

SEQ ID NO: 805188 - DNA, 120 bp, Artificial Sequence
  ENSG00000265313_26 (sequence is synthesized)
aaattcccaaaagcttggtctggtcctgcttctgtgttgagaacccctggcagctgggggctgaaaattcttccctcagctacttgctagagctcaggacccggtgtctggagttccaga

SEQ ID NO: 805189 - DNA, 120 bp, Artificial Sequence
  ENSG00000265313_27 (sequence is synthesized)
acctccttcaggttcaggaagtgatccacatgacaatcagtggaagaaaagtcattccttaatagcatgccctttattctgtaaaaagatattttataggtacatctaagtatgtggatt

SEQ ID NO: 805190 - DNA, 120 bp, Artificial Sequence
  ENSG00000265313_28 (sequence is synthesized)
atgctatcttagaactctaaaaagatatacacatgtggatagttcttatcaggtaaaactatattaagactatgtgaaaaacagcagagaaaaataccagatccatggtgtcatgaaatt

SEQ ID NO: 805191 - DNA, 120 bp, Artificial Sequence
  ENSG00000265313_29 (sequence is synthesized)
gttctataatctgaaagcacccaggctgcccagagctgaaaccaagaggtgcttaataagtatttttagggaggaagagaaaacacctcccacatcctacctccatccaaacctccttct

SEQ ID NO: 805192 - DNA, 120 bp, Artificial Sequence
  ENSG00000265313_30 (sequence is synthesized)
acggagatccaggaaccaaaatgaatcttccagtttgagaagacatacctcggcatccccacccacctgatagaaaggcgagagaatgacatagcgctcccccaacctctcagcaccccc

SEQ ID NO: 805193 - DNA, 120 bp, Artificial Sequence
  ENSG00000265313_31 (sequence is synthesized)
tacccaacacaccagatcttcactaccctggcctcagtgtgagctttggggtagcaacaaagtcggggacacctgggtctaggtagaagtggcacagatgggcatgtgccaggggcacaa

SEQ ID NO: 805194 - DNA, 120 bp, Artificial Sequence
  ENSG00000265313_32 (sequence is synthesized)
tagctgtatgaccaactcacttcacctttttgaaatctgttttcctcgctaagagggctgataccacccacctgctggggttggtgagaacgagctgaagcagcacgtgtgaaggctgtt

SEQ ID NO: 805195 - DNA, 120 bp, Artificial Sequence
  ENSG00000265313_33 (sequence is synthesized)
tggtggctgctgcagagtgagggctattgtgcatccaggggcagtcctgtttctccggggcatatcctgggccagattcggggatctgtcttacttccagctacctgacgatggggagtc

SEQ ID NO: 805196 - DNA, 120 bp, Artificial Sequence
  ENSG00000265313_34 (sequence is synthesized)
taccagacggctaaagtctgaactctctgagaaatgcatggcattgacagaaattgctaaaaatgtcctttctccacagtgtgaggccctcctgcaccctgcccttcatttaccgtggcc

SEQ ID NO: 805197 - DNA, 120 bp, Artificial Sequence
  ENSG00000265313_35 (sequence is synthesized)
cttcacctgaaatgaaaatggtcacctccaaggagccagaaacagaatctccctaattgggtgtctctgccaatgggggttgtccggccagctaagggctggctcagcacaggcttctca

SEQ ID NO: 805198 - DNA, 120 bp, Artificial Sequence
  ENSG00000265313_36 (sequence is synthesized)
gctgagggaggtcacggaaatggagtcccagtgcccctttccaagtctcatctactcatgacatcgggagggaagagttgctgctctgctgagtcatagctatttaagctatcagtactc

SEQ ID NO: 805199 - DNA, 120 bp, Artificial Sequence
  ENSG00000265313_37 (sequence is synthesized)
cgggctcggagactccccaaggacctgggaaagacagctcaatatccctttgatcaggactgcttcgggtttctatttccaaagttgagaaatccagataatgctgactcctgcccagga

SEQ ID NO: 805200 - DNA, 120 bp, Artificial Sequence
  ENSG00000265313_38 (sequence is synthesized)
acgaagtgagctcaggtctctctcactgacctcctgctgagaattgtaggccaaggtggccgggctctcccttccagcctaagtcagcttccttctgagtcagcattcttcacctcccta

SEQ ID NO: 805201 - DNA, 120 bp, Artificial Sequence
  ENSG00000265313_39 (sequence is synthesized)
ttaatagccactgctttggctgactccatgcacagtatgattacagtttaataatacgtctcaaaccaggaagcagtcaccttcctggagctgggctgtggagggcccccagagcagagg

SEQ ID NO: 805202 - DNA, 120 bp, Artificial Sequence
  ENSG00000265313_40 (sequence is synthesized)
ctccatcccagaaagcagaggccagaacagctgcagagaggctggggagacaacgtaattggcctgcaagacaagtcactgctttgggggttctgtctcactgagcttccttttgtttag

SEQ ID NO: 805203 - DNA, 120 bp, Artificial Sequence
  ENSG00000265313_41 (sequence is synthesized)
ggcaggagacatggacacaggctaactttcattttattctcacagatattcttgggcaggactgaaaaagtgtggctatcttatccaattatgcagacccctcagctcactggaacggcc

SEQ ID NO: 805204 - DNA, 120 bp, Artificial Sequence
  ENSG00000265313_42 (sequence is synthesized)
gaacggccagttctaggccaacctggggttagccccttccagtgtcaccttttccctgtcacgacagtaacactgtggcctacttaaagaggctcagggccaggtgcagtggctcacacc

SEQ ID NO: 805205 - DNA, 120 bp, Artificial Sequence
  ENSG00000265313_43 (sequence is synthesized)
gagactctgtctcaaaaaaaaaaaaaaggatcagattgtccagatgggatgggatgctgagaccagattgaaccccagcaaaaaataaataattttttttcacttcacccctcttccctt

SEQ ID NO: 805206 - DNA, 120 bp, Artificial Sequence
  ENSG00000265313_44 (sequence is synthesized)
cctttctctgtttctccccaggaaaggcaaacaagctaaacgtgctttagcattagatcatactgagaagcaatgaagtcaggccacccggtaatttgttccagacttcccatcccttgt

SEQ ID NO: 805207 - DNA, 120 bp, Artificial Sequence
  ENSG00000265313_45 (sequence is synthesized)
gggccctgaatgggcaaaacatacaggtttaggagccagacatcctgggttcaaattctcacttagcctctgagctgagagggcttagtaaatttactccacttttctgaacctccatct

SEQ ID NO: 805208 - DNA, 120 bp, Artificial Sequence
  ENSG00000265313_46 (sequence is synthesized)
tcttatgtatataaaagggataataatatatcctgaaatgattttaatgcaaatgaaatgagacaactttaaaaagtatgccaagtactgtgcctggagtatagtaagtgatcaataaac

SEQ ID NO: 805209 - DNA, 120 bp, Artificial Sequence
  ENSG00000265316_0 (sequence is synthesized)
ggacaacagccagcaagacagtaaggacttcagttgcacaaccacagggaaatgaattatgccgacaaccctaaggagtatgaagctgatctgttcctagcccagtgtctccatgaggat

SEQ ID NO: 805210 - DNA, 120 bp, Artificial Sequence
  ENSG00000265316_1 (sequence is synthesized)
gcagtcagtgaacaacatgatttctgctttctgagaccctgaacaccggaccaactgacatacactggactcctggcctatgcaaaacgatctgagccccttttctcctgattaatccac

SEQ ID NO: 805211 - DNA, 120 bp, Artificial Sequence
  ENSG00000265316_2 (sequence is synthesized)
aagaagacggcaagtgaagaaaataggagaaagtgaatagatttcaaggcaaagtcttgagaacttcttaagaattgaaagagaccaatctgctgagcttatgaaaagaaagcaacaaaa

SEQ ID NO: 805212 - DNA, 120 bp, Artificial Sequence
  ENSG00000265316_3 (sequence is synthesized)
aactgaatagccaattctaaaggccaaaacagttgagaagagtaaagaggaaagaaggaagaaaaagcaaacatttactttagtaattttaaatgtttgaagattaaaaaaaacaaaata

SEQ ID NO: 805213 - DNA, 120 bp, Artificial Sequence
  ENSG00000263257_0 (sequence is synthesized)
acatagcactcctgtctcccgtttgacttcatatagtgaaaattgtctaaaagataaggcaggagctctggttgacaccccccctgcccccgcctcatagatctctctctagaagcattg

SEQ ID NO: 805214 - DNA, 120 bp, Artificial Sequence
  ENSG00000263257_1 (sequence is synthesized)
gaagaggccgtctcaaaaaagaaaaataaaatagaagcattggaggaaagatgtggtttgtagtgaaacaaattggaagtcaagctcagcctcaaccacttacttgcttctgaccttggc

SEQ ID NO: 805215 - DNA, 120 bp, Artificial Sequence
  ENSG00000263257_2 (sequence is synthesized)
tgggcaatgtgtcaagaccccatctctacaagaaattttaaaattagccaggcattgtggaatcctgctttgtgtagttcagtgcctgctgccaagtcagagctgtgacctcaatgaaag

SEQ ID NO: 805216 - DNA, 120 bp, Artificial Sequence
  ENSG00000263257_3 (sequence is synthesized)
tggcccagccacagcaaacctcagtttccataacagtcctgggatccaatgtggctttcacactacatgtcacttcactctgttatctctgacagaaaaccaactcaaactggcttaagc

SEQ ID NO: 805217 - DNA, 120 bp, Artificial Sequence
  ENSG00000263257_4 (sequence is synthesized)
ttgctaatgtccctgtagtgtccaccacaggaaacattactatttgggttttgtgacccaggaatccatatttacctggcggcaacgacacagccctcacctttccagacctcatctggt

SEQ ID NO: 805218 - DNA, 120 bp, Artificial Sequence
  ENSG00000263257_5 (sequence is synthesized)
ggccttgtaatcctggagctgaagctgcctacacacaagcaatcggtcgcagtgtatccgtgcagggtcccaacccactccaggattcatttcgggatggcttcccctccctcagccagg

SEQ ID NO: 805219 - DNA, 120 bp, Artificial Sequence
  ENSG00000263257_6 (sequence is synthesized)
ctccggccccgttgctctgcatgcttgcccatctccatctccacggcgatcatgtgtttgcagggagccatcaatatcctcttctcttacgctttctgaatgggagagtcaatctcaatg

SEQ ID NO: 805220 - DNA, 120 bp, Artificial Sequence
  ENSG00000263257_7 (sequence is synthesized)
ggaagctagcagggacttgggtggacaggtgtctcacgctggatgggcgaatccaggtgggagggagggtgggcttgctgtcatttgttggtgggtcatgggatttgctatgaagctgga

SEQ ID NO: 805221 - DNA, 120 bp, Artificial Sequence
  ENSG00000263257_8 (sequence is synthesized)
gggaaaatctggacccctgaagaggggtcccttcccttcctaagggaaggcctcagctccaagactgcaggaggagctgggtagccattggatatggctaacgcacatgaatcatgacca

SEQ ID NO: 805222 - DNA, 120 bp, Artificial Sequence
  ENSG00000263257_9 (sequence is synthesized)
gggtgcactgtttggacagcaagtcagtggcccaaggagagagaggttagtgatgggaagcgtcctgagactcactgatgcatctttacatttttctctttaagcattaggaagaggccg

SEQ ID NO: 805223 - DNA, 120 bp, Artificial Sequence
  ENSG00000263257_10 (sequence is synthesized)
tcactgggccatgtaaccaaaaagtgtaggcatacatgtggcttcaggaatggctggatccaggcactcacatgtggcatcgggagtccctctcctggctgttggtttcagttttctctg

SEQ ID NO: 805224 - DNA, 120 bp, Artificial Sequence
  ENSG00000263257_11 (sequence is synthesized)
caggggtttcattcaagcactggttccctcctcatagtggcaaggtggctgcccaggacaagaggcttatagccacgggctcagctacttaaggataagttccatcagaagcccaagttg

SEQ ID NO: 805225 - DNA, 120 bp, Artificial Sequence
  ENSG00000263253_0 (sequence is synthesized)
tgagatggaatgtctacccagactggtaaccagtcactaccatccctgggcagagcctgggcagccgtctttgttgcagtcctaacctcaggacatctttggagatggggtctgtcttta

SEQ ID NO: 805226 - DNA, 120 bp, Artificial Sequence
  ENSG00000263253_1 (sequence is synthesized)
agacacagcgagaaggtggtcacttacaagccgaagaggaaggtcttagaagaaaccaacccagcagacaccttgaccttagacctcttttttgtgagaaaataaatttctgttgcttaa

SEQ ID NO: 805227 - DNA, 120 bp, Artificial Sequence
  ENSG00000251125_0 (sequence is synthesized)
cttcatatttacttttacagcgcacctctttaagagagaacattcacaatggaaaacagcggcaagggttagaagacttttaaaaggaggctgttagtgcagcagtaaaatttggccaga

SEQ ID NO: 805228 - DNA, 120 bp, Artificial Sequence
  ENSG00000251125_1 (sequence is synthesized)
tgctcacaaaatgtctcggataacagctggactcataatgtcctcatcatgaccggaggggacaaagaagctgaattcctagaccagtctatctattcgaacacttcatcaattgtatct

SEQ ID NO: 805229 - DNA, 120 bp, Artificial Sequence
  ENSG00000251125_2 (sequence is synthesized)
gcaaaaatattaatcaagacacaaagttcaaaccagtagagctgctggcttattctgggcctacagtcccatccttgaaattttactttctttttgttgagctccttgaatttgaggaag

SEQ ID NO: 805230 - DNA, 120 bp, Artificial Sequence
  ENSG00000251125_3 (sequence is synthesized)
gagcttggaaagggccctggtggaggagaatttgcataaggaaatcaccagctctagtacacttgtagcatgtgacaggaaaaatttgtcattggctatttatgaattaaatcttaataa

SEQ ID NO: 805231 - DNA, 120 bp, Artificial Sequence
  ENSG00000251125_4 (sequence is synthesized)
aatccctaggtcttccctaaccaagcacaaatgtcttaagaggttacctataattttgaacatcctttcaggacattttctgcatagttaatgtgggcagttgtgtctaggcacaggaca

SEQ ID NO: 805232 - DNA, 120 bp, Artificial Sequence
  ENSG00000251125_5 (sequence is synthesized)
gatttacttctatgtcaatatttaaggcactgtatatggcacagagaccccattattcagtgaaaatatggcctattcaaggagatgaaagtttagtgagaatcttaactaggaagacaa

SEQ ID NO: 805233 - DNA, 120 bp, Artificial Sequence
  ENSG00000251125_6 (sequence is synthesized)
caaagttactctatcaaagaaataatttaaatgactttgaagagaaaataagatttttttttaaatggaaagtttattttccaacctacaagacagttaaatagttagcatatctcttaa

SEQ ID NO: 805234 - DNA, 120 bp, Artificial Sequence
  ENSG00000251127_0 (sequence is synthesized)
aaacaacttcaacggcctttccatgcccaaagacactgcagcagagccgtctatgaatgacagatgaaatgccttagagtcttagttccaaaccacctccccggacagtcggaaatccca

SEQ ID NO: 805235 - DNA, 120 bp, Artificial Sequence
  ENSG00000251127_1 (sequence is synthesized)
ctggctggaggaataaataaattccttatcttgtcaaggaagctcctcccaagctacaaaagttgcagacagcaaagggatcaagtgaccccagagatgaaatctgtgactctctggtgg

SEQ ID NO: 805236 - DNA, 120 bp, Artificial Sequence
  ENSG00000251127_2 (sequence is synthesized)
agcaacatgatagtaataaacaaaggttgagtgcctgctgtataaagcaacctctggagtgcctgatatctactaactcttttagcacccactcgaccctgtgagatgcgtattacttta

SEQ ID NO: 805237 - DNA, 120 bp, Artificial Sequence
  ENSG00000251127_3 (sequence is synthesized)
ttgtatctaccactgtaaaaaagaatgaaccaagctacagcaatattatgttgcttgccctgagtcacacagctgagtaagtcacaggagtttgtgctcataatgactttgctatgctga

SEQ ID NO: 805238 - DNA, 120 bp, Artificial Sequence
  ENSG00000251127_4 (sequence is synthesized)
tgtttgaacctggaaccattcagcaaccctccagctaatatggctccatgctctacttctggaaaagctgagttcctgcagccttgtcctacatcacccaaaagagctggaaaagaatgc

SEQ ID NO: 805239 - DNA, 120 bp, Artificial Sequence
  ENSG00000251127_5 (sequence is synthesized)
agtgagttccattctatttgttccgagaataggaaagccacattgaagcaatatcttaaagagaaatctatagttaggagtgatgaagatttgaaacagatgtcagcagaaagaaaaagg

SEQ ID NO: 805240 - DNA, 120 bp, Artificial Sequence
  ENSG00000251127_6 (sequence is synthesized)
gagaggcaccatgataattatactcagtgatgctttttaaatgacatatattcagttaaatatagggaggtttgctgctagccatatgaacaaagcacaagagaattcctggatcaaggc

SEQ ID NO: 805241 - DNA, 120 bp, Artificial Sequence
  ENSG00000251127_7 (sequence is synthesized)
agacttaaagagacattgaaaaaaaaacaaaattcaaaattttgacctagtgcaggaagaagtgcaagtacaggggaagtggagggaaggagtggggaggctggcacagagatggcacgg

SEQ ID NO: 805242 - DNA, 120 bp, Artificial Sequence
  ENSG00000251127_8 (sequence is synthesized)
gcagatacgagcagattgactcgccaggactgtcattgggccaccgctcttagcaggaatttcaccattgaatgacctaattattgtcttgggaaaaacacaagagctcctgtccataac

SEQ ID NO: 805243 - DNA, 120 bp, Artificial Sequence
  ENSG00000251127_9 (sequence is synthesized)
aggataacagatgtatttcagtggagcacagaataggccggatggtgactagcaagaataaaagcccaagtggactgaagaatccatccaagatatggtcaggacgggcttgtggaaaac

SEQ ID NO: 805244 - DNA, 120 bp, Artificial Sequence
  ENSG00000251127_10 (sequence is synthesized)
ttgtgcaataatgagaagaaatgttatttgtcactaccttttttaggcagctgtgtggataaacctactttggggtaggagctgagcctcaggcctgtgaccgctagaagccagacttga

SEQ ID NO: 805245 - DNA, 120 bp, Artificial Sequence
  ENSG00000251127_11 (sequence is synthesized)
aaggagccctggttgccaaagccaggaggtgactttacaggagagcagcagtgactaagccaggaagtgactttgcgggagagcagcagtgactaattcaggaggtgactttgcggaaga

SEQ ID NO: 805246 - DNA, 120 bp, Artificial Sequence
  ENSG00000251127_12 (sequence is synthesized)
gcagcagtgactaagccaggaggtgactttgcgggaaagctgcagtgattgtgaagttgttcacatacagggggtcatgggacaccctctacgatctcccgtgggaaatcctcagtaagc

SEQ ID NO: 805247 - DNA, 120 bp, Artificial Sequence
  ENSG00000251127_13 (sequence is synthesized)
actctcactctagcaataagcactctcactctagaaagcccttttggtgcttccagtcacattgcctggcccacgctcggtgagagctcacatgcgcttctggtcctggccttctcagac

SEQ ID NO: 805248 - DNA, 120 bp, Artificial Sequence
  ENSG00000251127_14 (sequence is synthesized)
gccacagtagctgcccaccctgcaaaagacctggaaggggaggggagcctgtgccacagcagccagaggatgaatgtcctgtcatgaacaattcctgggggcactatgtacattttgtag

SEQ ID NO: 805249 - DNA, 120 bp, Artificial Sequence
  ENSG00000251127_15 (sequence is synthesized)
aagtcctgccagaatggaaccttgctgtctacagcagcgaccttgataacacatcatttgatttttcctccttttgtgactcatgcttctgctacctcaccctggcttcctgagatcacc

SEQ ID NO: 805250 - DNA, 120 bp, Artificial Sequence
  ENSG00000251127_16 (sequence is synthesized)
tcccagatgaactccctgcactgaattctggtctcagtttgctttggggagaactcaaaactaagacattcaccactgtgtttgtgtgagccaaatcttcacatcatgagcaggcgctat

SEQ ID NO: 805251 - DNA, 120 bp, Artificial Sequence
  ENSG00000251127_17 (sequence is synthesized)
gtctgcgttcagccagacaaacagcaaaccagcaactgcccacatgaatacagtccatggacaagaggagagtgatagctgagcgactttgggacttgctgtcaaagatacctgtctccc

SEQ ID NO: 805252 - DNA, 120 bp, Artificial Sequence
  ENSG00000251127_18 (sequence is synthesized)
tctctttcattctctttacctttccatcagactatgtggctgcctcattcccccgtgtcctgcaagcaaggatattaactatacaaacagtccagcttaaaacaaaatgggcagaatatt

SEQ ID NO: 805253 - DNA, 120 bp, Artificial Sequence
  ENSG00000251127_19 (sequence is synthesized)
tgaatagacacttcacaaaggaagacaaacaaattaccaataagtgtgttaacaattcttaacatcgttagtcatcagggaagtggaaattaataccacaaggagaaatcactacacact

SEQ ID NO: 805254 - DNA, 120 bp, Artificial Sequence
  ENSG00000251127_20 (sequence is synthesized)
aaagtggctaaaatgaaaaagagtaatgacatcaaattctaatctgagtatagagcaactgttgatggaaatataagatggtacagccactttggatataataaaatgatgcaaccactt

SEQ ID NO: 805255 - DNA, 120 bp, Artificial Sequence
  ENSG00000251127_21 (sequence is synthesized)
tggaaaagtttggcagctttatgtaaaactaagcaaatacctttggcccagcaattccactcaagcaatccttccctaaagaaataaaaatatatatccgccaaaagatttgtacaagaa

SEQ ID NO: 805256 - DNA, 120 bp, Artificial Sequence
  ENSG00000251126_0 (sequence is synthesized)
aaatatttcagcaacttcagaggcacttaattttcctccttttgtaaactggcaatcttgactctaacattgctaggaattacttatctatatttgtccttaaatacaagactattaaaa

SEQ ID NO: 805257 - DNA, 120 bp, Artificial Sequence
  ENSG00000251126_1 (sequence is synthesized)
aaaaatcaagggctgctttctgcccgtggataccgctgaggaagcctcgttaaagtctctcttcccagggccgtcctgtcctaaagagccggaacagctgcggaagctcttcatgggagg

SEQ ID NO: 805258 - DNA, 120 bp, Artificial Sequence
  ENSG00000251126_2 (sequence is synthesized)
gctgagctttgaaacaaccgatgagagcctgaggagcccttctgagcagtggagaaggctcacagattgtgtggactccaagtgaaggtgaaagagaccagacgagacctttcctaattc

SEQ ID NO: 805259 - DNA, 120 bp, Artificial Sequence
  ENSG00000251126_3 (sequence is synthesized)
aacccctggtctaaataatcaaacagagaaaagaagaaaaggaaaaaaggatcagaggacacagaagaatttctggacacacttccatctgctaattaaatggaaggagcaagtttgggt

SEQ ID NO: 805260 - DNA, 120 bp, Artificial Sequence
  ENSG00000251126_4 (sequence is synthesized)
ttttttgtttttcctctacctcaatcaaagactatgaatctttcttttaatctctggagctaacttctctaattagtttcctagaggaagaggatgctttactattggcatttcacactc

SEQ ID NO: 805261 - DNA, 120 bp, Artificial Sequence
  ENSG00000251126_5 (sequence is synthesized)
tgcacaatggtatgaacttgacatacctcagctgatccagcagaaagagctctaaaactcaaaagttatgtcatcagtaactgtcaatagatagaagtgttcgcaggtactactagttcc

SEQ ID NO: 805262 - DNA, 120 bp, Artificial Sequence
  ENSG00000251126_6 (sequence is synthesized)
aatactcattgactttgtaacaactggtatattagctacaatcaaacaaaatgaggtattctttacaagaattacataagccctttccaataaattttctgtaacgatggaaatattcta

SEQ ID NO: 805263 - DNA, 120 bp, Artificial Sequence
  ENSG00000251129_0 (sequence is synthesized)
agtggtaacccccttggatccccttccacactgtgggaggtttgttcttttgctctttgcaataaagcttgctgctgctcactctttgggtccagactgtctttatgagctataacactc

SEQ ID NO: 805264 - DNA, 90 bp, Artificial Sequence
  ENSG00000251129_1 (sequence is synthesized)
ggtctgcagcttcactcctgaagccaaggagaccacgaacccaccgggaggaaggaacaactacagacacgccggcttaagagctgtagt

SEQ ID NO: 805265 - DNA, 61 bp, Artificial Sequence
  ENSG00000251129_2 (sequence is synthesized)
tcactgcgaaggtccgcagcttcactcttgagccaaaactccagacacgccgcctttaaga

SEQ ID NO: 805266 - DNA, 120 bp, Artificial Sequence
  ENSG00000251129_3 (sequence is synthesized)
ccaagaacccaccaattccagacacactaccaaaggcagaggggagctcctagacaaagatattttgcttacaaatggaacatatcaaatcaagcttttgtgaacttgagggaagaaaca

SEQ ID NO: 805267 - DNA, 120 bp, Artificial Sequence
  ENSG00000251129_4 (sequence is synthesized)
ctggaaggccaggagagggcagactacccacctaaccctctgcagaattttgtgtggaccctggagaccagaaactaacttctcctgcagagacaaggtcttgctctgtcaccctggctg

SEQ ID NO: 805268 - DNA, 120 bp, Artificial Sequence
  ENSG00000251129_5 (sequence is synthesized)
ctcctgagtagctgggattacaggtacaagccactgcacccagctgttttttgttttgttttgtgttttctcctcaccatataagtttaattgcctagtttaagctcctaccgtctttca

SEQ ID NO: 805269 - DNA, 120 bp, Artificial Sequence
  ENSG00000251129_6 (sequence is synthesized)
ataagtttaattgcctagtttaagctcctaccgtctttcatcttcaacacagaactatcttggtgttaagaaatctatctttaacatttgctgattggctgactaatcactgtattatga

SEQ ID NO: 805270 - DNA, 120 bp, Artificial Sequence
  ENSG00000251129_7 (sequence is synthesized)
gttatatccattataatgtttttaacatgtttattttactcaatggggaatctagatgacttgctgcatgtgaagaacagttcctggcacagggtttgctccaaataaatgttgtcatca

SEQ ID NO: 805271 - DNA, 120 bp, Artificial Sequence
  ENSG00000251129_8 (sequence is synthesized)
tcaccagcaccatcatcgtcaccatcatcataaatgtaaacataataatagcaaataccttactgagcttaaatgtatgtttaattcaatgtatttaaaattaaatcctttatctctgca

SEQ ID NO: 805272 - DNA, 120 bp, Artificial Sequence
  ENSG00000251129_9 (sequence is synthesized)
gcctcctgagtagctgggattacagaaaaaacagtgaagcatagacagtttttgcaagaggcccaagatcatacatcaaatatgtgcacagccaggacctgaaccagttgatatctacaa

SEQ ID NO: 805273 - DNA, 120 bp, Artificial Sequence
  ENSG00000251129_10 (sequence is synthesized)
tgcaacctccacctcctgggttcaagcggccctgtcatctcagcctcctgagtagctggggttacagagctcctttctgacaacttgcaattgatccaacatttgaaaccttatgcagga

SEQ ID NO: 805274 - DNA, 120 bp, Artificial Sequence
  ENSG00000251129_11 (sequence is synthesized)
ccttatgcaggagccggacagcttggttttgaattataatcttacaaattactggctgtgtgttaaatctttaaattactggctgtgtgactttgtgtaagtaccttcacttctctgtgc

SEQ ID NO: 805275 - DNA, 120 bp, Artificial Sequence
  ENSG00000251129_12 (sequence is synthesized)
acttctctgtgccttagtttatgttatgtaaaaggtatgataatagtatctatcttggaatttagtttttaaatataaaatttatatatctacaacagctgaataagtgttatctatctt

SEQ ID NO: 805276 - DNA, 120 bp, Artificial Sequence
  ENSG00000251129_13 (sequence is synthesized)
aattattattataattatttgtatatgtcgggctcataaagctcttagctttgcaaaactgtctgagaaagtttgcttttctttgcattcattgggaaattaacttttctacacaataat

SEQ ID NO: 805277 - DNA, 120 bp, Artificial Sequence
  ENSG00000251129_14 (sequence is synthesized)
gtttttaaggcatggacctgtaaaatgtttaattggtgtggcttcaaagtatagaaattgtaaagtaggaaataattatacacaactatcaaaccaataataaaggtcaataaatattca

SEQ ID NO: 805278 - DNA, 120 bp, Artificial Sequence
  ENSG00000251128_0 (sequence is synthesized)
ggggtcaagtacagccagcccagccgaatgtggagaggaatttcttgtgcctagtctcttagctctgtaccacaatctcagaggaggccagcaagggtccaggagataaagggagctcct

SEQ ID NO: 805279 - DNA, 120 bp, Artificial Sequence
  ENSG00000251128_1 (sequence is synthesized)
aatccctctcctgactaccacttccaccttactgaaaatcctcaacacctacttcatctctgaagccacctttaaagaaaacaagaagtcaactccagatagatagtcaaagaattcaga

SEQ ID NO: 805280 - DNA, 120 bp, Artificial Sequence
  ENSG00000251128_2 (sequence is synthesized)
ataaaacattgtttaactttcataaagcacagaggaaagcagaatcccagatgctgctagaaccgtgtatgatggctaataaatggaattggccatcagaaacgagatggctaaacacaa

SEQ ID NO: 805281 - DNA, 120 bp, Artificial Sequence
  ENSG00000259352_0 (sequence is synthesized)
atcatcaaaacaaacagccaatatgtctctagaaacattgcgttctaaactggaagtgctgacaagccttcatcccagaccctgagtggcagattttcatgaaaatcagcttctgggcca

SEQ ID NO: 805282 - DNA, 120 bp, Artificial Sequence
  ENSG00000259352_1 (sequence is synthesized)
gaaccaggaaacccaagggccagatttccttcctcaatgaaggcacaccaattcctctgcttaaggacttctgttcacaatgaattgtattagttattcttaacattcaaaagagaaagt

SEQ ID NO: 805283 - DNA, 120 bp, Artificial Sequence
  ENSG00000259352_2 (sequence is synthesized)
tctgcatcagagcccacccatgtccagccattgtgccctgagatcccaagactgtggggatgagggcagagcccattaacatcagggattctggtcactggggtcacacttgagcatgat

SEQ ID NO: 805284 - DNA, 120 bp, Artificial Sequence
  ENSG00000259353_0 (sequence is synthesized)
acgaggagcccagcgccaggccctcggcctcctgcttcagcggcaccgtcagctccatggggcctcctggacggcagcgcctgccccgcgtggcccagggtgcaaagaggtctctgtgag

SEQ ID NO: 805285 - DNA, 120 bp, Artificial Sequence
  ENSG00000259353_1 (sequence is synthesized)
ttccgcggcttctgtacctcagtcctgcagctcctcccgcagcctgtcctacagcacaaaggctctggagcaaattccagctctgcctcccaccagctctgtgtccttggacaagaggga

SEQ ID NO: 805286 - DNA, 120 bp, Artificial Sequence
  ENSG00000259353_2 (sequence is synthesized)
atgcagtatggcagcattttctttggaacaaattaagaagatagtaacaaataacagaagaaatacttctacacatatattttccatgggcaataaacagataagtatataattatgaaa

SEQ ID NO: 805287 - DNA, 120 bp, Artificial Sequence
  ENSG00000259351_0 (sequence is synthesized)
gagatcttcagctgcagctcagggggatccaccacgtcacacagggctcctagtccaagagctgctgggagaatcagggacctggctcatagggatcattgagagaataatcctctcagc

SEQ ID NO: 805288 - DNA, 120 bp, Artificial Sequence
  ENSG00000259351_1 (sequence is synthesized)
tgctgagcactggtgccccctgccccatctggttgactcttactccagggtgctataaaaatagcattttccatgtgtgccatgaaggcaaaaagatctaagctgagccagagcccctgg

SEQ ID NO: 805289 - DNA, 120 bp, Artificial Sequence
  ENSG00000259351_2 (sequence is synthesized)
atcagggatactcacaggatgtaggtgatgacgcctatgctcctgcaaaataaagaacagtcaagtcagggccacctgggtcccatccccgaccagcaagggacaccctcatggatctaa

SEQ ID NO: 805290 - DNA, 120 bp, Artificial Sequence
  ENSG00000259351_3 (sequence is synthesized)
ggggaagaggtcacttgcctcctccacagcagaccctggatgccgtctcatgctccacacccatctccatcctgctcttcagcagcagcccggggtgtgtttggagtcatcgagctctga

SEQ ID NO: 805291 - DNA, 120 bp, Artificial Sequence
  ENSG00000259351_4 (sequence is synthesized)
tagcttgagaaggaggaaggactgagcccattcaactgcgaatggaaaaggtggagagtgggaaagtgtatttgtcttccctgactgctttgtcttggtacccttcagtttcactataat

SEQ ID NO: 805292 - DNA, 120 bp, Artificial Sequence
  ENSG00000259351_5 (sequence is synthesized)
gtgtctaggtaagatttttgtttttttctgcctggtatatattgtcctttctgtgtctgtggatgcatggatgcagttctgaaaattctcagccattctcttcaaatagtgcttctcctt

SEQ ID NO: 805293 - DNA, 120 bp, Artificial Sequence
  ENSG00000259351_6 (sequence is synthesized)
tttttctttttgtatctatttcctccttttagaattccaaagagatctatgataagttttctttttatcctcttttgcttatcctctctttcatatttctatgtctttgtcactctatgg

SEQ ID NO: 805294 - DNA, 120 bp, Artificial Sequence
  ENSG00000259351_7 (sequence is synthesized)
tgctctagctaatttgtttcagctctttcaattcttcaactctctccttagctgtatacaatctgctgtttaacccattcacagagttttacatttcaacaattaaattctttaaagttc

SEQ ID NO: 805295 - DNA, 120 bp, Artificial Sequence
  ENSG00000259356_0 (sequence is synthesized)
gtaaccatcactaccatcagggcatcctgcagaagcaggctggaggctgcagcctggacttcataaaacacgccacatcctgcgtctctttgggaagccccggagatggctggtaatcca

SEQ ID NO: 805296 - DNA, 120 bp, Artificial Sequence
  ENSG00000259356_1 (sequence is synthesized)
cccacccaaggcctgtcccgcctcttcccattcacctgggctggatccatggaggcaagaaactccatagaaaactacatgggaaaaaggagcatgttgttttcattcacaacagaaaac

SEQ ID NO: 805297 - DNA, 120 bp, Artificial Sequence
  ENSG00000259356_2 (sequence is synthesized)
agagctacggtgccactgcgaaagatcgaagagactaccaaggtgtaaatattataggagcaaaaaggcccacagctagcagagttcaggccctggcaaggtttactgaaggcttcatgt

SEQ ID NO: 805298 - DNA, 120 bp, Artificial Sequence
  ENSG00000259356_3 (sequence is synthesized)
tggaaaggcttcatcaggaaggggcctgcggctgggaggagtgggaatgctgcaggctctttctgttccttctgccatcgccctgccccacaggacgatgctgctggacaacagagattg

SEQ ID NO: 805299 - DNA, 120 bp, Artificial Sequence
  ENSG00000259356_4 (sequence is synthesized)
gacgtgaagatgcatcaatgactaacaatccgacgtgctgagacccacaaaccctcagctgtctgtgtaccgaggccctgcaaattctcccattcctcaatgataaaatacaggaaaaag

SEQ ID NO: 805300 - DNA, 120 bp, Artificial Sequence
  ENSG00000259356_5 (sequence is synthesized)
caagggagagaacagccacgactatcatggcgagggagagggaggacctgatgaagaagaagagtgaaagattttcacaactttgtgatttacagaacagcctctctcctggggccatgg

SEQ ID NO: 805301 - DNA, 120 bp, Artificial Sequence
  ENSG00000259356_6 (sequence is synthesized)
gacctgggggaatggggtgagaatcccaatataagaaaccccatggcaggccaggccagcgagagtacgagagtacactaatgccgctgtctgaactgggtggtgtttaggatcccccca

SEQ ID NO: 805302 - DNA, 120 bp, Artificial Sequence
  ENSG00000259356_7 (sequence is synthesized)
gctctggaaagccttgtctttgggctaccaatgccagggaagccctagctaatgtcatcccgagaaggcagacaacaccagttcccttcaaagaggcacctatggcatttgcatagcgtt

SEQ ID NO: 805303 - DNA, 120 bp, Artificial Sequence
  ENSG00000259356_8 (sequence is synthesized)
gataacgtcttattcttgcaaatgttgccctcgcctagagacaacttaaatgttgacagtctcaggacactggctccttcagacattcagaggttctgatatcctcctgctatgatgttt

SEQ ID NO: 805304 - DNA, 120 bp, Artificial Sequence
  ENSG00000259356_9 (sequence is synthesized)
actgggtgtcacctgttatgagataagacacgtaacgtgccaagaagaccagtcttccactaggacccacaaactccaatcacaaacgtggagcacccatgacaaccacaatccctgcca

SEQ ID NO: 805305 - DNA, 120 bp, Artificial Sequence
  ENSG00000259356_10 (sequence is synthesized)
atttctctctgcacttaacaaagccttagacagggaagggcaactggtaccatcctcgttcttctgtgagtgctaataacaagaggggctgcttattaaatacacaccaaggactttctg

SEQ ID NO: 805306 - DNA, 120 bp, Artificial Sequence
  ENSG00000259356_11 (sequence is synthesized)
caccaaggactttctgtgcattcccatgaattcttccaagtttcagatgaaaagacaagtaccagccgtcggcgctataagaagtcatgctggcagccaggcacagtggctcacacctgt

SEQ ID NO: 805307 - DNA, 120 bp, Artificial Sequence
  ENSG00000259357_0 (sequence is synthesized)
tattgccatgttttatttaatattttttatttaatcttttaatttttaaaaaaaacccattaacagtacattttggtctaaaatggtccctctgctgaaatgctaggtgctagccgtaat

SEQ ID NO: 805308 - DNA, 120 bp, Artificial Sequence
  ENSG00000259357_1 (sequence is synthesized)
tctggctttaaaaccaaaaccccaaatatttaataaataaaaattagaattagttgccattctactccaaaccagctagcctagctgaagagaagagggaagggggaagaggccagagaa

SEQ ID NO: 805309 - DNA, 120 bp, Artificial Sequence
  ENSG00000259357_2 (sequence is synthesized)
gctgaaagaagtagcactaagaaagatcatccgagcagtccccagtacagcccccactttttggcagaggtagggtaagggttatgtgcaccctcctcctaccctcaattcatttgtgtc

SEQ ID NO: 805310 - DNA, 120 bp, Artificial Sequence
  ENSG00000259357_3 (sequence is synthesized)
atagagggagaaagttaaaagctcagctttggtttctggcccaagttagggagcttagaaaggttagccttggtccagctttggcagaatgaggcccacagatgggacaataaggcagct

SEQ ID NO: 805311 - DNA, 120 bp, Artificial Sequence
  ENSG00000259357_4 (sequence is synthesized)
ggagtaatggttcagtcattcttacgatggttgttattgaggatggggtggccattggctaggggccggctctttgctcctcccccagctgcagcctcctccccctctgagctctctgtt

SEQ ID NO: 805312 - DNA, 120 bp, Artificial Sequence
  ENSG00000259357_5 (sequence is synthesized)
taacccctacccacagagagctgagggagggcctcaaaagcagtagaaaggatgacttggcgggtagggaggaaaatacgaccgtccccctctaacagaatataaccaacgtccccctac

SEQ ID NO: 805313 - DNA, 90 bp, Artificial Sequence
  ENSG00000259354_0 (sequence is synthesized)
tgccaatgatcctgacagcagaatttcagctcactgcaacctcgacttgctgggttcaagggatctcccaagtagctgggactacaggtg

SEQ ID NO: 805314 - DNA, 120 bp, Artificial Sequence
  ENSG00000259354_1 (sequence is synthesized)
cacaccatcatgcctggctaattttttgtagggatggggttttaccatgctgcccaggctggtcttgaacttctgagttcaagcgatcctccctcctgagcctcctaaagtgctgggatt

SEQ ID NO: 805315 - DNA, 120 bp, Artificial Sequence
  ENSG00000259354_2 (sequence is synthesized)
ctcctgagcctcctaaagtgctgggattacaggtttaaaaaatatcctggactttggaaaatattcttatataaagaagcaaaaagaggatggaatagacttgtgctaacactgaaactc

SEQ ID NO: 805316 - DNA, 120 bp, Artificial Sequence
  ENSG00000259354_3 (sequence is synthesized)
cagtcaagttgtaaactgaaaaagaacgtgttgaaacaaggaattgccccatagccttcacaggatctcactctgttgcagtgtcactggagtgcagtggtgcagtcttggcttcctgca

SEQ ID NO: 805317 - DNA, 87 bp, Artificial Sequence
  ENSG00000259354_4 (sequence is synthesized)
gtgtcactggagtgcagtggtgcagtcttggcttcctgcaccatctgccttccagaatcaagcaattatccagtgccaccatgcctg

SEQ ID NO: 805318 - DNA, 73 bp, Artificial Sequence
  ENSG00000259354_5 (sequence is synthesized)
attttttgtagagatggggtttcaccattgttgcccaggctgggctcaactcctgagctcacagtctatacta

SEQ ID NO: 805319 - DNA, 120 bp, Artificial Sequence
  ENSG00000259354_6 (sequence is synthesized)
tatttattaaatattgttgtcttttgctaggaaacttaaaaaccttaaagaacatcatttgtgagctcccaattggcacaaattacataaggtactctacacatatttttattttcttaa

SEQ ID NO: 805320 - DNA, 120 bp, Artificial Sequence
  ENSG00000259354_7 (sequence is synthesized)
ctttttgttataacaagtgaaaaatctaaaaatcaactgaataagcttttatgttgaaaagtatacttaaatgattctggtgatcatggtgttctagtaagaaaaatgctttgctagtga

SEQ ID NO: 805321 - DNA, 120 bp, Artificial Sequence
  ENSG00000259354_8 (sequence is synthesized)
tgtgacagcgtacggcatatgaataatatttgaaatcttgctactcttttcttatattctgccccaaacccaaaggaagtttaaaatgagaaaaaaggtaaaggtatgaaagaacctttg

SEQ ID NO: 805322 - DNA, 120 bp, Artificial Sequence
  ENSG00000259354_9 (sequence is synthesized)
caggcatgagccaccgcacccggcttgttatagtcttaaaacactctacaccaggggttagtaaacgtttcctataaagggccagatagtaaatattttatgtcactacgcaactctcca

SEQ ID NO: 805323 - DNA, 120 bp, Artificial Sequence
  ENSG00000259354_10 (sequence is synthesized)
tccacggtagcatggaagcagccatagacaatacgtaactgaatgagtgtggtgtgttccggtaacgctttatagacacagaaattcacttaaagtccatataattttcacatgccatga

SEQ ID NO: 805324 - DNA, 120 bp, Artificial Sequence
  ENSG00000259354_11 (sequence is synthesized)
aatatttactgtttttttttggggggggatggggacagggtctcactgtcactcaggctagagagcagtggcaccatcacggctcagtgtagcctagacctcctgagctcaagtgatcct

SEQ ID NO: 805325 - DNA, 79 bp, Artificial Sequence
  ENSG00000259354_12 (sequence is synthesized)
ggctcagtgtagcctagacctcctgagctcaagtgatcctcctatctatgcccagttaatttttgtattttttgtagag

SEQ ID NO: 805326 - DNA, 88 bp, Artificial Sequence
  ENSG00000259354_13 (sequence is synthesized)
gatttaatagatgtaaaaatcattcttagttcttggggcaaataaaacaggcttgcaggccagatttggcctgggaggtatagtgtag

SEQ ID NO: 805327 - DNA, 120 bp, Artificial Sequence
  ENSG00000259354_14 (sequence is synthesized)
aggcttgcaggccagatttggcctgggaggtatagtgtagactggtccacacgattggagagtcagcaggctcttactctcagacttcctggtggtcctcaccagtctattttacagtgg

SEQ ID NO: 805328 - DNA, 120 bp, Artificial Sequence
  ENSG00000259354_15 (sequence is synthesized)
cttctttatttcctttctgccactgttgatgggactgtagcgtcactgcatgtgactgataccaaaagagaaaggttcttttaattaatctttccatactatccagaagatttttttcag

SEQ ID NO: 805329 - DNA, 120 bp, Artificial Sequence
  ENSG00000259354_16 (sequence is synthesized)
tcagttttatttcttaaacatataagagggcattataaaatgacattataattataaaagattttcttttaagaacaatgtttttaggcctactaatattacttaataaaaagagcagat

SEQ ID NO: 805330 - DNA, 120 bp, Artificial Sequence
  ENSG00000259354_17 (sequence is synthesized)
gagcctgcctgctgggatgtagaggaggggggttccagcccctcctgtcccgcgtcaggtctgtagcacacaagctgcctgcccagggtcctcaaatcagctgtcttcactctgacctgc

SEQ ID NO: 805331 - DNA, 120 bp, Artificial Sequence
  ENSG00000259354_18 (sequence is synthesized)
aggtctcggctcctgcatactgcaagctgggtgccttccttctacagaacccatgcccccttgcaaggaaaccatggaatttccccaggagtcttcgacaactccaggccacaggaaggt

SEQ ID NO: 805332 - DNA, 120 bp, Artificial Sequence
  ENSG00000259354_19 (sequence is synthesized)
ggtcagaaaaggaatgaatttgaaggaggaagaaccagccctgcccacgttgtctggggcccctcccaaggggacaggaaagctccacaaacaggacctggaacatccagggagcgtctg

SEQ ID NO: 805333 - DNA, 120 bp, Artificial Sequence
  ENSG00000259354_20 (sequence is synthesized)
ggctgcagaagcccgctgtgcaaatgtgggaacggaggtagcttgtctaagctagcccagaggctgatccacatcaagccccgtcacagctgctgctcctgccctgtactcccagttgac

SEQ ID NO: 805334 - DNA, 78 bp, Artificial Sequence
  ENSG00000259354_21 (sequence is synthesized)
aaacaggacctggaacatccagggagcgtctgggctgcagagacacatagctcactatagcctcgacctcctggactc

SEQ ID NO: 805335 - DNA, 120 bp, Artificial Sequence
  ENSG00000259354_22 (sequence is synthesized)
gctccaaaatgcttttttatgcctcccctacttagtgttttacactgttccacagaatatcggaatctagaatttgttccagcataaagtgaaagatatgaatcaactttcatttttcct

SEQ ID NO: 805336 - DNA, 120 bp, Artificial Sequence
  ENSG00000259354_23 (sequence is synthesized)
catcaattcatccatatttttagcagaatttattaaatatgattcctctttggttttgctgtcttctgttcattgaatagaattttttctataatttgggaatttctggcatatttattg

SEQ ID NO: 805337 - DNA, 120 bp, Artificial Sequence
  ENSG00000259354_24 (sequence is synthesized)
cggccacgccttaccgaaaggagtcctgactcagagctgctgtgccgtcccttctcctgtccctgcctggaagaggcctatcaggttgaccaagctttgctcccacctgtggatgagaag

SEQ ID NO: 805338 - DNA, 120 bp, Artificial Sequence
  ENSG00000259354_25 (sequence is synthesized)
ccacacttcgagaatcactgttataatgtacagcagaactgcatgatcagctgtatggtagccttgaaaaccaacaggccacaatcacagtgaaaacctcaggttggcagccactggagg

SEQ ID NO: 805339 - DNA, 120 bp, Artificial Sequence
  ENSG00000259359_0 (sequence is synthesized)
actgcaagccgcctaaatgcagggcttttgatgatattccccgccaacaaggcatgaaggtggggcttgcctccatctggctctcctgccactttcaacaacacaccccacatccgatcc

SEQ ID NO: 805340 - DNA, 120 bp, Artificial Sequence
  ENSG00000259359_1 (sequence is synthesized)
tgcttagagtcgaagatgaatctggcataatacaaacagcactggactggaagcatgaagtttctcttatctgtgccttggtttcctcatgtggaaaatgaaaatgttgacataaataat

SEQ ID NO: 805341 - DNA, 120 bp, Artificial Sequence
  ENSG00000259359_2 (sequence is synthesized)
cgtgcttaccacacctagaaacaggggccatcattccagccagctaacagagaaaaagacgatacataatcaggcttgggaaaataaatttcagagaccaagtaaacaaagacaacaatc

SEQ ID NO: 805342 - DNA, 120 bp, Artificial Sequence
  ENSG00000259359_3 (sequence is synthesized)
tagtataagggttataactgggggatgaggggttgcaaatggagatctgccacagtcaactctatttggattcccctgttctcaacaggcaacagcaatcataatgggcttggagcacca

SEQ ID NO: 805343 - DNA, 120 bp, Artificial Sequence
  ENSG00000259359_4 (sequence is synthesized)
gtcccacaacatcacaggacatccagacataattgcattaataatgttgtgcataatcgcacaactctctggttattcagcatcgtccaatatgtgaataaagctctgaggaaaaattaa

SEQ ID NO: 805344 - DNA, 120 bp, Artificial Sequence
  ENSG00000259359_5 (sequence is synthesized)
gtgaaacgattcatactgcaagccgcctaaatgcagggcttttgatgatattccccgccaacaaggatgagtcaaggcctgccttgatgttgctctgtgtcctaccagcaattcttcctg

SEQ ID NO: 805345 - DNA, 120 bp, Artificial Sequence
  ENSG00000226334_0 (sequence is synthesized)
agctcagggccctccgaacaaagcagcgctcggtgccggacctgcagctctccccacccggcagcagcgccctcagcacgcccgggaacccccgacccctctgagcccggggtactgcgc

SEQ ID NO: 805346 - DNA, 120 bp, Artificial Sequence
  ENSG00000226334_1 (sequence is synthesized)
cccatttaacaccgcctccggtcccatctgagttgcaagtggtggggatgtggggctccggatcaaagtccccgaaaccgagcacttcccgaagcctccttggcctcgaaacaaaacaat

SEQ ID NO: 805347 - DNA, 120 bp, Artificial Sequence
  ENSG00000226334_2 (sequence is synthesized)
aacgcccaagcgacctactgccttggagattcccagcctgagctccccaggtccctcagaggacccgagaggaacatcttactgcttctcttcataaattgagaggaaggaggccacaaa

SEQ ID NO: 805348 - DNA, 120 bp, Artificial Sequence
  ENSG00000226332_0 (sequence is synthesized)
gttaccgcctagcgcagagagttcgtggccgctgcttccgctggcccccagcgccccaggcatcggggggttgttcagatactcgttgactttccggcaatgctcctcatcctggtctgt

SEQ ID NO: 805349 - DNA, 120 bp, Artificial Sequence
  ENSG00000226332_1 (sequence is synthesized)
cttgggttcctgcaagaggaagggcatgtaagggcaggagctggcgccagctcacccagggccaccacagccatcctctgacctggcttccaggtgagggacctgagacgcagaggcgcg

SEQ ID NO: 805350 - DNA, 120 bp, Artificial Sequence
  ENSG00000226332_2 (sequence is synthesized)
ggcccagggccacggcaggcgctcacaatcgagcacacgcgtgtgcacacacatgtgcacagatcagtgtcagaagcatcgacctgcgagctcacagagctgggagcagagcacccacgc

SEQ ID NO: 805351 - DNA, 120 bp, Artificial Sequence
  ENSG00000226332_3 (sequence is synthesized)
acaccccgaatggctatggaagctgcagggcgccagggacactgggagtccctgctctcatggcaaagcagggacgggggacttaaaagccaccaacaggaaaatcggggaaaaaaggga

SEQ ID NO: 805352 - DNA, 120 bp, Artificial Sequence
  ENSG00000226332_4 (sequence is synthesized)
gatggtggtaacagttggacactatttcttggcaaaaccgtggaaaaacacgttctacaccagcaggtggcaaattgtggccgccatctgtgtttgcaaataaagtttaactggagtttg

SEQ ID NO: 805353 - DNA, 120 bp, Artificial Sequence
  ENSG00000226330_0 (sequence is synthesized)
cgcgctggcctcaagccgggcggcagggagcaggcaagcgcttaaccctggccggccgggagccccagacaccacctgcctcctcgtcgactcgggagctcctcttcggaccgtttcctg

SEQ ID NO: 805354 - DNA, 120 bp, Artificial Sequence
  ENSG00000226330_1 (sequence is synthesized)
aactttaatgacgggcaattagcgcgaaagaaaaactacatggaatgaggaaatagaccactcctgccttcaaaatcctcttcgtgaggtttatagaattcctaagaactcaggaaagac

SEQ ID NO: 805355 - DNA, 120 bp, Artificial Sequence
  ENSG00000226330_2 (sequence is synthesized)
agagagcaatgatcgtcatagccagatgcactgtcacctccattcatacagcactgactttgccctttcagtcccatggggtttacagatctgttctcctaacagcttcttgcctatttc

SEQ ID NO: 805356 - DNA, 120 bp, Artificial Sequence
  ENSG00000226330_3 (sequence is synthesized)
acaatgcctattgcaaaactagctccacacagaatgcacccacccagctacttgtcgaattacaacctgatgatggatccaccagaaactaagaatggaaaggttataaagaaatcacag

SEQ ID NO: 805357 - DNA, 120 bp, Artificial Sequence
  ENSG00000231420_0 (sequence is synthesized)
agctctatgctaacttgcgtgagacatctgtgcacaatccatccagctgtgattaaattcctggtttcagtgtttgtgtgtgtgtgtttcaattcaaaaattaaaggcaaattcctgtgg

SEQ ID NO: 805358 - DNA, 120 bp, Artificial Sequence
  ENSG00000231420_1 (sequence is synthesized)
aaagagatacttggaaaacgtctgcaaatctaaaaacgctggacattttatatgaaacaagcataagaagactccaaaaggtagagacaaggcagaattgctggggaacttgagaccaaa

SEQ ID NO: 805359 - DNA, 120 bp, Artificial Sequence
  ENSG00000231420_2 (sequence is synthesized)
ttctcatggttgaagatgatgaagatgtgaaggctggatttgataatgaagagtcttctttgtgttctctcattatttatgccacatctgcctctcagcatttgtgtcaatgagtcactg

SEQ ID NO: 805360 - DNA, 120 bp, Artificial Sequence
  ENSG00000231420_3 (sequence is synthesized)
taattacagccgttggataatttcctccgttttacaacacaaacccgactgtgtgagtgctccatcagagaaaaacatttatttccttgcagcaccatcaggcagcaaggtccagctttc

SEQ ID NO: 805361 - DNA, 120 bp, Artificial Sequence
  ENSG00000245156_0 (sequence is synthesized)
aaagaagatgagggaggcgcacagcaccaggttagttcctgtaagcagacaaatagtgtcctttccaggaagcatcaggaaagagaggatggaaggaggaaaaagaagagtcaaagacct

SEQ ID NO: 805362 - DNA, 120 bp, Artificial Sequence
  ENSG00000245156_1 (sequence is synthesized)
aaggctaaggaggccaagctgaggatggctagtccaggagtacctggtcagtgacgtcatacaccacgatgatgccatgagccccccggtagtagctggaagtgatggtccggaaccgtt

SEQ ID NO: 805363 - DNA, 120 bp, Artificial Sequence
  ENSG00000245156_2 (sequence is synthesized)
cctggcccgctgtgtcccactaggagacagtaggcagaggagcaggtcagctgaggtccagagtcccagagtcccttccctcccaaggtggatacctctgtactggggattttgggaaga

SEQ ID NO: 805364 - DNA, 120 bp, Artificial Sequence
  ENSG00000245156_3 (sequence is synthesized)
gcgacactcacgatctgaagtttgatagttttgccatccagctcgatggttcggatcttgaagtccaccccgatggtgctgatgtagctctctgtgtacgtgtcatcctgaaagttcagg

SEQ ID NO: 805365 - DNA, 120 bp, Artificial Sequence
  ENSG00000245156_4 (sequence is synthesized)
ggccaatgaaatcatgggagttaatgaggtgaggcccacttggagagcctccctccagttccctgccccagctgggtctccgaaccaccaagccccaattcccagcactcagctggccag

SEQ ID NO: 805366 - DNA, 120 bp, Artificial Sequence
  ENSG00000245156_5 (sequence is synthesized)
ccctgtcttgttcagggcagatgtgctggtggcaggtcttacagcttcacccctggttcccagatcttgcaactactgtgctctgtgttgtcccttctccccccagctgccagtcaggac

SEQ ID NO: 805367 - DNA, 120 bp, Artificial Sequence
  ENSG00000245156_6 (sequence is synthesized)
cccaggtggatggtatgggaggcttcttactcacagcaaaccgcaggagcaggcatgacttgcccacgcctgagtcgccaatcaaaagcagcttaaacaggtagtcactggagagagaag

SEQ ID NO: 805368 - DNA, 120 bp, Artificial Sequence
  ENSG00000245156_7 (sequence is synthesized)
atgggaaggcgtgaagggaggcagggagcccacctaccatcatcctggagtcacaattacaggattcccccaccccatgaggcatcccttggtttatttttattttttttttagcaataa

SEQ ID NO: 805369 - DNA, 120 bp, Artificial Sequence
  ENSG00000245156_8 (sequence is synthesized)
ggtctcactctgtcacccaggctacagtgcactgaagtgatcacggctcattgcagcctctaccttgcgggctcaaagtgatcttcccacctcagcttcctgcgtagctgggacttcagg

SEQ ID NO: 805370 - DNA, 62 bp, Artificial Sequence
  ENSG00000245156_9 (sequence is synthesized)
atcttcccacctcagcttcctgcgtagctgggacttcaggtgtccaccaccaccaccacttc

SEQ ID NO: 805371 - DNA, 62 bp, Artificial Sequence
  ENSG00000245156_10 (sequence is synthesized)
acaggtgtgagccaccacacccggcccctggctaatcttttttcaattgattcacctgcctt

SEQ ID NO: 805372 - DNA, 78 bp, Artificial Sequence
  ENSG00000245156_11 (sequence is synthesized)
ggcctcttcccttggtttagaatactatggtgctcaccagatcttcccaacagtcccggtcagggagggctgatgcct

SEQ ID NO: 805373 - DNA, 120 bp, Artificial Sequence
  ENSG00000245156_12 (sequence is synthesized)
agatcttcccaacagtcccggtcagggagggctgatgcctccctccacaaacagctagcccaaagggctctcagcttgctgagtctaaattctcactttatggagaaagaaatcaagaca

SEQ ID NO: 805374 - DNA, 120 bp, Artificial Sequence
  ENSG00000245156_13 (sequence is synthesized)
cgtgacctgccaaggcaacagagctgggtatcctaacctgatttctgaaacttcatggtttggtccagtaggagctatttagggaatccccagtacatgccctgcgtgtgcctagcttgg

SEQ ID NO: 805375 - DNA, 120 bp, Artificial Sequence
  ENSG00000245156_14 (sequence is synthesized)
cagagaaggccccagaagtagaagccagggcccagcctagaacctattaagttgaaaacccacgtagagagactgatggctgggtgctgtggcgtgtgcctgtggttccagctactgggg

SEQ ID NO: 805376 - DNA, 120 bp, Artificial Sequence
  ENSG00000245156_15 (sequence is synthesized)
aggctgaaacaggaggaggatccttggagcctaggagtgtatgaccagcctgggtgatgcagcacaaccccgtctctcttttcttttgttttttcgagacagagtctcgctctctcacca

SEQ ID NO: 805377 - DNA, 77 bp, Artificial Sequence
  ENSG00000245156_16 (sequence is synthesized)
tgttatgaagtcaccaggaagaggtggtcaagttgcagtgaaaattgcacttaaggctgggtgcagtgactgacacc

SEQ ID NO: 805378 - DNA, 120 bp, Artificial Sequence
  ENSG00000245156_17 (sequence is synthesized)
gtgaaaattgcacttaaggctgggtgcagtgactgacacctgtaatcccaacactttggaagcccgaggcacgagaatcatttaagcccaggagtttgagatcaggctgggaaacatatc

SEQ ID NO: 805379 - DNA, 120 bp, Artificial Sequence
  ENSG00000245156_18 (sequence is synthesized)
gagaccctgtctttacaaaaaattaaaaaatgtgccaggtgtggtggtgtgcctctgtattcccagctactcaggaggacaaggcaggaggactgcttcagcccaagagttggagactgc

SEQ ID NO: 805380 - DNA, 68 bp, Artificial Sequence
  ENSG00000245156_19 (sequence is synthesized)
agtgagccatctaaaaaaaaaaaaaggcaaaaggtaatcacatttaatatacttgagttccaacctgt

SEQ ID NO: 805381 - DNA, 120 bp, Artificial Sequence
  ENSG00000257603_0 (sequence is synthesized)
gaagcactggttacttcccccgtcctctcagctctgggaagggtggggtggtcatgaagtcctgagagagcagagggacacaccaacttctcttgttggttccctcaaccctgcccatac

SEQ ID NO: 805382 - DNA, 120 bp, Artificial Sequence
  ENSG00000257603_1 (sequence is synthesized)
ctatgggtaatcagagatggattcagtctccagttaggatcctcatcaaggtatttgtatgggggattccatgcagatggtgtatagagagaagatagacacaagggatcttcatagcca

SEQ ID NO: 805383 - DNA, 120 bp, Artificial Sequence
  ENSG00000257603_2 (sequence is synthesized)
tctgggccactggctcgaagggcacatctcagggaaaaaggtcagtgtgattcccttatttctttgtggaaagacctcagtagccaaaggtgtttgcccgtgttatttgtctgaacaaga

SEQ ID NO: 805384 - DNA, 120 bp, Artificial Sequence
  ENSG00000257603_3 (sequence is synthesized)
tcttctctaggacagctaggtccacaggacagcaccaagagttactctgcatgcttatagtacctgcttacgaacagaaacagaggcaatattcacatgaaagctcaaatgtggatctct

SEQ ID NO: 805385 - DNA, 120 bp, Artificial Sequence
  ENSG00000250657_0 (sequence is synthesized)
ctctctctctcttctaacatcaatgcagctcctggtatgtggtcgttctcaggcccaaaggcccattttgcttttggctgcaactctgtaactctgtaacagagaccaagtgcctgcagg

SEQ ID NO: 805386 - DNA, 120 bp, Artificial Sequence
  ENSG00000250657_1 (sequence is synthesized)
tatagaaaaactcagaaagagactgtgaaagataatcttaaagaggcactcacgaaacacaagctccttctccgggaaaaagaatcatcacccttgttatcccatgaaaattcatcttct

SEQ ID NO: 805387 - DNA, 120 bp, Artificial Sequence
  ENSG00000250657_2 (sequence is synthesized)
ccttttcagctgatatgaggacttgatctgtcctttcctataagtgccatctgtgtttaaatgaggctgttactctaactcaaagcagacttgcaagagtaaaataatcaatcttcatca

SEQ ID NO: 805388 - DNA, 120 bp, Artificial Sequence
  ENSG00000250657_3 (sequence is synthesized)
acaatccaattcctagatgctttctccagttatggccctgactgggatctccgaagaatgactcagctgaaactatttcatcattgcctacatttgtcttcagacgacctgcagtacaaa

SEQ ID NO: 805389 - DNA, 120 bp, Artificial Sequence
  ENSG00000250657_4 (sequence is synthesized)
cttggcttaaacctgcagttgacaatggattcaccgtgggagaataaattacaatggataaaaaacagcattacaatccctcaataaaatgggattttaacagacaaagctcctggtatg

SEQ ID NO: 805390 - DNA, 120 bp, Artificial Sequence
  ENSG00000257607_0 (sequence is synthesized)
cacctttcttttgtttatttatattctttagttttgtgcacactttgaggaattgatttaggacaggttcatactgaaaaaaacctcagctgatgttatctgtgggggctggggagggtg

SEQ ID NO: 805391 - DNA, 120 bp, Artificial Sequence
  ENSG00000257607_1 (sequence is synthesized)
tcagggacatttggtggctgaggagagcgcgtcactgctattgaatagctccatttaacaccagccatgtctccgcgtctcaggcacttctgtgaaatgttctcagaaccctgtggtgac

SEQ ID NO: 805392 - DNA, 120 bp, Artificial Sequence
  ENSG00000257607_2 (sequence is synthesized)
tgcggcacacccggcaggccttgctagcacacgccgcccactggcagggcccggccaccctggctgttgccattctttcgtagggttttgttcattttactatttgtcatttttctagga

SEQ ID NO: 805393 - DNA, 120 bp, Artificial Sequence
  ENSG00000257607_3 (sequence is synthesized)
aacatctgtttttgtaaaacaaacaagggggaatcaagtattttaaccacaaagtataaatactggctctaagctttcatcacttcattgacaaactgaatgctgaggaggctgaaggcg

SEQ ID NO: 805394 - DNA, 120 bp, Artificial Sequence
  ENSG00000257607_4 (sequence is synthesized)
aggaggcttttgcggatgtggaccttgagctgcgtgtttgggagacgcacaggcctcggggagactcaagccagatgccagccacggggaccacagccttggcccaagagtggcatttgt

SEQ ID NO: 805395 - DNA, 120 bp, Artificial Sequence
  ENSG00000257607_5 (sequence is synthesized)
gggaaaaaggaaacttcaagaaaaacacccctcctgcttctcttccagcagctcgtctccttctggaaggatgtggggagcgtccagggtaactaagtgctctgcgtccaccagagtcac

SEQ ID NO: 805396 - DNA, 120 bp, Artificial Sequence
  ENSG00000257607_6 (sequence is synthesized)
ctccccaggagggctgggccgcctacgccagcacctgctgcacccccatgtggtccggggagcagtgccggtccccgcagggcagctttttcatcagccgttggagcttgctggggaagc

SEQ ID NO: 805397 - DNA, 120 bp, Artificial Sequence
  ENSG00000257607_7 (sequence is synthesized)
tctggttcatgtagcggtagagaagtggtgtcacaaagctgctggagaaggccaggagtttggagaaatccttcacaaagtgcagtagccccaggtagtgtgcgtccacgggcttccctc

SEQ ID NO: 805398 - DNA, 120 bp, Artificial Sequence
  ENSG00000257607_8 (sequence is synthesized)
gcgagatgatgaccgtgtgccccagcaggatcagatagtgtggcgtccagagcccaaactgcgtgcacacggtggccaccagcagcctgtgtgccgagggctccagccggcccgtgtccc

SEQ ID NO: 805399 - DNA, 120 bp, Artificial Sequence
  ENSG00000257607_9 (sequence is synthesized)
ggtccaggggcgtgtcctccctgcggacgcgggagagtagcaccagcgcgtagagggtggccagtgctggcaccacgtagccgatgaacaccagcgtggcgtcggcagcttctgcgttct

SEQ ID NO: 805400 - DNA, 120 bp, Artificial Sequence
  ENSG00000257607_10 (sequence is synthesized)
gcatcttggcgcactctagcgcgcgggtggacacatggctgcagatgtagaagagcagcgaggagaagctggtcagcagcgcgccaccccacacgaagccgcacacgtgccgcgtgttgt

SEQ ID NO: 805401 - DNA, 120 bp, Artificial Sequence
  ENSG00000257607_11 (sequence is synthesized)
acacgctggccatgtaggtccgcggcagtgcacgctcgatgtagtggtcgaggctcagcagggcggtggagtacatggccaccagtgaggacacattgaaggggatctgcagtgccacgt

SEQ ID NO: 805402 - DNA, 120 bp, Artificial Sequence
  ENSG00000257607_12 (sequence is synthesized)
ggacttcgccgcccacactccacagcgcccaccgggagctcggggggccgagcagcatggcgggacagaggtggccaccagagctctggtgaggacctgcgcgctgctgcgcttctctgc

SEQ ID NO: 805403 - DNA, 120 bp, Artificial Sequence
  ENSG00000257605_0 (sequence is synthesized)
cagaggaaagctgaggtcaaggaagttaaataaatggtatctgagaacctacctctggtgatggtcatatcggtgtctccgagggtcgtactcgccccccacgtccaccacgatgtcaca

SEQ ID NO: 805404 - DNA, 120 bp, Artificial Sequence
  ENSG00000257605_1 (sequence is synthesized)
cgccccccacgtccaccacgatgtcacaggaagcgagtttttcgggatcccgggtccgcacaatctctgcatcctgcgagaatcctgctcttgtcaccgaggctggagtgcagtggcacg

SEQ ID NO: 805405 - DNA, 120 bp, Artificial Sequence
  ENSG00000257605_2 (sequence is synthesized)
attacaggcgtcagccactgcgcctggcattgttaataaaactttaactcagtgatccactgtggggtcactaacacaaatttagggtctacaatgcatcggtcaatatgctaacacagc

SEQ ID NO: 805406 - DNA, 120 bp, Artificial Sequence
  ENSG00000257605_3 (sequence is synthesized)
tgctaacacagctgggtgtggtgagaatgagactcttctcggaaaaaaaaaaaacctgctaaccaaagatataaaaacgaacacaatatggtattaaatgagtctgacataatcagaaaa

SEQ ID NO: 805407 - DNA, 120 bp, Artificial Sequence
  ENSG00000250658_0 (sequence is synthesized)
gcagtggtctgaaattgaactcacaatatttctgaggcatgcctgtactgccctctcccaagaatgcctacgtgaccagccctcagactggatcttctgcctccaaattatgtttgcagt

SEQ ID NO: 805408 - DNA, 120 bp, Artificial Sequence
  ENSG00000250658_1 (sequence is synthesized)
tcatgtagcaggcatgacagacttcgattctaatagttgccttcttgcaatctctagtagctgcagcaacctcccactgcagatgtctattgtgaatctgggcccctggcccttggtcta

SEQ ID NO: 805409 - DNA, 120 bp, Artificial Sequence
  ENSG00000250658_2 (sequence is synthesized)
catctcacgtacattcagccttcttgcacttccagcctcttctccttgtggctctcttgccctgtcactttgcttatgtgcactgtggccaaagctaaggcaccagggagcatcaagaaa

SEQ ID NO: 805410 - DNA, 120 bp, Artificial Sequence
  ENSG00000250658_3 (sequence is synthesized)
agacaaacatctgtgagttggatatgtgccaatattgatattctcttatacctcaatgccctgtgctagagtgtcagagaggaagcgcagaatgcagccatacttcttttcaacctactg

SEQ ID NO: 805411 - DNA, 120 bp, Artificial Sequence
  ENSG00000250658_4 (sequence is synthesized)
gtcaaatttgggtggttcaagtgatctgaaactgagctcacaatatttctgaggcatgcctgtactgccctctcccaagaatgcctacgtgaccagccctcagactggatcttctgcctc

SEQ ID NO: 805412 - DNA, 120 bp, Artificial Sequence
  ENSG00000250658_5 (sequence is synthesized)
caaattatgtgagagactgagagctctctctcttcatttcctcgtaaggccaccaaacccgtcagcacctacttacctgaccattgtctcaactacagctgatgggatccatgacagaag

SEQ ID NO: 805413 - DNA, 120 bp, Artificial Sequence
  ENSG00000250658_6 (sequence is synthesized)
cttaaccaaaactagcccatgagattgtttttctcaggaatgtagaaatgaggcagaggttagccactgtccgtgtgctctggagctaaacgcatgtaagtgtaagggttctcttctgtc

SEQ ID NO: 805414 - DNA, 120 bp, Artificial Sequence
  ENSG00000250658_7 (sequence is synthesized)
ctaagctgacacaggctgcagagaaaagtggttgatgctgccagtcagagagaagcagatgaaggagccatgcagcctggaaggcgagaggagggccaagaaaatgagcttggtttccaa

SEQ ID NO: 805415 - DNA, 120 bp, Artificial Sequence
  ENSG00000250658_8 (sequence is synthesized)
cctgtgtggtgggttgaacggtgacctccaaaagatatgtccacctggaacctcagaataagatcttatttggaatagtctttgtagatgtcagtaaggtaaagatttggagatgagacc

SEQ ID NO: 805416 - DNA, 120 bp, Artificial Sequence
  ENSG00000250658_9 (sequence is synthesized)
tgtcagtaaggtaaagatttggagatgagaccctcctggattagggtaggccctaggtccactggcaggtgtgcttctcagggtctgaaaggggaagacagggccacccagaggaggaga

SEQ ID NO: 805417 - DNA, 120 bp, Artificial Sequence
  ENSG00000250658_10 (sequence is synthesized)
cagagacagggccacccagaggaggaggcggaggcagagattggagtgatgctgagacaggctgggccgaggtccgccaagggctgccaggcagccaccagaagctgggagagagccaag

SEQ ID NO: 805418 - DNA, 120 bp, Artificial Sequence
  ENSG00000250658_11 (sequence is synthesized)
caagcaaggaccccccgctgagccttccgagagagcgcggcctgctgacacctgggtgtcagacttctggcctgcagactgtcagaataagctcctgttgttttaagccacctggtttat

SEQ ID NO: 805419 - DNA, 120 bp, Artificial Sequence
  ENSG00000250658_12 (sequence is synthesized)
ggtaatttcttgcagcagacctagcaaattaatagaccccatagtcctgtaattcattttgcttaaacgagcatgaataagatttagttttgctaataaataaaagttacttcactaaga

SEQ ID NO: 805420 - DNA, 120 bp, Artificial Sequence
  ENSG00000250659_0 (sequence is synthesized)
ctgggctcaagtgatcctcctgcctcacccacccaagtagctcggaccacagccacgtgcctccacaactggctaatttttgtatttttggagagatggggttttgccatgttgcccagg

SEQ ID NO: 805421 - DNA, 120 bp, Artificial Sequence
  ENSG00000250659_1 (sequence is synthesized)
atgttgcccaggcttgtttaggaaaaaacattatgccacattctaaccggagcagaagtgcgcagacatctcagagtctaagctggcattaacaacttttacaaacccacctagctgatt

SEQ ID NO: 805422 - DNA, 120 bp, Artificial Sequence
  ENSG00000258400_0 (sequence is synthesized)
ggacaatacattttgggtgacaggaagtattaatggaggaaattttttaaagatacaattaaatatcttattaagatatctcaggaactttaattcactgaacatattttttgagtgcct

SEQ ID NO: 805423 - DNA, 120 bp, Artificial Sequence
  ENSG00000258400_1 (sequence is synthesized)
actatatgcaaggcatagtattagttgttcattaaatctagaatataaggatcacaatatatttaactagtcaaaatgagaactcagaacttggataatctctaaagaagctgatcacaa

SEQ ID NO: 805424 - DNA, 120 bp, Artificial Sequence
  ENSG00000258400_2 (sequence is synthesized)
gagttaaaataaatttttacataaatctgccatagttctcagaatctatataatagttcaaaaataaccagctgggcgcagtggctcagccagcattttgtaatcccagcacagtacaat

SEQ ID NO: 805425 - DNA, 76 bp, Artificial Sequence
  ENSG00000258400_3 (sequence is synthesized)
taatcccagcacagtactcaggagttcgaggctgtagtgagctatgatagtaccactgcactccagcctgggcgac

SEQ ID NO: 805426 - DNA, 120 bp, Artificial Sequence
  ENSG00000258402_0 (sequence is synthesized)
ctccagaaagatttaggacgtcaagtcgtctgaaaagatttcctttttggagaacaagccccgctctttggggtaccggagggtctctaagaagcactgcctgtcccagtttctacaaag

SEQ ID NO: 805427 - DNA, 120 bp, Artificial Sequence
  ENSG00000258402_1 (sequence is synthesized)
ttggggccgcctctctgggataggccagtccagctctgaaagctgagccaaggggctgtttctggaagttggaagaatcatggtgaaacggcacaagtatgggctgttcaacaattaacc

SEQ ID NO: 805428 - DNA, 67 bp, Artificial Sequence
  ENSG00000258402_2 (sequence is synthesized)
aggcagcgtggagtatcatcacagagaatctacgatgtgctactgtgtgctctctgctagaaactga

SEQ ID NO: 805429 - DNA, 90 bp, Artificial Sequence
  ENSG00000258402_3 (sequence is synthesized)
gggttctttttttaaagtaagattctaactgttaataaactgaggaacctcattgtccatgatattcacaataaatgataataaaaagaa

SEQ ID NO: 805430 - DNA, 120 bp, Artificial Sequence
  ENSG00000258404_0 (sequence is synthesized)
ccccaaagctagagaattcctgctctgagccatctctgaaagcaccaagagccagctcacggaggagatgccagctcacggaggaaaatctggaaggtgttgaagcatagacgctggaac

SEQ ID NO: 805431 - DNA, 120 bp, Artificial Sequence
  ENSG00000258404_1 (sequence is synthesized)
ttccacgatgtttagaaccatcggcgcactacatcagactagaggtctggggtcacccgaccatcccgccacaagcccctccgaggcatcactgtgtccagattttgcaaactgcacctc

SEQ ID NO: 805432 - DNA, 120 bp, Artificial Sequence
  ENSG00000258404_2 (sequence is synthesized)
ctgaaggggctggggtctgtccacttcgccccatctgccgtggcagcacttcctccgtggttcgcacccccacagcagcctcctgggaaggcacctccctggggcccctctcagtccacg

SEQ ID NO: 805433 - DNA, 120 bp, Artificial Sequence
  ENSG00000258407_0 (sequence is synthesized)
ttacaattaagctgataaagaaaatgtaacaatgttttctcgcagcactgattccatgaacagagattcatgccactgtgtagtctgcaacaaaagaaaaaaaacttcaaagggtagaca

SEQ ID NO: 805434 - DNA, 120 bp, Artificial Sequence
  ENSG00000258407_1 (sequence is synthesized)
acaatgggaaacaaatagtgatccaggtcatgctgttcttcaatacatgtgctgttcattttttcctttttaaggtagcaattatattagttcttagaaagtaaacagagaagtcttgtc

SEQ ID NO: 805435 - DNA, 120 bp, Artificial Sequence
  ENSG00000179428_0 (sequence is synthesized)
ctgagatgccgtcgaggatgtaccgaatttgtttgtcaattcgttctgaagagccccccaagcctgggattatgaagaaggtaatactaccagtcatctgagttcttctgtgttctggct

SEQ ID NO: 805436 - DNA, 120 bp, Artificial Sequence
  ENSG00000179428_1 (sequence is synthesized)
ctccctgtgagcggctgttgtagaactgcctggccatcctcaaatttcgtgcagttacttcaaggcgtctccaggtggagtgtgtgactcctttttgccaccgcgtggcttctgccactt

SEQ ID NO: 805437 - DNA, 120 bp, Artificial Sequence
  ENSG00000179428_2 (sequence is synthesized)
tcttcacctgcttcagcccacttagaggaggttggctgctgccctgccctctcccaagtgaccccttgggaatcctcccagtgaggactttgctctctgtgccagaggtttgccttgtgc

SEQ ID NO: 805438 - DNA, 120 bp, Artificial Sequence
  ENSG00000179428_3 (sequence is synthesized)
tgccagtgctctccccattgccactgagtctcttcaccactgtttcactggggcacctgcatgggccccaggtctcctggagccctgaaattactgaagcccacttggttcagggcagaa

SEQ ID NO: 805439 - DNA, 120 bp, Artificial Sequence
  ENSG00000179428_4 (sequence is synthesized)
agggggagaatactactcacctctttgttggggatgtcaaaggaggaccttgtggcatcttgcagagtttgtgtttatcgctccctctccctgtaagtcttgatttgaaatcaaaagaag

SEQ ID NO: 805440 - DNA, 120 bp, Artificial Sequence
  ENSG00000179428_5 (sequence is synthesized)
ctgcttccgcgtcggcacccaagaatttcttattgggtcaagctggttcagaagccctcttccctcaggatggtgtctcttgcaggaggatccttggtctcatgcaaatgggctctagac

SEQ ID NO: 805441 - DNA, 120 bp, Artificial Sequence
  ENSG00000179428_6 (sequence is synthesized)
taggttgtccctccagtctccagagacccagacagctctgagatggcttcaggctgaaaccagacccttgcacaacaccaaaacacttatttaccaaacatggtgttaccttcacaatcg

SEQ ID NO: 805442 - DNA, 120 bp, Artificial Sequence
  ENSG00000179428_7 (sequence is synthesized)
gtttctttgctttgctaagaagagatctcttcaagatcgataaaacagtgacctctgttgggcatttactcaagttttgtttcgtgcataacatttcaggacccgcctgttggggaaagt

SEQ ID NO: 805443 - DNA, 120 bp, Artificial Sequence
  ENSG00000179428_8 (sequence is synthesized)
gaggtcatccattcttcaccgattgtctaaacagagacggtggtcctctgccgcggtgggattctttggtgtgaaaatgaaaatgggggaggatggctggatggtttcatttttagtgct

SEQ ID NO: 805444 - DNA, 120 bp, Artificial Sequence
  ENSG00000179428_9 (sequence is synthesized)
ctcctgtcttaagcaacgtagacactcctgaaccaagttctctttcctgcatgaaacgaagccactgctcccagctccgcagccgtgcactgtgatccgtctatgtaatgtgagcttgct

SEQ ID NO: 805445 - DNA, 120 bp, Artificial Sequence
  ENSG00000179428_10 (sequence is synthesized)
tttactcaactatctattttttagaaaatacaattcaataaatttcaagtacttgaactgagtgacacaatacaacacacagatttatcttttcaataaaaagtgttttttaaataggaa

SEQ ID NO: 805446 - DNA, 120 bp, Artificial Sequence
  ENSG00000250387_0 (sequence is synthesized)
ggaacttgatgaggaagtgctgagaaggtgatcagtggcagaaagagcggatgacggatggggaccagcagacagtgaggagctcaacataacagggaaaaggagcacaggatgcagcta

SEQ ID NO: 805447 - DNA, 120 bp, Artificial Sequence
  ENSG00000250387_1 (sequence is synthesized)
cttagagggtgttgattgaaaacttcgatctccccaccccatcacggttgatttgacggatttctcacctcgttcacagagaaaatttcaattaaggcacatggagacggacctctacct

SEQ ID NO: 805448 - DNA, 120 bp, Artificial Sequence
  ENSG00000250387_2 (sequence is synthesized)
gcaatgccccccttgcacttggacagaaccatgtgactatttataagctatgacacatgagcagacatgacatgacgggattgatggagcaatgacctcatcttttctcctgccaaatat

SEQ ID NO: 805449 - DNA, 120 bp, Artificial Sequence
  ENSG00000250387_3 (sequence is synthesized)
tatgaaagaggactcaagtcactcacctgagggacactgggtgaaagtcagtaatgaagctgaaaggtcgctaaatgctggcaattccttctagaatttaaaagcattaagatttaagtg

SEQ ID NO: 805450 - DNA, 120 bp, Artificial Sequence
  ENSG00000250387_4 (sequence is synthesized)
ctacttgagaccgtcattactagactgaatgaagagacgaacatagaaatggtaacaaaaaacaaaagaaactgttttaaggaaaggctagcatggggaagaagagagctccctgcttct

SEQ ID NO: 805451 - DNA, 120 bp, Artificial Sequence
  ENSG00000250387_5 (sequence is synthesized)
agtggtcctcattccatctttgcattcagattcaactggttcatggttcatactgggggaacaaggtccatggttgggatccatgggtccctccagtctcctgttcaacggtcgtacaca

SEQ ID NO: 805452 - DNA, 120 bp, Artificial Sequence
  ENSG00000250387_6 (sequence is synthesized)
ccttgggagcacccactcggtttgttcatcttctgcaaagatgtcattctacagtcattaccttccagcctatttgtttctgcagaatctacgaaaaacccagacctgtgtagaagaaca

SEQ ID NO: 805453 - DNA, 120 bp, Artificial Sequence
  ENSG00000250387_7 (sequence is synthesized)
tccctctgccaaagagatagtgctgaaataacaaagaaggactcagacaagtccagcttcatgagaagatgagtttattaggacttacgtaaagggcagcgggataactccagagatccg

SEQ ID NO: 805454 - DNA, 120 bp, Artificial Sequence
  ENSG00000250387_8 (sequence is synthesized)
agggcagcgggataactccagagatccgcctgctgcccaccatcttcctctaagctgcttttaagctacttttttcttttcttttcttttctgtttcctttcctttcctttcctttcctt

SEQ ID NO: 805455 - DNA, 120 bp, Artificial Sequence
  ENSG00000250387_9 (sequence is synthesized)
attttacttcgacaaaggttgaagtatgtagcaggcgagcgtcagggacaagtgcagctatctctttgatcacatcgctttaaacatttttcagctttaagcttgtcttacaagtcagct

SEQ ID NO: 805456 - DNA, 120 bp, Artificial Sequence
  ENSG00000250387_10 (sequence is synthesized)
ctatcagtctattaattgtttcactgtacctaatatcttacacgaaggcaccttgaaaaacagcaggagaaagcacatttgtttaagtcctgcgatggctagcacggcagctaatctcct

SEQ ID NO: 805457 - DNA, 120 bp, Artificial Sequence
  ENSG00000250387_11 (sequence is synthesized)
tgcaaattataatcatagttgtagttcatccattaggctggaaaagacaagattcccaagtggccttggtgccttttccagttcccgggagacccaccaaccctcggcgtgtgttgcctg

SEQ ID NO: 805458 - DNA, 120 bp, Artificial Sequence
  ENSG00000250387_12 (sequence is synthesized)
atgaagctgaaaggtcgctaaatgctggcaagtgagatggattatagtgtctagactttttcctgaggtcattctatatccagcagatatctttcagtatatagtctattcagaacaatg

SEQ ID NO: 805459 - DNA, 73 bp, Artificial Sequence
  ENSG00000250387_13 (sequence is synthesized)
cagcagatatctttcagtatatagtctattcagaacaatgtgctagtgactattgagtgtggttataggctgg

SEQ ID NO: 805460 - DNA, 120 bp, Artificial Sequence
  ENSG00000250387_14 (sequence is synthesized)
agaaacatcgcttagtcctcatttactcactgggaacctcggaggatttcagctgatgtttttctctccttagacagtgaggagctcaacataacagggaaaaggagcacaggatgcagc

SEQ ID NO: 805461 - DNA, 120 bp, Artificial Sequence
  ENSG00000250387_15 (sequence is synthesized)
gccaccaagcccagccagttacattctttaaacaaggagtggacgtaccctgaaacaagagattagtcaaagagattttgctattcatgggacctaaaaggtggctgtacttccctttac

SEQ ID NO: 805462 - DNA, 120 bp, Artificial Sequence
  ENSG00000250387_16 (sequence is synthesized)
tgcttttccatacacagcaatgcacgctgtatgggttcttataggtcagagagtgaaagagaaccaggacctataaaagaatacaagtctctaaaatcagaaagtttattatttaaaaaa

SEQ ID NO: 805463 - DNA, 120 bp, Artificial Sequence
  ENSG00000250387_17 (sequence is synthesized)
atagttacgtgccagtctgcttataatttatttttatgactgagagtgcctttcataagcacattctggcaaactataaaacaaataaattgaaattgaataaaacctttagacattaga

SEQ ID NO: 805464 - DNA, 120 bp, Artificial Sequence
  ENSG00000250387_18 (sequence is synthesized)
agtgtagcaccagatttagtacataactgcaaaacttaaacatgcaattttacatctgcaagcacattaaattgaaagaaactttaacttaatttagatacattaattgatacaaacttt

SEQ ID NO: 805465 - DNA, 120 bp, Artificial Sequence
  ENSG00000250387_19 (sequence is synthesized)
tctggtatatagcacttcttggcgcattgagtattcttaatctttaaggcacatgaatataataccttaggaaagatctgttctccacacatttcctctataaagtgccaaaaaaaaaaa

SEQ ID NO: 805466 - DNA, 120 bp, Artificial Sequence
  ENSG00000250387_20 (sequence is synthesized)
taacgaagagccagtttgtcttccgcatcagtgtgatttagcatacataaataagtatcttttcacacaaaataaaaggttcagaacccaaagtgtctgatttttatagtgctttttctt

SEQ ID NO: 805467 - DNA, 120 bp, Artificial Sequence
  ENSG00000250387_21 (sequence is synthesized)
tccttttaaaaagatagcaagatgagggtaagaggtaatttaagagaagtaatcatcttctaacagccagcttgcagaaactaaaacaaatatcaatgatgtaaaaatgttgttttgaca

SEQ ID NO: 805468 - DNA, 120 bp, Artificial Sequence
  ENSG00000250387_22 (sequence is synthesized)
ctttggtaaatgaaagtgtgagatgagtaagaatatattataggtgcttgtatatcaaaggcctgtgaaaatggctgattataaaggagaaagttaatgatctctaattgtgttgtaatg

SEQ ID NO: 805469 - DNA, 120 bp, Artificial Sequence
  ENSG00000250387_23 (sequence is synthesized)
taaatgcagtatcaccgtaatgaagagaacagatttgcatgttaacaaaagaaatattagaggagtgagtgtaggatgtttgggataattaattccatcctccactcctacatacatatg

SEQ ID NO: 805470 - DNA, 120 bp, Artificial Sequence
  ENSG00000250387_24 (sequence is synthesized)
catatacaaactcaattcaattttaaagagaacccgaagaaccaaaaatagactgaacacacttgatgttgtatgggagcttaaattactatttttgttgttctctgtgactatctcatt

SEQ ID NO: 805471 - DNA, 120 bp, Artificial Sequence
  ENSG00000250387_25 (sequence is synthesized)
tagtttctattgtgtttgcagtttcttccaaggtgatttttaatggattgagtaatgcataaaaatttgcagaagtatgcagaaagtttgtatgcagggccatgtagagcttttatccta

SEQ ID NO: 805472 - DNA, 120 bp, Artificial Sequence
  ENSG00000250387_26 (sequence is synthesized)
agaaagtttgtatgcagggccatgtagagcttttatcctacagtaaatcctagtagtttgctggtgctgtgtgattttttttgtttgtttagggtttttgtgtgtgtgtgtgtgtgtgtg

SEQ ID NO: 805473 - DNA, 120 bp, Artificial Sequence
  ENSG00000250385_0 (sequence is synthesized)
taccgatcttggccaagctggccacgaggatccagagcgcgatgacgtagggatcctgcacgtgggcccactcgaaggaacctgcattccacagccggaccggccacttaccagaactcg

SEQ ID NO: 805474 - DNA, 120 bp, Artificial Sequence
  ENSG00000250385_1 (sequence is synthesized)
ggggcgcccaggccttgcgtggtgcgctggaaggccaaatttccaccagaccagtgtgttccatgatgcccactggacctccggccaccccaccccccaaccagcctgtcctaagagccg

SEQ ID NO: 805475 - DNA, 120 bp, Artificial Sequence
  ENSG00000250385_2 (sequence is synthesized)
acaacctttctccacaaagctgttcaaagggcagaagagcagtgtcactgcctggaaggacaaatccagaacagacaccagtgccaggcgctggccatcaggtagtgtgctgcccacacc

SEQ ID NO: 805476 - DNA, 120 bp, Artificial Sequence
  ENSG00000250385_3 (sequence is synthesized)
tccactgccccccacagcaggaagggctgcctcatggagaatagaaaggcaatgagcccctgaagtggcgtggccagaacaaggcacaccccactgcccacgagtcctgccagggcacac

SEQ ID NO: 805477 - DNA, 120 bp, Artificial Sequence
  ENSG00000250385_4 (sequence is synthesized)
gagggctcggggcagacgggcgctgccccagcctgtgatgggcatggccttgaggatgccagcctcatgcagaagccagtctaggggattatacagggtgtgcacacccactcccctacc

SEQ ID NO: 805478 - DNA, 120 bp, Artificial Sequence
  ENSG00000250385_5 (sequence is synthesized)
ctcggactggagccacaaaaccctccctctaactgggtcgtggttttaggcagggccgtggcaccccaccactgcaggggccaccatccatatcaggcagactgtatgaaccgtgcccct

SEQ ID NO: 805479 - DNA, 120 bp, Artificial Sequence
  ENSG00000250385_6 (sequence is synthesized)
tggaattgtacagtgcacaacctgcacatcctcatggccaaaaagacccagagacttgtgtgtgtgtgtgagggggtcttgggaagtatcctgagaacattcctgtcctgtgggtggtga

SEQ ID NO: 805480 - DNA, 120 bp, Artificial Sequence
  ENSG00000250385_7 (sequence is synthesized)
cgatctgataactgcccgaccacttcctgcctcaggcaggcacgcatagcattctggatccttccaccgtggcctggaccccttgtggtccagggaccccctgcacgtatggggaagggg

SEQ ID NO: 805481 - DNA, 120 bp, Artificial Sequence
  ENSG00000250385_8 (sequence is synthesized)
cgtggctgtaaaacattcaaaaatgtggaaataatgcaaaagccagtcggaaaacaactgtaatcttatacccagctgccacagcatctgaacttcaggattaagaaaataaaactgaaa

SEQ ID NO: 805482 - DNA, 120 bp, Artificial Sequence
  ENSG00000250385_9 (sequence is synthesized)
gcgcggggcagcgggacaggcggttccgcgcagctcctgggatgcccgggcagctgtgggtgcgctcgccccaaccctccttcataaacgcagggcctggggctgcgcagaccccacagg

SEQ ID NO: 805483 - DNA, 120 bp, Artificial Sequence
  ENSG00000250383_0 (sequence is synthesized)
aagtcccagctcctttgaatctgaggacacccttctccatgaacaatgcatcagcaagtctttcagattctgtctccaaagtcaatcacaaatccatcttcttctctccatctccagtgc

SEQ ID NO: 805484 - DNA, 120 bp, Artificial Sequence
  ENSG00000250383_1 (sequence is synthesized)
gattacctctggcttagactattacaacacctcccaaatgagatgggatttcaccatgatgtccaggctggtctagaactcctgagctcaagcaatccaccctccttggcctcccaaagt

SEQ ID NO: 805485 - DNA, 120 bp, Artificial Sequence
  ENSG00000250383_2 (sequence is synthesized)
ctaccgcatatggccaattttctaaattcttaaatgcgattctttggcagtgttgttttgtgaccaaaaataaaatggttcctagaaataaacacatcacctatttcataataaaaagga

SEQ ID NO: 805486 - DNA, 120 bp, Artificial Sequence
  ENSG00000267407_0 (sequence is synthesized)
tttgtttcctctggggacctctttcactcccacaaatatcctacaacccttgagtaggaattaaaacccatcagagatcgaaatagaattggttatggtaaaagggagctgaaacagtga

SEQ ID NO: 805487 - DNA, 120 bp, Artificial Sequence
  ENSG00000267407_1 (sequence is synthesized)
gaaagggaggagaagggaagaaagattaaggcagacaagggaacctgtggagagagtgagagctagagacagaaggagagaagaggcagggccgtggaaacagacacaccatctctccaa

SEQ ID NO: 805488 - DNA, 120 bp, Artificial Sequence
  ENSG00000267407_2 (sequence is synthesized)
gagagctgagatgtcctgtcctaagaacagagcctggcacgtgtcggacaactgtggagggaactgatgagtgaaagagagaatggagaaaggaatgaatcagcataagccccacaggga

SEQ ID NO: 805489 - DNA, 120 bp, Artificial Sequence
  ENSG00000267407_3 (sequence is synthesized)
caaagactgtaactggagcaccctttcatccccactgctggacacagggtggggaacactaaatgtgcgctacgcattgtttatcgaaacaggctctacatcaaaataaaaaacaaaacg

SEQ ID NO: 805490 - DNA, 120 bp, Artificial Sequence
  ENSG00000267407_4 (sequence is synthesized)
acccctgtttcagctatttctcaatttggtccagtgttcaagcccaacctttggagtcgagtcccacctcctacctcagaaccaccaccataatcaggatttagaatgcatcaccccaaa

SEQ ID NO: 805491 - DNA, 120 bp, Artificial Sequence
  ENSG00000267406_0 (sequence is synthesized)
acgctggaaggaagaaaggcaagagcaggaaatatctggccaacagaacgaatggcgtccaactaacagcatcttgtgaaaataaaatgagttaatgaaagttaactcacttaagacagc

SEQ ID NO: 805492 - DNA, 120 bp, Artificial Sequence
  ENSG00000267405_0 (sequence is synthesized)
aagtagattctttggcagatttgccatcagaacggagactaatacctgtggcatcaaatctgttttctttgctacacagagtttgaaaactgtttttaaggttttaagggcttatatgat

SEQ ID NO: 805493 - DNA, 120 bp, Artificial Sequence
  ENSG00000267405_1 (sequence is synthesized)
acttttagggtttgtttcctttagatatctcccattggaagcaggttgcacaacggcatgaagaatatggaagcagaggcaaatttgggaacagaatccagttaatgacatcttggagga

SEQ ID NO: 805494 - DNA, 120 bp, Artificial Sequence
  ENSG00000267405_2 (sequence is synthesized)
ggatcctaaggaaacggcacagcatttccttgccctgcccttgacgtgctatgcctactctaagctagataggggcttctgaaagaaaaacctaaggaagccccctgctcatgcctggag

SEQ ID NO: 805495 - DNA, 120 bp, Artificial Sequence
  ENSG00000267405_3 (sequence is synthesized)
gaaagaactgccgactttgtctttgccctcagccaaaccgccacaagtatctttgtctgcctggctctcctggggccatcacagagggctggggatgctgacagccgtaaactccaggcg

SEQ ID NO: 805496 - DNA, 120 bp, Artificial Sequence
  ENSG00000267402_0 (sequence is synthesized)
agatggcatcaaatccaataatcatcacaggaatagaaaccaaggtccaagtttgggcatcaggaggtatcttcaggttctctcttcgtctgcttcctagtgtatagccacaagcctact

SEQ ID NO: 805497 - DNA, 120 bp, Artificial Sequence
  ENSG00000267402_1 (sequence is synthesized)
ggaggaaggaaagtaaatgcttaaagttttcatacagctaactctgttgatagctgccaagtaaagaacctaaattcaagtgctttataattgttacaaattgtgccaaagtacagcgtg

SEQ ID NO: 805498 - DNA, 120 bp, Artificial Sequence
  ENSG00000267402_2 (sequence is synthesized)
ttacaataaattatgaagcttatctaaattataaaagtaattaaactttcctcagatactcataactctgccctccataaattttctgttcattgcatattcaatacctatgtgttccag

SEQ ID NO: 805499 - DNA, 120 bp, Artificial Sequence
  ENSG00000267401_0 (sequence is synthesized)
ggattacaggtgtgagccactgtgcccgccaacatttttagattctacgcataagcgagaagatgtgatttttgtcttctgtgtctggcttcttttattaaacataatgtcctccagggg

SEQ ID NO: 805500 - DNA, 120 bp, Artificial Sequence
  ENSG00000267401_1 (sequence is synthesized)
attaaacataatgtcctccaggggcattcatgttgtcacagatgacagaatttcctgggtttttaaagcataaatagtatgtcattgtgtatatatatgttacatttttcttatgcattc

SEQ ID NO: 805501 - DNA, 120 bp, Artificial Sequence
  ENSG00000267401_2 (sequence is synthesized)
gtcggttgatggacgcttagttgatgccatattttgagtgtcttgagtaatactgccatgaacagcgggagtgcagatatctttttgacatacgaatttcattttttttttttttggcta

SEQ ID NO: 805502 - DNA, 120 bp, Artificial Sequence
  ENSG00000267401_3 (sequence is synthesized)
tagcagaattgttggatcctatgaaagagccagagccagatggcaacaggagtgagaaaggtagaagatgaatgattgaggatgaaaattccctcaagagattttatttgaccaacatca

SEQ ID NO: 805503 - DNA, 70 bp, Artificial Sequence
  ENSG00000267401_4 (sequence is synthesized)
gatgaaaattccctcaagagattttatttgaccaacatcaattcaatgaaagctgtgattaagaggtttc

SEQ ID NO: 805504 - DNA, 120 bp, Artificial Sequence
  ENSG00000267401_5 (sequence is synthesized)
caacgagaacacatggacacagggagggaaaaagcacacaccggggactctcaggggagggcaggggaaggaagagcatcatgataaacagctaatgcatgcatggcttaatacctaggg

SEQ ID NO: 805505 - DNA, 68 bp, Artificial Sequence
  ENSG00000267401_6 (sequence is synthesized)
catcatgataaacagctaatgcatgcatggcttaatacctaggggatgtgttgataggtgcagccaac

SEQ ID NO: 805506 - DNA, 120 bp, Artificial Sequence
  ENSG00000267409_0 (sequence is synthesized)
gagttgcatctttttgcctcgggagcctggcgcatcggagcttccctgcactcatccacgcgggatggtcacctccactccggaatgggcgtgagtcgggcaaagggctcggttggctgt

SEQ ID NO: 805507 - DNA, 120 bp, Artificial Sequence
  ENSG00000267409_1 (sequence is synthesized)
gcatataaactgggcatgtgctcttggaaataaatttataaaatcccccgagaaagtaaagtggggacagccgagagggccccacacacctccttatggacacccaaggctgaggcagct

SEQ ID NO: 805508 - DNA, 120 bp, Artificial Sequence
  ENSG00000267409_2 (sequence is synthesized)
cctgattaggcccaaaggagaagtcaggatcaggaagagcagaaaacatctgagcaatgagacacgttgggaataaagctcccgcccaccgcatgataacaggcagagttcccaacctcc

SEQ ID NO: 805509 - DNA, 120 bp, Artificial Sequence
  ENSG00000267409_3 (sequence is synthesized)
agaggcacgtgactttaaagaccatatcctcacaaaataggatcaagtaaaagctgctcagtggtgaagacgcggagctggaccagccccggtgctgggtgcagcagccgctgtgcagga

SEQ ID NO: 805510 - DNA, 120 bp, Artificial Sequence
  ENSG00000263590_0 (sequence is synthesized)
ctttctgcaggacaactgtgcagactacaaagcttcggaaaaccggagaggctgagtcgactaatcgtgttgttgcacgttagaaacgcttgcattgcctgactctgaaaccagaagggc

SEQ ID NO: 805511 - DNA, 120 bp, Artificial Sequence
  ENSG00000263590_1 (sequence is synthesized)
ggccgaatggccttcaccctccattaaccctcgcctccttcagaagccagtgcctctggaaatgcctggatctgcgaccccagcctgagcctagtagggcccaagggaagctgaacgccc

SEQ ID NO: 805512 - DNA, 120 bp, Artificial Sequence
  ENSG00000263590_2 (sequence is synthesized)
cgacggctctcatgggcactggcaacagttttccgtttgtgcctactccacctgctgtctttgttgggtcagcgaacatcgcctccctctaccgctcaatcagcaaaagggaccgccctt

SEQ ID NO: 805513 - DNA, 120 bp, Artificial Sequence
  ENSG00000263590_3 (sequence is synthesized)
gaggacctcacccgccgctcactcccctcccaacttcgcgggcatcgcctccggtcgcctcttccgaaggcctaacgagcatgttagctgcgaacggaggtgaggaggctccgctgactg

SEQ ID NO: 805514 - DNA, 120 bp, Artificial Sequence
  ENSG00000263590_4 (sequence is synthesized)
accggtgcccacgtccagggcacgcacaaacgccatgacttggcttggcctctctcttagttattcacagctcagcccgataggcacctctggggcggcgacggcaaagagggtgcgctt

SEQ ID NO: 805515 - DNA, 120 bp, Artificial Sequence
  ENSG00000263590_5 (sequence is synthesized)
attaagtgcagctccacggggactggcctctctgcacggctgtgtacacctgagcgagacgctcagtcgctctctaaagccgcttctgcggatgacagacacggagataaacgtgagagg

SEQ ID NO: 805516 - DNA, 120 bp, Artificial Sequence
  ENSG00000263590_6 (sequence is synthesized)
tggcccaccacgacttgccctcctttgcccgggtttgcccctcgctgcggaggctgttctacatctggcccttggagcaggccggctgacagcgtggtaaaggaagatttctgcgggagg

SEQ ID NO: 805517 - DNA, 120 bp, Artificial Sequence
  ENSG00000263590_7 (sequence is synthesized)
gcggccagtgcaaaacaattccctgaccgggaatcgaacccgggccgtggcgctttcagcaccgaatcctagccactagacaaccatgcagatgcggaaagctgctttctctcccttctt

SEQ ID NO: 805518 - DNA, 120 bp, Artificial Sequence
  ENSG00000263590_8 (sequence is synthesized)
cgacctgaagcgacactttcctgtgctctaggaggacttgggtcttgtgagagtcgccctttgctcctggagtcgtctcacaaggccgttcactccctgctttcttcaaaaaaagaacct

SEQ ID NO: 805519 - DNA, 120 bp, Artificial Sequence
  ENSG00000263590_9 (sequence is synthesized)
gcaggcgacacaccaaggactccacgagggagtcctgagtactggagcgagttgcggccacgcggccgcagctcaccactggcctagagatgccctttgcgaggcggcagcaactgacaa

SEQ ID NO: 805520 - DNA, 120 bp, Artificial Sequence
  ENSG00000263590_10 (sequence is synthesized)
gatggtcgcgggtcgccgggtccggagccgcccaccaggttgccaggaggaggcgggagcggggaggcgcccgaggtgagacaggggcaccctctgcatcataaaggacccagaccccgg

SEQ ID NO: 805521 - DNA, 120 bp, Artificial Sequence
  ENSG00000263590_11 (sequence is synthesized)
caccctcaacatcataaggaatcagacggatgcggaaaccgagacgggctggataggaaactctttccaggaaggctccggggcactcaactggtctccaaccttcccctgcaacctgtg

SEQ ID NO: 805522 - DNA, 120 bp, Artificial Sequence
  ENSG00000263590_12 (sequence is synthesized)
acgcctgccattttcccattttaggcgatggcaacgcaacccctccgtttgctctgggcaaaacttcgagagttccctctgaagctggagctttttcctcagatccaagatccaattggt

SEQ ID NO: 805523 - DNA, 120 bp, Artificial Sequence
  ENSG00000263590_13 (sequence is synthesized)
caccaattcgtgatttccgtcggccaagtgcgtgggcattgatctacacgcgagtttctccacctctgccgaatggctacttcggggtgggggaggggccctcccgccgtggattgcaag

SEQ ID NO: 805524 - DNA, 120 bp, Artificial Sequence
  ENSG00000263590_14 (sequence is synthesized)
gtgtttagcagcatctgtctcctccgctgactagacacatgccagggggataacattctccctcccgcttcccccagccgcggcctagtgtcccagcggggttgggagaggcatgtgagg

SEQ ID NO: 805525 - DNA, 120 bp, Artificial Sequence
  ENSG00000263590_15 (sequence is synthesized)
gccaagttgccccctgttgagaaccattgctgcgcgtagtccttctctctgaacttgtgcagaggactctccaggtgaaggctcaagggtggatccagctcgagacaccctcgctccccc

SEQ ID NO: 805526 - DNA, 120 bp, Artificial Sequence
  ENSG00000263590_16 (sequence is synthesized)
tcacagtcggaccttaggatttaggctttaacatctccacatcatgagattcgaaacctttaggtcttgtcttccgttctgtcctccaaatcggcctcttccgagcctgttgaccagggc

SEQ ID NO: 805527 - DNA, 120 bp, Artificial Sequence
  ENSG00000263590_17 (sequence is synthesized)
cagccgggcagagggctgggctcgctcaacgaggctcctctcgcacctcctggagcttcaggcttctttccgttgcagagaagctttatgggccaattcgttcggcatccccgggggcag

SEQ ID NO: 805528 - DNA, 120 bp, Artificial Sequence
  ENSG00000263590_18 (sequence is synthesized)
gtgcgcggtgcgcggggaagaagaggatttgactgcggttctccacccccggcgcccaacctccaccccggtgcgcgcgctcttccaggctcctgctggtcccacttgccaggagttagg

SEQ ID NO: 805529 - DNA, 120 bp, Artificial Sequence
  ENSG00000263590_19 (sequence is synthesized)
tctcaggtcagcctgagctcctgagacgcccaggcccggaaagacacgtaggggaaaccatctgctcacttctgtcctgtccggaagggatccctttctgacgggaaagaaaggcggtga

SEQ ID NO: 805530 - DNA, 120 bp, Artificial Sequence
  ENSG00000263590_20 (sequence is synthesized)
gtcctgtcctgttgagtaggcggaagagagatcaaagggaagacaagaaaaatcctgtgagttttcaggatctaaagttaccatgaggtcgacctaacctcctctggaggtcctcccggt

SEQ ID NO: 805531 - DNA, 120 bp, Artificial Sequence
  ENSG00000263590_21 (sequence is synthesized)
ctatcttctttcatatgcacaaaatgtcagctcttcttgtttctaacttgcaacatcccacctgatgaccagctcagcaaattagagaccctccatgggattccatctctgtcttagttc

SEQ ID NO: 805532 - DNA, 90 bp, Artificial Sequence
  ENSG00000263590_22 (sequence is synthesized)
cacgttggaagtccgagatcaaggtgccaacatggtagggttatgatgagggacttttttctggttgtagactgccaccttctcattgta

SEQ ID NO: 805533 - DNA, 120 bp, Artificial Sequence
  ENSG00000263590_23 (sequence is synthesized)
ggacttttttctggttgtagactgccaccttctcattgtatcctcagggggcagagagagctccctggggtcccttttatagtggcattagtcccactcagactaacgggactaaatcca

SEQ ID NO: 805534 - DNA, 120 bp, Artificial Sequence
  ENSG00000263590_24 (sequence is synthesized)
gacccagttattgcaatgtgtgcaaaagaacaaggacttgtactatctgacttcaaggcttactataagctattacagacaaggcatcaggagggacaaatagataaacagactgagtta

SEQ ID NO: 805535 - DNA, 120 bp, Artificial Sequence
  ENSG00000263590_25 (sequence is synthesized)
agagacctgaaactgatccacagccatacagtcaataaatgagctttcaatgaaagcagttcaatagaagaaaataaatcatttcaattaatggactttcatatggaggtgggggagacc

SEQ ID NO: 805536 - DNA, 120 bp, Artificial Sequence
  ENSG00000263590_26 (sequence is synthesized)
aacaatgttattctccctcacactacatacaaaagtaatttgaggtgcattatacaccaaaacttaaaagttaaagatataaagcatttcaaggatactctgtaggtaaagattagccta

SEQ ID NO: 805537 - DNA, 120 bp, Artificial Sequence
  ENSG00000263590_27 (sequence is synthesized)
ccaacaagtaggacactgaaaaaatatatataaaagacatgataaattagacttcatcaacattagccataccttctcatcaaaagataccactaagaaagtgaaaaggcaagcaagcca

SEQ ID NO: 805538 - DNA, 120 bp, Artificial Sequence
  ENSG00000263590_28 (sequence is synthesized)
cagacagagagaaaatagtcacaaaacgtatctgacctccacatcctgtaattagaattattgtggtctggtacactgcacccagtttctgcaggagtactttctgggtgtctctaatga

SEQ ID NO: 805539 - DNA, 120 bp, Artificial Sequence
  ENSG00000263590_29 (sequence is synthesized)
gtaagagagggccccatgggatattcctacagttcccagatgaacagtgggaaagactctacgttgacaaaccccggggacctgaaaactcaggtcctcaaggagggtagaggatacctg

SEQ ID NO: 805540 - DNA, 120 bp, Artificial Sequence
  ENSG00000263590_30 (sequence is synthesized)
gaccctgacccagacccctagatgggctgtgccaagagacccagcaagggaagggattccctcctgcctcaggttctctgttcttctgtggttagaagacctgaacccaactccctctcc

SEQ ID NO: 805541 - DNA, 120 bp, Artificial Sequence
  ENSG00000263590_31 (sequence is synthesized)
aagcagtggagatagggcttttccaagggctggggatcttgctgtcctaaggacagctgagcaagggggtcgaggaggagcttgggtggtggaggagaggaaaccgggtaagatgtgtga

SEQ ID NO: 805542 - DNA, 120 bp, Artificial Sequence
  ENSG00000263590_32 (sequence is synthesized)
agcagtcggctataccaggcacagagaggacccactgggacacaagagcctgcatgtgaagccaggccttgggccaccttgttcctcaaaggggtgcttacttccatgggatcttcaaag

SEQ ID NO: 805543 - DNA, 120 bp, Artificial Sequence
  ENSG00000263590_33 (sequence is synthesized)
ggactgtggaaagagaagccttcagcccacacctctgaatgcttttccaccacagcatgccctgtggcctgtatcctgctggtgtggaacagtcagacccctgcagggctgcagagcctc

SEQ ID NO: 805544 - DNA, 120 bp, Artificial Sequence
  ENSG00000263590_34 (sequence is synthesized)
tgtactgggcggcatcccagcctgagtgccagagctcagtgggcaggcccccgagcaagcagagaggagggcaccttttggacagaacctgtgggacaagagcgacgtctcatcctttca

SEQ ID NO: 805545 - DNA, 120 bp, Artificial Sequence
  ENSG00000263590_35 (sequence is synthesized)
ggttcctcacaaaatgacagtcaggaagatcagggtgcagacctgatttcccacgaagggctgaaagcagacaaccggagggagagcagcacctgggtcaatgaggtagaagacagaaga

SEQ ID NO: 805546 - DNA, 120 bp, Artificial Sequence
  ENSG00000263590_36 (sequence is synthesized)
ccacagtgtacttctgccctcaacctcaccccctcccacctacatcctccacaccccctgaccaccttcttcagaaacgtaataggaatcaagatcccccctggcctggttgctatggga

SEQ ID NO: 805547 - DNA, 120 bp, Artificial Sequence
  ENSG00000263590_37 (sequence is synthesized)
ggcacagtggcctgatggagcctgaggcaggtgtgggaagatgtggattgtctaactggaggttgggagtccagggtgcagaaggagaagcttggagtgcaggatttggtggtatgtgtg

SEQ ID NO: 805548 - DNA, 120 bp, Artificial Sequence
  ENSG00000263590_38 (sequence is synthesized)
tggcagtaggcactatgttctaattgccagtttttttttcttcttcctttttttctctagctaaacaagcactggccttgagataagcaatgctgaagcacttgcagctcacctattacc

SEQ ID NO: 805549 - DNA, 120 bp, Artificial Sequence
  ENSG00000263590_39 (sequence is synthesized)
ataaactgactgagccctccctacacaagccgtaactactgctttgattggacaagagactgatttcagtagttttctcttgataagagaccactggccgtgggcgggttctggacagtt

SEQ ID NO: 805550 - DNA, 120 bp, Artificial Sequence
  ENSG00000263590_40 (sequence is synthesized)
tacagaagctatgcacttgattgcctttgtgtccctgcttcaccttttgaagcatagggcctaattataatgtatttaaatgttgtctccaccccaaagtgaacatgggttgcatgtaac

SEQ ID NO: 805551 - DNA, 120 bp, Artificial Sequence
  ENSG00000263590_41 (sequence is synthesized)
aggcatgtttactcagcatgcatgcagcaggatcccttcacaaatattcagagctccccctattccctgttgaatatgtatatgtggccagccagatcaacgtaaatcactattcgccct

SEQ ID NO: 805552 - DNA, 120 bp, Artificial Sequence
  ENSG00000263590_42 (sequence is synthesized)
cccctccctggaaacctacttttcgggtttcagcaggaagctatgcctccccgtctgtcagaatggccacttgcaggctgtaaccctttataaaaaaataaaatctcctttctaaattta

SEQ ID NO: 805553 - DNA, 120 bp, Artificial Sequence
  ENSG00000223901_0 (sequence is synthesized)
gtgggaaccggacagcagccttggggacgcagcatcaacgacaccaaaggctgacagtgaactgaggacaatagtgacaagctcaccaagaaagaaggcaggatctcatgagaatgcgta

SEQ ID NO: 805554 - DNA, 120 bp, Artificial Sequence
  ENSG00000223901_1 (sequence is synthesized)
acaggacactccacctggcacggtaggtcaggaagaggtcctcaaagaaggaacacgtaaagtgtgagccagcggggcaggagtggaagctgcaagtgcatctttctgtatcgcgtttgt

SEQ ID NO: 805555 - DNA, 120 bp, Artificial Sequence
  ENSG00000223901_2 (sequence is synthesized)
gagagctcattatcgagttgacacgaacccctggcccagcacatgctgcacatgccgtacctttcttgtgaagaatgttccgggctcgtaccaggtcaggatcgtcaggcccaacaccca

SEQ ID NO: 805556 - DNA, 120 bp, Artificial Sequence
  ENSG00000223901_3 (sequence is synthesized)
gagcagaggacaggtgagaaaccggtatctgtccttacttctaagaaataaagcaaaactttctgtggagtttcctcagaaaactaagaatgctaaaatgccttaacctgacataacatg

SEQ ID NO: 805557 - DNA, 120 bp, Artificial Sequence
  ENSG00000223901_4 (sequence is synthesized)
ccaacacaggagacccctgagcagccactctgcagtacgaattcatgcacctcccatgacaactgagccccccactccttcctcaccgtgacccgcctgctctacaccttcccacgcctg

SEQ ID NO: 805558 - DNA, 120 bp, Artificial Sequence
  ENSG00000223901_5 (sequence is synthesized)
agtcaacacttctagctcaagggcggtccactttgggctatggctctgctcccaaagtgtgtgccacatggcaggaaagctgtcaggccttgtctccacctgctgccagcccagagtcaa

SEQ ID NO: 805559 - DNA, 120 bp, Artificial Sequence
  ENSG00000223901_6 (sequence is synthesized)
tcctcaatgtgcctacaggagcagaggacaggcaaggaaactgaggctcagccagtaaatggtggggctaggaggtcagacccgattcagtgttcaccagagtgctgcccaatgccgcac

SEQ ID NO: 805560 - DNA, 120 bp, Artificial Sequence
  ENSG00000223901_7 (sequence is synthesized)
aggccacagtcaatgggagctgtctacatagcatcatggaccaagagcattttccaaagtccaaaaagagggaagaaaagctccaactcagccaggaaaaaccaggccatacagagatag

SEQ ID NO: 805561 - DNA, 87 bp, Artificial Sequence
  ENSG00000223901_8 (sequence is synthesized)
accaggccatacagagataggagctgaagaagagccttctgttaagcccggacaaggccactagagggctccttggtctagcggtaa

SEQ ID NO: 805562 - DNA, 120 bp, Artificial Sequence
  ENSG00000223906_0 (sequence is synthesized)
gaatgaatacacaaatataaagaaaatgtatatttgatattatggaaataaaacataggtatgaagagaaatattttacctaaaatacatatattttaggagtttctacacaggactagg

SEQ ID NO: 805563 - DNA, 120 bp, Artificial Sequence
  ENSG00000223906_1 (sequence is synthesized)
ggaccgaaagaacgtgagtgagagcaggggaatttaggaatccattgaggatgcctgaatggggttgttggccctgatcacactctagagacaggcatatcatcacaggcaatcagaaat

SEQ ID NO: 805564 - DNA, 120 bp, Artificial Sequence
  ENSG00000223906_2 (sequence is synthesized)
gaagaaggacattaacttgtaccctgtggaattgtcttcagttgataaaaaggacttctctgtgagtgtatattttaattatgctgttagctaggagtcaattaaattacaatacctaga

SEQ ID NO: 805565 - DNA, 120 bp, Artificial Sequence
  ENSG00000242317_0 (sequence is synthesized)
acttctccctgctgccaccttgtgaagaaagtgccttgcttcccctttgcctaccaccatgataaccaattttctttgcgtatgcccttggagttattagctcaaagaatagatttctct

SEQ ID NO: 805566 - DNA, 120 bp, Artificial Sequence
  ENSG00000242317_1 (sequence is synthesized)
tggcccacctggaagccttctcttttcctaactgatgactttggattatacaactttacctactgttaaaagtacacagatgaaaagagtaaagggtatttgactgacgagtgaacatga

SEQ ID NO: 805567 - DNA, 120 bp, Artificial Sequence
  ENSG00000242317_2 (sequence is synthesized)
tttgtctcctaatgcatgtagatgatcagcgggccacatagaatacgcaatggaaaatgctgagctgtgtcacaggactgaacataccagctgccattcataaaacatgccacttaggag

SEQ ID NO: 805568 - DNA, 120 bp, Artificial Sequence
  ENSG00000242317_3 (sequence is synthesized)
caaacaacttttcagaagaaacaatatgacacaaggggagagtaaatgggataccgtctttcttcggatgaaaactatttctcttattaaactctttccactaaggcaagccttatatgg

SEQ ID NO: 805569 - DNA, 120 bp, Artificial Sequence
  ENSG00000197503_0 (sequence is synthesized)
agtctcttcttgcaaggcctttcgcccctggtctatgtgcgcctagtccatgttgcctttcttttccaacaccacctccaagtccgtgtctgtttcctcctttcaagggtctcctgctac

SEQ ID NO: 805570 - DNA, 120 bp, Artificial Sequence
  ENSG00000197503_1 (sequence is synthesized)
cccactctctttccttttctttttcttcctttgcagagccggctcctcaatgactggctgctttaccttcttcttggacttcatctttttcttcgcgggggttttagggccatctcctat

SEQ ID NO: 805571 - DNA, 120 bp, Artificial Sequence
  ENSG00000197503_2 (sequence is synthesized)
ggggatgtattccggagcctccactttgactggcttctttttacttcgtttcctagggcagctctccatggacctggagggcttggagtggcttgggagggcgtctccctcctggtggat

SEQ ID NO: 805572 - DNA, 120 bp, Artificial Sequence
  ENSG00000197503_3 (sequence is synthesized)
ttttttttcttcttcgccttcccaccgtgttccctggggctcttgtgcttccgcttctgccccaaggctacctgttcctcaccctccttccccactgagcaagtgtccacagcatccccg

SEQ ID NO: 805573 - DNA, 120 bp, Artificial Sequence
  ENSG00000197503_4 (sequence is synthesized)
acctcgcagaaccaagggtcctggactgagaaagctgtggggtcctgggccccctttttttccttcttaagttttttaagcttcttgccaactctggtttcctcctcaccctgtctgggg

SEQ ID NO: 805574 - DNA, 120 bp, Artificial Sequence
  ENSG00000197503_5 (sequence is synthesized)
tctggggagattttcaccccagaggcatgggagatggccagagatgacttccttttcttctgcccactgaggaactccaaatggccaagcacctggttccttgggctggatgacttctct

SEQ ID NO: 805575 - DNA, 120 bp, Artificial Sequence
  ENSG00000197503_6 (sequence is synthesized)
gtccgtctggcacgcagcgtggtctcaggttctacgtgcccctcgcaaagggtgctgacacccttctctttcttctttttcttcactagaggcatctcaggtgcctgcccgtggaccaca

SEQ ID NO: 805576 - DNA, 120 bp, Artificial Sequence
  ENSG00000197503_7 (sequence is synthesized)
gaaacatgggcaaagtaatcatcattgtttaaaattgagtattgagtccctggttctttgaccactttcttcttctttttcttctctgggatcccagggcccaggtctactttccggtgg

SEQ ID NO: 805577 - DNA, 120 bp, Artificial Sequence
  ENSG00000197503_8 (sequence is synthesized)
gccaaacttccccgcctccacgtgagagccggctccgccgtgacccggaagtccactttcgggttgcacgcgtggcttctcttacacacaaattttcttccacttctgccactcctgaga

SEQ ID NO: 805578 - DNA, 120 bp, Artificial Sequence
  ENSG00000197503_9 (sequence is synthesized)
cagcaagactgataccttattttcctcctcctccttggcctactcaacatgaagatgatgaggatgacgacctttacgatgatccacttccatctaatgattgaggcagtgtctcactct

SEQ ID NO: 805579 - DNA, 87 bp, Artificial Sequence
  ENSG00000197503_10 (sequence is synthesized)
gccacctcagctaaggcctgcagtagctaagactataatcccttaaatattttagaagagaaggagcaagagaagaagatctcaaaa

SEQ ID NO: 805580 - DNA, 120 bp, Artificial Sequence
  ENSG00000197503_11 (sequence is synthesized)
tattttagaagagaaggagcaagagaagaagatctcaaaatactttttcaacactggctggttttgagaagctcactttcaaaatttgatatggacattgcatttgacgagacagtagag

SEQ ID NO: 805581 - DNA, 69 bp, Artificial Sequence
  ENSG00000197503_12 (sequence is synthesized)
tgacctgaccgcgcccagccgtcacaggatttcatacttattaagatccctctttcttctttaggattc

SEQ ID NO: 805582 - DNA, 120 bp, Artificial Sequence
  ENSG00000197503_13 (sequence is synthesized)
tttcatacttattaagatccctctttcttctttaggattcccaagtaacttgtctctgctatttttaatgtatatgaccgaataaattcaaaatgagccttatgaaaataggctaaggtc

SEQ ID NO: 805583 - DNA, 120 bp, Artificial Sequence
  ENSG00000256551_0 (sequence is synthesized)
aagaaggtaagaaggctgcagcttccaccgggcctcttgggctgtgtactcttgacactcttgctctgagaactaagcaggcatatttcatatcaaaatagtaaagaacttcctttccaa

SEQ ID NO: 805584 - DNA, 120 bp, Artificial Sequence
  ENSG00000256551_1 (sequence is synthesized)
aggcaggacttgcttctgtgaggtactgagccacccgtccctggaggaaagcaagaacagagcagatcagagcccaggcagacatcttggatgatggggtacatcttgccatccagaggc

SEQ ID NO: 805585 - DNA, 120 bp, Artificial Sequence
  ENSG00000256551_2 (sequence is synthesized)
ttgcagcctgcgatgaaacatcctgtttctcccaaccagaaacaggagagaagagccccagtgagagagtgaagcagatgaaaagataacatgaaaaccaaccaagcaacgaacagacaa

SEQ ID NO: 805586 - DNA, 120 bp, Artificial Sequence
  ENSG00000256551_3 (sequence is synthesized)
acaaaataacccatttcaagttctcggagcctggtctcatttccagccggaaattactgctgcagactgcagggtgctccctgcactccctgtgtatatgatctagtggttgctaatgtc

SEQ ID NO: 805587 - DNA, 120 bp, Artificial Sequence
  ENSG00000256551_4 (sequence is synthesized)
ggggatttgcccaccactgggcagccaggctcccgtcaggaaggcttttcagagggagtgttggaaggagtcgtcgaggagtcttcctcacccaggaagtcttcctcaccgggtgagccc

SEQ ID NO: 805588 - DNA, 120 bp, Artificial Sequence
  ENSG00000256551_5 (sequence is synthesized)
caacctgctggacctgctcagaatttgcccaacaggggatcctggttgactgaggtctgctaattccaactggcctacgctaaattctcccagaatgtcttcatcatcaatgaatcgctt

SEQ ID NO: 805589 - DNA, 120 bp, Artificial Sequence
  ENSG00000256551_6 (sequence is synthesized)
tccactgacacgacgcctggaagaacataaacactgaatgcgtcttggaggggttgcagtcatctttttgggatctgaacattcattcacagctgtcagcttatgtccttgtatctgacg

SEQ ID NO: 805590 - DNA, 120 bp, Artificial Sequence
  ENSG00000256551_7 (sequence is synthesized)
gcactgacctaggtgcatggctgccagaagtaacttcctgcttgtcacaaaaatgcaatctcctgcctgcccctgattctccccagccctggctttggataaagacaattaatatgaacg

SEQ ID NO: 805591 - DNA, 120 bp, Artificial Sequence
  ENSG00000256551_8 (sequence is synthesized)
cttcaggtcaaataacgtgtaccctgctggttccgggaagcgctgctatcacagaaaaacacacccgctgctccagccctgtgggaatacggcaccgcatctgcctgtggtctctgtcca

SEQ ID NO: 805592 - DNA, 120 bp, Artificial Sequence
  ENSG00000256551_9 (sequence is synthesized)
aatttccaaagacaatgaaaagtaatggtgacgatgatgtcgatgatgacgaaaacaataataagtgagaagaatcgctcactaggtcccaggcacattgccaagtggcttacatattgt

SEQ ID NO: 805593 - DNA, 120 bp, Artificial Sequence
  ENSG00000256551_10 (sequence is synthesized)
cttctcctatgataagtatttttagtccttctttcatagatgagtaaattaaggtacagagatgacaaataattggcccaaatccaatagccaagaagtcacaaaatcaagattcacaac

SEQ ID NO: 805594 - DNA, 120 bp, Artificial Sequence
  ENSG00000256551_11 (sequence is synthesized)
agttccctttgggtctgatcctagagttgtacccttccccattccatggcattagggaggcggaagggaactccctttctgcttcctggaatccaggctggcttggtgacttgccgacca

SEQ ID NO: 805595 - DNA, 120 bp, Artificial Sequence
  ENSG00000256551_12 (sequence is synthesized)
ttcctcattaattcattccacagggatggatgctgccctcagcctctgcagggagctgttctgcgtgctggaggtggagacgccagtgcctctgagggcctcctttttctgacagagctt

SEQ ID NO: 805596 - DNA, 120 bp, Artificial Sequence
  ENSG00000256551_13 (sequence is synthesized)
gcagagaaggcagacatgaaatggatggtcacagatggggtggaggttacagaaggggatgcatagacagccagggagtgcttagggcttgaatgaggggaattgcagaggtgagaaaaa

SEQ ID NO: 805597 - DNA, 120 bp, Artificial Sequence
  ENSG00000256551_14 (sequence is synthesized)
cactctgggccaaataacaggactgattgcagcctgcgatgaaacatcctgtttctcccaaccagaaacaggtagagaagtcagcattttacatgattctgggagggaagaaaggagaca

SEQ ID NO: 805598 - DNA, 120 bp, Artificial Sequence
  ENSG00000256551_15 (sequence is synthesized)
agctctctctaaatgccacggagctggaaggctgcagcctggaacttgctgcagcccacccaggcaagcaagagatgacatagtttcagcacctggatctatggcacccagaagccagat

SEQ ID NO: 805599 - DNA, 120 bp, Artificial Sequence
  ENSG00000256551_16 (sequence is synthesized)
ccaaccccccagcccttatctttgaccttgagccagtctgaactggtaactggaagtcacttatctaccagattcaactatcaggatgttactaataaaaaatgactccaaaaatgaaaa

SEQ ID NO: 805600 - DNA, 120 bp, Artificial Sequence
  ENSG00000256551_17 (sequence is synthesized)
cctgtttctcccaaccagaaacaggtagaggagctgctttaggatggaagatgaggcttgctttttctttctcctagaagtcagcattttacatgattctgggagggaagaaaggagaca

SEQ ID NO: 805601 - DNA, 120 bp, Artificial Sequence
  ENSG00000204929_0 (sequence is synthesized)
gttcaatcccaggtcgttttccctttcagctgcaatgccgggattttaaatagcagagatgaaaggcccctgcccccgcctccctcctcccctgagttcatgtattatgaatgaaacggc

SEQ ID NO: 805602 - DNA, 120 bp, Artificial Sequence
  ENSG00000204929_1 (sequence is synthesized)
tgagttcatgtattatgaatgaaacggcagcctcgctgcttcctgaggtgctccacttcaggctggggtgcaatggctcgatctcggctcagtgcaacctctgcttcccgggttcaagtg

SEQ ID NO: 805603 - DNA, 120 bp, Artificial Sequence
  ENSG00000204929_2 (sequence is synthesized)
agtgattctcctgcgtcagcctcccaagcagctgtgaatacaggttggagtgcagtggtgctgtgtctggagtttgttcctgccgttgggtttgtggtcttgctgacttcaagaatgaag

SEQ ID NO: 805604 - DNA, 120 bp, Artificial Sequence
  ENSG00000204929_3 (sequence is synthesized)
gtgcatgtcaccaaaaattctccaggaatttcatagtttggaccttggtggcatggctggccctggattatccatgcagggaggcctgatcctgtgacagctggctgcagcagggggctg

SEQ ID NO: 805605 - DNA, 120 bp, Artificial Sequence
  ENSG00000204929_4 (sequence is synthesized)
cccatcttctgtgctttgtggtacatatctgtgtcaccaaagtagcggcctcggtacagcaagcctttcatctgctgcttctccgtccagcagttgttccagaggttggcgatataatca

SEQ ID NO: 805606 - DNA, 120 bp, Artificial Sequence
  ENSG00000204929_5 (sequence is synthesized)
acatagtagatgacactcaggtggtcagtgactcgcctgtgatgtggcccacaaacagtcttgggctcagactgtagggtggactggagaccatgagctggctgagagctgacatgagga

SEQ ID NO: 805607 - DNA, 120 bp, Artificial Sequence
  ENSG00000204929_6 (sequence is synthesized)
tgaggatgggtatcagctgcacgaacacccgcaagctgccgtcactccgcttctccctgcagccctgcctttgctgatacacacacaggcacattggaaacgcagtagaaaatggctgcc

SEQ ID NO: 805608 - DNA, 120 bp, Artificial Sequence
  ENSG00000204929_7 (sequence is synthesized)
aatttaaaaccagaagttaagaagagcaaactcgaatgtacagcaagagagcttcaggctggactggcttccagcagaagtgggactggaaacctcggattctattgtctcttctctgtg

SEQ ID NO: 805609 - DNA, 120 bp, Artificial Sequence
  ENSG00000204929_8 (sequence is synthesized)
aagtgggaaaacatgtcagtatctgaacttgagcttggtaattactgctcatttctcaaccttttccaagccacgtaactcccctaaggcttagttttcttatctgtgaattgcgagatg

SEQ ID NO: 805610 - DNA, 120 bp, Artificial Sequence
  ENSG00000204929_9 (sequence is synthesized)
gtatgttcttcatcacgaggttgctataaagactgaatgagataatgtgtgtggaagcaccaagcatggtccttggcatgcagtagatgctcaataaatatgaactggagtacacatgca

SEQ ID NO: 805611 - DNA, 120 bp, Artificial Sequence
  ENSG00000204929_10 (sequence is synthesized)
ttttttttttttttaaatcagacatttgtctatttttagagattcagagggctttccctgattaggtcaaagtatcacaggaaaaaaaaataataaaacactgaaaggaatccacctatc

SEQ ID NO: 805612 - DNA, 120 bp, Artificial Sequence
  ENSG00000204929_11 (sequence is synthesized)
aagaaagcatcttggccaaagataggagagacgagggaaggaggtcctggaggtcatgagaagagtgagcaattaatcagaaggtcaaaggtctctctgagaacaccatggtgctgtgca

SEQ ID NO: 805613 - DNA, 120 bp, Artificial Sequence
  ENSG00000204929_12 (sequence is synthesized)
cagagagtcacttattattgagaaaggcaatgatttaaaataagcttcctcatctggaaggatgagaataatatccacctcatagagtattatctcggggtaacatgagataattacgtt

SEQ ID NO: 805614 - DNA, 120 bp, Artificial Sequence
  ENSG00000204929_13 (sequence is synthesized)
taatgctcatgaactggaaaacgctttgaaaatacaacataggattaagagaggttgttcgaaaccctgaaaactgcacagcctcctgaaagagtggaaactagatgcatggcctgttgt

SEQ ID NO: 805615 - DNA, 120 bp, Artificial Sequence
  ENSG00000204929_14 (sequence is synthesized)
agggtattctgttaactgatttgcaagaggcttcttggtctgccttcctctttataacttcacagaaggtacaaagcaccagtacagccccctctaagagcaggcatcagttctgactgg

SEQ ID NO: 805616 - DNA, 76 bp, Artificial Sequence
  ENSG00000204929_15 (sequence is synthesized)
agtacagccccctctaagagcaggcatcagttctgactggctctgttatcttaaaacaaaaacaaaaacaaaaacc

SEQ ID NO: 805617 - DNA, 84 bp, Artificial Sequence
  ENSG00000204929_16 (sequence is synthesized)
ccattgcatttcagcctggcccaaacaaacaaaactttctaagagcaaataatgtaaataatgtatctgtcacccattgcacag

SEQ ID NO: 805618 - DNA, 120 bp, Artificial Sequence
  ENSG00000204929_17 (sequence is synthesized)
gcaaataatgtaaataatgtatctgtcacccattgcacagtgcctaaccttccaccaccctctaaggagcatctccttagggcccttgaagatgggaaggattcttcacaagtgcaaatg

SEQ ID NO: 805619 - DNA, 120 bp, Artificial Sequence
  ENSG00000204929_18 (sequence is synthesized)
actggaaggcagccagtatctacagtgttgaggtttctgtccagctaaaaaaaatctagaggaaaagcactgagtgttggaggaaatgggtggtgaagatttcccttgaatggttctcac

SEQ ID NO: 805620 - DNA, 120 bp, Artificial Sequence
  ENSG00000204929_19 (sequence is synthesized)
atcagatcagaggggtgttggggaggaatgttaattttttgcctacagactaaaaataatggcaattattagtgaattaaaatattcttaacctttaacagaaagggaacctcccagaat

SEQ ID NO: 805621 - DNA, 120 bp, Artificial Sequence
  ENSG00000204929_20 (sequence is synthesized)
gcagatgttttttcactccaccaacatttattgagcatctagtatgtgttgatctctatgatgggagctgggaagacatagctgtgaagaagggcaagcatctctgtggacctatttcct

SEQ ID NO: 805622 - DNA, 120 bp, Artificial Sequence
  ENSG00000204929_21 (sequence is synthesized)
cttttaatttgcataatctgtatggtttgattctgacatctgaggcaggtaagatttttcattttttgcctgtcatgccacttgttctttgtgtttattattattttttaataaaaaaat

SEQ ID NO: 805623 - DNA, 70 bp, Artificial Sequence
  ENSG00000204929_22 (sequence is synthesized)
attattattttttaataaaaaaattgtccacggcaggcggaccacgtgaggtcaggagttcaagaccagc

SEQ ID NO: 805624 - DNA, 120 bp, Artificial Sequence
  ENSG00000204929_23 (sequence is synthesized)
atcacgccactgtactccagcctgggtgaaagagcaagatgtcgtctcaaaaaaaaaaattgtttactttccagtgtcattttaacttgttactagtgagcatctggcctgggtgttttc

SEQ ID NO: 805625 - DNA, 120 bp, Artificial Sequence
  ENSG00000204929_24 (sequence is synthesized)
gtgttttccattagcatgaaaattcagaaggctacagaaggaaatacctataattgagcagcgagagagccacttcattctgtggccaggcaatatgtcttgcatttctctagtgtaaat

SEQ ID NO: 805626 - DNA, 120 bp, Artificial Sequence
  ENSG00000204929_25 (sequence is synthesized)
aaaatgatgattcaaagaatggtccccattaatgagtatctgatttagaataaaacaaaatccatgctgggaagttgatgagcttgattttgctgaattgctttgagcttgcagcttata

SEQ ID NO: 805627 - DNA, 120 bp, Artificial Sequence
  ENSG00000204929_26 (sequence is synthesized)
tttattggttctttcctttcgacaattgtcaccagttgtctgctgttctttcgggagagggcttgaaggttgattttagttccctgtaactggaggtgacatgtgaaagctcaaagctat

SEQ ID NO: 805628 - DNA, 120 bp, Artificial Sequence
  ENSG00000204929_27 (sequence is synthesized)
tgaaaagggtgagagctgaatgtaggctccaacaggaagacggcattgaagcctggttgcttgttactactcagaatgccatctacaaaaggaaattatgtaaaaagcaataaagaaccc

SEQ ID NO: 805629 - DNA, 120 bp, Artificial Sequence
  ENSG00000204929_28 (sequence is synthesized)
cttttgttcttgcaggagtcagtgtttcataactctttctgtgatatcgtctgtataagttgaacctctaaagaaccttatctaagttgccacgaccttactcattaccctcaagaaaga

SEQ ID NO: 805630 - DNA, 120 bp, Artificial Sequence
  ENSG00000204929_29 (sequence is synthesized)
tgaacaatttaaagggggaaaaaaggaagtgaaaaaaatggcggatacgaggcagaactaacctgcagcttccactcgaagggacagagcagagtgtggagacccacaactggaactttt

SEQ ID NO: 805631 - DNA, 120 bp, Artificial Sequence
  ENSG00000204929_30 (sequence is synthesized)
tctccaagaactaccacaggaacataccaagaaagccaagagaatccacagaacctttggaggaagtggtttgtcactgcaggctctgtgggacagctgaggaactgttttcatggtgat

SEQ ID NO: 805632 - DNA, 120 bp, Artificial Sequence
  ENSG00000204929_31 (sequence is synthesized)
ttcaactaatatgtggaagggaaggaggggaagaggaaagactcggtgatggctacagcaggcaaaccatatgccaccgcatgggcctgaggacaatctcggacgtcttgcaaacaatca

SEQ ID NO: 805633 - DNA, 120 bp, Artificial Sequence
  ENSG00000204929_32 (sequence is synthesized)
cccacacaagtgtcctgatgagtggcgaccttctcagcgaggactgacaaccacacgggttcctacttcatgaccagaccagggtcaccatggagacatttctcattggatcagcttatt

SEQ ID NO: 805634 - DNA, 120 bp, Artificial Sequence
  ENSG00000204929_33 (sequence is synthesized)
atctatgccttgataggtcttcagttactcatggtgaaacatgtaagccttgaaaaactttttgtatggagttgtgctgggaagcagttttcccaccagggacaacatcttctagtcctt

SEQ ID NO: 805635 - DNA, 120 bp, Artificial Sequence
  ENSG00000204929_34 (sequence is synthesized)
ttacatctaagtagtaccatgagactggatcatgccaaagaaatgttttggaagtgagatgtttcactttggaaccaaggaactgaaaaaacagatagagggagcccaagccaagaagag

SEQ ID NO: 805636 - DNA, 120 bp, Artificial Sequence
  ENSG00000204929_35 (sequence is synthesized)
tatcaaagatttgctgaattcacaattgaagaggcttatgtcagtcccttagaaagaatttgaggactcctcggaaaattgctgagttgagtaaatatttccttccataaaggtaaataa

SEQ ID NO: 805637 - DNA, 120 bp, Artificial Sequence
  ENSG00000204929_36 (sequence is synthesized)
gcatctcaagagcaagtttctacattttgtatttccctgttttatttctgtaaaattgtgcaaccaagaattatgacctactgatattagaataaaatttgcagaagtttgactacatga

SEQ ID NO: 805638 - DNA, 120 bp, Artificial Sequence
  ENSG00000204929_37 (sequence is synthesized)
tgcttgcagttgtgagagtttcagcctggagaggaccaccctgctggaagggtgtcctgggaatgaagtccacgtaggtgagaacacacaccagggatatgtagctggatggactcagca

SEQ ID NO: 805639 - DNA, 120 bp, Artificial Sequence
  ENSG00000204929_38 (sequence is synthesized)
aaaaggaagaagaggggcctgagccaagcatgaccatttcttctttcaaactcctggtcagttaactcaccacttttcaggaggcaagtgctggggtgatcaatgaatgaggagggggaa

SEQ ID NO: 805640 - DNA, 120 bp, Artificial Sequence
  ENSG00000204929_39 (sequence is synthesized)
gaaaaccacagtaccccatggatttactattgtgggaaatgagtaggtgcttctaatgacaacctatgggttgtgcagttctggagccagagaaatagattctttgccatctgaatgttc

SEQ ID NO: 805641 - DNA, 120 bp, Artificial Sequence
  ENSG00000204929_40 (sequence is synthesized)
ctcttggcaaatggaagcccagagcactggtccaggtgaggttctagaatagggagagtaagaagtgctggaccatggctgtggcatttagagccatgagattgagagagtccagatgga

SEQ ID NO: 805642 - DNA, 120 bp, Artificial Sequence
  ENSG00000204929_41 (sequence is synthesized)
aaagaagacttgggaaagaatatgagcataaaatgtctccatggatacaggccacaggaacagcagggaagatccagagggttctggagggcgaggaggagcaggatggagcctgttacc

SEQ ID NO: 805643 - DNA, 120 bp, Artificial Sequence
  ENSG00000204929_42 (sequence is synthesized)
agaagtacttgaaacctcttactgagacccttcaacctctcctctgaggagctgtcaaggggaagaggacagcatctgtttttataacttccaagtgaacatagtcctctattttacacc

SEQ ID NO: 805644 - DNA, 120 bp, Artificial Sequence
  ENSG00000204929_43 (sequence is synthesized)
taataggtgctcattaaattatttggtagttgaattgaagagactcttctaaaaattagtaaagcaaagaaaagtaggcaaaaaatgaataatccataggcttaacccttctaaggaatg

SEQ ID NO: 805645 - DNA, 120 bp, Artificial Sequence
  ENSG00000204929_44 (sequence is synthesized)
tatgtagtttaaaagaggatctggttgtagtaaattcatgtgtaactgatagaatatgcagacatgtttggactcaaaggtcttatgagaagtttgaatttcttcccaacatacacacat

SEQ ID NO: 805646 - DNA, 120 bp, Artificial Sequence
  ENSG00000204929_45 (sequence is synthesized)
tccctagaagtccaaggttagcaatttggtgccatacttagtcaaatcccttccattgtttgaattttatggcttcttctagggaagatcagctttcctctcatttttggcattggtctg

SEQ ID NO: 805647 - DNA, 120 bp, Artificial Sequence
  ENSG00000204929_46 (sequence is synthesized)
catattaagatctatagatcttattaggtcttagaaatacatattcatgacagcaattcctatctggaggatttattaggatatttaatgtttgccatagtaatagagattaaaagtagg

SEQ ID NO: 805648 - DNA, 120 bp, Artificial Sequence
  ENSG00000204929_47 (sequence is synthesized)
gccaccacctcaaaactcaaatctccttacagaattatagaattcacatacatcacagaatccacataaattgcagaataactgccatatatgacaattgtgaagccaatggaatgtgat

SEQ ID NO: 805649 - DNA, 120 bp, Artificial Sequence
  ENSG00000204929_48 (sequence is synthesized)
cagtgtcctgatgagtggcgaccttctcagcgaggactgacaaccacacgggttcctacttcatgaccagaccagggtcaccatggagacatttctcattggatcagcttattatgccat

SEQ ID NO: 805650 - DNA, 120 bp, Artificial Sequence
  ENSG00000204929_49 (sequence is synthesized)
aggaaacatctgattgaaatggaactcactgacctaaagctcctaaaaaaaaattttctaggtcagtgacagacaagttggctgcttcaaaaaaggtatttactgtaattctggagatca

SEQ ID NO: 805651 - DNA, 120 bp, Artificial Sequence
  ENSG00000204929_50 (sequence is synthesized)
tattgggtcgcaaacttgctgcctgtgagtgcaatccagcccacaggttcattctgtgtgacaggcactgtgtttaaaaggtaagaattggagggcctttaggtgggaagtgccctctcc

SEQ ID NO: 805652 - DNA, 120 bp, Artificial Sequence
  ENSG00000204929_51 (sequence is synthesized)
agtttacagcgagcctcatcatttcctattgtcctagacttagccgcatgacacattacatgtcacctgccaggcctctaaaaacgtgaaaatcatgaccttcaggcattctgttcatgg

SEQ ID NO: 805653 - DNA, 120 bp, Artificial Sequence
  ENSG00000204929_52 (sequence is synthesized)
tccatccatgtgccctgtgccctaggtttgacttgaggtttctcaccgatgcttcccacagctgggccttgttcctcacaaagagtttctggtgaaaccagagtcataaagactggatta

SEQ ID NO: 805654 - DNA, 120 bp, Artificial Sequence
  ENSG00000204929_53 (sequence is synthesized)
agaggaaagtccaaggaatcccaggatctaagagcttgcaggaaaacttaagaatttgggatcctgcaacccctgatgagcaacctgagacacagaaaagggaaatgccttggaaaggtc

SEQ ID NO: 805655 - DNA, 120 bp, Artificial Sequence
  ENSG00000204929_54 (sequence is synthesized)
agccccagaaggaagagagcagagagggaaacccaggactagtgattccccatcctgtatgcttcacccaccaccccacgcagctggcctgaatgattggtgtagcccttccccacattc

SEQ ID NO: 805656 - DNA, 120 bp, Artificial Sequence
  ENSG00000204929_55 (sequence is synthesized)
ctagagagtgtgtcttttacaaagccaccgtccacacatacagagtggcaccagctatgcaaccaacccctcttacactagaccgctgtgtctggtgacttgaaagtcaaggccaatgtg

SEQ ID NO: 805657 - DNA, 120 bp, Artificial Sequence
  ENSG00000204929_56 (sequence is synthesized)
gtcacactaaggccactaagtcttaaagaaaagtacttctctatcattggcagagaactttaggctggagacagattaaagtttaaaacaaatccaaggagtcaactttgtagacaacac

SEQ ID NO: 805658 - DNA, 120 bp, Artificial Sequence
  ENSG00000204929_57 (sequence is synthesized)
aggttatttaagcctctgttccttctttgttagagtacactgaaacttttcttcagagctgaccctggaagtaggcagaaaggttgctgtctctttaagttgccttaaactacctcagga

SEQ ID NO: 805659 - DNA, 120 bp, Artificial Sequence
  ENSG00000204929_58 (sequence is synthesized)
gagcttccatcagccaaaaatccccttgtagagcagcccttccattctcaaccaaggcaaaaatacttgaaattcagttaatagcaattcattcatatgagctaaatgttgcccccttga

SEQ ID NO: 805660 - DNA, 120 bp, Artificial Sequence
  ENSG00000204929_59 (sequence is synthesized)
gccttttgggtcaacaataacccaccaactttggagcaaccaaagccataacacaggagacagaaggaagaaaagatctctggggaaatctgcagattaatcaagaaaagtcagagaaag

SEQ ID NO: 805661 - DNA, 120 bp, Artificial Sequence
  ENSG00000204929_60 (sequence is synthesized)
ggactcttcagtaggtagagcttaaggaccacaagtccgcctctcccagcctagcatgttgaacacggaacagggaatagccaaataaggtgtgaaagcaggtcccattaggtgcccatt

SEQ ID NO: 805662 - DNA, 120 bp, Artificial Sequence
  ENSG00000204929_61 (sequence is synthesized)
tcctgcttccactgcttccacgtaaaaccacccttgtttaggggtgatagggaaggtgggtggagaagagaattattgtacatatactttggtcatccagggtcactttcctcccctcca

SEQ ID NO: 805663 - DNA, 120 bp, Artificial Sequence
  ENSG00000204929_62 (sequence is synthesized)
aatagtcactgtcttcagtgtcttcagccccatccctgagccacaaaggatgagactggtacaatttgtcagtttcggacagtagcagaaaagccacccagggtgtgggctatgtcattg

SEQ ID NO: 805664 - DNA, 120 bp, Artificial Sequence
  ENSG00000204929_63 (sequence is synthesized)
gcaggggcagaatgggccttgataaaaagcacttgtggattctggtgtgttcaaatctcagctccatcacgtcccagcaataagaccttgggccaatcagcaaaccacatttggcctatc

SEQ ID NO: 805665 - DNA, 120 bp, Artificial Sequence
  ENSG00000204929_64 (sequence is synthesized)
ctagaatggatataatccttgtgtgtagctacctcaaagcactattataaggaataaatgagataagtttaaaatgctacagcagtaacaactcagttcattgtaactattgtcactatt

SEQ ID NO: 805666 - DNA, 120 bp, Artificial Sequence
  ENSG00000204929_65 (sequence is synthesized)
aagaaaaagtacggggctctctgctgagacagcagtggtctctgtgctcaccctcatgcatatgtcctagtgtgttccttaaatcacacaagcctactcttctgattgtctgaaacttca

SEQ ID NO: 805667 - DNA, 120 bp, Artificial Sequence
  ENSG00000204929_66 (sequence is synthesized)
ggatgacaatttcactttatgagcacagaacatatttacacaatgctgcttcactcatcaattaattaggttcttgtcccaacaagattgcaaggtcctcctcagagaaggtcatgagtc

SEQ ID NO: 805668 - DNA, 120 bp, Artificial Sequence
  ENSG00000204929_67 (sequence is synthesized)
ttgcctctgctggaccagtccctccctgcacagcacataactgaacttatagcactttccacactgtattctaatggtctgttttcatgtctgttttcccactgacttgccatctcttta

SEQ ID NO: 805669 - DNA, 120 bp, Artificial Sequence
  ENSG00000204929_68 (sequence is synthesized)
atgggagcgtagcgtgcgtatggggtagtatatagagtagaggcccagggaccagatagatctggagtaggggccatctgggatgctgcttataaggaccaagtgacagagaggacataa

SEQ ID NO: 805670 - DNA, 120 bp, Artificial Sequence
  ENSG00000204929_69 (sequence is synthesized)
aagcagagctgggaaggggagatgctgggagaaacagtgagacaaactgggaggtcaactaaagccccgccaaattgacattgtggtcttcatcgttcttgcccttttaagtgaacagaa

SEQ ID NO: 805671 - DNA, 120 bp, Artificial Sequence
  ENSG00000204929_70 (sequence is synthesized)
ttagctccatcagtcagaatccatcaggaagcagccagtacactgaagaggtaaagtcaaagagaggttaataaagggggtatttagagaaagtaagagaaaccaataggggctggtgaa

SEQ ID NO: 805672 - DNA, 120 bp, Artificial Sequence
  ENSG00000204929_71 (sequence is synthesized)
gcacctcgggctagcagtaggtggaggtgctgctactcctgggcttgaaggccaaggggacaagagcagatacaggaacaccctgagagctttagctctaggacaggcccctaacaggac

SEQ ID NO: 805673 - DNA, 120 bp, Artificial Sequence
  ENSG00000204929_72 (sequence is synthesized)
ctgtgacctttgcaagagaaacacggccactgccagcctgcagcgtggtaggaagtgagccggtggataaacactccaagttctctttttttcaccctttgatttcctgccactcacatc

SEQ ID NO: 805674 - DNA, 120 bp, Artificial Sequence
  ENSG00000204929_73 (sequence is synthesized)
ggtttcatccaaccagatgccaaaaggcgagggagtcagctcatgttatcagcagcctggatgcagagcagacaaggatggatctgaggggcaaagagagcatcctctgcctttatccac

SEQ ID NO: 805675 - DNA, 120 bp, Artificial Sequence
  ENSG00000204929_74 (sequence is synthesized)
aggtgtacttagaaactgctgggaacacaacccacgatgctatccatagggaaatatctaaataaactgtgatgtgtccatactaggaaatcctaggcagaagttgaaaagacagaataa

SEQ ID NO: 805676 - DNA, 120 bp, Artificial Sequence
  ENSG00000204929_75 (sequence is synthesized)
atcagtagttattgctatggagagattgctgagatctattgttgagtggtgaagcaaattgcagaaaaatgcctagagtaggatggcatgtttacgatactcacccccgccccccaccac

SEQ ID NO: 805677 - DNA, 71 bp, Artificial Sequence
  ENSG00000204929_76 (sequence is synthesized)
ggatggcatgtttacgatactcacccccgccccccaccaccacatacactatcataagtctattaaggtgc

SEQ ID NO: 805678 - DNA, 120 bp, Artificial Sequence
  ENSG00000204929_77 (sequence is synthesized)
aaaagtctattaaatgccccatgtcttttatggtattttgttatatgtatatgtccatatgcaaagtttggaataacatacatcaaactggtaagagtggtttgctctggagaggtggga

SEQ ID NO: 805679 - DNA, 120 bp, Artificial Sequence
  ENSG00000204929_78 (sequence is synthesized)
ggcagttcaagatttggggggtggtcaaaggggacttcagttgtggtagatagtactggctgcttaataacagccatttcccactcacccccttctttaatgctaacaactcaaatctta

SEQ ID NO: 805680 - DNA, 120 bp, Artificial Sequence
  ENSG00000204929_79 (sequence is synthesized)
ttcaggtatcaaagggcagcattgtgctcagggaaggtaggtccaggtgtcaaatcacgattgagctaagccaagtatgcttataccactcccctttgcctgtgatttgtctaggggtag

SEQ ID NO: 805681 - DNA, 120 bp, Artificial Sequence
  ENSG00000204929_80 (sequence is synthesized)
ctgcctttgctgatttatattcctcatagtctacaccaaagagcccagggtggagtggaagatgctgcagagttattgcaagggggtctgtgacccgtgcaacaagccctgcctgtagag

SEQ ID NO: 805682 - DNA, 120 bp, Artificial Sequence
  ENSG00000204929_81 (sequence is synthesized)
caaatatatcttgccttacgcatgtacgttctactatttttcaaatgcatatttcacacttctatgttctactgtttttcaaatatatataaatactactgtgattacaataaagggatt

SEQ ID NO: 805683 - DNA, 120 bp, Artificial Sequence
  ENSG00000204929_82 (sequence is synthesized)
agggagaaatcttggctgctggcttctttaaagtgtttcacagatgaagggaatatcaaggacagacttaaaagagggaagaagactattgtttgaagccaggtgaagccttgatgactg

SEQ ID NO: 805684 - DNA, 120 bp, Artificial Sequence
  ENSG00000204929_83 (sequence is synthesized)
cctcagcagctgaggccatcactcaaaattaagggtggtagattctcctttggacctgtaggcccaattcaagaactaatggctgccctgattattctgtagtctgtgttgtctgatgga

SEQ ID NO: 805685 - DNA, 120 bp, Artificial Sequence
  ENSG00000204929_84 (sequence is synthesized)
tccatatcttcctctttggaaagctgggaactagaaagaagtgttctatttgctattacccaagggataatactaccagaatagccagtggaatttgcctattacttttcttaaaaacaa

SEQ ID NO: 805686 - DNA, 120 bp, Artificial Sequence
  ENSG00000204929_85 (sequence is synthesized)
atgcaaatgaacattccccttggctggcggcttcattttgtctgctccttaatgtacacgtggctggccaagaagggaagatggagccgccattttctagctgccatgtctagtcccagg

SEQ ID NO: 805687 - DNA, 120 bp, Artificial Sequence
  ENSG00000204929_86 (sequence is synthesized)
tagttctttcctgccggcattcaccgtgaaagctcccagcgtgcttgtctatgtctgcagctcaacttcacaggctgctctttgttagaaaatgatttggggcagcttttcattaaaaga

SEQ ID NO: 805688 - DNA, 120 bp, Artificial Sequence
  ENSG00000204929_87 (sequence is synthesized)
aaacgttaccaaggacttctggactatctgcctaaatctatgccttgataggtcttcagttactcatggtgaaacatgtaagccttgaaaaactttttggtgagctcataggttatctat

SEQ ID NO: 805689 - DNA, 120 bp, Artificial Sequence
  ENSG00000204929_88 (sequence is synthesized)
tattaatcattatgtcaaggaaataagcaaaaatgggacttttctaagcaacttagacatatggtcattctacttatgagaaatatgtgtcttttataggttagatattaggtcccataa

SEQ ID NO: 805690 - DNA, 120 bp, Artificial Sequence
  ENSG00000204929_89 (sequence is synthesized)
cgagaaatattacgttgtatggatgtaccactgtttgtttatccattcttcaggtgaaggacatgtgggttgtgcccagcgcgggctgaataaagatacacacacaggcacattggaaac

SEQ ID NO: 805691 - DNA, 120 bp, Artificial Sequence
  ENSG00000204929_90 (sequence is synthesized)
gcagctgaggccatcactcaaaattaaggctcaactcagctgtacttctcaccacgtggcaaaggatggaccaaaggctgggagcaactgggagtgtctgggaacactttctggttgtca

SEQ ID NO: 805692 - DNA, 120 bp, Artificial Sequence
  ENSG00000204929_91 (sequence is synthesized)
cagtgatcagcagccaggagcagcctgcaatgtgaagacagtcctgtgggacagtcctaggctacagggaactgtcctgcatcctgcatgtcttataaacatcctactggacgtcgatgt

SEQ ID NO: 805693 - DNA, 120 bp, Artificial Sequence
  ENSG00000204929_92 (sequence is synthesized)
ttgactgtgccccaaggaagccacacaaactgtgtagccagacagtctgtctgggaggagaaggaaggaatttatctaccagctcccatctctcatggaccaaattcttccccactgtac

SEQ ID NO: 805694 - DNA, 77 bp, Artificial Sequence
  ENSG00000237414_0 (sequence is synthesized)
tcccaaaaggggcattagaaatcctggcgttttgctgatgttctgcttcttgatgtagatgcttatactgtagagca

SEQ ID NO: 805695 - DNA, 120 bp, Artificial Sequence
  ENSG00000237410_0 (sequence is synthesized)
cagtggcgacgggcagcagcgcttcgtgatcctgatttcttccaccccaggcaagaagtgcccaccatgggtaccaccaccacccctcccccgaggactaaatgagcagcagggagtgac

SEQ ID NO: 805696 - DNA, 120 bp, Artificial Sequence
  ENSG00000237410_1 (sequence is synthesized)
catggacaccccggggaccaccaggtgaagtggagtcaaggcctgctctcaaccctgggcatgggtggagacatgagtcagcatgagtggcctgagggggagggtcagcagccctgtccg

SEQ ID NO: 805697 - DNA, 120 bp, Artificial Sequence
  ENSG00000237410_2 (sequence is synthesized)
aggcaatgggaaaagcactgaattttaaggcaaatggcccaggttgagtcctggctcctccctctgccttcactagttttgtaatgttgaacaagtcaatacatgaatttcataatctat

SEQ ID NO: 805698 - DNA, 120 bp, Artificial Sequence
  ENSG00000280485_0 (sequence is synthesized)
agagcatggcttttggagtgattctgagctatgtttgaatcctgactccagcatttactggctgtgtgactttgaaacctctggagtgttctaactggcaaaaacaatggtactttgcgg

SEQ ID NO: 805699 - DNA, 73 bp, Artificial Sequence
  ENSG00000280485_1 (sequence is synthesized)
cttctcacttcatggctctggaaaacaagaagactgctcagcttgactccaagagatggagtccaaccgcctc

SEQ ID NO: 805700 - DNA, 120 bp, Artificial Sequence
  ENSG00000280485_2 (sequence is synthesized)
acccagccttgaatacactttggtgaattctgtttataaataatatatgctcattgtggaaattctggaaaacacaaaagcttaaagaagaaaatgaagtgcaccataatcatactaccc

SEQ ID NO: 805701 - DNA, 120 bp, Artificial Sequence
  ENSG00000237419_0 (sequence is synthesized)
ggaagagttaaaaggaggaacgctggctcagccaagccccggagactcctacttgatatgggcagtttaaagccactttccctttaaatttttctgtgacaactcttttcatggagaatg

SEQ ID NO: 805702 - DNA, 120 bp, Artificial Sequence
  ENSG00000237419_1 (sequence is synthesized)
gaaagactctcgttaagtgttgccgttcagaagtgttggcggtcgttgctaacatgagatccaacaagaaatggtgaaaatgcacaatgcctcaggacgccttgaggaaggagcagcatg

SEQ ID NO: 805703 - DNA, 120 bp, Artificial Sequence
  ENSG00000237419_2 (sequence is synthesized)
gtcagtcatcctgggactgggtgtcgtggaagaaggtgacaccaggcagaaaccaagagcaggggagctgcaggccggcataagagcccgtatcagagcagagtggcccctgagcgggga

SEQ ID NO: 805704 - DNA, 120 bp, Artificial Sequence
  ENSG00000237419_3 (sequence is synthesized)
gggagccggagatcactgttggaggagggcccggcacctgcacctgaggacatgagtctaataaaagagtataaataatataataaaagagagtataataaaaaaataatttaaagaaaa

SEQ ID NO: 805705 - DNA, 120 bp, Artificial Sequence
  ENSG00000246541_0 (sequence is synthesized)
aatgtcgaggcgcgcgctgttgtcatggtaaagcaaatttttccatgaaagaaagcttggacagaaaatacgcttggtaaatcagtcttctaaaagctgctggagatctctaagggacgt

SEQ ID NO: 805706 - DNA, 120 bp, Artificial Sequence
  ENSG00000246541_1 (sequence is synthesized)
acccagggcctgcaatattatgggtcaatacttcatgaaacagaaggttaaatttcaactgggatgataaatcaaaagaaactgtttattgaatgagaaataagctcccactctaggatg

SEQ ID NO: 805707 - DNA, 120 bp, Artificial Sequence
  ENSG00000246541_2 (sequence is synthesized)
agatgcatcattgaggagcagccccctggttttggtgacagaactcctactgaaggacagtgccctgaggatgctgtggtgagatgatgtcttgctgaattgcccaggctggagtgcaat

SEQ ID NO: 805708 - DNA, 120 bp, Artificial Sequence
  ENSG00000246541_3 (sequence is synthesized)
ggctgttcatacgtacgatcatcatagtgcactacagcctggaacttctggtctcaaatgatcctcccacatcagtctcttgagtagctgggactacaggaaatgtatctgtatcagaaa

SEQ ID NO: 805709 - DNA, 120 bp, Artificial Sequence
  ENSG00000246541_4 (sequence is synthesized)
aataaatgaagtcctcagaattctttttaaaagttagagcatagtttgttatgatgtagaagctaactgatacagacttgtagagacctatccagttcatttaccttgttttggagatca

SEQ ID NO: 805710 - DNA, 120 bp, Artificial Sequence
  ENSG00000246541_5 (sequence is synthesized)
gagagatgttgaaattcagagataaaatgatacccaaggtcacttatcagccaatttgaaaagaaaaatttcctacaaatagaccctagttaaaatttactcaatcatttttgtttgcaa

SEQ ID NO: 805711 - DNA, 120 bp, Artificial Sequence
  ENSG00000246541_6 (sequence is synthesized)
gtattagttattatatgggtttcagataattataaaggaatattactaagacattaaagaacaaaatattcacattagcaaaactagccttaaaactgtttgaagagtaaaaggtaactc

SEQ ID NO: 805712 - DNA, 120 bp, Artificial Sequence
  ENSG00000246541_7 (sequence is synthesized)
ggtaactcagaagccagaagatactaaaatattctgattggacctattgctgcaatgaatggcaagctggtacagttaagcggaaatccattcaggtaaccaaaaaaaaaaaaaaaaaaa

SEQ ID NO: 805713 - DNA, 120 bp, Artificial Sequence
  ENSG00000280734_0 (sequence is synthesized)
tttcagggggatgccctgggtaaagtttgggtcacctaatgggccctctacttttcaaagtcctcttctctgttccagaccactatgggcaactctctatctattcgacctgattccact

SEQ ID NO: 805714 - DNA, 120 bp, Artificial Sequence
  ENSG00000280734_1 (sequence is synthesized)
atgggcaattctacacctgttccaccggattcctcacttggctacatcatccaccattggaatcaatttgaccctgacactctaaagggaaaatgtataatttttttctgtaatactgtt

SEQ ID NO: 805715 - DNA, 120 bp, Artificial Sequence
  ENSG00000280734_2 (sequence is synthesized)
tggccccattatgagctgcccagcccccagcaatgggcagtcagtggtagccttaattatgacaccatcctgcaattagacctactttgcaagaggctgggaagatggtcagaagtccca

SEQ ID NO: 805716 - DNA, 120 bp, Artificial Sequence
  ENSG00000280734_3 (sequence is synthesized)
tatgtacaggcttttatcaaaatatcaaaaacctaacaatctgtgaaactcccagaacccaccccccaaaggaaagtactaaggcagaactagatattatagatgaccctcttttacaag

SEQ ID NO: 805717 - DNA, 120 bp, Artificial Sequence
  ENSG00000280734_4 (sequence is synthesized)
ggctagctgtctctcagggtgaacagcaaccatccccataaagccccttgccaagtgctcctgaggctaaaacccaggagcaaacaccagggaccctactaaatccccctcacacttgga

SEQ ID NO: 805718 - DNA, 120 bp, Artificial Sequence
  ENSG00000280734_5 (sequence is synthesized)
gaggaatgccatattcaattctctctccagccctgctacctcttagggaagtagcaggaaccaaggggccagtcctagtgcaggcccccttctctataatttatacatacaatataagga

SEQ ID NO: 805719 - DNA, 120 bp, Artificial Sequence
  ENSG00000280734_6 (sequence is synthesized)
aaagctaggaaactattctgagaatcctaagaaacttgcagatgggttccagcgtttgaccttagcctctgatctatcatggagagatgttcaattcattctagcaacctgttacacacc

SEQ ID NO: 805720 - DNA, 120 bp, Artificial Sequence
  ENSG00000280734_7 (sequence is synthesized)
ctcagaaaaggaatgaatctctgaggccgcccacctgcaagcaatgaattatttgcccaaaactctcagggcaatcatcccggcccagacacagttcccactattgatcataattgggac

SEQ ID NO: 805721 - DNA, 120 bp, Artificial Sequence
  ENSG00000280734_8 (sequence is synthesized)
tataacactcctgaggaaatgaacaaccgggctaaatttcttgaggctctccttggaggaatgagaaagggaataactaaaggcagtaaattatgataaagtaagggaggttacacaagg

SEQ ID NO: 805722 - DNA, 120 bp, Artificial Sequence
  ENSG00000280734_9 (sequence is synthesized)
caaggaggaaaatccagccatgttttatggcaggctggagggagactttaaaaaatatactaatctggacccttcctctcccgaaggcaaaatattaatagcacagcatttcattagcca

SEQ ID NO: 805723 - DNA, 120 bp, Artificial Sequence
  ENSG00000280734_10 (sequence is synthesized)
atctgccccagacattagagataagctccaaaagctacagatggggccacaaactaatcaaaatcagcttacttatatcacatttatggtgtataacaatcgtgacctgaaggaaggaaa

SEQ ID NO: 805724 - DNA, 120 bp, Artificial Sequence
  ENSG00000280734_11 (sequence is synthesized)
atggcagccatcattgacgatgccctgaatgtacaaagagtgtctaagggaaacccgaagggccataaagataatgccagcaaaggctcttgcttcaaatgcaagaaaagaagacattgg

SEQ ID NO: 805725 - DNA, 120 bp, Artificial Sequence
  ENSG00000280734_12 (sequence is synthesized)
gcaaaggattgtgctaagtccccgccaggcccctgccgtcaatgcaagggcaccagtcatgacccctggcactggagaattgactgcccatgttcccactgaggggctcagtcagtcaaa

SEQ ID NO: 805726 - DNA, 120 bp, Artificial Sequence
  ENSG00000280734_13 (sequence is synthesized)
actctagcagtgcaaaaggaggaattagatgaagactgaaggggcctgaggtcttcctcactgcccctgttcaggaacattgtaattactactgaggagccccaggtaactctggacgtc

SEQ ID NO: 805727 - DNA, 120 bp, Artificial Sequence
  ENSG00000280734_14 (sequence is synthesized)
atgggcacccaaattcagtttctttttgatgcaggagcaaattactctgttcttactgcttatgcagtaaggcgttcctcccagtccacaagtgttatgggaatagaatggaagccacaa

SEQ ID NO: 805728 - DNA, 79 bp, Artificial Sequence
  ENSG00000280734_15 (sequence is synthesized)
catggtggtttgctgcacctatcgacccatcatctaggttttaagtcccacatgaaccccccaacaggccttggtgtgt

SEQ ID NO: 805729 - DNA, 78 bp, Artificial Sequence
  ENSG00000280734_16 (sequence is synthesized)
ggtgtatatgtgccatattttctttatccccatggtaaatagtgttgcagtaaacatacatgtgcatgtatctttata

SEQ ID NO: 805730 - DNA, 120 bp, Artificial Sequence
  ENSG00000280734_17 (sequence is synthesized)
gattgcaggccaccacttcatttacatggggtgagcaccaatgcgttttgttcaattctttgttcaaaaccccaagaatctggacaacttgcactcaagaccctctacgggtttggcgag

SEQ ID NO: 805731 - DNA, 120 bp, Artificial Sequence
  ENSG00000280734_18 (sequence is synthesized)
ccagtctttcagtggctgttttctagtagctccttggcaattgaggggaactggctgggaccactctccagtgctgtctgaaggccaaggagtgaacagggatggctgccctgccttgaa

SEQ ID NO: 805732 - DNA, 120 bp, Artificial Sequence
  ENSG00000280734_19 (sequence is synthesized)
gagggaaggactcttttctatcctttccagctatagtccctgatccctacatgtgatgcggttggcagcggaagctcatcctgggcgaactcacacacttttcaggagacttaaaccttt

SEQ ID NO: 805733 - DNA, 120 bp, Artificial Sequence
  ENSG00000280734_20 (sequence is synthesized)
tcttatgctaagttcttcccttcccctactcatctggctaaaggacagactatgcaaaaaaggttatacaagtcagagggtctgagcatgtcggaggtggtctgtgtggggcatggggtg

SEQ ID NO: 805734 - DNA, 120 bp, Artificial Sequence
  ENSG00000280734_21 (sequence is synthesized)
gggggaaaattcatgaaaggcaatttattgcctaaatttaaagggttaaagggttgctttaagtgggatagaaaaaccttaaggaaagttcatagtaggtcctcagtggtggagtgttgt

SEQ ID NO: 805735 - DNA, 63 bp, Artificial Sequence
  ENSG00000280734_22 (sequence is synthesized)
aaggaaagttcatagtaggtcctcagtggtggagtgttgtgggaagtcagggaccctgaatga

SEQ ID NO: 805736 - DNA, 65 bp, Artificial Sequence
  ENSG00000280734_23 (sequence is synthesized)
gtatcaaatctgggcaccttaagaacaggataacagcaacgttcaaggaacaagggagataatct

SEQ ID NO: 805737 - DNA, 120 bp, Artificial Sequence
  ENSG00000280734_24 (sequence is synthesized)
ttgaacagtatcaaatctgggcaccttaagaacaggataacagcaacgttcaaggaacaagggagataatcttaacgtctggctgcctatgggccgggcagaacagagccatatttctct

SEQ ID NO: 805738 - DNA, 120 bp, Artificial Sequence
  ENSG00000280734_25 (sequence is synthesized)
ctttttctcagcaaggaacagccctgagacagagaatgtgtgcctaggggtagtcctccaaaatggccactctggggacggctgtcttttatggtcgtagataagggaagaaataagccc

SEQ ID NO: 805739 - DNA, 60 bp, Artificial Sequence
  ENSG00000280734_26 (sequence is synthesized)
atgacaatgcgtgcccgaaacttcactcgcaattttaatttcgccctggtcatgtggtcc

SEQ ID NO: 805740 - DNA, 90 bp, Artificial Sequence
  ENSG00000280734_27 (sequence is synthesized)
cctattcatacactccctccccttttggaaatcactaataaaaacttgctggttttacggcttagggggcatcacagaacctgccgacat

SEQ ID NO: 805741 - DNA, 120 bp, Artificial Sequence
  ENSG00000280734_28 (sequence is synthesized)
agccaacacttagggaaaatagaaaaggacccacgtgaaatatcaggggctgaatttcccccgatagtggagggaaccatcccaaagcagtgccagcccccatctaaggtcagagacatc

SEQ ID NO: 805742 - DNA, 120 bp, Artificial Sequence
  ENSG00000280734_29 (sequence is synthesized)
aattttataaaaccttgaaatcccttaataccactcgtctgcttaaacctcggcatcccacatttaccactatcaggaaggatcacgtttgtttgtttgctgtctcattcccccatttat

SEQ ID NO: 805743 - DNA, 120 bp, Artificial Sequence
  ENSG00000280734_30 (sequence is synthesized)
atgtgaattccacgggtaagggcctgctcctacatcccacacctctacatccacagagcctagagaccgcaggcgcggggaaagcactccacgaccatcactggccaggccacaagagtg

SEQ ID NO: 805744 - DNA, 120 bp, Artificial Sequence
  ENSG00000280734_31 (sequence is synthesized)
ctggatctaaatttggaaccggactttcagagctgaaataaacctgaggttttccaggggcttttaacctccttttacagccaaggatgcgcctaagaaaggggagaggcttccgtgact

SEQ ID NO: 805745 - DNA, 120 bp, Artificial Sequence
  ENSG00000280734_32 (sequence is synthesized)
gcaaaaacccggagaagcggagcctttctcaaagaaaatgacctccagactcatgctaccatctcgaccggtgcaagtatcacgcatgcgcagggccggccgcccggccgcacctcgcca

SEQ ID NO: 805746 - DNA, 120 bp, Artificial Sequence
  ENSG00000280734_33 (sequence is synthesized)
actcctactcggacacgtcatctagaataatttggacagccttttctgagtttcccatgacgacttctgtataagattgtcggatatagcaaataaaagtacagtatacccagctttact

SEQ ID NO: 805747 - DNA, 86 bp, Artificial Sequence
  ENSG00000280734_34 (sequence is synthesized)
gtgcgttttgtccaattatgtccgcaaccaatcagactgattgtgggctgaatcttcatttgcatggaagtgcaactttgtaactt

SEQ ID NO: 805748 - DNA, 120 bp, Artificial Sequence
  ENSG00000280734_35 (sequence is synthesized)
agaagtgcaactttgtaacttcactttagcctctgattgcaggccaccacttcatttacatgggtgcgttttgttcaattctttgttcaaaaccccaagaatctggacaacttgcactca

SEQ ID NO: 805749 - DNA, 120 bp, Artificial Sequence
  ENSG00000280734_36 (sequence is synthesized)
agaccctctacgggtttggcgagccagagaccatcaagcttcagatgatcatgtgacagggtttccagccagttccaggtgaagacaccacccctggccatcaagaagtcacccggtctc

SEQ ID NO: 805750 - DNA, 120 bp, Artificial Sequence
  ENSG00000280734_37 (sequence is synthesized)
cactagacagagtagggtgagagttccgtgatctccaaccggtagtgattatgccccaagtcagcataaagaagttacggaagaaaaaccatcagtccctctgtctcacataaagactta

SEQ ID NO: 805751 - DNA, 78 bp, Artificial Sequence
  ENSG00000280734_38 (sequence is synthesized)
tttcacactgacttcttagaactaaattgaaaggaaaaccctaattttccatgcctaagtaacaaaaggaccagaggc

SEQ ID NO: 805752 - DNA, 120 bp, Artificial Sequence
  ENSG00000280734_39 (sequence is synthesized)
acccccaccttttctgtgtggcatatgggaaattgaaagtacctctgattgattgttttctgcaaccaatcagatgtttgcattggagtgtaactttgtaatttcacttcagtctctgat

SEQ ID NO: 805753 - DNA, 120 bp, Artificial Sequence
  ENSG00000280734_40 (sequence is synthesized)
tggttgctgcagtctggaaattctgcaggccaagtcttcgtttgcatagaagtgcaactttgtaacttcatcttagcctctgattggttgctttctgcaaccaatcagatgtttgcatag

SEQ ID NO: 805754 - DNA, 120 bp, Artificial Sequence
  ENSG00000280734_41 (sequence is synthesized)
gcgtgtgacctttgtaacttcacttcagcttctgattggttgctttccacaaccaatcagactgattgtgggccaccacttcctttacgtgaggtgaacaccaagtggccaatggaaaac

SEQ ID NO: 805755 - DNA, 120 bp, Artificial Sequence
  ENSG00000280734_42 (sequence is synthesized)
ctcaagagggtatttggacctgagaagattctgtatctggggcccttgagctgctgctctgcccactctcacatggtggagtgtaatttcactttgaataaatctctgcttttgttgctt

SEQ ID NO: 805756 - DNA, 120 bp, Artificial Sequence
  ENSG00000280739_0 (sequence is synthesized)
tggccgatggagactatttagccgcgcccgcggcccctcccacgtgaccgtcccgcgccgagcatcctgggacttgtagttttctggaggcagcagagcccggaaagcctgaggccgggg

SEQ ID NO: 805757 - DNA, 120 bp, Artificial Sequence
  ENSG00000280739_1 (sequence is synthesized)
gcggccgagaccgcaattcccgtcacggagtgcgtcctctagcgcggggcggaagacccgcgaagtgttcaagcggccgcagagcggcccagagttcgcaggtctggggctctcttccca

SEQ ID NO: 805758 - DNA, 120 bp, Artificial Sequence
  ENSG00000280739_2 (sequence is synthesized)
gagagctcgtaggggaggacagtcaagggactcaagcgtctctcttgactccccttctctcgctgtgcagtggcggcgccgaggggtcgacgctcagggctaatctctatgagtcaccct

SEQ ID NO: 805759 - DNA, 120 bp, Artificial Sequence
  ENSG00000280739_3 (sequence is synthesized)
cgaggccccgggtaatattgggtggatcacaagaactaatctttcatgatttggaaaccggaaggaaagaagcacttttgtagctgacttacctcaatgacatgaccagtgtctgagcct

SEQ ID NO: 805760 - DNA, 120 bp, Artificial Sequence
  ENSG00000280739_4 (sequence is synthesized)
acaactgcgctatcttccctggatttttcttcaccttttccttactcatgagccagaactgcatgtccaaggagctatacatttgctagaaggggatgaccaattcagctctgagtttcc

SEQ ID NO: 805761 - DNA, 120 bp, Artificial Sequence
  ENSG00000280739_5 (sequence is synthesized)
tgggagccaaagccaagagctccatgtccacaagatcgaagaccaagtactcagaagaacagcttttcctgatactaggagttaagagaagctttctccaggaactctcatagagacaac

SEQ ID NO: 805762 - DNA, 120 bp, Artificial Sequence
  ENSG00000280739_6 (sequence is synthesized)
ttgcatgatgcagtggacagcacccttagcatgctccacaagggtcattctgcagtctctttcagcactggataacggcactctgtctcaaaagtagactctaagacccatgtgggcaga

SEQ ID NO: 805763 - DNA, 120 bp, Artificial Sequence
  ENSG00000280739_7 (sequence is synthesized)
gaggagagttctcacctggagttcagcatggtggacttgggctgcagccgtggccacctggtcctccagatccgccagatgggtctcatcagtgccactgtggatgcagcgggcggcatc

SEQ ID NO: 805764 - DNA, 120 bp, Artificial Sequence
  ENSG00000280739_8 (sequence is synthesized)
ttctagctcagtcagctgggtctccagtccatacacagtgcctgctgccagacaaagcaagatgaaaaagctccaagccctcagcaaggccagaatgttcatgttttactctgtgttcac

SEQ ID NO: 805765 - DNA, 120 bp, Artificial Sequence
  ENSG00000280739_9 (sequence is synthesized)
taaaagcctactttcctggcaccaggaggcagaagagatttagtggtttagcactgataccagctgaacaggaatttacagccaaagtgatggtgcctaaaggactggaggaggataatg

SEQ ID NO: 805766 - DNA, 120 bp, Artificial Sequence
  ENSG00000280739_10 (sequence is synthesized)
atgatgatggtggggatgatgatgatgatgatgatgacagcattaatttattgagccagtggctaagccaagggttttatgtgacttatatatgctcatagcaacccttgaggtagagac

SEQ ID NO: 805767 - DNA, 120 bp, Artificial Sequence
  ENSG00000280739_11 (sequence is synthesized)
tattataatcactgtgttcaagatgagaatttttttgctctaggaaggtttagtgactttctgaggtctcacagctggggactggtggagcctagaagtgatctcaggagggctgaagct

SEQ ID NO: 805768 - DNA, 120 bp, Artificial Sequence
  ENSG00000280739_12 (sequence is synthesized)
agttcccttgcctttatcctccttgccctatgatgctgtgataatctcagttggaatgttataacattttgcatttcagattttaacataaaggtactagagttactatggttatagatg

SEQ ID NO: 805769 - DNA, 120 bp, Artificial Sequence
  ENSG00000280739_13 (sequence is synthesized)
gatatgatattggctctgtggctggcttgaaataacaaaaggtaacatgctatatgatgaaaatgttattctagctttataaaacataacccatttgaaaaatattcacttggacttgct

SEQ ID NO: 805770 - DNA, 120 bp, Artificial Sequence
  ENSG00000280739_14 (sequence is synthesized)
tggcaagttaaggtccacttttggtgagaactgtggttaccatgtctgagtaatctatgaccccttcaaactctagtcattgatgcctgtgattgcattcactggctcttggttcaacaa

SEQ ID NO: 805771 - DNA, 120 bp, Artificial Sequence
  ENSG00000280739_15 (sequence is synthesized)
ggctttctcagagtggttcaaggcataagaataggtgtttccttaatgaaacacctatttgtgattaaattctctagaataaagagtgttaaacagatttctttactgcaggtcttcaca

SEQ ID NO: 805772 - DNA, 120 bp, Artificial Sequence
  ENSG00000280739_16 (sequence is synthesized)
atgtggcttccatgaattatactttaggggactaatgtatttctttccttgctctctgagggcacagaaccacctgagtaaccatggttgtctccacaagttctagtgctacatcctctt

SEQ ID NO: 805773 - DNA, 120 bp, Artificial Sequence
  ENSG00000280739_17 (sequence is synthesized)
tagtgctgtaagggttgtaggagaactttaagaaagaggaccaacatcctctgcatggatctggattcagtggcagagctgggctccctgtagtgcaggtctactgtgtctgctgccact

SEQ ID NO: 805774 - DNA, 120 bp, Artificial Sequence
  ENSG00000280739_18 (sequence is synthesized)
ggttgtatactccatgggcaatgtggggtggagctaaaagggaagttgggtttgctctccattccctctgaggctggggattatgggttacttacaaccctgcatacatcctcaaggtgg

SEQ ID NO: 805775 - DNA, 120 bp, Artificial Sequence
  ENSG00000280739_19 (sequence is synthesized)
cagtcctactattcacaccacaggtctgagaatgctatgctagtccttctctgttgaccttctagggccattttctatccttctttgtcctgccctgttccctgggaggccgaccaattt

SEQ ID NO: 805776 - DNA, 120 bp, Artificial Sequence
  ENSG00000280739_20 (sequence is synthesized)
ggacttcatcaccagggcttcctggctgtctgggatgggtttgaccagtggagataccactgtctagggctggtaacagcttccttttattgctactgttccaccctcagcatcccttaa

SEQ ID NO: 805777 - DNA, 120 bp, Artificial Sequence
  ENSG00000280739_21 (sequence is synthesized)
ccttgcccacacctgagttaacagcccctttcatgaaactctcctcttccagccagaccccaataggtacagtggagctcttcacagcaagaatttaaaatacctacagaccaaggcatt

SEQ ID NO: 805778 - DNA, 120 bp, Artificial Sequence
  ENSG00000280739_22 (sequence is synthesized)
cagcccaaggaactgagcccccattgcgtgctgctgtggagggtgggattagtcctaggttgtttctgcctttaggggagacaagagctgatttcacagcactaatgccagatagcaggt

SEQ ID NO: 805779 - DNA, 90 bp, Artificial Sequence
  ENSG00000280739_23 (sequence is synthesized)
acaagagctgatttcacagcactaatgccagatagcaggtgaggagtgtcaaagctgagagacaagataattctcaaatacccatgccct

SEQ ID NO: 805780 - DNA, 120 bp, Artificial Sequence
  ENSG00000280739_24 (sequence is synthesized)
tataaagctgcctttatgtccatcgcatcctaagggctgctgttgctcttctgcctctacactgatggactacgtcagaacatcaatatgctgtattgatgataatggatgatattttct

SEQ ID NO: 805781 - DNA, 120 bp, Artificial Sequence
  ENSG00000280739_25 (sequence is synthesized)
tagttgtgccaatattactcttgagggaagaaatgatgccaagcacttaaaaaatattgtgccacttccttctggcctccatggtttgagatggagaactctgctgtcaccctcattgat

SEQ ID NO: 805782 - DNA, 120 bp, Artificial Sequence
  ENSG00000280739_26 (sequence is synthesized)
ctttcccttcacaccaatgccaattccagactaacatcctgaagctccagttttgaggggtgcaagctgcaagactgatatcaacatccaccaaataccactgatgagtggcaagtatta

SEQ ID NO: 805783 - DNA, 120 bp, Artificial Sequence
  ENSG00000280739_27 (sequence is synthesized)
aaaaaacacagaaaatcccacagcatgttgtgggttgaattatgcttcttccctccccagaagagggctttcagaactaaggctgcacacctatgaccatctgatcttcaacaaagctga

SEQ ID NO: 805784 - DNA, 79 bp, Artificial Sequence
  ENSG00000280739_28 (sequence is synthesized)
gctgaaccccttccttgcgctatatatgaaaatcagctcaagatagattaaagagttaaatgtgaaatccaaaactata

SEQ ID NO: 805785 - DNA, 68 bp, Artificial Sequence
  ENSG00000280739_29 (sequence is synthesized)
caggaacaggcaaacatttcatgacaaatacaccaaaagaaattgcaacaaaagcaaaaattgacaaa

SEQ ID NO: 805786 - DNA, 120 bp, Artificial Sequence
  ENSG00000280739_30 (sequence is synthesized)
aaactatcagagtaaagagtcaatctacagaatgggagaaaatttttacaaactacgcatcagaaaaaagtctaatatccagcatctataaggaattaaacaaatttacaagagaaaaat

SEQ ID NO: 805787 - DNA, 81 bp, Artificial Sequence
  ENSG00000280739_31 (sequence is synthesized)
agcatctataaggaattaaacaaatttacaagagaaaaataaatatccccattacaaagtgggcaaagttcaacaagcatc

SEQ ID NO: 805788 - DNA, 120 bp, Artificial Sequence
  ENSG00000280739_32 (sequence is synthesized)
acaatgagataccatctgacaccagtcagaatggctattataaaaagttaaacaaacaaacaaaaaacaacccaacagatgcttgtgaggttgcagagaaatgggaacacttatacactg

SEQ ID NO: 805789 - DNA, 76 bp, Artificial Sequence
  ENSG00000280739_33 (sequence is synthesized)
ggttgcagagaaatcatcgtggaaagcagtatggcaattcctcaaagaactaaaaacagaactaccattcaaccca

SEQ ID NO: 805790 - DNA, 74 bp, Artificial Sequence
  ENSG00000280739_34 (sequence is synthesized)
tcccattactgggtacatacccaaaggagtataaatcattctaccataaagacacatcaatcaacttaaatgcc

SEQ ID NO: 805791 - DNA, 120 bp, Artificial Sequence
  ENSG00000280739_35 (sequence is synthesized)
aaatgtggcacatatacaccatggaatatgatgcagccgtaaaaaagaacaagaccatgtcttttatgggaacatgagtggagatggaggctattagccttagcaaactaacaaaggaac

SEQ ID NO: 805792 - DNA, 120 bp, Artificial Sequence
  ENSG00000280739_36 (sequence is synthesized)
aaataccacatgttctcacttataggtggaagctaaatgatgagaactcatgaacacgaggaagggaaaaacagacactggggtctactggagggtggagggtaggagaagggagaggag

SEQ ID NO: 805793 - DNA, 120 bp, Artificial Sequence
  ENSG00000280739_37 (sequence is synthesized)
aagggagaggagcagaaagataactattgggtactgggcttaataactgggtaatgaaataatctgtacaacaaacccctgtgacagaagtttacctgtataacaaaccttcacatgtac

SEQ ID NO: 805794 - DNA, 120 bp, Artificial Sequence
  ENSG00000280739_38 (sequence is synthesized)
tggatttttcttcaccttttccttactcatgagccagacttgcagcttatgagccaacagaattgaagatgaatgccaaacctccaagtgagatggggcagaaagactgaaggagcttgg

SEQ ID NO: 805795 - DNA, 120 bp, Artificial Sequence
  ENSG00000280739_39 (sequence is synthesized)
actcagagagtactggattgggtgaaccactgggagtcatcacctgcctctgaatatcatgttatgtgaaaaaaagatcccctatctgttgaagccactgttggccaggttttctgttat

SEQ ID NO: 805796 - DNA, 120 bp, Artificial Sequence
  ENSG00000280739_40 (sequence is synthesized)
atcggggtgcaggaacaaaacaagtccccttgctccggctttcaactcattggcccccgctcagcaactacctgcattgaaattccaaccccagttgcaggagcggtgttagtctcaacc

SEQ ID NO: 805797 - DNA, 120 bp, Artificial Sequence
  ENSG00000280739_41 (sequence is synthesized)
aatactggagatgggagcctctctttccaggattggacggacctccgattccctagcacggtggatctcagactaaagcgtgtgtctctggagggcttgagaaaacactgatagacccca

SEQ ID NO: 805798 - DNA, 120 bp, Artificial Sequence
  ENSG00000280739_42 (sequence is synthesized)
gcctgcccggatgcgaaaggagctgtaacactgaatccctctcaccctatgccagtgctggatggctgtcccatgtgatgggaagtggtggtggggccaggccagcccaggagccatcat

SEQ ID NO: 805799 - DNA, 120 bp, Artificial Sequence
  ENSG00000280739_43 (sequence is synthesized)
gggccagagtggggcagcaggaccaaacaagctataacacaaataagctgaaacatgttcctggctggcctgccaagctgccagcagtgacatgttcccattcgccagactacaagacaa

SEQ ID NO: 805800 - DNA, 120 bp, Artificial Sequence
  ENSG00000280739_44 (sequence is synthesized)
gagagctgtgacccttctggggacccagacctcgggactccctgagtcagagctgtgacatgctgtaacacccccttggggctctgtggttgctggtgtctctgagtttttgggcaccac

SEQ ID NO: 805801 - DNA, 120 bp, Artificial Sequence
  ENSG00000280739_45 (sequence is synthesized)
tgcattccccctgtccagatgctgctgcctggcccagctacagcccctcacaaaactcacgcctgtgctggtgcctggagctgcccaccccactgcagcagctggcacacctggctgtgc

SEQ ID NO: 805802 - DNA, 120 bp, Artificial Sequence
  ENSG00000280739_46 (sequence is synthesized)
atcatggctggaccctacacttgctcactcacacaccccttgccattctgtgcctggcttgtccacagtgggcatgggatctgggccagtagcgcaagctcagtacagcctgccaggccg

SEQ ID NO: 805803 - DNA, 120 bp, Artificial Sequence
  ENSG00000280739_47 (sequence is synthesized)
agtgggtggagccagctcagcagtcaaaagtgaaactcaggcagaggcaccactggccacagaggttaccgaaagaatcgtgtgtcactactgttagcggtgcctaatttatacaggtct

SEQ ID NO: 805804 - DNA, 120 bp, Artificial Sequence
  ENSG00000280739_48 (sequence is synthesized)
gcagcaacttcagttcttgccttctaagaagagagaattcaactgaggtgggtcataaggcagagtcagagactgaggcaagttttaagcaggaatgaaagtttattaaaaagttttaag

SEQ ID NO: 805805 - DNA, 120 bp, Artificial Sequence
  ENSG00000280739_49 (sequence is synthesized)
tgatgtgagagagtcaagtgcccagtttgacctttgacttacagttttgtatgttccagcatcttctgtcccttctcacctgattcttcctttgaagtgggctgtctgcatgcacagtgg

SEQ ID NO: 805806 - DNA, 120 bp, Artificial Sequence
  ENSG00000280739_50 (sequence is synthesized)
cctgctagcacatgggagggaccacaggcacagtgagtttactggagttgtatgcatgctcaggtgaggcattcttcccttaccagttgagtgttcctagaggaaggtcatataccagtt

SEQ ID NO: 805807 - DNA, 120 bp, Artificial Sequence
  ENSG00000280739_51 (sequence is synthesized)
aaactctgccattttggctcttaacgcacatgcttgagaccactcacccaattcctgagatcttatcggaaagctgctgatcaccagtttcagttttttccatctattgggagactgcct

SEQ ID NO: 805808 - DNA, 120 bp, Artificial Sequence
  ENSG00000280739_52 (sequence is synthesized)
ttctctggtgccggctgcgacccattagtattttggagagacagttaactacctgactatcacctgatggttgcctaatgttagtaggggggcatctctcctaccctgctcatgtctgcc

SEQ ID NO: 805809 - DNA, 120 bp, Artificial Sequence
  ENSG00000280739_53 (sequence is synthesized)
tgactacctaatgtaacactactttaaattattattctggttgatttcttagccccaaagatgaatcatccctcctcctttcttatttcccaaaacattactaacacagggttattttgt

SEQ ID NO: 805810 - DNA, 120 bp, Artificial Sequence
  ENSG00000280739_54 (sequence is synthesized)
gtagtactttttaaaaaattagagataacctaagaggccacagcactgcacaaaatggggatcaccttaaagttcagtgttaggcagcattgcccctggctatttccatcataagtaaac

SEQ ID NO: 805811 - DNA, 120 bp, Artificial Sequence
  ENSG00000280739_55 (sequence is synthesized)
agccttctttctccagagccccctcctgctggcttgttgctggcccctcctcttcttcttgtttattgtacaacaaaaccgcacaggcaaagcttaaaatttgctggtactttaacttgc

SEQ ID NO: 805812 - DNA, 120 bp, Artificial Sequence
  ENSG00000280739_56 (sequence is synthesized)
agagaaatttaactgcttccctcaacctcctgcccatatcagaatagaggcctttgtatgctagagtttccaataccaaataatggcaacaataataaatagtgacaacattttacatta

SEQ ID NO: 805813 - DNA, 120 bp, Artificial Sequence
  ENSG00000280739_57 (sequence is synthesized)
tatattactttaagttatagcaaagcaaattttgagtagggctctctccccaccagcaagattcttgggatcttatcgtttgtggggaggaatctggaaactgtattataatagacaccc

SEQ ID NO: 805814 - DNA, 120 bp, Artificial Sequence
  ENSG00000280739_58 (sequence is synthesized)
agacacccttttatctgatattattgaattgttagtagggtaactattaacaattaattgaaaagtcagttaatacaaagattcataaaatgatatgttttatattttattaaaatgtgt

SEQ ID NO: 805815 - DNA, 120 bp, Artificial Sequence
  ENSG00000280739_59 (sequence is synthesized)
tgggagtcaaaccaagacgcccacatgatgcaaagtggactccgagcatggctgtggagcactcactctgagaagaaaggaaaagtcctctgggccttctaatctgtcactgaggctgct

SEQ ID NO: 805816 - DNA, 120 bp, Artificial Sequence
  ENSG00000280739_60 (sequence is synthesized)
ctctggaccatctttcaagacttgacttatacatcactcctcaattgcatatgcttggccttccttccttgagacgctggctattctgttctctgagctttgccaaaaagctttcatttc

SEQ ID NO: 805817 - DNA, 120 bp, Artificial Sequence
  ENSG00000280739_61 (sequence is synthesized)
ttaacactcaaactatattatagtttattttcttggttgtctaccctacccctcaatcctgatcatgggctccttgagggcagagccacgtcttcttcactgctatgccccaagcccctg

SEQ ID NO: 805818 - DNA, 120 bp, Artificial Sequence
  ENSG00000280739_62 (sequence is synthesized)
gccaactttgcgtctcatcctgggcacatgaatactacttgttaatgaatacaggcaccaaaggctataggggcgacggggctcattgagcagctctcaatgagccctgctgtctacagc

SEQ ID NO: 805819 - DNA, 120 bp, Artificial Sequence
  ENSG00000280739_63 (sequence is synthesized)
ttctcctggggccctgggaggaatccaaaggaggcgacccttgataatgccactcagggctggctctagggttgaccatgttataaatgtggtcccctacatggtgaggtggcatttgac

SEQ ID NO: 805820 - DNA, 120 bp, Artificial Sequence
  ENSG00000280739_64 (sequence is synthesized)
ccattgccagctctccttctcctgcttttttacaaccctaggttgcctcatgcctctttggaagctagaagttgaccaaattttccctcagcaaacttttacttcttagcaaaaacacag

SEQ ID NO: 805821 - DNA, 120 bp, Artificial Sequence
  ENSG00000280739_65 (sequence is synthesized)
ggggatcctgctccctcttcctctttctccaaattcctgctcttccattattgtgcagacaactaactctcactgagtgatcccagagcagtgacaattccccgatctttatttccccaa

SEQ ID NO: 805822 - DNA, 120 bp, Artificial Sequence
  ENSG00000280739_66 (sequence is synthesized)
cactgaacacacgcagcatatacagcagatgcctaatcaaggtttataaagtgaaaatgcatttgggggaaacccattaactgctataagcagcgtcaagactgaaagcggagttactgt

SEQ ID NO: 805823 - DNA, 120 bp, Artificial Sequence
  ENSG00000280739_67 (sequence is synthesized)
ggtttacccaaaccgcagtgcccctaagactgaccccaactgtgcacgaacaggctcctgaatcaacccttctcctgaggcataaacacaactgccaaatatagcccagtgggcattcac

SEQ ID NO: 805824 - DNA, 120 bp, Artificial Sequence
  ENSG00000280739_68 (sequence is synthesized)
tttctaagatgacctccaccttcggaacgcttctatttgatgtttctgcccaactgagattgagcaatgcctgtaggaataatttgcttcctgctaaacatttcagacatccctcaagac

SEQ ID NO: 805825 - DNA, 120 bp, Artificial Sequence
  ENSG00000280739_69 (sequence is synthesized)
ctctgaggctggcatggacagtttagcatgtcaagggctaaaaattcctcagaaaaccagaagttttccacccaagtcctttttaaaaaattttaaatctttatcctgagagatgcatag

SEQ ID NO: 805826 - DNA, 120 bp, Artificial Sequence
  ENSG00000280739_70 (sequence is synthesized)
agttttgagcagaatgtgaaatctttttttgggtgtgtgatgctgtggaactaagttttatgtttatatacaattgaaaaattacctatgggtgcctaattttacagaaaattatgtaca

SEQ ID NO: 805827 - DNA, 120 bp, Artificial Sequence
  ENSG00000280739_71 (sequence is synthesized)
aaatcatgttttgaaaacaaaattcctttgcaaatttattatgaatgctcataatccagttggaaactattttgtgaaatagagcatcttgtagttgtttttataatatcctacacattt

SEQ ID NO: 805828 - DNA, 120 bp, Artificial Sequence
  ENSG00000280739_72 (sequence is synthesized)
ttttgtttgttttttgtttgtttgtttttatggtagagagacacttataatgcagtagttgaaaacctgcaaattggagtcatgctgtttggatttgaggaccagctctgcctacattgg

SEQ ID NO: 805829 - DNA, 120 bp, Artificial Sequence
  ENSG00000280739_73 (sequence is synthesized)
accagctctgcctacattggctgtggggtcttgaacaagtcacttaacttccctgtccatcaatgttcttatctgcaaaacaaaataatgacagtgtctggtaatgctgttggaggaaaa

SEQ ID NO: 805830 - DNA, 120 bp, Artificial Sequence
  ENSG00000280739_74 (sequence is synthesized)
cctgcaagaaatcctctgtgaaactagactttgggtgagaacagacaacagggagttggaggcttcattctctggcaccagttagcctggtggggagaatttccgcatgcctggcggtgc

SEQ ID NO: 805831 - DNA, 120 bp, Artificial Sequence
  ENSG00000280739_75 (sequence is synthesized)
agttgagataatccacaaagctgaaggcagggtcaacaacctcccatgccatgcaagttaaggacacctaggcaagtgcgtgtatgcctgagggcaggaccaacacatttcccaggaaac

SEQ ID NO: 805832 - DNA, 120 bp, Artificial Sequence
  ENSG00000280739_76 (sequence is synthesized)
tctatctcaaaagaagaaaaagagtgtgggctatgaggtcacgaaatttggattaaaatcccggttttatcactttctaggtatttgaccttgggtaagtttcctcagatataaaaggag

SEQ ID NO: 805833 - DNA, 120 bp, Artificial Sequence
  ENSG00000280739_77 (sequence is synthesized)
gatagtagcagtagctcacttatggggttgctgaaaaaaataaatacaataatgtggtaaaccattaaggacaaatacctagtacaaaataacgctcacagaacattgggaattattgat

SEQ ID NO: 805834 - DNA, 120 bp, Artificial Sequence
  ENSG00000280739_78 (sequence is synthesized)
aacattattgtaatatttaaaaataaatgaaaaattaataggcacacatttaaacacatggaaaatggacatttggaactctagagttttctgccataaaacatggctacaataatttaa

SEQ ID NO: 805835 - DNA, 120 bp, Artificial Sequence
  ENSG00000280739_79 (sequence is synthesized)
gtctagaaaaatgtggaagggggaataactatccaataaagggggaataattatccaataaaatcctcccaaacacccataaatattacttcctgcaaaatcattcaagaagtatttgct

SEQ ID NO: 805836 - DNA, 120 bp, Artificial Sequence
  ENSG00000280739_80 (sequence is synthesized)
acacaatgtaacagaaaacaagtgatttgattctacttaatatatctttgacaataaattgattaagtcttgggtgaaatttatggaaaataatttttttttaggagaattgctgttcag

SEQ ID NO: 805837 - DNA, 120 bp, Artificial Sequence
  ENSG00000280739_81 (sequence is synthesized)
ccattcttactgataatagtcaacagggccatctatctgataagctcatttctagttcacagcattgacccatccacagagtggagaattgtgccctttcattctctagagtggttaatg

SEQ ID NO: 805838 - DNA, 120 bp, Artificial Sequence
  ENSG00000280739_82 (sequence is synthesized)
tttgcttttctatgttgtgtaccaggtctggtatctagggagtccaaaaggcagagactcttctctgataattcagtattcttcttccctttgccccttaccacctatactatgctttac

SEQ ID NO: 805839 - DNA, 120 bp, Artificial Sequence
  ENSG00000280739_83 (sequence is synthesized)
tattactgaagatggaaattaagatgaagagaaggggaaaaaggaagaaggaagaataaggaagaaagcaatcttagccacattgggccctccaggactgtgcttcttcccttctggcct

SEQ ID NO: 805840 - DNA, 120 bp, Artificial Sequence
  ENSG00000280739_84 (sequence is synthesized)
ccaacactgacaaatctacctttgtctaaccagctccccaatccttcaagaggaactataatgccacatctgtcatccctactgtctgaatgaagacccactcacagcattagactttca

SEQ ID NO: 805841 - DNA, 120 bp, Artificial Sequence
  ENSG00000280739_85 (sequence is synthesized)
gcattccctgactggaatcacacaataatctgtttgttccttctctaggccatgagccccacagacatagaattatgcctgttttgttcatatctgactccctaattctggaatacagtg

SEQ ID NO: 805842 - DNA, 120 bp, Artificial Sequence
  ENSG00000280739_86 (sequence is synthesized)
cacagcagccactcattaaataggtgttgaatgaatgactaaattcctgtgagctccctcatgagctagcaagagattttgttttctaatcttggctaaactcaaatgtccgttaaatgt

SEQ ID NO: 805843 - DNA, 120 bp, Artificial Sequence
  ENSG00000280739_87 (sequence is synthesized)
aagataatgctcagcttctttaaatttggctccccactcgaatgatccaatattattctggcctattttacgggtagaagccttgattttcacctgattttatcttattaagtgtcttat

SEQ ID NO: 805844 - DNA, 120 bp, Artificial Sequence
  ENSG00000280739_88 (sequence is synthesized)
tacagaaggagttatgggaccatttcccgaaatttatctgcaaaagaaatgcagttgccttcatgagcatcgagatgaaaaatgtatccattacacatgccatttccttcatgattagga

SEQ ID NO: 805845 - DNA, 120 bp, Artificial Sequence
  ENSG00000280739_89 (sequence is synthesized)
taactaggccctaatgagaattataaagttcctgagttctatgcctaatgatcacaggaaaagcacacagaacactaaatgctagagagatgatttgttgatttctggcccagaaaataa

SEQ ID NO: 805846 - DNA, 120 bp, Artificial Sequence
  ENSG00000280739_90 (sequence is synthesized)
ataatcttggagttcattattttgggtaattaaatataaattaagccattaatgaaaaactttacatgaaaaagacaggtgtatgaaattttgaatgtgatcaattgaatgtagacttct

SEQ ID NO: 805847 - DNA, 120 bp, Artificial Sequence
  ENSG00000280739_91 (sequence is synthesized)
cagactggcagggagcactgatttcagccaccagctcccgcaatggtgaggttcataaatgccaggctgattccatatcttggctcttgtgagtaatgctgtgatgaacatgagagtgca

SEQ ID NO: 805848 - DNA, 120 bp, Artificial Sequence
  ENSG00000280739_92 (sequence is synthesized)
tttatctctttgatacactgatttcaaattccttggacatagatccagaagtggaattgctgatcacatggtagttctatttttagtttttttgagaaacctccatataattttacataa

SEQ ID NO: 805849 - DNA, 120 bp, Artificial Sequence
  ENSG00000280739_93 (sequence is synthesized)
tggctatactaaattacattctcaacaacagtgtacaagggttctctttcctccacatccttgacaacacttgttatcttttgtctttttgataatggccatttagtagataaagaaaat

SEQ ID NO: 805850 - DNA, 120 bp, Artificial Sequence
  ENSG00000280739_94 (sequence is synthesized)
gtggtatatacacataatgaatgctattcagccttaaaaaagaagggaattttgtcatttgcaacaacatggatgaccctggaggacatcatgctaagtgaaagaagtcagcacagaaag

SEQ ID NO: 805851 - DNA, 120 bp, Artificial Sequence
  ENSG00000280739_95 (sequence is synthesized)
acaaatagtacatgatcttgctcatacgtggaatataaaacagtagaactcataatagcagagagtagaatggtggttagcagaggctgggatgggggcatggggagatgttggtcaaag

SEQ ID NO: 805852 - DNA, 120 bp, Artificial Sequence
  ENSG00000280739_96 (sequence is synthesized)
ggtacatagtttcagttagacagagggaatacatttttgagatctactacacaacatgttgactatagctaataatatacgttgtatttcaaaattgctaagagaataaattccaaatgt

SEQ ID NO: 805853 - DNA, 120 bp, Artificial Sequence
  ENSG00000280739_97 (sequence is synthesized)
tctcaccacaaaaagtggtatgtgaggtaatgaatatattaattagtttcatttaattattttacattgtatacatatgtcataacatcacattgttaggttgtcattaaaagtaatggc

SEQ ID NO: 805854 - DNA, 120 bp, Artificial Sequence
  ENSG00000280739_98 (sequence is synthesized)
aaaaaccacataggataggctatatagcagattaaacacaacttgacagaattagtaaaacgaaggacagatgtaaacaaattatccaaaatgcagtgcagagagccaaagtgaaaaaga

SEQ ID NO: 805855 - DNA, 120 bp, Artificial Sequence
  ENSG00000280739_99 (sequence is synthesized)
aatatatagcaattctgaacttgtatgtacctaataacttgacctcaaaatgcataaagcataaacagacaattgcaaaaggaaagagacaaattattgttagggtagattttgaaatgc

SEQ ID NO: 805856 - DNA, 120 bp, Artificial Sequence
  ENSG00000280739_100 (sequence is synthesized)
ctttttcagtaattgatataacaagcagtcaaaaattgaggaagaatatagaagatttgagcagcacaatatcaagcttgatctaaagatcatacataagacactgtactcaaaaattca

SEQ ID NO: 805857 - DNA, 120 bp, Artificial Sequence
  ENSG00000280739_101 (sequence is synthesized)
tgaatatatattctcctcaggcacctgtgaaatacttaggaaagttgaccataacatgggcaggtaagtctaaatacatttcagagaagtggtatcatacaggccacagtctctgaggac

SEQ ID NO: 805858 - DNA, 120 bp, Artificial Sequence
  ENSG00000280739_102 (sequence is synthesized)
ccagcttaatcctgggcctggcatcgagtgggggccaggtgtgtatgaacagaagataccagaaaatcagcttgtcagctcattttgtgtgcctcagaaggcccaacagagaattcagga

SEQ ID NO: 805859 - DNA, 120 bp, Artificial Sequence
  ENSG00000280739_103 (sequence is synthesized)
caggacactgagaagctggataagcactctcttagtgctctgtgttggatttgtgtatggcttggatcacactccctaccctaaccttgattccagagagttgggccagctcagggtggg

SEQ ID NO: 805860 - DNA, 120 bp, Artificial Sequence
  ENSG00000280739_104 (sequence is synthesized)
gtgtaggaggatacactgtatacactctgacagtatatgtgtctcctcaacattcagaggccacatggcagggcagatgtccattaactatcttgggcttatcacatctctttaataaac

SEQ ID NO: 805861 - DNA, 120 bp, Artificial Sequence
  ENSG00000280739_105 (sequence is synthesized)
aacagtggggacagatagtgccctacaggcatattacagggaagacttgatgaaatttagcattgtttattgtctgtcttacaaacaatgcacttagatttttaccatgaaactagcagt

SEQ ID NO: 805862 - DNA, 120 bp, Artificial Sequence
  ENSG00000280739_106 (sequence is synthesized)
agagtccctgaagctcaagtttaaaaagcctcaagtcaaacgatatatatatatatatttgtaattttgttatgtgttggagagttgacatcagctggcatatatgactgtccataccag

SEQ ID NO: 805863 - DNA, 63 bp, Artificial Sequence
  ENSG00000280739_107 (sequence is synthesized)
agagttgacatcagctggcatatatgactgtccataccagctgttatattattaaaataattt

SEQ ID NO: 805864 - DNA, 87 bp, Artificial Sequence
  ENSG00000280739_108 (sequence is synthesized)
taataaaataataataattttatactgattgggaaatagctattgttcaacctccccaacaccaggctcctccctttgggccttcta

SEQ ID NO: 805865 - DNA, 120 bp, Artificial Sequence
  ENSG00000280739_109 (sequence is synthesized)
tagacccctacatgaaccagcaagtaagaggtgaatgcttgacagcagggatcttcctggatttagtcactacccatttgcaaagttaggcatttgagcctatggtgttgttgacaaaaa

SEQ ID NO: 805866 - DNA, 120 bp, Artificial Sequence
  ENSG00000280739_110 (sequence is synthesized)
ctctataaaatatttgaagagatttaaactgagccaaatataagtggccatggcccatgactcagctttcaggagatcctgagaacatgtgcccaaagtggtcaggggtgcagcctggtt

SEQ ID NO: 805867 - DNA, 120 bp, Artificial Sequence
  ENSG00000280739_111 (sequence is synthesized)
gcctggttttatacatcttagggacatgtgagacatcaatgaaatacatttaaggtatatgttggattgctgtagacttagagaaggaattatagatgcttttatgcattttgtttagct

SEQ ID NO: 805868 - DNA, 120 bp, Artificial Sequence
  ENSG00000280739_112 (sequence is synthesized)
cagagtttcttgagagttaagaggggaagaaaagaaataaatggattttagaatgtaagactgactttggaagagaatctatagttggataataaaactaggtgttgaaagggaagtatt

SEQ ID NO: 805869 - DNA, 120 bp, Artificial Sequence
  ENSG00000280739_113 (sequence is synthesized)
gatcagaggaggatccagaaaggcagggcaactcgaagtggaggtggggtgtggaatggggtggggcttttaagttataggtagattaaaaattttttgggttggcaactggttgaaaaa

SEQ ID NO: 805870 - DNA, 120 bp, Artificial Sequence
  ENSG00000280739_114 (sequence is synthesized)
gttattgtcaatagaaaggaatatctgggttaagataagaggttgtggagactaaagttttatcatgcagatgaagcttccaggtagcaggcttcagagagaataaattgtaactgttta

SEQ ID NO: 805871 - DNA, 120 bp, Artificial Sequence
  ENSG00000280739_115 (sequence is synthesized)
tcagacttaaggtcctgttaatgttaaatgctggttggcttttcctgaattcaaaagggaggaggacataatgaggcatgtctgatcccctctccagcccctgaatcatggcctgaacca

SEQ ID NO: 805872 - DNA, 120 bp, Artificial Sequence
  ENSG00000280739_116 (sequence is synthesized)
gtctttcagattaaatttagaggaccctggcctagaggaggaagtctattcacatagttgtggggcattcacattttattcctggattatagtgtcattatcccagcagtaagttactgc

SEQ ID NO: 805873 - DNA, 120 bp, Artificial Sequence
  ENSG00000280739_117 (sequence is synthesized)
cgtccaatatttatccgtagtttgattgaaacagtatacaggggatatcgctccaggcagtttatagttcacccctggatcaaatcagatccacagagaaactgagaatgtgtattgcat

SEQ ID NO: 805874 - DNA, 120 bp, Artificial Sequence
  ENSG00000280739_118 (sequence is synthesized)
ttcaattagcctctgctaccccttgtcaccctgagaactggtcttgctgaattgtcatgcaatcagcatgacaatgtgatgtcatcagtctgtgctgtcaacagcctgggctgagagaca

SEQ ID NO: 805875 - DNA, 120 bp, Artificial Sequence
  ENSG00000280739_119 (sequence is synthesized)
gggagggaaacagcacaaatgacactcattgtcatctgtcttttaggaatgttgtcaaggatgtgttttttttatatcatggtttctatttatgaggatactcagagaactgcctaactg

SEQ ID NO: 805876 - DNA, 120 bp, Artificial Sequence
  ENSG00000280739_120 (sequence is synthesized)
cttttcgatgtaagaacaattgtattactcctgagaaactgttctctttttaactttacaaatctctttgtaagtgtctagttttcccttctccttgtttttgtaggtagacttacatct

SEQ ID NO: 805877 - DNA, 120 bp, Artificial Sequence
  ENSG00000280739_121 (sequence is synthesized)
tttccttactcatgagccaggtatcccggaagcctgaagggaaaggttcaagtccaggcttccattaaaaccccactaatagacttgttctgccatcaatcagccacagacctgtactgc

SEQ ID NO: 805878 - DNA, 120 bp, Artificial Sequence
  ENSG00000280739_122 (sequence is synthesized)
aagatgcctactacacacccagtgctgagctgtggaaaatccagaacacacgtgaccacagacaatcatgaaggcgctgataatagcagcttctcaaagggaaaattgtgtccgggaccc

SEQ ID NO: 805879 - DNA, 120 bp, Artificial Sequence
  ENSG00000280739_123 (sequence is synthesized)
gctgggtacataacagatttctctttattctcagattcaggcttctttgcttggggcagctccccaggagtataagtatgaatgggggggaagatagagcatatacttcttccttcctga

SEQ ID NO: 805880 - DNA, 120 bp, Artificial Sequence
  ENSG00000280739_124 (sequence is synthesized)
tattgttgacaaaagtatgctgtttacatattgaaaatcatgggatggtgtgaactcacagggagaggacaggagggagcctccttgatcaaatgtctaagataaaaatgaaggttgcag

SEQ ID NO: 805881 - DNA, 120 bp, Artificial Sequence
  ENSG00000280739_125 (sequence is synthesized)
taacaaagagccagctgataaccttgttcctcctgtaaggtgcctgcacccctgccaggcatatgatctgggtggttacactgttaagccaggagaggtgctcacccaagggtatgtgtc

SEQ ID NO: 805882 - DNA, 120 bp, Artificial Sequence
  ENSG00000280739_126 (sequence is synthesized)
gttctctcccaactccttccctaaaaggtagattcaagccgggggaaggtggacatatcttgtgaagtgttgaatatggaaattcaaaacatatgttacattcagggaggggcttccatt

SEQ ID NO: 805883 - DNA, 120 bp, Artificial Sequence
  ENSG00000280739_127 (sequence is synthesized)
aggccctatttttatataaaaatctagaaataaataatattcttctatttgcttcaaaaaaacaaagaaatgcttaagttctctttacattgatgtcaaagcatagccatgagttatgct

SEQ ID NO: 805884 - DNA, 120 bp, Artificial Sequence
  ENSG00000280739_128 (sequence is synthesized)
gtgcaggaggcaggtgtttggcaagacagatttttttctgacaaaacaaataaaatcctgagaggtatttgttttagtaaaccaaagggaaatcctatgagactctggcttgtgcctcta

SEQ ID NO: 805885 - DNA, 120 bp, Artificial Sequence
  ENSG00000280739_129 (sequence is synthesized)
aatgtcttcctcagtgaaaacagcccatggtcatgcctgtgtcctgggtggactgagttcgttccagtgagctgatgagccaggcgggagattccccttgggaagggtcatggttgttta

SEQ ID NO: 805886 - DNA, 120 bp, Artificial Sequence
  ENSG00000280739_130 (sequence is synthesized)
tttgaagctgctttcagccagtacttggccgaggagtgtggatgaatgaaacgcctctgttgtcctgctgctgaaacgggaacactattgcctgtcatcactgttgtgcccactgttttg

SEQ ID NO: 805887 - DNA, 120 bp, Artificial Sequence
  ENSG00000280739_131 (sequence is synthesized)
gcttatgatacaagagcccactgtcctacatctctaatgatacacagagcatctctggtctctaggaggtgggagggacactacttccagctttaaccatatgcatgacaaggagatcca

SEQ ID NO: 805888 - DNA, 120 bp, Artificial Sequence
  ENSG00000280739_132 (sequence is synthesized)
gtgaccatctggtggggaagcaggcattccatctccggagcttcccaaggaaacaggagacaatggagtgcaggaaatgctcagaaccaggaaacctgcaaccacttagttccagtggct

SEQ ID NO: 805889 - DNA, 120 bp, Artificial Sequence
  ENSG00000280739_133 (sequence is synthesized)
tggggtagctaggattccgtttattcctttgtaaaatggggataatgcagggtgctctcatgtggagctaaggaaacaatatgtgaaagcccgttgcatataaaatttatataaagaaaa

SEQ ID NO: 805890 - DNA, 120 bp, Artificial Sequence
  ENSG00000280739_134 (sequence is synthesized)
tggatttttcttcaccttttccttactcatgagccagcaagaaggccctcaccagatgcactcttcttgaccttggacttcccagtttccggaactgtgagaaatgaatttcttttcttt

SEQ ID NO: 805891 - DNA, 120 bp, Artificial Sequence
  ENSG00000280739_135 (sequence is synthesized)
agaaattgcttaatctgtggtattcagttatagcaacataatatggactaagacagaaaattggtactgagaagtagggctgttgctatgagaaatacccacaaatgtggaagtggctta

SEQ ID NO: 805892 - DNA, 120 bp, Artificial Sequence
  ENSG00000280739_136 (sequence is synthesized)
tggattgctgtgaatggtgcattaagggcaatcctggtgagggctcaaaaacagagaagacgagagaaagtctggaacttattagagattatttaggtggttgtgaccagcataatgaaa

SEQ ID NO: 805893 - DNA, 120 bp, Artificial Sequence
  ENSG00000280739_137 (sequence is synthesized)
gaaatatggacagtaaaggccattctgatgaggtttcagatggaactgaagaacaaggtattggaaactagagcaaaggccacccttgttataaagtagcaaataactgggctgaacagt

SEQ ID NO: 805894 - DNA, 120 bp, Artificial Sequence
  ENSG00000280739_138 (sequence is synthesized)
gtccgtgcccagaggctttatgaagggtgaaagttaagagtgatggactaggatatctggtgaaagaaatatctaaacagcaagtcctccatgctgtgcatggctacttttaacttctta

SEQ ID NO: 805895 - DNA, 120 bp, Artificial Sequence
  ENSG00000280739_139 (sequence is synthesized)
cagtaaaataagacaggaaagagacgatttaaagacagaatttatcgttaaaaagtccgtatgcattctgtcctgcccttctgccttctactgtgggatgatgcagcaaaaaagtcttca

SEQ ID NO: 805896 - DNA, 120 bp, Artificial Sequence
  ENSG00000280739_140 (sequence is synthesized)
ccatatgcaagcccttcactgtggacttgccagcatccagaactgtgagaaatgagttcctttataaaataaattacccagtttgtggtattctgttatagtaacacaaaacagactaag

SEQ ID NO: 805897 - DNA, 120 bp, Artificial Sequence
  ENSG00000280739_141 (sequence is synthesized)
acaccttttctgtgctccggcctgggacactctttcaaggcagaaagatgggccaattgcagggctcaccttatttgtttcccatccctcaggaatcactgtcctttgtttgatgtggag

SEQ ID NO: 805898 - DNA, 120 bp, Artificial Sequence
  ENSG00000244945_0 (sequence is synthesized)
cagtttcgaggtctatggtccactaggaggggacctgtgacactgccttgctgtccatccaatgtaaagaggaaaacactggctgcaaaccccagaagccagctccacgccagctctgtt

SEQ ID NO: 805899 - DNA, 120 bp, Artificial Sequence
  ENSG00000244945_1 (sequence is synthesized)
ccacgtctgcttctgggtccagacccacctgtgaggcagacaggatagcagaggtaggagacagagaccgattcctgatggcttcttttgcttaagccactttgagttggatttctgtta

SEQ ID NO: 805900 - DNA, 120 bp, Artificial Sequence
  ENSG00000244945_2 (sequence is synthesized)
cttgcaaccatgcgccctgactcgaggagaaaagctacccactatgttgaaaatgcagaatcatcacacaaatgggcaagttccacagtccgcagtgtgatccaccccaaggcccaggcg

SEQ ID NO: 805901 - DNA, 120 bp, Artificial Sequence
  ENSG00000244945_3 (sequence is synthesized)
tccacagcaacctatctagactgggacaccaaggaggagagctgtcaagtcagaggggagcagaactaccagggtctgcaccccatcagcacctgcagcagagacagacagactctggcg

SEQ ID NO: 805902 - DNA, 120 bp, Artificial Sequence
  ENSG00000244945_4 (sequence is synthesized)
gatgcagtggccagttccccgaaaggaagggggctgtgctgtgcaaggcgggccctggatatgaagctaaggaataggagtgtcctggtcactaggaatgaacgtgcttcctgaattaac

SEQ ID NO: 805903 - DNA, 120 bp, Artificial Sequence
  ENSG00000244945_5 (sequence is synthesized)
taagagctcgctgacaccccatgtgggtagcagagatcagtgctgggcccctctgaggccgggcttcctgagagctcatccgtgaacggcggactgagctcctaaatggcccaccctccg

SEQ ID NO: 805904 - DNA, 120 bp, Artificial Sequence
  ENSG00000244945_6 (sequence is synthesized)
ttcgccaaaaggagaagcattctgaagcagaataaaggagggcaaatgttccacacggcctcggagtttcctgggaggtccagttccacagccagacagtgaaggcctgctggaccccac

SEQ ID NO: 805905 - DNA, 120 bp, Artificial Sequence
  ENSG00000244945_7 (sequence is synthesized)
ttctctcgccctctgaagcccacagcatccaggccatgcctccaagtgagagggtcctccatggaactgaggagatgtttactggttcctcccagcttcctctcctgcgagcctaccacc

SEQ ID NO: 805906 - DNA, 120 bp, Artificial Sequence
  ENSG00000244945_8 (sequence is synthesized)
gaccatccgcaaacagaacggatcctgtccctccaccagctgcccactctgggtctagctctgtcaccccagctggagtgcagtggcgcaacctcagctcactgcagcctcgacctcctg

SEQ ID NO: 805907 - DNA, 120 bp, Artificial Sequence
  ENSG00000244945_9 (sequence is synthesized)
gcttcccaagaaagggtggttaagggtgatacaggctgtgacctggtaccatggtttgagagtggccagatcttctggaggcgagctggaccacgtgaggagccctgtggggagggagct

SEQ ID NO: 805908 - DNA, 120 bp, Artificial Sequence
  ENSG00000244945_10 (sequence is synthesized)
ccctagggataacatacgaaccctgcagggccccctgcctcgcccgctccgagtgctgcaacctggatgcgacaccagcaagagtgcaaatgaagcaaatctttgtaaggaaaggatgac

SEQ ID NO: 805909 - DNA, 120 bp, Artificial Sequence
  ENSG00000244945_11 (sequence is synthesized)
ttttgctggctgaaattcatttttaaaattaccatacagtaaaattaactcttgtgagttttaacacgtggagattcagctccaccacaatcagaatacaggacggtcccaccactccca

SEQ ID NO: 805910 - DNA, 120 bp, Artificial Sequence
  ENSG00000244945_12 (sequence is synthesized)
aaactccccacctcagcccctggcaaccactcatctgtcctgcaacaatatggctttggctttttgagaatgtaatctcaatgtaattatacattatataaccttgagactgactttttc

SEQ ID NO: 805911 - DNA, 120 bp, Artificial Sequence
  ENSG00000244945_13 (sequence is synthesized)
tcagaataatgtcttggagatcaatccaagtttccatgtgtatcaatggttcatgccttttgtttcctctctgaacgtcctgaaagggcagtggttcattcctttctacggctgagtcat

SEQ ID NO: 805912 - DNA, 120 bp, Artificial Sequence
  ENSG00000244945_14 (sequence is synthesized)
acttcaccgcacagacgtaccactttgtttatccatcacccaatgcagaacattgggattgcttctagcttttggcagttatgaacggagctgctataaacatatgtactagttttggtg

SEQ ID NO: 805913 - DNA, 120 bp, Artificial Sequence
  ENSG00000244945_15 (sequence is synthesized)
tagacataagtttcatttctatttggatcatatggtaagaggacgtttagcttcttgagaaactgttttcctgagtggttgcaccattttgcattcctaccaataaagtatgagagatcc

SEQ ID NO: 805914 - DNA, 120 bp, Artificial Sequence
  ENSG00000255148_0 (sequence is synthesized)
actgaaaaaaattgacttgtatgagaagaacggagacagaaggcttggtgggttaacattgtcttgctggagactaaaaagcaaccctatggtggaggaattggaaaatatcacaaagaa

SEQ ID NO: 805915 - DNA, 120 bp, Artificial Sequence
  ENSG00000255148_1 (sequence is synthesized)
ggtagaaaaggtcctgctcaggcaagtgtggcccagtgcctgctttccagctcaggcctccggggtgctagagaaagaggggcagggactgcatcagtggggctgagtcttggctgctgt

SEQ ID NO: 805916 - DNA, 120 bp, Artificial Sequence
  ENSG00000255148_2 (sequence is synthesized)
gggcagcccagaggagggcaaggtgtccaactaatgttactgtcagataaatgagaatctacaagaaccacagaaaaacaaagattaacatgacccagaaatagctggcaggagagtttg

SEQ ID NO: 805917 - DNA, 120 bp, Artificial Sequence
  ENSG00000255148_3 (sequence is synthesized)
aaagctcagctttagagaaactgaacagaagtggttcctgatttgaataaaattgaagttggtgattagtgtggccagggaagaaagaaacttaagagtgaccacagtttgtgggttttg

SEQ ID NO: 805918 - DNA, 120 bp, Artificial Sequence
  ENSG00000255143_0 (sequence is synthesized)
gccacactcgtgttggttgttggttgtttaatcctcctgacaacctattaacacggcttctcttcactatcagcaaccccattctgcagccgggaaaactaaggccacacggatcacaaa

SEQ ID NO: 805919 - DNA, 120 bp, Artificial Sequence
  ENSG00000255143_1 (sequence is synthesized)
atgcaagagctgagatacaaacccagagctagctgaccgtagagtgcaggttctcccaacggctgtgtgtgcctactcaccctgcccgacccctgctcccatgcacacacacacacttcc

SEQ ID NO: 805920 - DNA, 120 bp, Artificial Sequence
  ENSG00000255143_2 (sequence is synthesized)
gctccaggctgtggctgcaatgaattcttcttaacctatccatcttttgtgccagatacatgcagtacctacaccccaccccccgcctttttttttttttgacacagagtctcactctgt

SEQ ID NO: 805921 - DNA, 84 bp, Artificial Sequence
  ENSG00000255143_3 (sequence is synthesized)
caggctggagtacagtggtgtgatctcgactcaatgcaacctccacctcccgagattgcagtgggtggagattgcgccattgca

SEQ ID NO: 805922 - DNA, 120 bp, Artificial Sequence
  ENSG00000255142_0 (sequence is synthesized)
gttttttcaaatatttaacatccttgcttggttgaatccacggatgcggaacccatagatcctgagggccgactctacccccttctgagaacatcccccacagatggctgggctgggtgg

SEQ ID NO: 805923 - DNA, 120 bp, Artificial Sequence
  ENSG00000255142_1 (sequence is synthesized)
agaagcaggaagcagacagtaagtgacagccgctaagacgcagggaggctgggccagggctggggcacgagggtaccttcacctgggcgtcagaagcacttgagaggacaggggctgctg

SEQ ID NO: 805924 - DNA, 120 bp, Artificial Sequence
  ENSG00000276744_0 (sequence is synthesized)
ctaggctcggcgcccttggcgaggggggcggggagagccgagaagccacacaaaggttccaccgaggctcgagacctagtagccttcggggtgaagccaggggattacagtgcggagtgg

SEQ ID NO: 805925 - DNA, 120 bp, Artificial Sequence
  ENSG00000276744_1 (sequence is synthesized)
atttcgggagcgaaactccggaggttctgctgggtttgagatctgcctttcggggccggggccaagtactaaagttctaaccctgtcgcttggctatttccgtgccccttgacttccctg

SEQ ID NO: 805926 - DNA, 120 bp, Artificial Sequence
  ENSG00000276744_2 (sequence is synthesized)
agcttaagctcgagaactctgcagacgctgcaagtgtctgttctttcctaggcatggcagcggctgtccttagttggctgtatctgagactctgacaacctagtgccctggcctggggcc

SEQ ID NO: 805927 - DNA, 120 bp, Artificial Sequence
  ENSG00000276744_3 (sequence is synthesized)
cttaggcgagatcttagcgcaggtggtaccctgtgttcacgggaagtcgtgggcggcctaatgctggcttgggttctgagtagttcttgataccatggtgggaatgccctgtggtactca

SEQ ID NO: 805928 - DNA, 120 bp, Artificial Sequence
  ENSG00000276744_4 (sequence is synthesized)
agttaaaagtagccgtgggtcagttctgctggagtgccgcttcctcctaacctccgagcagtttggccctggggtcgcttcgttggtctgacttatttttagagctctgtcctggggcag

SEQ ID NO: 805929 - DNA, 120 bp, Artificial Sequence
  ENSG00000276744_5 (sequence is synthesized)
ggcttggctactggcgaggctgctcccacctgtcggctacccttggagttcacaattcgctgctgtggtttcgcggctcgaagccatcgctggagtcaggcccacctgctgccagagctc

SEQ ID NO: 805930 - DNA, 120 bp, Artificial Sequence
  ENSG00000276744_6 (sequence is synthesized)
gttcctggccgtttccgctggattgcagagggaggacagtgttggacctaggcgtgggttccctgggcgtgtcccttggggtcttagctctctgggaggagggttctacttattcgggag

SEQ ID NO: 805931 - DNA, 120 bp, Artificial Sequence
  ENSG00000276744_7 (sequence is synthesized)
agcggtaacaacgtaatcccgtcacctctcctggcgctgagagagcgccccccaaagtaagatcagcgtcaggcccacgccctatttggtgaataaataaaagcaaactaggaattgaaa

SEQ ID NO: 805932 - DNA, 120 bp, Artificial Sequence
  ENSG00000276742_0 (sequence is synthesized)
gggctgatgttgctggggaaagtagtccagcctggcttgccagaggatttaatagtttcttgtgtgtaaatcagaggctgaatcataggaaattactcatatttgaccgtattttaccta

SEQ ID NO: 805933 - DNA, 120 bp, Artificial Sequence
  ENSG00000276742_1 (sequence is synthesized)
gaatcataatggtccgcagggcattaacaacctaagtaaaactttcactgggacaggaatagacaaaggagacactctccaataattagaaaataaagagcaactacaattatttgtgaa

SEQ ID NO: 805934 - DNA, 120 bp, Artificial Sequence
  ENSG00000255146_0 (sequence is synthesized)
ggaagcagagctgaggaaggcagccactgcccacccatggctaagcagggagaaatgaatacctcaacctcactttccccctaccccaagtctcccagcaagtctcctaccagaaggcag

SEQ ID NO: 805935 - DNA, 120 bp, Artificial Sequence
  ENSG00000255146_1 (sequence is synthesized)
agggcagggcagctctttgacacaatccacaaagatcagcccttctggagctcagagctattacagagaagcctggagagtgtgtcaagacagcttttctccaggtggtgtgacgctgct

SEQ ID NO: 805936 - DNA, 120 bp, Artificial Sequence
  ENSG00000255146_2 (sequence is synthesized)
gctaataatggtgatgacatcaaaactgccaagggccttagaaatctgctggtccagcacgaagcagggagatcaccaaaaaggggaggcagagctggaagagaacacagctgtcctgcc

SEQ ID NO: 805937 - DNA, 120 bp, Artificial Sequence
  ENSG00000255146_3 (sequence is synthesized)
atccaggtgctccattatgcctgaaaggttaacttcaccaccaaagcccaagaagaggttttcttcgccaaagatggggaagtgctgacaacgtttgacattaaaaacatctatgttctc

SEQ ID NO: 805938 - DNA, 120 bp, Artificial Sequence
  ENSG00000255146_4 (sequence is synthesized)
ccagacctgtcaggacagacagccattgttggacactttgacttcagagcaccttctggaaaagagcttctgttggatgacagcgcaattgtctgggcagaaggacccttaaagattaga

SEQ ID NO: 805939 - DNA, 120 bp, Artificial Sequence
  ENSG00000255146_5 (sequence is synthesized)
cagcgcaattgtctgggcagaaggacccttaaagattagagctgagagaaccctaagaaccaagaccacacagcacctctcacatcccaagctccaggagaatcgcttgaacccgggagg

SEQ ID NO: 805940 - DNA, 120 bp, Artificial Sequence
  ENSG00000255146_6 (sequence is synthesized)
gcctgggtgacagagtgaggtcctgtctcaaaaaaacaaacaaacaaaaaatacatattattactacaacttgagtatcccttatccgaattgcttgggaccagaagtgttttggatttc

SEQ ID NO: 805941 - DNA, 120 bp, Artificial Sequence
  ENSG00000255146_7 (sequence is synthesized)
tcatataccacttatacacatagtctgaaggtaattttttacaatatttttaactatatcatgcatgaaacaaagtttgtttatgtcaagtcaggtgtggaattttccacttgaggcatc

SEQ ID NO: 805942 - DNA, 120 bp, Artificial Sequence
  ENSG00000255146_8 (sequence is synthesized)
atgttggcactcaaaaagttttggattttggagcattccagatttcagattttcaaattagggatgccccatctatatctccattttattgaagaggaatctgaagcttagagatgttaa

SEQ ID NO: 805943 - DNA, 120 bp, Artificial Sequence
  ENSG00000255146_9 (sequence is synthesized)
gcccaaggcacgcaaaccataaagggcagaaccagaattccaaccatcaagatgtcttgttttcccaccacactcgaaatccggaagagcttattcttacctatcactgtttccctaaca

SEQ ID NO: 805944 - DNA, 120 bp, Artificial Sequence
  ENSG00000255146_10 (sequence is synthesized)
ccctgtacagtacctgatatacggaacacatttttaattatctgagcaagaaatggagaaagaggaaaatgaaagagagtagaaaaggaaaacgtgataaagaggggtttaataaaggaa

SEQ ID NO: 805945 - DNA, 120 bp, Artificial Sequence
  ENSG00000255146_11 (sequence is synthesized)
ggagtaagagaaagaaagagagagagggacctagtaagtgaaaacgatgaggcttattcctccacgacctgactgcacagatgtcgctcaattccccctgcagtctccccagcactctct

SEQ ID NO: 805946 - DNA, 120 bp, Artificial Sequence
  ENSG00000255146_12 (sequence is synthesized)
cccctccactctcccacctcttgtgtgtaggtcccttcctctgtctgcaacgaaaaacgtcctgtggaaaccaggaagtcaaccctatttgagaagtcaaaatgctgctacaaaagcctt

SEQ ID NO: 805947 - DNA, 120 bp, Artificial Sequence
  ENSG00000255146_13 (sequence is synthesized)
ccctgacccagaagagaaatcgcaatgtcaccaggtaaggagggaggctggttcttggtcagagggtggccagccatcagccagagtagacttcagatgaaagctgtgtccacatcaagg

SEQ ID NO: 805948 - DNA, 120 bp, Artificial Sequence
  ENSG00000255146_14 (sequence is synthesized)
aaattccttcaatggaaaagtccagggaagtcgagaccaaaaagaagatgtcaatgtgaccttcctagatgctacattaaagccatttgaggctattaaattcattctttcttttatcaa

SEQ ID NO: 805949 - DNA, 120 bp, Artificial Sequence
  ENSG00000276740_0 (sequence is synthesized)
atggatgaaacaactaaaaatctgaagattttataagatttccatatgctgtagaccacaaggacgaaggcagttgttgtcctacctggaagcaggcagtgccttgactcatttgctcca

SEQ ID NO: 805950 - DNA, 120 bp, Artificial Sequence
  ENSG00000276740_1 (sequence is synthesized)
gaccctgtctctgacatgcttggcagacattctccccagatgagtcactcctgagacctgcatttgagtggatcttccatgtcctgcaaccctgatttccacctcagccattcttaccct

SEQ ID NO: 805951 - DNA, 120 bp, Artificial Sequence
  ENSG00000276740_2 (sequence is synthesized)
ttgaaatctaatcactgatatgcaatagaattaagtggtgaggacttttgagaggtgactgggtcattgatatggtttggcagtgtcccatccaaatctcatcttgaattgtaactccca

SEQ ID NO: 805952 - DNA, 120 bp, Artificial Sequence
  ENSG00000276740_3 (sequence is synthesized)
gtcatgggagggacctggtggcaggtgattgaattatgggggcagcccttttcctgcactgtttttgtggtagtgaatgagtcccatgagatctgatggttttaaaaaggggaatttccc

SEQ ID NO: 805953 - DNA, 62 bp, Artificial Sequence
  ENSG00000276740_4 (sequence is synthesized)
tgcacaagtacctccccagctacgtggaactgtaagtccaataaatcactttcttttgtaaa

SEQ ID NO: 805954 - DNA, 120 bp, Artificial Sequence
  ENSG00000282393_0 (sequence is synthesized)
attaaatttctaaataattcttagtaaaatcatgtaaacaggaaaggaagtagaattagttccatattggtggaacacatagcagaggtttgagaagggagaatttagtcaactgagaag

SEQ ID NO: 805955 - DNA, 71 bp, Artificial Sequence
  ENSG00000282393_1 (sequence is synthesized)
agcagaggtttgagaagggagaatttagtcaactgagaagttctcatgaaaggagcaagttcaagatcaca

SEQ ID NO: 805956 - DNA, 63 bp, Artificial Sequence
  ENSG00000282393_2 (sequence is synthesized)
cagtgggcaaaggtacaaactcctgagaactggcaggttgacagccataaatggggtaccaaa

SEQ ID NO: 805957 - DNA, 77 bp, Artificial Sequence
  ENSG00000282393_3 (sequence is synthesized)
atcatgttggccaggctggtctgaaactcgtgacctcaggtgatccactccaaccagtgagagatttatttcctata

SEQ ID NO: 805958 - DNA, 120 bp, Artificial Sequence
  ENSG00000282393_4 (sequence is synthesized)
gcctccagccagaagccagaaacagactcttcaaggaggaggtaaaggaaatagcaatttatgctgactggaatggccaaatacatttatttaataagctccaggaggagtcatgaatat

SEQ ID NO: 805959 - DNA, 77 bp, Artificial Sequence
  ENSG00000282393_5 (sequence is synthesized)
atttatgctgactggaatggccaaatacatttatttaataagctcgcacaattgagtttctggcttcttcatgggtc

SEQ ID NO: 805960 - DNA, 78 bp, Artificial Sequence
  ENSG00000282393_6 (sequence is synthesized)
atgaaaactcgctctgtgcatcctctgtacgctggccagaacctctctgttgtgggtggtctcttatcaggcaagaaa

SEQ ID NO: 805961 - DNA, 120 bp, Artificial Sequence
  ENSG00000282393_7 (sequence is synthesized)
gagaactcagttttgaaagttactctgtggtcccctcagccaagagtggttctgttcagtcagttgggagcttataatttaatttttgtttatcaatgctaatgcgaaagagtacgctgt

SEQ ID NO: 805962 - DNA, 82 bp, Artificial Sequence
  ENSG00000282393_8 (sequence is synthesized)
tggatggggttaatggcagctgtatttttctgggagctctgctttaattggacaaagtaagttgtggtaagatttcttcttt

SEQ ID NO: 805963 - DNA, 120 bp, Artificial Sequence
  ENSG00000282393_9 (sequence is synthesized)
ttataacaacttttgatgtctgagtggattcccacacagtcatctattgtaagactttctgattccgtttttttcctttggtcattatgaatagggcttatgtaaataattgcatggtag

SEQ ID NO: 805964 - DNA, 120 bp, Artificial Sequence
  ENSG00000282393_10 (sequence is synthesized)
ttttttcctttggtcattatgaatagggcttatgtaaataattgcatggtagcttttgattggaaataacatcaaagtagttgtcaaaatacttaggaatgttatttttggattgtaagg

SEQ ID NO: 805965 - DNA, 120 bp, Artificial Sequence
  ENSG00000282393_11 (sequence is synthesized)
gggaggaaaaataattttctgttttcagaattcttagatgggatgctctgtaaaaactgacagattaaaatgagaaaaacagaaaagtagaaaaacacgtataccttatggttacatggg

SEQ ID NO: 805966 - DNA, 78 bp, Artificial Sequence
  ENSG00000282393_12 (sequence is synthesized)
tactgtcttcaacttaaagaaagaagatttgaggtgcagtattggggagttaaccagcaaaagcacattagacaaggg

SEQ ID NO: 805967 - DNA, 120 bp, Artificial Sequence
  ENSG00000282393_13 (sequence is synthesized)
gtattggggagttaaccagcaaaagcacattagacaagggtaaggttcgttatacagacttaagtccatgcattctccattgataagactctttagtgatttagttatccttctcttctt

SEQ ID NO: 805968 - DNA, 120 bp, Artificial Sequence
  ENSG00000282393_14 (sequence is synthesized)
gcttttaaatggtgatttcctttatagatgtaaattttccttacacaagtgtaacttctactctgttttcacaacttcctttgttagcgtttttttttttcaaaataattagcttggaat

SEQ ID NO: 805969 - DNA, 68 bp, Artificial Sequence
  ENSG00000282393_15 (sequence is synthesized)
ttgttaaagagagttctctagtatgttgagcatctttttgtaagtgtacttgccatctgtagatcttc

SEQ ID NO: 805970 - DNA, 120 bp, Artificial Sequence
  ENSG00000282393_16 (sequence is synthesized)
agcatctttttgtaagtgtacttgccatctgtagatcttctttggtgaggcgtctgttcagatctgtgtgcatttttaattgggctgtttaacttattgtttagttttaacaatttttta

SEQ ID NO: 805971 - DNA, 120 bp, Artificial Sequence
  ENSG00000282390_0 (sequence is synthesized)
ccctccctctccctctctctctccttccctccctctccctctctctccttccctctctccatggaaggatgttatgtatcttagcaacaaaggctttggattttcccctccagttactga

SEQ ID NO: 805972 - DNA, 120 bp, Artificial Sequence
  ENSG00000282390_1 (sequence is synthesized)
caagaaaccagaatgatttctggtgtcagaaaccttcctcgaacaaggagctttctctggagaacaggctccgagcagccacacgtcattcgacctctgttccccgttggggtgtcctca

SEQ ID NO: 805973 - DNA, 120 bp, Artificial Sequence
  ENSG00000282390_2 (sequence is synthesized)
ggccaggacatcctggcaagtgggccgtcagcgggcagtggcatcgcagcctcagccgggagacccaagtcactcctctcagaagcgcggcacccgaaccacctctgttcatcacatttt

SEQ ID NO: 805974 - DNA, 120 bp, Artificial Sequence
  ENSG00000282390_3 (sequence is synthesized)
gtcccgtggagcagtgacaagacccagcaagatttcatggcgacagaacttgaaggtttcagggcgacggaacctgagagtgatacagacattttgattcctggtgcaacagggtatgaa

SEQ ID NO: 805975 - DNA, 120 bp, Artificial Sequence
  ENSG00000282390_4 (sequence is synthesized)
gaaaacacatacctaattttatcggaaaagatatactgagtgtctatgcatgctgtgatttgaaagaaaatcactcagtagagaagggcctcaggtcacaagccttttgtctaagtgagg

SEQ ID NO: 805976 - DNA, 120 bp, Artificial Sequence
  ENSG00000282390_5 (sequence is synthesized)
gggataaaaaggcttcacagtagagtgacaattactaatcctgcgacagtaatatatgcaacttttaaatttttttctaaacatttattttgtgactactctgtttcaatgctccctggg

SEQ ID NO: 805977 - DNA, 90 bp, Artificial Sequence
  ENSG00000282390_6 (sequence is synthesized)
ctgtaatctcagcactggccaaggagttcgagaccagcctgggtcacagagtgaggtgccctcccctacccactcccagactatctggaa

SEQ ID NO: 805978 - DNA, 120 bp, Artificial Sequence
  ENSG00000282390_7 (sequence is synthesized)
gtgaggtgccctcccctacccactcccagactatctggaaacacccagtgcagacaaggtcaagtcagcttaacacacgcacgccgatagtggtgaacgctgctttctgagcggctggcg

SEQ ID NO: 805979 - DNA, 120 bp, Artificial Sequence
  ENSG00000282390_8 (sequence is synthesized)
aggtcagtcttaggaaagttggtggcagacgcgaacagccccactggaattggtaacttggaaggcgcagctccacggacacagccacgatatgccttctgccgccacacagcccctgac

SEQ ID NO: 805980 - DNA, 120 bp, Artificial Sequence
  ENSG00000282390_9 (sequence is synthesized)
ctgccgcagtgccaggcatgaagcctctgcccagccaggcctcggggtcctctctagggaaacacaggctccttctcctctcctggctttctctaggccctccagacaccagatggaaat

SEQ ID NO: 805981 - DNA, 120 bp, Artificial Sequence
  ENSG00000282390_10 (sequence is synthesized)
ctaatggaacccacacaccatgcattctgcagggctgagctcggcttcctccaggacaccacaggagccgtcttggttgcatgtttgtccaaatttaaaacttcacccggccgaggtggg

SEQ ID NO: 805982 - DNA, 120 bp, Artificial Sequence
  ENSG00000282390_11 (sequence is synthesized)
ccatctgtggcttcgtctgagatgcttacttttcgcaggattttcttggagctctgggacctggtggggcgctcactccatgcagttgctttcactccaccagggacatcgggtatgtaa

SEQ ID NO: 805983 - DNA, 120 bp, Artificial Sequence
  ENSG00000282390_12 (sequence is synthesized)
cacactgagctgtgaaggagctccgaccccgctcctctgggagcctgcaggatgctcagcagcggcacccaggctgcctcagggacccaggtgcattgggaacaacttggcaattttcat

SEQ ID NO: 805984 - DNA, 120 bp, Artificial Sequence
  ENSG00000282390_13 (sequence is synthesized)
ccactgatttctgttctccagatcctgctttcaggatagggaaagactcaggggcaaagtcatgggacaaagaggtctgagggcccccacctctgtggcactggaggcctgtgtaacatc

SEQ ID NO: 805985 - DNA, 120 bp, Artificial Sequence
  ENSG00000282390_14 (sequence is synthesized)
agcctccctggtgattttgcagaagaggggttggcgttccttagatgctcacttaaaggcttttcttgaatttaacagaagctgggaagtaaatattactttctttatgaaacaactact

SEQ ID NO: 805986 - DNA, 120 bp, Artificial Sequence
  ENSG00000282390_15 (sequence is synthesized)
ttttccaagggaatctctttctctagatggcctgaaatgattcttctggtttttatctttttaaatccagatgaatgcaaataaccatgaatcagccccaaacggaggacctcatctgtt

SEQ ID NO: 805987 - DNA, 120 bp, Artificial Sequence
  ENSG00000282390_16 (sequence is synthesized)
tgcaccctcatgtcagcacacaaatgagaatttaaagatcctaattaaacccgggctcaaaatatcttcctgagtagaccagaaagcaccagtttcacaaaaaaacagaaatatgcatct

SEQ ID NO: 805988 - DNA, 120 bp, Artificial Sequence
  ENSG00000282390_17 (sequence is synthesized)
tcccaatgtggtttttagtttattttctgtgttttaatggtattcaaatttgaagttgattgctaaagcagtaactaccgttaatgtgtgtaaacagatttgtggatatttaacgattta

SEQ ID NO: 805989 - DNA, 120 bp, Artificial Sequence
  ENSG00000282390_18 (sequence is synthesized)
ggaaactgtggacgactactttacataatcaacaggtagacagacagatgtcagcacacacaaccgtcaaccctcagttgctcaaggctgaatgtgggatctctcatctcaggcttgttt

SEQ ID NO: 805990 - DNA, 120 bp, Artificial Sequence
  ENSG00000282390_19 (sequence is synthesized)
gaaatcctcaattagtgaaaagcccttggaaggcacctctaacattgtggtcaggagcccagattttggagctagaatttaaacatagggatagggatttcattccaagcatcccaccaa

SEQ ID NO: 805991 - DNA, 120 bp, Artificial Sequence
  ENSG00000282390_20 (sequence is synthesized)
ctgcctgagcctgtgtcagcgagccagcccacctccctgtgctgattgtctcatccgtgcagtgggggtgtggacacctggtcctggggaccccagcatctggcttcaatgtcgatgtcc

SEQ ID NO: 805992 - DNA, 120 bp, Artificial Sequence
  ENSG00000282390_21 (sequence is synthesized)
ttccgccgaccaggagggaggcccttctccactctgctgcaggcgtgggtcacctgtgagtccctgcaggcctccactctctgctggaggtgcccgtgagctggacaatggctggggctg

SEQ ID NO: 805993 - DNA, 120 bp, Artificial Sequence
  ENSG00000282390_22 (sequence is synthesized)
attcataaaataaacaacaacatgcagaggacagaatccacttgtcagacatgggggaaaaggtagtcagctcctgaccttgcaaagcctcaggcaccaagagagactcagcctcgtatg

SEQ ID NO: 805994 - DNA, 120 bp, Artificial Sequence
  ENSG00000282390_23 (sequence is synthesized)
actcagtccctgcttttgctctatacagatccttcattttaaagccgtattttcttcattttccctagatggattctttactgtaactaattatgtcggattaaaacatgctaacaacac

SEQ ID NO: 805995 - DNA, 120 bp, Artificial Sequence
  ENSG00000286886_0 (sequence is synthesized)
acacaggaggctggcgggaggaaagctgcctgtggtatcacgtgctgtgtcgctgtggagcagggccctgccccggagcaggcatctgccgtggggaaggtgctgtgtgcggtggcgtgt

SEQ ID NO: 805996 - DNA, 120 bp, Artificial Sequence
  ENSG00000286886_1 (sequence is synthesized)
gggtggccccggctgggagacccaggaacagcgatatcttccactgatagaagcgaaggaatatccatccagtagcaccggccgcgcagggcatgctttgttcctggagatagcggtacg

SEQ ID NO: 805997 - DNA, 120 bp, Artificial Sequence
  ENSG00000286886_2 (sequence is synthesized)
cattctcccctaaaggcgactgggggtgggctacgattttgtaattttttaaacatgagcaggcatgctcattacagcggcatctccctgtcttctgaccacatacgatgactaattgct

SEQ ID NO: 805998 - DNA, 120 bp, Artificial Sequence
  ENSG00000286886_3 (sequence is synthesized)
cccattaagccaagttctgggatacacgtcaggtggagcagaagaatggagataatgttaaaaactgcatcaaaataagtgggactttccccaagcgtaaaagaagcatttataatcata

SEQ ID NO: 805999 - DNA, 120 bp, Artificial Sequence
  ENSG00000286886_4 (sequence is synthesized)
aatatgaaaaacattaaattcttctaccccatcttaatgaaatgagagaaaaattccctttcctcaagattggcagtgggtaagaaacagtcctttagaaatattacatgaaattcattt

SEQ ID NO: 806000 - DNA, 120 bp, Artificial Sequence
  ENSG00000286886_5 (sequence is synthesized)
gaaggctgtagttggtgggaactgggtattagcctaaatgcagaatgttttcaaaaggcattactttcacgcagagaaaagcttctttttgttatcaagggtacaactgctattcgatac

SEQ ID NO: 806001 - DNA, 120 bp, Artificial Sequence
  ENSG00000286886_6 (sequence is synthesized)
aactaaaatgtagaagaatttaaaaatctaaagtgttcatatttatttctatgaacttggtcacagacccacttgcctggaaagcgagttaaaacacaaatttaaaatatttatctctga

SEQ ID NO: 806002 - DNA, 120 bp, Artificial Sequence
  ENSG00000286886_7 (sequence is synthesized)
aaggaaaaactgataggacacattcaaatcaaactccgttatgactttggctctggcaagctatttctgggaacatttttcccagcaaatgcaagcaggagcaggaaatgtgactaaaca

SEQ ID NO: 806003 - DNA, 120 bp, Artificial Sequence
  ENSG00000286886_8 (sequence is synthesized)
tggcagcgatggtcgacacaccacacagacactgcaaaccctctctattgtactcacaactgccaaaatacgttcaccagaaggatcctgagctaagggaacactttagttcatttacaa

SEQ ID NO: 806004 - DNA, 120 bp, Artificial Sequence
  ENSG00000286886_9 (sequence is synthesized)
taggtgaaaatataaaattttgttgtaacttatgaactgaaaaactcagcatcattttctcaacattttgaagtattatgcattccctgatggcttcatcacacagaaatcctgctcact

SEQ ID NO: 806005 - DNA, 120 bp, Artificial Sequence
  ENSG00000286886_10 (sequence is synthesized)
ggccttcctgaggttaagagaatcatgttcttccccattttaagcaccaagctgcaaaagtgcatgctctccatccatcggcagcacccatgaccccgcctcactcggatgttggacttc

SEQ ID NO: 806006 - DNA, 120 bp, Artificial Sequence
  ENSG00000286886_11 (sequence is synthesized)
agtaccccacgctagtggcggggatgtaatcacctgttcagttcagaggccagcgttcacccacagaagcagtgatggaaggcactcatcagacagaaaagtctggccccacaagggtga

SEQ ID NO: 806007 - DNA, 120 bp, Artificial Sequence
  ENSG00000286886_12 (sequence is synthesized)
ccagtgtttgcacaggtgagagtcacactcccataccacatccagtatctctgattgataaacatccgtaaagccacgtttatgtttccataaataataacactcgactagtaaagaaga

SEQ ID NO: 806008 - DNA, 120 bp, Artificial Sequence
  ENSG00000286886_13 (sequence is synthesized)
ttattgacacttgctatgggtcctcagaaggaaccctgttagtggaacagccggcctgacgggagcctcatcatctgagcgggcttaaacctaacacaatttccgctttttcatcgtaac

SEQ ID NO: 806009 - DNA, 120 bp, Artificial Sequence
  ENSG00000286886_14 (sequence is synthesized)
gcatcgtgcacggctatgcggttcctctaggcatttccccgacagtcaaccaagcacaaactctgcctgccacattgcctgggactcccgtcgaagccaatctcagccaaccgtcctgcc

SEQ ID NO: 806010 - DNA, 120 bp, Artificial Sequence
  ENSG00000286886_15 (sequence is synthesized)
agcagctctgtgaggctgggaacgatcaggtttgatgtgggtatcggacagatggccactctccccgtttagacaagatgagatgctaccggagaaaaaggagagtggtgcttcgctctc

SEQ ID NO: 806011 - DNA, 120 bp, Artificial Sequence
  ENSG00000286886_16 (sequence is synthesized)
caccgagggaggctgcccaccccattggcctcgggcgggagccgcgtgacatgggccaggcacatgtgacccactttttgcccagctcccctcatgcccttggagggtggacccagcact

SEQ ID NO: 806012 - DNA, 120 bp, Artificial Sequence
  ENSG00000286886_17 (sequence is synthesized)
catgcgctgtcatttcaatacccccttcccccaacaggggcgactcaacagcccggcgagcctgtaggacacacggccgcagcagctaagcccctggaataggaaggggtgggtgggggc

SEQ ID NO: 806013 - DNA, 120 bp, Artificial Sequence
  ENSG00000286886_18 (sequence is synthesized)
agaaaccccaggacccagcattaatcccaacacagctcctaagacacgagcttttgctgctgctgccgccagtctgccatgggtggcgtaggcataaagcaggtccctacccggacagcg

SEQ ID NO: 806014 - DNA, 120 bp, Artificial Sequence
  ENSG00000286886_19 (sequence is synthesized)
gggctgacctgggcttggctggtgacgctcttgcaggtcctcatggactgcaggatgaggctattcctcaccaggaggaggtacctgaaacagcatgaactggaaattccctcctttccc

SEQ ID NO: 806015 - DNA, 120 bp, Artificial Sequence
  ENSG00000286886_20 (sequence is synthesized)
tgttttcttctttgttgtgactgagatgttccaggtctgccccacaagaaagacccatgcaaagctgagtggacgagctgcagcctcaaatgtggtcctgatgccagctgtgccccaggt

SEQ ID NO: 806016 - DNA, 120 bp, Artificial Sequence
  ENSG00000286886_21 (sequence is synthesized)
aggtggggtggaaaggcctagcccaggaccccacagcccagacactcggggccaagagaggaggtacaggatgcacactgctccacccatcaaactaggcacttctgccacagagtagga

SEQ ID NO: 806017 - DNA, 120 bp, Artificial Sequence
  ENSG00000286886_22 (sequence is synthesized)
gaaagtcaccctctgttctgttacaggcttcttaccttgatcccaccatgttacacaagactcaggggcggtaatgggaaaagcacacacaacaggcagaagtgaaatgtgaatgcaaag

SEQ ID NO: 806018 - DNA, 120 bp, Artificial Sequence
  ENSG00000286886_23 (sequence is synthesized)
agaagccactgggctgtgaagagggcccggtttcgtcggggacaggctgagctggctcctgctggggcccacacaatgtgcttgcagctttctgatgccagacaaggcacagagacagtg

SEQ ID NO: 806019 - DNA, 120 bp, Artificial Sequence
  ENSG00000286886_24 (sequence is synthesized)
tgtggtgtcctgcatgtcttactgaccaagcaaagtcagtcgattgcttattaaagaaagaagctaaaataacgagtatcggaggttcatacagaaaaaaatagaatatgtgtacatgca

SEQ ID NO: 806020 - DNA, 120 bp, Artificial Sequence
  ENSG00000286886_25 (sequence is synthesized)
aaagaaaaacctgtcactgatcattacccagaaggaccacggttgatatgtgttatcttgagatctgcctattcagactttggtctagtaggcctgtgtttttatatctttttagcaaaa

SEQ ID NO: 806021 - DNA, 120 bp, Artificial Sequence
  ENSG00000286886_26 (sequence is synthesized)
atagtaaccaaccatgtttgtttttcttgctattatacatgaaatatttttctatgttactatattgaagtctgcataaaagggagcagattccccacggtattgcattttgtgcatttt

SEQ ID NO: 806022 - DNA, 120 bp, Artificial Sequence
  ENSG00000286886_27 (sequence is synthesized)
tatgcatttattctgatgcataaaaatctgcagtgactgacaattccaggtattttgaattgttacagtaactaataatgtaatgtttgttgctatgatttaaatgtacgtgtcccccca

SEQ ID NO: 806023 - DNA, 120 bp, Artificial Sequence
  ENSG00000286886_28 (sequence is synthesized)
cccgccccaattcctatgttgaaacttaagacccagtgtgatggtatcaggaggtgattaggccatgagactccgctctcagaaatggaccagtgcctcataaaaaggctcaagaaaact

SEQ ID NO: 806024 - DNA, 120 bp, Artificial Sequence
  ENSG00000286886_29 (sequence is synthesized)
agcagggtcctttttacccttacatcccatccaccatggggacacagcgttcgtggcctccaggggaagcagcgttcaaggtgctgtctcagacaggccgacccttcccaggcgcaaaac

SEQ ID NO: 806025 - DNA, 120 bp, Artificial Sequence
  ENSG00000286886_30 (sequence is synthesized)
ctgctagagtcttgatcctggattgccagcctccgtaatggtgagtgatacattgattctgtttataaattgcccagtgttgggtatcttgttctagcagcagaaacggactaaaaccat

SEQ ID NO: 806026 - DNA, 120 bp, Artificial Sequence
  ENSG00000286887_0 (sequence is synthesized)
attgctgtgttggccgggctggagtgcagtggggcaattttagctcactgcagcatccaacttctggttcaagcaatcctctcacttcagccttccaagtagttaggactacaggcatat

SEQ ID NO: 806027 - DNA, 120 bp, Artificial Sequence
  ENSG00000286887_1 (sequence is synthesized)
gctgctgtgctcagctaactttttcattttttgtagagacaggatctcactttggaaggcagctatgctcaccactacactgccaacaccaggatctcactttgttgcccaagctggtct

SEQ ID NO: 806028 - DNA, 120 bp, Artificial Sequence
  ENSG00000286887_2 (sequence is synthesized)
ctcctaaagtgctgagattacaggcgtgaaccacaccatgcctggcccattttgtcaattaagtgttttggaaatgctacttgttcattataatcaatcagtaaaggataattattgtag

SEQ ID NO: 806029 - DNA, 120 bp, Artificial Sequence
  ENSG00000286887_3 (sequence is synthesized)
tcattataatcaatcagtaaaggataattattgtagaaattagtatttactaagagttgaaaaagcattcagctcttttttttttggcagagctagctgaggttttattttggaccaaaa

SEQ ID NO: 806030 - DNA, 120 bp, Artificial Sequence
  ENSG00000286887_4 (sequence is synthesized)
aaaaaaaaaaaaaaaaaacagttgaattgttttgtagctggaggcatgggcaagggggggtccccaagcagtaaacttccccgcacgtgggctgagggctaggactgagcctcaggtcat

SEQ ID NO: 806031 - DNA, 120 bp, Artificial Sequence
  ENSG00000286887_5 (sequence is synthesized)
ccgtgcttcccagccagcatctgcagctcctcatatttgatctggtacatgctctcagcctcactccggctgcggttggtgatctcctcgtactgcgccttgacctcagtgatgatgccg

SEQ ID NO: 806032 - DNA, 120 bp, Artificial Sequence
  ENSG00000286887_6 (sequence is synthesized)
tccatgtccggggagcggctgttgtccatggacagcatcacagacgtatccgagatctgggactgcagctcccgatctcttcatacagctgcctcaggaagttgatctcgtcagtcagcc

SEQ ID NO: 806033 - DNA, 120 bp, Artificial Sequence
  ENSG00000286887_7 (sequence is synthesized)
cttccagcagaagtcacactatatgacacccaggactcggccttatgagatcgtcagcttccacaggctctcttgaagcactccctgttagaagccggcagccatctaagtctatcttaa

SEQ ID NO: 806034 - DNA, 120 bp, Artificial Sequence
  ENSG00000286887_8 (sequence is synthesized)
gaacatgttactgtgaggatgcccaagctatgtggagagagaaagaggccaatagagatgcactgacaccaaacaagaagctttctcggactttctggctcagctcaaccaccagctgaa

SEQ ID NO: 806035 - DNA, 120 bp, Artificial Sequence
  ENSG00000286887_9 (sequence is synthesized)
tgcagccaaggaaagactcagccaacgtcacagggagcagaaccctccaaatgagtgacactgaattcctaatccacagaatcatgagtaaataaatgacagtagcttttgctcatcaaa

SEQ ID NO: 806036 - DNA, 120 bp, Artificial Sequence
  ENSG00000286884_0 (sequence is synthesized)
gagaactctggggctggtgctagctcctctaggttcagcatgacccacagctaagcagaggagcggaaggatggttatggagagtggaagtcctagacaagaatgaacagtttacagcca

SEQ ID NO: 806037 - DNA, 120 bp, Artificial Sequence
  ENSG00000286884_1 (sequence is synthesized)
cttgtagaactgtctgtctctttccagtatctgaactttgacgatctcaaagggcatctctgggaatttttgagtgtcagcgtgccactcaaagggtggcgggaggggcacctagcagtc

SEQ ID NO: 806038 - DNA, 120 bp, Artificial Sequence
  ENSG00000286884_2 (sequence is synthesized)
agtgcagcaaggcagacaggacccgcatgccagcaccctgcctgtctgatgacactgattccgaaagggcactttctcatctatttcctgctttggaaaagggcactccggtcattccag

SEQ ID NO: 806039 - DNA, 120 bp, Artificial Sequence
  ENSG00000286884_3 (sequence is synthesized)
tcaccgaaacaagagattttggaaattcatgccgggcagagtgctgggcatggggaatttggtggctggcaagacaagccgcttctgtcctcaaggcctgactctgaggccaaaccatca

SEQ ID NO: 806040 - DNA, 120 bp, Artificial Sequence
  ENSG00000286884_4 (sequence is synthesized)
ctgagtcagggcccccagagccctgcatgttgaccaccgtgtggatggacaccatgtggatggcctctttcaacatcttctaactcagctttctcctgcagccagtgagctctctccaga

SEQ ID NO: 806041 - DNA, 120 bp, Artificial Sequence
  ENSG00000286884_5 (sequence is synthesized)
gataagtgcagtcatgcccttaccatctaatacacagcagtttttcatcactgacagaaaatgtacaaccttaacccatcatgacttacagccctccatgtctgatcgtagccccaaaca

SEQ ID NO: 806042 - DNA, 120 bp, Artificial Sequence
  ENSG00000286884_6 (sequence is synthesized)
ctgcatccctgcattgtaccaccagccagccaccttcctcctcccttacccgctgggggatttgcacagtcgctgtagaccccagcctctgtgtgaccactactttgaagacttcctcct

SEQ ID NO: 806043 - DNA, 120 bp, Artificial Sequence
  ENSG00000286884_7 (sequence is synthesized)
tcaccctcttaggaatttagcctttctcacctaatatttgtctccgctcattgaacatgaagtcatggtttctatgctggttgttattctttctgttatttacagtgttttttttgttgt

SEQ ID NO: 806044 - DNA, 120 bp, Artificial Sequence
  ENSG00000286884_8 (sequence is synthesized)
tgttgtttttttttaagaaaagagtgtgttagaaatactttatacacaccacataaacttgaagtctctctgaagaaacgtttatggtttagaaatttatgatacgaggtttaagatagt

SEQ ID NO: 806045 - DNA, 120 bp, Artificial Sequence
  ENSG00000286884_9 (sequence is synthesized)
ctatttcatctgatgttttgcctttttctcatgtcaagtgttacctcactgttatgaatgttgccacactggctttatatagccaccatctatcactcttctgtttgtttagtaaacatc

SEQ ID NO: 806046 - DNA, 120 bp, Artificial Sequence
  ENSG00000286884_10 (sequence is synthesized)
tatctccatctatctgttatctatactctatgaatctattgcctatctgccagtcacctctcatctacctatccatctcaatgtttgttttgactcatttgaaaataagttgtcaacctc

SEQ ID NO: 806047 - DNA, 120 bp, Artificial Sequence
  ENSG00000286884_11 (sequence is synthesized)
acaaccacaagaaaaagaaatcttgcttccatctcaatcccttttgtaaccattgttattgatctcatgtatcttagcaataattctttttttgcaataataagcaaatttgttttctaa

SEQ ID NO: 806048 - DNA, 120 bp, Artificial Sequence
  ENSG00000286885_0 (sequence is synthesized)
cagagcgagactccgtctcaaaaaaaatgactggacaaaaaacactctgatgcaaacaggcaagaaacccagcaaggcctatctggattctccttggcctgtctgcagcattcattcctt

SEQ ID NO: 806049 - DNA, 120 bp, Artificial Sequence
  ENSG00000286885_1 (sequence is synthesized)
cattccttctgggtatggaacaggaccctctggaatgggggctgtggcctacaacagttaaacaagaaatctctctctgggaacagtgtggaagatggattgaaatggtgtaaaattgaa

SEQ ID NO: 806050 - DNA, 120 bp, Artificial Sequence
  ENSG00000286885_2 (sequence is synthesized)
caatgggaatataaaggagaggagacatttgagtgaaattaaggaagcacaatctgcagactgttttcttttttttaagagtcagggtctccctattttgcccaggctggtctcaaagtc

SEQ ID NO: 806051 - DNA, 120 bp, Artificial Sequence
  ENSG00000286885_3 (sequence is synthesized)
ctaggctcaagcgacccacccacctcagccttccaaaatgctggaattacaggggtgaactgcctcaccatgcctcagtctgcagaatttgatgactgaatgtatttggagagagtctgt

SEQ ID NO: 806052 - DNA, 120 bp, Artificial Sequence
  ENSG00000286885_4 (sequence is synthesized)
ggcttggatgactgggtgagtggattgtgatgccgttcatggaaatgaagaaggcagaggaagggagagcaagagggtggaagtggggcagtggggtgctggtgggccatccaagggaca

SEQ ID NO: 806053 - DNA, 120 bp, Artificial Sequence
  ENSG00000286885_5 (sequence is synthesized)
ccagctgttgaatatgttgcatctgtaaagatacagattgatcattcagaaataaagaagagaaaaaaagcaaaagcaaaaaaagttttaaaataaaaaagaatacagattgagagagtc

SEQ ID NO: 806054 - DNA, 120 bp, Artificial Sequence
  ENSG00000286885_6 (sequence is synthesized)
agtagtcggtggctggtcggtgactgggaccagaccgtcgcctcctcccttttacagctttaagtctgtgacccgaggcctctctgtatattcccgtggggttgggcctagttgtcctgg

SEQ ID NO: 806055 - DNA, 120 bp, Artificial Sequence
  ENSG00000286885_7 (sequence is synthesized)
gagaaactagatggatgaggagtatttccgagacaggtcccagggccagcgcagccttttctgttgcagaaccgcgactgttgttttgggatccaggccggagggtttgttgcttgtgtt

SEQ ID NO: 806056 - DNA, 120 bp, Artificial Sequence
  ENSG00000286885_8 (sequence is synthesized)
cattccagttaaccattagtactcgagaaggtggtacagaacgcatctatccccttagaagaaaagaaattaaaagccaaactaaactgggatatatattaatataggaaactaccactg

SEQ ID NO: 806057 - DNA, 120 bp, Artificial Sequence
  ENSG00000286885_9 (sequence is synthesized)
agacataggaaagtgtattaaaatataactagtgaggtgctatgtataattcagaggaaggggaaattatgcatgggccagactactaacaaaaggctccaaagcctgggatacgctgag

SEQ ID NO: 806058 - DNA, 120 bp, Artificial Sequence
  ENSG00000286885_10 (sequence is synthesized)
ggcctttccataacagaaaatgaaaaggaacctaaatttgagactagatttgaggaaaggcacagttgcgctggagtagaaagcgtctgtctaccgcagtggaaagtaagttttcgtaaa

SEQ ID NO: 806059 - DNA, 120 bp, Artificial Sequence
  ENSG00000286885_11 (sequence is synthesized)
tgcagactagctccagggtgaggacagaatctagcttttaaatcagtataatctctcttcttttacatttgaaaatctctgcagcgatatgttattgtatccccagcaccatacaaagga

SEQ ID NO: 806060 - DNA, 120 bp, Artificial Sequence
  ENSG00000286885_12 (sequence is synthesized)
catacaagggccaaatactgtgggaatatttattaatgatattaatgatgatgctgtccgggccaaaggaaaacttccgcttcaccttctgaagtttcgctgaaagtcactgacaggagg

SEQ ID NO: 806061 - DNA, 120 bp, Artificial Sequence
  ENSG00000286885_13 (sequence is synthesized)
cagttaataggagaaaagacatagacattgatttgaccatcgttttatgtgacacgggagccttcagaatgaagacccaaagataacaagggaaatcgtgtatttgtatgcttaggttca

SEQ ID NO: 806062 - DNA, 73 bp, Artificial Sequence
  ENSG00000286885_14 (sequence is synthesized)
agataacaagggaaatcgtgtatttgtatgcttaggttcaacaaagcatggacagccgtataaaaaaatgact

SEQ ID NO: 806063 - DNA, 120 bp, Artificial Sequence
  ENSG00000286885_15 (sequence is synthesized)
gaaggtttgcatctctgtgagaagaaacatcagaagcagttgaaagaccaggatgtgggtcctctggggctgaggaggcattctgaatcaactgtgtgttctacacctgtgttttaactg

SEQ ID NO: 806064 - DNA, 120 bp, Artificial Sequence
  ENSG00000286885_16 (sequence is synthesized)
agagaaaaaaaaacagagatggagaaggaatagttagtgaggtcggtaggaaagtaggattgagtgggaagagagactttccataagaaaggagtcatgttagggttttccagagaacca

SEQ ID NO: 806065 - DNA, 120 bp, Artificial Sequence
  ENSG00000286885_17 (sequence is synthesized)
tgtgtgtgtgtgtgtgtgtgtatatgggtgtgcgtgtatgtatatgtgtatatatatgggtgtgcgtgtgtatgtgtgtatatatatgggtgtgcgtgtgtatgtatatgtgtgtatata

SEQ ID NO: 806066 - DNA, 120 bp, Artificial Sequence
  ENSG00000286885_18 (sequence is synthesized)
tatatgtgtgtatatatgggtgtgcgagtgtatgtatatgtgtatatatgggtgtgcgtatgtatatgtgtatatatatgggtgtgcgagtgtgtatatgtatatatatgggtgtgcatg

SEQ ID NO: 806067 - DNA, 120 bp, Artificial Sequence
  ENSG00000286885_19 (sequence is synthesized)
tgtatgtatatgtgtatatatatgggtgtgcgtgtgtatgtatatacgtatatatatgggtgtgcgtgtgtatgtgtgtgtatatgagtgtgcgtgtgtgtgtatatatgggtgtgcgtg

SEQ ID NO: 806068 - DNA, 120 bp, Artificial Sequence
  ENSG00000227818_0 (sequence is synthesized)
actaatggtggctgtgggcactgccttgctgatctgggttctcttgaggctaactgtgcagaacacttctagaataaatgaagatcatgtaacaaatagagatggtagtgctgtctgaag

SEQ ID NO: 806069 - DNA, 120 bp, Artificial Sequence
  ENSG00000227818_1 (sequence is synthesized)
ctacagacagaaatgttgctaccctcaaagtgccacagcatgaacagaagacttgtctcacagaagtcaacagtcattgaggagatgcatgtagacatggagcagaacccctgtgtggtg

SEQ ID NO: 806070 - DNA, 120 bp, Artificial Sequence
  ENSG00000227818_2 (sequence is synthesized)
ggctgcagactgcttcctccaacctccctgccccatccccacacaaaaagataaccaaatcctaatctctggaacctgtaaatgtttccttattttgaaaaagagtcattgcagatgtga

SEQ ID NO: 806071 - DNA, 120 bp, Artificial Sequence
  ENSG00000286883_0 (sequence is synthesized)
ggcgaccaccgtccggttagcgacacctgccagccagcgcctgcgcctccgcctccgcctcccgccggaagtcccgccccgccacgttaggttaagtcccagagtccggaaccgctgcct

SEQ ID NO: 806072 - DNA, 120 bp, Artificial Sequence
  ENSG00000286883_1 (sequence is synthesized)
gcggcttgacacagggttgcgaccagtatcagcgcccggcttgtccccgctgcccgccgcgtccctggcccggatgtgggaggcgaaggcggtgagcatttccagagcggtgagatgagc

SEQ ID NO: 806073 - DNA, 120 bp, Artificial Sequence
  ENSG00000286883_2 (sequence is synthesized)
gccgcgcataatcaggcgatgcccgtctcctggggaagaaacaaacgagtgagacagggagggaccgcagtgctggggcttaggggcgcgcgggctgctcgctgttccctcctgcccgtc

SEQ ID NO: 806074 - DNA, 120 bp, Artificial Sequence
  ENSG00000286883_3 (sequence is synthesized)
tccaccaagcccaccgaacagcacgtccacgcagggctcggagccgtcatgcctcacgtccgcaatcactgagcagttgagattagtggagcggaccttctcactgctcaccgtctgcag

SEQ ID NO: 806075 - DNA, 120 bp, Artificial Sequence
  ENSG00000286883_4 (sequence is synthesized)
aaacagaggagcgccaagctgagggcttaaagccccggctgaaggaaggcgcaccacttcccgcttctacccacttccccttcgtacctcgtcgattccacgtttttctcgaagggacag

SEQ ID NO: 806076 - DNA, 120 bp, Artificial Sequence
  ENSG00000286883_5 (sequence is synthesized)
aactgaacccgaacctgtttgacaggccgcagaccaagccgagccaaggcagctgccatggtgacctccgccccggaagaactcgtgcaggcggaagtgtcgcattgcgtgaggccgtga

SEQ ID NO: 806077 - DNA, 120 bp, Artificial Sequence
  ENSG00000286883_6 (sequence is synthesized)
atggctgcgcttctgcgggatagacttccggccgccggctgcttagcaggcctgcgaaccgcagctctgggcttcctagcccaggcggaggaaggcaggaaagaaagaggtggtttcggc

SEQ ID NO: 806078 - DNA, 120 bp, Artificial Sequence
  ENSG00000286883_7 (sequence is synthesized)
acaacgcatgggggagcccaaagtaggctgtcagcaaatacagcctatcatgaatagtcctctcatacgacggtgaaaaccataaataaatggcgcaaaaacctctttgcacgaaaatac

SEQ ID NO: 806079 - DNA, 120 bp, Artificial Sequence
  ENSG00000286880_0 (sequence is synthesized)
ggggaggcctccctgcacctccagaacacccgtgcaaggacccggacagtaccgtgtagcgtgagaccttctgccacagaggcccctgctgcccatcaccgcctgtttctgggtgtcgat

SEQ ID NO: 806080 - DNA, 120 bp, Artificial Sequence
  ENSG00000286880_1 (sequence is synthesized)
ttcctgcctggacccagacaaggacatggatatgaagggaagaaggactcagctccgtggacccccgccccccaccgccactgcgtggccacgctggcctcgaccgtgctgaccagagcc

SEQ ID NO: 806081 - DNA, 120 bp, Artificial Sequence
  ENSG00000286880_2 (sequence is synthesized)
agcaggggtcaggattcacccaggaatgacgggcccgaggccgctagggttccagtgcccgacagaagacagagttctgcacgccggccagtgaacacagaccagaagcagtaagggaac

SEQ ID NO: 806082 - DNA, 120 bp, Artificial Sequence
  ENSG00000286880_3 (sequence is synthesized)
aggaagctgggggtaatgggcacgaagtcagagacagagatgcccgtgggttccgctttcattgttgaaaatgcttctgacttccatttccctgacctcatctctgccccagcaccagag

SEQ ID NO: 806083 - DNA, 120 bp, Artificial Sequence
  ENSG00000286880_4 (sequence is synthesized)
gcgccccaaaattaatgcacaccccaaaccaatgctccttccaccaggtgccgctccagctttctgcatccaaggaaacagctccatgattcaggcttacaccctcgggtgcccttccct

SEQ ID NO: 806084 - DNA, 88 bp, Artificial Sequence
  ENSG00000286880_5 (sequence is synthesized)
cgggtgcccttccctgctgtttctcttgcctcccacatcccagccatcagcaaatgctgacaattctaccttcagaattgttcccagg

SEQ ID NO: 806085 - DNA, 120 bp, Artificial Sequence
  ENSG00000286880_6 (sequence is synthesized)
gagttcaaggccagcctgggcaacatagagagacccccttctctggaaaacaacagaattgatcctgaagcttttaaggaacaaacagcaccaatcctacccaaactctttcagaaacta

SEQ ID NO: 806086 - DNA, 120 bp, Artificial Sequence
  ENSG00000286880_7 (sequence is synthesized)
gaggaggaaggaacacttcccaatgtgttttatgaggccagcgtaaccaaaacacattactgaaaatcaaaggccaatatccctcatgaatatcgatgcacaaatccttaatattaacaa

SEQ ID NO: 806087 - DNA, 120 bp, Artificial Sequence
  ENSG00000286880_8 (sequence is synthesized)
attgaatccagctgtctataaaagggattctccatcatgaccaccaagtggggtttatcccaggaatgcaaggttggtttaatacccaagaatcaatgtgattaaccacattagcataag

SEQ ID NO: 806088 - DNA, 120 bp, Artificial Sequence
  ENSG00000286880_9 (sequence is synthesized)
agaggaaaaccatatgatcatctcagtagatgcagaaaattcagcactcacttggacaaaattcagcattcatgcagattaaaaacacgcaactaggaatagaatggcatatcctcaacc

SEQ ID NO: 806089 - DNA, 120 bp, Artificial Sequence
  ENSG00000286881_0 (sequence is synthesized)
ggcgccccggcccggagcccgagagccctcgacgcccccgccgcgcctcccccgcctggcctggcccagcggcgtccccagcgaattgtgtcgcttttctgccctggaagctccctcggc

SEQ ID NO: 806090 - DNA, 120 bp, Artificial Sequence
  ENSG00000286881_1 (sequence is synthesized)
tgcgtgctgccgggcacattctctgccctctcgtccgaaggacgagtttaaaatggagagtttaaaataatagcatttacaggaggaaataaagagcgaggagatggttctttggccggt

SEQ ID NO: 806091 - DNA, 120 bp, Artificial Sequence
  ENSG00000227811_0 (sequence is synthesized)
ctcagtaacaggcagagtgccatagtgtcagtcccttttcccaaactccgatcaggaagggaaacacccccacccactccgctcccatccccagaagtccctcagaagctcttttctccc

SEQ ID NO: 806092 - DNA, 120 bp, Artificial Sequence
  ENSG00000227811_1 (sequence is synthesized)
cgaagaggaccctgggaaggtggctcccgcctcactcctagagtgaaatcctcgcagccctgccctcgcgggcggagcagagacgccgccgcttggccggttcacgcctgtcacacaaag

SEQ ID NO: 806093 - DNA, 120 bp, Artificial Sequence
  ENSG00000227811_2 (sequence is synthesized)
ccgccgagggtcggctgcgcccctggcaaggctgtagggctggggatactgagtatgacaggcgaggtccctgctctcaagaacttacatgggagagaaggggagacaagataaacaggt

SEQ ID NO: 806094 - DNA, 120 bp, Artificial Sequence
  ENSG00000227811_3 (sequence is synthesized)
aaacacacacacacacacgatggagcaactcaacccaaaaaggttggtctgtatggtgacggaatgtggtctcccagttttcagcacagcactcattcagctattctgctcttcagaaag

SEQ ID NO: 806095 - DNA, 120 bp, Artificial Sequence
  ENSG00000227811_4 (sequence is synthesized)
caggagggatgtgccctaaggtggactattgaaatgatgaaagccactgaggaagagccagagaattctcgtagctgtgattagacatcaaccttgggcatgctaaacatttcagcctgg

SEQ ID NO: 806096 - DNA, 120 bp, Artificial Sequence
  ENSG00000227811_5 (sequence is synthesized)
acaccctgagaagagccagtgccactggtgacagctgcttctgtgcgggcttttgcttggccagagaggcaggaccttctccctggcattttgaggagtggtgccgggtgggcagtgact

SEQ ID NO: 806097 - DNA, 120 bp, Artificial Sequence
  ENSG00000227811_6 (sequence is synthesized)
gcactagcaacagtctataccaagagaagacctcaaattcccagagaagaaaggcagcgaggccaagaaatgctgccgccgcttaacaagtgaagatgcatactggagaataggaactga

SEQ ID NO: 806098 - DNA, 120 bp, Artificial Sequence
  ENSG00000227811_7 (sequence is synthesized)
acacgcgaaggagtttcggctttactgccttctctcctagcattgaacagatcttctctgctgttgattattctccatgaatcatcatccatagaaagtgactgaggcaatagagagtga

SEQ ID NO: 806099 - DNA, 120 bp, Artificial Sequence
  ENSG00000227811_8 (sequence is synthesized)
ataatgaatctctcaaatagtcttttgtgtttctgcctggagggttttggaaataacttgcatcttaatctttctgacttagaatcatagaatttgggagctgaaaaggaccttcatcag

SEQ ID NO: 806100 - DNA, 120 bp, Artificial Sequence
  ENSG00000227811_9 (sequence is synthesized)
ctaacatatattggaggctttccttgtgtcaggtactcatttattcttccaaaaccttgggaggtaggtgctgctattcctccattctgcagaggaggaagagatgaggagacagtagat

SEQ ID NO: 806101 - DNA, 120 bp, Artificial Sequence
  ENSG00000227811_10 (sequence is synthesized)
caccagagggcagtgtgaggggtgtgctggaaccatcatgtggaactggctctggttccagaatccacatcctctcggtcattccactcccacatcaagtggctttggacaagtaattta

SEQ ID NO: 806102 - DNA, 120 bp, Artificial Sequence
  ENSG00000227811_11 (sequence is synthesized)
acttctttggatctcagttttctcctccgtgatctctaaagtttaaaaattactaacagtctgcatctgccacccaagcatgtgattttacaagtcagaaaagtgtagcgcagaaatgtt

SEQ ID NO: 806103 - DNA, 120 bp, Artificial Sequence
  ENSG00000227811_12 (sequence is synthesized)
aagtgacctgccctaggtcacccaggttgctaagggcagaatcagcacagaaacccaggcccagtgaccactgcccccaggcaagacctccttcccttccactgcactttggcaggtgtt

SEQ ID NO: 806104 - DNA, 120 bp, Artificial Sequence
  ENSG00000227811_13 (sequence is synthesized)
ctaggggaatccaactccttgccttagaggagacctgttcaatgatatcagatagactggagatgttacgttttggtgtggccaatcacaacaccaggatgagcttaggaggctggtgat

SEQ ID NO: 806105 - DNA, 120 bp, Artificial Sequence
  ENSG00000227811_14 (sequence is synthesized)
atttgtctatctaagcacccccaacctatctatctgtctgctgtttgtctatctttctcaggttatgcatagtgaccaaaccccgcctggtaactgtagggaaagagcatgactggtgtg

SEQ ID NO: 806106 - DNA, 120 bp, Artificial Sequence
  ENSG00000227811_15 (sequence is synthesized)
ttacagctacacacgccccctggtggtatttccagttgtttgtcctcttcatgcaaatgttgccaccttgtgccagctctctcacctagcttccttcatgacgacagtggttgcaattct

SEQ ID NO: 806107 - DNA, 120 bp, Artificial Sequence
  ENSG00000227811_16 (sequence is synthesized)
gctcctctctctgccttcccctgtccttggctccccatgtccagaatctgatcatttactggtgtgcaccctgggatgtgatgtgtgctttgggaggagacaggacccaacagtatctca

SEQ ID NO: 806108 - DNA, 120 bp, Artificial Sequence
  ENSG00000227811_17 (sequence is synthesized)
gctgtgctctggtaatcagtgtgcaccacattacaagcatcctcatcccagtatcctccctattgaaaaagaaatgggaaaggggtggatgtgtcaataaacacaacattgaaggcatct

SEQ ID NO: 806109 - DNA, 120 bp, Artificial Sequence
  ENSG00000227811_18 (sequence is synthesized)
ggcgaggacacacctggtcccggccagcgcggcggagggcatcgtgactccaggctgtaccgcggcccccaacgaagcacgtgaccctcgtgtggtcataaagggagagcacagttttac

SEQ ID NO: 806110 - DNA, 120 bp, Artificial Sequence
  ENSG00000286888_0 (sequence is synthesized)
tgttgttaataaaaaaagaagaaagaagattttcatctaaaatgagaaaagaggagagaaaacagctgcatttatgcaagatgctccccactagatcatcactaaaatgaaagtaaagga

SEQ ID NO: 806111 - DNA, 120 bp, Artificial Sequence
  ENSG00000286888_1 (sequence is synthesized)
atgaaagaggagaggtaggagaggaaaaaacaatctgtgagaaataacaacatatatcagaagctggaaagtgcatggagtagagctcagtgacacaacagagcagaaaaagcagaagca

SEQ ID NO: 806112 - DNA, 120 bp, Artificial Sequence
  ENSG00000286888_2 (sequence is synthesized)
gagaggaatgagcgtacaaagcaagtctgaatttaccctggagaaccccacaaaggcttgaaacttggaaacatcatgaactgctgggccagaggtgaggatccagatgaaaatcaaaag

SEQ ID NO: 806113 - DNA, 120 bp, Artificial Sequence
  ENSG00000286888_3 (sequence is synthesized)
aattaactgaaagtctgaactagaacagtaagacttctggatgtctccacctctcgctgcccaaagacagctcctttcctctcctccacagagaccagaggtttagtctcaaacactgag

SEQ ID NO: 806114 - DNA, 120 bp, Artificial Sequence
  ENSG00000286888_4 (sequence is synthesized)
ggtaccagtgagaagggagtggaggagtgaggcatcaggttgaaatcagagtggttaggggagagtctagactgaatagtcagacactgcctacctgcttcagttcctgacttgtgtcta

SEQ ID NO: 806115 - DNA, 120 bp, Artificial Sequence
  ENSG00000286888_5 (sequence is synthesized)
gggtattccatcctttgtccactaacacacacaggagatcagaaaattcttctatggagaaatggaattgcagaaaactgctacagatattggcatcctgaccatgtactggcctcccca

SEQ ID NO: 806116 - DNA, 89 bp, Artificial Sequence
  ENSG00000286888_6 (sequence is synthesized)
ctacagatattggcatcctgaccatgtactggcctccccaattaaaaacccaatttggctgggcacagtggctcacgcctataacccca

SEQ ID NO: 806117 - DNA, 79 bp, Artificial Sequence
  ENSG00000286888_7 (sequence is synthesized)
gagtgagactcggaaaaacccaatttgcctccaaactaccctgcagtgaggctttctactcttattttagtgacccatt

SEQ ID NO: 806118 - DNA, 120 bp, Artificial Sequence
  ENSG00000286888_8 (sequence is synthesized)
cctgcagtgaggctttctactcttattttagtgacccattctcaaatatgaagtatcactagatacctgagaaatgagtgaaaaacaccagataaaaaggaactcagaagaaacaaaggc

SEQ ID NO: 806119 - DNA, 120 bp, Artificial Sequence
  ENSG00000286888_9 (sequence is synthesized)
aatagagaaagcaaaaaaaatttaaactttttctgttaatacctttagatacataaggcaagatcttgagtgtatgaaaaagaataagattacataacaaggagtaataaggaaaaaaaa

SEQ ID NO: 806120 - DNA, 120 bp, Artificial Sequence
  ENSG00000286889_0 (sequence is synthesized)
atacccacaagcacctggtcagaattgagcagcccgacaggaaccttcctgccctgacccccagcaaacagcggtaagagggatttgccacgaccttccaggaaatcaggtgctaatgat

SEQ ID NO: 806121 - DNA, 120 bp, Artificial Sequence
  ENSG00000286889_1 (sequence is synthesized)
agagatcaaagtggaaggaaaggagtgaattctccctccaggtgccatagatgacatctttttagatggatcttttgtttcgcctttaaggtaagaaatgaaaggggtggctgatgcatt

SEQ ID NO: 806122 - DNA, 120 bp, Artificial Sequence
  ENSG00000286889_2 (sequence is synthesized)
tagatgaaacacaaacaagcatgtttgattgtttgatttgtttgaaaagttgtcagctttataaccatgtggctgattttcttgaaggacagagcctatacctgcccctctgcctagccc

SEQ ID NO: 806123 - DNA, 120 bp, Artificial Sequence
  ENSG00000286889_3 (sequence is synthesized)
tacctacaaccaaatgaacactttaagtagcctccatgctctgtgggtggttgccttaggatttgatttccttcctgcataactgttagggaaacacattttctcagaaataaatcccca

SEQ ID NO: 806124 - DNA, 120 bp, Artificial Sequence
  ENSG00000286889_4 (sequence is synthesized)
ccataagtgtatatatgagttgagcctgtaaagttatgagatgggatttttcttgtggtttgtggaatcagttttagaagctgaggaaacaacggaggtgatttaggctgcccagatgga

SEQ ID NO: 806125 - DNA, 120 bp, Artificial Sequence
  ENSG00000286889_5 (sequence is synthesized)
taagttgtaagagaatttatgtgatgctgagatatgtgatagagttgagatgatgtaaatgaagagattttggaaagtagaaagcactacataaagatattccaactcagagtggttaat

SEQ ID NO: 806126 - DNA, 120 bp, Artificial Sequence
  ENSG00000286889_6 (sequence is synthesized)
aatcactatgttattcagcacattgactaggaattaaattattttatataagccttgtatttcaggttaaatgttatccaagagagcattttaggaagtgatttctatttcatctggagt

SEQ ID NO: 806127 - DNA, 120 bp, Artificial Sequence
  ENSG00000286889_7 (sequence is synthesized)
agtcttctggttttcattatgattttaatattattgacaatgcatatttgttttagctgaggaggatgtacacagtgtaacttgtacctttttccagagctgttgcaatgttctacaggc

SEQ ID NO: 806128 - DNA, 120 bp, Artificial Sequence
  ENSG00000286889_8 (sequence is synthesized)
aagcattaattcaactttgctaatggatataaaggcacagaaaagttgagagtgcttcttgatgtcacacagcaaggcagcagcaggataaggttaggacacagaagccttgaccttcag

SEQ ID NO: 806129 - DNA, 120 bp, Artificial Sequence
  ENSG00000286889_9 (sequence is synthesized)
ttatgtgctcacaactcttgaacattccctcttttactgaacattttaaaatgttgtatttatacttcaataagggcctaattaaataaattagagctcaattttcagcttataaattct

SEQ ID NO: 806130 - DNA, 120 bp, Artificial Sequence
  ENSG00000286889_10 (sequence is synthesized)
tctgaactgaactccaagtagagccaggaaatgatcacactagctaatagatacagcataaggaatcatgctattgtgcttattaatatatggctgacaatgaagataatcacaagttta

SEQ ID NO: 806131 - DNA, 120 bp, Artificial Sequence
  ENSG00000286889_11 (sequence is synthesized)
tttatttacttttcattaaaagtttctcatataactctgtaataccagatattggtatattcatattctgggaacacatacgtttaagtgtcattctgctttttagcaatgatttttaat

SEQ ID NO: 806132 - DNA, 120 bp, Artificial Sequence
  ENSG00000286889_12 (sequence is synthesized)
gtccaaatgcccagatatttctttgggatgtgcgttcagaatcttgaaaagtgaatttgtaggtagttgtgaacatggaagtaaggtagcattgggagttgatgtctgaggaaggtatct

SEQ ID NO: 806133 - DNA, 120 bp, Artificial Sequence
  ENSG00000286889_13 (sequence is synthesized)
ttaggaaaatggcatcaccaactctggctgcaaatatatttttattgttgcttgtgatgcaattgtcctggacagaaggaatttctatttacactcaccaaagagactgtagcagagaat

SEQ ID NO: 806134 - DNA, 120 bp, Artificial Sequence
  ENSG00000286889_14 (sequence is synthesized)
aacaggggtactgagtactaactaaccaagagatcttatttgtatttatttatttacttacttacttatttgtgggcaactggcatagtttgttatcctgtagggaagttctgtcagtta

SEQ ID NO: 806135 - DNA, 120 bp, Artificial Sequence
  ENSG00000286889_15 (sequence is synthesized)
tcaatgtgtttgctctactttcatgaatgagtatacaacattcaaagcattcaaaattaacatggccatttttatattattattcgtttaagaataaaaacaataaagtaaaataacaat

SEQ ID NO: 806136 - DNA, 120 bp, Artificial Sequence
  ENSG00000286889_16 (sequence is synthesized)
aatgaattgatgtcactgacactatttggcagggatggggtggggcaagaacccatctggttgaatgagggtaatgttacattattactttgaaatattaacagaaaagtttgggggata

SEQ ID NO: 806137 - DNA, 120 bp, Artificial Sequence
  ENSG00000286889_17 (sequence is synthesized)
attaggtacacactgcagaaaactctctggattctataaacaactatatgttatactactttgaagcatcttgcattatatttgtcattgaggaagaggaaattattataaattatgtgt

SEQ ID NO: 806138 - DNA, 120 bp, Artificial Sequence
  ENSG00000286889_18 (sequence is synthesized)
aactttaaaatagcttcaaacacaactagtaatgatataagtaaactaagctgaaataaaataaaattgtatatttacatacatgcatacatacatatatttcttctcttaggttgagtc

SEQ ID NO: 806139 - DNA, 120 bp, Artificial Sequence
  ENSG00000286889_19 (sequence is synthesized)
agtcatctttttgaaatgttaccttctaaatcatactaagaacagcatatctttaggttatggtttattcttaggaaagttacaagttacattggttttaaaaatataatattccctttt

SEQ ID NO: 806140 - DNA, 120 bp, Artificial Sequence
  ENSG00000286889_20 (sequence is synthesized)
tcatttcacttccactagctaataataccaaagtatataaatgcccatgtttcaatccttaaaatactgttgcctcaaatgaactccaaaatatacacatgtctatgctatcaatcaaag

SEQ ID NO: 806141 - DNA, 120 bp, Artificial Sequence
  ENSG00000286889_21 (sequence is synthesized)
atgaaaatgttggtattgataggccctactccaatgtatttgaaacttatcacaattacatttttaaggtgtttgcatctcattgaacacttgcattctaatcaatagtctctcaaaacg

SEQ ID NO: 806142 - DNA, 120 bp, Artificial Sequence
  ENSG00000286889_22 (sequence is synthesized)
tgtcaacagtattgatatgtattttggtcctacgtgctgctcggaatttgggaagcacttatttgactgtgaaatggcaaattggtgcggttacttttgtgaaccttttcgtatgccttc

SEQ ID NO: 806143 - DNA, 120 bp, Artificial Sequence
  ENSG00000286889_23 (sequence is synthesized)
tcatttccaatacaacaaatgcttgtatgtcacacctgatgtagcgaaagatccaaataagactctttaagttttcaatgtgactgtcatgaacataataatgtgttattctttctgctt

SEQ ID NO: 806144 - DNA, 120 bp, Artificial Sequence
  ENSG00000286889_24 (sequence is synthesized)
cattcacaactctgtagattgagggatcagaatttagctggacaagatgcatacaatatatgagaacacaatttaatttgtactacattgactctacactgctgactaaaaaaaaaaaaa

SEQ ID NO: 806145 - DNA, 120 bp, Artificial Sequence
  ENSG00000286889_25 (sequence is synthesized)
atcaactgattcacatgttaaattcatttatccaaaataaaaatgcacagtgaggccaaaagaaaaaaaatgcttaaaaaagattcaaaacgttaaacaaattgcttttaattataataa

SEQ ID NO: 806146 - DNA, 120 bp, Artificial Sequence
  ENSG00000286889_26 (sequence is synthesized)
aaactgcccaggttcctctaacttgtcacttcaaacataattattaaggtcatctgtgctgcctaaagaagaaaagtatatcaaaattactgagatcagctcctgaattgagcatgaaaa

SEQ ID NO: 806147 - DNA, 120 bp, Artificial Sequence
  ENSG00000286889_27 (sequence is synthesized)
cttagactctgactgtccaaccaaactagccaattctgaaagaatgccaaaatcagttgagagcaacaattaattaaacaaatatttgaacaagtactaaaaactcttcttttggatgga

SEQ ID NO: 806148 - DNA, 120 bp, Artificial Sequence
  ENSG00000286889_28 (sequence is synthesized)
ttttttcatattgttataatggtagggttcttgatacaaccttagtttctgatttttctaaatatgctagtgagcactatggctttgcaaaacccagtatccatcacataccaaggaggt

SEQ ID NO: 806149 - DNA, 120 bp, Artificial Sequence
  ENSG00000286889_29 (sequence is synthesized)
ataaatccttggtccccacctaggatgtagactatcctcaagaaccagagctatgaatcccagtgcatttttagatgaggtggaggtggctatgcagcaatcctgatggtttgatgcact

SEQ ID NO: 806150 - DNA, 120 bp, Artificial Sequence
  ENSG00000286889_30 (sequence is synthesized)
actcacctttgatgtcaaaccctacatattagctaaggtatttcatcaaatgctccaactttaatggattttctccctttccaagacaagttttgagaataacatcttctgttttgcaaa

SEQ ID NO: 806151 - DNA, 120 bp, Artificial Sequence
  ENSG00000286889_31 (sequence is synthesized)
agcctggataggtttaaaaaatatccatttgcttatgttagctttttgcttttcatagcaaattctctatggcaagtatatcatctagatgactctgagtgtatgagtgtgtgtgtgcga

SEQ ID NO: 806152 - DNA, 120 bp, Artificial Sequence
  ENSG00000286889_32 (sequence is synthesized)
gtgtgtgtgcgcatgtgtctgtgtgaatgtgtgtatgctcacagacagatattttaaattactcttttcctcaaattctaagaaatcagaagattaaatgatttaattatatagcctcct

SEQ ID NO: 806153 - DNA, 120 bp, Artificial Sequence
  ENSG00000286889_33 (sequence is synthesized)
atttccccaaatcttataaaatgtcaacatctcctatttggtctttgcaaacttgatctctctcatccttaacccatttatgaacatgtctattttgcttggaccttttggagctgacca

SEQ ID NO: 806154 - DNA, 120 bp, Artificial Sequence
  ENSG00000286889_34 (sequence is synthesized)
tagtcacacaaagaacctgtttcttcggttagacatgcttttttacatgctggtaattattaggtgataagagattaaattagagaagtaaaaagatgaagtttggctagaaaggtgttt

SEQ ID NO: 806155 - DNA, 120 bp, Artificial Sequence
  ENSG00000286889_35 (sequence is synthesized)
tgttctgtttatttattttaattttatggaaattaaaaggtaccaacgactcatttcgtgctccttaacattgtggactgccttactggagggttttcccttgttctcacattacacaca

SEQ ID NO: 806156 - DNA, 120 bp, Artificial Sequence
  ENSG00000286889_36 (sequence is synthesized)
tgcacatacacgcacacacacacaaactagatgctcagttactatttatagactatcatctgccagggtctttgaaatttctgttttgcattaaagacaaagaattcctctttctgactg

SEQ ID NO: 806157 - DNA, 120 bp, Artificial Sequence
  ENSG00000286889_37 (sequence is synthesized)
ctcattgagggtttcctgatacaagaacataattaactctttgctggcctaactaatttctgcattttaaaaagtagccagatatgacaaaagtggagcactcaatccacagggtggcca

SEQ ID NO: 806158 - DNA, 120 bp, Artificial Sequence
  ENSG00000286889_38 (sequence is synthesized)
ttaactgcactccgttactgtatgttctcaattcagaccacaattactgtcagggaattgcactggaagctccttcttgtacgcaaacaggaatactattcattaaagagcactttcaat

SEQ ID NO: 806159 - DNA, 120 bp, Artificial Sequence
  ENSG00000286889_39 (sequence is synthesized)
aaaatacaatctatattttttaatgaatatttgagaaagaaaatacaatcttgggttcagaaacctgcaatatggttattattcttttaataacatagactttctcatgtacatatactg

SEQ ID NO: 806160 - DNA, 120 bp, Artificial Sequence
  ENSG00000224027_0 (sequence is synthesized)
attactggggcccggacacattattttctccaaggaatttcttcttttcattatttccctccaaagttctagaggccagaaccaaaatcaagatgctggaagagctgtgctttgtccaaa

SEQ ID NO: 806161 - DNA, 120 bp, Artificial Sequence
  ENSG00000224027_1 (sequence is synthesized)
gggcccagggaggacgctttctggcctctgccagcttacgatgactccaggcattccttggcttgtggccacatcactctagttccacctccatctttgtgtagctttctcatggggagc

SEQ ID NO: 806162 - DNA, 120 bp, Artificial Sequence
  ENSG00000224027_2 (sequence is synthesized)
cagaggaggagagcgaggcccatgtcctgtcctcgtggggtgctcagctgcagcagcccggagccctgaggtggccacgaactctggccagggggtggcaggggcactgtatgcgttgta

SEQ ID NO: 806163 - DNA, 120 bp, Artificial Sequence
  ENSG00000224027_3 (sequence is synthesized)
gggcctgtttgggaagacattgaagagtaggcgccgatggggacactgagcctcagagagaagaacgatgtggccagggtcccgcagcgaggatgcggcagaatcaggattggaacccag

SEQ ID NO: 806164 - DNA, 120 bp, Artificial Sequence
  ENSG00000225527_0 (sequence is synthesized)
aaatattctctgtatgtggtccagcgtggcagcagctaatgggctactgagcacttgaacaggcgtgtaaatttttaaaatttaataaataggcagaagctactattactaggcagcata

SEQ ID NO: 806165 - DNA, 120 bp, Artificial Sequence
  ENSG00000225527_1 (sequence is synthesized)
gaattccatgagacttttatgctagcaaatgtggatttacaattaccttttaattcctcttaggccgttggattcttgccagaagcttcctggagataattttaactagtaccttattga

SEQ ID NO: 806166 - DNA, 120 bp, Artificial Sequence
  ENSG00000225527_2 (sequence is synthesized)
agaaaagttgtcctagctaatgaaagaatgcagctcagcatcttgaagacggggcaagccttcctcatctccccacatcccacagtttcttatacccactgaattaaactgaaaaatgaa

SEQ ID NO: 806167 - DNA, 120 bp, Artificial Sequence
  ENSG00000241135_0 (sequence is synthesized)
attcgtgcaatgttttgagaagtagaaagtgctaggcacgtaggcgttcaggagacagtcacggtactcgtttccagacagaagtcatgaggaacaagagggaaggtgctttcccgtgtg

SEQ ID NO: 806168 - DNA, 120 bp, Artificial Sequence
  ENSG00000241135_1 (sequence is synthesized)
cagcgcttggggagactcacacagacagaggatctggcatgacagggaaaggaggaaatggcttctgttaatctctccttcagcttctcccgcccttcccatgcactcttcctgtttccc

SEQ ID NO: 806169 - DNA, 120 bp, Artificial Sequence
  ENSG00000241135_2 (sequence is synthesized)
tttccagttctcacggtgactcaagttctctgtaaaaatgtggcctatcttgcactggatggaagacaaggaagagattctcagtcaaacctgcctggtttcctcaaactctgtttaata

SEQ ID NO: 806170 - DNA, 120 bp, Artificial Sequence
  ENSG00000241135_3 (sequence is synthesized)
caaatgccaaagtttgacacattctaaccactttgctttctttggcaactccaactttgacaagagagtaagaatgtctcctccttgacaggaacaacgtgtgaaatgaaagacctcagg

SEQ ID NO: 806171 - DNA, 120 bp, Artificial Sequence
  ENSG00000241135_4 (sequence is synthesized)
gcctgttctgttcagtcctggtgcaggtggtcctggacaacactttgaaaaatgctggggcagaaacaagccagcaagcatatgggattcatctgctgtgagtgataatttatctagttt

SEQ ID NO: 806172 - DNA, 120 bp, Artificial Sequence
  ENSG00000241135_5 (sequence is synthesized)
ctaaaaatagtgttataggctggactgtgtccccttcctgtgccccgccgccatgcatatatggacgcctagtacctcagaatgtgactgtatttggaaacagggcctttgaagaagtaa

SEQ ID NO: 806173 - DNA, 120 bp, Artificial Sequence
  ENSG00000241135_6 (sequence is synthesized)
ttaagttaaaatgaggtcattagggtgggcagtaatacagtataactggtgtccttataagaagagattaggacacagatgcacacagagggaagaccatatgaacacagagggagaaga

SEQ ID NO: 806174 - DNA, 120 bp, Artificial Sequence
  ENSG00000241135_7 (sequence is synthesized)
atgaacacagagggagaagacagccacctgcaagccacagagagagcccttcaaagaaaccaaccctgcagacaatttgatctcaggtttctggcctccagaattgtgagaaaataaatt

SEQ ID NO: 806175 - DNA, 120 bp, Artificial Sequence
  ENSG00000241135_8 (sequence is synthesized)
actactagttggatggccttagtgaagcagttaaccgctccatgccctagctttctggtctgcaaaacggagataaaaataggctagggtcgtgggatttaaatgagataaggtgcacat

SEQ ID NO: 806176 - DNA, 120 bp, Artificial Sequence
  ENSG00000241135_9 (sequence is synthesized)
taatctggcataatttaagttttaagtcccattttatcataggggttcccctcccctttacctaggtgtgataggcacaagaaaaaggaatggagttaagtggataagtgactaaggtgt

SEQ ID NO: 806177 - DNA, 120 bp, Artificial Sequence
  ENSG00000241135_10 (sequence is synthesized)
cacattggagtagtgtggatcatagatctcagagctgaagatcatctaggtggactccctcatattaaagaagaagcagtgaaaaactgtgaaaggcaaaatgacatcaagtttcagact

SEQ ID NO: 806178 - DNA, 120 bp, Artificial Sequence
  ENSG00000241135_11 (sequence is synthesized)
caagttggagccatggtgttctgtagcaccatagttcattcatccactcatacacactactctgggtggatatctgatatactgccaggtacaaggttctgcctcagtaggcagggaaag

SEQ ID NO: 806179 - DNA, 120 bp, Artificial Sequence
  ENSG00000241135_12 (sequence is synthesized)
atagaaatccgggaggattctcgggttctttgtgcagcttcatggatgttgataccatttactgtgattgcaagtagaggaacagaaatggacctgagaggaagatggcatgttttgaac

SEQ ID NO: 806180 - DNA, 120 bp, Artificial Sequence
  ENSG00000241135_13 (sequence is synthesized)
atgggtttgaggtggctgtaggacatccaggtggagacctccaggaagagttaggaacatgagttccaagcacaggagagaggcctggaggtgcccactggggaacagtcaacttaaaga

SEQ ID NO: 806181 - DNA, 120 bp, Artificial Sequence
  ENSG00000241135_14 (sequence is synthesized)
tggtcactgaagccaaggcagggctgggatggcccagaagagcaggcagaatgaaaagactatgaaagcatgaaacccaaacctgacagataccagatcctaaggatcaaataagagatc

SEQ ID NO: 806182 - DNA, 120 bp, Artificial Sequence
  ENSG00000241135_15 (sequence is synthesized)
ctgaggaacagatggagaaatggaaagaaaaccagaaaaaagtggcatcaagcagttcacatcaagactctccaggttgaagacgtagtcaggagtgggaaatgccaccgagatgtgaag

SEQ ID NO: 806183 - DNA, 120 bp, Artificial Sequence
  ENSG00000241135_16 (sequence is synthesized)
caaatgagcaccggaatatgtctgttgtatttgacaatgaggaagtcattgattacttgtgagacattggttttagtggggatgtgagggcagaaacaaaatcacactaggttagaagca

SEQ ID NO: 806184 - DNA, 120 bp, Artificial Sequence
  ENSG00000241135_17 (sequence is synthesized)
aaatggagtcaaagaagagaagaggcaggggtagtgggtataaaccactgcttcaagagagttggttaggcagggagggggaagttacagctaaaaggggaggcagggagagtttccttt

SEQ ID NO: 806185 - DNA, 120 bp, Artificial Sequence
  ENSG00000241135_18 (sequence is synthesized)
attcattgtcgttttgttttatttgttgtgttttgtttttgcaactatgggaaactggaacgagcttataggaaaggggaagcaggaggggtcagcaaggagaaataacttggagtctca

SEQ ID NO: 806186 - DNA, 120 bp, Artificial Sequence
  ENSG00000241135_19 (sequence is synthesized)
gtacaacccccagcaccaccacagggtgagtgacagaagaggggattctggccccagataacccaaaggaagggatcctcttccttggttattttttttctaccactggaaaggaagaaa

SEQ ID NO: 806187 - DNA, 120 bp, Artificial Sequence
  ENSG00000241135_20 (sequence is synthesized)
caggtgctgtattggctcttgacagctcttcagaagaaaatacctcctgcctgttctgttcagtcctggtgcaggtgcctatttcattctctctcatggcatactgatttcgtccacatt

SEQ ID NO: 806188 - DNA, 120 bp, Artificial Sequence
  ENSG00000241135_21 (sequence is synthesized)
ctttaggctttcactaaagatattgccagctttaaatctgaaaatcccaggtaagactaatgagtggctggccttggtcaggcgcccaccactggactgtcaggcaaagcagggcgaggg

SEQ ID NO: 806189 - DNA, 120 bp, Artificial Sequence
  ENSG00000241135_22 (sequence is synthesized)
caagctcatagcatgcagttcctatgggctgtggggagagggctgtggggagaggatactttcatatgagagaagagtggtaggcagacagccccacagacatccacagcaaggcctccc

SEQ ID NO: 806190 - DNA, 120 bp, Artificial Sequence
  ENSG00000241135_23 (sequence is synthesized)
tccaactttaaggcccaattcaacaaagtttctccagaatcctcttcagctccacctggactggaaatagccttctcctcttctccacccttccagtgtcttcacctgtacctccccgtg

SEQ ID NO: 806191 - DNA, 120 bp, Artificial Sequence
  ENSG00000241135_24 (sequence is synthesized)
cactgaacacctgttgaccacgtggtcactatttgaataacttttcctatacaaatactaatgtgtgtcactgaagaaaaaaattggaaacataaataaataaagagaataaaataaaaa

SEQ ID NO: 806192 - DNA, 120 bp, Artificial Sequence
  ENSG00000241135_25 (sequence is synthesized)
gaagaatggacgaaagggcaaactttgataagctgaactgggcctttcttgttcgagatttgcaaaggatagtcaagatccttcttcaatcactagcatttcaaaagggttcttgaaatg

SEQ ID NO: 806193 - DNA, 120 bp, Artificial Sequence
  ENSG00000241135_26 (sequence is synthesized)
acaaaatggttcctttgcactgtcgacattttcatcatcaatgaatatttatgaagtgcccacatggaggttgcttgccagttccgaacccagataagagggaaggttctttattctgtt

SEQ ID NO: 806194 - DNA, 120 bp, Artificial Sequence
  ENSG00000241135_27 (sequence is synthesized)
gcagaggggcgtttagtcagtaaactgcatttcttttaacttctgaaagccttccttttttctggggaaaaaaatgtcattttgcttttgcaaatgagagagtaaagcttttggctattg

SEQ ID NO: 806195 - DNA, 120 bp, Artificial Sequence
  ENSG00000241135_28 (sequence is synthesized)
ctgccttgccagccaggcaagtattttaagaaacaaaatctaagccagaaccagcagagaaatacgagggatggattagcgccattagctttgatggtgtcttgttgtcatggtgctagg

SEQ ID NO: 806196 - DNA, 120 bp, Artificial Sequence
  ENSG00000241135_29 (sequence is synthesized)
aaaatcactatcatttacagtcccactcaccagctgttttgctagaatttttgacatgagaggctggtggccaccctaacacaggcgtgggacatgggtgtgcacacacacgtacacctg

SEQ ID NO: 806197 - DNA, 120 bp, Artificial Sequence
  ENSG00000241135_30 (sequence is synthesized)
cctggtgcagcttccaggaagccaaatgacccaccggcttacccacatcgcaggaagctttggagcagagtcagtgactatgtgaacctgcctcaacctctgctccctggttcagcattt

SEQ ID NO: 806198 - DNA, 120 bp, Artificial Sequence
  ENSG00000241135_31 (sequence is synthesized)
ggcttgggaaaaatgacactatttcctgtctcttaaacattatttcaaggcacaggtcttccaccattctgagaggcagggggatctttgagttctgccaggagctgggggttaggggta

SEQ ID NO: 806199 - DNA, 120 bp, Artificial Sequence
  ENSG00000241131_0 (sequence is synthesized)
gtataaaacattgaataatggcattcacacttttgaagctgtcatatctaactgcttattctcaggtaataaaaggaccctcaagctctgatgtatgagctgcttggactcaaagagatg

SEQ ID NO: 806200 - DNA, 120 bp, Artificial Sequence
  ENSG00000241131_1 (sequence is synthesized)
ttttaagattattcaacaaagaaataacagtgctttctccatgtactgtgaaacacatccatctggatccacctatttaagctacatgcctagcctccagagtcatccagacttttagca

SEQ ID NO: 806201 - DNA, 120 bp, Artificial Sequence
  ENSG00000241131_2 (sequence is synthesized)
taagaactcaaatgagaaatcatgaagaatgcattaactgaatccaatatcacctacaggaccctgggcccattgcactttgtaattgtattacttttcttctggttatcttcataggat

SEQ ID NO: 806202 - DNA, 120 bp, Artificial Sequence
  ENSG00000241131_3 (sequence is synthesized)
cttaggtatactctctctgaaaagtgttaaagacaacttctccctgggcctgagaataaattatctttttcctatcgctgtatatttttgtttgtttgtctcgtttttttgttttttgtt

SEQ ID NO: 806203 - DNA, 120 bp, Artificial Sequence
  ENSG00000241131_4 (sequence is synthesized)
ttttcctggctggatagggaagtgatcaagccacaagtgaggagctgcagtggcccatgaacaatacataggtccatctcctggaacttgtgaccactcgcccaggatcgcactcatggc

SEQ ID NO: 806204 - DNA, 120 bp, Artificial Sequence
  ENSG00000241131_5 (sequence is synthesized)
caactaatggcttctctgggagggataaaatagggcacatgaaattatcttgttgagaatacataggtatgtttatagactcacatatatttcatttataaatataaaattattttagac

SEQ ID NO: 806205 - DNA, 120 bp, Artificial Sequence
  ENSG00000241131_6 (sequence is synthesized)
aaaaataagtagaataatagcatttaaataatacttttaaactttttcatattctttcctaaataccttgattaacatttatttggtaacattatttgtcccattctttaaaaagaagga

SEQ ID NO: 806206 - DNA, 120 bp, Artificial Sequence
  ENSG00000241131_7 (sequence is synthesized)
ccattctttaaaaagaaggaaaataggctatgagaaagtaagtacattcaagttccaattattcttaatatgttgtatcatagtatgtcatttgcatcaaagtcagttacacagcaaact

SEQ ID NO: 806207 - DNA, 120 bp, Artificial Sequence
  ENSG00000241131_8 (sequence is synthesized)
aaccaactgcacaaacaaaaataataatatgaaagtagaaatttacatttgaaactcttaactaccatcggtaccaaatatacttttggttatcttgtcaaattatagggatgagtggct

SEQ ID NO: 806208 - DNA, 120 bp, Artificial Sequence
  ENSG00000241131_9 (sequence is synthesized)
gagaccatgcaggtatgttcggtagggttgaatggagtgttagagtgttgctattggccttgaaatagattgatttttttttcttttttttgccttctacctgggatcatggtctctgcc

SEQ ID NO: 806209 - DNA, 120 bp, Artificial Sequence
  ENSG00000241131_10 (sequence is synthesized)
ttacttgcacagggtcctcattatcaaagcagattatctggctcatattacacaatatgttaaatagcttacttctttaaatatacacactttcaccatattcaaatgtgaatactcaga

SEQ ID NO: 806210 - DNA, 120 bp, Artificial Sequence
  ENSG00000241131_11 (sequence is synthesized)
gaaggggagggaaaatctagagaattacagattggagacaccttgtggttaatgtaaaggttttaattcattcttatgtagagaatttgaagatcattattactgcagaaagtaatagcc

SEQ ID NO: 806211 - DNA, 120 bp, Artificial Sequence
  ENSG00000241131_12 (sequence is synthesized)
atggtttgcagaacattggctacagtaagaacatactctgcatcagagagggttcaacattaacaacgtctgtaaaaacagaatcacagctgtcaagaagagagagttcatccagagact

SEQ ID NO: 806212 - DNA, 120 bp, Artificial Sequence
  ENSG00000241131_13 (sequence is synthesized)
gcacaagggatttgtacagaataaagcctcacaaaacccaagggctgtcagagggaaatggtatccaggaggacagggcaggccaagcatcctctcaacagcaaagccacacaagagagc

SEQ ID NO: 806213 - DNA, 120 bp, Artificial Sequence
  ENSG00000241131_14 (sequence is synthesized)
agaacattggctacagtaagaacatactctgcatcagagagggttcaacattaacaacgtctgtaaaaacagaatcacagctgtcaagaagaggagatattctatgttgttatttatgat

SEQ ID NO: 806214 - DNA, 120 bp, Artificial Sequence
  ENSG00000241131_15 (sequence is synthesized)
ctaaaataaatcttcaaatttgtttatgatggtaaatatgggaaaacaaaggacttttaaaaatcatgtaaattacaacataaaaatctgaaagcacaacatttatacaaaatcatttgg

SEQ ID NO: 806215 - DNA, 120 bp, Artificial Sequence
  ENSG00000241131_16 (sequence is synthesized)
ccaacttgctggcaattaagttgggatacaatgtgctcagggtgaaaacaagatcagaaattaaaacaaagtagccagaaaaaattggaaaagttttggttttggttttggttttggttt

SEQ ID NO: 806216 - DNA, 120 bp, Artificial Sequence
  ENSG00000241131_17 (sequence is synthesized)
gtttgcagaacattggctacagtaagaacatactctgcatcagagagggttcaacattaacaacgtctgtaaaaacagaatcacagctgtcaagaagagtgctttctccatgtactgtga

SEQ ID NO: 806217 - DNA, 120 bp, Artificial Sequence
  ENSG00000241131_18 (sequence is synthesized)
agaacattggctacagtaagaacatactctgcatcagagagggttcaacattaacaacgtctgtaaaaacagaatcacagctgtcaagaagaggtctgaattctctacttcatctttgtc

SEQ ID NO: 806218 - DNA, 120 bp, Artificial Sequence
  ENSG00000225521_0 (sequence is synthesized)
agtggtagccgaagaagctctctgggcagacgcacagctggacgggcagccgaggcaggaccttggtggcctcatcctctgctgtctcccagcgcctgccactcagcagaggccgtctgc

SEQ ID NO: 806219 - DNA, 120 bp, Artificial Sequence
  ENSG00000225521_1 (sequence is synthesized)
aacccacaactattgctgggattaaaggagaaaatcatattatcatctgaagaggtatagagaaggcatggaataaaagtcaacgtccatttgtgattaaaaacgctgggaatacaagga

SEQ ID NO: 806220 - DNA, 120 bp, Artificial Sequence
  ENSG00000225521_2 (sequence is synthesized)
ctttttgagactaggaacaagtcaagggttccaccaacaccaccgctatgagacgattcacgggaggccttggccagcacaggcaccaacaccaccgctatgagacgattcattggaggc

SEQ ID NO: 806221 - DNA, 120 bp, Artificial Sequence
  ENSG00000225521_3 (sequence is synthesized)
ctcggccagcacaggcaccaacaccaccgctatgagacgattcatgggaggcctcggccagcacaggcaccaacaccaccgctatgagacgattcacgggaggcctcagccagcgcagga

SEQ ID NO: 806222 - DNA, 120 bp, Artificial Sequence
  ENSG00000253460_0 (sequence is synthesized)
gctcagctcctggggctgctaatgctatgggtccctgggtccagtggggatattatgatgacccaaactccactctccctgctcgtcacccctggatagctggcctccatctccttctgc

SEQ ID NO: 806223 - DNA, 120 bp, Artificial Sequence
  ENSG00000253460_1 (sequence is synthesized)
atctccttctgcaggtctagtcacagccttgtatacaggggggaataaacctatttggtacctgcagaagccaggccagtctctacagctcctgatctatttggttttgaaccgggcctc

SEQ ID NO: 806224 - DNA, 120 bp, Artificial Sequence
  ENSG00000253460_2 (sequence is synthesized)
tgcagtcccagacaggctcagtggcagtgggtcaggcactgatttcacactgaaaatcagccgggtggaggctgaagatgttggggtttatcactgcatgcaagctctacaaactcctcc

SEQ ID NO: 806225 - DNA, 120 bp, Artificial Sequence
  ENSG00000286770_0 (sequence is synthesized)
agagcagagaagggtgggatgggggcaggggaaagaaggaccctggcctgggtgtcaggcctcctggttcaaatcccagactcatcaccagcctcctggggaacctggggccatgttacc

SEQ ID NO: 806226 - DNA, 120 bp, Artificial Sequence
  ENSG00000286770_1 (sequence is synthesized)
cctctctgagcacctccctatctgggcccctgaaggggctctgccccagttttgaggggtagaggacccctcttccaggctcagggtcagagctggcttctccagagttggcaagttggc

SEQ ID NO: 806227 - DNA, 120 bp, Artificial Sequence
  ENSG00000286770_2 (sequence is synthesized)
aaagttggcaagtggctggggcttaaccacctcttcctatcagaggctcatggctctgtccctgggcaggggccactctctgcactccagaagcctgcctactccccagtatcttcccca

SEQ ID NO: 806228 - DNA, 120 bp, Artificial Sequence
  ENSG00000286770_3 (sequence is synthesized)
ctggttattattattcaatgcaggaagaagagaccactcacctgtaatttcaacagcaacaaaagacctgaggttccaccatcagaacttcacgccctaaggaagatgcagcatttcctg

SEQ ID NO: 806229 - DNA, 120 bp, Artificial Sequence
  ENSG00000286770_4 (sequence is synthesized)
taaaatgcaagtgctcccaggcagagagccagaattgatttcgtggctttctttctcctcttctgggattttgtgccctattgccacagaaaccctgggccccttccccagctgtcatga

SEQ ID NO: 806230 - DNA, 120 bp, Artificial Sequence
  ENSG00000286770_5 (sequence is synthesized)
gatggtcagagagatgaccggaggggcccacccggccaccgcagcagcagcagccaaggcgggactaagcctccacaccccacatctcagtcgtggccagcccgggatgcctgcctctcc

SEQ ID NO: 806231 - DNA, 120 bp, Artificial Sequence
  ENSG00000286770_6 (sequence is synthesized)
tgccctgtggtgttgctgtcctcatatgacccttcagtcccccgacatctggacaggctttagggacctgcttgagcagaacatggtagaagtgatggactggggcttctgaggctaagc

SEQ ID NO: 806232 - DNA, 120 bp, Artificial Sequence
  ENSG00000286770_7 (sequence is synthesized)
cataagaagccttgagaatttcacctggccctcactgtctctgggagccctgagccatgatagaagaagtccttcctatattgaatgtccttgagacctccagtactggaaagggcattt

SEQ ID NO: 806233 - DNA, 120 bp, Artificial Sequence
  ENSG00000286770_8 (sequence is synthesized)
gtagatgctcagaccaacagtccaaactgagcccagtctgccaacttgccctgccaaggtgtcagatgcatatgtgaatgagaccatcctagacctgctgatagcccatcacccggctga

SEQ ID NO: 806234 - DNA, 120 bp, Artificial Sequence
  ENSG00000286770_9 (sequence is synthesized)
ctgctactgagtaacctctgccaacttcacgccgaacacagaactgctgatttgaactctgcctgaatttcttggcccacagaacaatgagatataattaaaaggcaatggttcaagcca

SEQ ID NO: 806235 - DNA, 120 bp, Artificial Sequence
  ENSG00000286771_0 (sequence is synthesized)
tgctcaagattaaacagagcactgaatctaggatgaggaaagaattttttcctcaggggaagaaaggggtgtgggatttccaaatgtgcactacagtaggatcagctgtgtggatcagga

SEQ ID NO: 806236 - DNA, 120 bp, Artificial Sequence
  ENSG00000286771_1 (sequence is synthesized)
tttctccaagaataacctaaggaccatctacttcagaatcagcaggggttcaagttagaaactgcagttttctggacctctacccagacttaataaaaacattagaaggagggtagggcc

SEQ ID NO: 806237 - DNA, 120 bp, Artificial Sequence
  ENSG00000286771_2 (sequence is synthesized)
caagaatcttcactttagaagttacccagtgattgttatgcacactgaagtttaaggaccactgactgctctagacccttgttttttcccaaccaaatgacacaaggactctgccaagct

SEQ ID NO: 806238 - DNA, 120 bp, Artificial Sequence
  ENSG00000286771_3 (sequence is synthesized)
ataagtatcttaagatcatctgaaaagagaaaactccttaacagttctctctttgcattccttctatttgccttccttctaaaatacacatggaagaggaaagaaagcttggagagtggg

SEQ ID NO: 806239 - DNA, 120 bp, Artificial Sequence
  ENSG00000286771_4 (sequence is synthesized)
ctgaatatgagacatcagcataaatgcagacttgtcagccctgctctgtggctgctgccaattacagtagccagacctgcaagaggacttgattacatgtaatttataaaaagtaaacaa

SEQ ID NO: 806240 - DNA, 120 bp, Artificial Sequence
  ENSG00000286771_5 (sequence is synthesized)
gtggcttgtgaacaatgaatggtgatattgcagccaagaggtaataaaatgcatgaataaatgactcagcatccccctaccagacaacaattggctgtactctaagctaggagagcaaag

SEQ ID NO: 806241 - DNA, 120 bp, Artificial Sequence
  ENSG00000286771_6 (sequence is synthesized)
taaaaatgagtattttggtaatgatttaaatgacaacagatccttggagagagaatttgcctatcacctaaaccctctagtgatcaaaggctcagccatctcaatgactgtttttctcaa

SEQ ID NO: 806242 - DNA, 120 bp, Artificial Sequence
  ENSG00000286771_7 (sequence is synthesized)
acattacttcagtcagaaaaataaatgtttgcttccggtgctatgacacaatccaactggcaacatagggaaatatactaaatgaataaaataaatgtaagaaccaagctttatgaaccc

SEQ ID NO: 806243 - DNA, 120 bp, Artificial Sequence
  ENSG00000286771_8 (sequence is synthesized)
ctctatatgaggatttctcaacttcagcacactgatattctgagccagataaatctgtgcaatagagtgtttagtagcatccctgcttctacccactagataccagaagcattcctccct

SEQ ID NO: 806244 - DNA, 120 bp, Artificial Sequence
  ENSG00000286771_9 (sequence is synthesized)
ccagctgtagcaaccaaaatgtctccagaaattgtcaaattgttatggaagtgctgggacgggaagagcctggtccctttaaatgatatggaagtggggaagggaagtgcctggtagagg

SEQ ID NO: 806245 - DNA, 120 bp, Artificial Sequence
  ENSG00000286771_10 (sequence is synthesized)
aaggcgtggtccctgactagggatccatccccacgaacctaggtgaggataggcactccagccttgccgccgaaaggtcacctttccaagaccaccctggccggccacgcccccatcctg

SEQ ID NO: 806246 - DNA, 120 bp, Artificial Sequence
  ENSG00000286773_0 (sequence is synthesized)
agttcactaatgctcttttcacttttaaaaattcctgtgtctttcattttgcatagtttttattcatgcctttatgtctactatcttttcttctgtaatatctatcctatgaatctcatt

SEQ ID NO: 806247 - DNA, 120 bp, Artificial Sequence
  ENSG00000286773_1 (sequence is synthesized)
cattttattatttgtctctataagttctacttgagtcttttaaaatatattctacatctctacttaacgttttgaatgcagagaatacaattctaatacctgttttcatgtctcctctac

SEQ ID NO: 806248 - DNA, 120 bp, Artificial Sequence
  ENSG00000286773_2 (sequence is synthesized)
cagttctaacatctgcatcagttccgggttggtttcagttgattattttctactttatgggtcatcttttcctgtctcttggtatgtctggtgatatttgattgagtgcctgacattgta

SEQ ID NO: 806249 - DNA, 120 bp, Artificial Sequence
  ENSG00000286773_3 (sequence is synthesized)
aactttaccctattaggatattttgtatttctgcatatcttcttgagctttgttctgggatacagtgaagatacttggatgcgattttattctttggggcctagcttttatgatttcttt

SEQ ID NO: 806250 - DNA, 120 bp, Artificial Sequence
  ENSG00000286773_4 (sequence is synthesized)
ggtggctccagagcagtgctcagtctagggctaattatttcccactactgaggcaagaactttcctgagtattctactcaatgccctttgagttaggaatttttctagtctgactggtgg

SEQ ID NO: 806251 - DNA, 120 bp, Artificial Sequence
  ENSG00000286773_5 (sequence is synthesized)
atcctttcacgtgggtctttcctcacatgcagatactaatcagtattctgctgagtccttgaggcaggtcctttctctgtacagctttcttttctccagtactttgtctgtgaactctag

SEQ ID NO: 806252 - DNA, 120 bp, Artificial Sequence
  ENSG00000286773_6 (sequence is synthesized)
ctgccttagtctcccaggactctgagctccatcttcccatctcaaggagtctgctgggccctacctcagtttcccttccctgagcctacaaattcaaggcaggaaactggagcaatcata

SEQ ID NO: 806253 - DNA, 120 bp, Artificial Sequence
  ENSG00000286773_7 (sequence is synthesized)
gggctcatgtttgtttcctgtgtttaagaaatcactgtcctggcctggtgcactttggctcatgactgtaatcccagcattttgggaggcttaggcaggaggatcacttgagcctggaag

SEQ ID NO: 806254 - DNA, 85 bp, Artificial Sequence
  ENSG00000286773_8 (sequence is synthesized)
gaccctgtctctacaaaaaatatatctgtagtcccagctacttgggaagctaaggcaagaggattgcttgagcctgggaggttga

SEQ ID NO: 806255 - DNA, 64 bp, Artificial Sequence
  ENSG00000286773_9 (sequence is synthesized)
gtgtatatctgtagtcccagctacttgggaagctaaggcaagactgcaagctccacctcctggg

SEQ ID NO: 806256 - DNA, 120 bp, Artificial Sequence
  ENSG00000286775_0 (sequence is synthesized)
gcagagatttctggattgcttcctgctcatcctcaggggaccatctggaactgacagtctgtcctccagactcatatcttcctctttccaatcaaccagtcaatcatcaagcatttatgc

SEQ ID NO: 806257 - DNA, 120 bp, Artificial Sequence
  ENSG00000286775_1 (sequence is synthesized)
acaccttatgtgcccaataggcctcctttgctgtggaagaagcactgagagccagagtgccctccacattcaccagaagcacagctaagtgtcaaggctcaggttacatcttaggaagca

SEQ ID NO: 806258 - DNA, 120 bp, Artificial Sequence
  ENSG00000286775_2 (sequence is synthesized)
aaaatccaacctttctacccttgcctgactgactctactctaaggcttttgatctagaagaataggtatctgaggatagagcagtgaaccaaagagacaaaagtccctgcctctatggag

SEQ ID NO: 806259 - DNA, 120 bp, Artificial Sequence
  ENSG00000286775_3 (sequence is synthesized)
ctacattccagttgactgctataatgatggctctccagaattgttgtggtctgctttcaagttctgagcctagctgcatgccagaatcacaccatctgaggcttaatgaatcagcatctc

SEQ ID NO: 806260 - DNA, 120 bp, Artificial Sequence
  ENSG00000286775_4 (sequence is synthesized)
caagattggcaaaagtgccgctatcaaagacaggtagaatgactcctgtctctagctgctttcctggcacttgagctatgcagtgataatacaagttgggaggactcaacagaagccagg

SEQ ID NO: 806261 - DNA, 66 bp, Artificial Sequence
  ENSG00000286776_0 (sequence is synthesized)
cctggtgattcttgaggcatctctttgttctctgttgctaaatttttgtggtaactggacaagaga

SEQ ID NO: 806262 - DNA, 120 bp, Artificial Sequence
  ENSG00000286776_1 (sequence is synthesized)
gttctctgttgctaaatttttgtggtaactggacaagagaaacaggactgaagctgttactcccccaacttctgggagtgtttttggctgaaagctctcagtcagagccttgctctggga

SEQ ID NO: 806263 - DNA, 120 bp, Artificial Sequence
  ENSG00000286776_2 (sequence is synthesized)
attgtcctcagccaaggagaggaagagtcaaacttgacttttaagaagtgttgaagccctacattccttgaaaaattatgccgaatatcacctgtacctttcattttatggattgcaaag

SEQ ID NO: 806264 - DNA, 120 bp, Artificial Sequence
  ENSG00000286776_3 (sequence is synthesized)
gtgatcaatgagaaagtttgccgaagacttctctatctgttcatcaagctgcagtcactcatcatgatgtgaggcctttgcgatttagtactgacccttcctctagacacttctctctca

SEQ ID NO: 806265 - DNA, 120 bp, Artificial Sequence
  ENSG00000286776_4 (sequence is synthesized)
cttcatcaagctcatctcatgactgaccttgggtagtatagtttccagagtgcagtgcaccagctgctgctgcttttcctgtggtcccatgggctgcttctccagccccagtatgcacca

SEQ ID NO: 806266 - DNA, 120 bp, Artificial Sequence
  ENSG00000286776_5 (sequence is synthesized)
atttgtctagctggcaagtactagtccctgaagactcaatccacacaacactcccctgagaaagtgatgccaccccaaatccaatatacactgttcctctgggcctcccagagtgttctg

SEQ ID NO: 806267 - DNA, 120 bp, Artificial Sequence
  ENSG00000286776_6 (sequence is synthesized)
ctcccagagtgttctgctaacgttcccatgcatagcaggcaacactgtgtcctagtttgtctgtcatccccgttaatctctgatttttttaaggattttctttttttctttttttttgtt

SEQ ID NO: 806268 - DNA, 120 bp, Artificial Sequence
  ENSG00000286777_0 (sequence is synthesized)
ggaagggagcagacaggtgccatattggcaattctaggatggtcccttcccctttggagagatagatcttgcctgttgggccttcaggccaacacacactagcctcgctagaaggaatac

SEQ ID NO: 806269 - DNA, 120 bp, Artificial Sequence
  ENSG00000286777_1 (sequence is synthesized)
tgcctgtgtacctccttctttcctcctttgggcctactttgttcttctgaatggctgaaactccaaggcaccatggtctgcacagatgcttctagaagccaccttcaacacctaccatca

SEQ ID NO: 806270 - DNA, 120 bp, Artificial Sequence
  ENSG00000286777_2 (sequence is synthesized)
gatctaaattccagacagcaagaagatgtgaaaacgctctttccttcctttaaaggcaaaactcaagacacacatcaaaacatcaaaactcaaggcacacatccaaactcatggcacaca

SEQ ID NO: 806271 - DNA, 120 bp, Artificial Sequence
  ENSG00000286777_3 (sequence is synthesized)
agtctttggcttggccacttgtctagctcaaaaattactacagaggaataaggggagacagatagtggtctcctcttcttcaagagaggtaagagggcacaatgctgccttttgtctgat

SEQ ID NO: 806272 - DNA, 120 bp, Artificial Sequence
  ENSG00000286777_4 (sequence is synthesized)
gtgatggttaagaaggaacagaccaatgtgaggtgtgagttatgtgctgtgacttggactcattcaacagcaagacccaaggtttactctgatgggacagatgggcagaatcagtgacca

SEQ ID NO: 806273 - DNA, 120 bp, Artificial Sequence
  ENSG00000286777_5 (sequence is synthesized)
catcccctgtcatgaacctgctgcagccagtgtgatacctgtccagcacagagattggcccaggggaaagagcgtgggctttagagccagattaaattgggcttgtatttgggttctcca

SEQ ID NO: 806274 - DNA, 120 bp, Artificial Sequence
  ENSG00000286778_0 (sequence is synthesized)
agtgtctgctcatcaaagaggaatgacagatcctccttcatcaacatgttttccttaggaatggtgccaggatgcagggcataagtgagaggacagttcccttggttatgaggtaactaa

SEQ ID NO: 806275 - DNA, 120 bp, Artificial Sequence
  ENSG00000286778_1 (sequence is synthesized)
aaatagccacctttgaaagccatcagaggtcacttgttttgaagaaaatcatcagaagaactttgaactataagatattgactattaaatcatgttattttcttcatttgtcaaagttat

SEQ ID NO: 806276 - DNA, 120 bp, Artificial Sequence
  ENSG00000286778_2 (sequence is synthesized)
tgggatgtagcaaatacttgagactttgaattgagtagattttgagtagatttatgaatgaaatcaaaggacacacaaaaacagtgtaattcacccatctggagactccacgtatgagtt

SEQ ID NO: 806277 - DNA, 120 bp, Artificial Sequence
  ENSG00000286778_3 (sequence is synthesized)
tgaaaacttttagtatgtatgccaattagtccatccagccaaataggcacaacaattttccgataataagaaaaataagaccaagaagctagctggaatactaagaaaaacaacagaggg

SEQ ID NO: 806278 - DNA, 120 bp, Artificial Sequence
  ENSG00000286778_4 (sequence is synthesized)
tcttcattaaaattgaccacttctagaggccttgcaggaaatattaaaataagttcttcaatgagaatgaaaatgatataggtcagaaacttggatctgcatgaagatacaccttaaaaa

SEQ ID NO: 806279 - DNA, 120 bp, Artificial Sequence
  ENSG00000286778_5 (sequence is synthesized)
aggaagagcatcagaaaaatgaataagtgaaggtcaagtgctgtgctgtactgattgatagattgtctccagcaggaagtttgacaatggacaacctagaagcagatgtgcctgataaat

SEQ ID NO: 806280 - DNA, 120 bp, Artificial Sequence
  ENSG00000286778_6 (sequence is synthesized)
gtaaatggtagcttctttgtggcccttccaccagaagtgaagaagcctggtgcagagcttctacttgacctatgatagatatgctgctggagaagaaatcaacctcctgcctgaggacct

SEQ ID NO: 806281 - DNA, 120 bp, Artificial Sequence
  ENSG00000286778_7 (sequence is synthesized)
caacagatgcacctgcccaatcttaaactttccagcaatctgaattgtgagccaaataatttttttataaattatccagcttcaagtattataccaacaaaaaaaaggtaagcaacaaaa

SEQ ID NO: 806282 - DNA, 120 bp, Artificial Sequence
  ENSG00000286779_0 (sequence is synthesized)
attgccagcaagcacaggaagctaggagagaggcattgaacagattcttcctccaagcctccagaaaaagcagcccggtagacaccttgatatcagacttctggcctccagaaaaaacgt

SEQ ID NO: 806283 - DNA, 120 bp, Artificial Sequence
  ENSG00000286779_1 (sequence is synthesized)
gggggtcctctcctatctcgtttttggttctctgttatcttctccactgagaatccacctttgagagtgaactcttcaaagaaaaggaccacattttctccatcattggacccatcatgc

SEQ ID NO: 806284 - DNA, 120 bp, Artificial Sequence
  ENSG00000286779_2 (sequence is synthesized)
agcatctagtgcaatgcctggcacttagcagtcattcttcacactgtctaccactatgataaaaagttacatgagttaagtaccacatgggctacacagacattgtcctaagaagccaag

SEQ ID NO: 806285 - DNA, 120 bp, Artificial Sequence
  ENSG00000286779_3 (sequence is synthesized)
tgaaagaggatgtctttgcactgttccctaatggatagatgggattttcaacagcagacattgggaagatgtcattgaagtcagaagaattatatgaatagaaaattcaaaacatgctca

SEQ ID NO: 806286 - DNA, 120 bp, Artificial Sequence
  ENSG00000286779_4 (sequence is synthesized)
gagagcagtaagacttgagacaggagcaatgtaaagtattgacataatttatgtacataagaaaaagatttgaactagagtggaaaaggaaaagaggcagtagatgtaagaaaacaaaaa

SEQ ID NO: 806287 - DNA, 120 bp, Artificial Sequence
  ENSG00000286779_5 (sequence is synthesized)
tcatcatgtacatcaggccagcattggtaggcagaaaagttgagaaagtctgctcaaaggaagtaagggttatttgtggaaatatcgtctcctatgaagccttgtagatcttccttcctg

SEQ ID NO: 806288 - DNA, 120 bp, Artificial Sequence
  ENSG00000253465_0 (sequence is synthesized)
actccttctctgcctgctggctgccctctgtggtgagttaggggttcacagtgaggaccaccttgtgcaatgggaggaagaagtagtggtccccttggtcatgctcagcctcacctatgc

SEQ ID NO: 806289 - DNA, 120 bp, Artificial Sequence
  ENSG00000253465_1 (sequence is synthesized)
acactaagccccaaccttcagggcagagctagcatctccagaaacacatagtaaaaaacaagaaaacttacagctgagaagtgtgatggctggggaggcaggcgtgtattactgtgctca

SEQ ID NO: 806290 - DNA, 120 bp, Artificial Sequence
  ENSG00000268204_0 (sequence is synthesized)
agtccctggcggggaggacgggcaggtgcgtccgcgctgccgagcacgaagtcgctggaggtgcacacctcgacgacacgctcacagatgggagttcagacacacacttcctggcttgcg

SEQ ID NO: 806291 - DNA, 120 bp, Artificial Sequence
  ENSG00000268204_1 (sequence is synthesized)
tgcgaagcaggatcgcagggcaataatccctccatcttccccgggaggttctgtgcctgcaagatacacggcacccactcgatgccaccgggccgccactgtctgggcctgggatcttga

SEQ ID NO: 806292 - DNA, 120 bp, Artificial Sequence
  ENSG00000268204_2 (sequence is synthesized)
cccacttgccttctgtacttcagggtttagaggcagcagcagcagcagcagccgtcttggataacttttgatggattcaggaggcctggagacctcttgtgtgcaggcacctggacataa

SEQ ID NO: 806293 - DNA, 120 bp, Artificial Sequence
  ENSG00000268204_3 (sequence is synthesized)
tcattcagtcctgcccaatgttccgacctggactgcggtgccgacgaggaaaccgaggcttagcgggatccctaatccaaggccacgacgagtgagcctgctgggttcaagccaggagcc

SEQ ID NO: 806294 - DNA, 120 bp, Artificial Sequence
  ENSG00000268204_4 (sequence is synthesized)
tgtccccagggggcatttgtcacagccttaccctcttccgggaggcgcaacgcttaccctcgtggaccaacaatcgaattaacatgctgatacacacatggggtgagtgacgccctcaaa

SEQ ID NO: 806295 - DNA, 120 bp, Artificial Sequence
  ENSG00000268204_5 (sequence is synthesized)
tgcttgcaaacacagacacacactcggaatttcagaagctgcttctgctgtgtgtcctgtcgcttggaaggcacagccccagcagcacccatacaaaatgaggtctccgatttaaggtgg

SEQ ID NO: 806296 - DNA, 120 bp, Artificial Sequence
  ENSG00000268204_6 (sequence is synthesized)
cagctgccctttcaggagccagtgggggaacctgggtggctgggtggggacacctgcaagtcctccctaagccagctaccaccctacactgttggcctcccttctccaactgtggggatg

SEQ ID NO: 806297 - DNA, 120 bp, Artificial Sequence
  ENSG00000268205_0 (sequence is synthesized)
gaatgctagttatttgtcagatacatgttttgcaaaccatttatctgtatttggtttctttttgttatcttagcagtgtatcctgaagaatagttttaaattttgatgtaatccaaaata

SEQ ID NO: 806298 - DNA, 120 bp, Artificial Sequence
  ENSG00000268205_1 (sequence is synthesized)
aatagttttaaattttgatgtaatccaaaatatttcggttgtttgtgttctttgttatcctatttttgttgttgttgttttatagatatgggggtctcactacgttgcccaggctggtct

SEQ ID NO: 806299 - DNA, 120 bp, Artificial Sequence
  ENSG00000268205_2 (sequence is synthesized)
cagcctcccatccttgtctacctaattaggctttgtgtaactcagtgttgcaaagctttgacatctgtttgagttaatgtttatatatgttgttacttaagggtttcacattaaatttaa

SEQ ID NO: 806300 - DNA, 120 bp, Artificial Sequence
  ENSG00000268205_3 (sequence is synthesized)
acatacttatattttataaccaaacaagtcatgttggggcatactcattaggattgagtgctttcttacaccaaaatacatgtatacaaagatttaaaacactttcggccgggcgcggta

SEQ ID NO: 806301 - DNA, 79 bp, Artificial Sequence
  ENSG00000268205_4 (sequence is synthesized)
ctaggagatcaagaccatctggctaacacggtgaaaccctgtcgctactaaaaaaatacaaaaaattagccagacgtgg

SEQ ID NO: 806302 - DNA, 120 bp, Artificial Sequence
  ENSG00000268205_5 (sequence is synthesized)
gtgaaggctatgtctcaagaaaaaaaaaaaaaaacttttataataacaactgtaaatagttcaattgacagtcatttgtaagatgtttaagtaaactgtgaaacagtaagtaaatggatg

SEQ ID NO: 806303 - DNA, 120 bp, Artificial Sequence
  ENSG00000268205_6 (sequence is synthesized)
aaaacacactgattaaaactgctgcttttatccaacaagatggatgaatttcccaggaaagaatacttgagttcaggcctgttcaagtcccaacctgtttgtggtttgaggttgctctct

SEQ ID NO: 806304 - DNA, 120 bp, Artificial Sequence
  ENSG00000268205_7 (sequence is synthesized)
gcctcgtagagcaaagtggaaaatttatcttctgggaggacagagttttcttctctgaaaaagtttcctacatagttggctttggcatttgcaaggaatgaaaggtcagggattgaggcc

SEQ ID NO: 806305 - DNA, 120 bp, Artificial Sequence
  ENSG00000268205_8 (sequence is synthesized)
tcatgagtctggatttctagctgaggttgagagaaaaggtagtgattgtaaccagaaaatccagagtgggtgtatttacctccagaactcatcacttaaaaaaaaattttttttgaactg

SEQ ID NO: 806306 - DNA, 120 bp, Artificial Sequence
  ENSG00000268205_9 (sequence is synthesized)
tttttttttgagatggggtcttgctctatcccccaggctggagtgcagttgtgcagtcatagctcactgtagccttatcctcctggcctaagcagtcctcctgcctcaacctccctagta

SEQ ID NO: 806307 - DNA, 120 bp, Artificial Sequence
  ENSG00000268205_10 (sequence is synthesized)
taagcagtcctcctgcctcaacctccctagtagctgagaccacaggcgcatgccacctgtgagtttctagagatgaggtctccctatgttccccagcctggtcttgaactcctgggctca

SEQ ID NO: 806308 - DNA, 120 bp, Artificial Sequence
  ENSG00000268205_11 (sequence is synthesized)
aggcgtgagccactgtgcctggccagagctcatcactgttaactcagcctgggtttttcacagcagtcatggaaatagattcattaataatagtaacaaatatatagtctccctctcaaa

SEQ ID NO: 806309 - DNA, 120 bp, Artificial Sequence
  ENSG00000268205_12 (sequence is synthesized)
aatagtaacaaatatatagtctccctctcaaagaaaccttgagtggcagtggcataccagatacacagtaggaaatactgtagaattatgttgttaagttcataaccaaacatcatacat

SEQ ID NO: 806310 - DNA, 120 bp, Artificial Sequence
  ENSG00000268205_13 (sequence is synthesized)
gatgataaaagacaagataatggtcacatttatgcagtattaactgagagggcaaatttgtgcctgagaagctattgggaatgttctctctctttgcattactaggaattacatgggaaa

SEQ ID NO: 806311 - DNA, 120 bp, Artificial Sequence
  ENSG00000268205_14 (sequence is synthesized)
cacatgtagacagtcttcaggctattaagatttgtccacttaatctttacttatacatgaataaaaaatgggaaaacatgataaatataataaactaatacactcaaccctgccccttga

SEQ ID NO: 806312 - DNA, 120 bp, Artificial Sequence
  ENSG00000268205_15 (sequence is synthesized)
ttatataatagaacaaaatcagcatgcccggcatgagcctgccagattgccaattccatcctccaccttcagaggatgccgccatccagaattttgccttactcattttactttcttcat

SEQ ID NO: 806313 - DNA, 120 bp, Artificial Sequence
  ENSG00000268205_16 (sequence is synthesized)
aaattgatataaatgaaataatgctgtagagatgctttttggtattaagtggatatactgttattcttaaagatgtttgaaatgaatatacctttctaaatatctttttaaaataataca

SEQ ID NO: 806314 - DNA, 120 bp, Artificial Sequence
  ENSG00000268205_17 (sequence is synthesized)
ttaaatgatactgctttagaattcatgaactgcatctcatgagaatatgtagagatgacgtgggcaggtaaagtaaaacttcaggttgaatatcctatgataatttaaaaatgacaaaat

SEQ ID NO: 806315 - DNA, 120 bp, Artificial Sequence
  ENSG00000268205_18 (sequence is synthesized)
agtgtggtgaataatagagcttgagcactttaaggcaccgtagggaccccttcaatgtaatgatgacagtgctgaggtgcagagaagttaggtaatcagcccaagccactactctaagga

SEQ ID NO: 806316 - DNA, 120 bp, Artificial Sequence
  ENSG00000268205_19 (sequence is synthesized)
cagaccctatctacttttcctaatttgtcagaagactgcctatgatactactaataaaaagtcctatgaaattggtattgtcattattttacaaataaaataatcttcaatttttgtttc

SEQ ID NO: 806317 - DNA, 120 bp, Artificial Sequence
  ENSG00000268205_20 (sequence is synthesized)
ctctatgcatgggttacttagtattttgtaatttgaatttcaagcataattaaaaagaaatcaggtatctaggctgggcatgatggctcaagcctgtaatctcaacattttgggaggctg

SEQ ID NO: 806318 - DNA, 120 bp, Artificial Sequence
  ENSG00000268205_21 (sequence is synthesized)
ggatcacttgaggccaggagtttgaggtatcttttgttgatctctacactgattgtattctctcttttattctatgaaagttaaagattttttctgatactacatattgtcagtttttta

SEQ ID NO: 806319 - DNA, 120 bp, Artificial Sequence
  ENSG00000268205_22 (sequence is synthesized)
gttttttaaatactcagtttgtgctaaaagaaaacattcggcaactgatatctgctgttctgtatgtatctgtcagtccagatttgtccattatggtgtatgaatctaatagaacctcac

SEQ ID NO: 806320 - DNA, 120 bp, Artificial Sequence
  ENSG00000268205_23 (sequence is synthesized)
caatgttatacctgccttcttgaaatcattactgagatagctaatattaaaatatcctggtttgtctgtatatttaattctttactctcattatactaaatttttttaatgtaatttgaa

SEQ ID NO: 806321 - DNA, 120 bp, Artificial Sequence
  ENSG00000268205_24 (sequence is synthesized)
ttgatggtaaaaattgtatacaggccgggtgcagtggctcactcctataatcccagcattttggaagtcctatgcaggaggattgccagaggccaggaatttgagatcagcctgggcaac

SEQ ID NO: 806322 - DNA, 120 bp, Artificial Sequence
  ENSG00000268205_25 (sequence is synthesized)
atagtgaaactctcatctttataaaaagtaatattaaaatttttaaaagtgtataaactgtaaagtatattttactggtgttttcttccttattcctacttgtcagatgcaaatacacat

SEQ ID NO: 806323 - DNA, 120 bp, Artificial Sequence
  ENSG00000268205_26 (sequence is synthesized)
gcaaatacacatttttgtgtgtttgtgtttagtaattataagtatacatatttcattcttctatttcatatatttctatgacattatatcttagatgtgtaatttatgaactactactgg

SEQ ID NO: 806324 - DNA, 120 bp, Artificial Sequence
  ENSG00000268205_27 (sequence is synthesized)
cattagaaattactattcacgcattctgtattcaattcatgtgatagctaatatatttggttttaaatgcatcttattttgtggttttcttctaggctgttttttgtgctttcttttaaa

SEQ ID NO: 806325 - DNA, 120 bp, Artificial Sequence
  ENSG00000268205_28 (sequence is synthesized)
taatcttaattttcttttagtttgaaatgtatatactcattttattcattagtctaagataagaattgtaacacttctctaacctattatagaattgttaatacctttacccttctcttg

SEQ ID NO: 806326 - DNA, 120 bp, Artificial Sequence
  ENSG00000268205_29 (sequence is synthesized)
ctttacccttctcttgaacacatcaaaggatgtcattgagtgttggtattggagtatagcatatctattattctgctcaattagaagatattgttcatgttgtatagagataataagtaa

SEQ ID NO: 806327 - DNA, 120 bp, Artificial Sequence
  ENSG00000268205_30 (sequence is synthesized)
ttgtattgatctgcagatgcatccatctcttggattctcattccttctaccactgcagaactttcacctgtaatcactttcctttggccttaaggataacttttagggttacttttctac

SEQ ID NO: 806328 - DNA, 120 bp, Artificial Sequence
  ENSG00000268205_31 (sequence is synthesized)
taaatttccaatttttgaccagatataatcttatattgtgctcttcctgaaaaatactattgttgtggatagaaatctgggttggtagttatttcttcagcaatttgaccatgtcattcc

SEQ ID NO: 806329 - DNA, 120 bp, Artificial Sequence
  ENSG00000268205_32 (sequence is synthesized)
actgtgtccctggcctcctgtatactggatgtgaatggatacaattatatattgtgtttatagttttcctgtgctataggaacagtattcgaatctgatgcaaaggacaacacaccctag

SEQ ID NO: 806330 - DNA, 120 bp, Artificial Sequence
  ENSG00000268205_33 (sequence is synthesized)
agattgtaacagtgagatgaaccaagtgattggatggggttttgagttgctggaataatggagttacagtgtacaatgcataagcaacataataaattatatatctggtgaacaaatgga

SEQ ID NO: 806331 - DNA, 120 bp, Artificial Sequence
  ENSG00000268201_0 (sequence is synthesized)
cagagccatagactgatagaccagaaagtgggttaatcgaaggtctgtccatgaaactcagactcttccccatttttttttcttgcctggcattacctatctggctgtgggtagcaaaaa

SEQ ID NO: 806332 - DNA, 120 bp, Artificial Sequence
  ENSG00000268201_1 (sequence is synthesized)
ttaaagtagggaaggagtcatgtgctaaaagattagttcaggggacaagggaatctgatgtattttgctctgcagcaagggctgctttattctggcatttcagaactttttacctgatag

SEQ ID NO: 806333 - DNA, 120 bp, Artificial Sequence
  ENSG00000268201_2 (sequence is synthesized)
ctgtctgctttctgatagtctcttcaatatgggtgggaggcaaggagcaaaagataaagtctccatcatgagagaaggtatctaagacagcagaaaagacagatattcagaggaaccaaa

SEQ ID NO: 806334 - DNA, 86 bp, Artificial Sequence
  ENSG00000268201_3 (sequence is synthesized)
tctaagacagcagaaaagacagatattcagaggaaccaaatattctttgttttttgagacggagtctcattctgttgctcaggctg

SEQ ID NO: 806335 - DNA, 120 bp, Artificial Sequence
  ENSG00000268203_0 (sequence is synthesized)
ccatgacaacaattaatttatttattgagggtgaggcagggaagcggggagggagggtaggggtgacctctcttcctcacaggcaccaggccttgtttctctcccagataagctaaggtc

SEQ ID NO: 806336 - DNA, 120 bp, Artificial Sequence
  ENSG00000268203_1 (sequence is synthesized)
gagaagctggggtcagaggtaggagctggggctcaggtggggggttaaaggtgaggcaaggtcagcggtgaagtgcagctcagagggaggggtcaaacataaaccagaacttataggtct

SEQ ID NO: 806337 - DNA, 120 bp, Artificial Sequence
  ENSG00000279182_0 (sequence is synthesized)
aactgcttcggaggactggactcggacttgtccaccctggatgggatgcgcacctgggagaaggagggagcagctgccagagggagtagggcatccccacacacctgcagagcctactcc

SEQ ID NO: 806338 - DNA, 120 bp, Artificial Sequence
  ENSG00000279182_1 (sequence is synthesized)
ccagccagctggctctcacctggacaacaacgcccatgacaggtaggttcagggtctgcccaggtgcaggcgccggccactggtcgatctcactgcacactgcggatgcagtagcccgca

SEQ ID NO: 806339 - DNA, 120 bp, Artificial Sequence
  ENSG00000279182_2 (sequence is synthesized)
tcaggaccctccccaaggagaagctgctgccgagcccaccaggggccacagctgggatgatgagaccacgatggccacgactgatggccactcacctgcttccaggcagggcgccagctt

SEQ ID NO: 806340 - DNA, 120 bp, Artificial Sequence
  ENSG00000279182_3 (sequence is synthesized)
gtcaaagtactcgggggcgatgaggcttagcagcgcttggaacagccggacaaagggcaagcgggacaccagcaccaaagactgcagggccacggggccagttagaggcccagtgccagg

SEQ ID NO: 806341 - DNA, 120 bp, Artificial Sequence
  ENSG00000279182_4 (sequence is synthesized)
accaccgaagccacgctcacctggagctggcccagggtagcacgtcccaccaacttcacaggacagctgccccaggaacgcctgacttggaccccagaattattagacaggagaaaaccc

SEQ ID NO: 806342 - DNA, 120 bp, Artificial Sequence
  ENSG00000279182_5 (sequence is synthesized)
aacactgaactccctgggtggcggccggtggggctggaccctagggccttcggagggaaacgcacggtggccagaatttctagaacgacctccccaggggctgagcagcttttactctct

SEQ ID NO: 806343 - DNA, 120 bp, Artificial Sequence
  ENSG00000279182_6 (sequence is synthesized)
gcctatggcttccaggctgggttgccctgacactgacagtgtgatgaccctccagccatcagtgaggggcagcagtgtcctggaccaggacagaagggccttgggtcccatgccaggcaa

SEQ ID NO: 806344 - DNA, 80 bp, Artificial Sequence
  ENSG00000279182_7 (sequence is synthesized)
ccaggcaaggacagggcggggggggggcgaggacagggcgggggggcggcgaggacagggtgggggggcggcgaggacag

SEQ ID NO: 806345 - DNA, 120 bp, Artificial Sequence
  ENSG00000204110_0 (sequence is synthesized)
agttagcccagggaggaaggggacagaatgacagcatggttatatcaatggtccaattcttggttccaacccttgattgtccttcgagagcaccacccattccttacaacacatctctcc

SEQ ID NO: 806346 - DNA, 120 bp, Artificial Sequence
  ENSG00000204110_1 (sequence is synthesized)
gcttcattttgggagttttgaagttattaaagttattgatttcttttccttacaaccaaaataatctaaattaagattgtggccaagtttggattaaaacctgcctcccggctccaagac

SEQ ID NO: 806347 - DNA, 120 bp, Artificial Sequence
  ENSG00000204110_2 (sequence is synthesized)
aactctgttctttaaatgtgaccttagatgcaccagactcatgccatccaaaggttggaggtactgcccagttttagcaatgaaagtcccacgtcacgggaaacctctgagtcctggaca

SEQ ID NO: 806348 - DNA, 120 bp, Artificial Sequence
  ENSG00000204110_3 (sequence is synthesized)
aatcaagatgacattttctatgcatatgcaagcatgtcaccaggagcagagcacagagggacaacacagcttttgcgcttccagctggctcccatcaagaagttagaagggagcctgcaa

SEQ ID NO: 806349 - DNA, 120 bp, Artificial Sequence
  ENSG00000204117_0 (sequence is synthesized)
ggagagagcctctgcttcaggacttgagctgtctctgctgcctctccaggggccacctggcctcaggaccccaggcaagcaccgtgggttgggaaccaacctggtggaaaactaaaatca

SEQ ID NO: 806350 - DNA, 120 bp, Artificial Sequence
  ENSG00000204117_1 (sequence is synthesized)
gcccatcttcaggtctaccgcggcggatgaagcctcacgcagaacagatacagttgcttggcaagcagggggctgcagttctgctccacctctggactcctgccccacaggggagaaacc

SEQ ID NO: 806351 - DNA, 120 bp, Artificial Sequence
  ENSG00000204117_2 (sequence is synthesized)
ggagtccagccatacctcagcacagccctcctgcccacatcgccaaggccctgtcagaggcatgacaaacagcttggctgatggcttataatgtcaaagatgatggaaacagggaggcga

SEQ ID NO: 806352 - DNA, 120 bp, Artificial Sequence
  ENSG00000204117_3 (sequence is synthesized)
cggctgaaagaatgggttggggacgcttgtcataactttatttgtgggagaggaggaaaccgaagcttgaagaggagaaatgacatatccaagtgccccatgaaggaggacaaaagccca

SEQ ID NO: 806353 - DNA, 120 bp, Artificial Sequence
  ENSG00000204117_4 (sequence is synthesized)
ggaggcagctgtcgcatcatcctcttcctttccctgcacatccgctacatcccttggtcctactgatttcacctgccgtttcctctatgtccaacgttactcagtccaagtccccaagca

SEQ ID NO: 806354 - DNA, 120 bp, Artificial Sequence
  ENSG00000204117_5 (sequence is synthesized)
attttcaaagaattgctcttactgcctcctccttgtcctgtggctctcagctcaaatggcacctcctccaagaagccttccctgattttctacccttctctgtgctcccagtttcctgga

SEQ ID NO: 806355 - DNA, 120 bp, Artificial Sequence
  ENSG00000204117_6 (sequence is synthesized)
ctgcccgtgccacagacgtgctggcactgtctgttgacatggcttgctctctacttccccactggactgggcactctgcaagggcaaagactgtgtttggcccctctttgtggctgcagc

SEQ ID NO: 806356 - DNA, 120 bp, Artificial Sequence
  ENSG00000204117_7 (sequence is synthesized)
tgtgccttgcacaggttcaggcacagtacgggtgttcactaatgtttgctgaatgaatcaatgaacaaatattcccttccagttctgctccacctctggactcctgccccacaggggaga

SEQ ID NO: 806357 - DNA, 60 bp, Artificial Sequence
  ENSG00000204117_8 (sequence is synthesized)
catcctcccctgctgctctcaaactcctccttcttttttttttttgagacagactcttga

SEQ ID NO: 806358 - DNA, 120 bp, Artificial Sequence
  ENSG00000204117_9 (sequence is synthesized)
ggattacaggcttgagccactgcgccagcaaactcattcttcttcttacagactctcttatttgagttcacctaaaagcctgagataaggaattggatgtacagaatttatttgcatggc

SEQ ID NO: 806359 - DNA, 120 bp, Artificial Sequence
  ENSG00000204117_10 (sequence is synthesized)
tatttgcatggccatcccaggaaacacttggaagtaggggagtgggaaaggaagacagggaggggtaggcagccaggaaaagggttatcgagcaggttacactgtggataacgggggctt

SEQ ID NO: 806360 - DNA, 120 bp, Artificial Sequence
  ENSG00000204117_11 (sequence is synthesized)
gattccaccagacctctgggagcccatgaataacacctcggagttctcctgcctgcggagttggggagcagggtatttatctactaggtcctatgggggcaggggtgttcattctcaggc

SEQ ID NO: 806361 - DNA, 120 bp, Artificial Sequence
  ENSG00000204117_12 (sequence is synthesized)
gtgttcattctcaggcacctctgacctgcttcacaggcgggaagagtgtgctccagagttgttaaagaaagtctttaggtaaagagacacagtgggctgggcacagtggctcacgcctgt

SEQ ID NO: 806362 - DNA, 120 bp, Artificial Sequence
  ENSG00000233882_0 (sequence is synthesized)
gccaactctcctgaaaaagtggtaggtgtatatgatctccgcataaagtgaaaaatatggtttctgctgaccagaggttagactgtggcaaagactgcttttgctcaaaatctattatcc

SEQ ID NO: 806363 - DNA, 120 bp, Artificial Sequence
  ENSG00000233882_1 (sequence is synthesized)
atcaagtaaatgggaggggaaagagtaaggacagaactgggactcatttctctcttactaaggggatgtcccatggaaagaacacctcttaccagcctcctaataaacgttctgatggta

SEQ ID NO: 806364 - DNA, 120 bp, Artificial Sequence
  ENSG00000233884_0 (sequence is synthesized)
ttgccatgccctctgagtctcgccctgcccacctctgcactctgtcctcattgtctcacttccatgctcctcttggggacacttgcacagcttgctgccccgtgaatgctccatgtcccc

SEQ ID NO: 806365 - DNA, 120 bp, Artificial Sequence
  ENSG00000233884_1 (sequence is synthesized)
ttttcagttccaggttgttcctctgctggaagagcacgtgcctcgcctggcctctttgtctggacaccttcttttctttaagaatccacccaggaatggctcctgacgcttccagatttc

SEQ ID NO: 806366 - DNA, 120 bp, Artificial Sequence
  ENSG00000233884_2 (sequence is synthesized)
ctagcactgggccttataacagcatttcttaaaatggggtccccagtccaacagcatcagcatcacatgggaatttgctagaaatgcaacttttggagccctccttggacctctgggatc

SEQ ID NO: 806367 - DNA, 120 bp, Artificial Sequence
  ENSG00000233884_3 (sequence is synthesized)
taaaactctgcagaactgatgctatgagaagcccaagccatggagaggccctaggcaggtgctctggtcaacagcccaagctaaatgcccagccaacaccagcatctgcggccagccgtt

SEQ ID NO: 806368 - DNA, 120 bp, Artificial Sequence
  ENSG00000233884_4 (sequence is synthesized)
cagggtagcttggtgtaaatgtggccacagactctcagtttgggtcctctcatctggtcctccaccgtctaaggccagcacaccattcctgaagcccagcttcacaccctggattttacc

SEQ ID NO: 806369 - DNA, 120 bp, Artificial Sequence
  ENSG00000233884_5 (sequence is synthesized)
cctcatcccttgaggacccgaagacaaacagccttgtcaacgcactagtgctttgtctcacctcaactgcaaagtggccatggggtcttcaccagcagctggggaggatgctccagaaac

SEQ ID NO: 806370 - DNA, 120 bp, Artificial Sequence
  ENSG00000233884_6 (sequence is synthesized)
tggccctgatagctttgccctgtaacttgactggattgcaaccactatgggtgagataaacatgatctctaaggctctttttcagtattgaaattacatgtatgtctgatcactttaaag

SEQ ID NO: 806371 - DNA, 120 bp, Artificial Sequence
  ENSG00000233884_7 (sequence is synthesized)
aaaaatgtgaattttttctttattaaaacaattttcctttgtccttatggatcatttgtcatattttgcttcaatcaagagttgggtcagacacaaccactgggcagctgacacgagatc

SEQ ID NO: 806372 - DNA, 120 bp, Artificial Sequence
  ENSG00000233885_0 (sequence is synthesized)
aggaaacaaactcctgtcctaggaggatttcatctggagtgcagcgtgctggtgacacgtgggaacaggcagcggcaaaggttgggtagccatgacatgccgagtcacactggaaaccac

SEQ ID NO: 806373 - DNA, 120 bp, Artificial Sequence
  ENSG00000233885_1 (sequence is synthesized)
ctccttcccgagcagcagggtcctcagttacagcttcgctgtgccttcaaagcctgcttctccagggcacctcactccgctcactggtcctcattcaatattcccatgtgtttgtttgtg

SEQ ID NO: 806374 - DNA, 120 bp, Artificial Sequence
  ENSG00000233885_2 (sequence is synthesized)
aggaagtccagaaaaggaatgttgcaaatggcctggtgaatattactcactgtaatttctttgggaatcctggtccaaaaaacaaagggtgttaccaggtgaaattctctcacgtatatc

SEQ ID NO: 806375 - DNA, 120 bp, Artificial Sequence
  ENSG00000233885_3 (sequence is synthesized)
tcatcatttattcacttaactcatcacagggaccatcccaggcagaggccccgtggagagggctcctgagccacagacatagcttagggccactctggggtgaggactgccttcctgtca

SEQ ID NO: 806376 - DNA, 120 bp, Artificial Sequence
  ENSG00000233885_4 (sequence is synthesized)
gatgtcaacaagttggttgaataattaggaaaaaagattctgagaactgagaaaagagaaagaaaacaaagcggatggcagaacggaatgacacatttgtgagtgagtctcagcagaccg

SEQ ID NO: 806377 - DNA, 120 bp, Artificial Sequence
  ENSG00000233885_5 (sequence is synthesized)
aaagctgagtcaaagcaccacaaaactctgggaccttatttcccatctcctagaaagacgggagacggagccacgccaggccaggcgtgatgttaatcgttccatcaaaagcacctaagt

SEQ ID NO: 806378 - DNA, 90 bp, Artificial Sequence
  ENSG00000233885_6 (sequence is synthesized)
ccaggcgtgatgttaatcgttccatcaaaagcacctaagtcactctacccctccaggacagggagcacagagatggagtctcactctcgt

SEQ ID NO: 806379 - DNA, 120 bp, Artificial Sequence
  ENSG00000233885_7 (sequence is synthesized)
agcctcccaagtagctgggattaccaggcacccaccttcaggatcatgtcctccaccacggacgcatacacgttcctgtggagtgccacgggctgcagggtgatcccaatctggaaaagc

SEQ ID NO: 806380 - DNA, 120 bp, Artificial Sequence
  ENSG00000233885_8 (sequence is synthesized)
ggaaaagcagaagaaagccgtttgttcgtatcgctgctttagaaacagcctctctccaaacaagcatacctccctgacatgcaaagcgatgcctggttggaaggaggactctgcaaacat

SEQ ID NO: 806381 - DNA, 120 bp, Artificial Sequence
  ENSG00000233885_9 (sequence is synthesized)
tgtctgtgaagtaatgaggaggatataaacctctgagcaaagctgagtgagctttcacaaccatgaggttctctaaaaatgacaaagcagacccttgagctcatctggctctaagagtgt

SEQ ID NO: 806382 - DNA, 120 bp, Artificial Sequence
  ENSG00000233885_10 (sequence is synthesized)
cctaagcactcactccatctcctactggattgatgtaagtataaaacaccttcatgggcaattcaactgttaggaaagaggtgtaagcctcacaccacagactgcagagatagtaatacc

SEQ ID NO: 806383 - DNA, 120 bp, Artificial Sequence
  ENSG00000233885_11 (sequence is synthesized)
tgttgtgagaagctgtctggtatccaactgccaaagcctgtctcaggatatcattcaccagctgttctgtagcctacaatggaagatgctgttattcttcaaatggccatctgcttgctg

SEQ ID NO: 806384 - DNA, 120 bp, Artificial Sequence
  ENSG00000233885_12 (sequence is synthesized)
atttaaccccatcccttaccccaaatgtttgaaaccactgcaactagggattaaaaagtccttaagaaaaaattaaaggcctcaataatagaccataatgataaaggccatgattctgag

SEQ ID NO: 806385 - DNA, 120 bp, Artificial Sequence
  ENSG00000233885_13 (sequence is synthesized)
atatgactataatcctattaaaatctctcaaatctccttcgtgggagaacatggttgggatctgcctgggttctgatacgcaatcaacactttgaaaggtctggaatcagactccaacgt

SEQ ID NO: 806386 - DNA, 120 bp, Artificial Sequence
  ENSG00000233885_14 (sequence is synthesized)
catccaatgaaagcacactgtctttcaccttgggccctgagcaactggcagatgctgaagagctgttaggctccagcagggtggataaatacctctctcctgtatagtaaggcaggtgca

SEQ ID NO: 806387 - DNA, 120 bp, Artificial Sequence
  ENSG00000233885_15 (sequence is synthesized)
cgccatctgcaccacaggcggggcactcaggagctatcaacacatcaggggaggattacgcgctgacgtgcaactcagaaagagtacgacgtgcctcatgagggaaaggtgcttctactg

SEQ ID NO: 806388 - DNA, 120 bp, Artificial Sequence
  ENSG00000233885_16 (sequence is synthesized)
aggcagatgagaaaaacaagatgaagagtaatcaaccatttctatctagccagctttgcttcacgtctgcgttcaacaagcaatgttttcacatgtaattagcatttctgcccaagggct

SEQ ID NO: 806389 - DNA, 120 bp, Artificial Sequence
  ENSG00000233885_17 (sequence is synthesized)
ctgatgtgggacggtgggagccctgagagcacacctgggtcaaccaggcagaaggaagtcaagcatctacggcaccagaagagtctgggtctgagtctgtgtctgtgaggctgaacacct

SEQ ID NO: 806390 - DNA, 120 bp, Artificial Sequence
  ENSG00000233885_18 (sequence is synthesized)
gggtctgggtctgtgaagctgaacgtctgaacatctagctctgagctggtctgctgcatgaactattaacaccacaacccctaccttctgtgtgacatccccaataaattcagaccctgg

SEQ ID NO: 806391 - DNA, 120 bp, Artificial Sequence
  ENSG00000233885_19 (sequence is synthesized)
ggttggtggcaggtagaacttgacttcctcttgtttctcttcctgctccttcttgatgtttatcttcactggctcggagaggctgaggatgtccacctcctcctcattctcgggttccct

SEQ ID NO: 806392 - DNA, 120 bp, Artificial Sequence
  ENSG00000233885_20 (sequence is synthesized)
tttctggaactgttgcaggtcctccagtttgcggcagaggttgtcagcagaggagaatgatgatgggcactctaaatgacaggcaagcagtgttacaacagctgtggggccaacggaaga

SEQ ID NO: 806393 - DNA, 120 bp, Artificial Sequence
  ENSG00000233885_21 (sequence is synthesized)
ggactttccgtctccaagagacccatggtctgaggaagggggataagcatcaggggagctgaccttctttccagttctaacattctatggatctataatgatgagaactagtaattcacg

SEQ ID NO: 806394 - DNA, 120 bp, Artificial Sequence
  ENSG00000233885_22 (sequence is synthesized)
agggagaaaggcataaacacaggcatcttgtgtgtgatctatgtaaggtaactgccatctaagatgaaagagtaggaattctcacttctgccaccaaaaaccaggtcatccccctccctc

SEQ ID NO: 806395 - DNA, 120 bp, Artificial Sequence
  ENSG00000233885_23 (sequence is synthesized)
tgagtattaaggactgacctgatttttcctcatctcaaatctggaaaatttagaaatgcagagtgaagaaaataaaaagaatcacccctattctcactgctcagagagcaggactgttaa

SEQ ID NO: 806396 - DNA, 120 bp, Artificial Sequence
  ENSG00000283118_0 (sequence is synthesized)
tcggtgagggggaacaccaaggttttgatacaaagtatggaaacaagggctgatgagatggaagcactcctggaagcctgacaagctccacacagtcctacagcgttccaccatgtaaaa

SEQ ID NO: 806397 - DNA, 120 bp, Artificial Sequence
  ENSG00000283118_1 (sequence is synthesized)
tcaggccttcattttgaacttggaaatctccccactcgcaggcagtggcaatgccagcaagccacaggtgggcaccacatgagcagaatgaaggtagatgccttgactcagaattggtgg

SEQ ID NO: 806398 - DNA, 120 bp, Artificial Sequence
  ENSG00000283118_2 (sequence is synthesized)
cttcttcagcaaacagtgatcatgaaaccaaattcagctttcttcaggaaaaggacaaaaactggggtataccactggatctactatggaaaagtgtttgagtgatgcccacctaatata

SEQ ID NO: 806399 - DNA, 120 bp, Artificial Sequence
  ENSG00000283118_3 (sequence is synthesized)
gaagaacttgtcatagctctgatgcagcgacaattgaccacttgcttttacataaacactaggaagaaaggcatggcatcaagtgttttgagagctgaattacatcaatatttccttttc

SEQ ID NO: 806400 - DNA, 120 bp, Artificial Sequence
  ENSG00000283118_4 (sequence is synthesized)
agaaaatctaaaattatttcaatgcacaaaaggtacatactgaatgtaattataactcttcaaaaaaatcaatctctttctctttttaaacttacataaaaataaattatctgactattt

SEQ ID NO: 806401 - DNA, 120 bp, Artificial Sequence
  ENSG00000283117_0 (sequence is synthesized)
gtgagggtgtgagggtcgcgctcctgctgtctggactttttctgtcctactgagacacggccgacatgagatgatgaacctcaagtaccaccccagacaacaaggctgcttcatcaggac

SEQ ID NO: 806402 - DNA, 120 bp, Artificial Sequence
  ENSG00000283117_1 (sequence is synthesized)
acaaacctgcctgtaccaggacctctgacctgtgtgcagcagagacactgaggataccattggcatcaatgtcaaaagtgacttcaatctgaggaacaccttggggttcaggaggtatgc

SEQ ID NO: 806403 - DNA, 120 bp, Artificial Sequence
  ENSG00000283117_2 (sequence is synthesized)
ccgtgaattcaaacttgccaagcaggttgttatccttggacatggcacgctcaccttcataaacctgaataagcacaccaggctggttgtcagaataggtaatgaaggtctgtgtctgct

SEQ ID NO: 806404 - DNA, 120 bp, Artificial Sequence
  ENSG00000283117_3 (sequence is synthesized)
tggtaggaatggtggtattacagttgatgaggatggtcatgactccactagcagtttcaataccaagggaaagaggagtgacgtccaagagcagcaaatcttgaacattttcagacttgt

SEQ ID NO: 806405 - DNA, 120 bp, Artificial Sequence
  ENSG00000283117_4 (sequence is synthesized)
ctccagacaggatggctgcctggacagccataagcaacagcttcatcatggctgatgctcttattcagttcttttccattgaagaagtcttggagaagcttctgaatcttggggatacta

SEQ ID NO: 806406 - DNA, 120 bp, Artificial Sequence
  ENSG00000283117_5 (sequence is synthesized)
atagaaccaccaaccaggacaatatcatgaatttgtgacttgtctggtttggcatctcgaagggctttctctactgggtccagggtgccacagaacaggtcagcattcaattcttcaaac

SEQ ID NO: 806407 - DNA, 120 bp, Artificial Sequence
  ENSG00000283117_6 (sequence is synthesized)
tgggcacaggtaatggaggtatagaagtcaattcctacatagagagaatcgatctcaatactgacttgggtgctggaagagagagtacgcttagcatgttcacaagcagtacggaggcat

SEQ ID NO: 806408 - DNA, 120 bp, Artificial Sequence
  ENSG00000283117_7 (sequence is synthesized)
cttacagctctcttgctctcactgatgtccttcttatgcttgcgcttgagctcagcaataaaatggttgaccattcggttgtcaaaatcttctccacccaagtggttgtctctggctgta

SEQ ID NO: 806409 - DNA, 120 bp, Artificial Sequence
  ENSG00000283117_8 (sequence is synthesized)
gacttgacctcaaagattccatcctcaatagtgaggattgacacaccgaaagtgccaccccccaggtcaaagataagcacgtttctttgtgctccaacctttttgtctgaacttttgtaa

SEQ ID NO: 806410 - DNA, 120 bp, Artificial Sequence
  ENSG00000283117_9 (sequence is synthesized)
acaatagcagcaacagttggctcattaataattctaagtacattgagaccagcaatagttccagcatctttggtaacctgaaactgagagtcattaaagtaagctggcactgtgaccaca

SEQ ID NO: 806411 - DNA, 120 bp, Artificial Sequence
  ENSG00000283117_10 (sequence is synthesized)
gcactggtaacagtcttcccaaggtaggcttctgcaatttccttcatctttgtcagaacaatagaggatacctcctctggatagaagcttttggtctctcccttgtattctacttggacc

SEQ ID NO: 806412 - DNA, 120 bp, Artificial Sequence
  ENSG00000283117_11 (sequence is synthesized)
tggggcctgtcagcatcattcactaccatgaagggccaatgcttcatatcagactggacaacagcatcatcaaatctgcgtccaatcagacgtttggcatcaaaaactgtgttggtgggg

SEQ ID NO: 806413 - DNA, 120 bp, Artificial Sequence
  ENSG00000283117_12 (sequence is synthesized)
gctggaaaacacccacgtaagagtaggtggtgctaagatcaataccaactgcaggtcccttggacatggttgctggcatgtagccctggctccgataaagaagaaagccacaggaacccg

SEQ ID NO: 806414 - DNA, 120 bp, Artificial Sequence
  ENSG00000283117_13 (sequence is synthesized)
agagctgcaggcgagttcaatgagctaggatttcttaatatatatgtgataatgttttaactttgataattgacttttataatgacttgagtagtcttaaattgtctttcatttaaaact

SEQ ID NO: 806415 - DNA, 120 bp, Artificial Sequence
  ENSG00000283117_14 (sequence is synthesized)
tttgttcttttaaaaaagcaccaagtctatgctactaacaaaaatttccttttaccatgtagactacttgggatgaaaataacttttcataattactatcatgaagggaggagagtggaa

SEQ ID NO: 806416 - DNA, 120 bp, Artificial Sequence
  ENSG00000283117_15 (sequence is synthesized)
agttgccagatactgcagcaagatataaagatgaattcttcaaatgaggaagcaaactttatcaagtggttgaatttcttagatcaccttgttggacataatttcttgtaaacaaattat

SEQ ID NO: 806417 - DNA, 120 bp, Artificial Sequence
  ENSG00000283117_16 (sequence is synthesized)
gcagtcagtgtcacgttcatgcagagtcttttaacttaaaattcattacaggtaacactttcaaaaagaagttctgtagtcttgcatactatttaccacaccatatttactgcacttagc

SEQ ID NO: 806418 - DNA, 120 bp, Artificial Sequence
  ENSG00000283117_17 (sequence is synthesized)
ttcattatggaggaaagaacaatagtaaactatcaataactgagacaataatcatattcattagtgatgagtcaaacaggttatacttattttttaaaataaaaacatttgtaaattttt

SEQ ID NO: 806419 - DNA, 120 bp, Artificial Sequence
  ENSG00000283117_18 (sequence is synthesized)
ctctacgtttttaaaacaacagtttaacaatagcagttctgttattttagctttaattttttgtaccaacagttaatttgctcatgcccaaagatttacatttataaaaaatgttctgcc

SEQ ID NO: 806420 - DNA, 120 bp, Artificial Sequence
  ENSG00000283117_19 (sequence is synthesized)
atgcaagttttaagagatttttgaattgttgacaatactcagcacagtcacatgtctctcataaatccacccagacttaagaaccaattttcagtgcaactcatgaagacaaagaatagc

SEQ ID NO: 806421 - DNA, 120 bp, Artificial Sequence
  ENSG00000283117_20 (sequence is synthesized)
acacattgttgaaaatcatttaaaaaatcattaaatttttttgcatttaatattttttcagctttcttaagatataattaacaaaaattgtatatattcaagttgtgttatgtgaggttt

SEQ ID NO: 806422 - DNA, 120 bp, Artificial Sequence
  ENSG00000283117_21 (sequence is synthesized)
ttcaagttgtgttatgtgaggttttgatacatgtatacatagtaaaataattaccacagttaagctaattatactatacatagtaaaataattaccacaatcaagctaattaatatattt

SEQ ID NO: 806423 - DNA, 120 bp, Artificial Sequence
  ENSG00000283117_22 (sequence is synthesized)
ctttttcttgttgtggtgagaatacttaagatctactctcttagaaaatttcaggtatataatacattattattaaccatagttgccatgctatacattagggctccagaacttattcat

SEQ ID NO: 806424 - DNA, 120 bp, Artificial Sequence
  ENSG00000283117_23 (sequence is synthesized)
ttcataacttcaagttataaaagtcacgataaaagtttgtgccttttgcaagtttgtaccttttgatgaacatcttcccatatcttcccattttcctcagtcccctgcacctggaaacca

SEQ ID NO: 806425 - DNA, 120 bp, Artificial Sequence
  ENSG00000283117_24 (sequence is synthesized)
tcccctgcacctggaaaccacccttctaaactgtttatatgagttcaccttttttcagattccacatataagtgagatcatgcagtgcttgtgtttctgtgtctggcttatttcacttag

SEQ ID NO: 806426 - DNA, 120 bp, Artificial Sequence
  ENSG00000250629_0 (sequence is synthesized)
acagggacaggatgagactgacaggcctgactgaataacaaagccccgtggactgtgattggtaaagaagactgaggttccctggcctgagagaagtgaagatccagccatgagaggagc

SEQ ID NO: 806427 - DNA, 120 bp, Artificial Sequence
  ENSG00000250629_1 (sequence is synthesized)
tagccagtgaatctggcccatctcagtgatattaagcttgagggccattgtgaattgaatttcatctctgggaactgagaggaccctggatgaagcaacttattgtgtttaaggaacttt

SEQ ID NO: 806428 - DNA, 120 bp, Artificial Sequence
  ENSG00000250629_2 (sequence is synthesized)
gagcaaccttctagaatgggttactaaagaagatgctagtgcctggaaagggagattttgagagccaagttggattggaccatcctcactctctttcctcacaggtttaattgacttgac

SEQ ID NO: 806429 - DNA, 120 bp, Artificial Sequence
  ENSG00000250629_3 (sequence is synthesized)
catgaatcaataaggaatgctgtagacatagtgggcctggatttcatgaggcagttgaaaatgtttcccatgagatcctcatgggaactaaataatatggcctgagggataaggagattt

SEQ ID NO: 806430 - DNA, 120 bp, Artificial Sequence
  ENSG00000258451_0 (sequence is synthesized)
cggcagaacagctgacaccaccaactttaaagagcccaactgatgaactgatcagcatgagaatactgttttttcatctctctgtcccatgacttcactctgcattcttcaaccaattag

SEQ ID NO: 806431 - DNA, 120 bp, Artificial Sequence
  ENSG00000258451_1 (sequence is synthesized)
tgatctcttatttccacctactccaaatccttaaaaacaacagcctcaaactctttgaggaaatggatttgaggtttccttccatcttttggttcagcagccctgcaattaaacctcttt

SEQ ID NO: 806432 - DNA, 120 bp, Artificial Sequence
  ENSG00000258451_2 (sequence is synthesized)
ctctgctgcaacccagtgtcttggcatattgacatgctgtgcacatcaggcaaaagacctattaccattacatgaggacccctccggagggagataatggtgggggcatttctgggaggc

SEQ ID NO: 806433 - DNA, 120 bp, Artificial Sequence
  ENSG00000258451_3 (sequence is synthesized)
cagccccagccccagcagggtcagcagcaaaagcagaagcaatgaatgggtcctctgcagagccatcagtatcttagaggtgcctagaaaagaaagcaaggggcaggagaaataagagag

SEQ ID NO: 806434 - DNA, 120 bp, Artificial Sequence
  ENSG00000258451_4 (sequence is synthesized)
aagttgctgtggccagtacaatgacacagggcagggactgactgcgtggctgccaggtttgtgtggacagagtataaaaagagagaaaagggtgaggtcaggccccgtctcctcatgatg

SEQ ID NO: 806435 - DNA, 120 bp, Artificial Sequence
  ENSG00000258451_5 (sequence is synthesized)
ctttcacagtatctgtcatcccggccctgtggtttggcatcatagtgctgggtcaggaagtgtgtgtacctggagttatcctgagccagggtcggtggggtcagacccagacccagcacg

SEQ ID NO: 806436 - DNA, 120 bp, Artificial Sequence
  ENSG00000258451_6 (sequence is synthesized)
aagaccaacaacaaaacgcccaggcccatcaccatctcttccaacacaggctcctgcggagggcaaaaggaggtgtggtagacccaagaacagcatcaccaaattaggccaaaaggacag

SEQ ID NO: 806437 - DNA, 120 bp, Artificial Sequence
  ENSG00000253259_0 (sequence is synthesized)
ggggaattgtggttgaacctggagagaagccacagcggaccacttgcccacatcacatctcaagagaaccaggagagtacatctgtgtctaaagccatgacccaggagtaggttgaactg

SEQ ID NO: 806438 - DNA, 120 bp, Artificial Sequence
  ENSG00000253259_1 (sequence is synthesized)
tctgcctaaagatgggaagcaacgatttcccaaatgacctgagccccagactgacattgtttactcataactgggaaaccagacaacagaggggtgctgaaatcctacagtaggcttata

SEQ ID NO: 806439 - DNA, 120 bp, Artificial Sequence
  ENSG00000253259_2 (sequence is synthesized)
gaaatgtctaggctattattgcaacagaatggacattctgacccctgttatatcgtttcctggggcagaagctatgagactattatgaaaattatttaaaccgctttccatagcagaatc

SEQ ID NO: 806440 - DNA, 120 bp, Artificial Sequence
  ENSG00000288034_0 (sequence is synthesized)
ggagattgggctggaaaagtctctcggaggctcgctgggaccctgaggggaaaagggccttagggtgggtgagtgggcaggatttggagaaagttgccccttgacttacagcaagaagtg

SEQ ID NO: 806441 - DNA, 120 bp, Artificial Sequence
  ENSG00000288034_1 (sequence is synthesized)
gaaggattagaagccattaattcctggaattgttctctggagtgtaagtgacaacagctgtagctatctgctcagtgtctttccacatggactcccctgtacaagggacgcatgaataca

SEQ ID NO: 806442 - DNA, 120 bp, Artificial Sequence
  ENSG00000288034_2 (sequence is synthesized)
gaaaatggccttagtcctgattcccctctctcttacccattctcaggcaggcacaggcggagagagggagactttcccatttgctctgattatggagaggccctttgaaagtatcactct

SEQ ID NO: 806443 - DNA, 120 bp, Artificial Sequence
  ENSG00000288034_3 (sequence is synthesized)
gtcctcacaaagggctaagtttcacgttaatccaaatctaacctctctcagcctcaatttccccatctgaaatgaggaactggattagtcatctcaaggggtctttctggcctttcaaat

SEQ ID NO: 806444 - DNA, 120 bp, Artificial Sequence
  ENSG00000288034_4 (sequence is synthesized)
acaaagcaaactaacagataaaatctcctttcctctatcatcagggctgggctcagttaaaactcagaatgaaaagttgtcagagaagaattataaatttctattaaaatagcaattgta

SEQ ID NO: 806445 - DNA, 120 bp, Artificial Sequence
  ENSG00000288037_0 (sequence is synthesized)
ttcgggggaaaatggccatcccatcgttctacatcaaccgccggtttttctttagggtgaagtgagaggcttgagggcagggaagcatccaaagggaatttctcagttgccagcacttga

SEQ ID NO: 806446 - DNA, 120 bp, Artificial Sequence
  ENSG00000288037_1 (sequence is synthesized)
agtttcaaaaacgaggatcaagccgttcctgggagcatcctatgagacatttggacacaggtttacttggagtctcggagatatgacggaatctggaaaagtcaaaggaaaaaaagccaa

SEQ ID NO: 806447 - DNA, 120 bp, Artificial Sequence
  ENSG00000288037_2 (sequence is synthesized)
tatctccataagtcagtctttttaattgcctaaagttttaaccaagtcccggagctttggctaatgatgaaagaggtaacagaacaaactcaagtctcttgtcgagcagatggagctggt

SEQ ID NO: 806448 - DNA, 120 bp, Artificial Sequence
  ENSG00000288037_3 (sequence is synthesized)
ggattccaggacactccccaagggagccagggatgaccatctacggatctcaaagtggcaacatttgcaaaccaggacccaggagccaatttaacaaatgtcagggcagcctgcagagag

SEQ ID NO: 806449 - DNA, 120 bp, Artificial Sequence
  ENSG00000288037_4 (sequence is synthesized)
gaatggaaggaagaaacatgcattccacatctgggagtgtttagaagttggaaaccgatcatttagaagaagacagagaggaattccctttatttctcaatcaataaatcattgccacat

SEQ ID NO: 806450 - DNA, 120 bp, Artificial Sequence
  ENSG00000288036_0 (sequence is synthesized)
gtaaataaaggaagggcatgaacagaagccagctgccatcctgcttggtgaggcccacctggtgagaaactgaagcatcttgtcagtagcaatgtgagtgagcttgggaacagatcttcc

SEQ ID NO: 806451 - DNA, 120 bp, Artificial Sequence
  ENSG00000288036_1 (sequence is synthesized)
ataccagtcaaatcttcagatgactgtaatcccagccgacattttgactgcaactttatgagctagaaccgcacagctaagctgctcttagatttctgactcagaagctgtgtgagcata

SEQ ID NO: 806452 - DNA, 120 bp, Artificial Sequence
  ENSG00000288036_2 (sequence is synthesized)
agtgcattgttatcaattgctaagttttgagatgatttgttgtagataaataatataccatagaatcatgcttgagttgctcttttcaaaaccagacccttctttaattccgtgtatccc

SEQ ID NO: 806453 - DNA, 120 bp, Artificial Sequence
  ENSG00000288036_3 (sequence is synthesized)
actttgctgtattttttcagtccatttcagacttttgttcttaccactctattcaaattgctcgtgtcaaagtcactgaagacttcaatgttacatccaatagtaaatttatacatacat

SEQ ID NO: 806454 - DNA, 120 bp, Artificial Sequence
  ENSG00000288036_4 (sequence is synthesized)
tttttatcacagttggcctctccggttggtaatatttaacttgaagcattgtctttgcatggtttccaggaaaatccagtttccatttttcatttctccttctcctcatctttcagtgtt

SEQ ID NO: 806455 - DNA, 120 bp, Artificial Sequence
  ENSG00000288036_5 (sequence is synthesized)
gcgtttccctagagccgtgttttgattagttattccgattctacacctactgattgttcagttacaccatactgaataacatttgaaaagtcaagcaatggataaagtttccctgaacat

SEQ ID NO: 806456 - DNA, 120 bp, Artificial Sequence
  ENSG00000288030_0 (sequence is synthesized)
tggcacagagggaccacagctacagctgttttttaaaaatctcctgctgaaattcttggtttttaccttagtacttcttttatagcttcaatgaaatgggatggaaacaacatctttatc

SEQ ID NO: 806457 - DNA, 120 bp, Artificial Sequence
  ENSG00000288030_1 (sequence is synthesized)
tctgaggaaactgaacagtcactgttaaccaccaactgaggtgttaacttataacccctttttgtgccagatctttttatctgattccctgcaggatatatctaggcatcaggacaagat

SEQ ID NO: 806458 - DNA, 120 bp, Artificial Sequence
  ENSG00000288030_2 (sequence is synthesized)
taaacaaagatgtcaacttaaataatgatcctgtgactggctagagttaaatgatccagagaaatagtacatgctgtttacttcccagggagccgatggattcataatacgggattttta

SEQ ID NO: 806459 - DNA, 120 bp, Artificial Sequence
  ENSG00000288030_3 (sequence is synthesized)
cagggtatgtaccttaaattagatgattgtggttgagtgtaatgtagcaaaataacccatttggttcatcagaaaatgatcatatttggaatggtctttctcacctttaaattggcagag

SEQ ID NO: 806460 - DNA, 120 bp, Artificial Sequence
  ENSG00000288030_4 (sequence is synthesized)
ctggactagaggttgtgtaagatctcttgcagtgtagtgcatcttgctttgaaaaatttggccctgcccacattcaaactatgctttgtcttatgcaatagactgaatggcattgtcttt

SEQ ID NO: 806461 - DNA, 120 bp, Artificial Sequence
  ENSG00000288030_5 (sequence is synthesized)
ttaactttgggcaattattttgcacatatgaatgcaattgttgaaattgatgggtgtcagtcaagtgatgaagactttaatattgtaagggcctttaggctcaatctctatatcaattgt

SEQ ID NO: 806462 - DNA, 120 bp, Artificial Sequence
  ENSG00000288030_6 (sequence is synthesized)
ggcatgtgtggagttttgaatgtaagattttcttaaagttttgtgttatcacaaaccacccagatttcagacgaagagacgtagtccattttaagattatttttatgcaaaacaatctat

SEQ ID NO: 806463 - DNA, 120 bp, Artificial Sequence
  ENSG00000288030_7 (sequence is synthesized)
aattatgcctttccatttgtttctttcagcattgacagcccgtttcccctcctggctgaacagtatggttttgaactttgttattgtaattctgcagccaaaattgacaatgtggagcca

SEQ ID NO: 806464 - DNA, 120 bp, Artificial Sequence
  ENSG00000288030_8 (sequence is synthesized)
taaaatagtgtagattaaaaatcccttaaaggtaaataagaaggaagagttgaagatttctctgtattactttatcagccacacacctagagacaacatggaaatgtgggtaggaaatat

SEQ ID NO: 806465 - DNA, 120 bp, Artificial Sequence
  ENSG00000288030_9 (sequence is synthesized)
tttgaatgcttatattaaaaactatagtggtatatgattttttgaaaattcatatagtttaacgacagaaactgtctctgataagggaaacaaaattggatgtagaagtaaaaagagcat

SEQ ID NO: 806466 - DNA, 120 bp, Artificial Sequence
  ENSG00000288030_10 (sequence is synthesized)
gactaaacaaatgactgcatcagcaaaatgaaatgtattgaaacagacaaatcatcacatcagaatgaagttacttcctgaatttaccacatgaaaaaaaaactgtggaaattaacaaga

SEQ ID NO: 806467 - DNA, 120 bp, Artificial Sequence
  ENSG00000288030_11 (sequence is synthesized)
aattagccatctgtatttgttacaatatagatatagctgcatgtgagagagaccaaaaatagcttaataaactggcttatctgtcttgtctgagtggctttgcctgcaagtcatcagggg

SEQ ID NO: 806468 - DNA, 120 bp, Artificial Sequence
  ENSG00000288030_12 (sequence is synthesized)
cctgcactaatactatcttctctgcaatctcaagtgtgttgagattggtaccaggtgataccaggtctgcattcaaaccaggaaggacgaaatgggaagggaagagaatacactttcctt

SEQ ID NO: 806469 - DNA, 120 bp, Artificial Sequence
  ENSG00000288030_13 (sequence is synthesized)
tcaaggacatggtcagaggacatgggcatccttatgctccatctcttggctagaagttagtcgcacggtccccgcccctcatgtgaggctaggaaatgtaggctttattattttggccag

SEQ ID NO: 806470 - DNA, 120 bp, Artificial Sequence
  ENSG00000288030_14 (sequence is synthesized)
gtgcttatctaaatattctactgagaaagagaagagtggatattggcagaacaacatatttgaaaccagatatccctaaataatcagagctgcaaaaatccaaaaataaaaaataaaaaa

SEQ ID NO: 806471 - DNA, 120 bp, Artificial Sequence
  ENSG00000288033_0 (sequence is synthesized)
aggtgaggagcgcctctgcccggccgcccggtctgggaagtgggcgcctctgcccagctgccccgtctgggaggtggggggcgcctctgcctggctgccccgtctgggagttgaggggtg

SEQ ID NO: 806472 - DNA, 120 bp, Artificial Sequence
  ENSG00000288033_1 (sequence is synthesized)
gaggggtgcctctgcccgaccgccccacctgggaagtgaggggcacctctgcccagccaccgccttatctggaaggtggggagcgcctctgcccgactgccccgtctgggaagtgggcgc

SEQ ID NO: 806473 - DNA, 77 bp, Artificial Sequence
  ENSG00000288033_2 (sequence is synthesized)
ccaaccccgtgctctctgaacagatgtgctttgttaaacagatgcttggaggcagcatgctcgttaagagtcatcac

SEQ ID NO: 806474 - DNA, 85 bp, Artificial Sequence
  ENSG00000288032_0 (sequence is synthesized)
gatgacttagctgggctcacctctgtttcttcccttgaagccttgggatgtcttcctgttctatgagaaattccttgagacacac

SEQ ID NO: 806475 - DNA, 120 bp, Artificial Sequence
  ENSG00000288032_1 (sequence is synthesized)
ggatgtcttcctgttctatgagaaattccttgagacacactgggaatccctttcccttaaggaaaagcttttctgcaactttatgtgactcaatatgaattaacataatattaacaatgg

SEQ ID NO: 806476 - DNA, 120 bp, Artificial Sequence
  ENSG00000288032_2 (sequence is synthesized)
caatgatagttgtgtcattggactagtggaattttaagatattaatatttaagatatattgtaatttcagagatgcgtggcttctttcacttggcaagtttgaaatgattcatttatgtt

SEQ ID NO: 806477 - DNA, 120 bp, Artificial Sequence
  ENSG00000288032_3 (sequence is synthesized)
aaaggacagcataccactctggagcaatagagaattttaaaagagcagtttggctaaagagtaggccaggttcttataggtcttgggaaatattttgagctttattgaacagtctaaggg

SEQ ID NO: 806478 - DNA, 120 bp, Artificial Sequence
  ENSG00000288032_4 (sequence is synthesized)
gaagtcactgtaaggttttgagcaaaggaagatttgaatctgattttttttttctttcttttaagcacactggcatgttatccaaactcagtatcaccagtaatggaacaaaatgacatt

SEQ ID NO: 806479 - DNA, 120 bp, Artificial Sequence
  ENSG00000288032_5 (sequence is synthesized)
gtgtctttgcattgtatcatatcaagaggaggcatgataacattaccaatgtaaatttcttgtcaaatgtttatctagaatctgatcatgatacaacaaagagatccagtgtgggacatt

SEQ ID NO: 806480 - DNA, 120 bp, Artificial Sequence
  ENSG00000288032_6 (sequence is synthesized)
ctacaaaaagctggtctgatctttaaaaaaggtcaatgccataaaagactataaaaagagttgctttaatgtgaagtattttcctggagtcacttcctttgggacgttgccattctttcc

SEQ ID NO: 806481 - DNA, 120 bp, Artificial Sequence
  ENSG00000253252_0 (sequence is synthesized)
gcagatgcagaaactgaggctccaagagcagaagtgacaccgaagtcacctagcccagaattgtctatcatcaaggctgctactggcctctctaggagcttttgtgtccacagaaaaaga

SEQ ID NO: 806482 - DNA, 120 bp, Artificial Sequence
  ENSG00000253252_1 (sequence is synthesized)
tcaacttaggccagaactttgtgcagaatgcaaaatatgcacccctctgctggccctgtctgtagaagtaaagaagttaagaaacagatcaataaatgatggtctattcacatgatgaaa

SEQ ID NO: 806483 - DNA, 120 bp, Artificial Sequence
  ENSG00000288039_0 (sequence is synthesized)
taaacatcagggatgcaaccatgacatgacatatgttcctgtccgcaatgagcctgcagtgtgctggagatctcgatgactgcaccacaggtaaaatgaacaatcggttattctcccttt

SEQ ID NO: 806484 - DNA, 120 bp, Artificial Sequence
  ENSG00000288039_1 (sequence is synthesized)
cctggcagaggagtttctttgaaatttatcatcagaaaatccactcaacaaccagttcaatctacataagaaagataagatgtaatcaaactaccccccaaattgtctaaagaccagaat

SEQ ID NO: 806485 - DNA, 120 bp, Artificial Sequence
  ENSG00000288039_2 (sequence is synthesized)
gaaaagaagatctcagcatatccactgtggctactaggccatattaaacatcaatttttgattttccggaatgagaagaaaggttgaatcatcaaagatgactatgggggcttgcactaa

SEQ ID NO: 806486 - DNA, 120 bp, Artificial Sequence
  ENSG00000288039_3 (sequence is synthesized)
gagtctacaaagtcttcattattggaaagtttctaagagatacaaaaccggaagatatgctctttggttgtattctctaaaagcaaacccttaggaaagggttcaggtgaaagcaattca

SEQ ID NO: 806487 - DNA, 120 bp, Artificial Sequence
  ENSG00000288039_4 (sequence is synthesized)
gactaggaaatgaggaaaggtaatatagaaaatgtgaatgagcaggttgctgctgtgggcatcggggtctcatttttgcagaagactctttgagagactacatagaacaatccttacaat

SEQ ID NO: 806488 - DNA, 120 bp, Artificial Sequence
  ENSG00000288039_5 (sequence is synthesized)
cggcccaacaaagcataaggaagcagggtatttatccaccaactcatgatgtgatggctgttcttggggatttaactctccacttcaggcctggccctccgtcatgttagccacgcaggc

SEQ ID NO: 806489 - DNA, 120 bp, Artificial Sequence
  ENSG00000288039_6 (sequence is synthesized)
tcttatgggccacagaaagacctcaagagttcagaagccagctgcatgcaagggaatggtacaaaaacttcagatgacatcctgcataggccaaaggaatctgccaacaacatctgtcaa

SEQ ID NO: 806490 - DNA, 120 bp, Artificial Sequence
  ENSG00000288039_7 (sequence is synthesized)
agctatctacaatacagtacgttgtatcatgttttcccaagcatgagacaagtaccaccagtggttcaggagatgattttaggtggttctgggtcatggaattaaataacattgaattac

SEQ ID NO: 806491 - DNA, 120 bp, Artificial Sequence
  ENSG00000288038_0 (sequence is synthesized)
acaggaactggctgcagctgccactgtcgccttgtcatccttgacttctcacatgattaaattttaattcaagtctatgaagcgtaaacttggttcaaatagcgagtctgtgctgccacc

SEQ ID NO: 806492 - DNA, 120 bp, Artificial Sequence
  ENSG00000288038_1 (sequence is synthesized)
tgctggaaaatgtgagaaaattgtctgttttaatggaatagcagtgatgtatgctgcattaaataagaaaactcaggaagatccagacacacgcagaggtaagaccatttaaagatggaa

SEQ ID NO: 806493 - DNA, 120 bp, Artificial Sequence
  ENSG00000288038_2 (sequence is synthesized)
agaagattactgtctacaagacaaggaaagaggccgtagaagaaaccaaccaggccaaaactttcatctcagacttctagccttcagaactacttgcatcacaagaagaaaagaagaaaa

SEQ ID NO: 806494 - DNA, 120 bp, Artificial Sequence
  ENSG00000288038_3 (sequence is synthesized)
aagagatgtaactatgggaaatactggatatgttaattcacttgacctgtagtaatcacttcattatatatgtataccaaaacatcttgcagtacaacttaaacatacagaattttttaa

SEQ ID NO: 806495 - DNA, 120 bp, Artificial Sequence
  ENSG00000288038_4 (sequence is synthesized)
aagactgcatcttcatgcttgcttaaggacataaattttcagagagcactgtgagaaaataatcatgttcatggtgatgtctaatcatcgcccaatggtgctcagtggcattataggagc

SEQ ID NO: 806496 - DNA, 120 bp, Artificial Sequence
  ENSG00000288038_5 (sequence is synthesized)
acaaaaatcagaagtattccaatcacattgcatttgaattctatgctccaaattcataatccaatctcccatccaaattactgtttgacagagatcattaatttgatttgccaatttttg

SEQ ID NO: 806497 - DNA, 120 bp, Artificial Sequence
  ENSG00000288038_6 (sequence is synthesized)
aagaatttttctgccaactatccacaaagcctgcagtttgaatagaagagtgcaaagcaacagcagcagcagcagtagctgtaacagctataaggcccaggatcacagctattaaagtcg

SEQ ID NO: 806498 - DNA, 120 bp, Artificial Sequence
  ENSG00000288038_7 (sequence is synthesized)
gtggagttgcttggcgagctttacagtttccatctgctcaacagagacgttcttctgagccatctgacgaactgggggtgcagggatgttccgaggtcttttcctcttccttggattctg

SEQ ID NO: 806499 - DNA, 120 bp, Artificial Sequence
  ENSG00000288038_8 (sequence is synthesized)
gctcatggcacagcttaagatgtcttgtgggtacccagacaggaagctgattctctcctggccttttccaggaatatagcccatgtttgacattattttttgatgagcttcaccatacca

SEQ ID NO: 806500 - DNA, 120 bp, Artificial Sequence
  ENSG00000288038_9 (sequence is synthesized)
gggagaagggattgaaatttctgtgccccattgctgaagcagatctctcccccataagttaacaagaatcagtatatttcaaaaagaagagggaggtgaaatgtaaaaggaaaatagaaa

SEQ ID NO: 806501 - DNA, 120 bp, Artificial Sequence
  ENSG00000288038_10 (sequence is synthesized)
tgtgggaccccaattcaagatgccaaaaggaaaaattaagctgaaactgagtcatgcaagaagctgcctttcttttggttcctaagcagataggtacagataaaaggttgaatatcttca

SEQ ID NO: 806502 - DNA, 120 bp, Artificial Sequence
  ENSG00000253256_0 (sequence is synthesized)
cgagaattcgttttaacctcgtcactgactggactagactgtaaactccttggcgtctgggatggctcagccgtgcccagcaccaagtgcaggcactcaaacccctgtggagtgcctcag

SEQ ID NO: 806503 - DNA, 120 bp, Artificial Sequence
  ENSG00000253256_1 (sequence is synthesized)
actacttcaccatagtcataaatcctgtcacatcccagtgatgcagttcatgagtctcttaatctagcctgaactctacttttgcattcagacaggcaggggatgcctcatcctttgaat

SEQ ID NO: 806504 - DNA, 120 bp, Artificial Sequence
  ENSG00000253256_2 (sequence is synthesized)
acccaagcactataagagaggatgttaagcaagatctaaaaatcaacgtgatcaacaagagcagtaatcttttcttttccaagaaaaaagaatggaagaaacagaaggtactgggcgcaa

SEQ ID NO: 806505 - DNA, 120 bp, Artificial Sequence
  ENSG00000253256_3 (sequence is synthesized)
tgtattaaacactgtgttttgaatgactcgagattctacgactgcctggaggggttttgctggatcggtgcaatgtcatgtgattattggaaattaatcccttttttcaagaatttttca

SEQ ID NO: 806506 - DNA, 120 bp, Artificial Sequence
  ENSG00000253256_4 (sequence is synthesized)
agaattaggttaagttagatttgagcaaacttaattaccttgccaggcatttgtttttcagaaacataataatctatgtatttgattcaattagtagtaggcccatgggttgttctgtaa

SEQ ID NO: 806507 - DNA, 120 bp, Artificial Sequence
  ENSG00000287913_0 (sequence is synthesized)
ggccctggccctttccagaggacaatagccttcatgcaagggaaaattccatcgcccagggttcaagtctccaaggagttgctggggcctctatttagcctggagtgggctctgaggagc

SEQ ID NO: 806508 - DNA, 120 bp, Artificial Sequence
  ENSG00000287913_1 (sequence is synthesized)
cgctgcagctgcccggcttgttttccccctcgctgtgttttatttttaacccctgagctgccaaggattgtttttccccaaccagtgcctgggaactaagggagggaagaaataaggctt

SEQ ID NO: 806509 - DNA, 120 bp, Artificial Sequence
  ENSG00000287913_2 (sequence is synthesized)
tgttccctttggggaactaattgggaaagacaggcagtgtggccagcttggctctattagggtgtggggctcccacccctcactgcacaacatcttcaccccaatccatacccaggaggc

SEQ ID NO: 806510 - DNA, 120 bp, Artificial Sequence
  ENSG00000287913_3 (sequence is synthesized)
tgggagtgcagaagtgccccccaggatgcaaccagaggcccgggggctggtgggaacgcaagtgcagcttcaagactgcaaaggcagctcagagccactttcttgggctccgaagatatt

SEQ ID NO: 806511 - DNA, 120 bp, Artificial Sequence
  ENSG00000287913_4 (sequence is synthesized)
caggaaataagatgttgggagctggaaatgtctatttttcccatttcaaccccccccaaactaacccctgcttttctcctgctggtggtggtggttgttgttttccagacctgcataatg

SEQ ID NO: 806512 - DNA, 120 bp, Artificial Sequence
  ENSG00000287913_5 (sequence is synthesized)
aactctagaagaaaagtgagggaactcaaaaaagtaagaaaccagaaaataaagacattatacttttaaacactaggctaatcaatgggaaacacccagcaaccccacttataagtttac

SEQ ID NO: 806513 - DNA, 120 bp, Artificial Sequence
  ENSG00000287913_6 (sequence is synthesized)
tccgtaaaaaatattccttatactcagaaatttaatttcattgcaaatcagctaggaattaatgaaaaatttcttccacggccattttattttaagatcaaatggattccagatagggac

SEQ ID NO: 806514 - DNA, 120 bp, Artificial Sequence
  ENSG00000287913_7 (sequence is synthesized)
ccattaagaatctaaggaccattttgatcccgtctaggaacagagcaaatttctaaggaatcacccacttgcagcaagccagcacattcaagttagggctgtggcatatgacacccagtg

SEQ ID NO: 806515 - DNA, 120 bp, Artificial Sequence
  ENSG00000287913_8 (sequence is synthesized)
cgttcaagtaaagactgctcgtctatttaccaagaatatttgagaaaagaaaatgcccctgcctggtggacaatagcacaaagcatttctctgtacctgggcacatttgttccactcgat

SEQ ID NO: 806516 - DNA, 120 bp, Artificial Sequence
  ENSG00000287913_9 (sequence is synthesized)
aaaagaggacccctgacccaggtacacaggcagttggagaagaggacaacgatgaactgatacaaaggtaagaggttcccggtagcattggaagaacacagattggtgcataatgcatgg

SEQ ID NO: 806517 - DNA, 120 bp, Artificial Sequence
  ENSG00000287913_10 (sequence is synthesized)
cataatgcatggcatgtgcaataaaagtaagttgcattaaaacttcagccttgttaatgactacaaaaaaaattgttagaaagaatgaataagatcttggccaggcacagtggctcacgc

SEQ ID NO: 806518 - DNA, 120 bp, Artificial Sequence
  ENSG00000287913_11 (sequence is synthesized)
tccagcctgggagacaagagcgaaaagaatgaataagatctgatatttgatagcacaacaaggtgactatagtcaataatgattgaattgtacatttaaaaataacgaaaagagtataat

SEQ ID NO: 806519 - DNA, 120 bp, Artificial Sequence
  ENSG00000287913_12 (sequence is synthesized)
tggattgtctgtaacacaaaggataaaagctttaagtgatggataccccatttaccctgatgcaattactacacattgtatgcgtgtatcaaaatatctctcatgccccataaatacaca

SEQ ID NO: 806520 - DNA, 120 bp, Artificial Sequence
  ENSG00000287913_13 (sequence is synthesized)
cacctactatgtcccgacaaaaatttaaaattttttttaatttttaaaaatttgttgaaaaaccatcagccctgttaagttgctcacacgtgctgttgcagccccagctcacccggtagt

SEQ ID NO: 806521 - DNA, 120 bp, Artificial Sequence
  ENSG00000287913_14 (sequence is synthesized)
aaatcctgctgacacagggtcccccacagctatgggtctatccttcctctggtgtggcaagactacattttcaggaagctgctgggcagaatgaagcaactcaaagctcaggagaagtgt

SEQ ID NO: 806522 - DNA, 120 bp, Artificial Sequence
  ENSG00000287913_15 (sequence is synthesized)
ctacgtgccttttagggttggggtttaacccagcactcagggatttcccagcatgcagacaaaggcactgacagttacagcagaagctggaagggtgagtcaagccaggactcagcacgc

SEQ ID NO: 806523 - DNA, 120 bp, Artificial Sequence
  ENSG00000287913_16 (sequence is synthesized)
ttgaacccatccacagctcccactcacatcatcccacactcccttttcacatttactccaagcatctggagccccaagctcctgtgcctcaacccatgccctcagtaacagtatccattg

SEQ ID NO: 806524 - DNA, 120 bp, Artificial Sequence
  ENSG00000287913_17 (sequence is synthesized)
ccaagccagaattgactccgggcccaccttgccactcactcagagtctgtgaggagtgggcaccgcacgcagccgtgaaacaggccaactcacaggtgggctccccactgcacgtcttgt

SEQ ID NO: 806525 - DNA, 120 bp, Artificial Sequence
  ENSG00000287913_18 (sequence is synthesized)
ccgaaaagacacccctcagccccatcagtgttgactttgcattgcgccattagattatttctttcagctcttcttaagacaaatggctggctgttgggaggctggccagggttaaggtgg

SEQ ID NO: 806526 - DNA, 120 bp, Artificial Sequence
  ENSG00000287913_19 (sequence is synthesized)
agcctcaatgtggccattttcacagccccggcaaagcctgtggttgatgccaaacccccattgaactgaatagaatggaggaaagctaaccaacccaccagaataataatcactaatgct

SEQ ID NO: 806527 - DNA, 120 bp, Artificial Sequence
  ENSG00000287913_20 (sequence is synthesized)
atggagtgatcacacagcaagactgttctaagtgttttatgtgtattcatttatttttacctcatcataagtactattatttttctattttatagatgagaaaactgaaacaaggtcaca

SEQ ID NO: 806528 - DNA, 120 bp, Artificial Sequence
  ENSG00000287913_21 (sequence is synthesized)
aaccagatgatctaaagggtagccactactgcctcctaaagaaccccaatcaggaatcccagattaatttgcccagcatcctgtttggaaaccacatgtccaccctgcaactgtacctgg

SEQ ID NO: 806529 - DNA, 120 bp, Artificial Sequence
  ENSG00000287913_22 (sequence is synthesized)
cttgtgtcccacaaggaggaagatgcaggggactccggaagctaaggaggagattgtgaactcaggcaccaaatccaacaagctccccgaggaacttacaacagtctgttttacagagaa

SEQ ID NO: 806530 - DNA, 120 bp, Artificial Sequence
  ENSG00000287913_23 (sequence is synthesized)
gtaaatgttgctgagagagaaaattgtcaggcctcggtgttccagagcaagaggcattccttcattcccagagaggccctgggcctcagcaagcaagcccgacaagccctccgcagccag

SEQ ID NO: 806531 - DNA, 120 bp, Artificial Sequence
  ENSG00000287912_0 (sequence is synthesized)
gcttcttgacaaccgaatcacagctagtatgatgtatccttgaactaaacagtccagtggtcatcccctgactgctgctgccccagctcatccaatcatttggtgggcctcatgcagtaa

SEQ ID NO: 806532 - DNA, 120 bp, Artificial Sequence
  ENSG00000287912_1 (sequence is synthesized)
gttgaaggttgtaagagcaaagatagaaggccttcccaaagaatgaggacttctgcctgaggatagcaaataccaattctgcatgggtttcctggcttcagactcaagaatgcaatatca

SEQ ID NO: 806533 - DNA, 120 bp, Artificial Sequence
  ENSG00000287912_2 (sequence is synthesized)
tgatgaaggacatcaacaagtttctgttgcagaatacccccaacattcaaactggagtttggaggtggtaagaaatctagaagttccagttcaactttgaagttaccagttgtttctgtt

SEQ ID NO: 806534 - DNA, 120 bp, Artificial Sequence
  ENSG00000287912_3 (sequence is synthesized)
tctcatagttcatgtgcatattctattctgaattgtctaccacatcgactttaagtgacaacaaaaagacagtggcattgcatacattgtgtagccaacttccacaagtgcatatttcaa

SEQ ID NO: 806535 - DNA, 120 bp, Artificial Sequence
  ENSG00000287912_4 (sequence is synthesized)
atatctataatgtatctgttatatgtattagtatgtgtgtatatgtgtgtgaatgtatatatacatatgcatgcatacatacatagagatgaggatagagctatgtgtgagtatatatac

SEQ ID NO: 806536 - DNA, 120 bp, Artificial Sequence
  ENSG00000287912_5 (sequence is synthesized)
ccctcaggtcaggaactgaaacttaccagctcacgcatccagccaatgagaagtaaaacccctcattcatcacgattgcttccttacccctccgtaattcctgttttcctgtacatagct

SEQ ID NO: 806537 - DNA, 120 bp, Artificial Sequence
  ENSG00000287912_6 (sequence is synthesized)
aatacattccttacctgctgtacaaatctccaatatattcagttgagttacacaggtttgaggtttggctcccacctctacagctgacgtcacccaaatgaaaagcctgcttccctggca

SEQ ID NO: 806538 - DNA, 120 bp, Artificial Sequence
  ENSG00000287912_7 (sequence is synthesized)
atacttgttgtcttggtgattggtttcctgtgctgcaaacatttgagacctagatggaacccctggcatttcagtaacaacgtttacaatttttatattgtaacagagtaacaatgttag

SEQ ID NO: 806539 - DNA, 120 bp, Artificial Sequence
  ENSG00000287912_8 (sequence is synthesized)
tcatttatctatgacacatagaagagagcagatagaactccatgtcgtggtaatatgacagaaggaggaaaagatggttgcagctgtgttcaagtttgcagattttgtgttaagataaag

SEQ ID NO: 806540 - DNA, 120 bp, Artificial Sequence
  ENSG00000287912_9 (sequence is synthesized)
acaaagctaccgtctggggacctctatattattcaatctgaggagaataatagaggttgtgtaataagtttgaggatatgagagtacgatactatatagccagcctttcctctcacattt

SEQ ID NO: 806541 - DNA, 120 bp, Artificial Sequence
  ENSG00000287912_10 (sequence is synthesized)
taagtttcatctttcatgccacctcttgcaatgctatctcccgccagaggccttccctggtcacactatcccatgtactatgtaaccccactcccaactagtctactgcttgatttattt

SEQ ID NO: 806542 - DNA, 120 bp, Artificial Sequence
  ENSG00000287912_11 (sequence is synthesized)
ccttcacaacacttttcactatgttagtttatttacttattgtctttttgccctagtgttttgttggttcaactggacaaaggatgctgaacttgttcatatctatttcgattatcttaa

SEQ ID NO: 806543 - DNA, 120 bp, Artificial Sequence
  ENSG00000287912_12 (sequence is synthesized)
tttccattagaacttaaggtaatatttattaaaaaaaaacagtgattataggctgaaaggtaaaagaagatgggggaactttctttcttgatcaaatgataggtttcacagcagagaaaa

SEQ ID NO: 806544 - DNA, 120 bp, Artificial Sequence
  ENSG00000287912_13 (sequence is synthesized)
atttctttggggaggaaataggaagttatcgtctacgttgctaagagtgggagtggtggggggaaggagagggacagttcagtgacaacagcaactgaaattcagctgaatagccagggg

SEQ ID NO: 806545 - DNA, 120 bp, Artificial Sequence
  ENSG00000287912_14 (sequence is synthesized)
agtcatagcctgagcagcctctcgtggagcaagccacaaccactctgagccttggtttactctgacatgaaaagattttaggtggtctctaagacctccagcctcttaaataacatggtg

SEQ ID NO: 806546 - DNA, 120 bp, Artificial Sequence
  ENSG00000287912_15 (sequence is synthesized)
attctttttactctgttttgccattgcatcttgtgtgtatctgtataataaattttgccacattccttcacccttgctttgtgcatatacggtacttgtttattctcttcacgactataa

SEQ ID NO: 806547 - DNA, 120 bp, Artificial Sequence
  ENSG00000287912_16 (sequence is synthesized)
tgtttgtaagcagatttgaattaacatatggtcctctgcagttgtgtgaaggtaaagtgctaggcagatatttctatggaccactggacaagagttattctggttcatttcttctaaagc

SEQ ID NO: 806548 - DNA, 120 bp, Artificial Sequence
  ENSG00000287912_17 (sequence is synthesized)
atccagtccaaattgtttccgtactcttctttttagagtaacttatatgactttctaaatcttttcacttggctgccacagatttgagacagataatatatttttctgtctttttgtctg

SEQ ID NO: 806549 - DNA, 120 bp, Artificial Sequence
  ENSG00000287912_18 (sequence is synthesized)
ttctaaatgtccaggctgcaggagacaataaaacaggctatgaattcctgagctggtttccattcataggagacattaagctccacaagattgatcaaatttcacatcaccaggtgcctg

SEQ ID NO: 806550 - DNA, 120 bp, Artificial Sequence
  ENSG00000287912_19 (sequence is synthesized)
cagccctgagagtgccttacataattatttaatttatagttgtaaatcacatttggatcataaaattccagctagataagtgtatggagcaaacatgtaattaagattagagtcctcaca

SEQ ID NO: 806551 - DNA, 120 bp, Artificial Sequence
  ENSG00000287912_20 (sequence is synthesized)
aagaaggtgactattatttatggtcattaccatcctgatactgtaaaatgaactgacgttttaggattcttaaattacttaagggtcctaaggtaatttaatattcattaataaacccaa

SEQ ID NO: 806552 - DNA, 120 bp, Artificial Sequence
  ENSG00000287912_21 (sequence is synthesized)
ctaaactagtacaaattattgacattgaccatagagctgcaaatttaaaaaactgttgtgcttccttgtaaaatatttgaagtttaaagtggcaatctgaatggaaaaattatatgactg

SEQ ID NO: 806553 - DNA, 120 bp, Artificial Sequence
  ENSG00000287912_22 (sequence is synthesized)
cttactagtgaagtacatttacattgtcatcctaattgatatgcttagaagtttaaaccatggtatattttcttctctacctgttttgtttgtttgtttgttcccacatagtactttgag

SEQ ID NO: 806554 - DNA, 120 bp, Artificial Sequence
  ENSG00000287912_23 (sequence is synthesized)
ggaggatatcttagtcccatctttctaaccccagctgcagctcaatgccacacaacaaacttcatcagctaagaaaataactgctaattaaaattactgaaataaaatattttcaatgga

SEQ ID NO: 806555 - DNA, 120 bp, Artificial Sequence
  ENSG00000287912_24 (sequence is synthesized)
tattaagcagtcatacaaaacatattttcaagagttttgagaatatgaagaaaattattgggttataatattatgtattacactgaaagagtgtgatcacaaatatgaaatgaacctttg

SEQ ID NO: 806556 - DNA, 120 bp, Artificial Sequence
  ENSG00000287912_25 (sequence is synthesized)
tcatatgcggttatctctctctgctctaggtaatggaattatatttaattttagttcctttcctagtgtttattttttattgcaaataatacattgaatgtttctcactttataagaata

SEQ ID NO: 806557 - DNA, 120 bp, Artificial Sequence
  ENSG00000287912_26 (sequence is synthesized)
aaaagaaaaaagtatttttagaaagatgcccttttttatccttttttatatatgaacctgtgaatctggctgtgtaaatactgcaggtttaatattatacaaattaatagtacatcaatt

SEQ ID NO: 806558 - DNA, 120 bp, Artificial Sequence
  ENSG00000287912_27 (sequence is synthesized)
gattattttttatttctttgttttatacaggcaaaattattatgaatgtgaatatagtatgcatttctttccacatctgttctgagaaaataaataatacatggtaaagttctaaatctg

SEQ ID NO: 806559 - DNA, 120 bp, Artificial Sequence
  ENSG00000287912_28 (sequence is synthesized)
acaaaatatagctttttagtggaggggaaatagtaaagcagaagagcaataacaacagaaaaacaggaatcatttatacatctctctaggctattatattggcaaatctgaaaggaaagg

SEQ ID NO: 806560 - DNA, 120 bp, Artificial Sequence
  ENSG00000287912_29 (sequence is synthesized)
aaacgaacctcgggtcacatacttagttctcaatgtgatgattgccattggtgatttttcatttggaatatccacatccagtagtctatctcagaatgcttcaatatcaagtcattgtgt

SEQ ID NO: 806561 - DNA, 120 bp, Artificial Sequence
  ENSG00000287912_30 (sequence is synthesized)
ttgctgcatatgtccttatacattgaataaccataacaactttaatgtgtataaatcttacaaaatttcaaaatgctctcttccatgttgaaatatgaagacattatcttttagatatct

SEQ ID NO: 806562 - DNA, 120 bp, Artificial Sequence
  ENSG00000287910_0 (sequence is synthesized)
agtcgggggcgggaccgagggccgccgagcgcaagagaaaatcatataatgaaggtggatgtatccattacccagcttccatatcaactcaggacaagtcttgtttcaaccatactccct

SEQ ID NO: 806563 - DNA, 120 bp, Artificial Sequence
  ENSG00000287910_1 (sequence is synthesized)
catctactgtgtgtgtctgtaaaagataagaactattttcaaaaagtagccacaataccattatcatacctaaaaaaacaataattctttaatatcattaaatgcccagtgagtgatttc

SEQ ID NO: 806564 - DNA, 120 bp, Artificial Sequence
  ENSG00000287910_2 (sequence is synthesized)
cagttatctcctaaaaacagaaattatttttgtaataagaaaaaaaaggctgaaaaagataaaattgtcaatccaaagagcagattagtacaagtttcctggagctttgtttagtgatac

SEQ ID NO: 806565 - DNA, 120 bp, Artificial Sequence
  ENSG00000287910_3 (sequence is synthesized)
ttatcaagagccttaacaatgtgcttaccttttgccctagtaatcccaacctgtgaatttattctaagaagaaaaaagaacattgaagaggtatacaaacattgttcactagagtgtgca

SEQ ID NO: 806566 - DNA, 120 bp, Artificial Sequence
  ENSG00000287910_4 (sequence is synthesized)
ttcactagagtgtgcagtgtctgttacagagaagttgtttgaaaactatttgttgaggccagatgtggtggcttacatctgtaatactagtactttgggagactgaggcaggaggattgc

SEQ ID NO: 806567 - DNA, 120 bp, Artificial Sequence
  ENSG00000287910_5 (sequence is synthesized)
cagaccagcctgagcaacatagcaataccccatctctacaaaaacattttttaaaaattagccaggcatggtggctcatgcccataattctaactacttgggaggccaagacaggagggt

SEQ ID NO: 806568 - DNA, 120 bp, Artificial Sequence
  ENSG00000287910_6 (sequence is synthesized)
cagagcaagaccctatctcaaaagaaaaaaaaacaaaccacaattttttttgaatttgaagttgagctcctgctgtggtttgcagctttgtttgtaaaagaaaagctgaaagtcatggaa

SEQ ID NO: 806569 - DNA, 120 bp, Artificial Sequence
  ENSG00000287910_7 (sequence is synthesized)
gtgtgtgacattagggtactggctaaataaatgagggcagatccataaaatgaaacattgttctgtcatgtaaaatcagattctaataatacacatagataaccaccgcttccaagaggc

SEQ ID NO: 806570 - DNA, 120 bp, Artificial Sequence
  ENSG00000287910_8 (sequence is synthesized)
agaacttcatcctcatcctctaatggactatggaaagaagaaaaacagtccttttacagtgaagaaactcagcagatgctccctcaacatcgctggtggtaagtcttgtggctactgggt

SEQ ID NO: 806571 - DNA, 120 bp, Artificial Sequence
  ENSG00000287910_9 (sequence is synthesized)
accccctgatacaatgacaggggcacctcacctctgtgatcttttacccaaaaactaataacctcagtctcatgagaaaaacatcagacaaactcagatgaggggcattctacaaaatac

SEQ ID NO: 806572 - DNA, 120 bp, Artificial Sequence
  ENSG00000287910_10 (sequence is synthesized)
gtgagcagcactcttcgaatgtgtcaaggtcgtgaaaaacaagaaaagactcagaactgttagggaccagaggagcctcaggagatgacggagactgaatgccatgtgggatgccggatg

SEQ ID NO: 806573 - DNA, 120 bp, Artificial Sequence
  ENSG00000287910_11 (sequence is synthesized)
agatcatggaacagaaaaagggcattagtgggaaactggcgaaatcctaatagagtctgtcgtccagctaataatgttttactaatgttaactttttagttttgacaaatgtagcatgat

SEQ ID NO: 806574 - DNA, 84 bp, Artificial Sequence
  ENSG00000287917_0 (sequence is synthesized)
tctgcccgcctcggcctcccgaagtgctgccatgttttgaagggcaggcaccgcacagggtgctggagacagactgaaggaaac

SEQ ID NO: 806575 - DNA, 120 bp, Artificial Sequence
  ENSG00000287917_1 (sequence is synthesized)
caggcaccgcacagggtgctggagacagactgaaggaaactgcacctctcagtgactcaagagagatttgttgagtatctaccaagtgcctagcgctgttcttgtccctggggattcagc

SEQ ID NO: 806576 - DNA, 120 bp, Artificial Sequence
  ENSG00000287917_2 (sequence is synthesized)
ctctggattgggacctgcagcccagagaagggaaatgggggaaatccaagttcccaggtacatcatgatacccttccagcctctccttcctggaaattgccatcaccagcggccatagca

SEQ ID NO: 806577 - DNA, 120 bp, Artificial Sequence
  ENSG00000287917_3 (sequence is synthesized)
gctgaagccagctctccatgggcacgaaacctggaacccaggaccctggggggcagggctatgctggactagagaagacacaggtggccaaagctggacccagccctcagggaacagata

SEQ ID NO: 806578 - DNA, 120 bp, Artificial Sequence
  ENSG00000287917_4 (sequence is synthesized)
acctgcgtgagaaacaaataattgattctgccctttatccctcccgggccagcacggaggggttcagccaatgactgggaattgaatgaaaaaccaaagagaacagccatgagatctgtc

SEQ ID NO: 806579 - DNA, 120 bp, Artificial Sequence
  ENSG00000287917_5 (sequence is synthesized)
tgctatgggtgggaaagcagatgggagagtgagaagggcttcaaggagaaggtgatatgtgaacagggcataaatggatgaataggagtttgccaggcacagaaagggaaggacattcca

SEQ ID NO: 806580 - DNA, 120 bp, Artificial Sequence
  ENSG00000287917_6 (sequence is synthesized)
ggggaagcaggcagaggcctggcaaggcaaaggccaggaggattgcaagtaaagtcatggtatgagcagaaaacaagagaggtccagttgcccatggcataggagaggggacaggccaag

SEQ ID NO: 806581 - DNA, 120 bp, Artificial Sequence
  ENSG00000287917_7 (sequence is synthesized)
gtaatttacagatgcacttcttggcagagggaccttcaggttgcttccagccctttctcaagacaggccgtgccgcagtgagtcatctgtacaaaagccctttcacacatgcacgagcgc

SEQ ID NO: 806582 - DNA, 120 bp, Artificial Sequence
  ENSG00000287917_8 (sequence is synthesized)
tgctgcggaatacattcccagaagggacttgggaggactggggggcaaaagatacatgcagtggtgtcttattattgttattttagagacagggtcctgctctgtcacccaggctggagt

SEQ ID NO: 806583 - DNA, 120 bp, Artificial Sequence
  ENSG00000287917_9 (sequence is synthesized)
acaatgtacaatggtgtcatcatagctgactgcagcctcgacctcctgggcttaagccatcctcccgccttggcctcctgcgtggctgggactacaggcacgcaccaccgtgcccagctt

SEQ ID NO: 806584 - DNA, 120 bp, Artificial Sequence
  ENSG00000287917_10 (sequence is synthesized)
gcagtggtcattttgtcagctctgtcagcttgtccttcttggagactgtgccaggtaccaggcccccacacagtcaacagggctgtttctcctcaggctcaccagcccctggtttccacc

SEQ ID NO: 806585 - DNA, 120 bp, Artificial Sequence
  ENSG00000287916_0 (sequence is synthesized)
ttttttttttttttttttttagctttaagcaagaagttttatgcagaaattgtttgtgagaatgttgaagttaaaaaacatagttattaatccaaactcagaaatcaaacagggataagt

SEQ ID NO: 806586 - DNA, 120 bp, Artificial Sequence
  ENSG00000287916_1 (sequence is synthesized)
ggataagtcagcgaaaagatgatatattgaaaattcatgaaggccaacgagaagttagcctctatcgccctgaaaatttaaaccaaccccccaaaagaccctcctaatctattaattcct

SEQ ID NO: 806587 - DNA, 120 bp, Artificial Sequence
  ENSG00000287916_2 (sequence is synthesized)
ctgcttgggagtcccaaggaagtgaaagagaatcccttagagctctgatacatctataaattggttttctccataaatgtacacatacatgtatccttccatcctgtctccagaagcagc

SEQ ID NO: 806588 - DNA, 120 bp, Artificial Sequence
  ENSG00000287916_3 (sequence is synthesized)
agtgactggcatgcacactgaaaacaaagaaatagggcaggcaggaaggcacagcaggtacatactggcagaggcctgatgtctgccctttactgtaactgctcaatgcctttcattgcc

SEQ ID NO: 806589 - DNA, 120 bp, Artificial Sequence
  ENSG00000287916_4 (sequence is synthesized)
tcacatacatttgattggtaactacaaagatgtgcatttacatgtgtgagatattaaaatgatggttacatgtatacatatgtaccaaacctgcatggtcagcacatgtatcccagaact

SEQ ID NO: 806590 - DNA, 120 bp, Artificial Sequence
  ENSG00000287916_5 (sequence is synthesized)
aaataaaacaatttgaaaaaaaagatggttaatgtaaaataatataataaagattacgtacttcatcataggattcttataaagaagtgtagggaaaatacaaattttaagaagcaaagt

SEQ ID NO: 806591 - DNA, 120 bp, Artificial Sequence
  ENSG00000287916_6 (sequence is synthesized)
aagaagcaaagtttaatcatacttattaagcaagacttttcacaagaattgagtataaattcaatctccatatttcagttaacttcaaaccttgtttcaaattatcctttccaagtttca

SEQ ID NO: 806592 - DNA, 120 bp, Artificial Sequence
  ENSG00000287916_7 (sequence is synthesized)
aacttcaaaccttgtttcaaattatcctttccaagtttcaataatatggcaaataggacaaccagtaaacttttattgcttaagaatatcaatctaggccgggcgcggtggctcacgcct

SEQ ID NO: 806593 - DNA, 120 bp, Artificial Sequence
  ENSG00000287915_0 (sequence is synthesized)
ggatggaacctgcttttgtgatatgtgagatgttctcgatgtgaaatcgcttgatgattttgtgattaaaccccacgactgcctgtttctgattttgctctggagctcactgatagctct

SEQ ID NO: 806594 - DNA, 120 bp, Artificial Sequence
  ENSG00000287915_1 (sequence is synthesized)
ggaacttgggatttctgaacacatggccttcatcattgggaaagactcagtcttactatggaatatcttgtgctgctttacaggactccttaccaaccaggtacttctgataattgactg

SEQ ID NO: 806595 - DNA, 120 bp, Artificial Sequence
  ENSG00000287915_2 (sequence is synthesized)
gcaaacctggtttattccaaatattagctcaatgttctctctcccagctgcttggtggctggcccttgactatgcactgttgattatggcatttgaatggactgtctttacccaatcatc

SEQ ID NO: 806596 - DNA, 120 bp, Artificial Sequence
  ENSG00000287915_3 (sequence is synthesized)
tccttagtaaaaccgaaaagggtttccaatggggcaagaatataatgttgcattgcccaaaaattcagggaaggtgtggtggtgtgtggggcactttgacacctgaagaactgcaacaag

SEQ ID NO: 806597 - DNA, 120 bp, Artificial Sequence
  ENSG00000287915_4 (sequence is synthesized)
attctagtcatctggaagaaatggagcttcccatttggaagtggtgaaatgaagacctgaggtcaagggcacttaggcatgttttggtcacttcacaatcttctgctatttattttgtta

SEQ ID NO: 806598 - DNA, 120 bp, Artificial Sequence
  ENSG00000287915_5 (sequence is synthesized)
attgacccaaagtttgatccaatgatatttttaggagccatatgctggatcaaatcaaatctgtcatcttgttctatcagtttctaatgagtcactatttctggtgcagggctggcaaaa

SEQ ID NO: 806599 - DNA, 120 bp, Artificial Sequence
  ENSG00000287915_6 (sequence is synthesized)
gttcctagctttccaaggccagactcaataccagagtctaaactttgtgcttcagtagttattaccaattcatcagagttggcatacaatttgggacctatttgtcaagcctgggttaat

SEQ ID NO: 806600 - DNA, 120 bp, Artificial Sequence
  ENSG00000287915_7 (sequence is synthesized)
gggagaacagtgactcttctttgttgtagctgtctatgtgaacttaggcaggcattagtctctctgagcctcgaccatcatctactaagaggtattacctaacccacaagctagaccaaa

SEQ ID NO: 806601 - DNA, 120 bp, Artificial Sequence
  ENSG00000287915_8 (sequence is synthesized)
ttcatatgcatataaaatgagatttatataataaaaataagcctccttttcaatctaaggagatattatttttactgaaatggactaatgtttagtaaaaccatagttcattaatccagc

SEQ ID NO: 806602 - DNA, 120 bp, Artificial Sequence
  ENSG00000287915_9 (sequence is synthesized)
cacccacagtagattcattgttgctttcgttctttgtttcactcccctgtgtcaaaccagttttcgagtcttgttgattttgcctttaagtagctcttgaatctgcctttctcgtcaggc

SEQ ID NO: 806603 - DNA, 120 bp, Artificial Sequence
  ENSG00000287915_10 (sequence is synthesized)
acactggggtggagtccatgccctccatatgagccttttagataatgatctctctgccatgcatgcccccagtttctggtctgttctctactactctatggccagggtggcctctttaga

SEQ ID NO: 806604 - DNA, 120 bp, Artificial Sequence
  ENSG00000287915_11 (sequence is synthesized)
tggaccacatgcctccgctgtttacacccccgtgggtctcccacactctccgtgataaagactagaagttccctggctgacacctgtggcccttcattttccacctccaccttctctgca

SEQ ID NO: 806605 - DNA, 120 bp, Artificial Sequence
  ENSG00000287914_0 (sequence is synthesized)
ttttcacatcaagaaacaaaaaggcagagaaagtcactaacctgctagggaactcggatagtaggtaggcagagcttagatgaaacccaatctgctgactccacatgtggtaatgataaa

SEQ ID NO: 806606 - DNA, 120 bp, Artificial Sequence
  ENSG00000287914_1 (sequence is synthesized)
ggagacgctctctcgggagacgtgtgaaactcgtggtgagattcagagacagagagtgatgagcgattggctaagtgactggaaggtgatttttccaggtaggatttctgttttagatca

SEQ ID NO: 806607 - DNA, 120 bp, Artificial Sequence
  ENSG00000287914_2 (sequence is synthesized)
agtttgaagtctaagcacttttaagcctcagcagaaaagtttatgatgtggatggggataggccacttgaaaaccgctgttttttacggccacataagtttttcctctctcgcctatttt

SEQ ID NO: 806608 - DNA, 120 bp, Artificial Sequence
  ENSG00000287914_3 (sequence is synthesized)
ctgctgtctgggccccacagatagatccaggacagaaagtgagaccatcacagtgcctggtgcctctggacagcctcaagccagaaaataagagcctatttctgagattgtatatgaggt

SEQ ID NO: 806609 - DNA, 120 bp, Artificial Sequence
  ENSG00000287914_4 (sequence is synthesized)
tgtgagacaaaagttttttcttctcgcattgctaaactgagaggatgagaatacgaggctctgaatggccctcttcccagcacatggaactcctgtctgcagaaaggaaactactgacaa

SEQ ID NO: 806610 - DNA, 120 bp, Artificial Sequence
  ENSG00000287914_5 (sequence is synthesized)
caaggagagaatggagactcaaacagcttggatgtccctgcctggaaaggtgacatgtgtgcctctcttctcttcttattgtttgcacggtgtgaaggcacaccgtgctgggacctcagc

SEQ ID NO: 806611 - DNA, 120 bp, Artificial Sequence
  ENSG00000287919_0 (sequence is synthesized)
gaggtagataatgaacctgtcctatataaagactgagctaaatctgctgagaggctgtggatagtgtattttaattaaggtaatccttatttgcatctaacaagcagcattgctacttag

SEQ ID NO: 806612 - DNA, 120 bp, Artificial Sequence
  ENSG00000287919_1 (sequence is synthesized)
aaatttaagaccttagtgatgcatattagtacattacctcaacaaatctaatagagatttaatacttatgttttgaggagctatttgtcataaagtaagagtatttgcatagtaaatttc

SEQ ID NO: 806613 - DNA, 120 bp, Artificial Sequence
  ENSG00000287919_2 (sequence is synthesized)
aaggatattattcttttcagagttttctacaattaagcaacacattaaacattaaaattttataatttctgtagtgctgggaatgcttgctttgttattaaactgaacctcattttcagc

SEQ ID NO: 806614 - DNA, 120 bp, Artificial Sequence
  ENSG00000287919_3 (sequence is synthesized)
tgcacataacccaatggaaaagtcctgtgttaataaagacataacgaatgtactgtcactaaggtttttttcctcttaaatctgagtgatggcctatgtatttaaagaatgttttagcat

SEQ ID NO: 806615 - DNA, 120 bp, Artificial Sequence
  ENSG00000287919_4 (sequence is synthesized)
gcaaaatgcaacttggaagacatccattcagttggatggagagtatttaatcatttaaaaagtaggccaaagagacttatctcaaccatactgctaaatagttatgagctgcatcataca

SEQ ID NO: 806616 - DNA, 120 bp, Artificial Sequence
  ENSG00000287919_5 (sequence is synthesized)
taaattaagtgtgctctaactgggggtatggatagactctttctttagtcaattaagtgtttacagtattagtatctactttagttagttagagtaaaggaattaaagagaccattttaa

SEQ ID NO: 806617 - DNA, 120 bp, Artificial Sequence
  ENSG00000287919_6 (sequence is synthesized)
ttaagaatgacaactttattctcaaggtcctttttattttgatagttaacaggataattttagcatttgcattttattgatccagagagaatgattttatgaaatatagcttagaaataa

SEQ ID NO: 806618 - DNA, 120 bp, Artificial Sequence
  ENSG00000287919_7 (sequence is synthesized)
ggctcaacagctgtgtttacctgtggtcacgtagatttgacttgtggtgaagacctctgtcacttagacatctttacctgggagtaacttatgtagggtatgaagggcaagattcctttc

SEQ ID NO: 806619 - DNA, 120 bp, Artificial Sequence
  ENSG00000287919_8 (sequence is synthesized)
ctacaaagaaggaatttataccttgttcggcttaccttagacttctgtgtgttctttcttctcattatcttctcccataaactaacaaaatccctttgcctttccaaccaagaggaaaag

SEQ ID NO: 806620 - DNA, 120 bp, Artificial Sequence
  ENSG00000287919_9 (sequence is synthesized)
gtctagaaagtgtttgcccccagtatctagagagttcattggctccccttgcttgtagtagtttaaaagattccccacagcagggagtgcaaacgtttaatattcattcaatgagagtga

SEQ ID NO: 806621 - DNA, 120 bp, Artificial Sequence
  ENSG00000287919_10 (sequence is synthesized)
tgtttcaaagaactaattcaggttatatgggtgtgggtgctctatatgtggtcatttttaattaagcgttgcatcagttctaataagaatgctaaaatattcagatacttagttttatca

SEQ ID NO: 806622 - DNA, 120 bp, Artificial Sequence
  ENSG00000287919_11 (sequence is synthesized)
aattggctaaaagtgtctaatagttgtaatgtataaaaactagttacatctaagagatattagtaataaaatgttatttgaattctcttatcattagaagggcaagttgaagttgtggaa

SEQ ID NO: 806623 - DNA, 120 bp, Artificial Sequence
  ENSG00000287919_12 (sequence is synthesized)
ataacaggcttctgaagagactcactctgttgtgggttcaaatctcaatattgtgattcctggctgggtgatcttgggccttaatttctacatttgagcattggaaatcacattgcaagg

SEQ ID NO: 806624 - DNA, 120 bp, Artificial Sequence
  ENSG00000287919_13 (sequence is synthesized)
agagaacagacttgtttgtcaagaacaaacacgcagaggtgagagatcaggaaacagcgggcccagggagccaggctctgctttgctgaacacagttggaaggagtgagtccagcagcca

SEQ ID NO: 806625 - DNA, 120 bp, Artificial Sequence
  ENSG00000287919_14 (sequence is synthesized)
gtcaccatgaggtgtctcagtgtctgaggagaatttgtgtgaactgtcagctgaaagcatcgacagcttcccattagtaatgaattatggaaataattttattaatttcttcacctcaat

SEQ ID NO: 806626 - DNA, 120 bp, Artificial Sequence
  ENSG00000287919_15 (sequence is synthesized)
cagaacatgttagtgaaagttgctcaaccaaacatcaaagaaccattgcattttaaccttttagtcttttaccgtgtaaccaggaacagcgaagaaataaattagtgtagcattccttta

SEQ ID NO: 806627 - DNA, 120 bp, Artificial Sequence
  ENSG00000287919_16 (sequence is synthesized)
aaaaaaaaatgcctggagataaggagtggacataattttttctgtttttaatttaatagcaggtttatggttttatgcaaagccattcacattacatttgaccctctgggagctgctttt

SEQ ID NO: 806628 - DNA, 120 bp, Artificial Sequence
  ENSG00000287919_17 (sequence is synthesized)
tttttttttctgtggatataattttgagtctttaataatctgttgttaaacccagtctgagtttgattaatgaattgtgatgaaccggtgcattaatttgcaggtttggtctaatgccct

SEQ ID NO: 806629 - DNA, 120 bp, Artificial Sequence
  ENSG00000287919_18 (sequence is synthesized)
aaaaggctgctttgttgctggttattaatgctcaactcttcaagaggagccatgggatggcagtgtgtcccaagtaatgaacaagttacacatttgagcagtcccaatgatagagctgta

SEQ ID NO: 806630 - DNA, 120 bp, Artificial Sequence
  ENSG00000287919_19 (sequence is synthesized)
gctctagaagtgaccatggagctacattattgaaagaaaaaaatcctgatttagcttaatgccctagaacagggggccgcagacctccaaatctacaggtctctggatggaattcagggg

SEQ ID NO: 806631 - DNA, 120 bp, Artificial Sequence
  ENSG00000287919_20 (sequence is synthesized)
aatctgtgaatttcaataggaaaaaaatctttaattaatctccaactgaaatttaacattgttcaattatgaatgtaggtgacaaccatagtattcttagctgtatctgtgactttgtca

SEQ ID NO: 806632 - DNA, 120 bp, Artificial Sequence
  ENSG00000287919_21 (sequence is synthesized)
tctctagaaatcacaaatatttccagaacatgttatagagatgcaagtacctcactatgtcatttgggcttgtcactacctcagaattatagtaagtatgaggacagctgcctgacttgt

SEQ ID NO: 806633 - DNA, 120 bp, Artificial Sequence
  ENSG00000287918_0 (sequence is synthesized)
gcgccgcagcgacgcagggctgttgccggcgcgggggcgggcgctcacatgacttaccggcggtggctccgcggcgtgcgccctgccaggaggggcctgtgctcgaggagcaggcctggc

SEQ ID NO: 806634 - DNA, 120 bp, Artificial Sequence
  ENSG00000287918_1 (sequence is synthesized)
gggcctgtgctcgaggagcaggcctggcgagtagcccagccactccacgttgagccgggacttgccgcgcaacatggtcctcctgggcgggcggcggctacgccgccccctgaactcgcg

SEQ ID NO: 806635 - DNA, 120 bp, Artificial Sequence
  ENSG00000287918_2 (sequence is synthesized)
tgaacactggtcctcgtctgcgtctcggtcgctgagctgggggccgcaaggagacccgagcatatgagccgcgaagagggactaccagccagagggctgtggtgctaggcaactgagcgt

SEQ ID NO: 806636 - DNA, 120 bp, Artificial Sequence
  ENSG00000287918_3 (sequence is synthesized)
attccgccgacgacaacacaaaaaagcagtgcgcattatttcgccactacttgagcaaataaatgcctcattaattactgcccgcagtggtaggaagtcaagcccttggcagctgggagg

SEQ ID NO: 806637 - DNA, 120 bp, Artificial Sequence
  ENSG00000287918_4 (sequence is synthesized)
agttaaaacactcacccgagtccgtaaaactagagaatgtcagagttcaaagagctcttgctgagaatgactgttccagactcgatgccagtgacccccaacttccacttaaaagttaaa

SEQ ID NO: 806638 - DNA, 120 bp, Artificial Sequence
  ENSG00000287918_5 (sequence is synthesized)
aacatattttgcagctgctcagaaagccgccaatgagacaacagggactcaaatagtaagaacagatgggcctcccgggcctgcgcaacccgagagaggtaaaaacgaaagggtgggtaa

SEQ ID NO: 806639 - DNA, 120 bp, Artificial Sequence
  ENSG00000287918_6 (sequence is synthesized)
gtctggagtcaggcttgacaaaattaagttgccactggctgctaataagaggacagcccttaacatggtcagcgcctggaaagggccgctgaccacacagctattttctgcaccacatgg

SEQ ID NO: 806640 - DNA, 120 bp, Artificial Sequence
  ENSG00000287918_7 (sequence is synthesized)
atacaaagaccacatctgaaatcatgactaaaccagcagcttagagtggtggaaagggcaatggactgggcagcaggaagtccaggttttagttcaaactgaataatccccctctagggc

SEQ ID NO: 806641 - DNA, 120 bp, Artificial Sequence
  ENSG00000287918_8 (sequence is synthesized)
actttgggaagctgaggcaggaggattgcgtgaggccagtagttccagagcagcttgggcagcatagcaagactccgtctctaaaaaacaaactgtaaaatatttaataaaaataatagt

SEQ ID NO: 806642 - DNA, 120 bp, Artificial Sequence
  ENSG00000287918_9 (sequence is synthesized)
caaactgtaaaatatttaataaaaataatagtaatctctatctgggcctcatctagacctttaggtgagtaagaaccacctaatgtaagaacttggggtacaaagagaatctagctctgg

SEQ ID NO: 806643 - DNA, 120 bp, Artificial Sequence
  ENSG00000287918_10 (sequence is synthesized)
ggtaggcaaactgagccagccgacctaatacatggagcctaccacctgtttttctacagccctgaggttcatatgcagaagggacttgccttttctcagatgagatgttggactcggact

SEQ ID NO: 806644 - DNA, 120 bp, Artificial Sequence
  ENSG00000287918_11 (sequence is synthesized)
tttgagttaatgctgaaatgagctaagactttggggaactgttgggaagacatgatcggttttgaaatgcgagaaggacatgagatgtgggaggggccaagggtggaattataaggttta

SEQ ID NO: 806645 - DNA, 120 bp, Artificial Sequence
  ENSG00000287918_12 (sequence is synthesized)
gtgattggatcatgggggtggacttccctcatgctgttctcctgataatgagtgagttctcatgagatctgcttgtttaaaggtgtatggcacttccccccttgctcacgctttctctct

SEQ ID NO: 806646 - DNA, 120 bp, Artificial Sequence
  ENSG00000287918_13 (sequence is synthesized)
ggcacttccccccttgctcacgctttctctcttctgctgccatgagaagaaagtgcttgctttccctttgcttttctcccatgattcagtttctgaggcctcccagtcatgcttcctgtt

SEQ ID NO: 806647 - DNA, 120 bp, Artificial Sequence
  ENSG00000287918_14 (sequence is synthesized)
tctttatagcagtgtgagaacagactaatgtactaagcaataagaaagatgtccaggccccaaatgccccaacctgacacctagctggctcttaaagagggtagctactgtgaagaggga

SEQ ID NO: 806648 - DNA, 120 bp, Artificial Sequence
  ENSG00000287918_15 (sequence is synthesized)
ctcttaaagagggtagctactgtgaagagggagaaaaaggccttggcatctgcagaccctctttctttatgatcctttaaatataaaggatgtgtttatgtctgtcttcctaagtaggaa

SEQ ID NO: 806649 - DNA, 120 bp, Artificial Sequence
  ENSG00000287918_16 (sequence is synthesized)
gttttattctttaaactaaatttgacctactggcatgtgacaagaatcactgacttgtcattactggcatgtgacaagaatcactgacttgtcatctaactgacatctgaagttcctaac

SEQ ID NO: 806650 - DNA, 120 bp, Artificial Sequence
  ENSG00000287918_17 (sequence is synthesized)
atcctaagggatggggacaagtaggaggaagctacagaaaaacatatatgtctgagtttttgttttaaatgtgtgaggtaaaagcaaattgtttctgttctgcttaaactgttatttgaa

SEQ ID NO: 806651 - DNA, 120 bp, Artificial Sequence
  ENSG00000287918_18 (sequence is synthesized)
agtatgttgccccaggcctaggcatttgctaagctctctcaaattcacatcttctcttattctctcattctctgcctccagtggtttctatttagaggtggatcaacccattagcagtct

SEQ ID NO: 806652 - DNA, 120 bp, Artificial Sequence
  ENSG00000287918_19 (sequence is synthesized)
tggactctgctccttttctgcttctcagaaacccctttcagttttctaccatttgcagcacacttcatgcaataattggcaaaactctgtcaatttaattagacttcctgacaattccag

SEQ ID NO: 806653 - DNA, 120 bp, Artificial Sequence
  ENSG00000287918_20 (sequence is synthesized)
aacatctccccccttcaaagcacttgctttccaatagcaactgaaacataaatcctgatgctttgactttcatgtttctcttgaaataatattgttaatgactttttgtaaccattggag

SEQ ID NO: 806654 - DNA, 120 bp, Artificial Sequence
  ENSG00000287918_21 (sequence is synthesized)
gcctttgaatagagtttgaattaaaatactggcaacaaatatctgtgagtcatgtaaaaaaagctcaaaattaaatgttcattttgcacagaagaacattttcattaatatttctttgct

SEQ ID NO: 806655 - DNA, 120 bp, Artificial Sequence
  ENSG00000287918_22 (sequence is synthesized)
tgatgtatctgatcttgtcataaagagttgtgctaaggggaaattttgtttatagaattatatcatattatattatgtttatatcatatttccccattgtttaacactgcaaaaatataa

SEQ ID NO: 806656 - DNA, 120 bp, Artificial Sequence
  ENSG00000287918_23 (sequence is synthesized)
ataagtgctcctgttaggaagaaaacaatttgttctcaaaaacgtattttataatgtatcaagatttttaaaagatcatgtattgaatagattcactcattttgtaaataataatttcta

SEQ ID NO: 806657 - DNA, 120 bp, Artificial Sequence
  ENSG00000287918_24 (sequence is synthesized)
gaagggacttgcccatggagtcaaggaatgctcagggttcatgcctcaggactgttctcaccaacttgactcacctttggggctctagtggagcccgtgggccttccggcaaacagaagt

SEQ ID NO: 806658 - DNA, 120 bp, Artificial Sequence
  ENSG00000287918_25 (sequence is synthesized)
aggcaatgggggtcaggaaatggcccccactgcctgtccagcgtggtgccagctcagcctaggatcccatgtcccctggcacaccagtggtttgatataaccagaggatctcctgcccat

SEQ ID NO: 806659 - DNA, 120 bp, Artificial Sequence
  ENSG00000287918_26 (sequence is synthesized)
gaggggcggcagcgctccagttaccaacccccaagtgaaagatcctggatcaagtctttcctgattggcctgcacccagaggctacgctaccagaagaggaactggacaagggcacaccc

SEQ ID NO: 806660 - DNA, 120 bp, Artificial Sequence
  ENSG00000287918_27 (sequence is synthesized)
caagatatacacgcgttttttccttgaaaggcccaggctttgaggaggcgatcgcaaccagtgggctgaataaaagagcaagtgtcggcacggagagagctaggcccgggctcaccaaga

SEQ ID NO: 806661 - DNA, 120 bp, Artificial Sequence
  ENSG00000287918_28 (sequence is synthesized)
catagagcccgagggttctgaaaacactgttcacggtggagcacgaggctcgagcgccagagacctcggagttgggtttccacgtggttattcccagcgccaagtgggcggggcagggga

SEQ ID NO: 806662 - DNA, 120 bp, Artificial Sequence
  ENSG00000287918_29 (sequence is synthesized)
gggcggggcaaggcctcctcccagcttgggccactctgattggtccgcagcagcatgtctttcctggcgagtctgggcaggccaagcagccccgcccacccgcagcccaacgcaaagggg

SEQ ID NO: 806663 - DNA, 120 bp, Artificial Sequence
  ENSG00000287918_30 (sequence is synthesized)
cgggacctagagctggctgcagactgagcgccttgcacccagcaggtgtcggggtgaaatcagagtgtctagcccctcatcccgtggaggctggcaccctcggcctgagctgcactcatt

SEQ ID NO: 806664 - DNA, 120 bp, Artificial Sequence
  ENSG00000287918_31 (sequence is synthesized)
gagtaaacaaatacataattggtgaatgcgtgagtgggtgagagaaatcgaagggaaaacccaaaattcttccaggatttcaatgagaaatagctatagattttgttttggttgttttcg

SEQ ID NO: 806665 - DNA, 120 bp, Artificial Sequence
  ENSG00000287918_32 (sequence is synthesized)
ctgttctcggttcttactttttccataattgggtggaaaaagttagaaacactcgagagaggaagaaactgcaagaggcaaatgaaacccaggagaagcaaggcaaggaggagctggtga

SEQ ID NO: 806666 - DNA, 120 bp, Artificial Sequence
  ENSG00000287918_33 (sequence is synthesized)
ttcgagaatgtgtaataaaaagacgtaaaagatgaataaagtgctccaggcccgggcatgcctggcccttggcttcttggctgagtggtcccaggctgcacctctagctcctgtcctggg

SEQ ID NO: 806667 - DNA, 120 bp, Artificial Sequence
  ENSG00000287918_34 (sequence is synthesized)
aagaagaaatcgccttacaagaggggcggagtgaagggagtgtatgtgctagcgtgtggggctgtgtgtatgagtgtgtgtgcatttgagtatgtgagtgtgcttcactgtgtgtgtgag

SEQ ID NO: 806668 - DNA, 120 bp, Artificial Sequence
  ENSG00000287918_35 (sequence is synthesized)
ggtatgtgtgactgtgtgtgtgtacgcgcgcacgcatgtgagtttgtctacatcattgggggaaatataattaaaaacaaaatcttctcccagcccagataacctctccataaaggtaga

SEQ ID NO: 806669 - DNA, 120 bp, Artificial Sequence
  ENSG00000232821_0 (sequence is synthesized)
tgttgctattgctccccttgctaccgctgacacttggcaccgccgcctcctagcagcggccagacgcggggctgggggccttccacgcaaaccgaaggagatacggacatcgtcattctc

SEQ ID NO: 806670 - DNA, 120 bp, Artificial Sequence
  ENSG00000232821_1 (sequence is synthesized)
cccaccgcgcgagccgggcccgccacccacgcaggggagaccgtgcccgtgcccctctcccgcgcctgccgcagatgcagggaaaaccgcctgacatcatgagagcgggacaaacgctca

SEQ ID NO: 806671 - DNA, 120 bp, Artificial Sequence
  ENSG00000232821_2 (sequence is synthesized)
ctttgaaggattcctgggcaggacttcaagtgaaatcatatgcctgagaagaacttgataccggtctagagaaaataaccagttctgactttgccaaaccatggaatgtgcaaaatgctc

SEQ ID NO: 806672 - DNA, 120 bp, Artificial Sequence
  ENSG00000232821_3 (sequence is synthesized)
tacttttttgcaagaggccaaatgtcccttaaaaagctccattatgaatatgaaccttaagaccgaagggtcaagaagcttgtgccgttgttgagtgtgggaaaaaatttacacacatcg

SEQ ID NO: 806673 - DNA, 120 bp, Artificial Sequence
  ENSG00000232821_4 (sequence is synthesized)
tgcaagtttctgctccttaacattattttattaataatacgttccactttggggaggggaacctgtaactgtgcgtgaattatcatctggacatgtgcttctgtgaacaaaaggggaaat

SEQ ID NO: 806674 - DNA, 120 bp, Artificial Sequence
  ENSG00000232821_5 (sequence is synthesized)
gtgcatatgggtaaaaaaattactgctttcttataactaaaggctatcaatctgaccaacttataaataaaagtaatcaatagcacagtaaaggaaacattaaattttctacaatttacc

SEQ ID NO: 806675 - DNA, 120 bp, Artificial Sequence
  ENSG00000232821_6 (sequence is synthesized)
caagacaatttaatacaatactttcccctagcaaatgcattctgaaggaaaaagatcccaagtgaaccaacacattaattggaaagccttagcttcttatttccgaaaacaagaggtaat

SEQ ID NO: 806676 - DNA, 120 bp, Artificial Sequence
  ENSG00000232821_7 (sequence is synthesized)
tagcaaaaataaaatgaaataacataaaatcaaaagaagatataatggtggaggaaaagaaacaggtggcttcatttctattctaaaaaagaatttcacgatttatgtcttgtgtataca

SEQ ID NO: 806677 - DNA, 120 bp, Artificial Sequence
  ENSG00000232821_8 (sequence is synthesized)
ggggtagggattagaatctgcaagctggaaactgcattccagtagttaatatttttcattgtgcagtcgcctcattcaaaataaaattaccacctttttcattcatttatttctctgaaa

SEQ ID NO: 806678 - DNA, 120 bp, Artificial Sequence
  ENSG00000232821_9 (sequence is synthesized)
atctggggggaaacattaccttcagattagtatttaatattactataaatatggcatttgcttttctccaaagtgtttccccttatgaaaaaagtagaaaaagcaaaacacattaaaaaa

SEQ ID NO: 806679 - DNA, 120 bp, Artificial Sequence
  ENSG00000232821_10 (sequence is synthesized)
agaaagaaataaaagaaaggcaaatggagagctacctttctttgacacatctagttcttatatccagagttaagataacaattaccttctcagcagtcatggccagctccatcctggtgt

SEQ ID NO: 806680 - DNA, 120 bp, Artificial Sequence
  ENSG00000232821_11 (sequence is synthesized)
accttaagaaatctgaaatatcaaatagtcagaccaagctagtgaacaaggagactccccatgaataatttagaaaatggaggtggttggatgatacatacaaaaaagaattaccaacct

SEQ ID NO: 806681 - DNA, 120 bp, Artificial Sequence
  ENSG00000232821_12 (sequence is synthesized)
aatgctttccctcatcctcctagggcaccctccttacatttctaacctgccttacacacaacacacacacacccccaacaaatacaccaacacataatcgccttccctttctgttatttg

SEQ ID NO: 806682 - DNA, 120 bp, Artificial Sequence
  ENSG00000232821_13 (sequence is synthesized)
ctaaaggactatcaaaataaaaaaataataatacttctccaagctttcactaaccttttaatacaagtcaatgctgcagactccttattgtaaaatatagtctgaaatattaacaataaa

SEQ ID NO: 806683 - DNA, 120 bp, Artificial Sequence
  ENSG00000232827_0 (sequence is synthesized)
atgtgcatgttgaggaggcctcacgccagtttaggctctccagtatctcctgccgagctgctctgttcccggcttagaggaccaggagaagggggagctggaggctggagcctgtaacac

SEQ ID NO: 806684 - DNA, 120 bp, Artificial Sequence
  ENSG00000232827_1 (sequence is synthesized)
catggctcgtctcgctctggatggtggtggcaacagagatggcagcgcggctgaagtcttaggagggcggcctgagcggtttttctggcattgtctgcccagctactccaagccaggctg

SEQ ID NO: 806685 - DNA, 120 bp, Artificial Sequence
  ENSG00000232827_2 (sequence is synthesized)
atgaaggaggagtcccctgtggtgactggaggttggagcctgaagatggcacagctctgtgattcatctcctgctgttgtggcggccacggtgatggagacggcagctcaacaggagcgc

SEQ ID NO: 806686 - DNA, 120 bp, Artificial Sequence
  ENSG00000232827_3 (sequence is synthesized)
cctgtaaggagaatataccatccccactgaacagatgagaaaactgaggctcaggggtgtcaggtgactgcctgaggtcacaggtgggactggggctccttggtctgtcctctttctact

SEQ ID NO: 806687 - DNA, 120 bp, Artificial Sequence
  ENSG00000232827_4 (sequence is synthesized)
gaaactcccattgcccttctacaatgccactcactccttccacaagagcactgaatgagagttcctgttgcttcacatcctcatcaccatttggtgttgtcagagttctggatttttgcc

SEQ ID NO: 806688 - DNA, 120 bp, Artificial Sequence
  ENSG00000232827_5 (sequence is synthesized)
attctaatatgcatgcagtagtatctcattgcagtgctgtgtttgagaatattaattagctctcaggactgctgtgtccagagttgattccttctggtgggttcgtggtgttgctgactt

SEQ ID NO: 806689 - DNA, 120 bp, Artificial Sequence
  ENSG00000232827_6 (sequence is synthesized)
gaagaatgaagccgccgaccttcacgagcgctgattggtgtgttttacagagcatggattggtgcgttttacagagcgctgattggtacatttcacagaactcgtgagacagtcgcaggt

SEQ ID NO: 806690 - DNA, 120 bp, Artificial Sequence
  ENSG00000232827_7 (sequence is synthesized)
ggcatgatttgatttgtgtgaaggcaatgaaatgatacacagatacaccgaagcctcccaaaagaatcctggttccaagattcaagaagatggattaatgtttttccattaattgttgga

SEQ ID NO: 806691 - DNA, 120 bp, Artificial Sequence
  ENSG00000232827_8 (sequence is synthesized)
atttatgccatttttttactatgtgccatcaattttaaagcacttctgaaaagagataacaatctacaatagctggcattttaaattcataaaaatatagtattttcttctatttttata

SEQ ID NO: 806692 - DNA, 120 bp, Artificial Sequence
  ENSG00000232827_9 (sequence is synthesized)
ttatcttccgtataagctttggaagcagtttagtgacaatggtactcttgtctttttcttgattttaaaaggagtgatttcgatatttttaatcacaaaacatgataggtgctgtaggtt

SEQ ID NO: 806693 - DNA, 120 bp, Artificial Sequence
  ENSG00000232827_10 (sequence is synthesized)
atttgttgactccttttatcaggttaaggaaattaccctttattcataggtggaaatatcatgaattatttaatttttgtaaaataattttataggccttttgagacaatcatataactt

SEQ ID NO: 806694 - DNA, 120 bp, Artificial Sequence
  ENSG00000232827_11 (sequence is synthesized)
ttgtctttaattcattgataaggagatgatttcagtagattttctaacattgaactaaatttgtattactaaccgagcttgttcatggtttttatactttgctaggtatacttcctagta

SEQ ID NO: 806695 - DNA, 120 bp, Artificial Sequence
  ENSG00000232827_12 (sequence is synthesized)
ttttgtttacaatatttgtctctgtgtgcatggatgaggtacacaatagcaaggttaccctagtctcaaatgaattgaagaatggcctcttttttctcccctcgcaaataattagtgtaa

SEQ ID NO: 806696 - DNA, 120 bp, Artificial Sequence
  ENSG00000232827_13 (sequence is synthesized)
cattggaactacttgtgacatcatctgggcatcctgttttctttgtagaattattaattatcaactcaattactttaatggtatgatttccatccagattttctaattatttgagtcaac

SEQ ID NO: 806697 - DNA, 120 bp, Artificial Sequence
  ENSG00000232827_14 (sequence is synthesized)
tgttaatctcacttatttacaaatgcatatatttaattgtcttattacttaatgaaatagatcataaatataaaagtgtgtatgtacagcttaagaagaatataaaatgagcatatgtgt

SEQ ID NO: 806698 - DNA, 84 bp, Artificial Sequence
  ENSG00000232827_15 (sequence is synthesized)
ccattgcccttctacaatgccactcactccttccacaagaggtaaccactatccctaacttcctgttaatcattccattgcttg

SEQ ID NO: 806699 - DNA, 120 bp, Artificial Sequence
  ENSG00000232827_16 (sequence is synthesized)
accactatccctaacttcctgttaatcattccattgcttgtcattacagacttgtatattgtttagttttgcacatttgactttttaaataagtgaaactatgtattgtttcttatgatc

SEQ ID NO: 806700 - DNA, 120 bp, Artificial Sequence
  ENSG00000232827_17 (sequence is synthesized)
agatatgcatacacacaaacatgtatatgtatgtatatatacacacatacacacattatttttaagagcagttcaaagttcacagcaaaactgagcagcaggtatagatttcccatatac

SEQ ID NO: 806701 - DNA, 120 bp, Artificial Sequence
  ENSG00000232827_18 (sequence is synthesized)
tttcccatatactccctgtcccccacacatgcatagcctcccccataataaacatcccccaccagagtggtgcatttgttacaattaaagaacctacatgatacatcttatagtttgcat

SEQ ID NO: 806702 - DNA, 120 bp, Artificial Sequence
  ENSG00000232827_19 (sequence is synthesized)
gtattcactattaaaatatcatacacgtactttcactgccttaagcatcctctgtgctctggttattcatccctctcttcctcctaactcctgggaaccactgatttttttttctatttc

SEQ ID NO: 806703 - DNA, 120 bp, Artificial Sequence
  ENSG00000232827_20 (sequence is synthesized)
gggaaccactgatttttttttctatttctatagtattaccttttccagaaggtcataaagttggaagtgacatacgtagcctttttagattggcttctttcattctgcaatatgcatgta

SEQ ID NO: 806704 - DNA, 120 bp, Artificial Sequence
  ENSG00000232827_21 (sequence is synthesized)
agcttccactgtgtcttttcatggcttgacagccatttattttatcattgaatggtattcagttgtctggatgtaatacagtttgtttaattattcacctactgaaggtaatcttgtctc

SEQ ID NO: 806705 - DNA, 120 bp, Artificial Sequence
  ENSG00000232827_22 (sequence is synthesized)
gggtatataccaagaaacaagattgcggggtcgtataataagagtggatttagttttctaagatgccacaaaactattctccattttgtatttccatcagcactgaatgagagttcctgt

SEQ ID NO: 806706 - DNA, 120 bp, Artificial Sequence
  ENSG00000232827_23 (sequence is synthesized)
ttcactcttagtgctgcgaggtactctattattggaatatatgatcatttagttacctattccacaatctacccatattgagagataactggattgtttccaggtttttaaaattgtgaa

SEQ ID NO: 806707 - DNA, 120 bp, Artificial Sequence
  ENSG00000232827_24 (sequence is synthesized)
cattctcatatatccctaggtaaacaaatgcaagaatttttctggggcctgtaacaggctgactagattgcactaggttgtagtgaagccactgggtcatagggtacatgcatgatcagc

SEQ ID NO: 806708 - DNA, 120 bp, Artificial Sequence
  ENSG00000232827_25 (sequence is synthesized)
tgtatgagctaacatccgttttccaaatggctgtccttctacttgcatgggatgaatgcttccacggttctttatccttgccaatactacacctttcagaacttccaaaaaattttgtca

SEQ ID NO: 806709 - DNA, 120 bp, Artificial Sequence
  ENSG00000232827_26 (sequence is synthesized)
atatgtgtgaaagggtatctaattgttaattttcattttcatgattattattaggttgagcactttttcacatgcttatgggctatttatgctaacttcttgaggtgttatttttcactt

SEQ ID NO: 806710 - DNA, 120 bp, Artificial Sequence
  ENSG00000232827_27 (sequence is synthesized)
attaatttataggagagctttatatattctggatactaaacctgtctaggtaacatgtgttgcaaatatctctgccaagttttgcatatttttttctcattgcggtatccaataaacaga

SEQ ID NO: 806711 - DNA, 120 bp, Artificial Sequence
  ENSG00000232827_28 (sequence is synthesized)
agtcttaaatttttatgtgatcaagttagtttttactcttgccgtttgttcttcttccctatgtaaagataaaagagatgctccacagtttttttctaagaatgttgagaaggtatcttt

SEQ ID NO: 806712 - DNA, 120 bp, Artificial Sequence
  ENSG00000232827_29 (sequence is synthesized)
atccattaaaatatatttttaggtttggtctatgggattaagtttcaatttccttttttcccccttatggagaccagtggtcccagtgttgcttattgtaaaatttactatcttcactta

SEQ ID NO: 806713 - DNA, 120 bp, Artificial Sequence
  ENSG00000232827_30 (sequence is synthesized)
accacaagaaaagctgtgttacaaaatatgtttccaagtatgtgtgaaaaatatatttatctttatgattctactcagattaattagctctcaggactgctgtgtccagagttgattcct

SEQ ID NO: 806714 - DNA, 120 bp, Artificial Sequence
  ENSG00000232825_0 (sequence is synthesized)
ggggaccccggcggccagcgagtagaggagcacggggggcacggcgctgctgtcctccgggcccgggtagggtttgcggtaggcgctgtcgtggcagaagaagccctgcacgttcacggt

SEQ ID NO: 806715 - DNA, 120 bp, Artificial Sequence
  ENSG00000232825_1 (sequence is synthesized)
gaacgtgtccgtatactcgaagtagtacgccagcatcaccgtccctgccatgatcaccatctggaaatagagcatgctgctgcttcctgatgaattcactcacttccaatgacagcagaa

SEQ ID NO: 806716 - DNA, 120 bp, Artificial Sequence
  ENSG00000232825_2 (sequence is synthesized)
ggattactcacactgataaaggaaattggcggaagctacccagaagggccacacctccaaaaggtttttttaagtacatgaaacattgatgcacgtgccccgcctggcttggaagtccag

SEQ ID NO: 806717 - DNA, 120 bp, Artificial Sequence
  ENSG00000232825_3 (sequence is synthesized)
gaccaaggttccagctgtctggctgcatccacatatggaggaaggcagaagtaatgtattggaatccaggaaaaactgcaatccttggaatgtactttaatctagctcttcagacttcct

SEQ ID NO: 806718 - DNA, 120 bp, Artificial Sequence
  ENSG00000232825_4 (sequence is synthesized)
ctgatcctgcttactgtatttcacttggggaattaagttatctgaattcagtgcaacattgcaagtctctccctgtttgtgtttggaagttgtagtctctgaatgaatgtaggaacacta

SEQ ID NO: 806719 - DNA, 120 bp, Artificial Sequence
  ENSG00000232825_5 (sequence is synthesized)
ggataatcccacaaagtagcaattccagaggaaaaaaaaatagcccctcattttcctggtttgtacaaaacaattatttgagccagaagccatttgactgaagaagaatttagatttttt

SEQ ID NO: 806720 - DNA, 120 bp, Artificial Sequence
  ENSG00000232825_6 (sequence is synthesized)
tatcttttctcagatgggaagaattgcttatcttcttgaaacaaagcatgagtaagatatcaaatacatttctcaattaatggaaaatctactctggttctaacaaaagattaacaatta

SEQ ID NO: 806721 - DNA, 120 bp, Artificial Sequence
  ENSG00000232825_7 (sequence is synthesized)
taatgttcagtgttgtatgtttttattattttattgtttatttttatgttctcagtatgttttctagaaaatatgctaagctggttatcatctattaaccagataactttttcaagctga

SEQ ID NO: 806722 - DNA, 120 bp, Artificial Sequence
  ENSG00000232825_8 (sequence is synthesized)
agtcagaatttgtcatgaagaaactagtaaacatctgttagtgatgttaaagaaaaacattctgcatccgatttctagattgaattaggtgaaatttaaattttcttccaactttcatat

SEQ ID NO: 806723 - DNA, 120 bp, Artificial Sequence
  ENSG00000232825_9 (sequence is synthesized)
acaaacactaggcagaagctgctaattgctcacctgaatgtcagaattgtgattttgttgggttaggcaatgtgcccatcttgaaaattacattaccccatttctgatgctgttaggcct

SEQ ID NO: 806724 - DNA, 120 bp, Artificial Sequence
  ENSG00000232825_10 (sequence is synthesized)
tttcccctcctcctagatggagaagccaacttgtgactaaataagctcaaagtaagaatgcaggaaacagtaaaagaaacctgggttcagggaggattcatggaatttctgtacccaccc

SEQ ID NO: 806725 - DNA, 120 bp, Artificial Sequence
  ENSG00000232825_11 (sequence is synthesized)
tggactaccaacttctggtactgtcatgtgaaaaatagcaaattccttatttgcttaagccacttttgtgtgtgtgtgtgcgctattacttgcagccagaagcaatcctagctttttcac

SEQ ID NO: 806726 - DNA, 120 bp, Artificial Sequence
  ENSG00000232825_12 (sequence is synthesized)
actgtacataaaaaatatattatatatatttctcccctatgccgttttaaaaatactgaagagctaatagagagtaaggattaattactaagccaaaattgaaaaagaaaacaagaacct

SEQ ID NO: 806727 - DNA, 120 bp, Artificial Sequence
  ENSG00000232825_13 (sequence is synthesized)
ggagagatagttgagcacagaagctacttttggtcttaaggcatttgttaatactggaaattcagaacctacgtcttggttgcttgtagggcaacagtgacagaagcccagagcaggcaa

SEQ ID NO: 806728 - DNA, 120 bp, Artificial Sequence
  ENSG00000232825_14 (sequence is synthesized)
caagtggggcttaccccccgtagtgagctaggaccatggtaggttacatcctcagggtaaaagtgaaccagaaatagtatagccctttcaaggaattgcagccccttttcaagttgtcta

SEQ ID NO: 806729 - DNA, 120 bp, Artificial Sequence
  ENSG00000232825_15 (sequence is synthesized)
atcaggaaatctcaacttgacttaaaatgatttcaggctgataatcctaccagtcacccagcaggagcaactgcaaaactactatgtcagaactgaccttaacataaactcctcaacaca

SEQ ID NO: 806730 - DNA, 120 bp, Artificial Sequence
  ENSG00000232825_16 (sequence is synthesized)
ttgaaaaacaacttttcaattataattaccaacatgtttaaaaacagtcaagcctacaaaagttgatggtgacaaccagcagagacaaagacaaaacaaagatccacaggatctcatata

SEQ ID NO: 806731 - DNA, 88 bp, Artificial Sequence
  ENSG00000232825_17 (sequence is synthesized)
agagacaaagacaaaacaaagatccacaggatctcatataatggaagtattggagacaagttataaaacatctgtattttgaatatgt

SEQ ID NO: 806732 - DNA, 120 bp, Artificial Sequence
  ENSG00000232825_18 (sequence is synthesized)
gggggagaaactgtcattctcaaacaacatgaagaaaactacagataaatcatgaggattaatgacagagtctaacaatgtttctatatacaaaatcaataaacagatgtaacccatttt

SEQ ID NO: 806733 - DNA, 120 bp, Artificial Sequence
  ENSG00000232825_19 (sequence is synthesized)
gaagccctgcacgttcacggtgaacgtgtccgtatactcgaagtagtacgccagcatcaccgtccctgccatgatcaccatctggaaatagagcatgctgctgacagaagatggatgtac

SEQ ID NO: 806734 - DNA, 120 bp, Artificial Sequence
  ENSG00000232825_20 (sequence is synthesized)
aaaaagtcaaggtggaggagacctctatcttcgtaggatagaggatagtccttgaatgggcgagcattgaatatttgtggatggcttagataagtataccgatggctgcagcctgagcca

SEQ ID NO: 806735 - DNA, 120 bp, Artificial Sequence
  ENSG00000232825_21 (sequence is synthesized)
gtgactttaagccttggacatcaagcaggcaaaccaggcaagattttgaccttgctgcattactgcaggtatggcaggtttgcccagagcttcctgatgaattcactcacttccaatgac

SEQ ID NO: 806736 - DNA, 120 bp, Artificial Sequence
  ENSG00000232825_22 (sequence is synthesized)
aggttccagctgtctggctgcatccacatatggaggaaggcagaaggtcaagctccctgcatggtgcataaagcctcttttataaggcccttaatcccattcatgaggaaggaaacttca

SEQ ID NO: 806737 - DNA, 120 bp, Artificial Sequence
  ENSG00000232825_23 (sequence is synthesized)
aggcccttaatcccattcatgaggaaggaaacttcatggcctatcatctctctctctctttttcaaatttgattttttattttagatagagggggtacatgtgcaggtttgttacatagg

SEQ ID NO: 806738 - DNA, 120 bp, Artificial Sequence
  ENSG00000232825_24 (sequence is synthesized)
catcccacgccccatccctccctcccttctctagtagtccacagcgtctgttgctcccacgtttgtgtccatgttatgtactcaatgtttatcccacacttataagtgagaatatgtggt

SEQ ID NO: 806739 - DNA, 120 bp, Artificial Sequence
  ENSG00000232825_25 (sequence is synthesized)
tttcagttcctatgttacctcacttaggattatggtctccagctttatccatgttgctgcaaaggacattattttgttcctttttatggctgcatggtattcgatagtatatacgtacca

SEQ ID NO: 806740 - DNA, 120 bp, Artificial Sequence
  ENSG00000232825_26 (sequence is synthesized)
tattttcttgatccaatccaccactgatgggcaccttggttgattctatgtctttgccattgtgaattgggtggtgataaacatgaatgcatgtgtcttttggtataatgatctatttcc

SEQ ID NO: 806741 - DNA, 120 bp, Artificial Sequence
  ENSG00000232825_27 (sequence is synthesized)
ctggtataccgatggctgcagcctgagccagtgactttaagccttggacatcaagcaggcaaaccaggcaagattttgaccttgctgcattactgcagcttcctgatgaattcactcact

SEQ ID NO: 806742 - DNA, 120 bp, Artificial Sequence
  ENSG00000232825_28 (sequence is synthesized)
tatggaggaaggcagaaggtcaagctccctgcatgggatgaagagacccccaactgtctctctccaccatgtgaggaaaccaggaagaaagccctcgccagaacctggccacactggcac

SEQ ID NO: 806743 - DNA, 120 bp, Artificial Sequence
  ENSG00000232825_29 (sequence is synthesized)
cctgctcttggactttccagcctccagaatgatgagaaatacatatttgatgtttaagccacccagtctatggtattcttgttatagcagcctgaactaagacaatgtaaaagcatgaaa

SEQ ID NO: 806744 - DNA, 120 bp, Artificial Sequence
  ENSG00000232825_30 (sequence is synthesized)
tattttatttccttctggatacagaatcacaacagtaggtccaagtttggaatgggattaataatgttttctgacaaccagtgagactatggtgtataagtagagcataactgcttcagt

SEQ ID NO: 806745 - DNA, 120 bp, Artificial Sequence
  ENSG00000232825_31 (sequence is synthesized)
gagaattatgttaagaagaaaaggccttaaactattgaatttatagggaacattcaattctctttgctataatgcaatttttgcccatatctacctgctctgattaatgataaggcttat

SEQ ID NO: 806746 - DNA, 120 bp, Artificial Sequence
  ENSG00000232825_32 (sequence is synthesized)
gaaaaggacatttgtaatgtcacaaaagcttccatgcattttacaaaggatatcattaataatcaagttaaaacaaccccaaaggaaaatatcacatttctttaaaagatttagtgatgc

SEQ ID NO: 806747 - DNA, 120 bp, Artificial Sequence
  ENSG00000232825_33 (sequence is synthesized)
acgcgccctagaatgtcctctggggaaggggctgcccataacttggaggaacttagaaggcaaaacctactgcgccccaacccttagaggggcctcaaccccgaaggcgaggggcgagat

SEQ ID NO: 806748 - DNA, 120 bp, Artificial Sequence
  ENSG00000232825_34 (sequence is synthesized)
ctcatggagcaattggcatccacttcctcctctctgaggcccacaaaagacccgtgctcagccagaagcagataattgggtgaccagctgcagagaggaactctctgctgagaacttcag

SEQ ID NO: 806749 - DNA, 120 bp, Artificial Sequence
  ENSG00000232825_35 (sequence is synthesized)
agacctgcagagatgatgggactaccagttccagagaggagctaccgtctccagggcttctctactgagaactggacactcgttggggtgatctgcccgcggagaggagccttctcctgc

SEQ ID NO: 806750 - DNA, 120 bp, Artificial Sequence
  ENSG00000232825_36 (sequence is synthesized)
tcactcactccagggcctccactcctcctcctccactcactccagggcttcctctctgctgagacctgaacgctcaacaggacagcctgcctacagagagaagctacccattgtgtgtct

SEQ ID NO: 806751 - DNA, 120 bp, Artificial Sequence
  ENSG00000232825_37 (sequence is synthesized)
cttctgagctgtttctaacactcagcaaagctcctcttcaccttgctcaccctgcatttgtctgcatatctcattcttcctggacacaggaccagaactcaggcaaaggtgccaccggcc

SEQ ID NO: 806752 - DNA, 120 bp, Artificial Sequence
  ENSG00000232825_38 (sequence is synthesized)
acagaggtttccggccagaaaagtgacaccccgaggatcccataacagaacttgctcatgctcctgcttgacctatgcttaattgttaagtccaatgtattaaaagcacaaagtgtttat

SEQ ID NO: 806753 - DNA, 120 bp, Artificial Sequence
  ENSG00000232825_39 (sequence is synthesized)
gtttgtgaagagggtacacttcatctctaattttctagtttccaggaggagggattgtccttaaacattaataacctcttgattcccttccttgattcctcccaccaagatagactgagt

SEQ ID NO: 806754 - DNA, 120 bp, Artificial Sequence
  ENSG00000232825_40 (sequence is synthesized)
ttcttacttaggtaaacttaaattttcccaaatcttaaaccaagagcatttgttcttttacccttacctgccctccactaagataagtgatttgggtgctagtgtctgctctgaagaccc

SEQ ID NO: 806755 - DNA, 120 bp, Artificial Sequence
  ENSG00000232825_41 (sequence is synthesized)
aaaacttccctccaactctaaagactaccctgctaatactactctaaaagttaggctggggagaagtcagaggctcatttagggcttagtagtgactaattataatattaataatttgct

SEQ ID NO: 806756 - DNA, 120 bp, Artificial Sequence
  ENSG00000232825_42 (sequence is synthesized)
attgtcataataatgccacctaacaaacactccaaaatcagtagcatacaacaataggcatttagtcacttgcttgcaggtctgcagataggctagtgaagatattccattccatgtgtc

SEQ ID NO: 806757 - DNA, 120 bp, Artificial Sequence
  ENSG00000232825_43 (sequence is synthesized)
tcattttgcacccagacaggaggtacagcaaaatcctgaagtatattttctcataaggaaaatcggaaactcccagatagggtagtgagaatagttgttcataagggttaggtttggcac

SEQ ID NO: 806758 - DNA, 120 bp, Artificial Sequence
  ENSG00000232825_44 (sequence is synthesized)
actctcactctcatctactgggcagaagtccacaggccagggcaatatctgggcttaaggtagtatctgcttccatggaggtattaggtgtgggtagggaataaatatttctcaaacaat

SEQ ID NO: 806759 - DNA, 120 bp, Artificial Sequence
  ENSG00000232825_45 (sequence is synthesized)
agcatatcccacctggaaatattaagatataagtcactatttctgatgcaattaatatgaaaaataataatttgttgcaaagcttgcttgcttttatattttcctaagctgtgcacaata

SEQ ID NO: 806760 - DNA, 120 bp, Artificial Sequence
  ENSG00000232825_46 (sequence is synthesized)
aaaagatcttctttcttcttttatacatgccttagtttaagaaagcttaatttgattgaaatatgccagaaagaactaagatagtatatatataacacaattgggtgtagaagtcatagc

SEQ ID NO: 806761 - DNA, 120 bp, Artificial Sequence
  ENSG00000232825_47 (sequence is synthesized)
attacatttttatcctctgaaattctcataattctgccctcactttctagagatcatttgttaatttatgaaaaggtaataatataagaaatcaatcacaaatttatgctgaatattttg

SEQ ID NO: 806762 - DNA, 120 bp, Artificial Sequence
  ENSG00000232825_48 (sequence is synthesized)
ctccttcaaaaagcttatatatttgttaccgatttgactcttacatcaatcctataagtatagatacagatataaatatagatagagagactggaaatttatatgtttaaaaataaagga

SEQ ID NO: 806763 - DNA, 120 bp, Artificial Sequence
  ENSG00000232825_49 (sequence is synthesized)
aatccaagaagttctgaaaatttaaatgaccaaagtcattccactaggcttaaacttaaagcttttggctctaatcctacacttttcttctactcagcaatctttaagacaactcaatag

SEQ ID NO: 806764 - DNA, 120 bp, Artificial Sequence
  ENSG00000232825_50 (sequence is synthesized)
ctcaatagatccaataataacaggcacaaattgtatacacatgaagactacttaccgtaatattgtaaaattgtaaaaattactttattattcatataacttttcaaagaaataaaaata

SEQ ID NO: 806765 - DNA, 120 bp, Artificial Sequence
  ENSG00000232828_0 (sequence is synthesized)
cgaggcagggctttggctactggagatcgtaggttcgaatcccgtctgggaagttcaacttgtgcacctgtaaaagaagctggcattattggcttgtactcaagggctggcacagagtgt

SEQ ID NO: 806766 - DNA, 120 bp, Artificial Sequence
  ENSG00000232828_1 (sequence is synthesized)
gtcggggtgcggacgccccagccacgcccatcatccgtgcggaagatgcagaggtcatatcggatacccttctgtaccacacgatttgggcagtcatagccgcagcggcagcgggagttg

SEQ ID NO: 806767 - DNA, 120 bp, Artificial Sequence
  ENSG00000232828_2 (sequence is synthesized)
cactcgtagatgggcagcccggctcgaagccgcacctggccctggtcattgtaggcaaacttgtgcagtgacgcccccgggcagcagcctccagtgggtgcccacagacagtcctggcac

SEQ ID NO: 806768 - DNA, 120 bp, Artificial Sequence
  ENSG00000232828_3 (sequence is synthesized)
ccaggtccacctcattctctacagtgatgcgtcccagatggctgcgcttggcattgagctcctgctcccagcgacggagcgcccgcctctgcttggccttctgcaccaggtagttggcca

SEQ ID NO: 806769 - DNA, 120 bp, Artificial Sequence
  ENSG00000232828_4 (sequence is synthesized)
agcttgggtccaggtgccggggggtctttgaccggtggtgccgccggagcagctccctttctaagtccttgtggaactgcttgaggatacgcacacacttgagattctgccgtggctccc

SEQ ID NO: 806770 - DNA, 120 bp, Artificial Sequence
  ENSG00000232828_5 (sequence is synthesized)
aggtgctctctgagtctggatatccacgccatttcaccagggtcaaaggagaaaattccctttggaaacagatgtgggcagttggggacaagagggcaggacactaacttccttgtgacc

SEQ ID NO: 806771 - DNA, 120 bp, Artificial Sequence
  ENSG00000232828_6 (sequence is synthesized)
tgtcccctcccagagcatggtcaccccagactcacgcggatcttcttgtaatcgcacaggtactcgacttcaaagtcatagaggttcctcttagagataccgagggcagggcaggagagc

SEQ ID NO: 806772 - DNA, 120 bp, Artificial Sequence
  ENSG00000235890_0 (sequence is synthesized)
cgagcccggagagcctgggctgcaggggagggcgccacaggtgaggacacagctccgtgggcaccaggcaaggtcccaaagcagatccgcagccggtcagaggagcgcacatggctccac

SEQ ID NO: 806773 - DNA, 120 bp, Artificial Sequence
  ENSG00000235890_1 (sequence is synthesized)
cctatctgctggagaacagccgtccagggccaccccacgtccttcaaggggactctgagacactctgggccggtgggaccttcagcagcatctggactttggctgcctcacaggcggatg

SEQ ID NO: 806774 - DNA, 120 bp, Artificial Sequence
  ENSG00000235890_2 (sequence is synthesized)
tcacccaccccttgggacttcgccatgggtcgctagcccagaccctccccttggttccggtggttccatttctgcccctttgctgctggcccccttctgaggatgcccgtgcatctccag

SEQ ID NO: 806775 - DNA, 120 bp, Artificial Sequence
  ENSG00000235890_3 (sequence is synthesized)
cggatgtaccagtggtggaagatcctgtccggctgcaccgaggctcacatcagaagccggcttcggtttcaccacaaaataaggcatctagtgcccgattctgcctccaaagcagccctg

SEQ ID NO: 806776 - DNA, 120 bp, Artificial Sequence
  ENSG00000235890_4 (sequence is synthesized)
ggtcacactcgctgtaggacagatgttattcttcagaatcacgccctctggcaaatgcccatcatcggacaaatggacggatgaagtgtgactcagccatgagaagggggatgctctgag

SEQ ID NO: 806777 - DNA, 120 bp, Artificial Sequence
  ENSG00000235890_5 (sequence is synthesized)
ccgcgcggccacaccaccaacccggaggacacggtgctgcgagaaaaagccagccaggagttcagaagtaacagggcaaatagggaaagtccttcctggcctgtctacatacccctgcag

SEQ ID NO: 806778 - DNA, 120 bp, Artificial Sequence
  ENSG00000235890_6 (sequence is synthesized)
ccctcccggtcctagggtgactgctgacggagagggcactcccttcccgagtcttctctgcacgtccgtgggcacgcacagctgagcggcacacagcagcccggctcgctcctccgcact

SEQ ID NO: 806779 - DNA, 120 bp, Artificial Sequence
  ENSG00000235890_7 (sequence is synthesized)
ggggacacaagatttcactgcacctcacccagccctttccacagagcagttcatcttggagactcttcccctcgaagggtctaaaggccagtctccgtgtcctggtgtttgttgtcgggg

SEQ ID NO: 806780 - DNA, 120 bp, Artificial Sequence
  ENSG00000235890_8 (sequence is synthesized)
aggatgcaacatcgggggaaggaagtaatcatgtctggtggcagctggcactggcaggcagcgggcactcgaagcctgcacctcgcacctgtccctctggggcctcggctatccctccgc

SEQ ID NO: 806781 - DNA, 120 bp, Artificial Sequence
  ENSG00000235890_9 (sequence is synthesized)
acgacgggcatgaagccccctcctgcctccactgctcggatgaaaggagctcgtagatgacggagttgatgacataggaatcattctggacttgcatctccacatcgtagctgtgactgt

SEQ ID NO: 806782 - DNA, 120 bp, Artificial Sequence
  ENSG00000235890_10 (sequence is synthesized)
ttgccacagcgaggaagatcctctccccgatctggaagacctcccagtctgcagcaccgaacgtctaggaccaaaggagagcaggccccagtgctgtgcgtcctacgagcaccacctgct

SEQ ID NO: 806783 - DNA, 120 bp, Artificial Sequence
  ENSG00000235890_11 (sequence is synthesized)
cagaagccccgtgtttttcggtaaccacgttccacgaacacctcccgactgccttccagaacacacaaagatcaacgaagctcagaatccagtcccgacgtcatttcatgaagagcaggt

SEQ ID NO: 806784 - DNA, 120 bp, Artificial Sequence
  ENSG00000235890_12 (sequence is synthesized)
agtccatcaaagggatgggccccatgagtgaagggctgagaccccaccatggtgtgaggcgtcccaggcactcccgtcacggcccaaaccaggctgcaggctccatccccatggggcagg

SEQ ID NO: 806785 - DNA, 120 bp, Artificial Sequence
  ENSG00000235890_13 (sequence is synthesized)
cacagaggaggcgattcatgtggacacagggacacctgtggacgccctggctcggccgcttaccgccgtgtgtttgtggccaggtccctgctcctgagcctcagtttccacacctgtgag

SEQ ID NO: 806786 - DNA, 120 bp, Artificial Sequence
  ENSG00000235890_14 (sequence is synthesized)
atgggtctgaggtggaatcgccaaccagctgaggatgcgcagccacagaccaccttccagaaatctccaaaaggctttccaaaacaggaaaacaaggaaggctgccatcagcaggaattc

SEQ ID NO: 806787 - DNA, 120 bp, Artificial Sequence
  ENSG00000235890_15 (sequence is synthesized)
cagggctttcagaatgaggctgtcaggagtgaagggagctgtgctccacatgcagggcagtggccagggctgccaggccttgtttatctgggagcgccaggctgcctgcctgcacctggt

SEQ ID NO: 806788 - DNA, 120 bp, Artificial Sequence
  ENSG00000235890_16 (sequence is synthesized)
ctgggcacctgaaggcagagctgctcctgcttagggtctgtggcaactgtcctcctcagtgggtgctgctgggagctcctctgattcctggtgggcggcttctggcctcgcctcttcacc

SEQ ID NO: 806789 - DNA, 120 bp, Artificial Sequence
  ENSG00000235890_17 (sequence is synthesized)
cacggtgtagggtgtgggatggagatgcagggcctctgctctccttctcccctcccccaagcagcctgggttgtacctccactaataaacaccaacacccgcgcccagggtgggttcggc

SEQ ID NO: 806790 - DNA, 120 bp, Artificial Sequence
  ENSG00000273055_0 (sequence is synthesized)
gcgtgagccaccgcgcccggccttcctctgaaaaactttctaatggaacatctcccagaaccagttatactgagggtcctgagatctgctataacatcaccatcctttcaacccagaggt

SEQ ID NO: 806791 - DNA, 120 bp, Artificial Sequence
  ENSG00000273055_1 (sequence is synthesized)
cagaggtgtgtgtttgtggcccattcatttggccctcaccacatcctgccttgtattgctagtttatctttttattgtctttgttctccccctacattccaagctctcgagtggcaggtt

SEQ ID NO: 806792 - DNA, 120 bp, Artificial Sequence
  ENSG00000273055_2 (sequence is synthesized)
tgaggagtacagcattatggttaagagcatgaactgcggactgaggtggtaaatcctgccttctccacacatgttatgtgaccctgggtaatcaggaaactgagtcacgtcttccacatc

SEQ ID NO: 806793 - DNA, 120 bp, Artificial Sequence
  ENSG00000273055_3 (sequence is synthesized)
tgtaagaagaggtaatgattataaatacaggactgctttcaagataaaataattacaaagtgcttagaagagcatctggtctatagcaagcattcaataaataaattgtttttattatca

SEQ ID NO: 806794 - DNA, 120 bp, Artificial Sequence
  ENSG00000273056_0 (sequence is synthesized)
agtggttctatcccttaataataactatcactgaagtaggtgttattcctgtagaaatgcaagttatagtccttgcagagcacacagctccggccctgaattacacccaagttgctctcc

SEQ ID NO: 806795 - DNA, 120 bp, Artificial Sequence
  ENSG00000273056_1 (sequence is synthesized)
atttgctaactaataaggttaatcagatcaggaaggtggtgcagcaaaactgtatggccgcacacatagttacaactgcccaaggtggcacctgtgcccttgcagggacacagtgttgta

SEQ ID NO: 806796 - DNA, 120 bp, Artificial Sequence
  ENSG00000273056_2 (sequence is synthesized)
tgggtgcctctggggctctggcctacattgggctctaataatcatgggtagcacatcaggaatattagtggtaggttgttgctctctgtggcctatgggtccaaggtgctgccctatgca

SEQ ID NO: 806797 - DNA, 120 bp, Artificial Sequence
  ENSG00000273056_3 (sequence is synthesized)
cacagatctgcactagaagaactccctcagcctagggggtggaatgtaaggcctgtgggccaagcctgtttatcaaactatgtgcccaaaacttatatataaagcctgtgtgtgtatatc

SEQ ID NO: 806798 - DNA, 120 bp, Artificial Sequence
  ENSG00000273058_0 (sequence is synthesized)
agccacgcccccacacctgggattccagggcctgctcttctctgctggactcccagactgcaacccagactgcactgttagaaaccagagaactgcatgatcatgaggatgagtgggtgc

SEQ ID NO: 806799 - DNA, 120 bp, Artificial Sequence
  ENSG00000273058_1 (sequence is synthesized)
ctgtgggtcttcaagacatggcatccacctgccgtggaccagtccagtctgcaggcgtggactctgacagctggctccacccagtattcaggtctcaacctgcaccctcactgcccagaa

SEQ ID NO: 806800 - DNA, 120 bp, Artificial Sequence
  ENSG00000273058_2 (sequence is synthesized)
tgactacactgtcttcccagtccactggctggggacctgtgctatgtggctgcctctcctgcatcacaaccatctgcctccatctagagcatctgaccaggatgtacagcccacacaccg

SEQ ID NO: 806801 - DNA, 120 bp, Artificial Sequence
  ENSG00000273058_3 (sequence is synthesized)
ttaagcctcacactaagctcactcaaattacgatgtgcatggtaaaacctacccaaggtacttctgattgtcaagaaataagaaataaaataagacgggccacagaaaagtggttataaa

SEQ ID NO: 806802 - DNA, 120 bp, Artificial Sequence
  ENSG00000285519_0 (sequence is synthesized)
ccctcctcagagctggcgcaagcaatcccagacatcacactggagagtcaagcatgaataaactcctactttgacacgagtatccctccagagatggttaattcatctcctgttccagag

SEQ ID NO: 806803 - DNA, 120 bp, Artificial Sequence
  ENSG00000285519_1 (sequence is synthesized)
acgtcacatgttagatcaaatttaatccccaataagagtctacctgggctggagttgaggatcctacatgtctattatacagagatgccagagagaagagggcagcccgccttgcaggcc

SEQ ID NO: 806804 - DNA, 120 bp, Artificial Sequence
  ENSG00000285519_2 (sequence is synthesized)
ggccacacagctgatgagaaaaccaactcagaggagataatggcttgcccaagatcacacagaaagaggataacagatcttgggctacaatccgggcctcacgactctctgcatctctac

SEQ ID NO: 806805 - DNA, 120 bp, Artificial Sequence
  ENSG00000285519_3 (sequence is synthesized)
catgttgcttgtcaccaaccaaaaacattttcgtggacattccacagagagagatttacgcaaattaactataaaatgattaaatataatccattgaatgtaaataaactgtttacaagt

SEQ ID NO: 806806 - DNA, 120 bp, Artificial Sequence
  ENSG00000285518_0 (sequence is synthesized)
agagctgctctggtttacagacttgctgttaaatatttaactccggtcctgctgatctctggaggacaggtacagacagcactagctcatgcacgagtcattcaagggaggtaggcattt

SEQ ID NO: 806807 - DNA, 120 bp, Artificial Sequence
  ENSG00000285518_1 (sequence is synthesized)
tctcaaagcaactccctctccaggcattttagggaagaaggaaaacagtcttggctcactcacacttctctctgttggaggctccttcctaacgaggcacatttggggcttgcttctggg

SEQ ID NO: 806808 - DNA, 120 bp, Artificial Sequence
  ENSG00000285518_2 (sequence is synthesized)
atatgcatttttaaagttctcagcagtcagcctgattgctgctctcctcaccccagcagtgccagagatgcagtcagtggcagatgtgacacaaggtgcagagtactgcccttgcactgg

SEQ ID NO: 806809 - DNA, 120 bp, Artificial Sequence
  ENSG00000285518_3 (sequence is synthesized)
gctctctggactggaaaggagagaagaaaccatttagtattttggaaccacatccctggccctatctatcaaagtcaacaagtggtctagttggcagtcatgtctagtatttccagtgca

SEQ ID NO: 806810 - DNA, 120 bp, Artificial Sequence
  ENSG00000285518_4 (sequence is synthesized)
ggatgcactggaaatcttatttcccaaccctcacagggaaaaatatgactgttttagctataagaggattgtagccatgtaatttccctttaagaaacatttgtgagtcaatttctagtc

SEQ ID NO: 806811 - DNA, 120 bp, Artificial Sequence
  ENSG00000285518_5 (sequence is synthesized)
ccccctcttccctgctcatcactgtagcattctatgaaatgtttctctggaaacagtccttgtgccaaatttccagaccaaggctttccactcagcaatgaaataaatgcgttcgagagc

SEQ ID NO: 806812 - DNA, 120 bp, Artificial Sequence
  ENSG00000285517_0 (sequence is synthesized)
gtacaggagctgcaagagaggcgcgccggggccagcaagctctagaacagcaggagcggccccagttgggaccccgggacgacgagtggccggcaacgcggcgcccgcatggcccaagca

SEQ ID NO: 806813 - DNA, 120 bp, Artificial Sequence
  ENSG00000285517_1 (sequence is synthesized)
gtgtccgggaggggtcggggccccggactaggggcgcagcgaggaccgcccggaggctttcccttgggcagctaagtccgagtcagctctactcggatttccagcttccagccccggctc

SEQ ID NO: 806814 - DNA, 120 bp, Artificial Sequence
  ENSG00000285517_2 (sequence is synthesized)
tgaagcgccctcgagaagtgtctaaaggagacagttgatagccaaacaacagttttggattcactgactgattatgaaagaagcagtagactggtatcaagaatcagtcagcaaggaggc

SEQ ID NO: 806815 - DNA, 120 bp, Artificial Sequence
  ENSG00000285517_3 (sequence is synthesized)
cctcaccagacgccagtgccatgttcttggacttctcagcctccatattcatgaactaagtttttggaatccttaggcttccacgtgtggaaagcctgagctaacctactggaggatgag

SEQ ID NO: 806816 - DNA, 120 bp, Artificial Sequence
  ENSG00000285517_4 (sequence is synthesized)
ccatcacctggagcagattcaggccatcctagttgaagcctccctaggccaagcaaccgtccaactaccagacattgaccattcagccttgaacattcagcacaaagacaaaacagacca

SEQ ID NO: 806817 - DNA, 120 bp, Artificial Sequence
  ENSG00000285517_5 (sequence is synthesized)
gaccagaagagtcccacagaataggggaaactattcagagaaaacttaagccactaagttttatggtgttttgttctgtagcagaagcataggcatactgacaatacaaaccgaaatcct

SEQ ID NO: 806818 - DNA, 120 bp, Artificial Sequence
  ENSG00000285517_6 (sequence is synthesized)
tctaacgtagtggaccttttcaggccagcattttttccttgaaaacctggagcatgtatccatcttatagcagagatcactttcacaatgtttgggctcttgatttgaattgatgatgta

SEQ ID NO: 806819 - DNA, 120 bp, Artificial Sequence
  ENSG00000285517_7 (sequence is synthesized)
atgagccctctatccagattgtaactaattactctgcgaattgactggattccacacccttctaatattttacttttcctcttttatcaactctcattcttgctgccatgatcaatggac

SEQ ID NO: 806820 - DNA, 120 bp, Artificial Sequence
  ENSG00000285517_8 (sequence is synthesized)
ggaccaactatgcttataaccacaaattttgatatgcttaaacaaatgaacaaatatatttaataatttcttttttttttttgaaatagtatcttgctctgtcacccaggctgcagtgca

SEQ ID NO: 806821 - DNA, 120 bp, Artificial Sequence
  ENSG00000285517_9 (sequence is synthesized)
aatttcctgatataataaaaatgccaatactatacaattaaatagtaaagtgataaaaaataggataacatgataaccactaattaatatatactacataatcatccttttcgtgagttg

SEQ ID NO: 806822 - DNA, 120 bp, Artificial Sequence
  ENSG00000285517_10 (sequence is synthesized)
gttgaaatgttcttttagcacactttatggtttatcctttctggaatactattatatgatcatgatttttctcacacttgttccagtgaaatatacttttaggtgtttcctttgtattgt

SEQ ID NO: 806823 - DNA, 120 bp, Artificial Sequence
  ENSG00000285517_11 (sequence is synthesized)
tcaaactgtaatatctccagtggaagattttttaagcttgttcttgtcttgtcagtgtcacccacatagtcatagtctgaaagcattttgctttctggaaataagatattataggcacca

SEQ ID NO: 806824 - DNA, 120 bp, Artificial Sequence
  ENSG00000285517_12 (sequence is synthesized)
agttatggaattatctacttttcaccaagccttcattctttcagtgctgtattagagacctcatttagggttctaagggtgcatatcaaattgttccatgagtctaaaatggataattct

SEQ ID NO: 806825 - DNA, 120 bp, Artificial Sequence
  ENSG00000285517_13 (sequence is synthesized)
tctgtgggccatttttagtgctagagctagaaaagttatacttttaaaaggtaaatagctcacaatgattttgcaatataattcccactttacccaattattaactgctgtttgaatata

SEQ ID NO: 806826 - DNA, 120 bp, Artificial Sequence
  ENSG00000285517_14 (sequence is synthesized)
aaaatatttttaaacttttttatttacaacatatctatttaaattcaatacagcattcccaaataaatatagcagaagtgggagtttcaagttactaaacatgtcagtcacaatttatgg

SEQ ID NO: 806827 - DNA, 120 bp, Artificial Sequence
  ENSG00000285517_15 (sequence is synthesized)
agccgattgaaagatggagaaatattactgtattagtttcttctcacattgctataaagaaatatctaagactgggtaatttaagaaggaaagaggtttaattggatcatggttccacag

SEQ ID NO: 806828 - DNA, 90 bp, Artificial Sequence
  ENSG00000285517_16 (sequence is synthesized)
atgggaaggggagcaagcacttcacatggccagagcagaaggaagagagagaggcggaggtgcctcacactttaaaacaaccagatctca

SEQ ID NO: 806829 - DNA, 120 bp, Artificial Sequence
  ENSG00000285517_17 (sequence is synthesized)
gaggcggaggtgcctcacactttaaaacaaccagatctcatgagaactctatctctatcatgagaacagcaccaaaaggggaaatctgcccccatgatccaatcatctcccaccaggccc

SEQ ID NO: 806830 - DNA, 120 bp, Artificial Sequence
  ENSG00000285517_18 (sequence is synthesized)
cacctccaacactggggattgtaattgaacatgagatttgggtggggacacagatacaaaccatatcattccactcctggccccactcaaatctcaagtccttctcacattgagaaatac

SEQ ID NO: 806831 - DNA, 120 bp, Artificial Sequence
  ENSG00000285517_19 (sequence is synthesized)
aatcatgccttcccaacagttgctcaaagtgttaactcattccaacattaactcaaaagtccaaagtctcatctaagacaagactagtctcttccatccataagtctgtaaaatcaaaaa

SEQ ID NO: 806832 - DNA, 120 bp, Artificial Sequence
  ENSG00000285517_20 (sequence is synthesized)
gcagggcagtcattaaatcttaaagcttcaaaataatctttgacattatgtcccacatccagggcacacttgtgcaaggggtgggctcccaaatccttgggcaactctgcccctgtggct

SEQ ID NO: 806833 - DNA, 120 bp, Artificial Sequence
  ENSG00000285517_21 (sequence is synthesized)
ccaaatccttgggcaactctgcccctgtggctttccaggggtcagcccccatggctgctcttaagggctggcattgagtgcttgcaatttttccaggcacatggtggcaagctgtcagtg

SEQ ID NO: 806834 - DNA, 120 bp, Artificial Sequence
  ENSG00000285517_22 (sequence is synthesized)
aagctgtcagtggctctgccattccagggtctggaagatggtggccttcttctcaactgcctatctattaggcagttccccagtgggtactctatgtgggggctccaaccccacatttcc

SEQ ID NO: 806835 - DNA, 120 bp, Artificial Sequence
  ENSG00000285517_23 (sequence is synthesized)
tctccatgagggctccacccctgcagcaggcttttacctggacatccaagtgtttccatacatcctctgaaatctagatggaggctcccaagcctcaattcttgtactctgtgcaccttc

SEQ ID NO: 806836 - DNA, 120 bp, Artificial Sequence
  ENSG00000285517_24 (sequence is synthesized)
ctgtgcaccttcaggcttaacaccacatggaagctgccaaagcttatggctcacaccctctgaagcagtagccggagctgtacctgggccccttttagccatggcattctcaaagaatgt

SEQ ID NO: 806837 - DNA, 120 bp, Artificial Sequence
  ENSG00000285517_25 (sequence is synthesized)
tgagagagatggctggaggtggagtggctgggatgcagggagcagtgttctaaggctacataaggcagcagggccctgggcccagccaaggaaactattcttccctcctaggactctgga

SEQ ID NO: 806838 - DNA, 120 bp, Artificial Sequence
  ENSG00000285517_26 (sequence is synthesized)
cccgtgatgggagaggctgctgcaaaggtctctgaaatgccttggaacccttttctccatcgtcttgtctatcaatatttgccttccttttagttatgcaaatttatgcagccttcttga

SEQ ID NO: 806839 - DNA, 120 bp, Artificial Sequence
  ENSG00000285517_27 (sequence is synthesized)
attcctccccagaaaataggcttctcttttctaccacatggctgggctgcaaattttccaaacttgtactctctgcttcccttttaaatataagttccagtttcagatcttttctttgct

SEQ ID NO: 806840 - DNA, 120 bp, Artificial Sequence
  ENSG00000285517_28 (sequence is synthesized)
tttcagatcttttctttgctcacacatatgagtatatgttgttagaagaagcagccagaccacatcttgaacatttcgctgcttagaaattccttctaccagataccctaaatcatctct

SEQ ID NO: 806841 - DNA, 120 bp, Artificial Sequence
  ENSG00000285517_29 (sequence is synthesized)
gatccctagagcaagggcacaatgcagtcagtttctttactaaatcatagcaaaaatgacctgtgctccagttcccaataagatcctcatctccatctgatacctcctcagcctggactt

SEQ ID NO: 806842 - DNA, 120 bp, Artificial Sequence
  ENSG00000285517_30 (sequence is synthesized)
cattatcagcattttggtcacaataatttgacaagtctctaggaagttctaaactttccctcatcttcctgtctttttctgagcctccacattcttccaacttctgccagttacccaatt

SEQ ID NO: 806843 - DNA, 120 bp, Artificial Sequence
  ENSG00000285517_31 (sequence is synthesized)
ccaaagatgcttccacattttcaggtatcattatagcaacgccccactcgtcagtaccaattttctgtattagtctgttctcacattgctacaaatacctgagactaggtaaatttataa

SEQ ID NO: 806844 - DNA, 120 bp, Artificial Sequence
  ENSG00000285517_32 (sequence is synthesized)
tcacattgctacaaatacctgagactaggtaaatttataaagaaaagaggttctgcaggttgtataggaagcataatggcttctgcttctaggaaggcctcaggaaacttacagtcatgg

SEQ ID NO: 806845 - DNA, 120 bp, Artificial Sequence
  ENSG00000285517_33 (sequence is synthesized)
agcaaggatttcacatggctggagcaattacccaaagggagaatgccaccaaattctacaagtgattagcttttatttctaggaggcaaaaaacaggtggcttatgcctgtaatctcagc

SEQ ID NO: 806846 - DNA, 120 bp, Artificial Sequence
  ENSG00000285517_34 (sequence is synthesized)
atcaaaaggttaggagattgagatttatggagctttttttgcctaaaccacttaccttcttagcatagggacttttaaaaattctgattatcagaatatggctgagagatgtcagaacca

SEQ ID NO: 806847 - DNA, 120 bp, Artificial Sequence
  ENSG00000285517_35 (sequence is synthesized)
tttttctcaaatatgaattcttagcaggaatagaaattgcaattttttaatttttaattttaagaggaattagtgccagagagaactattaagaaaggggtatatccagtctaaggatta

SEQ ID NO: 806848 - DNA, 120 bp, Artificial Sequence
  ENSG00000285517_36 (sequence is synthesized)
ttaggctcaagtccatgaataggctctgggaagtttgtaaacacttggaaattatttgcaaaatgtgtgtgtgaatgtgctttaccttagagagttcatgaatttcattagattgttgaa

SEQ ID NO: 806849 - DNA, 120 bp, Artificial Sequence
  ENSG00000285517_37 (sequence is synthesized)
agagttttagtattaacaaaggaaaaacaaaccaccaccatcacataacaaaaccacaacagtgatttaatcttttcacctaacaataagtaaattgaggctctgatggctaaattaata

SEQ ID NO: 806850 - DNA, 120 bp, Artificial Sequence
  ENSG00000285517_38 (sequence is synthesized)
gcctgaggctacacagtcagtggcagagcccagggtaaagagagaaccagcacagccattgtgggagccgagggtaaagagagagctaggtgttgtacttagtaaataaatcagaaattc

SEQ ID NO: 806851 - DNA, 120 bp, Artificial Sequence
  ENSG00000285517_39 (sequence is synthesized)
ctaactcttaggctggagttcttcctgttatgtgaagccaaagtagggaatcattaggtccaagaataggaattacatttatattttaatgaaaaggtgcagtaaaatttaaaggaagag

SEQ ID NO: 806852 - DNA, 120 bp, Artificial Sequence
  ENSG00000285517_40 (sequence is synthesized)
agagggttgcagatgacagaatacaaagaatgttgagagagatgaagcaagatgagtccatagaatcagaggcttagaagtaattcctatttatgaaagggagtgagaacaatgtggtga

SEQ ID NO: 806853 - DNA, 120 bp, Artificial Sequence
  ENSG00000285517_41 (sequence is synthesized)
ggtgtatagagctatgtgaaagtgcttgtcaataacatggctgcagaatgctgatggtggtaattgaaaaggaagtaaaatataaaaacatttgcagaatatttctttttttttttctct

SEQ ID NO: 806854 - DNA, 120 bp, Artificial Sequence
  ENSG00000285517_42 (sequence is synthesized)
gtctgacgcaggggacgtggctgaagtcagtcgggccgcccgcttgctgcacggcagccgtgggactggcacaggctcctcggcagcattatgggcagctggtagagcggccacttctga

SEQ ID NO: 806855 - DNA, 120 bp, Artificial Sequence
  ENSG00000285517_43 (sequence is synthesized)
acttctgagagccggatgggccttccgagggatgtggtctcattaggttgcccaagctggacttgtactcttggcctcaagaggtccttccatctcagtctcccaagtagctgggactac

SEQ ID NO: 806856 - DNA, 120 bp, Artificial Sequence
  ENSG00000285517_44 (sequence is synthesized)
gcaggacccagcgccgcggtagccttctctgaactgcggctcaggcggaggtgtcactcctgcctccagcccaggagggcaggtagagacagctccgggccgggggtggaggatggtgcg

SEQ ID NO: 806857 - DNA, 120 bp, Artificial Sequence
  ENSG00000285517_45 (sequence is synthesized)
gtggggaggaggcaaggaaattcccagccttcctgcgcgaacctgggagaccagcaggcacctggtctcgtcccgctgggtcccctccgcacccaagactgtcttcccaagtggcttact

SEQ ID NO: 806858 - DNA, 120 bp, Artificial Sequence
  ENSG00000285517_46 (sequence is synthesized)
ggtggtggtctggggggttggaaggggcgggaagggcgctgtcttaagaatcatcctcacatctcagggcttcgcccctcgagggaggtgacccttggccaccctctgcgcagttctccc

SEQ ID NO: 806859 - DNA, 120 bp, Artificial Sequence
  ENSG00000285517_47 (sequence is synthesized)
ccgtgccccgctgggcagcgcagagggggtgtgtagggcacgcgacttggagccaggtccagacccatcctggctcctctcagggctccttcccctgcccccattccaccccagccctgc

SEQ ID NO: 806860 - DNA, 120 bp, Artificial Sequence
  ENSG00000285517_48 (sequence is synthesized)
tggctgtcccgcaggacccagcgccgcggtagccttctctgaactgcggctcaggcggaggtgtcactcctgcctccagcccaggagggcaggtcaggttatgcaacgcgtgccgcgcga

SEQ ID NO: 806861 - DNA, 120 bp, Artificial Sequence
  ENSG00000285517_49 (sequence is synthesized)
tctccccccacctccaacccccttttctcccgggtccacaccgcagttcccaccgctccgggtgtcctccccagtgcgccgcgatttttgtgtccaagccccagagtccctctgagacca

SEQ ID NO: 806862 - DNA, 120 bp, Artificial Sequence
  ENSG00000285517_50 (sequence is synthesized)
ttcctgccttcccagctcggcgccctcgagaagtgtctaaaggagacagttgatagccaaacaacagttttggattcactgactgattatgaaagaagcagtagactggtatcaagaatc

SEQ ID NO: 806863 - DNA, 120 bp, Artificial Sequence
  ENSG00000285517_51 (sequence is synthesized)
agtcaggtgccattctaagccccttcagtgatgagaagaataattctcgaagcctcactagagagatgtgtgagtgacaatatggaacgaaggcctgatggtgaagtttcagaaactagt

SEQ ID NO: 806864 - DNA, 120 bp, Artificial Sequence
  ENSG00000285517_52 (sequence is synthesized)
tgagagtggttcatatgttaagctgaggtgaaattaccaaccccctttaaattatgtcatgctacttcgatgatacataaagtttctcctactctgcccagctcctcttcctcaccctcc

SEQ ID NO: 806865 - DNA, 120 bp, Artificial Sequence
  ENSG00000285517_53 (sequence is synthesized)
ctaaacatttataacatcaaaatgagatgctctggaagccctttcaaagctacttccagctgggtgcgctgggtcacgtttgtaatcctaatactttgggaggccaaggcgtgcggatca

SEQ ID NO: 806866 - DNA, 120 bp, Artificial Sequence
  ENSG00000285517_54 (sequence is synthesized)
ccttcacaatgaggaaaatgggattaggaattagtctctgattgactgatatttgtgtctccattatctgaaatcatgccgtttgtttgaattgttttttccaatatgtgcgctgctggt

SEQ ID NO: 806867 - DNA, 120 bp, Artificial Sequence
  ENSG00000285517_55 (sequence is synthesized)
gttaagtctgaatgaaggaagggactgggagtcatttcctaacattgctatggtttgaatgtgtcccctaaatttcatgtcttggaaacttaatccccaaattcaaatgttgattggaag

SEQ ID NO: 806868 - DNA, 120 bp, Artificial Sequence
  ENSG00000285517_56 (sequence is synthesized)
attaggattagataaggtcatcagtgtgggcccccacccccatgatggaactggtggctttataagaagaggaagataagaagggaaagaaagacctgagctgacatgcacatgcttgac

SEQ ID NO: 806869 - DNA, 120 bp, Artificial Sequence
  ENSG00000285517_57 (sequence is synthesized)
tctttataaattatccagcatatagtattctgttaggtaacagaagacagactaagacaaccatactcccagtgcctagattaatacatacactgtagatgattaatacatatggttcat

SEQ ID NO: 806870 - DNA, 85 bp, Artificial Sequence
  ENSG00000285517_58 (sequence is synthesized)
ttaatacatacactgtagatgattaatacatatggttcatatggttgtttgtttgtttggttggatagttagttcagtggcacaa

SEQ ID NO: 806871 - DNA, 82 bp, Artificial Sequence
  ENSG00000285517_59 (sequence is synthesized)
tctcagctcactgcaacctctgcttctccagttcaagttattttcatgcctcaaccatctgagtagctgggattacaagtgt

SEQ ID NO: 806872 - DNA, 88 bp, Artificial Sequence
  ENSG00000285517_60 (sequence is synthesized)
cctgcattgctgggattacaggtgtgagccatttgcctggccataaatatgatttgaataaactattgaataaatgtgtcaactgaga

SEQ ID NO: 806873 - DNA, 120 bp, Artificial Sequence
  ENSG00000285517_61 (sequence is synthesized)
accgcgcccagcccagaatatttcttaatcaaaatttcaccaggggttccaaaatggcagcatagaatcaagcttcttccacagaaaaccaaaaacaaatatatagcgctgagattatta

SEQ ID NO: 806874 - DNA, 120 bp, Artificial Sequence
  ENSG00000285517_62 (sequence is synthesized)
ccagcaatatgtcaaacttgaatatgaagatgagacagttcctggggccacagagaagtgaaaaactttgagaagatggtaagagaatcagactttcgtgtccacaatgcctttcctccc

SEQ ID NO: 806875 - DNA, 120 bp, Artificial Sequence
  ENSG00000285517_63 (sequence is synthesized)
agtctgctcagcaccaagtgtacggaaaatttctccctgacttatagtttccacactggaaaaaccgaggttgaggtggacaaccagcttccccagcatcttgggttctctggcaggaga

SEQ ID NO: 806876 - DNA, 120 bp, Artificial Sequence
  ENSG00000285517_64 (sequence is synthesized)
cccatccctgcctcaacccaagggaagcatcaggagtaccttgaaaggaaaactattcctgagggcagccagagacaaaggagggaagtgagactgccatcctcagccctggaacctctg

SEQ ID NO: 806877 - DNA, 120 bp, Artificial Sequence
  ENSG00000285517_65 (sequence is synthesized)
taactcagcgaaatgaggcacaaatcagagtagctcttcagcagcaccatgctgtaggaggttcattcaacaggttcgtgctctgggcagaacaccctaggcagccttcctgcactactg

SEQ ID NO: 806878 - DNA, 120 bp, Artificial Sequence
  ENSG00000285517_66 (sequence is synthesized)
cgatatttcatttggcatctccccatttgggctgggaagcactctgatcatttactagaactgtagcaaacctgggcttaaagtgccatctagtgacaaaaagaaggcagtgacctagca

SEQ ID NO: 806879 - DNA, 120 bp, Artificial Sequence
  ENSG00000285517_67 (sequence is synthesized)
aggaaaaaaaagaagtcaacagataaattacaatctgtaagcaaacatatccaataaaaaccaaaacaagccacaccaagaagactggaataaagagctaatccttaaatgaaagacata

SEQ ID NO: 806880 - DNA, 120 bp, Artificial Sequence
  ENSG00000285517_68 (sequence is synthesized)
gatgtacatccacaagaaacaacagcaatcagggaaccatgactttttcaaacaaccaaacaaggaaccagtgactgatcttaataagatggcaggcaatatgtgaactctctaagaatt

SEQ ID NO: 806881 - DNA, 90 bp, Artificial Sequence
  ENSG00000285517_69 (sequence is synthesized)
ttaataagatggcaggcaatatgtgaactctctaagaatttaaaataatagttttttttttgttttttttttaggcagagccttaaaatc

SEQ ID NO: 806882 - DNA, 120 bp, Artificial Sequence
  ENSG00000285517_70 (sequence is synthesized)
tggcctcaagtgatcttcccacctcagactcccaatatgctggaattattggcatgagccaccatgcccggctcaaaataatagttttgagaaaacgcagtgacctccaagataacacag

SEQ ID NO: 806883 - DNA, 120 bp, Artificial Sequence
  ENSG00000285517_71 (sequence is synthesized)
aaaacaaatttagaaatttatcagagaaatttaacaaagagattgaaataattttttaaaaatcaaacagaaatcttggaattgagcaatacatttgctggactaaaaaattaattacag

SEQ ID NO: 806884 - DNA, 120 bp, Artificial Sequence
  ENSG00000285517_72 (sequence is synthesized)
gccctcaacagcaaaatgcattgaacagaggaaagagtcagtgagcttaaagagaagctatttaaatattcacagttagaggacaaagaagaaaaaagaaaagaaacagatcacctacaa

SEQ ID NO: 806885 - DNA, 120 bp, Artificial Sequence
  ENSG00000285517_73 (sequence is synthesized)
gatacagaaaattacctgaaaagacaaaattaaacatcattggtattgaagagagagttgaggaagggcgaagtgtagaaaccttattcaaagaaataatagaaaactttccaaaacatg

SEQ ID NO: 806886 - DNA, 120 bp, Artificial Sequence
  ENSG00000285517_74 (sequence is synthesized)
agaaaaagataaatattcaggtacagggaagtaaaagaacaccaaatattttttacccaaataagactaacctaaggttatataatcttcaaactctcaaaggtcaatgacaaacagagg

SEQ ID NO: 806887 - DNA, 120 bp, Artificial Sequence
  ENSG00000285517_75 (sequence is synthesized)
atcctttctctcttttaagagaggatcctaacagcagcaagagaaaagaaacaaataacatacaaaggagctctaattcatctggcaagagacttctcaacagaaactgtataggccaaa

SEQ ID NO: 806888 - DNA, 120 bp, Artificial Sequence
  ENSG00000285517_76 (sequence is synthesized)
aaagagtgagatgacactttcaatgtgctgagtgaaaaaaagcagacatccaagaatattttatccagcaaagttatctttcagatatgaaggaaagataaagtcttttccagacaaaca

SEQ ID NO: 806889 - DNA, 120 bp, Artificial Sequence
  ENSG00000285517_77 (sequence is synthesized)
aaagctgagagaattcaccaccaccagactcatcttacaagaaatgctaaaggtaattacttattctgaaaggaaaaaacattaatgtaaataaagaaaacatttgaagatacaaaaccc

SEQ ID NO: 806890 - DNA, 120 bp, Artificial Sequence
  ENSG00000285517_78 (sequence is synthesized)
actgtgtatttatatacttataaatacttataaccctagtatgaatccaaaagacaaacctattaaaaacaataatacctacagcaacttgataagagacaggcaatataaaataagtaa

SEQ ID NO: 806891 - DNA, 120 bp, Artificial Sequence
  ENSG00000285517_79 (sequence is synthesized)
attgaggcaatataaagtcaaaatgtgtgttgcaggagtggagttaaagtgtagagggtttttttccttgtttgctcctattttttgtgtgacctaagataagttgttatctctttaaat

SEQ ID NO: 806892 - DNA, 120 bp, Artificial Sequence
  ENSG00000285517_80 (sequence is synthesized)
tcacatgttacacctatgagatgttttttgtaagcctgatggtaaccacagtacaaaaaccaacaacagattcactaaaaataacaagtgatcaattaaaacatactaccagagaaaata

SEQ ID NO: 806893 - DNA, 120 bp, Artificial Sequence
  ENSG00000285517_81 (sequence is synthesized)
actacaaagaaagacagtaagaaaaggaagaaagagaggagttacaaaacaatcagaaaataaggaagaaaatggcactaataagtcctaccttttcagtaacaacactgaatgtaaatg

SEQ ID NO: 806894 - DNA, 120 bp, Artificial Sequence
  ENSG00000285517_82 (sequence is synthesized)
gactcaattctataattaaaaggcatagagtggctgaacaaataaagaaataagacccaactatatgccgcctataagaaacccacttcacctatagagacacaaatcaaagattgcaaa

SEQ ID NO: 806895 - DNA, 120 bp, Artificial Sequence
  ENSG00000285517_83 (sequence is synthesized)
gagacaaagaaggtcactacataatgacaaaggggtccatttagcaagaggatataataattagaaatatctgtgcactcaacactggagcttccaagtatataaaacgaacattactat

SEQ ID NO: 806896 - DNA, 120 bp, Artificial Sequence
  ENSG00000285517_84 (sequence is synthesized)
ctctgaaggtagagatagactacaatacaataatagtagcacattcgccacaaccgtagagcaaagaaaaaaattttcatctcatgacaagatgagaaaactcatttcaatatattcaga

SEQ ID NO: 806897 - DNA, 120 bp, Artificial Sequence
  ENSG00000285517_85 (sequence is synthesized)
cctcagcctcccaaagtactaggattacaagtgagccactgcacctggcccagaaaacatatttgataaaacaaaaattttaaaaattttaaaacccatcaggtttattcataggattct

SEQ ID NO: 806898 - DNA, 120 bp, Artificial Sequence
  ENSG00000285517_86 (sequence is synthesized)
ttctaaattttatatgaaaaagcaaaggacttaaaatatccaagacaaccttggaaagggataataaaggtggggcacttacactactggacttaagacttattctgaagttacagaaat

SEQ ID NO: 806899 - DNA, 120 bp, Artificial Sequence
  ENSG00000285517_87 (sequence is synthesized)
caaaactttactggaggtactgggataaagataaacaagtaagtcaatggaataaatagagaactcccaaacagatgcataccatggccatttggttcttgacaaggtgccaatgggaaa

SEQ ID NO: 806900 - DNA, 120 bp, Artificial Sequence
  ENSG00000285517_88 (sequence is synthesized)
agaaaattctttaagaaatagttctggaacaactaggtatctctctacagaaataaatgaatctctacccttgcctcacaccatacacaaaaattaattcaagtggagcatagacctaaa

SEQ ID NO: 806901 - DNA, 120 bp, Artificial Sequence
  ENSG00000285517_89 (sequence is synthesized)
cataaaagttataattataaagtctccagatgaaaacaaaagaatatctttgtgaattggacataggtaaaagtttgttaggatataaaaagcaataaatgataaatgaaacctcataaa

SEQ ID NO: 806902 - DNA, 120 bp, Artificial Sequence
  ENSG00000285517_90 (sequence is synthesized)
aataaaaaaaaattctgttcttcaaacacactattaagaaaaaagacaagacatagggaaatattttgcaagacatatatctgacaaataactgataaacagaatatattttaaaaaaac

SEQ ID NO: 806903 - DNA, 120 bp, Artificial Sequence
  ENSG00000285517_91 (sequence is synthesized)
caaataactgataaacagaatatattttaaaaaaactcctgaccaggtggggtggcttacacctgtaatcctggaactttgggaggccaaagcaggcagatcgcttgagcccaggagttc

SEQ ID NO: 806904 - DNA, 120 bp, Artificial Sequence
  ENSG00000285517_92 (sequence is synthesized)
ataaataaataaataaataaatctccttaactcaataacaaaaagacaacccaacttttaaaaataggcaaaacatttcaatagacattttacaaattaatatatatgaatgaccaacaa

SEQ ID NO: 806905 - DNA, 120 bp, Artificial Sequence
  ENSG00000285517_93 (sequence is synthesized)
ttaatatatatgaatgaccaacaagaacattaaaaagtacttaacatcattaattgttagaaaaatacaaattaaaaccacaatgaaaaaccactacacacctaccagaatgactaaaaa

SEQ ID NO: 806906 - DNA, 120 bp, Artificial Sequence
  ENSG00000285517_94 (sequence is synthesized)
taaaaacactgaaacacaaaatgttggccaggatttgcaacaacctgaactttcatgcactgttggtgggaatgttaaattgtatagttactttgaaaagatctacctgtttcttaggaa

SEQ ID NO: 806907 - DNA, 120 bp, Artificial Sequence
  ENSG00000285517_95 (sequence is synthesized)
actgaatatacatataccctgtaaccaagctattacatttttaggtatttgcccaagagaaataaaaaaaaatagtccacaaaaagacttgtacaaaaatgtctgtagaagctctattta

SEQ ID NO: 806908 - DNA, 120 bp, Artificial Sequence
  ENSG00000285517_96 (sequence is synthesized)
taatagccctgaactgaaaacaatccaggtgtacatcggtaggaaaaactgtggcaaatttataaagtagtacaaactaatgttagataaaatagcatgaataaatcttgaaaatgctat

SEQ ID NO: 806909 - DNA, 120 bp, Artificial Sequence
  ENSG00000285517_97 (sequence is synthesized)
tttggtgaaagaagtataacacaaaagagacatactttatgattccaatttatgaagttagatccttgtaaaacaggcagaactaatctatgatcttgtattagtcagggttttccagag

SEQ ID NO: 806910 - DNA, 120 bp, Artificial Sequence
  ENSG00000285517_98 (sequence is synthesized)
ggacagaactaatagggtgtgtgtgtgtgagtttattagggagaattggctcacacaattacaaagcaaagtcccatgataggctatcggcaagctggggaagagagaagctggtagtgg

SEQ ID NO: 806911 - DNA, 120 bp, Artificial Sequence
  ENSG00000285517_99 (sequence is synthesized)
ttcagtccaagtccgaaagcctcaaactggagaggctgacggtgcagtcttcagtctgtgggcaaaggactgaaagaccctggaaaaccaatggtgcgagttccagagtccaaaagccaa

SEQ ID NO: 806912 - DNA, 120 bp, Artificial Sequence
  ENSG00000285517_100 (sequence is synthesized)
cgagttccagagtccaaaagccaaagaacctggagtttgatgtccaagggcaggaggagcagaagaaggcatccagcacgggagaaagaaggcagccagaagactcagcaagccagctta

SEQ ID NO: 806913 - DNA, 120 bp, Artificial Sequence
  ENSG00000285517_101 (sequence is synthesized)
tcagcaagccagcttatcccaccttcttctgcctgctttgttctagccacactggcagccgattggatggtgtccacccacattgagggtggatcttcctctcccagtccactgactcaa

SEQ ID NO: 806914 - DNA, 120 bp, Artificial Sequence
  ENSG00000285517_102 (sequence is synthesized)
gaaacaatgcttaccagctatcttggcatccttcaatccaatcaacttgacaactaatattaaccatcacagatgacaaaaagaaaatcagacagtagatgcatctagaggataaaggat

SEQ ID NO: 806915 - DNA, 120 bp, Artificial Sequence
  ENSG00000285517_103 (sequence is synthesized)
tcaggattgactaggaagggttatttgtggagttgctagacaaaatacaagatgcccagttaaacttgaatttcagataaacaatgagtatttttttttttttgagaaaaggtctcactc

SEQ ID NO: 806916 - DNA, 120 bp, Artificial Sequence
  ENSG00000285517_104 (sequence is synthesized)
atagctcactgcagcctcaaactcctggggtcctgtgatcctcccacctcaagcacccaagtagctaggactacaagtgtgcaccaccacaactggctaatatttctttttctttttttg

SEQ ID NO: 806917 - DNA, 120 bp, Artificial Sequence
  ENSG00000285517_105 (sequence is synthesized)
tatttctttttctttttttgtagagactgagccttgctatattgcccaggctggtctcgaacctctgaccacaagcaatcctcctgccatggcctcccgaagtgctgagattacaggtgt

SEQ ID NO: 806918 - DNA, 90 bp, Artificial Sequence
  ENSG00000285517_106 (sequence is synthesized)
agtgctgacggcaacaaatgatttttttaggacaagaatttctcatgcagcagtgggggcatacttaaacacacacacacacacacacac

SEQ ID NO: 806919 - DNA, 120 bp, Artificial Sequence
  ENSG00000285517_107 (sequence is synthesized)
acacacaaagccattatttatctgaaattcaaatgtaactgggcaccttattattatttttccttctaaatctggcaaccccagacatgaggaaactttctagagtgattataatgtttt

SEQ ID NO: 806920 - DNA, 120 bp, Artificial Sequence
  ENSG00000285517_108 (sequence is synthesized)
acatgaggaaactttctagagtgattataatgttttatatattatagggatttaggttgcacaggtatatatatttgtaaaaattcatctaatgttacattaaaaatgtatgtatttaat

SEQ ID NO: 806921 - DNA, 120 bp, Artificial Sequence
  ENSG00000285517_109 (sequence is synthesized)
attgaactctagttaatgatatgcatgctgaagtgctaagtgtagtaatgtctacaacttgctttgagatgccttaaaaaagtaagatggattaataggtgcatagaggaatggataaaa

SEQ ID NO: 806922 - DNA, 120 bp, Artificial Sequence
  ENSG00000285517_110 (sequence is synthesized)
ggacagataagtgataggcaaatatcatagaatggtaatgagaatctaagtggtagatatatggctgctcgctgtacaatttttcaacttttctgtttaaaaattttcacaataaaatgt

SEQ ID NO: 806923 - DNA, 120 bp, Artificial Sequence
  ENSG00000285517_111 (sequence is synthesized)
tggggaaaactcaagggaaaaaggttcatgatgaatagtgcgataccaattttgtaaaacgtaggtaaatatacacaaaggacaacaaaagtgaaatacattacaatggttaacagttgc

SEQ ID NO: 806924 - DNA, 120 bp, Artificial Sequence
  ENSG00000285517_112 (sequence is synthesized)
tatccagaaaaacaataacaacaacaaaagaaacctcgcagaatcccatcagacagcaaaagggtgaatgatcttcttgaaaattaggcagctacaatttgtgtaagaggttgcttttaa

SEQ ID NO: 806925 - DNA, 120 bp, Artificial Sequence
  ENSG00000285517_113 (sequence is synthesized)
aacgtgaagcacagatttgcaaggaaaggcatgggtttaaaatgttccattctattcaacaagcctcatcttgtttttatgtggctcagggggtaccaccctgggagtagacccagctgt

SEQ ID NO: 806926 - DNA, 120 bp, Artificial Sequence
  ENSG00000285517_114 (sequence is synthesized)
tctgttacaattcagaatctctgagttgttcaatttccatgtagttgtgtggtgtggatgtaccattaattatttgatcagtcccatatggatggacattggactgtttccaatattttc

SEQ ID NO: 806927 - DNA, 120 bp, Artificial Sequence
  ENSG00000285517_115 (sequence is synthesized)
actgctagttttcttcttaactttttactttgcagtgattatattcatagggagttgcaaaatagtaggtacagtccctcggatgagtcacacagcttcccctaaaggtgacatcttcca

SEQ ID NO: 806928 - DNA, 120 bp, Artificial Sequence
  ENSG00000285517_116 (sequence is synthesized)
taacagcagttacactatcaaaactagggaattggcattggttcaatattgttagacgacagaccttatgcagttctcacaacttttacatgtacttgtgtgtgtgtgggggtgtggggg

SEQ ID NO: 806929 - DNA, 120 bp, Artificial Sequence
  ENSG00000285517_117 (sequence is synthesized)
tgtgtgtgctttctatgcaagttgacctcatgtatagtatcttgtaaccaccaccaccaccatcaacatagaactgtttcatcaccaagtggaactcccttgtgctgccccttttcagtc

SEQ ID NO: 806930 - DNA, 120 bp, Artificial Sequence
  ENSG00000285517_118 (sequence is synthesized)
acatcacccacctgtccctgtccccctggtcactggtaatccattctccacctctatagttttgtcattttgaggatgttattacatgaaattatagtgtgtaaccttttatgcatttgg

SEQ ID NO: 806931 - DNA, 120 bp, Artificial Sequence
  ENSG00000285517_119 (sequence is synthesized)
cctttttcactcagcttcatgctgtgaagatccttcaagttggtgtacatatcaatagtttatttatttttattcctgagtagtagtccactgaatggatatgctagagtttgttgaatc

SEQ ID NO: 806932 - DNA, 120 bp, Artificial Sequence
  ENSG00000285517_120 (sequence is synthesized)
ccttactcattgaacaaaatttgggtggtttccagtttgaggctattatgaataaagcttttattaacattcatgcacaggcttttttgaacataagttttcattctttgggatataggc

SEQ ID NO: 806933 - DNA, 120 bp, Artificial Sequence
  ENSG00000285517_121 (sequence is synthesized)
caaagagtgccattgctgagtcacatggtaagtgcatgttgaattttataagaaactgccaagctattttccagaatggctgtaccattttctattcatgctagcaatatatgacatgtc

SEQ ID NO: 806934 - DNA, 120 bp, Artificial Sequence
  ENSG00000285517_122 (sequence is synthesized)
tggtgttctttgcattcttgctagcatgtggtgtgatttttcaacttatccattctaataggtatagtgatagctcattgtggttttaatttgtatttttccctaatggttaatgatgcc

SEQ ID NO: 806935 - DNA, 72 bp, Artificial Sequence
  ENSG00000285517_123 (sequence is synthesized)
tggttttaatttgtatttttccctaatggttaatgatgccaatcatatttacatgtgcatatttgctgttcg

SEQ ID NO: 806936 - DNA, 120 bp, Artificial Sequence
  ENSG00000285517_124 (sequence is synthesized)
ctcctacctcagcctcccaagtagctagaactactggcacatgccatcatacctggctaattttaacatttttctgtagagatggggtctccctgtgttgtccaggccagtctccaactc

SEQ ID NO: 806937 - DNA, 120 bp, Artificial Sequence
  ENSG00000285517_125 (sequence is synthesized)
ggccagtctccaactcctgtgcccaactgattctcctgcttcagccttccaaagttctgggattataagcgtgagccactgcacctggcctcatatcccttttttggtgagatgtctgct

SEQ ID NO: 806938 - DNA, 120 bp, Artificial Sequence
  ENSG00000285517_126 (sequence is synthesized)
cgtgtcttttgtccattttctcaggggattttttaaaatgtgttcagttttaagagttcttcatatatcctagatgcaagtcctttgtcagatatacggtttgcaaatgttttcactcag

SEQ ID NO: 806939 - DNA, 120 bp, Artificial Sequence
  ENSG00000285517_127 (sequence is synthesized)
tctatagcatgccatttcatcctcttataggatccttcacaaagccaaagtcctaaatttcgatgaagtccatttgatccattttttcttccatcaattactattttggtgccatgtcta

SEQ ID NO: 806940 - DNA, 120 bp, Artificial Sequence
  ENSG00000285517_128 (sequence is synthesized)
aggactaagtcttgaatatttatcccatattttcttctaaaagttttatagttttacattttatatttaaatctgtggtccatttgaattgatttttatataaggtaggagctttaggtt

SEQ ID NO: 806941 - DNA, 120 bp, Artificial Sequence
  ENSG00000285517_129 (sequence is synthesized)
gcggttcaatgttttgcacatgacagttcaattgttccaatagcacctattgaaagagtgtctttgtttactgggttgcctttgcacctctgtcagaagtcaattggctgtatttgtgta

SEQ ID NO: 806942 - DNA, 120 bp, Artificial Sequence
  ENSG00000285517_130 (sequence is synthesized)
gacctatttctagactctctgtattcttctttttaccttttatctttgcatgtaaattatagaatcatagaatcatcttgtctctataaaatatcctgtgctgggattttgatggagttg

SEQ ID NO: 806943 - DNA, 120 bp, Artificial Sequence
  ENSG00000285517_131 (sequence is synthesized)
cattaaaggtatagatcaatttgggaagaattaaaatctttactgtgttgggtcttccaatccatgaatccatatactcttgatttatttagaacttctttgattttgtttacagcattg

SEQ ID NO: 806944 - DNA, 120 bp, Artificial Sequence
  ENSG00000285517_132 (sequence is synthesized)
tgtaagttttcagcacacagatcctatatatacctagaagttttatgtttcagagatattataggtgcaattatttcaaaatttttggttttatttattgctagtgtttagaaattcagc

SEQ ID NO: 806945 - DNA, 120 bp, Artificial Sequence
  ENSG00000285517_133 (sequence is synthesized)
tgtgtgttgtgtgttgaccttgtattacttttagggtgtgtgtatgtgtgtgtgtgtgtgcattccttggaattttctatgtagaaatcatcttgcttattaataagaatgatttctttc

SEQ ID NO: 806946 - DNA, 120 bp, Artificial Sequence
  ENSG00000285517_134 (sequence is synthesized)
ccccaaggaagtcatttttccatccaaggagtcactctggttctctctccatgtctgtctatacagtgctcaccattctgggaagaagaaaggtcccttatctagagctccactcatctt

SEQ ID NO: 806947 - DNA, 120 bp, Artificial Sequence
  ENSG00000285517_135 (sequence is synthesized)
cttatctagagctccactcatctttgggccttacgggtgtgtgtgttttggtagagggagtgttcaagtatctccccaacaatgtggagaccaggtgtgtgtggtggctcacacctgtaa

SEQ ID NO: 806948 - DNA, 120 bp, Artificial Sequence
  ENSG00000285517_136 (sequence is synthesized)
tgggaggaatacttgagccaagagttggagaccaacctaagcaaaatagtgaaacccagtatctgtaaaaatacaaacattagctgggtgtgatgacgtgcttctctagtcccagctact

SEQ ID NO: 806949 - DNA, 72 bp, Artificial Sequence
  ENSG00000285517_137 (sequence is synthesized)
tagctgggtgtgatgacgtgcttctctagtcccagctacttgtgggaggctgagttgacaggatccattgat

SEQ ID NO: 806950 - DNA, 120 bp, Artificial Sequence
  ENSG00000285517_138 (sequence is synthesized)
aaaccaatacggagatctagcagaaacgcatttaactgttatattggtatctgatgcaataaagcaatttttcattgctttgagatagaaataaagttaaaaccaaaagtggcctcacaa

SEQ ID NO: 806951 - DNA, 120 bp, Artificial Sequence
  ENSG00000285517_139 (sequence is synthesized)
aaaaactgtgcaaatatctgtatgtagaactctctctgacttgtccctctcaccaggctacaaggagaagggagagctgggagctgggaggggagcaggaagagggagatctgtgtaggg

SEQ ID NO: 806952 - DNA, 120 bp, Artificial Sequence
  ENSG00000285517_140 (sequence is synthesized)
agggggaagggtgcccatccgtgacaattgtaggacatgtctttcttcaaaatgtggctgctggagaacctagactctggcaactgcgagctgccctgtgagtcaggtttgggcttcccc

SEQ ID NO: 806953 - DNA, 120 bp, Artificial Sequence
  ENSG00000285517_141 (sequence is synthesized)
gcctgccttcagacaggacctgtgtcatgtggcagctggatagcatgagtggaaggacatcagcagagtggggaactgggtggtagagaccctcacacctgccaggaaggtcaatgtgac

SEQ ID NO: 806954 - DNA, 120 bp, Artificial Sequence
  ENSG00000285517_142 (sequence is synthesized)
tgcgaaaacaccaccagattgaaaatcttcctatatagacccttgatatatcagccactccaccccactggtcactgtggatgggtgaactaaacatgtctttccacaaaatggtgagac

SEQ ID NO: 806955 - DNA, 120 bp, Artificial Sequence
  ENSG00000285517_143 (sequence is synthesized)
agccaagtaaaaagtggtccctggagaacctccgactggcctgtgcactgggaggatggggcagggcctcaggaagttcgtgctgtttgtaggggggaggagcctggcctctcctgttcc

SEQ ID NO: 806956 - DNA, 120 bp, Artificial Sequence
  ENSG00000285517_144 (sequence is synthesized)
tgggtggtgacctggaattcaatctgtgagatgggggccttttaacaggaacccctttagctttgctgagaatcttttttctttttgcccaataaattctgtaaccactcacccttcaaa

SEQ ID NO: 806957 - DNA, 120 bp, Artificial Sequence
  ENSG00000285513_0 (sequence is synthesized)
gtcatggttacctccccacctccccagctgcaaggaggattcatccggcaaccagttgaggctagattctcagcagctttattgaatattgagaggtggtctcacctcccactggacatg

SEQ ID NO: 806958 - DNA, 120 bp, Artificial Sequence
  ENSG00000285513_1 (sequence is synthesized)
tgtcctcaagttcataccagaacttctttgggacagacagacagacaggtccttctccaggaagctcaagtggccttccacgtcccccgcatgggggcccagtttctgcctgagctgttc

SEQ ID NO: 806959 - DNA, 120 bp, Artificial Sequence
  ENSG00000285513_2 (sequence is synthesized)
cagctctgccagtgacttctgcagcccctcggtgttgcccctcaggttgccacgcacgtcctcggccaagggcgccagcctctgccgcagctcctcggcactggccgagatcctggcctt

SEQ ID NO: 806960 - DNA, 120 bp, Artificial Sequence
  ENSG00000285513_3 (sequence is synthesized)
gagctcctcggcgttcttcttcatctggaaggtcaggccctcaagctggtggttgagcttctcctgcgtgtcctgagcatagggagccaggctgcggcgcagctcctccacggtctggtc

SEQ ID NO: 806961 - DNA, 120 bp, Artificial Sequence
  ENSG00000285513_4 (sequence is synthesized)
aatcttgactttgaattcgtcagcgtagggcgtaaggcgtcccttgagctcctccacgttctggtcgatcttggccttgagctcgtcggcgtggggcctcagcgaggcctgcaggctgtc

SEQ ID NO: 806962 - DNA, 120 bp, Artificial Sequence
  ENSG00000215162_0 (sequence is synthesized)
attctggggtagaacttgctgtggagtgagacctctggaacacaaacttaacaaaaattcctgacatgtgttatgatggaggcaggagagccgagtcctgacacccttggccagaccttt

SEQ ID NO: 806963 - DNA, 120 bp, Artificial Sequence
  ENSG00000215162_1 (sequence is synthesized)
cacctctctgagccttgccctttccaactgggccaggaggggactggattctgcagagtaaaggccaggccagcttgccatcccgtgactcttgtttccctcagacttttattcattcaa

SEQ ID NO: 806964 - DNA, 120 bp, Artificial Sequence
  ENSG00000215162_2 (sequence is synthesized)
gcagcatgtattggatacctactatacaacaagcattgttctaggaaccagggatacagtggcaaaaatgacaagccatagaccctgccctcatgaaacttcatgtagaggagacataca

SEQ ID NO: 806965 - DNA, 120 bp, Artificial Sequence
  ENSG00000215162_3 (sequence is synthesized)
gcagatcgaatcctagactcactgtctgatccggaaggcactttaatcatgcctaagagcctggagatttataaaggaagctgtaactgggaagaatccggcctgctgggaagctgcttc

SEQ ID NO: 806966 - DNA, 120 bp, Artificial Sequence
  ENSG00000215162_4 (sequence is synthesized)
gcctgctgggaagctgcttctcccagggtcttgctctattaccccgagtggagtggagtggtgccatcttggctcattgcatcgttgacctcccgagctcaagtgatcctcccacctcag

SEQ ID NO: 806967 - DNA, 120 bp, Artificial Sequence
  ENSG00000215162_5 (sequence is synthesized)
caggcacacaccaccacagccagatgcagctgaaggttccatggatgtatttggtcagaccatgcatatgacagtcacctcctcacctctgctccttgccctctcacctggttccccctt

SEQ ID NO: 806968 - DNA, 120 bp, Artificial Sequence
  ENSG00000215162_6 (sequence is synthesized)
ttctagtctgtcaggaatgggaatgtttttgaaaacagactctgaaagccaatgagatgtgctcctcctgcccacagttggacccaggctccatatttgatcagtgaacagccacgtccg

SEQ ID NO: 806969 - DNA, 120 bp, Artificial Sequence
  ENSG00000215162_7 (sequence is synthesized)
cacatgtgccacaaggcatttgtctgcaaattcatccggagaccttgacagatgcctggaggtcagaaatcagcctcctctatgctgccatgtggccccaggagcctgaaggaaacacca

SEQ ID NO: 806970 - DNA, 120 bp, Artificial Sequence
  ENSG00000215162_8 (sequence is synthesized)
agtacatctagaagttgatggttgaccgatgggagagggggcaagatgccagtcactcagtcagccaacctttcctgaagattgttggaggctccaagtgacataggggataatgcagag

SEQ ID NO: 806971 - DNA, 120 bp, Artificial Sequence
  ENSG00000215162_9 (sequence is synthesized)
aacattcagagacatcatctactgcctgtgcgctctggaagtttctagtctcacaaaaaggaagaccagggaggcccttaagaaaatatagcaggctgaataatatcccccaaagatatc

SEQ ID NO: 806972 - DNA, 120 bp, Artificial Sequence
  ENSG00000215162_10 (sequence is synthesized)
aggtcctaatccctggaacctgtaaaagttacctgatttggaaaaatgatcttggcagatgtgatcaagttaagggtttctaaatgcaatcacataagagggaggcagaggagacttgaa

SEQ ID NO: 806973 - DNA, 120 bp, Artificial Sequence
  ENSG00000215162_11 (sequence is synthesized)
acagatggaaaaagaaaagaaaagaccacgtgaccatagaggcagagattggagtgaagtggctacaagccaaggaatgctggcagccacagaagctggaaaagacaaggaccagattct

SEQ ID NO: 806974 - DNA, 120 bp, Artificial Sequence
  ENSG00000215162_12 (sequence is synthesized)
cccttagagcctctggaaggagcatggccccatcaacaccttgattttggcccagtgatactggctttagacgtctagcctccagatccgtgagagaatacatttttgttttcttcagcc

SEQ ID NO: 806975 - DNA, 120 bp, Artificial Sequence
  ENSG00000215162_13 (sequence is synthesized)
aagtgctgggattacaggcgtaagccacagtgcccggcccaaaagttgctttctccaacttttgggctgaactctgtctctttgtggcttccatccattggtcacagtgctgcctctggg

SEQ ID NO: 806976 - DNA, 120 bp, Artificial Sequence
  ENSG00000215162_14 (sequence is synthesized)
gtcacagtgctgcctctgggggccacctaagctctgtcttctccctctgccctccaacagcttcttagaggtctgaagcatcaccatagccataacccctgagtcttctccaagcaaaac

SEQ ID NO: 806977 - DNA, 120 bp, Artificial Sequence
  ENSG00000215162_15 (sequence is synthesized)
aactccacttccttcaactgttcttcatgagaccagggcccccgctttctccacagcatgcttttgcctccctggtcatgctccagtgtgactctggtacccttaatatgtggcacacag

SEQ ID NO: 806978 - DNA, 120 bp, Artificial Sequence
  ENSG00000267458_0 (sequence is synthesized)
gacacaaaatttaatttaatagaaattttgtttgtagttcttacattctcagtgtgagccaatctgggacccactgccccacccagaagtggcccagtcctgggggcaggggagaaaggg

SEQ ID NO: 806979 - DNA, 120 bp, Artificial Sequence
  ENSG00000267458_1 (sequence is synthesized)
ctcagtgctggggggttggaggggagctaagagatgagagaaggggacagaggcaagaaaagatgttgatcaagaaagatgagaaccaggggtgagggctgaaggagaatcaaagataaa

SEQ ID NO: 806980 - DNA, 120 bp, Artificial Sequence
  ENSG00000279973_0 (sequence is synthesized)
atggtggtggcaacagagatggcagcgcggctggagtgttaggagggtggcctgagcagtaggattggggctggagcagtaagatggcagccggagcggtttttctggcattgtctgccc

SEQ ID NO: 806981 - DNA, 120 bp, Artificial Sequence
  ENSG00000279973_1 (sequence is synthesized)
ggaggttggagcctgaagatggcacagctctgtgattcatcttctgcggttgtggcagccacggtgatggagacggcagctcaacaggagcaataggagggtacccatggaggccaagtg

SEQ ID NO: 806982 - DNA, 120 bp, Artificial Sequence
  ENSG00000237994_0 (sequence is synthesized)
agtctctccgtagagagaatacgataactgaagagggctttatatgctgagatgaaatttagtttgttcaaatccgtaatgaattgccatcgggaaaggaattttctagagagatcttag

SEQ ID NO: 806983 - DNA, 120 bp, Artificial Sequence
  ENSG00000237994_1 (sequence is synthesized)
ttatacctctgtgaatatatatgataaacaaatgaatatatacaatgtaatgttatattacatcatgggtcattttcttcctaaactataatcatttttacagttttaaaccaaaaaggt

SEQ ID NO: 806984 - DNA, 120 bp, Artificial Sequence
  ENSG00000237994_2 (sequence is synthesized)
aaaaaggtagtgaaaataagcgagcccatattaaatttctaggaagtatccctaaattgtttcctcagtcttttgacttatttcacatggaatcctaacatacgtggttgtctgtttttc

SEQ ID NO: 806985 - DNA, 120 bp, Artificial Sequence
  ENSG00000258860_0 (sequence is synthesized)
gggcatgagagaacagaagcggaggaagaccctgagagttggcttcctaagagagaaaagggagcttatttcccagagtggtgttccaggattgctgcaggacatgtgacaatggaatta

SEQ ID NO: 806986 - DNA, 120 bp, Artificial Sequence
  ENSG00000258860_1 (sequence is synthesized)
cttctatgagagcccgattttggggctcaaagttgtcctcaagcccagagatggatgcagggactctccaaggtagaagggccttctggctaccagccacccatgcaaagtgaaactcca

SEQ ID NO: 806987 - DNA, 120 bp, Artificial Sequence
  ENSG00000258860_2 (sequence is synthesized)
ttggcaaatactgaagccactgctggaaaagaaggaaggccccatgtgagcctgccctcaccattccatggagacagatgagcccgtgggaagctgaatgtgctaggggagatctttgtg

SEQ ID NO: 806988 - DNA, 120 bp, Artificial Sequence
  ENSG00000258860_3 (sequence is synthesized)
ccctgctaaccagtggcctgccagaagcccaaaaagtgccaggagggagcagcgacaggaaagcagagaattctggaaaataaggtttcccagcatcatctgcctgggtgaatgtcgttg

SEQ ID NO: 806989 - DNA, 120 bp, Artificial Sequence
  ENSG00000258860_4 (sequence is synthesized)
gcaggtagacatctgtctcaatttctaaagaatgatctgattttctaaaaaaggagaaagaagggaaggagggaagaaggaaggaagggaaaaaaagggaaaagtaaagaaaaaataaaa

SEQ ID NO: 806990 - DNA, 120 bp, Artificial Sequence
  ENSG00000237990_0 (sequence is synthesized)
atccagattggaggcctttgtggtgggtggtggactgcaggtggaaccaagcacaggtgtgccctgggcagaggtgggcaagaggaaggaacccaaacagtgctgattccacatggccct

SEQ ID NO: 806991 - DNA, 120 bp, Artificial Sequence
  ENSG00000237990_1 (sequence is synthesized)
tggtcaagaagctgaaggcctagaaaggaggtctgagatggaggtgacacaggccttgtgcctgggagcacaatgaggaaccacacccagatgccaacgctgaggtgccgtgtgtctact

SEQ ID NO: 806992 - DNA, 120 bp, Artificial Sequence
  ENSG00000237990_2 (sequence is synthesized)
acaaaaatgatttaaatataagccagtggaccctacctgaggcaaccatgaaagccaacaaatgagacaagtttgggtggaggtgctcatggggcactttctaaaacatcttcaattcag

SEQ ID NO: 806993 - DNA, 120 bp, Artificial Sequence
  ENSG00000237990_3 (sequence is synthesized)
ttagactcaactaatccaggacctcatttacccgatgatgaagccaattggtcaaagacttcttccagcattttcttctttgtcttcatgtctccaatatttaacctaagaagataaaca

SEQ ID NO: 806994 - DNA, 120 bp, Artificial Sequence
  ENSG00000237990_4 (sequence is synthesized)
gaaagaccttggaaaccatacccaatggggatatttgcaatgtcatcaggtaattttgtacgcagattcttatgatggagttagttttctatactacatcatgagcagagctatcaggac

SEQ ID NO: 806995 - DNA, 120 bp, Artificial Sequence
  ENSG00000237990_5 (sequence is synthesized)
cacacccagatgccaacgctgaggtgccgtgtgtctactataaggcggaagacaccaacaaaaatgatttaaatataagcattttcttctttgtcttcatgtctccaatatttaacctaa

SEQ ID NO: 806996 - DNA, 120 bp, Artificial Sequence
  ENSG00000237990_6 (sequence is synthesized)
gaagataaacagaaagaccttggaaaccatacccaatggggatatttgcaatgtcatcagatgttttaacatggtcccattctgagcatcatctttaaaacaacatagacgaactccaaa

SEQ ID NO: 806997 - DNA, 120 bp, Artificial Sequence
  ENSG00000237990_7 (sequence is synthesized)
ggtaacgaagactgtgtgagaggcatcccgagagcagggatagcatggaggtatgccttcaagatacatgtaccatgcgaaattgattgtacgtgctacaatccacattttagaattgaa

SEQ ID NO: 806998 - DNA, 120 bp, Artificial Sequence
  ENSG00000237990_8 (sequence is synthesized)
gaaatattaacagtcaatgatctaggcagcataaacgataccttcttctgcagaatacaccaccgtggtgggactgaaagggccttctcctttgttgttgaagacacctactttaacctc

SEQ ID NO: 806999 - DNA, 120 bp, Artificial Sequence
  ENSG00000237990_9 (sequence is synthesized)
aaagggagagaaggggtgcacgctctcattcctgaacacgtatctagaggcatcagctgaggccagcactgtcagcatccagatcattttaccgtagggccggaaggccaccacataacc

SEQ ID NO: 807000 - DNA, 120 bp, Artificial Sequence
  ENSG00000237990_10 (sequence is synthesized)
aaagcctcgaccattctgtaattcctcagggaccgtctgggaaagaaggaaggtggtcttcagaaatcacagtagtttcactcaaatgcaaaaatcgtttttgtttcccttgtaacattc

SEQ ID NO: 807001 - DNA, 120 bp, Artificial Sequence
  ENSG00000237990_11 (sequence is synthesized)
ttaaacagttatgatgtactggacagggttgaaaacgtaatgaggatctgcagtccagagcttgctctttgatggggcagacccagctctgaaatggttggaaatgattgtaaaaaaaaa

SEQ ID NO: 807002 - DNA, 120 bp, Artificial Sequence
  ENSG00000237990_12 (sequence is synthesized)
aacactggacatcggtctcctgaaaaaccacatttccaacacgtatcctctaatactaatcttcttccattgccaaatagacaaaagatctcactgaaggaagaaaaaccatcttggctg

SEQ ID NO: 807003 - DNA, 120 bp, Artificial Sequence
  ENSG00000237990_13 (sequence is synthesized)
aagatcctccctctcagagggaagagttcagctggagggatgagtgatttctttcactgctgtgctttgggtaaatgagagattttaatttctggggctgtttagaatctttcaaaaaca

SEQ ID NO: 807004 - DNA, 120 bp, Artificial Sequence
  ENSG00000237990_14 (sequence is synthesized)
tgaagaaccctttctaaagctcccacctcttctctcaaagccaatttttaataaattggtgactaactttcctccaggttgttttaaaaaatacctcctaaaagagggccccttctagaa

SEQ ID NO: 807005 - DNA, 120 bp, Artificial Sequence
  ENSG00000237990_15 (sequence is synthesized)
gcaaagccaattgccaggaaattgtgctggtgcactgaatctattgctggcagacgttttaaatcaattggccatgcagcaattcaggaagaaaagaaaaactagttttctctgaaacag

SEQ ID NO: 807006 - DNA, 120 bp, Artificial Sequence
  ENSG00000237990_16 (sequence is synthesized)
ccttctttatttttttttgtaacgtgtgttgtcttcccttcataattgtttttactgtgatggattgaattaaaacttgcctcaacaatggatgggcaagtgccgtccttcctgctagcc

SEQ ID NO: 807007 - DNA, 120 bp, Artificial Sequence
  ENSG00000237990_17 (sequence is synthesized)
attagctacgtgagagggagtgtctgaacccaaatgaattttcactgttaaaaacagaggaggaaacttcccagctatgtctaacatggaggaaaataataaaatagcttcgatgcgtgt

SEQ ID NO: 807008 - DNA, 120 bp, Artificial Sequence
  ENSG00000237992_0 (sequence is synthesized)
ggctccagctgaaaggttccaaatctaggagctggagtccatgactcacaggaagagaagattaagacacagagataccagagaggtcgttcacagaggaaagaccatgtgaagacgcag

SEQ ID NO: 807009 - DNA, 120 bp, Artificial Sequence
  ENSG00000237992_1 (sequence is synthesized)
tgagaaggtggccatattcaagctgaggagagagacctcagaagaaaccaatactgccaacgccttggtcttggacttccagcctccagaactgtcctggatcagaagatgcctgacaag

SEQ ID NO: 807010 - DNA, 120 bp, Artificial Sequence
  ENSG00000237992_2 (sequence is synthesized)
aggccactatcagcagcaacagcacagtggggacaaacctgagaccttgatggaccgtggacaccagcaggagagacagagcaactcaattggacataattagagacatcatcataaata

SEQ ID NO: 807011 - DNA, 120 bp, Artificial Sequence
  ENSG00000237992_3 (sequence is synthesized)
ggcataaagaatggggcgtttatatcacaaatccatcctgcacttgaacctttcctgtctgaaacccatacaaacagctgaattagacagaaggaacttgaagtctaaatgggcagacaa

SEQ ID NO: 807012 - DNA, 120 bp, Artificial Sequence
  ENSG00000237992_4 (sequence is synthesized)
gaccaacatacacaaagcagagagtggcacaagagccatgtctgatgcaacagtgactcaggaggatcactctgactcagaatggccaagcaaaggtattgggaggaagtgggatagaac

SEQ ID NO: 807013 - DNA, 120 bp, Artificial Sequence
  ENSG00000237992_5 (sequence is synthesized)
tgagctttgaagaccgtgctaaaatatttacagactccccaggttatctcaagttctctccaggaattagcttcacctctttgtgctttggctccacatcagttaaatagtggtaacgtt

SEQ ID NO: 807014 - DNA, 120 bp, Artificial Sequence
  ENSG00000237992_6 (sequence is synthesized)
tgatcgttaagaaccatgtagagatgaaacaattttcaaagttttttaattaagtgtactcattgccactcaaagacaaataccatataaatataataataatcatattgagaaacaaaa

SEQ ID NO: 807015 - DNA, 120 bp, Artificial Sequence
  ENSG00000237992_7 (sequence is synthesized)
atggccaagcaaaggttagcgtgttaagtctctgaagctgattaacggcttaactcaagttttcgcacctgcagaccagtgaccccccaccgccgcccccccgcaaggcatctgtttgac

SEQ ID NO: 807016 - DNA, 120 bp, Artificial Sequence
  ENSG00000237992_8 (sequence is synthesized)
gtctctttaattttattagtggcttatggacaaaatcacttgacttaacctttttcaagtgtaagttatttggattcacaagagcatttttctccctgttataaatcaatgaacccagtt

SEQ ID NO: 807017 - DNA, 120 bp, Artificial Sequence
  ENSG00000237992_9 (sequence is synthesized)
aagattaactgcctacatgtgagcttcaaaagatcttctatggccaggcaaagttgaaagaaacacataattccataacatgctaaacacaagttgatcaaagtttttggagctggttac

SEQ ID NO: 807018 - DNA, 120 bp, Artificial Sequence
  ENSG00000237992_10 (sequence is synthesized)
ttaatgctgtacttcctcattctcaaacaatctgatttcaagtagtttgtgtctaaaacatatattactagactgcaaacattcatcctttggaagaaaaatcatttctgtatcttaact

SEQ ID NO: 807019 - DNA, 120 bp, Artificial Sequence
  ENSG00000237992_11 (sequence is synthesized)
ggtcaaaatctatgtttcaacagacctaaactaaactctgggctaaacattcctgaacctaatttgtgaaattccataatgtttggagattaaagcaaaaagaaatgaaaataaaagaaa

SEQ ID NO: 807020 - DNA, 120 bp, Artificial Sequence
  ENSG00000237992_12 (sequence is synthesized)
gggaaggttctgggagggcatatggcacccagaatatggctgtaggcatttgtaaatggggttgttgacattgagctttcaggaagagaagattaagacacagagataccagagaggtcg

SEQ ID NO: 807021 - DNA, 120 bp, Artificial Sequence
  ENSG00000237992_13 (sequence is synthesized)
ggaagaaggcagatttctctcaaaaaactacataaattcaatctgctggagaaagaagagagttgagatggaaaagggggcaatatttagtagtcactgtgtaggtctcagagaagggac

SEQ ID NO: 807022 - DNA, 120 bp, Artificial Sequence
  ENSG00000237992_14 (sequence is synthesized)
tctgctcccatcttcctctcttgtagagctaggcccagccctagagaaggtgatctaaacggtagtcaggtttgggatggggagtgggaattcttggaagacagcactgcattccgcctc

SEQ ID NO: 807023 - DNA, 120 bp, Artificial Sequence
  ENSG00000237992_15 (sequence is synthesized)
ctgttgagtaggctgagtttagagcctctcagatgtgccctgcccctcagtgcaatgaactggaagaggaaattggaatatctaagaagaaagggattgtgagagggcatccaaacattt

SEQ ID NO: 807024 - DNA, 120 bp, Artificial Sequence
  ENSG00000237992_16 (sequence is synthesized)
tgaggggagtttttactcaaatatccctagatgaataaatacatatggtctataaatatgtcccaaagcaattttctccacttgaacctacatatacttcactatagaactgaaaacaaa

SEQ ID NO: 807025 - DNA, 120 bp, Artificial Sequence
  ENSG00000237992_17 (sequence is synthesized)
gacatcagaggctccagctgaaaggttccaaatctaggagctggagtccatgactcacaggtcttatagttgatgctagcttttggctgaagcctcaattcgtcttcagtgggcctctcc

SEQ ID NO: 807026 - DNA, 120 bp, Artificial Sequence
  ENSG00000237992_18 (sequence is synthesized)
ctattggctaaaatttgggcttcctcacagcatggtggcaagattctaagggcaggaatccagagagagaaagggccaagcagaagccatattgtcttcgatgacctggcctcaaaaatc

SEQ ID NO: 807027 - DNA, 120 bp, Artificial Sequence
  ENSG00000237992_19 (sequence is synthesized)
ttgaaagcattcttaatggtaaacataaagaaaattttgatgtctactcactttccattttttggaattttccccttttggtctccttgctacccctagtggactctaccttccttcccc

SEQ ID NO: 807028 - DNA, 120 bp, Artificial Sequence
  ENSG00000237992_20 (sequence is synthesized)
gagagaaggagcaaactgttactctcttgtcaaatccagttttcttttaatctctgataatgtttcacattgaaccaatgcctttaatatgacttagtgctttaggaaaatagtatcacc

SEQ ID NO: 807029 - DNA, 120 bp, Artificial Sequence
  ENSG00000237992_21 (sequence is synthesized)
tcaggatatttaggtaactaaaccagcagatccaataagtgttatctttcagagtcagccttctgaaggaggctagatgcacatgtgaatgactttgccatagcacagaatgcgtctgga

SEQ ID NO: 807030 - DNA, 120 bp, Artificial Sequence
  ENSG00000237992_22 (sequence is synthesized)
tcatacttctggaaattcctctggaaccactgtgtaaatgaagctatcaggaaatctcattgctttgtaatcatgctttacttttgactaaaaagtaaaaacaccgagagttcagagttc

SEQ ID NO: 807031 - DNA, 120 bp, Artificial Sequence
  ENSG00000237993_0 (sequence is synthesized)
cttttcagatcactcccttctgatgcttccacaaccagtcatcatggctcaaagtacatctaacttctctccttccctcctagtcttgtaagactggattgataaaggtcttgacaagac

SEQ ID NO: 807032 - DNA, 120 bp, Artificial Sequence
  ENSG00000237993_1 (sequence is synthesized)
agcttctggacatctctatgcaaaaccacccaccaaaaggctcaggaattgggaaaaacagatgagaataatgtccccttactaatgtatgctttacttctgaattccattcttcacatg

SEQ ID NO: 807033 - DNA, 120 bp, Artificial Sequence
  ENSG00000237993_2 (sequence is synthesized)
actggggatggttgacacagggatgccaactcacagattcagaacaatgggttgacaaccagccctctgcatccttcatctcccaacatatgctgagaataaatggcatgtcctgataag

SEQ ID NO: 807034 - DNA, 120 bp, Artificial Sequence
  ENSG00000237993_3 (sequence is synthesized)
ggataaagtactggcgtacatcaagaaaagctgctttagctgcaatacagagaacagaatggaggtagcaagcatgtgagcgggaagatccatcaaaggccattacaaccgtgcaggcca

SEQ ID NO: 807035 - DNA, 120 bp, Artificial Sequence
  ENSG00000237993_4 (sequence is synthesized)
gaactggagacttccagaagagaaaggattcatgctggatatagatgcctggagttcagaggtgagatctggggcgagtcatccatgaacaggtattatttgaagccaccaggatggatt

SEQ ID NO: 807036 - DNA, 82 bp, Artificial Sequence
  ENSG00000253287_0 (sequence is synthesized)
agaaagaagcatctccaaatgtatctcccagtaactctgttcctgatctttgatggacctctggtgtatttttgttcttgtt

SEQ ID NO: 807037 - DNA, 120 bp, Artificial Sequence
  ENSG00000253287_1 (sequence is synthesized)
ctgatctttgatggacctctggtgtatttttgttcttgttgctgggagggagaatgtcttagatagtccacatgacaagttttttcaataatctctagtcaatttctgacacaatctgag

SEQ ID NO: 807038 - DNA, 120 bp, Artificial Sequence
  ENSG00000253287_2 (sequence is synthesized)
aaatgctctggagacactgagcaaaaagattgagtcaatgtaagaaggacacatccctatctctactcaacaatttccagggcccgttcctttcactctaaaagttttcttcaactttaa

SEQ ID NO: 807039 - DNA, 120 bp, Artificial Sequence
  ENSG00000253287_3 (sequence is synthesized)
ttataatcttattttaaatatggctcctgagctcaggagaaaaatctggagtatgaagaaaacaagactagagtcaagaccagctgaccggaagatcctggatacttgagcttttcttga

SEQ ID NO: 807040 - DNA, 120 bp, Artificial Sequence
  ENSG00000253287_4 (sequence is synthesized)
agactatccttccacccttaaatgtacatgtgctgcctgagaagttctcaattgatgatagttcaaaatttgcataacttcacatatctttgatgtaactgaataaatgctttccaaaat

SEQ ID NO: 807041 - DNA, 120 bp, Artificial Sequence
  ENSG00000272097_0 (sequence is synthesized)
gccctgcatcccgggggcggggagtgaggcggggcatcgcggctagcgccgttggcggggaaccgggcggggaatctctgtgcttcctcagtccccaggcccagcacctgcagggccgac

SEQ ID NO: 807042 - DNA, 120 bp, Artificial Sequence
  ENSG00000272097_1 (sequence is synthesized)
cagctccagtcccaggtccaatcctgagtggccaaaagccggaaacccggagttggaattggatcttgcacaagctggaccacggagtgaggctacttgagaagcatcttaaatggggag

SEQ ID NO: 807043 - DNA, 120 bp, Artificial Sequence
  ENSG00000272097_2 (sequence is synthesized)
agagagcaagttaaatctgatttccacgcagctctgtggattccgaatgtccacagtatgatgttatctccattcccacttccgagccgctcctcttctgtgtttcctgcaccaccattc

SEQ ID NO: 807044 - DNA, 120 bp, Artificial Sequence
  ENSG00000272097_3 (sequence is synthesized)
gctcagttgctctacactaaaatttgctgtcatcgttgacttctccctctccttcatcccctacaagtatcaacatagacaactccgatcaatataatcatcagtgaataaagcaaattg

SEQ ID NO: 807045 - DNA, 120 bp, Artificial Sequence
  ENSG00000272097_4 (sequence is synthesized)
gtggagatggatgcttacacatggggaattgtatcaggaaggagtgtatgtgtgattaaaacctgttctacataaatagaaaagttgatcattcaacacatggacggctaagactatatg

SEQ ID NO: 807046 - DNA, 120 bp, Artificial Sequence
  ENSG00000272097_5 (sequence is synthesized)
cagactatccattctcaggaagaaaagggaagcaatctacctgacttccccaaatggattccgtattttgatatgaattgttatcatgtgggaaatgcgatggcctccaggtatactacc

SEQ ID NO: 807047 - DNA, 120 bp, Artificial Sequence
  ENSG00000272097_6 (sequence is synthesized)
aatttaaagagacagtgaaaagcaagaggaaagagatgggataagtaaacgctgtcaagagacggtgcaaatctggtggaagatgcctgctacctaaagcctacctcatacaatgttcag

SEQ ID NO: 807048 - DNA, 120 bp, Artificial Sequence
  ENSG00000272097_7 (sequence is synthesized)
gggccaccatcccccacctgccccaacctccacccctctctgtgatattgactttcctgtggatcgtggtgctgaagacgacaggtttgagcaaggagactcaaagaggcaaggtgcccc

SEQ ID NO: 807049 - DNA, 120 bp, Artificial Sequence
  ENSG00000272097_8 (sequence is synthesized)
acgccaatgacacaaacttgctctgtccgagatgcaggtacaagcaagcctagcaaagagctgagctttgcctgttggcctgtggagcaaccatgggttttactgtgtttcttggacaga

SEQ ID NO: 807050 - DNA, 120 bp, Artificial Sequence
  ENSG00000272097_9 (sequence is synthesized)
ggacacttggggacagaagtgaatagcatgactatttcatgcttatgtatattttatgcactgtatttagtgcctcttggacatttaatgtatcaaatatttcatgctcaggtgtctcat

SEQ ID NO: 807051 - DNA, 120 bp, Artificial Sequence
  ENSG00000272097_10 (sequence is synthesized)
gtatacttggtagctaggaatgttaggtatcctggactttctattcctttctgtgtctaacacatgttctacttactacttaacacatctaataaaatctgcctatgttttaaaaactaa

SEQ ID NO: 807052 - DNA, 81 bp, Artificial Sequence
  ENSG00000272094_0 (sequence is synthesized)
gctatgtaagaagtacctttcacctcctgccacaattctaaggcctccccagccatgtggaactgctcaaaggcagacttt

SEQ ID NO: 807053 - DNA, 90 bp, Artificial Sequence
  ENSG00000272094_1 (sequence is synthesized)
gagttaagactttgggggactattgggatggcgtaattggttttgaaatgcgatgacatgagatttggaggggcaaaaccaaatctcaac

SEQ ID NO: 807054 - DNA, 120 bp, Artificial Sequence
  ENSG00000272094_2 (sequence is synthesized)
cagcagtgtgaaaatggactaatacatagtgttatacaaatatcaattatatcaagatagttgattgtgttgttaagcttttctgtattcttaatcatgggcgtggggaggggctacagt

SEQ ID NO: 807055 - DNA, 120 bp, Artificial Sequence
  ENSG00000272094_3 (sequence is synthesized)
aatcatgggcgtggggaggggctacagttgttgggaggccttaaatctctaattataattctgaatgatctatttctgtttagttctgacaattcttacacaatgtattttgaatctctg

SEQ ID NO: 807056 - DNA, 120 bp, Artificial Sequence
  ENSG00000272094_4 (sequence is synthesized)
atttagatacatacacttataattttattattatgaaacattacccattttctctggcaacattgcttgtcttgaagcctactttggtctgatgttaatatagtaattccatcttttata

SEQ ID NO: 807057 - DNA, 120 bp, Artificial Sequence
  ENSG00000272092_0 (sequence is synthesized)
ttcgggacgctggggctccggaggaagcggcgagtcggcggggcggagggggcgggagcgcgaaccaggaacgcccgcggcagctagcgtctggacgactagggagaccgggcgagaggg

SEQ ID NO: 807058 - DNA, 120 bp, Artificial Sequence
  ENSG00000272092_1 (sequence is synthesized)
ccgaggaacgagggacggggagggactgtacgtgggagagtgacacacaaaacaccccgggaagccggaggaggcgtggaaaggtggggcccgggaggtaaaactgggatcggcgcgttc

SEQ ID NO: 807059 - DNA, 120 bp, Artificial Sequence
  ENSG00000272092_2 (sequence is synthesized)
agtgaggctgattaaagaacaacgcgcaaccagcgccatacggcgctcctcagggtgactcggctctctagctcttaagggttagaagcgaccctcgcacggtccccggtgggtcaccgc

SEQ ID NO: 807060 - DNA, 120 bp, Artificial Sequence
  ENSG00000272092_3 (sequence is synthesized)
gcgagggcggggcagtccaggcgacccctcggccgtctcccgtcctacggctgtcagggaagggctccggttccggtagggtctgcatttggaaagccgggggcgatgcaagaccgcctt

SEQ ID NO: 807061 - DNA, 120 bp, Artificial Sequence
  ENSG00000272092_4 (sequence is synthesized)
ctcagccccggctgagctgtcggatggtccccctcccccggttgcaagcagtaggagacccggccggcggcgccggctcgccgagggagcgcctcgacctccccggcaggcgccggcccc

SEQ ID NO: 807062 - DNA, 120 bp, Artificial Sequence
  ENSG00000272092_5 (sequence is synthesized)
gcctcttcctgctctgctgcggcccggaggcttgtgggtaaccgggaggacgacgtcagcgcccgccgcatccccgggtgccccccagccgcgggggaccgcgacggctccgtgaccgtc

SEQ ID NO: 807063 - DNA, 120 bp, Artificial Sequence
  ENSG00000272092_6 (sequence is synthesized)
acgtgccggaggccgcggctgctcgcggccagaccttcgcatcgagggacgtgagggacatttgtcctagagggcccaagataagaacgagaggaagaaccgggaggcaactctccgtca

SEQ ID NO: 807064 - DNA, 120 bp, Artificial Sequence
  ENSG00000272092_7 (sequence is synthesized)
tcctctagccccccgcatcctaggaaacgtatggaaaacaatggaaggttaagtgtgtgcacagtgatctggccctgcaggagtgtgccgaccaggtgatatttcctggggcctggtgat

SEQ ID NO: 807065 - DNA, 120 bp, Artificial Sequence
  ENSG00000272092_8 (sequence is synthesized)
aaggatttggaaggttacagcacagagacgtgaacgtaaaaaggaaacagaggcagcaagcaaatgaggaaaccgatactctgttctgagaataaagccattttaccgctagacgtcata

SEQ ID NO: 807066 - DNA, 120 bp, Artificial Sequence
  ENSG00000214691_0 (sequence is synthesized)
atgtcatccactggtcttatccttatggaaatagacagtacacggatctggaatggaagcaaataataaccgggtctccagattccatcgtatcacagaacatagaaccaagaaagtacc

SEQ ID NO: 807067 - DNA, 120 bp, Artificial Sequence
  ENSG00000214691_1 (sequence is synthesized)
ttagaagtcatctgatccagtcacccctgttttaccaatgaggaatctagacccagaagaagttaaaggacttacccaagagtacccaacaactctctcaccaccccaggctcccatctt

SEQ ID NO: 807068 - DNA, 120 bp, Artificial Sequence
  ENSG00000214691_2 (sequence is synthesized)
tgtgtctctcctgtgtgagctgttccctgaagttcttcctgaacttgcacattgcctttccctttgattttaaatccttggctcaaatgacatgcccggactatatcgtgtgatatgagc

SEQ ID NO: 807069 - DNA, 120 bp, Artificial Sequence
  ENSG00000214691_3 (sequence is synthesized)
aagttttaaaacaaagtagcatctactctgccccagccttgacatcttattacatagcaaatgctggctttttaatttccctaatcaagactggtcctatttagcccacctcctcaaggg

SEQ ID NO: 807070 - DNA, 120 bp, Artificial Sequence
  ENSG00000214691_4 (sequence is synthesized)
gtcccagcactagccccactccgacgcctgatgaagttccagaacagtggaatcaagcacagagatgggcacgcctctttacagaaccaaagattcagaactgtgccttaccctttgctt

SEQ ID NO: 807071 - DNA, 120 bp, Artificial Sequence
  ENSG00000214691_5 (sequence is synthesized)
atgaggcggaggaggaggaagagaaagaaccaccgcaaagagagatggcaacaaaggtaaaatgaaggccgggcagccgatcccactcaggctgaccacagtgagggagcagcattaaaa

SEQ ID NO: 807072 - DNA, 120 bp, Artificial Sequence
  ENSG00000214691_6 (sequence is synthesized)
tgagaaaggatcaggtctcgaagcccagcccttcccgctgaatctcgtcctttgcttcatccattccattaaataagtcatattgaaaataaattattattaatacaacagtagctaaca

SEQ ID NO: 807073 - DNA, 73 bp, Artificial Sequence
  ENSG00000214691_7 (sequence is synthesized)
actttgggaccacaacatgatgtaaccccgtctttactaaactacaaaaagattagctgggcatggtggcaca

SEQ ID NO: 807074 - DNA, 120 bp, Artificial Sequence
  ENSG00000214691_8 (sequence is synthesized)
tgccactgcactccagcctgagcgacgtggcaagactgtcttacacacacacaaaaaagacaaaatgcttggaggagcaacagacaccctgagaccatgaagacaggacgaagtcacaca

SEQ ID NO: 807075 - DNA, 120 bp, Artificial Sequence
  ENSG00000214691_9 (sequence is synthesized)
cacactaagatctgaggcccagggtcaccacaaacccgggagacatgaggccaggcctgagaggcacaggcaggctgaggaatggacagaagagcaacagagaagcctggaggatgaaag

SEQ ID NO: 807076 - DNA, 120 bp, Artificial Sequence
  ENSG00000214691_10 (sequence is synthesized)
ccaactctgcaaagagcttccaagagtcttcctgccacagaaattccacttggccacagaaatggccctggccctgggccaggagagaggtggcgacgagctgctcatggcaatgacttt

SEQ ID NO: 807077 - DNA, 120 bp, Artificial Sequence
  ENSG00000214691_11 (sequence is synthesized)
cagtcagcatgtcttacctgtgcttccaagggtggagatgccactttgagtaggtcactgggtcaggcaggtcacaaaccaagctcctcctacacagtgagttcacggagacagagagaa

SEQ ID NO: 807078 - DNA, 120 bp, Artificial Sequence
  ENSG00000214691_12 (sequence is synthesized)
ggaagggaaggaggttctcagctctactgattccttaggtcaaggagggacagggtccctgtacttggggaccctccagtctgatgggaagatacaaggcaaccctcttagagccgtaga

SEQ ID NO: 807079 - DNA, 120 bp, Artificial Sequence
  ENSG00000214691_13 (sequence is synthesized)
catgtcacacaagggagtgaaggaggtggcaggcccagggataggtccatttctgtggtgaatggaggctttcagaggacattcccacagccctgctgtcaagggccccttccccttcct

SEQ ID NO: 807080 - DNA, 120 bp, Artificial Sequence
  ENSG00000214691_14 (sequence is synthesized)
ccctccccggcacgatgccttacccactggaatgaatcctgagctctgagcctattcctaacacatgaatgctgacccctttgtcacgtcccgctttccctccaactctgttttttgttc

SEQ ID NO: 807081 - DNA, 120 bp, Artificial Sequence
  ENSG00000214691_15 (sequence is synthesized)
tttttcccacccagactcgccctcccccacttgccatttcccaagctcatcccggggagaccagactcaatggcccactggtgatcttgttttacatgagacatttccaaaaaagaccaa

SEQ ID NO: 807082 - DNA, 120 bp, Artificial Sequence
  ENSG00000214691_16 (sequence is synthesized)
aaaatcctttccaggaaaatgccatttttaaaattcagctccagacactgcggcaacattaggaaaacaaaggacttggcagaaaggttttctgcgtggggactttctctcgaaaatacc

SEQ ID NO: 807083 - DNA, 120 bp, Artificial Sequence
  ENSG00000214691_17 (sequence is synthesized)
ttctccaaattgcctccagtggggatgactccaagggtcagttctggagcacccaggcaattgcagacagagtgacttcgggtttgtacactgtcccaggtctttccttacctgatatca

SEQ ID NO: 807084 - DNA, 120 bp, Artificial Sequence
  ENSG00000214691_18 (sequence is synthesized)
ccctgggatcttccaggcttaaacaaggagccccttccaagggtccccaaaggaagcagctgtctctgagggtcaagaaataatgctgcttccttcctccagaggggactcctcaacccc

SEQ ID NO: 807085 - DNA, 120 bp, Artificial Sequence
  ENSG00000214691_19 (sequence is synthesized)
tctcttgccaccatcactaagccaggggcccaggttaggaggtggagggacatagtgtgcttagtagagagcttgtcttctcttatcatccaagtgagaggaatacacagcttcccctgg

SEQ ID NO: 807086 - DNA, 120 bp, Artificial Sequence
  ENSG00000214691_20 (sequence is synthesized)
ggcatacatagtggtgttccccttttttgcatgtatcaggtataattaatcaggttgacatcacatatgtaataataatggccattatttattaaacacttccaatgtgtccacgagtaa

SEQ ID NO: 807087 - DNA, 120 bp, Artificial Sequence
  ENSG00000214691_21 (sequence is synthesized)
ccgggcaacgtggagagatgtaggaagtgaacctgaagcctgacacactcaaggtctcggaaccgaaaataataggaattgttcttatttttccagtggaatcaagcacagagatgggca

SEQ ID NO: 807088 - DNA, 120 bp, Artificial Sequence
  ENSG00000214691_22 (sequence is synthesized)
ttcagacagcaagacagaaaaggcattcattttcttcctccacgtcatgataccaaccgaaattacctttaaatgaggaagaaggtcattatttaatcaataggattgcgtcaattgagg

SEQ ID NO: 807089 - DNA, 120 bp, Artificial Sequence
  ENSG00000214691_23 (sequence is synthesized)
gtgtttgaccaaaaactgggtaccatggcctagccaagttgatgcataaaattagccctcacaacctagtgtttgaatcccaaatcaaaaaattcttcttatattcttaatataagaatt

SEQ ID NO: 807090 - DNA, 120 bp, Artificial Sequence
  ENSG00000214691_24 (sequence is synthesized)
tgtcctcaacagtctccctggggcacatagagaaattctagaagaatagaaaacttctctacagaagatcctctctatcccaaggggaaaagcagctaaagatgaattcacaaccaaaaa

SEQ ID NO: 807091 - DNA, 120 bp, Artificial Sequence
  ENSG00000214691_25 (sequence is synthesized)
cacggtctgccccaaataatctccaggctaagagacaaagtggcttttcggagcaggctttcctctgcgggggtggcctccaggcaggacacaggccgtctggaagaggtcatgatctca

SEQ ID NO: 807092 - DNA, 120 bp, Artificial Sequence
  ENSG00000214691_26 (sequence is synthesized)
cctccccgagagtggagacacagccaacaaggatcatgggcccaagggcctccaagagctgctcctttcagaccacccccaccatgggcccaccctgcagccacaggtcctgggaagccc

SEQ ID NO: 807093 - DNA, 120 bp, Artificial Sequence
  ENSG00000214691_27 (sequence is synthesized)
atggtcatggagcccccacagctgagttactgtggctcatgacccaattggagctcttccctccctgctcttggatattccccatgaccagaaagtcattaaaatcccacagtctcctct

SEQ ID NO: 807094 - DNA, 120 bp, Artificial Sequence
  ENSG00000214691_28 (sequence is synthesized)
gagctgattctcaccatttttctcttcctcttcattctcagtgcctcactcttacacactagacccctggactatcatttggaccatggagccagccccccagccagcttccctgccacc

SEQ ID NO: 807095 - DNA, 120 bp, Artificial Sequence
  ENSG00000214691_29 (sequence is synthesized)
aacttcccctccaagacacttaaaggccagctttggaaatatttttttaaattgaatgtcatttttatcaagtccttcccctactcaagagcctttagtagttccctatttcttcttgtt

SEQ ID NO: 807096 - DNA, 120 bp, Artificial Sequence
  ENSG00000214691_30 (sequence is synthesized)
tcaccagattttgagaatactctcaccactcccccaacccctcttctgcctatgtccagatctacactcaaaaacagccttccctagttaatctcctcccctctctgtccacccctttac

SEQ ID NO: 807097 - DNA, 120 bp, Artificial Sequence
  ENSG00000214691_31 (sequence is synthesized)
ccatccccatggtttattggatactgttttgggtgtcttgagatattaggttagggttctttgacagcaagcaacagaaaccaactctgactagtttaaggaacagaaagggatagattg

SEQ ID NO: 807098 - DNA, 120 bp, Artificial Sequence
  ENSG00000214691_32 (sequence is synthesized)
gaaacgaatggcatagtttggagattaaaagcaagcctgaactacagtcctgggaaagatagaactgggcagctctgaagatctttctggaacattgccatcagatgatcagctccaact

SEQ ID NO: 807099 - DNA, 120 bp, Artificial Sequence
  ENSG00000214691_33 (sequence is synthesized)
gccttctctccttatttctctctgcttaagattcagagttgcaggactgaacatcaacaagctccgtgatcagggagcagagtcctgtgattggttgccctaccaaaaccactcagggtg

SEQ ID NO: 807100 - DNA, 120 bp, Artificial Sequence
  ENSG00000214691_34 (sequence is synthesized)
ggggaaggttgcaacatttagcaaataaaaatacaggatgcccagctaagttgaattccagataaacaatgtttaattgcccatataaacacatcccaggcagtagttcctgatttgtct

SEQ ID NO: 807101 - DNA, 120 bp, Artificial Sequence
  ENSG00000214691_35 (sequence is synthesized)
tctcattcttcccttccctcagtcccactctgttgctcccaggtgggtcagcacaccctcagacctgtacctctacccactctgactgtacctcactgttaatgaatctgttcagtcctt

SEQ ID NO: 807102 - DNA, 120 bp, Artificial Sequence
  ENSG00000214691_36 (sequence is synthesized)
tcaaggtggctgtgaattttatttcttcctctttaattttaataaccgagcttccattgactggaaactacacattaactgacacaaataaaagggtgcacatgccctttggcaaccttt

SEQ ID NO: 807103 - DNA, 120 bp, Artificial Sequence
  ENSG00000214691_37 (sequence is synthesized)
gagaaaaggataattaaattttaaaaccctgggtgcttaatgatatccttaaagatgtgtactagctctgaactttttactccagtcttctcgttgcgaaataaacccctaaatgtttaa

SEQ ID NO: 807104 - DNA, 120 bp, Artificial Sequence
  ENSG00000229155_0 (sequence is synthesized)
agtaagtaaagaggcaagaaaaaatgtctccccgtggttcaaaagccaactaaagtttaccaagagctgtgacctgtggttaaaatgtcctcagaggccagctctcatctgatttcaacc

SEQ ID NO: 807105 - DNA, 120 bp, Artificial Sequence
  ENSG00000229155_1 (sequence is synthesized)
tgaagccccatttcctatcaagagagccatttggctcctctcttaagctcagcagccctgaggtgtggtagcctcacgctgacccatacagaatgcaacagaactgtccctgctgcagaa

SEQ ID NO: 807106 - DNA, 120 bp, Artificial Sequence
  ENSG00000229155_2 (sequence is synthesized)
gagagctttagaccagagagaaaacggaggcgtggtgacaccaagtgacatgctccaagccgctgaacatgttggtggcagagctagaactcgacaccaagtctcctggctttagtccac

SEQ ID NO: 807107 - DNA, 120 bp, Artificial Sequence
  ENSG00000229155_3 (sequence is synthesized)
tgtggctctcaatcctcgcacacgcagagcacagaccgtttttgatggtgctgcagggaacaaggccccaccagtgtgtgctcttcctgtgtgtccaaatttccaccaaagagggctcct

SEQ ID NO: 807108 - DNA, 120 bp, Artificial Sequence
  ENSG00000229155_4 (sequence is synthesized)
cccaggagattggctgccgaacctgttcttccacggcagaagcggcgcagctagcccagcacgactctgcttattgttacgcttctgccacatgtgtgtaaatttgtaaggaacttgccg

SEQ ID NO: 807109 - DNA, 120 bp, Artificial Sequence
  ENSG00000229155_5 (sequence is synthesized)
cctccctctgtggcttggcgaggggggtcgggggaaagggtagggaggatgtgaggggtggggagcagtgctctctctgcctgtttcaggaaggctctctggtttggtgagagcccacac

SEQ ID NO: 807110 - DNA, 120 bp, Artificial Sequence
  ENSG00000229155_6 (sequence is synthesized)
tttgttaagtgagataagggacactacaagaaaaggagggggtgggtgggcagaggacatcacgctgcttattttgaacctgggaaaactgtgccttaggagagggaagtcctgcatatt

SEQ ID NO: 807111 - DNA, 120 bp, Artificial Sequence
  ENSG00000275479_0 (sequence is synthesized)
tctggcaccagaatttatccatgacagataattgaccttctgataaacattccttgtaaggatgctggtgttacccaaaatattaaatatttataaagctgaataaaatgtaagttctga

SEQ ID NO: 807112 - DNA, 80 bp, Artificial Sequence
  ENSG00000275475_0 (sequence is synthesized)
taaaaaccaaagacaacttgacaacttgggggatccctgagactctcctgtgcagactctggattaaccttcagtagcta

SEQ ID NO: 807113 - DNA, 120 bp, Artificial Sequence
  ENSG00000275475_1 (sequence is synthesized)
cagatatgttatgcacaatctgtgaagagcagattcaccatctccaaagaaaatgccaagaactcactctgtttgcaaatgaacagtctgagagcagagggcacagctgtgtgttactgt

SEQ ID NO: 807114 - DNA, 120 bp, Artificial Sequence
  ENSG00000275476_0 (sequence is synthesized)
caccaaaatgctcattcgatgagatggaaatttcttcttaaatgtctatttctcattttgcagcaaaggcatgattatacttctataaatttttgccttacatagtcagatagaagcatg

SEQ ID NO: 807115 - DNA, 120 bp, Artificial Sequence
  ENSG00000275476_1 (sequence is synthesized)
caaagtaggcagagcctaggcatctacctgaaagaaatgccctcctgcattttcttgaacatattaactcttcctgagctccagtggcactatctctggagtccttttccggcagataat

SEQ ID NO: 807116 - DNA, 120 bp, Artificial Sequence
  ENSG00000275476_2 (sequence is synthesized)
gcaggcgtcacttgttattttctctctcaaattgccgtgttctttgtcttcacagtacttttgaaaatacttaaatatacatgtgtttcttatgaaactcgtttgcctcactggacttta

SEQ ID NO: 807117 - DNA, 120 bp, Artificial Sequence
  ENSG00000275476_3 (sequence is synthesized)
agatctgtgaggccaattccatgcctgttttattttctactttattgcccctgttccccaggcacaaagcaataagtgcctgacatacatttggctctcaataaatacttgtcatatttg

SEQ ID NO: 807118 - DNA, 120 bp, Artificial Sequence
  ENSG00000236119_0 (sequence is synthesized)
ctcagaagcacaactgcagtaagccagtgccagtgaaggagagatgggtgttgctgtgttgcccaggcttgtcttcaactcctggcctcaaggaatctgccctcattggcctctcagtgt

SEQ ID NO: 807119 - DNA, 120 bp, Artificial Sequence
  ENSG00000236119_1 (sequence is synthesized)
aattttgaagaaacaaaccgctacaaaagcaaaaataatggtaggaaacgtgtagattaagagatacagtgtatgcaccttatttagatcttaatgcaaataaaatgtattttaaaaatg

SEQ ID NO: 807120 - DNA, 120 bp, Artificial Sequence
  ENSG00000236117_0 (sequence is synthesized)
agcagagggactgccttccagagactttggatcatcaccacgatgggttgattttacaaatttagccactgtcaccggaggcctggctgaacttcagagtttcttctccagcgtcggttt

SEQ ID NO: 807121 - DNA, 120 bp, Artificial Sequence
  ENSG00000236117_1 (sequence is synthesized)
cttgattgcctaaagttccttccagtctaatactctgggattctgggccagtttctggtctgtcacagctgaataagagtgcaagggcaggagtggaatgttcagactgctccaagagga

SEQ ID NO: 807122 - DNA, 120 bp, Artificial Sequence
  ENSG00000236117_2 (sequence is synthesized)
ccttggcccaggtgaggcagcaggccggcaccctgcccacaaccacatagagggcccaggcttgtctgacgcctcaggctgtgctctctccagctcactgcggtgcctctcccagattcg

SEQ ID NO: 807123 - DNA, 120 bp, Artificial Sequence
  ENSG00000236117_3 (sequence is synthesized)
agacatagcaggatttaaaaaacggatcccctctggctgggcatttaggttgctttcacttctgggctgctataaacagcctgcagttactgcctcaggacgcctttctggaaggtgagt

SEQ ID NO: 807124 - DNA, 120 bp, Artificial Sequence
  ENSG00000236117_4 (sequence is synthesized)
ttcttggccaggggatatcgcacatgcactttggagcctctgagcctttgcacaggctggtccctttgcctggctgcccctctcccatttatccctagattcttctgcagcacacacact

SEQ ID NO: 807125 - DNA, 120 bp, Artificial Sequence
  ENSG00000236117_5 (sequence is synthesized)
gcctcctctgaagtgtcctggctgcatgtgctgctctccttgccctgggctgccctcttctccctggtgtcatgagtatctgctgaccttctgcttctcccatgacagagtgccttcctt

SEQ ID NO: 807126 - DNA, 120 bp, Artificial Sequence
  ENSG00000236117_6 (sequence is synthesized)
ctcttccttctctgccttggcctccagcacgtagtaggcgcctaggaaatgttttccagcagaacgagccatctcctggctggtttagcagtgtgggattgtgtggtgtttctattagtc

SEQ ID NO: 807127 - DNA, 120 bp, Artificial Sequence
  ENSG00000236116_0 (sequence is synthesized)
cagcatttctgttggcaacagcccttcccatagccacagccacacgagccgcaggtgcggcggcagcagcagatcacgggagtgctgcagcagcctccacagcagccgcggcagcagggg

SEQ ID NO: 807128 - DNA, 120 bp, Artificial Sequence
  ENSG00000236116_1 (sequence is synthesized)
cagcagctggagcagcagcccacccggtagcacctgcaggtggtgcagctgccacagccaccaccacagccaccaccgcagccaccaccgcagccaccactgcagccaccaccacagcca

SEQ ID NO: 807129 - DNA, 120 bp, Artificial Sequence
  ENSG00000236116_2 (sequence is synthesized)
gtagaggactcagattaaaagcaagccaagagatgctaacatgtaggagaggatcttcatttactcagaaaccacttgaatccttgagacttcgggttaagccggaacccaaggtggctg

SEQ ID NO: 807130 - DNA, 120 bp, Artificial Sequence
  ENSG00000236116_3 (sequence is synthesized)
ccagctgcttttccatctctctgccatggcttctctccaggaaatcaccctgctttcatggaaattcccgagatgcaaaagagtaaataagagcatccaaataaaacatgtcatttttgc

SEQ ID NO: 807131 - DNA, 120 bp, Artificial Sequence
  ENSG00000236115_0 (sequence is synthesized)
gctggagtgcagcggcataatcatggctcattgcagctcgacctgccaggctcaggttatccacctgcctcggtctcccaaatgccaactgtggggggaataaagttgcttagcaacgtg

SEQ ID NO: 807132 - DNA, 120 bp, Artificial Sequence
  ENSG00000236115_1 (sequence is synthesized)
tgtgaattctgaaatgtgtcagacccacactgcagtctgaaggctctctcgacctacgcttgctccatctcccgtttatcctccatttatgtttcctctaataaattcttgcacatctaa

SEQ ID NO: 807133 - DNA, 120 bp, Artificial Sequence
  ENSG00000224922_0 (sequence is synthesized)
tttctacttgcagacttccaaacatttactgaaaccttaaactcttactgattctttaaactgtccccattccagttttctctacagcaagtagctctcaatgtgtagtcctcagatggg

SEQ ID NO: 807134 - DNA, 120 bp, Artificial Sequence
  ENSG00000224922_1 (sequence is synthesized)
ttaacaagccttccagatgactctgaagcatgctccatactgacaactaatgcaatgcattatgtcttcatgtgaccagcagcaccaactgcaagactgtctgtcacctgagtgtgactt

SEQ ID NO: 807135 - DNA, 120 bp, Artificial Sequence
  ENSG00000224922_2 (sequence is synthesized)
gcaaccaagcacatgtgggaattcagtgaaggcccctgccttgacctcattatcaacaggaaccagccaaagacagtggtcactctttatccatgtaaatagacaccgtaatttattttc

SEQ ID NO: 807136 - DNA, 120 bp, Artificial Sequence
  ENSG00000224924_0 (sequence is synthesized)
aggataacatgacatagcaggaataatactgccttttctttctggcatggatcaagagaaaagaaaatacaagaaaacagacagaagatcctatctgcgacaattaagagcactctaaga

SEQ ID NO: 807137 - DNA, 120 bp, Artificial Sequence
  ENSG00000224924_1 (sequence is synthesized)
ggaaaacacatcccaccacacaaggcaaggtacttctatggaagggtgagccctcacagatggagcaatggggcgcgcacacctgaacaagggaggggaaggagttcttatccctgatgc

SEQ ID NO: 807138 - DNA, 120 bp, Artificial Sequence
  ENSG00000224924_2 (sequence is synthesized)
atgtgacccctgctgctgtgtccttcccctattggctaaggcttctgacagctttggagattgtgacattggaataaaggaaaaacgtacaggactcatgaagcgctgaaatgttcacaa

SEQ ID NO: 807139 - DNA, 120 bp, Artificial Sequence
  ENSG00000224924_3 (sequence is synthesized)
gactcatgaagcgctgaaatgttcacaaatatcaagcaaaagtcaatgaaatttattttgagctatttacatcatttaataattgagcaaggtatactcctatgaacaaaatttggagca

SEQ ID NO: 807140 - DNA, 120 bp, Artificial Sequence
  ENSG00000224924_4 (sequence is synthesized)
agaatttggaaactagttaaaattgttgtcttattttcatcctctttaaaagatggtttataatcagctatagaattttaacacgtgctctcaaatgcaagtttctgataactttggaga

SEQ ID NO: 807141 - DNA, 120 bp, Artificial Sequence
  ENSG00000224924_5 (sequence is synthesized)
ttgtgacattggaataaaggaagagctggaatgttcatgaatatcaagcaaaagtcatggaaatttattttgagctatttacagcatttaataattgagcaaggtatactcctatgaaca

SEQ ID NO: 807142 - DNA, 120 bp, Artificial Sequence
  ENSG00000224924_6 (sequence is synthesized)
aaatttggagcatgtttgtctctctctgtctgcctggcatctacagaatttggaaactagttgtgctgtactgcatgagaatgcctgcatttagtatgcgaactggaattggcaaaggac

SEQ ID NO: 807143 - DNA, 120 bp, Artificial Sequence
  ENSG00000224924_7 (sequence is synthesized)
gatggctgctctcccgctaactttaaataagtcatgtcacaaattgcattcgttcccagatttcctaaactttccagagaaaatggtcttctccctggctcagcaagaagatgaacttta

SEQ ID NO: 807144 - DNA, 120 bp, Artificial Sequence
  ENSG00000224924_8 (sequence is synthesized)
aaagggaggggactcagatattgagaattttatgatagtgtgaactgtctggtatgtcatttaagtaagcccgttgctgaaatattttccatgttattagaaagagctgaagagagggat

SEQ ID NO: 807145 - DNA, 120 bp, Artificial Sequence
  ENSG00000224924_9 (sequence is synthesized)
tgagatggcttctttattttttgtcttttgggaattaaaggaacctggttcaacaagggcctacacctaagtctcttgttgtaccagagtacaatttaggactgctcctgaggaaggaat

SEQ ID NO: 807146 - DNA, 120 bp, Artificial Sequence
  ENSG00000224924_10 (sequence is synthesized)
tagctagaaatctagagagtaagggtaacagatttacatagaataacagcctcagtatttttggttcctctccagtaaagatcacaaagaatattgctaaatcgctaaaacacctttgca

SEQ ID NO: 807147 - DNA, 120 bp, Artificial Sequence
  ENSG00000224924_11 (sequence is synthesized)
ataacgtaagggcttacaactatataccaatgtagctcagttactaaactggagtaaactaatttctcttgtgtagaaaaattggttggctgtggttttatagcagatctgcaattatta

SEQ ID NO: 807148 - DNA, 120 bp, Artificial Sequence
  ENSG00000224924_12 (sequence is synthesized)
atagttatgccaataatcgtttaacagtgcatatgttaatatatatggaaagacaatgtgtatagacagatgtgtaaaattgaaaaataaacatataacaagagagaaacatctatcgaa

SEQ ID NO: 807149 - DNA, 120 bp, Artificial Sequence
  ENSG00000224924_13 (sequence is synthesized)
cagacaatatacatacacatcaaacacaacagcagttttagtgaccataatatttatttctcatttttacattgcttactttagtgacaactgaaaatgacagttggcaatgcagctaac

SEQ ID NO: 807150 - DNA, 120 bp, Artificial Sequence
  ENSG00000224924_14 (sequence is synthesized)
agtttcaataaaagtataaaacaaaagactgtgtacaaagcacctgtctttccgcttttgtaatcttccgttggaaaaaatttacacacctaagtaaccatctgttttcttcaagaaaaa

SEQ ID NO: 807151 - DNA, 120 bp, Artificial Sequence
  ENSG00000224924_15 (sequence is synthesized)
atcattcttatttctctctctcatcttgaaaacagctgtcagccaggagggcagagctgaaatttattgccacatcacatgaagcatagaacagactccactactccttgagattcaaaa

SEQ ID NO: 807152 - DNA, 120 bp, Artificial Sequence
  ENSG00000224924_16 (sequence is synthesized)
ctttgcctctcacaaagttaccttttattttcctcttgtttgtcactcatctcccctagtgtgctctttttatttcttttactattaataataaaatctgtggatgactgtattattgaa

SEQ ID NO: 807153 - DNA, 120 bp, Artificial Sequence
  ENSG00000224924_17 (sequence is synthesized)
aggtggagtatttgatccctttagcaaggcagtgattttgaaattcgggtttagacaaaaagatatttcaagctcctgaagaacaagtttgaaggattcagagcagagaattgcaccctg

SEQ ID NO: 807154 - DNA, 120 bp, Artificial Sequence
  ENSG00000224924_18 (sequence is synthesized)
atgtaagacttataaaatattaacgttgggagacactgaaacaaatcagtatttctattaacctgcgaaaagatcttccaaatatataaccaaagtaactaaaacaaatactaaaaagag

SEQ ID NO: 807155 - DNA, 120 bp, Artificial Sequence
  ENSG00000224924_19 (sequence is synthesized)
tttacttttaaaactaggtttatgaaatattttccccaagtttgcatgattattagaaaagtggcttaaagagtaaagaaaaactggaatcttgttgaccccaagtactcctctaaccct

SEQ ID NO: 807156 - DNA, 120 bp, Artificial Sequence
  ENSG00000224924_20 (sequence is synthesized)
tttgctctgctgttacaatggaccagtaaatcttcaaacataacacctcttaaattaaaaacagaaatggtgtagattgcacacattacaacatttttttaggcttacttctttttttca

SEQ ID NO: 807157 - DNA, 120 bp, Artificial Sequence
  ENSG00000224924_21 (sequence is synthesized)
atattaaagcttatttttcacacattacttaatgttgcctgttaaaaagtggtgcttatatttgtgtagctatctgtttgatggtggtttagtttaggaaataaatcacacagtgacaat

SEQ ID NO: 807158 - DNA, 120 bp, Artificial Sequence
  ENSG00000224924_22 (sequence is synthesized)
acaagctttactaggtcaggagcctatcgctgtttatattctctgcaaagttttaattgtgaaaaaggatttgagatggtttataatcagctatagaattttaacacgtgctctcaaatg

SEQ ID NO: 807159 - DNA, 120 bp, Artificial Sequence
  ENSG00000224924_23 (sequence is synthesized)
tgacccctgctgctgtgtccttcccctattggctaaggttagaccacacagcctaaactaattccgattggctaattcaaagagagcgacgggggcttctgacagctttggagattgtga

SEQ ID NO: 807160 - DNA, 120 bp, Artificial Sequence
  ENSG00000224924_24 (sequence is synthesized)
ctggcctcaccgatgacttacctcatgatgagaccgagaccatcatccctgagggtgtgacttcctgttcatcacagcttctctggccagattgccgtatctgtctttttgcaattgtca

SEQ ID NO: 807161 - DNA, 120 bp, Artificial Sequence
  ENSG00000224924_25 (sequence is synthesized)
caattgggtgaagaattaccaagacctacttaactagattatctgggtgccacgaatattcactgctccattgcataacaccacttttgccttttcatcaacatgaaggtcaattaccat

SEQ ID NO: 807162 - DNA, 120 bp, Artificial Sequence
  ENSG00000224924_26 (sequence is synthesized)
agaccaaagcaggagcagtgattagtttaggttcagggaaatcggaccatctgcaacatccctattacacagatattcccccttgtctgtggctaaaactctcaggcaagctttggcatg

SEQ ID NO: 807163 - DNA, 120 bp, Artificial Sequence
  ENSG00000224924_27 (sequence is synthesized)
agaatctatttcattttgctataaccatattttctttttttaatttgctaattagtctactacctaaatttccacttaattatcatgaaaataatgtggaataacttgtagaatattttg

SEQ ID NO: 807164 - DNA, 120 bp, Artificial Sequence
  ENSG00000224924_28 (sequence is synthesized)
tataggcttctcatagtcttctcaatttcaactattttaagattttaattattctgattttaaaataatttgcagttatttgtgtgattacttgtgtaatttttaaaagttacttacacc

SEQ ID NO: 807165 - DNA, 120 bp, Artificial Sequence
  ENSG00000224924_29 (sequence is synthesized)
agaaaaatataagcactgttgttattttgatgtttttctaatattaatatgcatatatcataggaagtatttaaatgaattttaatttcccttttcaatcatctcccattgaaagctgaa

SEQ ID NO: 807166 - DNA, 120 bp, Artificial Sequence
  ENSG00000224924_30 (sequence is synthesized)
ccaagattgtgactccacttcttgtctgcttgtccttgaaacaaaaacctcagagtgcccaggggacagctgtgcccggtttctagctcagttggaaacttgctttttctaaccccttgg

SEQ ID NO: 807167 - DNA, 120 bp, Artificial Sequence
  ENSG00000224924_31 (sequence is synthesized)
ggaacctggatgtctactctaaagcgtccagagtcgcaggcatgggaagtacaaagtcccatggtgggtcatgagaataatgacctctgcttcccttccttatatcacaaaaccatgtac

SEQ ID NO: 807168 - DNA, 120 bp, Artificial Sequence
  ENSG00000224924_32 (sequence is synthesized)
tcacaaaaccatgtactctttctttaggccacagaatcacataatggtgtttgatgcaatgtatatcctacctcctagaggatggcatctatagtagtctgttctcacgctgctaataaa

SEQ ID NO: 807169 - DNA, 80 bp, Artificial Sequence
  ENSG00000224924_33 (sequence is synthesized)
agaaaaagaggtttaatggactcaccgttccatatggctggggaggcctcaccatcaggagagaacatgtggaggggaac

SEQ ID NO: 807170 - DNA, 120 bp, Artificial Sequence
  ENSG00000224924_34 (sequence is synthesized)
gatctcatgagacttattcactatcacgaaaacagtatgggaaaaacccgcccccataattcaattacctcccaccaggtgcctcccaccaggtgcctcccatgatatatggggactatc

SEQ ID NO: 807171 - DNA, 120 bp, Artificial Sequence
  ENSG00000224924_35 (sequence is synthesized)
aggtgagatttgggtggggacacagacccaaaccatatcagcatctcatctccacagaatatggcctctagactggggattcagaaatgtatccgccattgcttcagttctgtatcaggc

SEQ ID NO: 807172 - DNA, 120 bp, Artificial Sequence
  ENSG00000224924_36 (sequence is synthesized)
tcagaaatgtatccgccattgcttcagttctgtatcaggccagcaggtcctgggtggtgatcttatgtgatctgagcagtggatctcaaggtcagggcctacttatatcctgaaaagtgg

SEQ ID NO: 807173 - DNA, 120 bp, Artificial Sequence
  ENSG00000224924_37 (sequence is synthesized)
gtccattgatctcaggtgatattagacaggatcctggctagtaaattaaacaccgtaaatggtaaaatagtggtgcttgttgaggctcttagggcaagagaaatcgatctccagaatgtc

SEQ ID NO: 807174 - DNA, 120 bp, Artificial Sequence
  ENSG00000224924_38 (sequence is synthesized)
tttttatatttctgtgagaatagactggtggctatccgtatatgaaagagcctaaggtggtcactttcccagcaagtggctggatggtggcctagaagaatagtgccgtggtgaggggtc

SEQ ID NO: 807175 - DNA, 120 bp, Artificial Sequence
  ENSG00000224924_39 (sequence is synthesized)
tattgctatcaggttggctgtttggcaatggaaatagctagattatccatgaaaagtgagaatcctctctgttgggcccattcatattttccatgtctactacagtgaccacttcttttg

SEQ ID NO: 807176 - DNA, 120 bp, Artificial Sequence
  ENSG00000224924_40 (sequence is synthesized)
cgtgcctattgtgttaattctgaagcagtcaacggcagaggctgatggatgtcaacctaccagtcattttgtctagttggttatttaattcaacaactgagacaaaatgttctttggtat

SEQ ID NO: 807177 - DNA, 120 bp, Artificial Sequence
  ENSG00000224924_41 (sequence is synthesized)
ctgttaatatgttataaaaagatcatcatagtttgtgcccactcccatgtgtctatcttcatgcctctaaccctgagttctttgcctcatattttccaatccttttctttctaagcctct

SEQ ID NO: 807178 - DNA, 120 bp, Artificial Sequence
  ENSG00000224924_42 (sequence is synthesized)
gaacaactagccaggccttaccctctggccgtaaggccatagacttgctaataccatggtccttttttgtgtgtataaagtacatgataagatgctgctcctgaaactctgcccactggg

SEQ ID NO: 807179 - DNA, 120 bp, Artificial Sequence
  ENSG00000224924_43 (sequence is synthesized)
agcattttccccagctctgtctttcatgatcaccccagaaagcagcatacagaagctgctatctatttttgatttgtaaacacatactgagccagctcatctgtaatttaaatgggcatt

SEQ ID NO: 807180 - DNA, 120 bp, Artificial Sequence
  ENSG00000224924_44 (sequence is synthesized)
ttgctcctttcttaaagtgctcctacatccaggcaagagttgaaagaagagcatggggtgttgaaagccacagatttctggtgagcttcccttttaggagacacatttaaggttttttgc

SEQ ID NO: 807181 - DNA, 120 bp, Artificial Sequence
  ENSG00000224924_45 (sequence is synthesized)
tgcataatgggcaggtataatgtaaactttttctttcttttctacaaaagcttcagtaaattttccatcacttaagaatgctttgttcaaacaaagtcttcttgggattttcaaagaaat

SEQ ID NO: 807182 - DNA, 120 bp, Artificial Sequence
  ENSG00000224924_46 (sequence is synthesized)
gaaaatgttgaagctgacactttgattactgacactttgattacactttcagtgtagaaaagtaacttgatttttaaatgactgttgaagagattaatggaaggaagagagtaaagacag

SEQ ID NO: 807183 - DNA, 120 bp, Artificial Sequence
  ENSG00000224924_47 (sequence is synthesized)
gtttttgagtggatattagaacaaaatgaaaatatttttgatcaggaagatttcagaaagctaaaaatgacttataagactgaataatggtctccagagatgttcatgtcttaatcccca

SEQ ID NO: 807184 - DNA, 120 bp, Artificial Sequence
  ENSG00000224924_48 (sequence is synthesized)
gaatctgtgactgttagttgatattgcaagaggaactttgcagttgtgataaagttaaacgaggagattaaccaagattacccaggtgggcccctctgaagtcagaagacaatgtaatta

SEQ ID NO: 807185 - DNA, 120 bp, Artificial Sequence
  ENSG00000224924_49 (sequence is synthesized)
cagaagcaaaggggtaagtcagaagacaatgtaattacagaagcaaaggggtagagaatgagacttgaagatgttgcgcttctagctttgaagacgtctagaaaggcagtctctggaaac

SEQ ID NO: 807186 - DNA, 120 bp, Artificial Sequence
  ENSG00000224924_50 (sequence is synthesized)
cgggaagggcagggaagcaaagtctccctggatcctgcagaggacagagccctggtgatgcatttcagacttctaccctccagaaggatcaaattctacaaatatgtgtcctttcaagcc

SEQ ID NO: 807187 - DNA, 120 bp, Artificial Sequence
  ENSG00000224924_51 (sequence is synthesized)
cctaaactagtgggcatttgttatagcagcagtaaaaaatgaataccatgtgctattttgaaatctgacttttgtgagaagccagttaagtatttattttgttaacaattggcttttgtg

SEQ ID NO: 807188 - DNA, 120 bp, Artificial Sequence
  ENSG00000224924_52 (sequence is synthesized)
ctcactggaggttaaaaatatttttgtcattaatacactttgaatactcagtcctaagtaatataagtagcgtgaccttttttgccctttccctctccaggcacaacatgaagaataact

SEQ ID NO: 807189 - DNA, 120 bp, Artificial Sequence
  ENSG00000224924_53 (sequence is synthesized)
caatgatttgccgaaaagaagagaaatatattatcccttcagttcctaaacttacttgttttctcatcttcaagaacgaaagtaattcagcatacacatatagcatattaatattcttta

SEQ ID NO: 807190 - DNA, 120 bp, Artificial Sequence
  ENSG00000224924_54 (sequence is synthesized)
attcatgtacaactatataatgtataatcatattcatgtactacctgtacaaacaaatttacacatttaaaatataaaaaataagatgaaaatggaatcaatgtatcacaagtgattgaa

SEQ ID NO: 807191 - DNA, 120 bp, Artificial Sequence
  ENSG00000224924_55 (sequence is synthesized)
tgattgaaatatctaatactttctttcagcaaatcactggatcatactgcagattccttgaatttctgctcctctcattacaaactgttgtattagatgaccaatatatatcttttccta

SEQ ID NO: 807192 - DNA, 120 bp, Artificial Sequence
  ENSG00000224924_56 (sequence is synthesized)
ccatttaatgattctctcctttttctactgtgagcttgttttgttgttaatgacaaatacagtacagatttagttagctgctgtggagtatgaggcagaataagcaatgtgactaatcct

SEQ ID NO: 807193 - DNA, 120 bp, Artificial Sequence
  ENSG00000224924_57 (sequence is synthesized)
tattgtgcattctcaagctgactcccagtactctcttttcatgcctcctgagcactatacttattaacattgtctacttctgcagtattttagtgaaaggtattaggatgcaatatattt

SEQ ID NO: 807194 - DNA, 120 bp, Artificial Sequence
  ENSG00000224924_58 (sequence is synthesized)
tctttttaacatgcaaaggtgatgaatgaaaattatatgatcatttggttaatgatattaatttatcagtgtgaatatgtattttaaaaaatcacatactgttactgcaggaaataaatt

SEQ ID NO: 807195 - DNA, 120 bp, Artificial Sequence
  ENSG00000224924_59 (sequence is synthesized)
gaagtttcttatattttgaaaaaaaatcagataatatacatgccataactaaaatgatactttgttgaaagaatctattttaatcagagtatgaggatgccaatctcatgtttttttaaa

SEQ ID NO: 807196 - DNA, 120 bp, Artificial Sequence
  ENSG00000224924_60 (sequence is synthesized)
gatatgcttccctttaagaaaccaagctcaacttacagagctgataaaacccctttgggaaaactggcctcataccttgtctacacagtccccatgcagggttcctaacgtgtggtgagt

SEQ ID NO: 807197 - DNA, 120 bp, Artificial Sequence
  ENSG00000224924_61 (sequence is synthesized)
aaagcatgtcactttctaacaggtccaggaaccccatgttcttgggacctcaagaagagtggagtttaccaattcacaggtattcgagggtaaaaacccatgggtggtttcagcttcagg

SEQ ID NO: 807198 - DNA, 120 bp, Artificial Sequence
  ENSG00000224924_62 (sequence is synthesized)
aagtcctatctgagattccttgtggaacagcgttccatcaaagccaatttaaaaagcctatgtcaaaataattattcttgctacactctatgcaaataaacaggccaagtataggactaa

SEQ ID NO: 807199 - DNA, 120 bp, Artificial Sequence
  ENSG00000224924_63 (sequence is synthesized)
agtttattttgcaaacagcttagtcctatcatgatttgtttttaacaaagatgaagactggagaaagaaattatgtttcaaaacttattatacatttgtcattaaattctagactcatta

SEQ ID NO: 807200 - DNA, 120 bp, Artificial Sequence
  ENSG00000224924_64 (sequence is synthesized)
ggactgtgtgatttttgttctttagtagaaggataacatgacatagcaggaataatactgccttttctttctggcatggatcaagagaaaagaaaatacaagaaaacagacagaagtgga

SEQ ID NO: 807201 - DNA, 120 bp, Artificial Sequence
  ENSG00000224924_65 (sequence is synthesized)
tttttttgtttgtttgttgattggttttctgtactagaaaggatgcatagtcaagcaaaggtggataattataaacagcctaacagtatctagactcagtctgctttctttgcaattagt

SEQ ID NO: 807202 - DNA, 120 bp, Artificial Sequence
  ENSG00000224924_66 (sequence is synthesized)
agacaagagggaaaagattaaagatatagtgaactctataactctgttttattgactccatggaaattcagacacacatgcttgagagagagcaagtgaactagaaagactttgtttagt

SEQ ID NO: 807203 - DNA, 120 bp, Artificial Sequence
  ENSG00000224924_67 (sequence is synthesized)
gtcagcttttaatttaaactgtattcaagttggcttattaacagtctaggttttataaaaatagagaggaagataaatgatatgtaatagaatgaacaatgtaaacaccttttttcaaaa

SEQ ID NO: 807204 - DNA, 120 bp, Artificial Sequence
  ENSG00000224924_68 (sequence is synthesized)
atggatttattgataacttcctatattcttcatattagggtagatattatagtagatagaaaagcaagatacagtctccatctttgaagtgaaatataatcttgccagggagataagcag

SEQ ID NO: 807205 - DNA, 120 bp, Artificial Sequence
  ENSG00000224924_69 (sequence is synthesized)
tctttacaggtgctaaattgagcagatatattatgtgagaattttgaaagtaagcctagaactcggaacttgattctaagtgcaaggaatagccaccaacttttatgaacacgattttga

SEQ ID NO: 807206 - DNA, 120 bp, Artificial Sequence
  ENSG00000224924_70 (sequence is synthesized)
tattgatattgatatgactgacgtgttttcaggaaaggtatctatcaacattgatttccaaaagtaaaggccattttgtagttgatattttactgaaatattctagtacaactgatactg

SEQ ID NO: 807207 - DNA, 120 bp, Artificial Sequence
  ENSG00000224924_71 (sequence is synthesized)
ccagtcacttctttgaaattctcttctccttgactttggtgcccaagattctgttgattcttctcaaattactgttatttcttattatctttatgtgcttctctttttctttaaaatgtt

SEQ ID NO: 807208 - DNA, 120 bp, Artificial Sequence
  ENSG00000224924_72 (sequence is synthesized)
gatatttctttgaaatatttctttgcattgttggtacttcatagcatcccaccatcagttaaagtctcttcttatttgacctgcttcccacaaatgaaacaataaatttatctttactcc

SEQ ID NO: 807209 - DNA, 120 bp, Artificial Sequence
  ENSG00000224924_73 (sequence is synthesized)
tacatcttcacctagatgtcataaaaacgttactatgtccaatagttgattccttcctccccagacagtgggcattcactgtgtgttgtatacccaacaccagtttgtctttcttgatgg

SEQ ID NO: 807210 - DNA, 120 bp, Artificial Sequence
  ENSG00000224924_74 (sequence is synthesized)
ctgcttggttttattttggaaaaatctctctctctcatttgaatgcatttttgtcagttcaggagctctgccctctcactgcagatgccaaaggagtgtttagagaatgtaaaaggctat

SEQ ID NO: 807211 - DNA, 120 bp, Artificial Sequence
  ENSG00000224924_75 (sequence is synthesized)
ttttgcaggtattttaatttaccatattgtggtctaagggtgagcatgtttctgaaacagacaactggattctctctccatcattctggatattgtaatacaaggaccaaaaacttgaag

SEQ ID NO: 807212 - DNA, 120 bp, Artificial Sequence
  ENSG00000224924_76 (sequence is synthesized)
tccacttatttcaacgatggcatcccgcttgcgtggttgagcagttcttgttgcttcggtttcttttctggatgctgtcctattttcatggctactattctaactatgccccatctgata

SEQ ID NO: 807213 - DNA, 120 bp, Artificial Sequence
  ENSG00000224924_77 (sequence is synthesized)
tcttcctgtgttagttatttgttgatataaagcaaattacctcaaaatgaaacaactcaaaatgaccacgttgattgtttcttacagtgtccgtagctcagggatttgggagtggtttaa

SEQ ID NO: 807214 - DNA, 120 bp, Artificial Sequence
  ENSG00000224924_78 (sequence is synthesized)
ctgggtgcctccagctctagttttctaatgagattgcaatcatgctgttggtggggctgcagctattgccagccccagctggggcaggtgagctcactcatgtggctgttggcagacctc

SEQ ID NO: 807215 - DNA, 120 bp, Artificial Sequence
  ENSG00000224924_79 (sequence is synthesized)
agaaagtttgtttccaaatttgctatgtgggcctctctacaaggttttcttacagcatggcagctgggttttacgagggttggtgatctaagagggaaagagagaacatccatgattaaa

SEQ ID NO: 807216 - DNA, 120 bp, Artificial Sequence
  ENSG00000224924_80 (sequence is synthesized)
accacagcattcttgttaacctaatccctgaggtaatatcccatcacttcagcttattctattcattagaagtaagtcaataaattcagcccacagtcagtggaagggaattatacaagg

SEQ ID NO: 807217 - DNA, 120 bp, Artificial Sequence
  ENSG00000224924_81 (sequence is synthesized)
ctgtgaatcctaggggattcacatgattggaaaacatcttagaggctgcctactattcccaacaagtttcctttctacctaagatagccaacattgtcttctattgattgcagtcttaca

SEQ ID NO: 807218 - DNA, 120 bp, Artificial Sequence
  ENSG00000224924_82 (sequence is synthesized)
actctaatggataaactacgtaagcagtacccttttgttctgtattcctatgtggttttttgccattatgatcttccacccaaagtccaaatctcggagtaatgtttatcacctcgccct

SEQ ID NO: 807219 - DNA, 120 bp, Artificial Sequence
  ENSG00000224924_83 (sequence is synthesized)
ccctaactccccacatcaaatatctttctacattccaatccttcagtttctaaaaccacttcagttgagaggaatcttcatgactgcactcttctatcttattatctgaatctttttcct

SEQ ID NO: 807220 - DNA, 120 bp, Artificial Sequence
  ENSG00000224924_84 (sequence is synthesized)
ctagaatttatgcttctgttcctgcttttaatttcctgaacattttccatgtatataattatttcttgttgttcctatggctctttcagcctgagacaccttttccttcatctctccagt

SEQ ID NO: 807221 - DNA, 120 bp, Artificial Sequence
  ENSG00000224924_85 (sequence is synthesized)
cccacattacacttctcctagtgtgttcttttagggccagcttagtcattaccttacctagaaaaccgcctctgatttcccaagtctgagtagtgtattttcattgtggactcacagtgt

SEQ ID NO: 807222 - DNA, 120 bp, Artificial Sequence
  ENSG00000224924_86 (sequence is synthesized)
tatctgaatctttgttattgcacttcacacattattatactacctgatatgtgtctatcttccctgtaagactgtgaaattgtgggttaaaactttacttttgtgtttattttttgatct

SEQ ID NO: 807223 - DNA, 120 bp, Artificial Sequence
  ENSG00000224924_87 (sequence is synthesized)
tcatgtcttgtacatacctcttgtattatgatttgtattataattctcaaaatataatagataagctgcaaacaaagtttatatcaacatcctacatgactcaataaagatagttatatt

SEQ ID NO: 807224 - DNA, 120 bp, Artificial Sequence
  ENSG00000224924_88 (sequence is synthesized)
tgctcataacaaaaattaaatagcatgagaatctatgtggagagtaagtcgttgaaagtaacactgttaaagttagggcacacattgaattggaaattcaggaattcagtagtatactag

SEQ ID NO: 807225 - DNA, 120 bp, Artificial Sequence
  ENSG00000224924_89 (sequence is synthesized)
tggagaattaaagcaattagataactattttatcataattgcaaatccttttcaattatatatgcagtttattatatgaaatggttttatataaattaccataagagtaaatttagagct

SEQ ID NO: 807226 - DNA, 120 bp, Artificial Sequence
  ENSG00000224924_90 (sequence is synthesized)
ttagagctagtgaaaacctgaagattagtagaggcttgcagggcacaatgaagactttgcaatttttgatgattagagattacatgaacttaatgtgtaaggttgtttccaaaactcaaa

SEQ ID NO: 807227 - DNA, 120 bp, Artificial Sequence
  ENSG00000224924_91 (sequence is synthesized)
tattagaaatgattgatatccacatgccatacatacaaagtagagccagaggacttagtgatattaagagatgtgtgtcgtcactagtgatgatgacataaagtatgacttccaagtgat

SEQ ID NO: 807228 - DNA, 120 bp, Artificial Sequence
  ENSG00000224924_92 (sequence is synthesized)
acaaaggccatgaggcttgccttttcctttctcctttacttgaaacaccttaccttgactgtctacatttgcttttttccactaagaaattaggttcttactctcagctaaaatataaca

SEQ ID NO: 807229 - DNA, 120 bp, Artificial Sequence
  ENSG00000224924_93 (sequence is synthesized)
aggaataaaagtacattgtaggtcaggggttgggactttttctataataggcctaatagcaaatattttaggcattgaaggccatgtgttggtctttacatttttcaaccttactcttgt

SEQ ID NO: 807230 - DNA, 120 bp, Artificial Sequence
  ENSG00000224924_94 (sequence is synthesized)
agtgcaaaaatagacattaacaacatatgtggcaataagtgtaactgtgttctaacaaaatcacacaggcagaggactgactcttgttgtaggcaaatatattaacatgaaagggtagat

SEQ ID NO: 807231 - DNA, 120 bp, Artificial Sequence
  ENSG00000224924_95 (sequence is synthesized)
ctaaagggttatagtgatgatattagaagcagaattgcctaggagactattgaaaggaatagcttctaagcttatgctatataataatagagaaaggagtagggtaggctgaaaattcaa

SEQ ID NO: 807232 - DNA, 120 bp, Artificial Sequence
  ENSG00000224924_96 (sequence is synthesized)
gagtagggtaggctgaaaattcaagtggaaaaaactttcttcagctggccagatgcagtggctcacgtctgtaattgcagcactttggaagcctgaggtgggcagatcacaaggtcagga

SEQ ID NO: 807233 - DNA, 120 bp, Artificial Sequence
  ENSG00000224924_97 (sequence is synthesized)
aactaatataaaactgcagtaatctttctgacacttgcttggaacattgctgatccttgttttctttttcagagtcatggaaatttattttgagctatttacagcatttaataattgagc

SEQ ID NO: 807234 - DNA, 120 bp, Artificial Sequence
  ENSG00000224924_98 (sequence is synthesized)
gggtcatggataactagctattcccacctccaaccagaactgtttcttttccttgggaatggtttccagtttcaaggaaggtaaagaataagatatagacatctgtggaggcctccaata

SEQ ID NO: 807235 - DNA, 120 bp, Artificial Sequence
  ENSG00000224924_99 (sequence is synthesized)
gttaatcctggaactatctggatgctgggacatgtagtcatctgactacagtggaatctttggactctactaagaaccctttgaaggaaaaatatatgagactttagtatctaagggcca

SEQ ID NO: 807236 - DNA, 120 bp, Artificial Sequence
  ENSG00000224924_100 (sequence is synthesized)
gatgaagacctagatagtggcaatgaggaccccagggcaaaacctagagatgcatatgtcgagcagagtttgaacataacagatgtgttgacttcagatttggagccaggttctgagatg

SEQ ID NO: 807237 - DNA, 120 bp, Artificial Sequence
  ENSG00000224924_101 (sequence is synthesized)
agccccaggcagctttgagaaggtgctcattaggagtgaagctgggatcctgggctggcaactctggcttacactgcgctcataaaagtgagccatcctggaagtggattctccagccta

SEQ ID NO: 807238 - DNA, 120 bp, Artificial Sequence
  ENSG00000224924_102 (sequence is synthesized)
cgtctagccataccagttgatactctctctatggagcagagaggagctatctcactcaagccctctggaattgcagatcagcaatcaaagtaattaactgtttttggtttgtgccactaa

SEQ ID NO: 807239 - DNA, 120 bp, Artificial Sequence
  ENSG00000224924_103 (sequence is synthesized)
ctcttgaggtcgttgcctacacaactatagataatcagaagagaaatcattacctcataaaactttctgtaaacgtaatgcaattcagtgatatacagcatgccttttgttacttagaat

SEQ ID NO: 807240 - DNA, 120 bp, Artificial Sequence
  ENSG00000224924_104 (sequence is synthesized)
attttttccatctttgtggctgaggtataactaaaattagttgaaatttttcttttgaatgaaattttctatacatattttatatacttgaaatacttgtccattatttgatgtaaggat

SEQ ID NO: 807241 - DNA, 120 bp, Artificial Sequence
  ENSG00000224924_105 (sequence is synthesized)
gctgaacattggcaaggatatgtaagattcttcctctgggaaatgtgggcaatataaatataactaagatctcttaaggaataaattgccttgtaagatatatcacatgatacaaaatat

SEQ ID NO: 807242 - DNA, 120 bp, Artificial Sequence
  ENSG00000224924_106 (sequence is synthesized)
ctatatctattttaaagagaattacttatgagactgatgagactacacagcaaaggtcacaccttgtttgttggaattttgcctgaagttatttactattatggtaaagttaagaggctg

SEQ ID NO: 807243 - DNA, 120 bp, Artificial Sequence
  ENSG00000224924_107 (sequence is synthesized)
aactgaaagggatatgaactttttggaaatcttattcttttcatcaaagttgcattattacatactgatggaatacttcaagctgaataaagtgtcttaacactctgcaatccagagtat

SEQ ID NO: 807244 - DNA, 120 bp, Artificial Sequence
  ENSG00000224924_108 (sequence is synthesized)
ttgccactagtaaaaattactctggacacttacctaggtgacttcaactaacagagagaggtagagacagttagactgtaaccagtgctaaactagttacctacatacagatatttaaaa

SEQ ID NO: 807245 - DNA, 120 bp, Artificial Sequence
  ENSG00000224924_109 (sequence is synthesized)
atgattttatcataaaaatgatgctgaattctatagtttttatacacattattttagaaagttaacatgcacaatcaaacatattgctgtttttacctattatgtatacacatacacctc

SEQ ID NO: 807246 - DNA, 120 bp, Artificial Sequence
  ENSG00000224924_110 (sequence is synthesized)
aatgctgaatctttccaaatattcaagtgggcttttagcttgaagaattgtaaatctgcttctctacttagaagctataagaatctggaatcaaagaacattctagacaaaaatgtatca

SEQ ID NO: 807247 - DNA, 120 bp, Artificial Sequence
  ENSG00000224924_111 (sequence is synthesized)
taagaagtcttaaattgtagcaaacaatttatgttaaacatacctgtattagaacttcgtattaaaacagaattgcccgtggctttaattaaatacaatttgatatataagtgagctact

SEQ ID NO: 807248 - DNA, 120 bp, Artificial Sequence
  ENSG00000224924_112 (sequence is synthesized)
gtaaattctctacctcactttcagatttttatattccttggaataaaatggagcataagaattttctccaataacttattttcttcaatagaactttggaggacatttgtggctactgag

SEQ ID NO: 807249 - DNA, 120 bp, Artificial Sequence
  ENSG00000224924_113 (sequence is synthesized)
aacatgtattttaagaagcttacaaatgtgaattttccccatattgaacatactttttacttaaatatcgtcatattgttcctttttgtttctagtcctttctatcttccatcactaatt

SEQ ID NO: 807250 - DNA, 120 bp, Artificial Sequence
  ENSG00000224924_114 (sequence is synthesized)
gtggacctaaccgatgcattgtttctgttttccgtttttcatttgctttttaaacctattttcagaaaaatctacttaaaaacaatagaaaataaatgaaagccctgttttcagtttaca

SEQ ID NO: 807251 - DNA, 120 bp, Artificial Sequence
  ENSG00000224924_115 (sequence is synthesized)
gctgggattttgcacagcatgtaatactaactgcatctgtgcagaaatactaccatatgggcgggaggggaatcatttaatttagttcatatgcaagaagtaagtgaagagttgactata

SEQ ID NO: 807252 - DNA, 120 bp, Artificial Sequence
  ENSG00000224924_116 (sequence is synthesized)
ttttaaacctcaccaaagctaagcaacagcagaattaggaacagaatccaaaaagtttcataatcagtcttatgttctttctagtaaactacaccatcttttaaggctgttcacttgtac

SEQ ID NO: 807253 - DNA, 120 bp, Artificial Sequence
  ENSG00000224924_117 (sequence is synthesized)
ggctgttcacttgtacagtgcgaataatatatcttcttactttgaaatgtatttttaagatcagtgtaaataatatattttcatttactatttatatctttcaattttttgtcaaaatat

SEQ ID NO: 807254 - DNA, 120 bp, Artificial Sequence
  ENSG00000224924_118 (sequence is synthesized)
cagagaaaataaaacatgtataatacttgaaaataacaatcatttctggaaaaaaatctacatgtattgcatgaataaggacacaattttaatctaagtaatataacttaactgatgcaa

SEQ ID NO: 807255 - DNA, 120 bp, Artificial Sequence
  ENSG00000224924_119 (sequence is synthesized)
gcccatagagattaaagacagtttattacagttgatcctgactaatgggacagtggtctttcagagataaaggggagacaggattgaacatgataaggatagctcaagaatagagaacat

SEQ ID NO: 807256 - DNA, 120 bp, Artificial Sequence
  ENSG00000224924_120 (sequence is synthesized)
aaacctaaaaaggaaatttacatttattattttcaataatgaggtcatgaaaatattccatttgctttataggaaaaatgctcacacaaattatttcaggggagcttttagtgaataagc

SEQ ID NO: 807257 - DNA, 120 bp, Artificial Sequence
  ENSG00000224924_121 (sequence is synthesized)
cttcaatttcctcatctgtaatatgggaataataatgtctatgaggtggaatcactgagaatattagtatggacgtacgttctgtgtcttcttggggaagaaacttttaggaagattcac

SEQ ID NO: 807258 - DNA, 120 bp, Artificial Sequence
  ENSG00000224924_122 (sequence is synthesized)
tactctttttaaaaaatgttatttactgctacagaaaaatgtctcctctgtaaagtcttatttaattatgggagaaccattaaaaccatgatctcatagtgaattgtgtaaaaataaaat

SEQ ID NO: 807259 - DNA, 120 bp, Artificial Sequence
  ENSG00000224924_123 (sequence is synthesized)
aatgaagacttacatctattacaaataggagagtatttcttttatacaaaaatatagcccattaataaatcaccaatgtagatgttacacatggtactatctacagattagaagaggtct

SEQ ID NO: 807260 - DNA, 120 bp, Artificial Sequence
  ENSG00000224924_124 (sequence is synthesized)
ctcaatcagactaaactgaaacaactattaggattaatcaacatttttcatggccttgatggtgatacttgttgtaatttctgatttaatttaaatgaatagtttgataaactaatgaaa

SEQ ID NO: 807261 - DNA, 120 bp, Artificial Sequence
  ENSG00000224924_125 (sequence is synthesized)
actgcttgtaaaagagtaatatattctattaaagttaaatgcatagtttactcttaaaaagtgagtcattaataaaatgctgccatacaagatgcagataaggcaaccgtaaaagcaata

SEQ ID NO: 807262 - DNA, 120 bp, Artificial Sequence
  ENSG00000224924_126 (sequence is synthesized)
aaagtaaagtttactgaataaccagattttaaagaaatccatgcttctggttatttcatatttttatttggtattttgttcaacctttttagtcaacgagtcagtagcatgactatattt

SEQ ID NO: 807263 - DNA, 120 bp, Artificial Sequence
  ENSG00000224924_127 (sequence is synthesized)
aacaataatcaattgtacatttcagaatagctaaaggagaataatttgaatgtttctagcgtaaagaaaagataaatatttaaggtgacggatatctcaattatcctgatttgattatat

SEQ ID NO: 807264 - DNA, 120 bp, Artificial Sequence
  ENSG00000224924_128 (sequence is synthesized)
gcatttttcaaattatcacaggtaccccacaaatatgtacatccattatgtttccatcaatcaaacctcttcaaaaatatatgcatgatttattaaagaaagattccgtaggctttgaac

SEQ ID NO: 807265 - DNA, 120 bp, Artificial Sequence
  ENSG00000224924_129 (sequence is synthesized)
cttccaaccttacagcaggaatggtttccagtttcaaggaaggtaaagaataagatatagacatctgtggaggcctccaatagttaatcctggaactatctggaaaatcatttttactga

SEQ ID NO: 807266 - DNA, 120 bp, Artificial Sequence
  ENSG00000224924_130 (sequence is synthesized)
ttattctcctctggacttggtatatccctgttggaaaacatggagaaaagatgcaagtcttacatttaagcttaccctcagtgacaaagcacttttctttctgaaattttataaccagtg

SEQ ID NO: 807267 - DNA, 120 bp, Artificial Sequence
  ENSG00000224924_131 (sequence is synthesized)
aagatcacatcttaaggtacaacaagcagcaagtttagaaatgggagatcaaagaaataccttctatctgaagaaagtttctaggaagcattaaacaataccaaagaacagaatattgaa

SEQ ID NO: 807268 - DNA, 120 bp, Artificial Sequence
  ENSG00000224924_132 (sequence is synthesized)
cttatggtcagaaaagcaaatttgagtcttgccatgtattaattatataactgtgtttcactcactttgatattttggctaccgttcccttatcagttaaattagcagattatgttcaaa

SEQ ID NO: 807269 - DNA, 120 bp, Artificial Sequence
  ENSG00000224924_133 (sequence is synthesized)
acttttcaacattttactacctgatactctgaaattctaagttctcggagagatgcccccatatgtaagctgaatgttttactcatgcattggagaaaaaaaaattgaaaatttgaaaaa

SEQ ID NO: 807270 - DNA, 120 bp, Artificial Sequence
  ENSG00000224924_134 (sequence is synthesized)
tctgcctggcatctacagaatttggaaactagttgtaagtattcctaacttatggcagtataattgtttgcatcagtacaataagaatccactttcttttgcaacaggatgcaattggag

SEQ ID NO: 807271 - DNA, 120 bp, Artificial Sequence
  ENSG00000224924_135 (sequence is synthesized)
gaacaaaagggataagtaatgtaaaactctggatcaatattttaattctgagcaattattctgcaaatccagtcaggtaatgggaataaataaggtgcccatcacccagaagtttctttt

SEQ ID NO: 807272 - DNA, 120 bp, Artificial Sequence
  ENSG00000224924_136 (sequence is synthesized)
ttgggaaagtaagaccaagggaactaaccaaagcaaagccccatgcacccgaatcttagcaagcataactacagccaccagttacctgggcatgtcacaagacatccttttctctccctt

SEQ ID NO: 807273 - DNA, 120 bp, Artificial Sequence
  ENSG00000224924_137 (sequence is synthesized)
gttggagcacgactcaattccacagcctcatctcagcatttggcttatgttaaggagtccatgcaacccctggagacatatttttgtctcaaactcaattcctagcttcagatcaaagcc

SEQ ID NO: 807274 - DNA, 120 bp, Artificial Sequence
  ENSG00000224924_138 (sequence is synthesized)
ctaggaaaaaaacttgcatctgagggatccagaggcagatgataacagaagttaaaatgtacaacataggtgagtatgactaattcctgccgattgagccaagcttcctgtttcatggat

SEQ ID NO: 807275 - DNA, 120 bp, Artificial Sequence
  ENSG00000224924_139 (sequence is synthesized)
aaagttcatgctagtatccatggcataaataagatctagggaactcgaaggctactgacagcagaggagatagggtgtacatgggtaagagcagatattcccatctcctaagctcccctg

SEQ ID NO: 807276 - DNA, 120 bp, Artificial Sequence
  ENSG00000224924_140 (sequence is synthesized)
agttgccagaactcggagatgtaaggacagaagaaagaaagaagggtgcctcactttctcacataccccaggtattcactaggaagagaaggcaacctgagttgcctcattcccctcttt

SEQ ID NO: 807277 - DNA, 120 bp, Artificial Sequence
  ENSG00000224924_141 (sequence is synthesized)
ctacatgagtagccatccatcttcagtctgtaccactttcaaatgcatcctgaacccctgagactcctttgaaaaaaaaaaaaaaagccttcttttttagtttctcctcctcagttctct

SEQ ID NO: 807278 - DNA, 120 bp, Artificial Sequence
  ENSG00000224924_142 (sequence is synthesized)
cttcacagataggtaattgtgtctctgtactatgggacactcccctcagatgcatcctccaaactgggaaaagttaatttcccaaacattaaactggttgacttaggattgggctcaggg

SEQ ID NO: 807279 - DNA, 120 bp, Artificial Sequence
  ENSG00000224924_143 (sequence is synthesized)
taagggaacccagaagcctgacctgctggcaaaaagggtaaaagtgttttttaatcagttgggctcttggactccctctctctgtgcaaactggtaaaagttctcaagattttcaagcag

SEQ ID NO: 807280 - DNA, 76 bp, Artificial Sequence
  ENSG00000224924_144 (sequence is synthesized)
tctgtgcaaactggtaaaagttctcaagattttcaagcagtctttaccttgatcttgtttaattttttttctttta

SEQ ID NO: 807281 - DNA, 86 bp, Artificial Sequence
  ENSG00000224924_145 (sequence is synthesized)
agtagctgggattacaggtgcatgccgccatggctggctaattttttgtattttttgtggtcttgagctcctgacctcaagtgatc

SEQ ID NO: 807282 - DNA, 120 bp, Artificial Sequence
  ENSG00000224924_146 (sequence is synthesized)
ctgacctcaagtgatctgcccgcctcggactcgcaaagtgttaggattacacgcgtgagccactgcacccccttgttttattttgatacatgttttttaatgacccggtttgtcttttct

SEQ ID NO: 807283 - DNA, 120 bp, Artificial Sequence
  ENSG00000224924_147 (sequence is synthesized)
tcttttcttgccttcaggccataaaactccaaacagtcatgcaaccagagcctcagacaatggcttcttttgccagggacccttgcttaggcctctgagggagctctgacagctgttttc

SEQ ID NO: 807284 - DNA, 120 bp, Artificial Sequence
  ENSG00000224924_148 (sequence is synthesized)
cccaaacagtgccccctttcagcacgaagcagttaagatcagtcttcatccttatccttattctaacagaagttagatgtacttctttagagaggggaatgatagaggcaggaggcagat

SEQ ID NO: 807285 - DNA, 120 bp, Artificial Sequence
  ENSG00000224924_149 (sequence is synthesized)
aagagaacctgcatagggtcttgcctaaatatgcccttggtgaaaaattctgtcccttaacacatgcacagtaagtgaaataaatcaatgtggaacagctcagactaagggcccacctgt

SEQ ID NO: 807286 - DNA, 120 bp, Artificial Sequence
  ENSG00000224924_150 (sequence is synthesized)
gcactgggagagtggggtggaaccacaggaatttgtgccttatgcagtggggaggagcctggcatcttctgctcacatgtggtggcctggcattcactctgtgaggtgggagtctgctgg

SEQ ID NO: 807287 - DNA, 120 bp, Artificial Sequence
  ENSG00000224924_151 (sequence is synthesized)
caagaccccctcttttttcctgagaactttcttttaataaattctgttctcctcacctttcaattgtctgtgggcctaatttttcctggtcatgagacaagaacccagatattagctgaa

SEQ ID NO: 807288 - DNA, 120 bp, Artificial Sequence
  ENSG00000224924_152 (sequence is synthesized)
agaaggagcaaaaaatcctgcatcagattgattctggacattataataaatttgaattgatagtatataaagaataagttgggatatagaagagataagcttagaacgcatgggtaggta

SEQ ID NO: 807289 - DNA, 120 bp, Artificial Sequence
  ENSG00000224924_153 (sequence is synthesized)
caactcatgattggtttgcaacataacgttgtagaactcaaaatcaactatgtaagatgcagggataaatatagcttttactgttcaaaatgtaacctttttagcaatgacatggtttta

SEQ ID NO: 807290 - DNA, 120 bp, Artificial Sequence
  ENSG00000224924_154 (sequence is synthesized)
tggttttagggtttatattaatcattgataggtttttattaattcaatgagagtaaaggtacttactagtaatttcattgaaaaatgacagtatttaagaatctaagaaactttaagata

SEQ ID NO: 807291 - DNA, 120 bp, Artificial Sequence
  ENSG00000224924_155 (sequence is synthesized)
tctggtatgtgagaattggaggattttttaaaaataagaaatatatattagtgacctctatgtgatcaaaagttaaacaggttcaagaagctccaaactgagccagagttgtttaaaaat

SEQ ID NO: 807292 - DNA, 120 bp, Artificial Sequence
  ENSG00000224924_156 (sequence is synthesized)
ttccaaatagctcttcaattcatgagcttatcccccaaaccttaccgataagctatcagttttggggcaaaagttttctcttagttcaaacagttacacttgaatctaaagtgcatatac

SEQ ID NO: 807293 - DNA, 120 bp, Artificial Sequence
  ENSG00000224924_157 (sequence is synthesized)
aagagaaaagaaaatacaagaaaacagacagaagatcctatctgcgacaattaagagcactctaagaggaaaacacatcccaccacatatatttcagagactacaacacatttattttcc

SEQ ID NO: 807294 - DNA, 120 bp, Artificial Sequence
  ENSG00000224924_158 (sequence is synthesized)
atgaggatttatcagttgtattccagtcatgttggtggatgagctcaatatccctgaaggagttctgcttacacatggaggaccagttgcttctcaaatattctgcaaggcaaggtactt

SEQ ID NO: 807295 - DNA, 120 bp, Artificial Sequence
  ENSG00000265579_0 (sequence is synthesized)
atttaacacacagcagcttcatgggaaaacaactgtattttaaatgaagaacaggcctcctcagtgataactctaaaatttctcaacaatgtacagacacagactaatcatgaaagaaga

SEQ ID NO: 807296 - DNA, 120 bp, Artificial Sequence
  ENSG00000265579_1 (sequence is synthesized)
taatgacgatgctgggcagtgtctggaggtagccttttctcctggcattcactctagatgctcaaacttgggagtgcagcgctctggcagagttgggagatgttctctggagggctctgg

SEQ ID NO: 807297 - DNA, 120 bp, Artificial Sequence
  ENSG00000265579_2 (sequence is synthesized)
cggtgcttatttatcagccagtattgaaatttgtcaatatatcaaaaacgatttagtagctatatcagaccttatcacctgaatgcagcctttggcccacattctaaaggtggtgacaca

SEQ ID NO: 807298 - DNA, 120 bp, Artificial Sequence
  ENSG00000265579_3 (sequence is synthesized)
catagataaggaatgagatgtctcaagacttataagacatgttattttaataaatgattatattttttgataaagtgaattcaaatattaccaacccaagtgctttattgatttaacaag

SEQ ID NO: 807299 - DNA, 120 bp, Artificial Sequence
  ENSG00000265579_4 (sequence is synthesized)
atgatttcaaataatgcattaagttagcctgctgtgttaatttcataaagctattctttttcattttattttttcaagttttcattcacttttcaaaataatggtagcatataatcacat

SEQ ID NO: 807300 - DNA, 120 bp, Artificial Sequence
  ENSG00000265579_5 (sequence is synthesized)
gcaatgccaatgaatccccatattaagcttcgtacttctgtccaaatgtattgtagttgcctaatttcaaggttctaatttggaaatctgatttattttgtatgtttttatatacatacc

SEQ ID NO: 807301 - DNA, 120 bp, Artificial Sequence
  ENSG00000265579_6 (sequence is synthesized)
aattttaagcattatcttgcaaagtagacataggtggtgtttgatttgccataattaacttgaatttgattttgtaaccaaaatgtggctgtccacataattggagatcagtgtctttgg

SEQ ID NO: 807302 - DNA, 120 bp, Artificial Sequence
  ENSG00000265579_7 (sequence is synthesized)
gcttttaatggagaacaaatcacattgtggtgttgctggtttttctgtttcacatttacttttgctctagaagtatttccgtgagtctgatgactccataagttatgatcctcagtgtta

SEQ ID NO: 807303 - DNA, 120 bp, Artificial Sequence
  ENSG00000265579_8 (sequence is synthesized)
agtaacttagacggttggcattactttaatattcacttaagcttctgtatcatttttttctgtatttttcccttaggaatttaattcgggtcttcctcaaattttacagctttaaaaaaa

SEQ ID NO: 807304 - DNA, 120 bp, Artificial Sequence; identical to SEQ ID NO: 531588
  ENSG00000265579_9 (sequence is synthesized)

SEQ ID NO: 807305 - DNA, 120 bp, Artificial Sequence; identical to SEQ ID NO: 531589
  ENSG00000265579_10 (sequence is synthesized)

SEQ ID NO: 807306 - DNA, 120 bp, Artificial Sequence; identical to SEQ ID NO: 531590
  ENSG00000265579_11 (sequence is synthesized)

SEQ ID NO: 807307 - DNA, 120 bp, Artificial Sequence; identical to SEQ ID NO: 531591
  ENSG00000265579_12 (sequence is synthesized)

SEQ ID NO: 807308 - DNA, 120 bp, Artificial Sequence; identical to SEQ ID NO: 531592
  ENSG00000265579_13 (sequence is synthesized)

SEQ ID NO: 807309 - DNA, 120 bp, Artificial Sequence; identical to SEQ ID NO: 531593
  ENSG00000265579_14 (sequence is synthesized)

SEQ ID NO: 807310 - DNA, 120 bp, Artificial Sequence; identical to SEQ ID NO: 531594
  ENSG00000265579_15 (sequence is synthesized)

SEQ ID NO: 807311 - DNA, 120 bp, Artificial Sequence; identical to SEQ ID NO: 531595
  ENSG00000265579_16 (sequence is synthesized)

SEQ ID NO: 807312 - DNA, 120 bp, Artificial Sequence; identical to SEQ ID NO: 531596
  ENSG00000265579_17 (sequence is synthesized)

SEQ ID NO: 807313 - DNA, 120 bp, Artificial Sequence
  ENSG00000233693_0 (sequence is synthesized)
cttattaaaaatagaatattgcctacatcacataaagggcaaactccgccctcacttggtcacagaagcaattacagcattgtctgtagtacacagcccacggcctctaaccacagtgat

SEQ ID NO: 807314 - DNA, 120 bp, Artificial Sequence
  ENSG00000233693_1 (sequence is synthesized)
gggcacacttggtgatgtgcaactcagtggggcctacagggtcccagctgacatagacatcacaaaggaatttgaaccaggactcagaaatagggtctctgggtgctttaaaaaagctgt

SEQ ID NO: 807315 - DNA, 120 bp, Artificial Sequence
  ENSG00000233693_2 (sequence is synthesized)
ttaagagaaaaagcagaaagactgtagtgattgtcaagtgcaaggagttctgcattccagacaaacaaatgcagtgtgcagacaacagacagagcggcaagggaaccccctcagcacaag

SEQ ID NO: 807316 - DNA, 120 bp, Artificial Sequence
  ENSG00000233693_3 (sequence is synthesized)
gggacggcggcagataggcaaaaaggtaattactacatgtctgcctttcatgaaaggcagccaccctccttggtgtggcttggaacttcaattctggctaccaggatacagaggtggagg

SEQ ID NO: 807317 - DNA, 120 bp, Artificial Sequence
  ENSG00000233693_4 (sequence is synthesized)
aagagaaggctgaacaccacccccgtctcccaacacacaccctcgaggcaagaaagatatcaagttctcattttgttgcaagaaaactacattctccttttgataataagcaaaaaaata

SEQ ID NO: 807318 - DNA, 120 bp, Artificial Sequence
  ENSG00000233693_5 (sequence is synthesized)
cttctacatttttcaaatagtacctggtcggaactgttccaaacccagagaaaaaagcaataaacactgaaatcccctggcggtctctgagttgaagatgtaggcaggaagtattccata

SEQ ID NO: 807319 - DNA, 120 bp, Artificial Sequence
  ENSG00000233693_6 (sequence is synthesized)
tcttcaaggtttttagggagaagcaagaaaacggtagaggaagggtagaggaggcctcccaggaggcctgggagtgaagtgtacccatcctatgaaagctggaacctttaggaaacagaa

SEQ ID NO: 807320 - DNA, 120 bp, Artificial Sequence
  ENSG00000233693_7 (sequence is synthesized)
tcaggagaatgctgactttaaatttaaattaccttgctgaaaaggattggcccaacacaggacaagcagcagtctttggaatgaatgcatcttttactgacctatgcctctctttcagag

SEQ ID NO: 807321 - DNA, 120 bp, Artificial Sequence
  ENSG00000233693_8 (sequence is synthesized)
tatgtaattaacaccaatatttttactcacatctgagaaaggagaccaagggcatcaaaagacatggcagtgctgggacttggcttcagaaatgcactttgctcaaggaaattctctgag

SEQ ID NO: 807322 - DNA, 120 bp, Artificial Sequence
  ENSG00000233693_9 (sequence is synthesized)
ccgccagtacaaacagttagagacggtgatgcacttcaaaagttatagcagaaaatagagatgagccagtaagataactgcataattgcaccctataggagaagatccttaaggggaaaa

SEQ ID NO: 807323 - DNA, 120 bp, Artificial Sequence
  ENSG00000233693_10 (sequence is synthesized)
tgatggacccccatagatacagaacagctaaggcatcatgctgcaagacatcccagcaatgaaaactgaagaagagaatggcactagcctgcaatggtcaagaagggaaggaagtgttca

SEQ ID NO: 807324 - DNA, 120 bp, Artificial Sequence
  ENSG00000233693_11 (sequence is synthesized)
cccaagcgtgaggctgaggagttggagcacagaaggtgacactgattatgaagatttcccaacaaagagctggctacagtgaaaagagccctagttttcaactttcattttatctcacct

SEQ ID NO: 807325 - DNA, 120 bp, Artificial Sequence
  ENSG00000233693_12 (sequence is synthesized)
acattgtctatgctgacccacacatcaagcttcagaagtagatcctggatgcctattttttaggaaaataagttcaaagttacagcttacgcaagtgcagttcttcaatgtccatgctct

SEQ ID NO: 807326 - DNA, 120 bp, Artificial Sequence
  ENSG00000233693_13 (sequence is synthesized)
ttgcactaccctgggcttacaccaggaattcagataagcatggactgtctgcttatgtgcagggatgtactggtctcaagtcagttaccatctgaaagctaaaaaaagggagtcaaaagg

SEQ ID NO: 807327 - DNA, 120 bp, Artificial Sequence
  ENSG00000233693_14 (sequence is synthesized)
accacaaagatgaagccacttctgacaccaaaggaaatgtgtcttctgctcacctttgtaggggccaggaaagaaaatgtaccccaagtacagatccataatttggggccagagtctcat

SEQ ID NO: 807328 - DNA, 120 bp, Artificial Sequence
  ENSG00000233693_15 (sequence is synthesized)
ttgacccctgtgagattcttcatgatccactctaaagctttaagccaccaaattcgatgtatttataagggagtcaaaccacatcacatgtgcaagttcaaagaatctgatgttcgaatc

SEQ ID NO: 807329 - DNA, 120 bp, Artificial Sequence
  ENSG00000233699_0 (sequence is synthesized)
agaaaatagaagacatgagccacactgaagaaacatcaggcaaagcaccaggaataagctacaaaactctaaggatccaaaaaatctgcagaattcctcaggcatgcctagatgttgcag

SEQ ID NO: 807330 - DNA, 120 bp, Artificial Sequence
  ENSG00000233699_1 (sequence is synthesized)
gggtgaatatttttgaaacttggtctgctgtgatttctaggcacttaacatctctaggaggaacacctgcatcatcttgggatttcatcctgtgacaaggagtgtcagcagcaataagcc

SEQ ID NO: 807331 - DNA, 120 bp, Artificial Sequence
  ENSG00000233699_2 (sequence is synthesized)
tccaacaaggaaactcctgttctcccaattctattggaaggctgcatgattcctgtagcatgagaagaaggccgtcatgtctggcttcttactggtaatctagccactgtttcatttcaa

SEQ ID NO: 807332 - DNA, 120 bp, Artificial Sequence
  ENSG00000233699_3 (sequence is synthesized)
ctgcacagccttctttttgtggaggggtatgaaatccctaaggatacaaagggaccttcaggattccccaggcctgcctgatggatcccctgcaaagcccacgatgaagggaggcagtga

SEQ ID NO: 807333 - DNA, 120 bp, Artificial Sequence
  ENSG00000233699_4 (sequence is synthesized)
cgttaagagaccaggcgtcatttgctgacaatcacctctgtcatctcagggcttcatgattcctgtgggatgagaagcaggcagctacttctggctattgcctggcttgcaatcaccaca

SEQ ID NO: 807334 - DNA, 120 bp, Artificial Sequence
  ENSG00000233699_5 (sequence is synthesized)
gatgacctctgagaaaacttatgatcatcatctgtacctgtgagaccacagtttgatgtatggcaacactgctccactttggacatgcctttgtcgtggttcctgcctttcccagagagc

SEQ ID NO: 807335 - DNA, 120 bp, Artificial Sequence
  ENSG00000233699_6 (sequence is synthesized)
ggcagggtgacagctctgagagccaggagcccgagtctgtctcaagaacttgcacatgcctgtctcagagcaccaggcctgattgtgagctctggctagcgtcacagtgaatgtcatcat

SEQ ID NO: 807336 - DNA, 120 bp, Artificial Sequence
  ENSG00000233699_7 (sequence is synthesized)
tgcctagcgactgttcctccggcttggcagagaaggagacattcatgaagatgtgtcggcagtggactctcagttgtcttctctgtgggattctcggtatagtcccatgaacctagaaga

SEQ ID NO: 807337 - DNA, 120 bp, Artificial Sequence
  ENSG00000233699_8 (sequence is synthesized)
gggcagacttcgaccagcctgaaaaaaacttctagcacagaccaaggaataaacaatgaaatccctaaggatccagaagagtctgccggattcctcaggcctgcctaaactttgtagggg

SEQ ID NO: 807338 - DNA, 120 bp, Artificial Sequence
  ENSG00000233699_9 (sequence is synthesized)
agagtctttttgaaacttgcctcactgagattttgaggtgttgcccacctgtgtttcccatggtggctctctcccttgtgggacttcctgcagaacaacacagcctcagaagctactggg

SEQ ID NO: 807339 - DNA, 120 bp, Artificial Sequence
  ENSG00000233699_10 (sequence is synthesized)
ctctgtgttttgggggcagtgttgcaagtgttggatgtctgcttctgtgtgtggcagtgtgtctttgtgtgtgtgtgtgtgcctgtaagtggagtctgcttaacattttgtggctacctc

SEQ ID NO: 807340 - DNA, 120 bp, Artificial Sequence
  ENSG00000233699_11 (sequence is synthesized)
attccagtgcttctttttttttttttttttaaagtctcccaaccttttggtggccagtctatgttgctgtgcttgggttgcaggactccatattctttaattttctgtggatcatgaatt

SEQ ID NO: 807341 - DNA, 120 bp, Artificial Sequence
  ENSG00000233699_12 (sequence is synthesized)
caaactgaattgggaggtaggcagagatgagccagcgtccaaatcacctttccctgcaaaaaaactactcttcttaaaataaataaataaataaataaggagcacactacttcaaaagaa

SEQ ID NO: 807342 - DNA, 120 bp, Artificial Sequence
  ENSG00000232124_0 (sequence is synthesized)
ccgcacttctctgggctccaacaggatgtggttgcatcatctcctggaggaacggatttgccttgaaacgcaggaggcagagcgggcctgggagaaggaggttgtttccacgccttcctg

SEQ ID NO: 807343 - DNA, 120 bp, Artificial Sequence
  ENSG00000232124_1 (sequence is synthesized)
ggggagaggctggtgcagtcgtgagagtcaaccgggagctcggaggaggagcagacaggacgtgggagagctcgggagagacccaggctgggcgtcttgcagctcagacccttggccacc

SEQ ID NO: 807344 - DNA, 120 bp, Artificial Sequence
  ENSG00000232124_2 (sequence is synthesized)
caagcagcgtagccggcatcacagcccacggcgtgaggccaccaagacagacagaggaggctacaactgaaaacaccagtcatattaccaaggctgtgaccgaaatcgtgtctctgagaa

SEQ ID NO: 807345 - DNA, 88 bp, Artificial Sequence
  ENSG00000232124_3 (sequence is synthesized)
catattaccaaggctgtgaccgaaatcgtgtctctgagaatgtgcctcaagcgttccaagcctggccggccgcgctggctcacgccta

SEQ ID NO: 807346 - DNA, 120 bp, Artificial Sequence
  ENSG00000232124_4 (sequence is synthesized)
cattgcgctccagcctgggcaacaagatcaaaactccatcccccctccaaataaaaagaaagttcccagccttacagcgagagtaaataaaaactgtcaccatctggcaggcccaggaac

SEQ ID NO: 807347 - DNA, 120 bp, Artificial Sequence
  ENSG00000232124_5 (sequence is synthesized)
ttagcctcaagaggccattaaatctgagattcccatctgatcaacatagggagaaaagcttatgtttctaaagaaaagctgtaggcctgggtgcagtgcctcacgcctgtaatcccaaca

SEQ ID NO: 807348 - DNA, 120 bp, Artificial Sequence
  ENSG00000232124_6 (sequence is synthesized)
aggagttcgagaccagcctgggcaaaatagagagacccttatctctatactttttgaaaaaggaaaagaaaagctataatacatctgttaggagattgtagctctgggcattgtatttga

SEQ ID NO: 807349 - DNA, 120 bp, Artificial Sequence
  ENSG00000232124_7 (sequence is synthesized)
tgtagctctgggcattgtatttgagctcttatatctacctacagactagactagatcctaaattcttctagattccttcagtcaaaatttcttccatggaattactaaaaataaaaactg

SEQ ID NO: 807350 - DNA, 120 bp, Artificial Sequence
  ENSG00000232124_8 (sequence is synthesized)
ctctgttcctaaatccctataaactgaaactagatgaattttaaggaacaagtctcatatctgacatatgggccccacaggagttcaccaaaccatccaatgccataaccacagacattt

SEQ ID NO: 807351 - DNA, 120 bp, Artificial Sequence
  ENSG00000232124_9 (sequence is synthesized)
cacctgcaaaccaggcagagaagctggcgttttcacactgtagccagggcttccagttcatcgggacgagattctgtatcagagacgccctccctcttaccgtctacctgctcgtgccac

SEQ ID NO: 807352 - DNA, 120 bp, Artificial Sequence
  ENSG00000232124_10 (sequence is synthesized)
aggatcatggtcatttagttcattcaactggtgatcttaagcctaggtttgtagctcaaaactgttatgcaaactgggattttcatattactattaattttactttgtattttccctttt

SEQ ID NO: 807353 - DNA, 120 bp, Artificial Sequence
  ENSG00000232124_11 (sequence is synthesized)
taaactttgtgcctgttacttgttaaatttctgcagatgtacacctcctaactgaacaatgctggaccggctctttgagatgatagcaaagactatgaaacaaataaaactgaaattaat

SEQ ID NO: 807354 - DNA, 120 bp, Artificial Sequence
  ENSG00000232124_12 (sequence is synthesized)
cggccgggtggtcctcctgggtgcctcaggggcccggggagcatgggtcagggcgagtggctgctccctggcctcaggttatctgggtgcccggtgagtgaggcatggcaggcgataccg

SEQ ID NO: 807355 - DNA, 120 bp, Artificial Sequence
  ENSG00000232124_13 (sequence is synthesized)
gaccccacccaccgcgtatacctctggaatagcgattgccatgattgatgtcagtagcctgggctgggagcctgcaggtaatcagaactgcgaagatgattgggtcacagccaggagact

SEQ ID NO: 807356 - DNA, 120 bp, Artificial Sequence
  ENSG00000232124_14 (sequence is synthesized)
aaatgaacgcgcgttcaagatttccttcaactcattgttagcgcagaaaccggtaagatgtgccagccaggtcaaaggagaagtgacaaaggcacctgtgtacgcggagtaaagggatac

SEQ ID NO: 807357 - DNA, 120 bp, Artificial Sequence
  ENSG00000232124_15 (sequence is synthesized)
cactttgggaggctgaggagttcaccaaaccatccaatgccataaccacagacatttcacctgcaaaccaggcagagaagctggcgttttcacactgtagccagggcttccagttcatcg

SEQ ID NO: 807358 - DNA, 120 bp, Artificial Sequence
  ENSG00000238186_0 (sequence is synthesized)
agatgtccaggatttaccagctcatgtataacatggaatcatactaacaacattcaccatgttctgttggctcttaatgttccagttaatacagaaactctacccctgccaattgccctc

SEQ ID NO: 807359 - DNA, 120 bp, Artificial Sequence
  ENSG00000238186_1 (sequence is synthesized)
cccatgcattgacttctgcaaattctccagtagtgtcacaagcaagtccttatcttccaggcttggaataacacgtacacaactatatatggtggtcatctttgaaggactgcagttatg

SEQ ID NO: 807360 - DNA, 120 bp, Artificial Sequence
  ENSG00000238186_2 (sequence is synthesized)
atcaagataaaaatagggatgacttatcagaaactgaagaattttcttaggaaagcaaagtttactgaaggataccttcattccagccatgatgagcatctgtcttctcaggcaatcatg

SEQ ID NO: 807361 - DNA, 120 bp, Artificial Sequence
  ENSG00000238186_3 (sequence is synthesized)
atgaagctccagggacagtataacccatctctcccactcatccctgagccttggtcctggactgaatgtggttagaggttgtggaaataaaaaaaagaaccaaaataagaacactctcca

SEQ ID NO: 807362 - DNA, 120 bp, Artificial Sequence
  ENSG00000203620_0 (sequence is synthesized)
attggatctttcattctgtcacgttcttggggccccacaactccatggacagaaagtgagcaccacgaagacaggtcttgttggatattctctttgtccctttctgattccccagtgccc

SEQ ID NO: 807363 - DNA, 120 bp, Artificial Sequence
  ENSG00000203620_1 (sequence is synthesized)
gcccagagcaagagacaaggtcttgctatgctgcccaagctggtctcaaattcctggcctcaagcggtcctcccatcttggcctccagaagcattgggattacaggtgtgagccaccatg

SEQ ID NO: 807364 - DNA, 120 bp, Artificial Sequence
  ENSG00000203620_2 (sequence is synthesized)
gccaaaaaatgtctttgctattttgattggaatcacattaaatttgtagatgactccgaagagaaatgacatctttatagtactgaatttttccacccaggagcatggcaagtctctccg

SEQ ID NO: 807365 - DNA, 120 bp, Artificial Sequence
  ENSG00000203620_3 (sequence is synthesized)
ttgattcagatcgccttttatgaccttcagtaaagtttcataattttattcatttcagcttattcctagatttgtgatggcttgtgttgccactgggaatggaattctgagtatggccca

SEQ ID NO: 807366 - DNA, 120 bp, Artificial Sequence
  ENSG00000203620_4 (sequence is synthesized)
gggactgttgctcagttctatccccagcccagcctctgggatgcatgactggctccaaaagacgcctgggacaggaagtaccagctgcaagagtcattcactgttgcaagctttggcaat

SEQ ID NO: 807367 - DNA, 120 bp, Artificial Sequence
  ENSG00000203620_5 (sequence is synthesized)
aggaagcaggtggatccaagttagaggtttggcagccagagggaggagagaggctgggatgagctgaaggagctggcaaggtcaagaggagggaccttcaggatgaggggaaccagagct

SEQ ID NO: 807368 - DNA, 120 bp, Artificial Sequence
  ENSG00000203620_6 (sequence is synthesized)
tgtaatcaaatgggtcagaaagagggagaatctgaaatgctggagatcagggctgatgctcagaatgaatactgatgtagctcaaatgcctctatcacgctgtagaacagattgtggctt

SEQ ID NO: 807369 - DNA, 120 bp, Artificial Sequence
  ENSG00000203620_7 (sequence is synthesized)
tggagctaggagatgagagtttgaaccctgaccctgtcactaactgtttaagtcacttagtttctaggaaacccagtctcctcaccagcaaaataagggtgaattctaattatatgttta

SEQ ID NO: 807370 - DNA, 120 bp, Artificial Sequence
  ENSG00000203620_8 (sequence is synthesized)
attgtttaattatgtgtctgtcttgcactggactggagctccacaagggcagggaccatgtgggtttaattcattaatgtgcagggctgcagccagcgcatgcagtgcttttgagggaat

SEQ ID NO: 807371 - DNA, 120 bp, Artificial Sequence
  ENSG00000203620_9 (sequence is synthesized)
gtgtgcccttgtgccaggaacagcctgccctggtgttcagtgcttagcacaggctggcaccggggaagtgctcacacaatgtattgagtaaatagatgattagatgtggtggttgagaga

SEQ ID NO: 807372 - DNA, 120 bp, Artificial Sequence
  ENSG00000203620_10 (sequence is synthesized)
gagagagagagagagagagagagaggagccaggtatttctgggagcccttgagggcttctcacttatgctcagaaagaagtcctctgcttccaggtgctgattaacatggaattttccaa

SEQ ID NO: 807373 - DNA, 120 bp, Artificial Sequence
  ENSG00000203620_11 (sequence is synthesized)
ttttccaagtgcttcatttcatgtatttctgcaagggccagagatggtgtccactagtcccaaggctgcgacaggaatggactagtctgatgacctgatacgatagacccccatttgcac

SEQ ID NO: 807374 - DNA, 120 bp, Artificial Sequence
  ENSG00000203620_12 (sequence is synthesized)
aaggcctggggagcctccatgaagcattctgcctagggaaggtgggaccctgacttggtaacaaagccttgagcaacccaaggaaatgctacccaagtgccaacccaaggaagagcagag

SEQ ID NO: 807375 - DNA, 120 bp, Artificial Sequence
  ENSG00000203620_13 (sequence is synthesized)
aagaacattctaggcagggggataaagatccaaaagccctgctgctgcacagaggtggctcggccctttggagagctgagcgttggccagtgtggctgggcctccaggcatcgcttcata

SEQ ID NO: 807376 - DNA, 120 bp, Artificial Sequence
  ENSG00000203620_14 (sequence is synthesized)
ggaccttctttcatttggtggcctttgggatttcctgcaactgtcctcttctttgtgaactttatgaagttcgcataactgagacatacctaccgcacctctgtatctgccaacgcatac

SEQ ID NO: 807377 - DNA, 120 bp, Artificial Sequence
  ENSG00000203620_15 (sequence is synthesized)
acctctgtatctgccaacgcatactccagctctttgcacggggccagcccagaggttgatagagtcatcccacgaaacagattaagaatcccagctccggccgggcgcggtggctcacgc

SEQ ID NO: 807378 - DNA, 120 bp, Artificial Sequence
  ENSG00000238185_0 (sequence is synthesized)
agaggactttttgtgtccagacagatggcaatactcatccgtatgttgtctgccccagggcaagtgtcacagtgagtacgaataaagcgatcaataatttgtctatctgaaaagtatgaa

SEQ ID NO: 807379 - DNA, 120 bp, Artificial Sequence
  ENSG00000238185_1 (sequence is synthesized)
agacccttcatgcaccttcccagtcaacactccctacttcaagacagccactgttctggtttctttcatcaaagataagttttcccagttgtagaccttcaaataaatgaaatcatacag

SEQ ID NO: 807380 - DNA, 120 bp, Artificial Sequence
  ENSG00000238189_0 (sequence is synthesized)
tcactggtaagctggtcacctggaagcaacgcatcagttagccactgaaaaggggtaatatttattgacatactttggaaaagactggatgagttgctctgcgacttcccactctaacat

SEQ ID NO: 807381 - DNA, 120 bp, Artificial Sequence
  ENSG00000238189_1 (sequence is synthesized)
atgtttctctgagtttctacaacttcagctaaatgttttaaggaagaaaagaacaacagaatatgtgctaattttgattgattgatgctccctcctatagcagcatacaaattttagagt

SEQ ID NO: 807382 - DNA, 120 bp, Artificial Sequence
  ENSG00000238189_2 (sequence is synthesized)
atctattacgatttcaatgaaatgagctattttatcttgtccctatgtggtaccatcaacattttagacagatgaacaccaaaccattgactgaattgctgcatagtggatttgccttga

SEQ ID NO: 807383 - DNA, 120 bp, Artificial Sequence
  ENSG00000238189_3 (sequence is synthesized)
ttataaagacagttgaatgaccagggtacctctggcaattttggcaatcaataagtaacatgaatcaactatgtagtggtcagactggctacccagtgctcaatcaaaacagaaaataac

SEQ ID NO: 807384 - DNA, 120 bp, Artificial Sequence
  ENSG00000238189_4 (sequence is synthesized)
agagataagttaatccttaggttgcaggactataccatgataccagcataaaactcaaatggacattcatgatgaaaaaatgttaatgctatcattatacaataaactgctaaaagtatt

SEQ ID NO: 807385 - DNA, 120 bp, Artificial Sequence
  ENSG00000223652_0 (sequence is synthesized)
gggctgctgcgcttggccgctgccgcgtcctggctccttggttccacgctctggcagcttcccggctggacacgtgggttttacgacagcacaaaatagattttctgaacctgggaaacg

SEQ ID NO: 807386 - DNA, 120 bp, Artificial Sequence
  ENSG00000223652_1 (sequence is synthesized)
tgctgttcagacttcatccgggtctcattcaggatgcttcgatgttggttggaagagagttagaccgaaaatgttttgactggcgtcgttatgacaaggtcatccgtcattgttggatag

SEQ ID NO: 807387 - DNA, 120 bp, Artificial Sequence
  ENSG00000223652_2 (sequence is synthesized)
attgatagcacccaagtttaaggcagacaccacgagggaaagcccacggcgctgtggtcccggaggctaaccaggcagtgtccgcagacctccagcaactccatcgggaggagaggatga

SEQ ID NO: 807388 - DNA, 120 bp, Artificial Sequence
  ENSG00000223652_3 (sequence is synthesized)
aacaaatgctctttctcacactctcctggttcattgctgagaaaccaggacactcctctgttccctgggagagacagtgaactccagggatggaagtccggactccggcggcggtcccgt

SEQ ID NO: 807389 - DNA, 120 bp, Artificial Sequence
  ENSG00000223652_4 (sequence is synthesized)
catttgccttcttgtttctgcccaaacccagctagttccaagcgcttggtccccaagactggaagtccccaagaacctacctctacctgtcccaaccctgcctcccccctaccctttcac

SEQ ID NO: 807390 - DNA, 120 bp, Artificial Sequence
  ENSG00000223652_5 (sequence is synthesized)
cccctgccaccattagaaagtctctggattttgaaatgctagttgcagcagctgcttccgtggcctcatgccgcccacactctgggaagcggaggagggagggttcctctcgtaataaga

SEQ ID NO: 807391 - DNA, 120 bp, Artificial Sequence
  ENSG00000223652_6 (sequence is synthesized)
ggaggaggcggaggaggcggaggtggaagaggaagccggcgtggacgaggcggaggagagagaggcgggccgcgggcgcaggctgtccggcggaggctcagcgcgctccgggggcggggg

SEQ ID NO: 807392 - DNA, 120 bp, Artificial Sequence
  ENSG00000223652_7 (sequence is synthesized)
cggcggcggcggctgaagaggctgcggcgcgctcaggagacccgcggcgccgctgcccttgagcgggcctgcgcctccgtgagggaagagttgctgccagtgctgcagttttctgaacct

SEQ ID NO: 807393 - DNA, 120 bp, Artificial Sequence
  ENSG00000223653_0 (sequence is synthesized)
gaccgtattttaactactatggcgctgtgtaagaagcaacctgagaagtgtggatgaaaagctacagcttccctgctgaaataccttagtgagaatgcataaaaaccaactctaaatgat

SEQ ID NO: 807394 - DNA, 120 bp, Artificial Sequence
  ENSG00000223653_1 (sequence is synthesized)
gctgcatccctaaattcatcccttattttaattaacccaaggatgacatggaggccttggagaccctatacagtgctgtgtgttcagcagtaaatatccacccattgtagtcaggagcca

SEQ ID NO: 807395 - DNA, 120 bp, Artificial Sequence
  ENSG00000223653_2 (sequence is synthesized)
gcatcttcatcatcctttcttgttagaacaaacttgtccaacccatggcccatgggccacatgtggcctaggacggctttgaatgcggcccaacacaaatttgtaaagtttcttaaaaca

SEQ ID NO: 807396 - DNA, 120 bp, Artificial Sequence
  ENSG00000223653_3 (sequence is synthesized)
ggagctcgggctgcgccgccccgccctggctgggggcttcggcctccgggtaatggggaagaaggagaggaggcggagcgggtcgggagaaagacggccgccccttcgggaacagaggga

SEQ ID NO: 807397 - DNA, 120 bp, Artificial Sequence
  ENSG00000223653_4 (sequence is synthesized)
ctcgggggtcaaaccgtagcgcttccggccccgcctctgaggtcgacggcgacgcgaatctacgcgacgcgacgcggagctcggagcagcgttccttccctctcgtagaggctcaggcgc

SEQ ID NO: 807398 - DNA, 120 bp, Artificial Sequence
  ENSG00000223653_5 (sequence is synthesized)
aggcaccgccccacggcgaggcgcgtcgcttagcagagcccgccctgtctctgcggcagcctatcgacgccagcccgcgggccgatcctgttcccgcccccgaccggagcctttcgggtg

SEQ ID NO: 807399 - DNA, 120 bp, Artificial Sequence
  ENSG00000223653_6 (sequence is synthesized)
ttttaactactatggcgctgtgtaagaagcaacctgagaagtgtggatgaaaagctacagattggtaccctgtattaaatgtgttgtggtggccaggcctgtaatcccagcactttggga

SEQ ID NO: 807400 - DNA, 74 bp, Artificial Sequence
  ENSG00000223653_7 (sequence is synthesized)
caatgaatcaatgaatgagtggatgaatgaatttatgtgttctgggctttttagctgagaattgctaaactctt

SEQ ID NO: 807401 - DNA, 120 bp, Artificial Sequence
  ENSG00000223653_8 (sequence is synthesized)
atgtgttctgggctttttagctgagaattgctaaactcttcctagatggatgatttcatttaaatatacaatgcacacactattaactctactataatctcaaatggcaagatgatgatc

SEQ ID NO: 807402 - DNA, 120 bp, Artificial Sequence
  ENSG00000223653_9 (sequence is synthesized)
tccataagaatccacttcattaaccaagagtagattgcaacccattacaaagtatttcaaatgcaataaaactacccagaaacccttggggctctcagctttacctaaacatgtaagaag

SEQ ID NO: 807403 - DNA, 120 bp, Artificial Sequence
  ENSG00000223653_10 (sequence is synthesized)
tagattctgaaggaaccaagtactcagagagcagtgacagaggtgagaagtaatcaagctttcggtgtgtagcacaggaaggcacaattcacctctgtttaagtaatatgccctttaaag

SEQ ID NO: 807404 - DNA, 120 bp, Artificial Sequence
  ENSG00000223653_11 (sequence is synthesized)
agatgcccaagtgaccagggacttctctacagaggaaagaactgagacatcaaggtttacaagggaaaaaataaatatctggtaccaaactcacacctatcctgagactgctcagatcct

SEQ ID NO: 807405 - DNA, 120 bp, Artificial Sequence
  ENSG00000223653_12 (sequence is synthesized)
ggtggaaagacacggaaggagcagacaagctcggctagaaccaatctatggcaaaataattagaaaaggttttctaattaaaaaagaagattcagtatggagtaggttgggcaactgggg

SEQ ID NO: 807406 - DNA, 120 bp, Artificial Sequence
  ENSG00000223653_13 (sequence is synthesized)
ccaggggaatcagggcccaggaaacttgtttctggaactgtaagatcccactcaaaatgattatttcatcaggtctcagtattttgaactgtaaaatgggaaaaacaaagccaataccac

SEQ ID NO: 807407 - DNA, 120 bp, Artificial Sequence
  ENSG00000223653_14 (sequence is synthesized)
ttttatcacttataagtgatatatttgtctctattcatctgtcttcctgcctgtctataataacatggagtatttatatttctatgttagttagcaattaataattgccccattagatct

SEQ ID NO: 807408 - DNA, 77 bp, Artificial Sequence
  ENSG00000223653_15 (sequence is synthesized)
tcacacaccggggcctgtcgtgggaaaataacgagttaataggtgcagcataccaacatggcacatgtatacatata

SEQ ID NO: 807409 - DNA, 120 bp, Artificial Sequence
  ENSG00000223653_16 (sequence is synthesized)
agccaccgagagtgacattcacaatgagcatttacccagcattttgtgctggcatcttccaggatgtacaagcatcccaacatagtctcagattcttggtccctggcactggcagagctg

SEQ ID NO: 807410 - DNA, 120 bp, Artificial Sequence
  ENSG00000223653_17 (sequence is synthesized)
aaatggtcatattcccactggcctctggttacatgatccatgctgccttctgtagtcacatattatttgtgataacaaacaagactggactggatcctgaattcttttagtgcactacct

SEQ ID NO: 807411 - DNA, 120 bp, Artificial Sequence
  ENSG00000223653_18 (sequence is synthesized)
ccagtatctagcttcaactcttcaactaagagcaaaaatgctaagctggacaacttgatagaaatttcaagggacaagtctcatgtgtgatgtgcgtgccatacagagagttcaccagaa

SEQ ID NO: 807412 - DNA, 120 bp, Artificial Sequence
  ENSG00000223653_19 (sequence is synthesized)
tatctaacgccacaaccagggacattcaaactgcaaaccaggttgagaatttgctaactgcatgccgtggacagcttttcccaaggccatcagacgaagacttcttatgatattcttacc

SEQ ID NO: 807413 - DNA, 120 bp, Artificial Sequence
  ENSG00000223653_20 (sequence is synthesized)
cctcttaatttttccttgcttatgcctacttctttcgcttggcagaataaggctatggttaaagtttcacaatccttagtttttgtgagtaatctgacagcatgttgaatctgttatgtc

SEQ ID NO: 807414 - DNA, 120 bp, Artificial Sequence
  ENSG00000223653_21 (sequence is synthesized)
aaatctgaatctttaaaaaacctgagatcctttagtccacctagtgggtaacttcagcaacatccctaatatccctaatgcaactgtttgttcaaattgtactagtgatctcttttatag

SEQ ID NO: 807415 - DNA, 120 bp, Artificial Sequence
  ENSG00000223653_22 (sequence is synthesized)
ttcctggaatgctatatgatagaattgctaccgactaaatgaatagggagaaatctgtgcaattgctaatacttcttgttacccatagatataatgagtatccggcctggctcattcttt

SEQ ID NO: 807416 - DNA, 120 bp, Artificial Sequence
  ENSG00000223653_23 (sequence is synthesized)
gatctatttaatttcagttggtttagtttatggggatcctagataaaggagcatactccaaactcctggcattatccttttgatagtcataatagtagtttctctggtacactatatcct

SEQ ID NO: 807417 - DNA, 120 bp, Artificial Sequence
  ENSG00000223653_24 (sequence is synthesized)
ctcgaaaagttttaaaggttgcacacagccattcatcaaacaccaaagagtctcttttctgctggaatgacaaaaactcaaataaatgcatgatgatgagtacaccataacctatgaatg

SEQ ID NO: 807418 - DNA, 120 bp, Artificial Sequence
  ENSG00000223653_25 (sequence is synthesized)
acttgtagagaccagaaacccagcatgataataagagtagcattaatgcccttagttttggtcatgcactcacccaggtgaaagcatgactgaaaggggaaaattgttaaatacaaaata

SEQ ID NO: 807419 - DNA, 120 bp, Artificial Sequence
  ENSG00000223653_26 (sequence is synthesized)
taggaggccattgttttggactaagcttctgcactaggccccacagctcctgcattaggccccaacagatttgactaaaaatcaaaatggagttatccatgctgaagttccacatcacca

SEQ ID NO: 807420 - DNA, 120 bp, Artificial Sequence
  ENSG00000223653_27 (sequence is synthesized)
aactgaaactaagttgttatataacattccaagaaagcaggagagagagatagcagccaatttcccaaataggccaatttcaatcttcaatcagtaggataatagtttcctctgttttaa

SEQ ID NO: 807421 - DNA, 120 bp, Artificial Sequence
  ENSG00000223653_28 (sequence is synthesized)
tccttaaaagtaacctgatgctaaccaatctttctatttttctgcctccctgtccctgcctttcaaggaaagtaactttgaaataatcaatctgttttttgttcttcatttttgctttcc

SEQ ID NO: 807422 - DNA, 120 bp, Artificial Sequence
  ENSG00000223653_29 (sequence is synthesized)
ttagccctttctgtctataaaaccaaccccttctgttcaactcactggcaaatttattgtattttatggcataaaatgttgcctgattctagaattgcaataaagccaaccgtgatcttt

SEQ ID NO: 807423 - DNA, 120 bp, Artificial Sequence
  ENSG00000270638_0 (sequence is synthesized)
cggccgcagcgattgggcggtggtgtgggagccccgggcaccggggagaacacgtgctgttctgcgccttctttgggatgcatcacgcggctcccgagcccagacttcgtccaggccggc

SEQ ID NO: 807424 - DNA, 120 bp, Artificial Sequence
  ENSG00000270638_1 (sequence is synthesized)
gggaaggggtcagcggagccgctagctgcctctttgtgccccgcaaccccgcgggcggttgatttccacctgtgggcgctggggacacgcgaccggaagaaatggaagagaaaacggggt

SEQ ID NO: 807425 - DNA, 120 bp, Artificial Sequence
  ENSG00000270638_2 (sequence is synthesized)
tcggggagggaggaaaacttctaagccaggcgatcgtccagttctctctccaagagactggaaattaactttatgaggatcataaggaagggaatgacctctagacagccgccttctaat

SEQ ID NO: 807426 - DNA, 120 bp, Artificial Sequence
  ENSG00000270638_3 (sequence is synthesized)
tgtgaaacgggggaagatcttggacctggtctctggagcgctccctatcttaaccaagtcacttactctagcaggtctcaggttctttgtctgtaaaatgagggtgtaaaataatgatct

SEQ ID NO: 807427 - DNA, 120 bp, Artificial Sequence
  ENSG00000270638_4 (sequence is synthesized)
ttctagaccctacgagctctgaaggatctctgattggtggagatcacccaagacccggagctgatgcaaaacattacctaccattcccttgtctgaaaagccacatcaactttctttttt

SEQ ID NO: 807428 - DNA, 120 bp, Artificial Sequence
  ENSG00000270638_5 (sequence is synthesized)
caaaaactatatttttagtatgtgtaaagtaagtttggagtaaatactttcaagtccttttcaaggtcaaaacaaaaactaattctgtgactacaaatgtatgctttttttttttttttt

SEQ ID NO: 807429 - DNA, 120 bp, Artificial Sequence
  ENSG00000270638_6 (sequence is synthesized)
aagtcagcattattttttcaacttaaaacctttttgggttttaagttgaaacaggttttttagctgtctggcccaaatccaaaatacgtatatcttggtggggaacttcaatttgtctct

SEQ ID NO: 807430 - DNA, 120 bp, Artificial Sequence
  ENSG00000270638_7 (sequence is synthesized)
gccataagacaaacgaatgtcctgatactttttgattctttaacaaaattatccttgtattcttaggtttatatattcactaacatttaacataacacaaatctgttacgtgaattaaag

SEQ ID NO: 807431 - DNA, 120 bp, Artificial Sequence
  ENSG00000270638_8 (sequence is synthesized)
acacacaaaggcatttttaccagtgtttggaagtttgtgaatagtaaaggggaacaggccaaaatttcatgcgttgaggatataagtaaaacagaaagtgcaaaaatgtaaactacacaa

SEQ ID NO: 807432 - DNA, 120 bp, Artificial Sequence
  ENSG00000270638_9 (sequence is synthesized)
actcaatctcttgtggaacaattagaaaactaataatacattttactcttgaatgttgatattccactcgaagtttggttggttgctaagcttaaggataaacactatgaaaaatgtgaa

SEQ ID NO: 807433 - DNA, 120 bp, Artificial Sequence
  ENSG00000270638_10 (sequence is synthesized)
gacagaagggctggccaaacacagctgattcggcagcaaatcacacattaaatcacagtggcatgtgagtcggtttattcaaattgctgttaaaagatattcttagagtaagtttaggaa

SEQ ID NO: 807434 - DNA, 120 bp, Artificial Sequence
  ENSG00000270638_11 (sequence is synthesized)
aataagagtcatttggcgatgcagagaggattttgtctacagtggaatccagactccggtgaaagttctcattccttcaggacctgggagctaacagctccggactttcttgtgctccac

SEQ ID NO: 807435 - DNA, 120 bp, Artificial Sequence
  ENSG00000270638_12 (sequence is synthesized)
tgtgctgcctatgttgtgtgcttcccaaatggcattattcccaccagctcttccagagtgagttctgcccattctgtagaagaaacagtagcggaaaaattaaacaatatctttgctcaa

SEQ ID NO: 807436 - DNA, 120 bp, Artificial Sequence
  ENSG00000269303_0 (sequence is synthesized)
acagagaagggaaagcagaggggcagagagacagagaaggaaacaaagagactttattaaaaccaaacatcgtggaggcagctgcctgcccgcagaggtcagagtcaggtggtgtcctgg

SEQ ID NO: 807437 - DNA, 120 bp, Artificial Sequence
  ENSG00000269303_1 (sequence is synthesized)
tgtcctggactcctggcccaaccacacagaaatgcgagtcccacctcacagctccggggctgtggctccccagcgctctccagggtcaggcgcgttgggtcacgcctgtaatcccagcac

SEQ ID NO: 807438 - DNA, 120 bp, Artificial Sequence
  ENSG00000269300_0 (sequence is synthesized)
tcttctccctggcttctgagctcagccctcaatgcttgtctccttaggccattcccaggtccagtgcacagtaccacagagcagctgccttttctcactcagactgggagctcctgtgat

SEQ ID NO: 807439 - DNA, 120 bp, Artificial Sequence
  ENSG00000269300_1 (sequence is synthesized)
cttatttccctcaatctccaggggatcatgggcccgtgacatggcagaaagcagagaaatacttgcccagcagaactccagccaggcgtgacttcaatcatccacctgctccaggggaca

SEQ ID NO: 807440 - DNA, 120 bp, Artificial Sequence
  ENSG00000269300_2 (sequence is synthesized)
caccaacgtgtagagaaccctcagcctgcagggcgatcccacaggtcagcatggcttcccactcgtcaaacctcctctcctctctttaaacttcacacctcctcccctgtcccctctgtg

SEQ ID NO: 807441 - DNA, 120 bp, Artificial Sequence
  ENSG00000269300_3 (sequence is synthesized)
gtaactgcttcctaacgagcccttgacgatcccagcctcccggtgctcacaccctgtgtaggcccgacgcacacacggaattagagctgacctgtgtgaccagcagaatatggctgagga

SEQ ID NO: 807442 - DNA, 120 bp, Artificial Sequence
  ENSG00000236800_0 (sequence is synthesized)
accccagccctgcggagagagatgctttctgctcatgcacctcagtttggcccagtgaacacctgcaccacccaagtgccgtggggtgggatctggccggtgatggtgatcaggtgactg

SEQ ID NO: 807443 - DNA, 120 bp, Artificial Sequence
  ENSG00000236800_1 (sequence is synthesized)
ttcacagggagagaccacagagctgggctcccagtggacccacagagaatcctgtgcagctcatttccccaaaagcttctgagccccagcatctgtgtgctattcctgagtggaaagacc

SEQ ID NO: 807444 - DNA, 120 bp, Artificial Sequence
  ENSG00000268061_0 (sequence is synthesized)
atggcggccaggtcgcctgctcgggcctcccaggcgactttgccccactgcgcccgcgctctcttctcctttccatttctggaccaaggggctgccataaggagtctgtgactagagatg

SEQ ID NO: 807445 - DNA, 120 bp, Artificial Sequence
  ENSG00000268061_1 (sequence is synthesized)
ggaggtggtggccacggcctctcgctgtatgctgtgtggaaggtcgaatcatcatcatcataaaacttaatattgcccttatgtgccaggaactactatctcagcaatggagatgtggtg

SEQ ID NO: 807446 - DNA, 120 bp, Artificial Sequence
  ENSG00000268061_2 (sequence is synthesized)
gggacacaggaaggggctgcctgcgactcatgacctcctgcgtgcctgcctgctgacctatgacccttcaagttcccacccctcagccacgcctgtgaggagggtcttgttttgtcgcct

SEQ ID NO: 807447 - DNA, 120 bp, Artificial Sequence
  ENSG00000268061_3 (sequence is synthesized)
acagctcactgcagcctcaacttcctggactcaagcgattttcctgcctcaacctcccaagaactaggaccccagatccccatggacaaggcacttgcatgaattgtgaggctcatggag

SEQ ID NO: 807448 - DNA, 120 bp, Artificial Sequence
  ENSG00000268061_4 (sequence is synthesized)
gcatgaattgtgaggctcatggagttggggtcggacaacacagagccggctccctccaggagctgcatgtccagagagggaaacaggatgtggacagcaagaatgaatacatgcagacca

SEQ ID NO: 807449 - DNA, 120 bp, Artificial Sequence
  ENSG00000268061_5 (sequence is synthesized)
aagatcctcccacctcagcctcccaacatgccaggattacaggcatgagccaccctgcccagctcaataacctaagttctatgaatgaaaaccatgactgcctgtggagtgagggggccg

SEQ ID NO: 807450 - DNA, 120 bp, Artificial Sequence
  ENSG00000268061_6 (sequence is synthesized)
tcaggctggtggggagctgggtgaagacccagccagcccaggccagctcaggtgacctaatccccccagctcccacttccccctccccaagtggtttggccgcagaataagaacagtgct

SEQ ID NO: 807451 - DNA, 120 bp, Artificial Sequence
  ENSG00000268061_7 (sequence is synthesized)
cccttaccatgtctgtgtagatctcgattgctcgcatcaaacagttaatggcctctggagagaaagggaggtgggaggagacatgagaaagtgaagtcgtttcagcagaagctgaggaga

SEQ ID NO: 807452 - DNA, 120 bp, Artificial Sequence
  ENSG00000268061_8 (sequence is synthesized)
ggaggcggacgcaggcgcacctggctgccagcagagagatcaataggcgctcagagctgccagcgctgccacacactctcaaggggctgggaagaaggggacggaatccctgagccccag

SEQ ID NO: 807453 - DNA, 120 bp, Artificial Sequence
  ENSG00000268061_9 (sequence is synthesized)
gaaatctggtgagagggctgactctgcagactgtgacttgctgggcacatgcttctgggggagcccttctctcctcgggctgccaggatgctaccagcttcccacaaccccagggacagg

SEQ ID NO: 807454 - DNA, 120 bp, Artificial Sequence
  ENSG00000268061_10 (sequence is synthesized)
gcacagcagtgctaggccaggatgatggccagactcccacggtgttttaagacagacctgccaaggccctgctcttgaaggactgagctgctggcaaaggggaaggaggcatgggaggcg

SEQ ID NO: 807455 - DNA, 120 bp, Artificial Sequence
  ENSG00000268061_11 (sequence is synthesized)
gccaaaccagcatctgaggtggtcttggaggcaacagggtgccaggttctacctgggctctgccaccatctctgcaggatcctgagcagcttctgctcctgcaccaggaggacctggacc

SEQ ID NO: 807456 - DNA, 120 bp, Artificial Sequence
  ENSG00000268061_12 (sequence is synthesized)
tctggcacgaggaggctggatgtcatcaacactgagccctcagtgtgctctccactgccccctcttcctcgtagctcagcagtcgggagccctctgctcagtccctttaacctagtcctg

SEQ ID NO: 807457 - DNA, 120 bp, Artificial Sequence
  ENSG00000268061_13 (sequence is synthesized)
ccacccaccagctcctcaaaggttttgccaaaaaacctgaacacaccaggatggcactgaggaagaactgggctacctttgttgtactatctcttgcaagattttaaatttgggaaaggc

SEQ ID NO: 807458 - DNA, 120 bp, Artificial Sequence
  ENSG00000250874_0 (sequence is synthesized)
tcctattcggccatcttggctcctccgtcagctttacctttaaaaacattatgtttttaagtttgaagctattttcgtcttctttcagaggccaaataggtggtttcagcattttgttga

SEQ ID NO: 807459 - DNA, 120 bp, Artificial Sequence
  ENSG00000250874_1 (sequence is synthesized)
taggtggtttcagcattttgttgaaagcatcttccaaaattgtaaatgtagaaacacaagaatgggcatttggcaaaagtagcatcaaaaagcatgtcccagagcgaaagccaaggagtc

SEQ ID NO: 807460 - DNA, 120 bp, Artificial Sequence
  ENSG00000250874_2 (sequence is synthesized)
tggcagacctgaagaggatttggggaagaaaataaacactagcaatcagtccaattagatgtagctgtaaggtaagtgtttttgttgaaggggctattcgtctgtgcttaaacatttttt

SEQ ID NO: 807461 - DNA, 120 bp, Artificial Sequence
  ENSG00000250874_3 (sequence is synthesized)
catatatgttgtgcagaaaaccttattagttgttcccacaacaactgaatataatgccacattttatgaatgatccataagccttagtaatattatgaaataatctttaaaattaaactt

SEQ ID NO: 807462 - DNA, 120 bp, Artificial Sequence
  ENSG00000250874_4 (sequence is synthesized)
gtgtattcgttgtcattttgaaaagagcatgttaaaaatttaatttataatgttgtgtgaattttaatctgatgtgtgaaattatagaaaccacataaagtctaaacataaatagatttt

SEQ ID NO: 807463 - DNA, 120 bp, Artificial Sequence
  ENSG00000250874_5 (sequence is synthesized)
gtatgttactcttcccaagtaaccttcatgtaaggctagccatctttatagtctactgaaaactcttttaaaaattatttgtgtatgctacataacatgcatgtatacatctgtctttgt

SEQ ID NO: 807464 - DNA, 120 bp, Artificial Sequence
  ENSG00000250874_6 (sequence is synthesized)
catttgcattaaaaattgttaatattgtttatcaatgtgtaattattttacaggaagaagatttaaattgtatggcactttgtcttcttgatgttatataaaaacatactacctgagatg

SEQ ID NO: 807465 - DNA, 120 bp, Artificial Sequence
  ENSG00000250874_7 (sequence is synthesized)
gctcataccggtgtgattttccaggtaaatttatagtctagtaattggatattatgaactgataaaaataatgccaagataactgaaaatattaatagattctgatcttttattgcctgt

SEQ ID NO: 807466 - DNA, 120 bp, Artificial Sequence
  ENSG00000250874_8 (sequence is synthesized)
gaaagtttgttaacttatcaagtagatctgagaaaatgagttttacaagctatatcaactgatagtataaaaattatttaatagatcatctttcctttatacgtaatatgactgtatact

SEQ ID NO: 807467 - DNA, 120 bp, Artificial Sequence
  ENSG00000228124_0 (sequence is synthesized)
cagaaatgccacaatgttgaaaggaatgcattacagttcccacaaacacacacccctccctgcaaccactacaagatatgcaagcaactctgagctgacttggatctaattcttcccaat

SEQ ID NO: 807468 - DNA, 120 bp, Artificial Sequence
  ENSG00000228124_1 (sequence is synthesized)
ccctctgcacctctccacgttgcccatgcccatttcctggcagaagaaggaaaaacatgctgaaggggctgctgacaaacatcacccacagatgtgcctctagaaagctgtttctactat

SEQ ID NO: 807469 - DNA, 120 bp, Artificial Sequence
  ENSG00000228124_2 (sequence is synthesized)
aagcgtcagacatgccacactctagaggtgacatattcatttttttgagcagtgtttctccaattatgcttgcacagatcattgagattccatagacaggaactggatttaactccaaaa

SEQ ID NO: 807470 - DNA, 120 bp, Artificial Sequence
  ENSG00000228127_0 (sequence is synthesized)
attcagatgccctcttagggtttgaaatgtgggggaaaaaaaaagagaatcactgcttatcttagtctgttcgggtagctgtaacaaaataccatacctgagtgacttacaagtaataga

SEQ ID NO: 807471 - DNA, 120 bp, Artificial Sequence
  ENSG00000228127_1 (sequence is synthesized)
aatgttatttctcacatttctggagtctgggaagcccaagatcaaggtgctagcagatttggtgtctggtatctactgacctggttatcgcttcttcctttaaggagtattagaacactg

SEQ ID NO: 807472 - DNA, 120 bp, Artificial Sequence
  ENSG00000228127_2 (sequence is synthesized)
ctggggatgggctgacaaacataccagggattttactttgtgtcagccaagaggctttccttacctccttgtcttcagtactcttgtgcacaagcatgcttctcagagaaggtggattct

SEQ ID NO: 807473 - DNA, 120 bp, Artificial Sequence
  ENSG00000228127_3 (sequence is synthesized)
accttggaaggaaatgagtcgtttcctcccatcaggacaactgccacagcatggtgtcaactcactcttgcctttcgtaaattgagtttgtcagtgctcagcgacacagctgagtgaaat

SEQ ID NO: 807474 - DNA, 120 bp, Artificial Sequence
  ENSG00000228127_4 (sequence is synthesized)
gttgtgtgatgcgggctgtctcctgggagagagaaactggcataaaccacatcctaatgggatccagaaacaaagaagcgtgaatgaagtgttaattgcattcataaagacattaacaaa

SEQ ID NO: 807475 - DNA, 120 bp, Artificial Sequence
  ENSG00000228127_5 (sequence is synthesized)
ggaattaaaatggcagaagcttcagtcccccactcaagattcacagaaaaatatgttatccaaagaatgtttcaacaataatcatcaaagtttattgcttgcccattggggaaataactc

SEQ ID NO: 807476 - DNA, 120 bp, Artificial Sequence
  ENSG00000228127_6 (sequence is synthesized)
ttgatacatattaacttttcaaagaacattttgggtccattattttgagtatattaactaacagacagtttattccaccctacctccagttctttgcttgcttttgtatgatttaagttt

SEQ ID NO: 807477 - DNA, 120 bp, Artificial Sequence
  ENSG00000228127_7 (sequence is synthesized)
tcttattagagcaaaatgctcattatctgggagaatttttgctttttgaaataaaattacaagactgggggtttattttacagtccctcttgaatattcctgagatgatctgcaatgtgg

SEQ ID NO: 807478 - DNA, 120 bp, Artificial Sequence
  ENSG00000228127_8 (sequence is synthesized)
gcaacccggggctccctccccagccctgtggcagggccccccagctgctgacagcggggctaagctggcaaaaggtcaggaggctgcatttcactgaagatggatcgcacagatgaatat

SEQ ID NO: 807479 - DNA, 120 bp, Artificial Sequence
  ENSG00000228127_9 (sequence is synthesized)
tgcgcttgcttaatgaagtcaaggccacggatttggggccttttatggttcttcttgtttcactcaatttcaccttcatagaccacgccactaatcccagccaatcattttgtagatatg

SEQ ID NO: 807480 - DNA, 120 bp, Artificial Sequence
  ENSG00000228127_10 (sequence is synthesized)
tgcaactggtgactaagggactagataaaagtaaatgaatctaaaaaacagtgaccagaaattcagaaatctctgtgcctataacaaactcagaattaaaaaaaaaaagcatgcagagtg

SEQ ID NO: 807481 - DNA, 120 bp, Artificial Sequence
  ENSG00000228127_11 (sequence is synthesized)
agtgtttcgtgatccttgcagaaactctgtgagatatatggagccgacattcctaccttcattctgcagaccctgcatcctgatgaaccaactggcaccacccagactggtaaactggcc

SEQ ID NO: 807482 - DNA, 120 bp, Artificial Sequence
  ENSG00000228127_12 (sequence is synthesized)
caacttgttctgccatcccacccagaaactgaagacagcaagaagaacctgcttcaaccccctatgatttcagccccaacccaaccaaagcattcccccactccctagccccatgaccac

SEQ ID NO: 807483 - DNA, 120 bp, Artificial Sequence
  ENSG00000228127_13 (sequence is synthesized)
caaattacgcttaaaaaaccctagtcttcaaatttttggggagaccaatttaagtaataaaattctggtcttctgtttagccagctctgcatttattaaactatttctctattgtaataa

SEQ ID NO: 807484 - DNA, 120 bp, Artificial Sequence
  ENSG00000228127_14 (sequence is synthesized)
ggggggcagctctcataaggacactgatcattcatgatggcctgccttcacgagactcagtcacctcccaagggcccccagttcctaacagcatcacctatggcggtatctactgacctg

SEQ ID NO: 807485 - DNA, 120 bp, Artificial Sequence
  ENSG00000228127_15 (sequence is synthesized)
cagaaactctgtgagatatatggagccgacattcctaccttcattctgcaggtaagaaagctaaaactcaaagacattaagtaaagtctcaggattaaaattcagatttttttaatcatc

SEQ ID NO: 807486 - DNA, 120 bp, Artificial Sequence
  ENSG00000228127_16 (sequence is synthesized)
ggatgggctgacaaacataccaggtattgatgcatacagtcccctgaaaggtctcatctgattagggacatttattctgagaaccaggtctcagaattctcttttggatgcatcaaagtc

SEQ ID NO: 807487 - DNA, 120 bp, Artificial Sequence
  ENSG00000228127_17 (sequence is synthesized)
agaaacagctcttctactccctttactccaactaacttagcctcttcaaggcaggaatgatatcatactagtttctctatgacagtgcttgccacataacagaaattctataaatactga

SEQ ID NO: 807488 - DNA, 120 bp, Artificial Sequence
  ENSG00000228127_18 (sequence is synthesized)
agagccttttttgacattctcatttgttctgctgtgtaatagcatgggatctttcagagctgtcgacatctgctccactctagagagctgcagaaccaagccagcagagcaataataatt

SEQ ID NO: 807489 - DNA, 120 bp, Artificial Sequence
  ENSG00000228127_19 (sequence is synthesized)
atgcccaaatgggctgaaaagaatgcaagagatgagaaggaagacatggaaaaatacacccagtgcgatgatgttctaacctgtatctactgacctggttatcgcttcttcctttaagga

SEQ ID NO: 807490 - DNA, 120 bp, Artificial Sequence
  ENSG00000250877_0 (sequence is synthesized)
gcattatcatgcgcaccaggaccacatttatatgcactccgagggactcatcatggtaaatttcattcacctagcaacaaaaaaagataattgctaaaagaaaggaaacaccgaggattt

SEQ ID NO: 807491 - DNA, 120 bp, Artificial Sequence
  ENSG00000250877_1 (sequence is synthesized)
cttcttcttcaagtattagagtcattctactaccaagtaccgcagacatctgtcaaacctgtccacctccacaccaagcagcttagtaaaccaaccagctcatgcagactgttgcaataa

SEQ ID NO: 807492 - DNA, 120 bp, Artificial Sequence
  ENSG00000250877_2 (sequence is synthesized)
cttgtgaaaacttttgcaaatattttgtatttaggtgatttgggcacatttgagtagctctccagaaaggaagattgtaagggttgatggttgttttcaataaacatgagtctttccttt

SEQ ID NO: 807493 - DNA, 120 bp, Artificial Sequence
  ENSG00000228120_0 (sequence is synthesized)
cctctgacagccctccaagtgtgagcagaccgaggctgtttcgggaggcctggagccctttggcgctgccctcagtctgcctctgagccaaaacctgcagccggcctcgtcgccagcaat

SEQ ID NO: 807494 - DNA, 120 bp, Artificial Sequence
  ENSG00000228120_1 (sequence is synthesized)
gctgggaccccaaggttgaaatgatataggaaacaagggtaccccccaggatgtctgaagggtgagatgcagagaccgcacaggcggcagagtcagatggacgcagcttccacacgggcc

SEQ ID NO: 807495 - DNA, 120 bp, Artificial Sequence
  ENSG00000228120_2 (sequence is synthesized)
ccacctaggccatctgcgccccagcaagggagacgccagcccagcatgcctggctcagcgcagtgccaccacaggcccgaccctcacccccccgccccggggaagaaaaaatcgagccct

SEQ ID NO: 807496 - DNA, 120 bp, Artificial Sequence
  ENSG00000228120_3 (sequence is synthesized)
gtcgggaggtttttcccggcctctgcgatggctcctccgtggctccccggcattgtttccgcggcccagcttaagcctgtcctcagcgatttgccgccccactgcacccgagctcaatgc

SEQ ID NO: 807497 - DNA, 120 bp, Artificial Sequence
  ENSG00000228120_4 (sequence is synthesized)
actccagggccccgcggggctcacacacaaatccgcctgtgtagggcggatggggcattgttgtggctcagcggggaatgtgcctgagctaagccctcgccctgcttctcctcgaggtca

SEQ ID NO: 807498 - DNA, 120 bp, Artificial Sequence
  ENSG00000228120_5 (sequence is synthesized)
gcaggttacacaggatggtcccctgcagacccccgagctgccctcagagtgcaacgtggggccggtcatgtcccgccagccctttccagaacaaagccagcagggagagtgtgccataga

SEQ ID NO: 807499 - DNA, 120 bp, Artificial Sequence
  ENSG00000228120_6 (sequence is synthesized)
cccccgaggccctccgaggctggagttaagttggggagaggatcctctttcgggggtttagagataattctgtcccacagcacacactgggcgctcaccactgccaggacgtgcaggtca

SEQ ID NO: 807500 - DNA, 120 bp, Artificial Sequence
  ENSG00000228120_7 (sequence is synthesized)
tgggtgacggggacagagccagtgacgtcccgccctccccctgcgggccagcacctggtgcgcccatcacggggtattacttttacggtggcggcaaatgctacttcattgagtttattt

SEQ ID NO: 807501 - DNA, 120 bp, Artificial Sequence
  ENSG00000234405_0 (sequence is synthesized)
agatgggagcactcagcttcagtgttcagaagcagatttaggccaattgccataccttacgttctggagggatccaccctgacctgagcagaaggcatcacacacattcccaagcagcat

SEQ ID NO: 807502 - DNA, 120 bp, Artificial Sequence
  ENSG00000234405_1 (sequence is synthesized)
ggttcccgtgagaaactgaaaactaatttcttgaatctacaatgcgacttccatcttccaggtgtaaccagagtttttcctggagcgattccagcttgtttccttttggtgccttcctta

SEQ ID NO: 807503 - DNA, 120 bp, Artificial Sequence
  ENSG00000234405_2 (sequence is synthesized)
tgggtgggctctggggtgggcagacgatctccactttgcagaggctgctcttgtgagtggagctggtggtgagggagtaggagaggcctcgcatcatcctggcattcaggcccttagcca

SEQ ID NO: 807504 - DNA, 120 bp, Artificial Sequence
  ENSG00000234405_3 (sequence is synthesized)
tggagaaggacttgaggtggcttcttaaggtactggggagcgggagcttgtccaccagatgcacaggtgtgcaggacacgatggtgcggcagcagaggtcttgcaagctcagtaccttgc

SEQ ID NO: 807505 - DNA, 120 bp, Artificial Sequence
  ENSG00000234405_4 (sequence is synthesized)
tcggcctcccgagccaattcatcctgtgccgcagcagcactatcctggccagctccgtgaaagactctatgatgttgaaattgcacagagggctgacctcaaagaaggtcacacccaggc

SEQ ID NO: 807506 - DNA, 120 bp, Artificial Sequence
  ENSG00000234405_5 (sequence is synthesized)
gcgcccggccacccctgactaatttttatattttttgtagagacaggatttcaccatgttacccaaactggtctcgaaatcctgagctcaagggatccgctcacctccgtcttccaaagt

SEQ ID NO: 807507 - DNA, 120 bp, Artificial Sequence
  ENSG00000234405_6 (sequence is synthesized)
gctgggattacagatgtcagccactgcacccggccatactacttaggacttttgtaacctgtgtttgcctttactatgaccatctttcaaattcaatttcaattttttgtatagagttgg

SEQ ID NO: 807508 - DNA, 120 bp, Artificial Sequence
  ENSG00000234405_7 (sequence is synthesized)
tgtttcatcatatgatgccctaaactttattttcccagtactctagtggtgaaaatttaattccttttaatatagtttctattacagacaatagtatacttaacaccagcttttatatat

SEQ ID NO: 807509 - DNA, 120 bp, Artificial Sequence
  ENSG00000234405_8 (sequence is synthesized)
gcagatatcttttaaagcatttctttataagctcctgaagagtcctttcaaaaccctggaaattagaacattttatattaacataatggttcaaaatactactactaatttacattccta

SEQ ID NO: 807510 - DNA, 120 bp, Artificial Sequence
  ENSG00000234405_9 (sequence is synthesized)
gatccccaggttgcaagtcatataacctgagcatgcccagatgaaccaagtatgcctgattggtgaacctggaactggccagaacagaaaatgtcaaccacatgtggaatctaagtattc

SEQ ID NO: 807511 - DNA, 120 bp, Artificial Sequence
  ENSG00000234405_10 (sequence is synthesized)
agattgagaaatgaggaccaaaatgagaacactgagctcctcacacaggtgactgaacccgtggttttggtgtctgagaagatgcagcttctccagtctctgcaactgacggcaggaaga

SEQ ID NO: 807512 - DNA, 120 bp, Artificial Sequence
  ENSG00000234405_11 (sequence is synthesized)
tgggagcactcagcttcagtgttcagaagcagatttaggccaattgccataccttacgttctggagggatccaccctgacctgagcagggcacaattattttatcttggaaccaacaatc

SEQ ID NO: 807513 - DNA, 120 bp, Artificial Sequence
  ENSG00000234405_12 (sequence is synthesized)
ttcggagaatgtatcccaaagatacaattcaaaaagataaaaaggcagaagcacaaggtcattcttggcagaacaaattgtaacagcagaagactggaaataagacagatgtccaccaat

SEQ ID NO: 807514 - DNA, 120 bp, Artificial Sequence
  ENSG00000234405_13 (sequence is synthesized)
aaaggactgactgaataatctaaggtgcatctacatcctagatttcaatgccggtataacaagcaaggaagattccctctctctgctgctatgtagtgatttccaggatataccattaag

SEQ ID NO: 807515 - DNA, 120 bp, Artificial Sequence
  ENSG00000234405_14 (sequence is synthesized)
tgactgcaggatgagtacagaatttttctataaatatactaaaataccaagtaagccaggagcagccactaggcaaacaccaaaccttgcattcctggccaaacctatcacagagctcat

SEQ ID NO: 807516 - DNA, 120 bp, Artificial Sequence
  ENSG00000287007_0 (sequence is synthesized)
gccatgattaggaggtctccgcagccatgtggaactgtcttcaagaatgtccgtttaaaacacaagagaaggaaggtttcatcttaaatgatgattggcagacagtagagaccagaacaa

SEQ ID NO: 807517 - DNA, 120 bp, Artificial Sequence
  ENSG00000287007_1 (sequence is synthesized)
acctttgaggatttggatacagagtaaacctgaaggtgggtggtacaaaaaagaaaaagaatggagaaggcccctatttcactaatttgactacatccagcattaaacccaaaaggtcac

SEQ ID NO: 807518 - DNA, 120 bp, Artificial Sequence
  ENSG00000287007_2 (sequence is synthesized)
acatcccagtgcaagaggaccccagcattggcagtgagtcaaattccctgagcttttcatgttcattttcaatattaatttattttccaaatagaagctggaatactaaatcaactaaga

SEQ ID NO: 807519 - DNA, 120 bp, Artificial Sequence
  ENSG00000287007_3 (sequence is synthesized)
gcatccatctgataaaagatatgcaaatatctttataaatatacagcatcatctataatgttgacaggttagataaagggaccaactttcacttaaaactctaaattccaaatagaggat

SEQ ID NO: 807520 - DNA, 120 bp, Artificial Sequence
  ENSG00000287007_4 (sequence is synthesized)
gtaaatacagtcactcttttcccccaacatactcactctctctctctctcatacacactcacacacacacacacacagacatgcacatacaacctattttattttcagtttcacagatag

SEQ ID NO: 807521 - DNA, 120 bp, Artificial Sequence
  ENSG00000287007_5 (sequence is synthesized)
ttataaattgcatatattattcacagactcctcaaccccaacccaccttcacatacaaaccagactcaaatattgtaggaacctctaatgccaaggcttgaatttaaaaaattaatagat

SEQ ID NO: 807522 - DNA, 120 bp, Artificial Sequence
  ENSG00000287007_6 (sequence is synthesized)
tctcagaattgtcaaaggtgctgtggaaatgcaattagggcacatatcatctttggatgtgtgaaataacaacagtaaaaagtgtccaaacaaaataaaaacagcagcaagacaaacctg

SEQ ID NO: 807523 - DNA, 120 bp, Artificial Sequence
  ENSG00000287007_7 (sequence is synthesized)
gtctaacatttgctaagcaggagcccacccctgcagcagcccatggctacttcctgctctccagccacggcctttatcaacaattcttttctgtctccttaataaataattggggtgtga

SEQ ID NO: 807524 - DNA, 120 bp, Artificial Sequence
  ENSG00000287007_8 (sequence is synthesized)
agccccaaaggcagcggaatgtcccacctggggaaagcaggatgaatgcacagaggcagccctaggacggactgatgagtgactggctaggcagctctcacttggtccaagccagcctgg

SEQ ID NO: 807525 - DNA, 120 bp, Artificial Sequence
  ENSG00000287007_9 (sequence is synthesized)
agctggagtccctgagagatgacagatggttcagcatcgacttttcaaagggaagaagggaaggttgctgtggagagacatcccaatttgcagtccttttgttcttgtgtatgtgtgagc

SEQ ID NO: 807526 - DNA, 120 bp, Artificial Sequence
  ENSG00000287007_10 (sequence is synthesized)
tctgacctcttactccctcctccttgttctcttcctttccctttccccagatctccttctccacatcattctataatgccaagagaaaaccagaataaaaagaaagaataatcagggtca

SEQ ID NO: 807527 - DNA, 120 bp, Artificial Sequence
  ENSG00000287007_11 (sequence is synthesized)
aaaagtcagagggcccatctctgatctgtcctgtgtggctgatgaagcctcaggcttcagagtatctgacaaggcatcaatggaatcaatgtggctaaattaaaacgtgcagaacatacc

SEQ ID NO: 807528 - DNA, 120 bp, Artificial Sequence
  ENSG00000287007_12 (sequence is synthesized)
atgttttacacgtagctcttgggagagaggagacacggccagcaggatctgagagagcgtgaaaggctaagctggtcagcaagcctcctggaactggcagacagggagggcagcaggagc

SEQ ID NO: 807529 - DNA, 120 bp, Artificial Sequence
  ENSG00000287007_13 (sequence is synthesized)
tcctaagaacccaggcacacaaatatgtagaaagaaaaaccaacgcaggtgaacgctgattacagtgctcactggtccaagttccaagggacttattttctgattgtaaacaatgtacta

SEQ ID NO: 807530 - DNA, 120 bp, Artificial Sequence
  ENSG00000287007_14 (sequence is synthesized)
attttataaaaattggagaatgtaggacccctaaaacacggtgggacttttgtggaatgggcgaatgcagtcagggaggtgacactataggccagtgaatgctctatatccaatgcgtgc

SEQ ID NO: 807531 - DNA, 120 bp, Artificial Sequence
  ENSG00000287007_15 (sequence is synthesized)
actacctgtgttgggtatgcatactctgtgccttttgttagcctaagaacacagaacacaatagcaactcaatgcctaaaatgaacaataacccaactgctgacagaggtattgactgct

SEQ ID NO: 807532 - DNA, 120 bp, Artificial Sequence
  ENSG00000287007_16 (sequence is synthesized)
cctgggctaacgatttagcatcttaattcctattgagcttcagtgtccctttgaaatatcagctaaatcatttagacactgtttgaagtataaatagggatttttgaagtttatctagct

SEQ ID NO: 807533 - DNA, 120 bp, Artificial Sequence
  ENSG00000287007_17 (sequence is synthesized)
tactgagtaaagaattaattgctgcatttacttaatgaggtagtatgtcccattaatttttttttcctttcagccaagtgcatacatttaatatttcactgtctgtctgctcaacatttc

SEQ ID NO: 807534 - DNA, 120 bp, Artificial Sequence
  ENSG00000287007_18 (sequence is synthesized)
tttttcatgaagcatagctcaaagaaatttcaataatactgttttaaattagctgcttcctgtcaagttaataaacctcagatacttaagtcccctacgtacagtcccaagtctcctgtt

SEQ ID NO: 807535 - DNA, 120 bp, Artificial Sequence
  ENSG00000287007_19 (sequence is synthesized)
caaggctaattctctttgcttctcccatctccatggccacctctctgcctaaagcccatagaactataacgatgaactagagggttcatctgcatggcattgcaattatgataatagctg

SEQ ID NO: 807536 - DNA, 120 bp, Artificial Sequence
  ENSG00000287007_20 (sequence is synthesized)
atacttacatggcagttactatgtgccaagatctgttgtaagtgctttacacacattaactcatttaaccttcacacaaccttataaggtaggaactattattatcctcattttacatgt

SEQ ID NO: 807537 - DNA, 120 bp, Artificial Sequence
  ENSG00000287007_21 (sequence is synthesized)
ctagaaggtctccagagtggcctccttagggaactatataaggaaaagaggaagagaagagacacttagttcaaagatattttctcaagattgaaaggaagaagagattctgaccccagc

SEQ ID NO: 807538 - DNA, 120 bp, Artificial Sequence
  ENSG00000287007_22 (sequence is synthesized)
ttctgtttctcatttagcttctcttatggtccagcttcttctaggtccaaccctgtaaccaagtgttaaaaagaagaggcttcatcatcttgcatactttaagtacacacagtaaaattt

SEQ ID NO: 807539 - DNA, 120 bp, Artificial Sequence
  ENSG00000287007_23 (sequence is synthesized)
atttcttaaaaaagagaagagcccacaagtaaaaaactctatgcagtaaggagagtgcttgaggagagactcaaatccaggaaacccagagaacaaaagagaatgctcgtgtgtggcttt

SEQ ID NO: 807540 - DNA, 120 bp, Artificial Sequence
  ENSG00000287007_24 (sequence is synthesized)
ggagagacagtgaagaagaatcactgctctgttagagcagagaatacatacaagtttctaatgtaggaccagatgcaggccacatgggagagagctgtcctggggccatgttaaatccca

SEQ ID NO: 807541 - DNA, 120 bp, Artificial Sequence
  ENSG00000287007_25 (sequence is synthesized)
tgcaagaaaactgccagaaagagagggtctgtgaagtaaattgccaagaagcaggcctgagggcaaggcagcaaatttgaggaggtcattgatagggcagtccctcatggaagcctatga

SEQ ID NO: 807542 - DNA, 120 bp, Artificial Sequence
  ENSG00000287007_26 (sequence is synthesized)
aagaccactgaggcatggacaagagaaagagaccatctcaaatgcctactggacccccaagtcgcaaagcgatctcagagcagtaccatttaagtaatgaatttccagaccccatttctc

SEQ ID NO: 807543 - DNA, 120 bp, Artificial Sequence
  ENSG00000287007_27 (sequence is synthesized)
tcctctaccttcttactttgaatggtcaaaaacctaccttagcaagatgggataggagaggtggggagagaagatggataatgacctctcctcccatctctttccctggctataaggttg

SEQ ID NO: 807544 - DNA, 120 bp, Artificial Sequence
  ENSG00000287007_28 (sequence is synthesized)
ttgccattagaccccaccagaggaaagggaacagctacaaccctgagtaaagttggaagctttggctgttaccttggactaagtgttaaactgaaaccatgttctgtgatttaaagggat

SEQ ID NO: 807545 - DNA, 120 bp, Artificial Sequence
  ENSG00000287007_29 (sequence is synthesized)
tgtaggaaattttactacctaaacacgaaaacccaaaggatctgttaaattttcatcaagaacagcagaggagtttcccaacagagcaagtgtaaagggattgagggaggcaaataaagt

SEQ ID NO: 807546 - DNA, 120 bp, Artificial Sequence
  ENSG00000264769_0 (sequence is synthesized)
agcgtagccgcggttcttgagcgtgcgccggcgctgcttcagctggacgatctcctccttggacaggccccgcaggtgctggttcagctcccgcaccgacatggtcaccagctcctcatc

SEQ ID NO: 807547 - DNA, 120 bp, Artificial Sequence
  ENSG00000264769_1 (sequence is synthesized)
cgtcaggctggtgccattctcacccggctcccgcttcacctggggcacagtgcaggtggtcacaggccaagcgggcacgcccactgtgccccccgaccccagcccacaggctcctgtccc

SEQ ID NO: 807548 - DNA, 120 bp, Artificial Sequence
  ENSG00000264769_2 (sequence is synthesized)
acacggagcaggaagcagcccctgccccaccccatccagggtatttcacaagggctcccacagtgagccaccccgggcctgcccaacgtgaaggctggcggagtcagcccctccgagctg

SEQ ID NO: 807549 - DNA, 120 bp, Artificial Sequence
  ENSG00000264769_3 (sequence is synthesized)
cagcctgctctctggtccctgccccgggtttgatgcagacagatgggagactcctccagaggagctaggatcacttcaggaaattatgggctggggggcttcttactctcatcaggggag

SEQ ID NO: 807550 - DNA, 120 bp, Artificial Sequence
  ENSG00000264765_0 (sequence is synthesized)
agaatcctcagcgcctgagccccccgccccttttgtctgcgttagtgaaggaattggctcttcgagggtgcgactaaagaaagccgtcgagagaacagatagatgtgatccagacaaata

SEQ ID NO: 807551 - DNA, 120 bp, Artificial Sequence
  ENSG00000264765_1 (sequence is synthesized)
tgtgaacaagtgcttggaaacacatatttctgaacaattccctttatgacaattccctcagagttggaagagacaacaattgatgactataatgccaattaagtagaatggatatgaatg

SEQ ID NO: 807552 - DNA, 120 bp, Artificial Sequence
  ENSG00000264765_2 (sequence is synthesized)
tctgaaaataagctggaaattttaaggccaaaattcttcgaaatacaaagaaaaaacctttctgaagacaaatagctgtagaagttctcctcaatgcatacaaatgataattcttaaaac

SEQ ID NO: 807553 - DNA, 120 bp, Artificial Sequence
  ENSG00000264765_3 (sequence is synthesized)
agggctgctcgtccaagagctatattaaggtctatttactttatccctaccaaaggcggtattttttgaggatagaaactacatctcatggagtttatcactcagagtgcctacttagga

SEQ ID NO: 807554 - DNA, 120 bp, Artificial Sequence
  ENSG00000264765_4 (sequence is synthesized)
gactgcttgcatactgaatgaaacgaaggaagaatgaatgaataatttgggaccccacctcccaacacacttccacatatcgaaatgcacacggaatgaggtacatcttctaaggagagt

SEQ ID NO: 807555 - DNA, 120 bp, Artificial Sequence
  ENSG00000264765_5 (sequence is synthesized)
ggcattgaagagtaatcaaaacaacaggatattcacaggaggactggaataaaacgaaatttccagtgaaaaagattactcaaaatatttattcaatacactctgaaattagaaactaag

SEQ ID NO: 807556 - DNA, 120 bp, Artificial Sequence
  ENSG00000262089_0 (sequence is synthesized)
gctccagtaggttccagattaattttttatccccaagctctttcctgctccttcatgggtctcaggtctcctggaaatccaggaacagcaattagcccactgctatttagggcctttgta

SEQ ID NO: 807557 - DNA, 120 bp, Artificial Sequence
  ENSG00000262089_1 (sequence is synthesized)
ttatatgcatttggatctccgtggatgcatctggtggcctgggctaggccagtgtccactctggcctacatcctctgctcaggactgcaggtcggccatttgctggtccccagttcttcc

SEQ ID NO: 807558 - DNA, 120 bp, Artificial Sequence
  ENSG00000267226_0 (sequence is synthesized)
cggcctgccgcggccctgagctcacctgaggcggaggcgcccgcgactccccgccagctccgccagtctcctccagccccggccctcgggcgcctgatccaggagctcgctgagcctccg

SEQ ID NO: 807559 - DNA, 80 bp, Artificial Sequence
  ENSG00000267226_1 (sequence is synthesized)
ggaggggcgagcagcggccccgtgggggcggccgagggcggcagggcctgtagcgggtcccccaacagcgacatggccct

SEQ ID NO: 807560 - DNA, 120 bp, Artificial Sequence
  ENSG00000267226_2 (sequence is synthesized)
ctgccggggctcccgcccgccccgtcacgggcctcggccccggggcaccttccgctcgcctccgagccgcggaggcaggggcggaagaacaaatctggcagcgcggcacggccctcagag

SEQ ID NO: 807561 - DNA, 120 bp, Artificial Sequence
  ENSG00000267226_3 (sequence is synthesized)
ggcacggccctcagaggaggaagctccgctccccgccccaattagacagcaggaatcatctggtttacaccgcgtcagactgccgcccgcaatctccgtcatcaaagcaggcaaccctgt

SEQ ID NO: 807562 - DNA, 120 bp, Artificial Sequence
  ENSG00000267226_4 (sequence is synthesized)
agaggatgcctttccctggaatgatccggaatggacgacacctgagctctctctgccaatcttagcaacatccaaggccattatccctttgaaaactatggcttcgtttgggacaaaaag

SEQ ID NO: 807563 - DNA, 120 bp, Artificial Sequence
  ENSG00000267226_5 (sequence is synthesized)
tacgaaatgtgaccagtcaggtagttccctacacgaggcttcctggcccaatttctgttgccattagcttttcatcacccaaggccgcaggattttctgaccagtaatttggatacctat

SEQ ID NO: 807564 - DNA, 120 bp, Artificial Sequence
  ENSG00000267226_6 (sequence is synthesized)
attcttatacatgttggcgaggtaggtgcgccatacagtctccaccacattctagcacaagcagtcattaaacttcactctagcataagttaagaattcagactgcagtgagatggctaa

SEQ ID NO: 807565 - DNA, 120 bp, Artificial Sequence
  ENSG00000267226_7 (sequence is synthesized)
gagcatgaaagatctgctcgattcaagtgttaggagcttgaataagtttcttaatttctctgcctcatctattaacacaggactgacaatacagtttatatagagttgttgccagaatta

SEQ ID NO: 807566 - DNA, 120 bp, Artificial Sequence
  ENSG00000267226_8 (sequence is synthesized)
aaggagttgatgtatgtgaagcacttaactcggtaactggcacatcgtagatgactcagtaaatgctattacccttacacatacaagtgccgtttcatactcagtttgacttggcaagcc

SEQ ID NO: 807567 - DNA, 120 bp, Artificial Sequence
  ENSG00000267226_9 (sequence is synthesized)
tttcccaaccgcttcaggtgccttcctgttttgtcctcaattactgtacaaatattttctgaggatctgttacctgcatgtgccaattatggaaataaaatcttctagtctttactggaa

SEQ ID NO: 807568 - DNA, 120 bp, Artificial Sequence
  ENSG00000267225_0 (sequence is synthesized)
gtacacaaaaatattttccttgtagaaaatagttttccagacacttagccttctgaagtgctcatctcttgcttaaatgatagtctatttagtagtttaaaataaaaataatcactccct

SEQ ID NO: 807569 - DNA, 120 bp, Artificial Sequence
  ENSG00000267225_1 (sequence is synthesized)
atgatctagttaatgtaattatccagtcactgtaactaatctcttgaagggacttttgtgataaagagccaagttcagaagcatagcgtgtaccgaaaatgaagactctcctatctactg

SEQ ID NO: 807570 - DNA, 120 bp, Artificial Sequence
  ENSG00000267225_2 (sequence is synthesized)
gttatgaaattattataattcagccttcaaactactactgatcaactaaaggaaagctaataagtgttcactcatcttaaacatcctcagttgaaatccgtatgctccgctagccctgct

SEQ ID NO: 807571 - DNA, 120 bp, Artificial Sequence
  ENSG00000267225_3 (sequence is synthesized)
gcttctaatcattcatttccctggagagctggcttgggaaaggcaacttattcccagaggacagtagagcagaagtgcagagctctagtccacagccttcctccccaggacatgtgattc

SEQ ID NO: 807572 - DNA, 120 bp, Artificial Sequence
  ENSG00000267224_0 (sequence is synthesized)
actcaacttgtgctcaggtgtctcttccaccctcagatgattcatcgaaagctgactgaattcccagtgacaggagtagactgcccttcatcttagccagatatcacaaggctattcctg

SEQ ID NO: 807573 - DNA, 120 bp, Artificial Sequence
  ENSG00000267224_1 (sequence is synthesized)
atagaaaattcatatttttaatcagtagattccttggataactaaattcattggactaagtattatttcccaaatcaaatgtcattatgttgtacattctgtttgttaaacatctgacac

SEQ ID NO: 807574 - DNA, 120 bp, Artificial Sequence
  ENSG00000267224_2 (sequence is synthesized)
acacctaagcatatgacatcctttctttgtgctataaattttatttttgcctattgtgagtatatattactctttatactgaatttttaaaaaaattaataaaacaatttataaatatgg

SEQ ID NO: 807575 - DNA, 120 bp, Artificial Sequence
  ENSG00000267223_0 (sequence is synthesized)
cgctcaccccggggcgcgccgaggccaccgcagggcacttacttggcacttgcttttgagtgtgcagatcgtcgcggttttcacttgggttttcaaacaagtttcagggagaaagaagga

SEQ ID NO: 807576 - DNA, 120 bp, Artificial Sequence
  ENSG00000267223_1 (sequence is synthesized)
ctgacgccgctactgtacgagttctcggagcagccccgggccgggcagatttatgggggcgcgtcacggctacgccaggtcccgccgccggagcatctcgaagttaattaaagcggtgct

SEQ ID NO: 807577 - DNA, 120 bp, Artificial Sequence
  ENSG00000267223_2 (sequence is synthesized)
agtggagaggttaaactgctggagaactgtagtttccatcccagcaccaaaagaacagagtccagagttttcaggggccaccaagaggagccagagaagggtgccaacacagtccgtggc

SEQ ID NO: 807578 - DNA, 120 bp, Artificial Sequence
  ENSG00000267222_0 (sequence is synthesized)
gtgccttgaggagccacatacttttccctgcgctgcttatttctgaggtggttaataatatcgactctgggaagattgatttttcaagactccttcccatttcttaatttatttctgctt

SEQ ID NO: 807579 - DNA, 120 bp, Artificial Sequence
  ENSG00000267222_1 (sequence is synthesized)
acttagtttggttttttatttttagcagacattttagcaaagcagaaatatatttttcctgtggattttagacttgcattcttatatttacgaacttacaaaaacttatccgagaattaa

SEQ ID NO: 807580 - DNA, 120 bp, Artificial Sequence
  ENSG00000267222_2 (sequence is synthesized)
tttttttttcaaatgcttaggcaaattaagtatgatcaagtcttctttattgtgtgctgtaaaaatggagtggcggcaagaatgtaatacagggcatctgactgctgaggaaaaaaaaaa

SEQ ID NO: 807581 - DNA, 120 bp, Artificial Sequence
  ENSG00000263938_0 (sequence is synthesized)
gtcctgttagaaaaggaaaacttctgttatatttctaattgtatctctggtagattagagtagggctaagtgcaaagtggcacaaatttgcaacagaaaaggaactattttacgttcttt

SEQ ID NO: 807582 - DNA, 120 bp, Artificial Sequence
  ENSG00000263938_1 (sequence is synthesized)
tgaataggtaatgcattcacatggttcaaaattgggaaaataaaaatgtctcttatccttgcctcccaggtactcagttcccttccatggaggcaaggtagtcttttgtgtcaccttcca

SEQ ID NO: 807583 - DNA, 81 bp, Artificial Sequence
  ENSG00000263938_2 (sequence is synthesized)
ccttccatggaggcaaggtagtcttttgtgtcaccttccagagctattctataaacatataagcaaaaaagaaaatgatta

SEQ ID NO: 807584 - DNA, 86 bp, Artificial Sequence
  ENSG00000263938_3 (sequence is synthesized)
agcagtttttttctatagtataatcaaatggtgtattaagttctcacattactatgttgctgaagcaacacaaacacaaaaggaag

SEQ ID NO: 807585 - DNA, 120 bp, Artificial Sequence
  ENSG00000263938_4 (sequence is synthesized)
cattactatgttgctgaagcaacacaaacacaaaaggaagatttaagactgacgcagtttatttcatgtgattttctttttaaaatcttggtctctgagataggaaagtagctggaatta

SEQ ID NO: 807586 - DNA, 120 bp, Artificial Sequence
  ENSG00000263938_5 (sequence is synthesized)
tatttcataaatctctgtatctgacaaattggatctatatgagccttggcagcttaataactattttcttgttatctttcttttctttttctattaaatgtattatgttaatgcaaacaa

SEQ ID NO: 807587 - DNA, 120 bp, Artificial Sequence
  ENSG00000261687_0 (sequence is synthesized)
cttattcatcattcattcatttatttgattagttgaaaacacttccgactaaggaagcagagagcccacaatcctgtgggaaaacaggcctgggaactaatatctcaggggtagtgaggg

SEQ ID NO: 807588 - DNA, 120 bp, Artificial Sequence
  ENSG00000261687_1 (sequence is synthesized)
tcgggcccagatcctcaaaggggagaataaaaaagctagggtgccgtatgttgcataaagaaagtagcaggaataaacctgccagatgtacagcagtagcataagtaggtgaacaggcat

SEQ ID NO: 807589 - DNA, 120 bp, Artificial Sequence
  ENSG00000261687_2 (sequence is synthesized)
caccgctgcagcaagctccaacacatgtaagccatcaaggggatgttaaaaaacgccagctggaaaagaacagaaccatagcttactcccaagtccttggaagagtttggtcttaataat

SEQ ID NO: 807590 - DNA, 120 bp, Artificial Sequence
  ENSG00000261687_3 (sequence is synthesized)
gcattattagtggatcctaagactatgctgctatctgtcttggcgttagctaatttacttcaagcacagttgcttataacacaacagctgacttgtggctagttgtgtatttgcccatgt

SEQ ID NO: 807591 - DNA, 120 bp, Artificial Sequence
  ENSG00000261684_0 (sequence is synthesized)
ttctatttttctctttggagcagaggttgcaaaactgtgatgcctaacaaaaacgttgtgtataaaagctccaaaaccaagcattagcctaaattggctataactgcaacttaaatcaaa

SEQ ID NO: 807592 - DNA, 120 bp, Artificial Sequence
  ENSG00000261684_1 (sequence is synthesized)
aactatatccaactagatcttcgttgtggctatgcaactttttgctttgtggcctgaaggtttttactgaggtaacaacctcttatctcttgtccttccctcaaccacaaaagcaaaaat

SEQ ID NO: 807593 - DNA, 120 bp, Artificial Sequence
  ENSG00000261684_2 (sequence is synthesized)
aaacaacaacaaaaaacacctctacagcttccttcttcatggctgtctttggcaatgcttccaaatcttgaaagcaaaagaacctgctgaagtatatgaggaggatgaaaacactaaaca

SEQ ID NO: 807594 - DNA, 120 bp, Artificial Sequence
  ENSG00000261684_3 (sequence is synthesized)
tgacatatgaaaaccaatctaagcgtatgaattgagaaagaaaatactagaaggaaggcagagcagcagtcggccctcaacagaaaacaaaaaagaaggagggctgtaactgctctggcc

SEQ ID NO: 807595 - DNA, 120 bp, Artificial Sequence
  ENSG00000261684_4 (sequence is synthesized)
cttcttccatattatctcccaattagaagagcgtggaaccgaaaacttaaactctgaaaaggtaataactttcaaggaggagctacggaagtgaataaatgataaagaagaacagcagta

SEQ ID NO: 807596 - DNA, 120 bp, Artificial Sequence
  ENSG00000261684_5 (sequence is synthesized)
gctttagctgtcaatgagtttctttgctctggcattggcaatatcaatacgatctctgttggtgtcagcctgaaaaacaagaaagatatcagctttacaaggtaagtaactctaataaaa

SEQ ID NO: 807597 - DNA, 120 bp, Artificial Sequence
  ENSG00000261684_6 (sequence is synthesized)
attaaactttttacacttggagtaactgacacaccaagaaaatccaagaaaccacgtgaagttacattacaaaactcatgttgggcaagaagtaacagaatatgaaattcatttggaaaa

SEQ ID NO: 807598 - DNA, 120 bp, Artificial Sequence
  ENSG00000261684_7 (sequence is synthesized)
cccctggtatataaacatgacaaaggtgtaacatataagaccttgccaatatttcataaattctataacgcattttttcatagtttaacatgcctgaaactgggatgcatcctgtaatca

SEQ ID NO: 807599 - DNA, 120 bp, Artificial Sequence
  ENSG00000261684_8 (sequence is synthesized)
atggcattttttgatgcaatgaaatatgaaagagtgctcttctctgttaaagatctggaccttgtgtgagtcctctgaactgaatcatagaatctcatctggattcagacaccctaagtc

SEQ ID NO: 807600 - DNA, 120 bp, Artificial Sequence
  ENSG00000261684_9 (sequence is synthesized)
taacctggagagactgaaataacctttccaaagatctttgaaacgaatctattaccatcctcaccaacatctgaattaaaatgacaggggtcatgtactgctaaactcatctcctaagtg

SEQ ID NO: 807601 - DNA, 120 bp, Artificial Sequence
  ENSG00000261684_10 (sequence is synthesized)
aaccattcattaagaaaggtacaggaatatcaggaggagttggcataccgtttaatgtatccaccactggctgctcccgttgttggttgctgaagctgaccatttgtcaccgggcctggc

SEQ ID NO: 807602 - DNA, 120 bp, Artificial Sequence
  ENSG00000261684_11 (sequence is synthesized)
tactacattgcaagtgtcaaccagaaaatgctattattatggaacagcaaacttcaaccttgaatctaccaataactccccacaatcactcagatcactggatcactgagctgagaccac

SEQ ID NO: 807603 - DNA, 120 bp, Artificial Sequence
  ENSG00000261684_12 (sequence is synthesized)
atcactcagatcactggatcactgagctgagaccaccaagtaatttataaagcaaagagaagaaatttaagccagctgtagaaatttgcgttaagtaacaaggagctgaatgttaatcac

SEQ ID NO: 807604 - DNA, 120 bp, Artificial Sequence
  ENSG00000261684_13 (sequence is synthesized)
agatcttcatggcagcccctcccatcacaagacctgaggcctaggaagaaaaaatggtttcgtgggcagcctcagaacttggggccctgagtcccagctgctccagctcctggctaaaag

SEQ ID NO: 807605 - DNA, 120 bp, Artificial Sequence
  ENSG00000261684_14 (sequence is synthesized)
ctccagctcctggctaaaaggggtcaaggtacagcttgggctgttgcttcagagggtgcaagccccaaaccttggtagcttccacgtggtagctgggcctgcaggtgcacagaagtcaag

SEQ ID NO: 807606 - DNA, 120 bp, Artificial Sequence
  ENSG00000261684_15 (sequence is synthesized)
gatgtacggaaatgcctggatgtccaggccaaagtctgctgcagtggaagagacctcatggagaacctctgctagggcactgcagaaaggaaacgtgggattggacaccgcccacccccc

SEQ ID NO: 807607 - DNA, 83 bp, Artificial Sequence
  ENSG00000261684_16 (sequence is synthesized)
tccagaatggcaggtctacaaacagcttgcactatgaacctggaaaagcctcaggcactcaatgccagcccagcagagcagcc

SEQ ID NO: 807608 - DNA, 120 bp, Artificial Sequence
  ENSG00000261684_17 (sequence is synthesized)
aaaagcctcaggcactcaatgccagcccagcagagcagcctctgggcctgaaccctgcaaagccacagggtcagaactgctcaaggccttgggagcccacccttggcatcagcgtgccct

SEQ ID NO: 807609 - DNA, 120 bp, Artificial Sequence
  ENSG00000261684_18 (sequence is synthesized)
ccctagatgtgagacatggagtctaaggagattaaaataagttttaagacgtaatggctgtcccactggattttggacttgcatagggccggtagcccctttgttttggccaatttctcc

SEQ ID NO: 807610 - DNA, 120 bp, Artificial Sequence
  ENSG00000261684_19 (sequence is synthesized)
gacttggacttttgggttaatactggaatgagttaagattttggaggcctgttgggaaggcatgattgtgttttgaactgtgaggacatgagatttgaaaggggccagggaatctgggcg

SEQ ID NO: 807611 - DNA, 77 bp, Artificial Sequence
  ENSG00000261684_20 (sequence is synthesized)
tgaggacatgagatttgaaaggggccagggaaagatgaggtgggtggatcatgaggtcaggcgtttgagaccagcct

SEQ ID NO: 807612 - DNA, 120 bp, Artificial Sequence
  ENSG00000261684_21 (sequence is synthesized)
ccagaggcataattttttcaaataatttttagttacagaataaattctaactttttaaagtctaaagctacataaaactcaaagcaatctatttttctacctgaggtcaaaatgactttc

SEQ ID NO: 807613 - DNA, 120 bp, Artificial Sequence
  ENSG00000261684_22 (sequence is synthesized)
ctttttcctaactaaacataattcttagcattgaggtaaatctgaattcatgtggtatgctttgtcaaacttttccaaaaaattttaagccctgctttagagagaaattctcatgttaca

SEQ ID NO: 807614 - DNA, 120 bp, Artificial Sequence
  ENSG00000261684_23 (sequence is synthesized)
catatatatttacatattttttcttcaaagactaatgacaatgtatgatgttaataggcctgtaatggaaccatgatactactaataatatgaaataaaaagccactcatttatataaag

SEQ ID NO: 807615 - DNA, 120 bp, Artificial Sequence
  ENSG00000261684_24 (sequence is synthesized)
agtgttcctgaatggtgcaataagaaatgggatcacagatttatgtacatatatgaatcactaagagttcagaaattaagctcactttaagaaaactcagccaggcacagtggctcacgc

SEQ ID NO: 807616 - DNA, 86 bp, Artificial Sequence
  ENSG00000261684_25 (sequence is synthesized)
catattgcactccagcctggacaagagagcgagactctgactccaaaaaaaaaaaaaagaaagaaaactcattctatttttctctt

SEQ ID NO: 807617 - DNA, 120 bp, Artificial Sequence
  ENSG00000261683_0 (sequence is synthesized)
agtattctgcctgggtacgtgtaaagtggagccgtcttttctgcacagagtgtgcactatcatcgtaacagcagagacggagagcaagatctgatggcactaaggctgaacccagaagct

SEQ ID NO: 807618 - DNA, 120 bp, Artificial Sequence
  ENSG00000261683_1 (sequence is synthesized)
gcagcagtggacggatgatgatctgaagaaatgagatccctgatgggcttggaagtcatggttcctgtaaccatgatgtcacaccctcgtcctgacaccgagatgggctggacacatctg

SEQ ID NO: 807619 - DNA, 120 bp, Artificial Sequence
  ENSG00000261683_2 (sequence is synthesized)
tcacccagggcaaacaaaatgcttggtctgcatctttcagaagaaaactaaaaatcaagtaatttcttagaagtttgcttgcgtgtggcttaagtcttcttctcctgttgaggaaggtgt

SEQ ID NO: 807620 - DNA, 120 bp, Artificial Sequence
  ENSG00000261683_3 (sequence is synthesized)
tgagtttgaccatgacagccccacccagtccttggctcatctcacccatcaaagaggatctggagattcagagctatgccgtggaagaccttgtcagagcaccaggccatactgtgctgc

SEQ ID NO: 807621 - DNA, 120 bp, Artificial Sequence
  ENSG00000261683_4 (sequence is synthesized)
aggtggggttcaggtgcccagtgacaaccaccggggccgctcatccctaaacgtctgttgaacttaaagttctactcaagactttctacattaaataccctttcatacagcaaaatcagc

SEQ ID NO: 807622 - DNA, 120 bp, Artificial Sequence
  ENSG00000261683_5 (sequence is synthesized)
catgttctgagatgtgaaactgcagcacaaagttactgtggtctccacctatagaaatggaatgttacttcataaagccccaggccaaaaaagaaaccccaaaactctgaaacgacaccc

SEQ ID NO: 807623 - DNA, 120 bp, Artificial Sequence
  ENSG00000261683_6 (sequence is synthesized)
ttaaatttaacctgaacatctggccagcctcctccatcattgaaacttctcctgagtgttggcatggatcctatgtttctccagccagggagctttgctccccattcttgatggacccac

SEQ ID NO: 807624 - DNA, 120 bp, Artificial Sequence
  ENSG00000261683_7 (sequence is synthesized)
tgagtcccaattttctacattttacttgggtcattccaccactttgggatgcttttcctactctgttgtactttaaaaatgtttcttctttcctattctcagcttcacgcatttgtcttc

SEQ ID NO: 807625 - DNA, 120 bp, Artificial Sequence
  ENSG00000261683_8 (sequence is synthesized)
tttctcaattcaacttgcttagttctcgctacatcaattcctagagccatccatctgcacttctgaatcatttaagttttgtttggctacaagtaatggaaacccactctgagtaactca

SEQ ID NO: 807626 - DNA, 120 bp, Artificial Sequence
  ENSG00000261683_9 (sequence is synthesized)
agcaagaactggaatttattggaaggacagtgggatatatcataagatccaaaaagaattgaacaaataaaatttcagagggaagaaaaagggcagctccagtgacttcagcaacaagac

SEQ ID NO: 807627 - DNA, 120 bp, Artificial Sequence
  ENSG00000261683_10 (sequence is synthesized)
atattattcagctgcaagagcccctccccatgagaaacttgattgaaaattctgatttcccacagagaagaatctgatcgactcagtttagctttggttgcccaactgctcaatcttgca

SEQ ID NO: 807628 - DNA, 120 bp, Artificial Sequence
  ENSG00000261683_11 (sequence is synthesized)
tgaattatttccagccaaggggacaaggtgtattatagggacacacctgctttctccaaagaaaagatctgggcatttcctgatcatttccctgagaaggaggaatcattgtgagccaag

SEQ ID NO: 807629 - DNA, 120 bp, Artificial Sequence
  ENSG00000261683_12 (sequence is synthesized)
aagatacctcaagtataatgagctcagttacacttttttgatatctgagtatttggtatgtagtgtgcattttaaaaaacatgtctctctccaggacaatgttaacctcttccacggtgg

SEQ ID NO: 807630 - DNA, 120 bp, Artificial Sequence
  ENSG00000261683_13 (sequence is synthesized)
agtggggctatgtgattttgtgcttaatttacctagctggtgggcctccagtagaggctgtagtcgagccagctgataccacatcagttctccaaaggaacaaaagctgcccttccttcc

SEQ ID NO: 807631 - DNA, 120 bp, Artificial Sequence
  ENSG00000261683_14 (sequence is synthesized)
ttattgcaaagtttgacaaaaagcaaaacgtgaagaataaaagcgacttgcattgtctaacatctaccgcagtgtttgagctgcagctgctcctcctcccctgattgttttcaaatattt

SEQ ID NO: 807632 - DNA, 120 bp, Artificial Sequence
  ENSG00000261683_15 (sequence is synthesized)
cttcaaaaaaggcattaaagaaaaacacaagatattgcacagggaaccaaaacaaatcacaatcttcaaggacaaagcattgcaaaatggcttacatccccaaatgggaacagatatggt

SEQ ID NO: 807633 - DNA, 120 bp, Artificial Sequence
  ENSG00000261683_16 (sequence is synthesized)
tggaaattaaaacaatcttttttattttaagcggaaatgctagcagatgccacaagaaacatatggaactcgccacagacaaatagggaatgctttctgcgtgtggaagtagagcaaagg

SEQ ID NO: 807634 - DNA, 120 bp, Artificial Sequence
  ENSG00000261683_17 (sequence is synthesized)
gagtgaccacctctgactgtcagggggaaccatcagctcgaactgtttgctatggcaggagggagtttgcagagtccggagtcctgccctcatgaaaaagctttaacggtcttgactgag

SEQ ID NO: 807635 - DNA, 120 bp, Artificial Sequence
  ENSG00000261683_18 (sequence is synthesized)
taatttaagtcattcttgtcagggagtttcagaacactatgcacaattatatttatttcacaatgcattgattccagatatctttttaaatgtgcttacctctgtgtgcgttgttacctg

SEQ ID NO: 807636 - DNA, 120 bp, Artificial Sequence
  ENSG00000261683_19 (sequence is synthesized)
ttccctctttgaatctctgaatgaaacaaaataaataggaaaaaatggagacatagaagcattgtccacaaggcatctcccactctagaggtctcccagccccgtgctagcttgttaatt

SEQ ID NO: 807637 - DNA, 120 bp, Artificial Sequence
  ENSG00000261683_20 (sequence is synthesized)
tattatcgcttgtctgtcaaacaaggaagatataatttgccacacaacatgttttcctaaagcaatgtttttgtacaatttcctgatttccaaaaatatgaccaatgatattctggttga

SEQ ID NO: 807638 - DNA, 120 bp, Artificial Sequence
  ENSG00000261683_21 (sequence is synthesized)
agagtgtgcactatcatcgtaacagcagagacggagagcaagatgtgaggaggttaaaagtcagggtcagaagttcaggttgctctgaccctcaaatcaatttcaagcactgtttgtgac

SEQ ID NO: 807639 - DNA, 120 bp, Artificial Sequence
  ENSG00000261683_22 (sequence is synthesized)
attttcctgtgttccctcgcttgatgttagtctttgcaatgaaccaccgaatcagacttcagggctcatgggactttggggtttcagtagggtcaggtcaatttctacctaccagtgtac

SEQ ID NO: 807640 - DNA, 120 bp, Artificial Sequence
  ENSG00000261683_23 (sequence is synthesized)
tgtcacctatgaggcaaaccattatctaggcgtttgagaacctcaaagttttgaagctctgaggggaaagagagaggatgaagcgctggggcccctgtgtctttggggcctgacatagct

SEQ ID NO: 807641 - DNA, 120 bp, Artificial Sequence
  ENSG00000261683_24 (sequence is synthesized)
gctggggcccctgtgtctttggggcctgacatagctcaacctgtggcttcagggggaccgtgtgcagccaggtcacagtggtaccggaaagggatcctgatccagaccccaagagagggt

SEQ ID NO: 807642 - DNA, 120 bp, Artificial Sequence
  ENSG00000261683_25 (sequence is synthesized)
tgacctcctcggaatgcacctgagtaggactcagcctcattttgcctagcccctgctcaagatagagtcactctggttggaaggcctttggcaataggattggcaactcagagaaagctg

SEQ ID NO: 807643 - DNA, 120 bp, Artificial Sequence
  ENSG00000261683_26 (sequence is synthesized)
gtccctggcatgggcatctctcccaaggcattcttccaaaggatgaatgttgataagacctgtcctcagcaatcctctctttcaattttctggatgatctcaaccatgatcacaactctg

SEQ ID NO: 807644 - DNA, 120 bp, Artificial Sequence
  ENSG00000261683_27 (sequence is synthesized)
tgtaatgccccagagcctatttctgtaatctccgtctccatctgagaaggccaccctgagttccagttacatgctccaactccaccagacttctccaatggggcgtctcaggcactccca

SEQ ID NO: 807645 - DNA, 120 bp, Artificial Sequence
  ENSG00000261683_28 (sequence is synthesized)
tcttagcgtttctaagcctgaactcatgatctttctcctcaaactggttgttcaccatgctttactcccacattttgtttagtgatatcttgcaagccacagacttcacagtcatattag

SEQ ID NO: 807646 - DNA, 120 bp, Artificial Sequence
  ENSG00000261682_0 (sequence is synthesized)
gcacgcacgcccgcactcccacgggagtcagtttctcaccagctgaattatttgaatttagcaccactaaaagtggagcaatcagaaatactctatgcagtgattacttctggctgtgat

SEQ ID NO: 807647 - DNA, 120 bp, Artificial Sequence
  ENSG00000261682_1 (sequence is synthesized)
acataaaaacaggaaaatctcaatagagaaaaaatatgtattgatgatacataatctggatttttccaaagtacaaaaactatgaattgggttgcaaggatttcatgttaagacaacagt

SEQ ID NO: 807648 - DNA, 120 bp, Artificial Sequence
  ENSG00000261682_2 (sequence is synthesized)
aagaataaagacatggagtagaagatacacacgttgagtaggtttaacaggcctgagcaaaagatgcatataatgaaacgtcacaagaacagactagaaattcctctaagcctgttgcga

SEQ ID NO: 807649 - DNA, 120 bp, Artificial Sequence
  ENSG00000261682_3 (sequence is synthesized)
gactgttgataatgaggaatttctgaaaggttgacctatagaagttctgaaaaaatgcttctaaacaaaccagattcctttgtcaaacagataagggaaattatggatatgtaatgccac

SEQ ID NO: 807650 - DNA, 120 bp, Artificial Sequence
  ENSG00000261682_4 (sequence is synthesized)
tttagaaatttcaaatgcacattaacaaagcaacagcaaaaagcaaaccccatttaacattgtttaacctagattttatgaacttatttaccaaggaaactctcccatctgtatttccct

SEQ ID NO: 807651 - DNA, 120 bp, Artificial Sequence
  ENSG00000261682_5 (sequence is synthesized)
acttgtaatacttattaagaatcactattttggtgtcgttggaatttacttagagaaatgcggtctaacctctgctttaagaagacaactctggcagaactatcaattggaaaaagagag

SEQ ID NO: 807652 - DNA, 120 bp, Artificial Sequence
  ENSG00000261682_6 (sequence is synthesized)
tttagatgctaggaggccattataatagctcacttgagagctaatctgtgcatgactctgatgggagaaaataaaactgagaaaaaggcatgcattggaggcaacaatccttggaatgtg

SEQ ID NO: 807653 - DNA, 120 bp, Artificial Sequence
  ENSG00000262332_0 (sequence is synthesized)
tgcaacccccacccccactccatgaactccactccctggagtcctttgctaagagcaatggaaaaagaaaccagagagcaatttccaggagttcatcctgatgagagaactgaaaggtgt

SEQ ID NO: 807654 - DNA, 120 bp, Artificial Sequence
  ENSG00000262332_1 (sequence is synthesized)
gcacacgttagtaacaaggaggcctggtgaccgcctaagcgtccaatcgcggggaccaccgggtcgaggccgagaggatggagaccgcgtcacaggcacctcgctgctggaatggagggt

SEQ ID NO: 807655 - DNA, 120 bp, Artificial Sequence
  ENSG00000262332_2 (sequence is synthesized)
agcagaaactcaagaaacctctagggtcctgttttctggtcgtatgatcccaggagtgcacatgggcccctcgggtgtctgaacagaagggcataggagggagggccgcagccctgcagt

SEQ ID NO: 807656 - DNA, 120 bp, Artificial Sequence
  ENSG00000262332_3 (sequence is synthesized)
cttactctgctggtgtagcggtcacctgccaactcccaccccaccctgcaccgcgggctcctgagtcggcagattaagcattttataaattctattttaaatacgtgttttaaacttgtc

SEQ ID NO: 807657 - DNA, 120 bp, Artificial Sequence
  ENSG00000254011_0 (sequence is synthesized)
tagaaggaggcagatcatctcaagcggccccagtgggaattaagtcaagttcagaaccttcttccttctgaaatggcctccaggaagccagccaggtgccaggaagcctccataccttac

SEQ ID NO: 807658 - DNA, 120 bp, Artificial Sequence
  ENSG00000254011_1 (sequence is synthesized)
agaaagaagtaacttggctcgtcacatgatctgcctctttaatcaatggaggaaaacgcatgggttttgagcctcagatttgcaacccagctctggaaatcacttcttggagcagcagta

SEQ ID NO: 807659 - DNA, 120 bp, Artificial Sequence
  ENSG00000254011_2 (sequence is synthesized)
cctccatcagttatgccaagataataacctctagctcctagggttttggagtggggaggttagagatgatcctggtgaaggcttgagaaaccataacacttcagtaaatagtaatttcag

SEQ ID NO: 807660 - DNA, 120 bp, Artificial Sequence
  ENSG00000262339_0 (sequence is synthesized)
ttagagcaagtggatcaattcctcaaaaatcgcaagctgccagagctgctggctgaaaaatcacaagaaatgttacacaagttagacaatgtgaccttcacccattatcttcatgctcct

SEQ ID NO: 807661 - DNA, 120 bp, Artificial Sequence
  ENSG00000262339_1 (sequence is synthesized)
tttctttcaaacccactgtaactgctgctaactggagcatatgttcggagccacctgaatctacgtcccccaggatgccgtcctcacacgtggcccaaataaaccctccacatgtactaa

SEQ ID NO: 807662 - DNA, 120 bp, Artificial Sequence
  ENSG00000262339_2 (sequence is synthesized)
tgaagctgggagtgaagtttctcagaatgcccttctcagtacgaatccagttgagtctagagacaaggaggaagacgccattgctcccacatgtcaagggcctggctggctgaaaaatca

SEQ ID NO: 807663 - DNA, 120 bp, Artificial Sequence
  ENSG00000262339_3 (sequence is synthesized)
aaaagatattcttattgctctagttacttaggaaataattacagggggtcagagtcagggatcctggataaaacgccaaatccatgatcctagttccagccacagatcaggaggaaatga

SEQ ID NO: 807664 - DNA, 120 bp, Artificial Sequence
  ENSG00000225721_0 (sequence is synthesized)
gcagcccgcggcccggaacccggagcccagagccttcgcagcccccagagacgggctgggcggccgaaacccgagggccaccactcctcgtggctgtccctggccgggggtcggggcgtc

SEQ ID NO: 807665 - DNA, 120 bp, Artificial Sequence
  ENSG00000225721_1 (sequence is synthesized)
cgtctggactcctcagtaggctgtgaagcaggatggggcctgattgagctcaacctcccttcacccgcctcaatgcagagcgacactcacccatcgctcggcgctggctggaaagagaaa

SEQ ID NO: 807666 - DNA, 120 bp, Artificial Sequence
  ENSG00000225721_2 (sequence is synthesized)
ctggaacccccttttcatcaggcgctgcccatgtcgatcatcttgatgacatcatcagcagagttaaccagatgctcctgcagccccaccacttgcacctgttgcttgccgtcctccagc

SEQ ID NO: 807667 - DNA, 120 bp, Artificial Sequence
  ENSG00000225721_3 (sequence is synthesized)
acgcgcagcttggccttcttgttgagcaggtcaaacagctgtgccaggcagggggaatgaggctaaggccactgggcacccggcaccccacccgactgcttcctcctactagcctgccca

SEQ ID NO: 807668 - DNA, 120 bp, Artificial Sequence
  ENSG00000225721_4 (sequence is synthesized)
cagctgactctccagcagggcccggagaggattgggacagacctagcatcacggcggaactcccaagcctcaggttcagagtcacagaggagtatacagctgggagccagtgaacctgag

SEQ ID NO: 807669 - DNA, 120 bp, Artificial Sequence
  ENSG00000229654_0 (sequence is synthesized)
tgtatttaggggaagctggccacattgtaagaagtcggactatgctgagactgtcatgatgacagaaaacccaagctagccaggtggagagatcacacagaaagagatgcctggccagct

SEQ ID NO: 807670 - DNA, 120 bp, Artificial Sequence
  ENSG00000229654_1 (sequence is synthesized)
agccaggtgtggtggctcatgcctgtaaacccagccctttgggaagccgatgcgggcggatcacgagatattaatccaaggaacaatactgacgaatttcacggacaaaatactaagaag

SEQ ID NO: 807671 - DNA, 120 bp, Artificial Sequence
  ENSG00000229654_2 (sequence is synthesized)
acggacaaaatactaagaaggaaatcaagtgaatcaagcggagaagaaagacagtggaaaaagaaaactgaaaataaaaatattttctagaccccttgaaataaagtttgaaaaaccaca

SEQ ID NO: 807672 - DNA, 120 bp, Artificial Sequence
  ENSG00000263680_0 (sequence is synthesized)
cacgctcccaccggtgagtgcatgtagtcatctgggcacctaccgtgtgctccttggatcccaggatgagcagtgaagaaaggatggcgggggatgaaagagatcccctcccaccctcat

SEQ ID NO: 807673 - DNA, 120 bp, Artificial Sequence
  ENSG00000263680_1 (sequence is synthesized)
cccactctcaaggctctagctggaaggcagaggcaacactgcagatgaagttctgaaagtgagatggtgggcaggtaaaggagctgccagccccatggtgccatggctgtggggttttaa

SEQ ID NO: 807674 - DNA, 120 bp, Artificial Sequence
  ENSG00000263680_2 (sequence is synthesized)
gcagcacccaccgagtcagccagaaacctctgattccacctagaaaaataagggaagagttacaccaggaagcaagataatgaaactcatcttgaagcttaaacgtggacggagtggttc

SEQ ID NO: 807675 - DNA, 120 bp, Artificial Sequence
  ENSG00000263680_3 (sequence is synthesized)
aattatggatatagcagactgaagaatattttcaaagaaatacagtttattatgatcacaaacttgacctagagtaaactaagatgtaaatggatatttacactggatagtaattgtttt

SEQ ID NO: 807676 - DNA, 120 bp, Artificial Sequence
  ENSG00000263680_4 (sequence is synthesized)
caagttataaaaatacttaagtttacaatggacatttactacaaaacaacctaatgccacagtgccaagttgttctgtttttattgggtcttttactcctatgatcctatttctaaatgt

SEQ ID NO: 807677 - DNA, 120 bp, Artificial Sequence
  ENSG00000263680_5 (sequence is synthesized)
ttatatgttctaatttgtgatatgtctgaattcactgaatgggatgacatatgaggaacatctagtgccatgtctggtccctattaagcgctcaataaacatcagctatactattattaa

SEQ ID NO: 807678 - DNA, 120 bp, Artificial Sequence
  ENSG00000229656_0 (sequence is synthesized)
taaaggcatgcgccaccacgcccaggagacagcttcccaaggctggaaagaggggagtgcggaacatgcctccaccataccactgcccacctcctgtgacctctgcagcaaaacctgaag

SEQ ID NO: 807679 - DNA, 120 bp, Artificial Sequence
  ENSG00000229656_1 (sequence is synthesized)
ccccaaagaggcagcttctcaaagtaaaagtggaatgaagttcctggtgacctgaattcccatggaggaaagaggaaaaggacattatgcaaggagatggcatctcgtgtccctggtgaa

SEQ ID NO: 807680 - DNA, 120 bp, Artificial Sequence
  ENSG00000229656_2 (sequence is synthesized)
ccaaattccattaggaagacggtgcagtgtgaggtggacctggacctggataaaatgggtgtttaacaagtatttgttgagtaggtggtggaggaggcacgactagatgcagggtctagc

SEQ ID NO: 807681 - DNA, 120 bp, Artificial Sequence
  ENSG00000229656_3 (sequence is synthesized)
cccttgactgtggggaggcccttggtggtggggtgacggtcccccagtctgaggattttccctggatgtagcctctcagtgctaaaatgggacagtcccaggcaaaccaggtcagttggt

SEQ ID NO: 807682 - DNA, 120 bp, Artificial Sequence
  ENSG00000229656_4 (sequence is synthesized)
cactctactcagtgagccccgtgctgtgttcaaattttcctcttaacagatgtggatggatttcggaaacttagaaaccaccatttctctgtgcctgggaggagagttaaatcttctcac

SEQ ID NO: 807683 - DNA, 120 bp, Artificial Sequence
  ENSG00000229656_5 (sequence is synthesized)
cagaatccttttatgtgtgagagaaataaatatctatcctttttatatctcttttgttttggattctttgtcaccagcagccaaacccaattcttacataaacgtgatactaattaaatt

SEQ ID NO: 807684 - DNA, 120 bp, Artificial Sequence
  ENSG00000229656_6 (sequence is synthesized)
catttgcataaactcaccagttttatccttaattactgtgatatacactcatgaagtatgtaccctaaaataccactgtaagttttatttgattacagcattaaacttaatttacagaaa

SEQ ID NO: 807685 - DNA, 120 bp, Artificial Sequence
  ENSG00000229656_7 (sequence is synthesized)
tgcttttctggagtgataatgtgcttgcctgtgtctaagagaaaggtgaagaattgggaaacccatgggtgtcacgaagggtggtgagactggggaacgttttagaaaacctgtaccctg

SEQ ID NO: 807686 - DNA, 120 bp, Artificial Sequence
  ENSG00000229656_8 (sequence is synthesized)
ggctaagccaggactgcttttctggagtgataatgtgcttgcctgtgtctaagagaaagtaccctggctgataaatgggacttggattttaaataccattggataataaatgtatgtgat

SEQ ID NO: 807687 - DNA, 120 bp, Artificial Sequence
  ENSG00000229656_9 (sequence is synthesized)
ggggctaggaggaggcggaggatggggcaggaagtgcgaccgggacaaaggaaccggctgcgcgggagcgcgcctgagggaggccgcggggggcagggccgggactgcgttgagacagtc

SEQ ID NO: 807688 - DNA, 120 bp, Artificial Sequence
  ENSG00000229656_10 (sequence is synthesized)
gccgtgcctcagtttcctcctctgcgaagggcgggaggagtcggacgcgccctagagccccgcgcgttcctggtgtagcctgctgggcccgtgttctttaagttcctcttcctcggagcc

SEQ ID NO: 807689 - DNA, 120 bp, Artificial Sequence
  ENSG00000229656_11 (sequence is synthesized)
gcgcgttcgaccctcgctcccgtttgtccactgatgtcccgtttcgagcccgggagatcctgcatctcggaagccccctgagtcccgaggcaaatcgggaccgtgagcccccctaccctg

SEQ ID NO: 807690 - DNA, 120 bp, Artificial Sequence
  ENSG00000229656_12 (sequence is synthesized)
cagggctccatggggccaaaaaccacgtggtccttctggaagggaactggctaagccaggactgcttttctggagtgataatgtgcttgcctgtgtctaagagaaaggtgaagaattggg

SEQ ID NO: 807691 - DNA, 120 bp, Artificial Sequence
  ENSG00000229656_13 (sequence is synthesized)
cattttgttatttgtatgtcattgctttttgcatcatattgtttgtccttacaaaacaaatctggacacagcaagttgttcattcgcagagaaagaaagcttactcacacttcctgtcat

SEQ ID NO: 807692 - DNA, 120 bp, Artificial Sequence
  ENSG00000229656_14 (sequence is synthesized)
ccagcagcaaagaatactgaccacagagtgacctttaagtgtaaggctttaatgagtattaggctgaatgcctgttttccaacctggtgcaaaatatttatattttagaaattgtgattt

SEQ ID NO: 807693 - DNA, 120 bp, Artificial Sequence
  ENSG00000229656_15 (sequence is synthesized)
ttaacattactgcaagaaagaggggcttctatttcctttttcctctatttagtccctagattaagaattggcaatttttttctacaaaggaccaaattgtaaatatctttgactttgcaa

SEQ ID NO: 807694 - DNA, 120 bp, Artificial Sequence
  ENSG00000229656_16 (sequence is synthesized)
accatgtgatctctgttgcaactgctcaactgcctttgtcttgcaaaagcagctgtggatgatatgtatgcaaataaacatggctgtgttccaataaaactttattttcaaaaacgggaa

SEQ ID NO: 807695 - DNA, 120 bp, Artificial Sequence
  ENSG00000229656_17 (sequence is synthesized)
gtcagccagattttgttcgcaggtcttggtttgccctagatcactgttttttccccccgagtttaaaatcatcatttttttgttggttttaaacccatgccagagcaagagaacttcaca

SEQ ID NO: 807696 - DNA, 120 bp, Artificial Sequence
  ENSG00000229656_18 (sequence is synthesized)
tttctatgggtatactgtgttttagttatttggatgattgtccaaagaatcagtccacaataggaattattgttacctgttttgtgtttccgttggttccagagaggaataatcttatca

SEQ ID NO: 807697 - DNA, 120 bp, Artificial Sequence
  ENSG00000229656_19 (sequence is synthesized)
agtcatgtaggttaaaaaattaaaattagtaaaactatagcaatagaaaaataaatttaatgtttttaaaccttgcatttaaaaggtaaatttggcggggggcggtgactcacacctgta

SEQ ID NO: 807698 - DNA, 82 bp, Artificial Sequence
  ENSG00000229656_20 (sequence is synthesized)
tgctggatcgcttgagcccaggagttcacgaccagcctgcacaacatggcaataccccatctctacaaaaaaatacaaaaat

SEQ ID NO: 807699 - DNA, 120 bp, Artificial Sequence
  ENSG00000229656_21 (sequence is synthesized)
ctcaaaaataaataaataaataaaataaacggtaaatttgattaagaaaaagaaagatgcaaagtgaactgtgagtagatggagggatcataaatttgggggaccaataaatattttcct

SEQ ID NO: 807700 - DNA, 120 bp, Artificial Sequence
  ENSG00000229656_22 (sequence is synthesized)
attttcctcactgtggtggggaaattgataggtgaaataatagagtagctgttattttaagtctgtaggaatttttgcccaatgacaaatgtggaattcaaaacccgtttataggttgtg

SEQ ID NO: 807701 - DNA, 120 bp, Artificial Sequence
  ENSG00000229656_23 (sequence is synthesized)
cctgactagttttctttttcttttctgattaataacaatgtattattatatgtttaaaaaatctggacttacatagcatcttaataattgctcatatacagcattaaatgcacagctgtc

SEQ ID NO: 807702 - DNA, 120 bp, Artificial Sequence
  ENSG00000229656_24 (sequence is synthesized)
ttatttaaacttaaaaagaaactccattttggtgatagctattatcatctcttatagcatgaccaaaaagcatcctcagaaatataagcctacctcacatgtacatggtaaccttggaaa

SEQ ID NO: 807703 - DNA, 120 bp, Artificial Sequence
  ENSG00000229656_25 (sequence is synthesized)
ttagggtgtgtcggcattattattcttactttcagatataaaacagcatggagactgatttttcccaggtcatatgtctagtgacctgcagatttttggaccccaagtccacattcttat

SEQ ID NO: 807704 - DNA, 120 bp, Artificial Sequence
  ENSG00000229656_26 (sequence is synthesized)
actacaccacagttaccaaattgcctttgttgacatgtagacttttcaatttgcaattgctttacacatttaaaaaaattgtgaataaaagaacaaactatttcagttttcagttgcaac

SEQ ID NO: 807705 - DNA, 120 bp, Artificial Sequence
  ENSG00000229656_27 (sequence is synthesized)
ttacagaacaattaaatcataacaaaaacatagtatgtgttttgggtgtatcacttaaatgagtagaataaagggatagaaatcaatatgtatgtggacttgttcttcttttctttttct

SEQ ID NO: 807706 - DNA, 120 bp, Artificial Sequence
  ENSG00000263684_0 (sequence is synthesized)
tcccaaagtgctcagattataggcatgagccaccatgcccggccttcaaactgtttttgcttctgttcttcagctcacccatccttctttccccagtatggtattcccaggttgctacat

SEQ ID NO: 807707 - DNA, 120 bp, Artificial Sequence
  ENSG00000263684_1 (sequence is synthesized)
ggggtcagcagtcttccagagtctagcagaacccacctaactcaatccaggaaaaacagcccccctctgcaacctctcccagagtggagtacactgcaggctctagtggcagaacatttt

SEQ ID NO: 807708 - DNA, 120 bp, Artificial Sequence
  ENSG00000263684_2 (sequence is synthesized)
ctcccttctgtcctcaccttcagctgctccaagtctggcctctccatgctgaccacagcggccagcaactggtcctccaggccatccctggtcacggtgaagttgatcagggtggcctga

SEQ ID NO: 807709 - DNA, 120 bp, Artificial Sequence
  ENSG00000263684_3 (sequence is synthesized)
gcctgcagctcaggctggtagtgaggattagccagcttggtgtggaggatgagccggaacttgggattgtattcacattctttgtctccaattttaatgaatctggaacataaaggctca

SEQ ID NO: 807710 - DNA, 120 bp, Artificial Sequence
  ENSG00000263684_4 (sequence is synthesized)
ggatgtcaaggcccaagccactgaagcctggtgggtgctggccagacattctcagtgccattcaagtcccttcacgtggtaactttcccacagctgagggtcaaccatgagtggccagcg

SEQ ID NO: 807711 - DNA, 120 bp, Artificial Sequence
  ENSG00000263684_5 (sequence is synthesized)
ctcacagttgatgagaatggtggcattctccacggacatgcggtcggctgggaggccctcgttctgccaggcagccacgtcagcatcatccatcagcatcctcaggggatccagggctgg

SEQ ID NO: 807712 - DNA, 120 bp, Artificial Sequence
  ENSG00000263684_6 (sequence is synthesized)
ggtgactggaatgggagtctggtgaagaagaaacaccaccccacgctcagaacagaagcagacattctcagctgggatgaatgcagttactcaccaaatgacacaactcctttaaaagca

SEQ ID NO: 807713 - DNA, 120 bp, Artificial Sequence
  ENSG00000263684_7 (sequence is synthesized)
agatcaacatcccactgaagaatgcctttctggctgtgtgattatttctggaagcaggttctattaaagtcctgatagcttttttttttcccctccatggatgaataactgcagaaattc

SEQ ID NO: 807714 - DNA, 120 bp, Artificial Sequence
  ENSG00000286578_0 (sequence is synthesized)
agtgaagtctgagagagtataagtgtgtataactgaggaaattcaggaagagaaagttaagtaacctgaccaagatcagagagtgaagaagcctgggcacttacagggaatctaagaact

SEQ ID NO: 807715 - DNA, 120 bp, Artificial Sequence
  ENSG00000286578_1 (sequence is synthesized)
gccagggatggaatcacatcctccgcgcttagctttgaaagactgttaacattgcagcatgatgccatgtccaacaagcagaacagcggggaaaattaagagtagcttgtaagggtacct

SEQ ID NO: 807716 - DNA, 120 bp, Artificial Sequence
  ENSG00000286578_2 (sequence is synthesized)
gtgcagaagtcacatgtggaggcctgaggttgggacaagaaggccacagagagcagaaacctcacaaagggcattgtgtgggcacagtcagcactgagccccagcacaaggctcaaacca

SEQ ID NO: 807717 - DNA, 120 bp, Artificial Sequence
  ENSG00000286578_3 (sequence is synthesized)
tgcagaaggcaccagccacacctcaagggacaacaaaggatgcccagaagaggcaggattcagaacagagaccccttttgctacaaccacaaagtgctcctaggctcagatgccttgtgg

SEQ ID NO: 807718 - DNA, 120 bp, Artificial Sequence
  ENSG00000286578_4 (sequence is synthesized)
gagacaaggagatcctgaagagaagaaccctgagagaccagaggcagctctgaagggagatggagctttgaattgactaaatattttcaagattttttaaattaaaagtgatacacggga

SEQ ID NO: 807719 - DNA, 120 bp, Artificial Sequence
  ENSG00000286579_0 (sequence is synthesized)
ttcatgggctgttttttattctggtccccagtaaaggctgctgggatcccacaacagcacagtcggttatttctaatactaccattaacaaacgtttgtgagacatatggagacctggga

SEQ ID NO: 807720 - DNA, 120 bp, Artificial Sequence
  ENSG00000286579_1 (sequence is synthesized)
ccactttatcacctatagtcagtattacttcagtgcttacttcagtgcttaattatttcaatactgaggctcctttataaggagcccaaggtcattgactcagcatcagtgtatcatcaa

SEQ ID NO: 807721 - DNA, 120 bp, Artificial Sequence
  ENSG00000286579_2 (sequence is synthesized)
tttagtttccctgatagtccggctctgaccccagtttcttcgtttgttcctcctgaaccgtgggtaaatgacctacctcttctgggccttggctttcttatacataaaatgtgattaaaa

SEQ ID NO: 807722 - DNA, 120 bp, Artificial Sequence
  ENSG00000286579_3 (sequence is synthesized)
ataccttatttgtagtacttctgtggggactaaatgagatggtagctgtaaaaagcttaggacataagtcacttaatacatggtatcattacttcatcatcagctcttcaccttcaaaaa

SEQ ID NO: 807723 - DNA, 120 bp, Artificial Sequence
  ENSG00000286579_4 (sequence is synthesized)
gttccctcttgtagactgtccttacacagagtgcaggtagctaagagcagcttgtattgtataccctacattttctagtctgtccagagaaggatgagaatttaatagggccagatcctc

SEQ ID NO: 807724 - DNA, 120 bp, Artificial Sequence
  ENSG00000286579_5 (sequence is synthesized)
cattgtgagcttcatggcttccaatattattccacttaaggaattggcctgtcttgcctttggactgttgggttttgggaaatgtgaatttttgattatcaggataacaactcacccatt

SEQ ID NO: 807725 - DNA, 120 bp, Artificial Sequence
  ENSG00000286579_6 (sequence is synthesized)
cattctttctttcccccgcttctggtctttgttaactctcctctgtcctgtagtgctgccttatcttctgcaaataccaagtaatttggaatatggcactttggttaagattgtttgata

SEQ ID NO: 807726 - DNA, 120 bp, Artificial Sequence
  ENSG00000286579_7 (sequence is synthesized)
tttgcatgtatctgctaaacacgctttaattatgattcatgactagctctggattaaaattgtatttctgaatttaaggtttaaaaaattggaatgctattataggcctttggtaagttt

SEQ ID NO: 807727 - DNA, 120 bp, Artificial Sequence
  ENSG00000286579_8 (sequence is synthesized)
gtgttgctaatagtgaattatgaagcgcaaacatttctgagatacaatcctgtaattctttcattctttgggatggggggagtggggagggatagcattaacatgttaaatgacgagtta

SEQ ID NO: 807728 - DNA, 120 bp, Artificial Sequence
  ENSG00000286577_0 (sequence is synthesized)
gggcggggcgcgggccctgggtaggttcctgtggtattaggtggactggagaaagaggcccgcgtgaattaagtgtagttctcttatgcactggcggactctggtcgcccttccttgtga

SEQ ID NO: 807729 - DNA, 120 bp, Artificial Sequence
  ENSG00000286577_1 (sequence is synthesized)
aggctgcctgggtagccgtagaggacgaggccactctaaagcctcgttttcccagcggaattttaactattctaaggatgtccttacagccagttccccactccgctactcagagtgtgt

SEQ ID NO: 807730 - DNA, 120 bp, Artificial Sequence
  ENSG00000286577_2 (sequence is synthesized)
cagactttaccctgtccattcaactccagaaaaaccgggaggtctagattcggaagattaaatttacctttgaattaggacatgtaaaataggaagttaatattagcatcctaatgacaa

SEQ ID NO: 807731 - DNA, 120 bp, Artificial Sequence
  ENSG00000286577_3 (sequence is synthesized)
aagttttctcgttatcatacttgactcaaatgggaatcttacggatattaatgttttttccagaaacaggtttgaaaggtatttcaaggataaatctggggaaagggatggaagcaactg

SEQ ID NO: 807732 - DNA, 120 bp, Artificial Sequence
  ENSG00000286577_4 (sequence is synthesized)
atttttaatttttagatagtactctcagagcatttatttagtccaaaactgttaatttaatgaattaggctaaactagacgctggggtaacaaagctgagttagataccctctcctctga

SEQ ID NO: 807733 - DNA, 120 bp, Artificial Sequence
  ENSG00000286577_5 (sequence is synthesized)
ggcagctaaagagaaggaaagtctggtggctgacaagtaaaccaacagttatgttcttcagagaggagatctcagactctctaagcaaaagaaactaatagctgtatgacaacagccaaa

SEQ ID NO: 807734 - DNA, 120 bp, Artificial Sequence
  ENSG00000286577_6 (sequence is synthesized)
gaagaggttatgtgctgaaacagaatgaccttcacaagatgcagcctctggatcttggacttccccagcctccagaacttgagtgcaccacagttattgtcatatacagaaaattctgac

SEQ ID NO: 807735 - DNA, 120 bp, Artificial Sequence
  ENSG00000286577_7 (sequence is synthesized)
tgacagttccagagctttttggcatcagagaaagtcaagtactgtgttacctctttctatgactcccaagagaataatccagcacaactactcagtatcttggaagaaggccttatgact

SEQ ID NO: 807736 - DNA, 120 bp, Artificial Sequence
  ENSG00000286577_8 (sequence is synthesized)
ttggagagccttctttctcacctacacagccttacagcattcccctgtattctcctgttctaagtttctctcccttatttaaattctaacttcaaatgtaacagttgactaatgttaaaa

SEQ ID NO: 807737 - DNA, 120 bp, Artificial Sequence
  ENSG00000286577_9 (sequence is synthesized)
ttaatttccaaaagaagttcattaattgatcaagttaaagaatttccttctatatttacgtgaatttaggttgaataaatttcatatttttagggaaatatctaggaagcattaaaaata

SEQ ID NO: 807738 - DNA, 120 bp, Artificial Sequence
  ENSG00000286577_10 (sequence is synthesized)
acagttgacattgagatatttagtaaacaaaatcattctagtttcttctgtcttgccccctcccatcttatttgccataacctataaatttagccaaaatgcagcaagtctaattcattt

SEQ ID NO: 807739 - DNA, 120 bp, Artificial Sequence
  ENSG00000286577_11 (sequence is synthesized)
ataagcagttgacattcaaaggttatcctcattgatgtctaaatttttatgatgtgtttctgctactgtattacaattctgaattccgtatcaaatttattaaatttttttattgctaaa

SEQ ID NO: 807740 - DNA, 120 bp, Artificial Sequence
  ENSG00000286575_0 (sequence is synthesized)
agctgaggaaccccgaggctcgcgggagggaaagagggagggagaggagcgccggctgctcccgcgagaggcaggccgaccagccaatcacaagcgggtgcccgccctcccagccagggg

SEQ ID NO: 807741 - DNA, 120 bp, Artificial Sequence
  ENSG00000286575_1 (sequence is synthesized)
gctggaatgggggcgtgaccgtgtgccgctccgcggaccaatggcaaggttgacttacacagaacagagataaaattttacaattccatgagatcctgggagtaacatcagtcattctgc

SEQ ID NO: 807742 - DNA, 120 bp, Artificial Sequence
  ENSG00000286575_2 (sequence is synthesized)
cataaaggcacttgcttcctgaagcttctaattacaactttcaagtgtctacctttctgaaatgaagaggtctgcctgcatctggtaagatgagcatctggcagaggatctccaagcctg

SEQ ID NO: 807743 - DNA, 120 bp, Artificial Sequence
  ENSG00000286575_3 (sequence is synthesized)
gaagaaggccagctctgctggttgctactgctaggacttcacatcaattgcatttccatctctcagtatactggaactcctgcttgaaagggtttgccctggcctggtgcggtggctcat

SEQ ID NO: 807744 - DNA, 66 bp, Artificial Sequence
  ENSG00000286575_4 (sequence is synthesized)
ttgggcgtggtggctactatgaggctgaggtgggagaatcccttgaaccctcttctttccactcaa

SEQ ID NO: 807745 - DNA, 120 bp, Artificial Sequence
  ENSG00000286575_5 (sequence is synthesized)
gaggtgggagaatcccttgaaccctcttctttccactcaatgatctatctaccaacaggagatggtgatatcaatatcacttctaaatgcatgcttctagttcaaaaagatctcaagact

SEQ ID NO: 807746 - DNA, 120 bp, Artificial Sequence
  ENSG00000286575_6 (sequence is synthesized)
tgaaggaaatgaaaggtggggtacccagatataagcagtcctttcctgcaccaacatcctgtgattctatgagaagtacaactatggagagatggagcagcacactggtttagagtgcca

SEQ ID NO: 807747 - DNA, 120 bp, Artificial Sequence
  ENSG00000286575_7 (sequence is synthesized)
gctccagaatcagatgtgggtgcaaattcaccactttctagctgtatgactttggatttgtaaatgaatctttcagagcctcagtctctccatctgtcaaatgaagataataggggtgat

SEQ ID NO: 807748 - DNA, 120 bp, Artificial Sequence
  ENSG00000286575_8 (sequence is synthesized)
tgtgaggactaaatgacagggtgccttaaacatattaactattcaataaaagttaattcctctatattactgctatggttgttaatgctattactaccattactattaagacagtccata

SEQ ID NO: 807749 - DNA, 120 bp, Artificial Sequence
  ENSG00000286572_0 (sequence is synthesized)
cagccacgcactgccttagaggctgccatccctctccacaaggacccaagtcggccagggaggagccgccactgcccagcgttgttggggaatctgacagtacaagatctggaagaagcc

SEQ ID NO: 807750 - DNA, 120 bp, Artificial Sequence
  ENSG00000286572_1 (sequence is synthesized)
ctgcatctcaaaaaaaaaaaaaaaagatctggaaggaattggccgtccagaaccatctcctccagctccctctttgtgcaatagagaagactgaggcacaagaaggagggatagctcact

SEQ ID NO: 807751 - DNA, 120 bp, Artificial Sequence
  ENSG00000286572_2 (sequence is synthesized)
gaggcacaagaaggagggatagctcactcaagcctgcacgttacacacaggactcgcttaagctatcagcggctctgtgaagaccgggacagttcctttcacagatgaggaaaaagatac

SEQ ID NO: 807752 - DNA, 120 bp, Artificial Sequence
  ENSG00000286572_3 (sequence is synthesized)
tcagaaaggggagggaaatttcccaagaccacacagtgaaggggcaccatcagacatctgaacccaggctttccggccctctgatccatgctttgtccagcataccatgctgccttgctg

SEQ ID NO: 807753 - DNA, 120 bp, Artificial Sequence
  ENSG00000286572_4 (sequence is synthesized)
cttgtggggttttctggtccttggaatctgaaacatataataaacagcagctgagtattattccgtaccctagattctagcctagaccctagaagttgaagcagctctctgctttccgta

SEQ ID NO: 807754 - DNA, 120 bp, Artificial Sequence
  ENSG00000286572_5 (sequence is synthesized)
tgccagtcagcctcctatttcctgagtggcggactttctcccagggacagaggacccaacccataccaccactccttaacacgcaggcacagaatctcccagggacagaggacccaaccc

SEQ ID NO: 807755 - DNA, 120 bp, Artificial Sequence
  ENSG00000286572_6 (sequence is synthesized)
ataccaccactccttaacacgcaggcacagaaacacgcagggaccccactcagtgtgtgggttcagctaatgttggcgacttgagtcctttttacacacatgcacacttccagagctttt

SEQ ID NO: 807756 - DNA, 120 bp, Artificial Sequence
  ENSG00000286572_7 (sequence is synthesized)
ccactccatccttcacgtgttcagctgccacagggaatgagcttgggaagagggctggagtagtcattctcacctccagggctagtgcacactctctgtgaatgtaattatctggagtcc

SEQ ID NO: 807757 - DNA, 120 bp, Artificial Sequence
  ENSG00000286572_8 (sequence is synthesized)
ctacttggaatgggggcagtgcaaagacagggccacttccccctgagaggacgcccacacgcatgcgaatacacacaatggtggtttttttcattttcttctgtctcttcccacagagag

SEQ ID NO: 807758 - DNA, 120 bp, Artificial Sequence
  ENSG00000286572_9 (sequence is synthesized)
gggccactgggccacaccagcaaaggcaggtgagggagggaggaaaagagatgcagaaggtgcttccctcccagaagcctgggccatttagaaaatccttaggccgcctcctcagtcctc

SEQ ID NO: 807759 - DNA, 120 bp, Artificial Sequence
  ENSG00000286572_10 (sequence is synthesized)
ttctcctccccacctaccacctggcttacagtgccccacacccatccccaaactttttttaaatccctgtttcctgccttgaggagacctagatccccatcctgggagggactggcaaca

SEQ ID NO: 807760 - DNA, 120 bp, Artificial Sequence
  ENSG00000286572_11 (sequence is synthesized)
attaacaaaggcaccatggagtaaagacaattaacaatccagaaaagaggcgaaagagaggctttgttctggtctccatgacaacagcggggggtgggggggagatgagggaggaggagg

SEQ ID NO: 807761 - DNA, 120 bp, Artificial Sequence
  ENSG00000286572_12 (sequence is synthesized)
aagagaaggggcatccagagaggctgatactttcactttcctttcatccctcccctctccgcccctttgggtttctgccagggatcccaaagggaacagggctgggacaggccaagtctg

SEQ ID NO: 807762 - DNA, 120 bp, Artificial Sequence
  ENSG00000286572_13 (sequence is synthesized)
aaggctggagattagaggtgggcaactccaagattcaagccttagctgagggctcactggggagttaagactagacaggaagccctggggactgaatcaaaggcatttgagtgcttcctc

SEQ ID NO: 807763 - DNA, 120 bp, Artificial Sequence
  ENSG00000286572_14 (sequence is synthesized)
ctctttttccaaagggcttaccttatgctaagaactgtacccaaagatcaagtctctgccctggatggacacctcacggtcaaaaagcttggtggcttctgcatcccttctcatcaggac

SEQ ID NO: 807764 - DNA, 120 bp, Artificial Sequence
  ENSG00000286572_15 (sequence is synthesized)
tctcatcaggacgtggtggaaagtgaagaagtgaaggcaggactgtctacatagcttgcagggtccagtacaaaatgaaatgttccaacattagtccaggcgcggtggctcacacctgta

SEQ ID NO: 807765 - DNA, 75 bp, Artificial Sequence
  ENSG00000286572_16 (sequence is synthesized)
tgaacccaagaatgagaccctgaaagaaacagagaaagagaaagaaagaaagagagagagagagaggaaggaagg

SEQ ID NO: 807766 - DNA, 120 bp, Artificial Sequence
  ENSG00000286572_17 (sequence is synthesized)
aagagaaagaaagaaagagagagagagagaggaaggaaggaaggagagagaaagagaaagaaagaaagagagagagagagaggaaggaaggaaggagaagaaagaaagaaagagaaagag

SEQ ID NO: 807767 - DNA, 120 bp, Artificial Sequence
  ENSG00000286573_0 (sequence is synthesized)
agaacaacaaagaactgatataattgccacgatgaagctggggctgcagggattacctctgtggaattaagggaagctgataagattctcctcctccataaggattattacaagagcgat

SEQ ID NO: 807768 - DNA, 120 bp, Artificial Sequence
  ENSG00000286573_1 (sequence is synthesized)
tgggactcggggaaagaaagcggtttgaacagtaagactgcaaagtcctgaaagaggttacttgaagcaattgggaaatcctgaaagcacctatctggaagctttggctgagaccaggcc

SEQ ID NO: 807769 - DNA, 120 bp, Artificial Sequence
  ENSG00000286573_2 (sequence is synthesized)
cagaaggacagacagacagcacgttcctctccggctctgtccttctgcagggaaactgaagatgggtgtgttttgacccagaatccgcagggttagagttgaattttacaaatcacttca

SEQ ID NO: 807770 - DNA, 120 bp, Artificial Sequence
  ENSG00000286573_3 (sequence is synthesized)
ggatgcagcgttgagacggaagacttaggattggagaattaattttctcttcctcctgagtaaagcagctcttcctaaagctgagaatcttagcagaatgaataaaccaaatggcagcag

SEQ ID NO: 807771 - DNA, 120 bp, Artificial Sequence
  ENSG00000286573_4 (sequence is synthesized)
tccggtaagcactgtatgaccctaatcattctgaccattttgtaccacgttttacagtggcctgattaaataggagagaatccacgtgacatggtgctcctgagaacaaagctaaagtat

SEQ ID NO: 807772 - DNA, 120 bp, Artificial Sequence
  ENSG00000286573_5 (sequence is synthesized)
gccaatcaaaccatgtgccctggaggaaaaacttggggcactctcttctagcagctaataaaaaataggacaacacttgaattctacacggagaactgtttcttacatttagttgataca

SEQ ID NO: 807773 - DNA, 120 bp, Artificial Sequence
  ENSG00000286573_6 (sequence is synthesized)
gtaagaagtaaccagctacagagaaatcacaagatctggattagaccagaacatttgtttattaaaatgtaatttaagtaatcagaaccttgtgaatgtttcaaactggaaaccctagaa

SEQ ID NO: 807774 - DNA, 120 bp, Artificial Sequence
  ENSG00000286573_7 (sequence is synthesized)
aatctaagttttctcatgagatattttctagtaaacacttccattgcccagtcacacctataaagtgagtatgcacctgtgtatgatcccataagagcacttttaaagtaacaaaaccac

SEQ ID NO: 807775 - DNA, 120 bp, Artificial Sequence
  ENSG00000286573_8 (sequence is synthesized)
tataatatgaagagtaatatgataatttccttttcaaacactgattttatgagaagcgcttgatcccaaaatacctgtatgagaccagctcactctttcctacatagaatcaatacttta

SEQ ID NO: 807776 - DNA, 120 bp, Artificial Sequence
  ENSG00000286573_9 (sequence is synthesized)
ttggcctataaatctaagatgcatataattcttaagtcttcttttcaaacactgctaactgttaaagtatgtccattaaaactaaggaaaaatcatttttataaaatatggatgaaccta

SEQ ID NO: 807777 - DNA, 120 bp, Artificial Sequence
  ENSG00000286573_10 (sequence is synthesized)
tgaataaaaacttccctgactatccaagtgccaagcattgtgtctctcagcattagaatattaagaaatagccttcccgcagttgtatgtacagtggtataattagaataaaattgaagt

SEQ ID NO: 807778 - DNA, 120 bp, Artificial Sequence
  ENSG00000286573_11 (sequence is synthesized)
attctttgaaacagaagccttagaaaaatgagtgaagaacatcagtggatttcctaaactgatattctgcgaagcactcttccaaaaacattaataaatgtgccacaaaataaatgccca

SEQ ID NO: 807779 - DNA, 120 bp, Artificial Sequence
  ENSG00000286573_12 (sequence is synthesized)
tggtcaaacaagtttaggaaaaactctgttgtacaaaatgcacttttcatattaaaggcactgagaagttctgcaacaaagaatcatgtttaattgtatttaatccaccatttccaaaat

SEQ ID NO: 807780 - DNA, 120 bp, Artificial Sequence
  ENSG00000286573_13 (sequence is synthesized)
ttgaaatgagaaaatataatacccaccccactgctggcataccttttattaaccaaaagaatcatttcttaggaaattctaatttgagaaacaatagatcgtttaaagagatctggtatt

SEQ ID NO: 807781 - DNA, 120 bp, Artificial Sequence
  ENSG00000286573_14 (sequence is synthesized)
tgcctttcttacccaaactttcaaaaggaaaggaagtgtattgaaaaaataatttgaggttttattgactcatgctgtcagtcgaatgctttctgtccatttttttcacgaattgggtat

SEQ ID NO: 807782 - DNA, 120 bp, Artificial Sequence
  ENSG00000286573_15 (sequence is synthesized)
attccagcctcctggtctcccagccttggggagtgaccttccgtttccaggggaaatacaggtgcccagaacttccagcagggggctctgtccgctagcactgactgtgaaggactcaaa

SEQ ID NO: 807783 - DNA, 120 bp, Artificial Sequence
  ENSG00000286573_16 (sequence is synthesized)
gctggttcaaggttaagatggctcaacaagtgacgagccagaaatgtcatctggccactaggacgccgcattatgaaagtgtgatcatggttcaagaacgttgccatgaggaaaatctgt

SEQ ID NO: 807784 - DNA, 120 bp, Artificial Sequence
  ENSG00000286573_17 (sequence is synthesized)
gcacggaattactattattaggttttatcgtgtgtgcattttcaaacatagtaagacagcccaaaagggaaaaagtagaacaagccaaaaagtattttaaaaaaataattatccaattat

SEQ ID NO: 807785 - DNA, 120 bp, Artificial Sequence
  ENSG00000286573_18 (sequence is synthesized)
agggctcctgttgaaaatattaaaagaacttaaaagtttccctacatggttgacaactcaagtatgcccactttctatcaaaaataatgcagaaaatacaaaatgcgagagaaaagttga

SEQ ID NO: 807786 - DNA, 120 bp, Artificial Sequence
  ENSG00000286573_19 (sequence is synthesized)
aaataaatggaaataaactacttccattgaaacaagggacaaatataactcttcagaaataatgtctgcaaatgagagaagcacattgttttgaggaagctgtattttgatgatgttcac

SEQ ID NO: 807787 - DNA, 120 bp, Artificial Sequence
  ENSG00000286570_0 (sequence is synthesized)
gacacccctgaggctggggagccatgaccctgcccctttaaggaccctgctccgaactgaaacagtaacacacatccatgagctaggacagggaagagaatgacaaggactctaaaccac

SEQ ID NO: 807788 - DNA, 120 bp, Artificial Sequence
  ENSG00000286570_1 (sequence is synthesized)
ccagcagtgaaatttccaatggaaataagacccactgggcccctctgtgttgggggtggagtgggggagggcagcactcctggagactcagatcggttttcaggttgtttgccccagcac

SEQ ID NO: 807789 - DNA, 120 bp, Artificial Sequence
  ENSG00000286570_2 (sequence is synthesized)
tgctcagtgggaaatccttcatccctgaacccaccagcaattccagacccaggggtgaagggaggtgcaggtttggccaaggcatccccagggacaagcacggatgacagcagatgctgc

SEQ ID NO: 807790 - DNA, 120 bp, Artificial Sequence
  ENSG00000286570_3 (sequence is synthesized)
tgtctcttggggcctgcacctcggcagaggctgattccagcttgcagttctccgccacttgcaggttgccctggagtttgcagtatgcatttacaactaatccaagtccactttgaaata

SEQ ID NO: 807791 - DNA, 120 bp, Artificial Sequence
  ENSG00000286570_4 (sequence is synthesized)
attctatactgcttcaaggtcatggaggacattcaggacttgagcacttaccaaatcacctttgaagtggagccctgtgtgtgctgagaccactaggaccctggaacgggtgcccgtcac

SEQ ID NO: 807792 - DNA, 120 bp, Artificial Sequence
  ENSG00000286571_0 (sequence is synthesized)
gtctatttttagggaatttcactatatgatatttactttattgtcttatgatactggagtgaaccaaaaagtacacccttacaaacagatatttctagaattagtcactcaatcctagtt

SEQ ID NO: 807793 - DNA, 120 bp, Artificial Sequence
  ENSG00000286571_1 (sequence is synthesized)
agtttgtagatttattttctcttttaaaatcctacaatccagatgttataattaatataggacctagttagattattttaaagttctaataacacattcactatgcattaatttcttttt

SEQ ID NO: 807794 - DNA, 120 bp, Artificial Sequence
  ENSG00000286571_2 (sequence is synthesized)
tttcaaaacagctttgttaaggtatagttaacatatagtaaactgtgaagtttgactagttttgcaatttaactagttttgatatatgtatgcacctgtgaaataatccctgcagtcgga

SEQ ID NO: 807795 - DNA, 120 bp, Artificial Sequence
  ENSG00000286571_3 (sequence is synthesized)
taatgaatatatccattttctccaaaagattgctcatgccattttcctatggctccctcccacacttctcccaccccttcacaccacccatcctcagtctgccactgctttgctttatac

SEQ ID NO: 807796 - DNA, 120 bp, Artificial Sequence
  ENSG00000286571_4 (sequence is synthesized)
cactatagatgaggttgcatatttcctgaatgttatataaagggaataacataatgtgtacttgtttttggtctagattctgtcactcagcacagttattttgaaattttccatggtgta

SEQ ID NO: 807797 - DNA, 120 bp, Artificial Sequence
  ENSG00000286571_5 (sequence is synthesized)
atgtgtaacaatattttattcctttttattgttggttagtattcatcgcatgaccgatagcactaaccgtttgtctgtccactaacctgttgatggacataaaacatacacatagaccaa

SEQ ID NO: 807798 - DNA, 120 bp, Artificial Sequence
  ENSG00000286571_6 (sequence is synthesized)
cattttttatgaaggtgccaagaacacacgttggggaaacgatagtttcttcaataaacgatgctgggaaaactggatatccacatacagaagaatgaaactagtctccaatctctcagc

SEQ ID NO: 807799 - DNA, 120 bp, Artificial Sequence
  ENSG00000286571_7 (sequence is synthesized)
atctaaaaaaatcaactctacatgtattaaagatgtaattgtaagacctgaaactactagaagaaaatataggtggaatgcatcttgaaattgggctagacaagaagtttttaaataaaa

SEQ ID NO: 807800 - DNA, 120 bp, Artificial Sequence
  ENSG00000286571_8 (sequence is synthesized)
actcagaagcacaggcaacaaaagcaaaaacagacaaaaaaattacattgaactaaaaagcttctgcccagcaaaagaaacaatagagtgaagaaacaacctacagaatgggagaaaata

SEQ ID NO: 807801 - DNA, 120 bp, Artificial Sequence
  ENSG00000286571_9 (sequence is synthesized)
ttttcaaactatgtgtctgacaaagggttaatattctgaatatataaggaactcaactcaatagcaaaaaatcaaataaactaatttaaaaatggacaaaaggactgaacagacatttct

SEQ ID NO: 807802 - DNA, 120 bp, Artificial Sequence
  ENSG00000286571_10 (sequence is synthesized)
caaaagaagacatatatatggccaacagatgtatgaaaaactgctcaacaacatgaacatcagagaaatgcaaattaaaaccatgacaaaataccaccttatcccagtgagaatgggata

SEQ ID NO: 807803 - DNA, 120 bp, Artificial Sequence
  ENSG00000286571_11 (sequence is synthesized)
gaactacaactctaactggctttagcaatgaagaaaatttctggtttcacatctttcaagggtccagaggtggctacagattcaggagacttgcaccaggaggaactggcaaatttcctt

SEQ ID NO: 807804 - DNA, 120 bp, Artificial Sequence
  ENSG00000286571_12 (sequence is synthesized)
ggcaagaacagatgaataaataagaagcatgagcttgcgacttttagctggggtgattcgtcaaaaaccacagcactgtggctgttttcagattttaagggttatgttcaacctcaatca

SEQ ID NO: 807805 - DNA, 120 bp, Artificial Sequence
  ENSG00000264660_0 (sequence is synthesized)
gaaagaataagaagccagagggaggcggctgcctgcaggaggtttagcataaaggaaataggaatgagcttcctgcctcctgcccagcccctgctgtcagagatacttggtgcttccagt

SEQ ID NO: 807806 - DNA, 120 bp, Artificial Sequence
  ENSG00000264660_1 (sequence is synthesized)
tctggagacttccttgagttctgtgactcaaaacaacttccttcccctgtgggcatcaacaatgagagatcttcagatgcgatcaggcactccagtccttccatctcccacaatgttgga

SEQ ID NO: 807807 - DNA, 120 bp, Artificial Sequence
  ENSG00000264660_2 (sequence is synthesized)
aaacctctgccattccctttatctctgaagacagatggacttgactgtcagcttagcttggtttcaggaggaaaggaagataaacccctgtgtttaagctgccgtgttaaatgggaggca

SEQ ID NO: 807808 - DNA, 120 bp, Artificial Sequence
  ENSG00000264660_3 (sequence is synthesized)
cctggtcttttttctttttcttttttaaagactgggtctcgctctgttatccaagctgcagtgcagtgatgtgatcatagctcacctcagccttgaactctcaggctcaagcgatcctcc

SEQ ID NO: 807809 - DNA, 120 bp, Artificial Sequence
  ENSG00000264660_4 (sequence is synthesized)
ttgaactctcaggctcaagcgatcctccagcctcagcctcctgaattgctgggattatagcacctggccaattttaaaatctttctgtagcgacaggatctcactatgttgcccaggctg

SEQ ID NO: 807810 - DNA, 120 bp, Artificial Sequence
  ENSG00000280809_0 (sequence is synthesized)
acagtgaaacgagcttgcatgagagcatcccaggaccactgaacattcagagaacagccagttgtaaggggtaaaataaattggagaagagaacatccacatggattaagtcccaagctc

SEQ ID NO: 807811 - DNA, 90 bp, Artificial Sequence
  ENSG00000280809_1 (sequence is synthesized)
ttggagaagagaacatccacatggattaagtcccaagctcaccctttgttagtgagaatgtagtcacgtggccatacctactacaagatg

SEQ ID NO: 807812 - DNA, 120 bp, Artificial Sequence
  ENSG00000280809_2 (sequence is synthesized)
agcctcccgagtagctgggattacagttcaaactgttgttacgagtgtgtcataaccatttggttatacctgattccaggcttcatcatttacagctgtaagtgatataagacagagttt

SEQ ID NO: 807813 - DNA, 87 bp, Artificial Sequence
  ENSG00000280809_3 (sequence is synthesized)
catttggttatacctgattccaggcttcatcatttacagctgtaagtgatataagacagagtttccccatgttggccaggatggtct

SEQ ID NO: 807814 - DNA, 120 bp, Artificial Sequence
  ENSG00000280809_4 (sequence is synthesized)
ccggcctcaggtctcaaattcaggtttttgctgctattggcagtggcttgttgcaaatatttattgaagatttcaagagtagtaactgaaaaaccgtataagactcagcctgcctgcacc

SEQ ID NO: 807815 - DNA, 80 bp, Artificial Sequence
  ENSG00000280809_5 (sequence is synthesized)
ctcacacatttggtgctgtgactcggatccggagacctcccttgggagataaaatcccctgtcctcctgctctttgctcc

SEQ ID NO: 807816 - DNA, 69 bp, Artificial Sequence
  ENSG00000280809_6 (sequence is synthesized)
tacgacctcaaaatgacatgaatgactgaaaaagcatgtggagcacaagactcaagaactaagtgaaag

SEQ ID NO: 807817 - DNA, 120 bp, Artificial Sequence
  ENSG00000280809_7 (sequence is synthesized)
aaaagcatgtggagcacaagactcaagaactaagtgaaaggactcacacttcctgatttcaagtaaagctacagcaatcaagacgtggcattgatgtaagaatagacacatcaatgaatg

SEQ ID NO: 807818 - DNA, 120 bp, Artificial Sequence
  ENSG00000280809_8 (sequence is synthesized)
tttgtgtgctaaagtgtatataatatttaccattttaaccatttttaagtgcacagttcagaagcattaagaataaacaatgttgtataaccatcaccattatccagttccagaattttt

SEQ ID NO: 807819 - DNA, 120 bp, Artificial Sequence
  ENSG00000280809_9 (sequence is synthesized)
catcacctcacacagaaactctgtacctattatcaacaataaattttcattccccccttgccctcagtctctggtaaccactattgaactttctgtttctatgaatttgccccttctcag

SEQ ID NO: 807820 - DNA, 120 bp, Artificial Sequence
  ENSG00000280809_10 (sequence is synthesized)
tgcctaatatgagtggaataatacaatatgggtcctttgtgcctagtttatttcacttactgtaatgttttcaaggttcatccatgttataatatggatcagaattttatttcttttcaa

SEQ ID NO: 807821 - DNA, 120 bp, Artificial Sequence
  ENSG00000280809_11 (sequence is synthesized)
gcatgaataatagtccatggtatgtctataccacattgtttatccattcatcagctgatggatatttgggggttgtttctatcttttggctattgtaaatgatgatgttatgaacaatgg

SEQ ID NO: 807822 - DNA, 120 bp, Artificial Sequence
  ENSG00000280809_12 (sequence is synthesized)
tgtataatgtctgtttgagcactgctttgaattgtttggggtatatacttaggagcggaattactggatcatatgtcaattctatgtttaatttttgaggaactgtcgagctgtctttca

SEQ ID NO: 807823 - DNA, 120 bp, Artificial Sequence
  ENSG00000280809_13 (sequence is synthesized)
cagcagctgcataattttacattcccaccacaatgcataagagcttcagtttctcaaaatctttaccaacatttatttttctttttaaaaatatataatagccatactaatagtataaag

SEQ ID NO: 807824 - DNA, 120 bp, Artificial Sequence
  ENSG00000280809_14 (sequence is synthesized)
taatatttcattgtgcatttgatttgcatttccctaatgataactgatgttgagcatcttttcacgtgcttgttgaccatttgtatatcttcttttgagatatgtctaatcaagtccttt

SEQ ID NO: 807825 - DNA, 120 bp, Artificial Sequence
  ENSG00000280809_15 (sequence is synthesized)
gtccattttttaattgggctgggtattattcttctgttattgttgagttgcaggagttctttatatattctgcataaaagttccttatcatatattgattttcaaaatctctctcctatt

SEQ ID NO: 807826 - DNA, 120 bp, Artificial Sequence
  ENSG00000280809_16 (sequence is synthesized)
acagtgaaacgagcttgcatgagagcatcccaggaccactgaacattcagagggctggaggcagagaaaaacttcccctactcaagaaaaagaagctatttttgtcaagttaaatgagcc

SEQ ID NO: 807827 - DNA, 120 bp, Artificial Sequence
  ENSG00000280809_17 (sequence is synthesized)
tgaacctgcagagctgaattggcagatgaatattgctaattggtgcagtttcttcggtgcaggaaagagtttccaatcagaccggcaattcattggccacatgaagcctgtttggtggtc

SEQ ID NO: 807828 - DNA, 120 bp, Artificial Sequence
  ENSG00000280809_18 (sequence is synthesized)
ggcctctgccctggctctgaaagaggcaggctgtgaatgatggttgtcagtgtctggagttttcactgaaaaacagtcccctgaaatggaaagacacacagaggggagtgatctcatcgc

SEQ ID NO: 807829 - DNA, 120 bp, Artificial Sequence
  ENSG00000280809_19 (sequence is synthesized)
cactgatttttcccaactttcagttttgtatctccatggtggaactcgatacagcagcatccctcagtggttccagcccagaagtgcaaggggaagccggctgcctgttcatgaattctg

SEQ ID NO: 807830 - DNA, 120 bp, Artificial Sequence
  ENSG00000280809_20 (sequence is synthesized)
tagctcaaaaagcagaggccgagaaagcaaaatttcaaacctttgtcagaaagggtgagaccttgctcagcacgatagctgagaacagcttcctccttcaatgctggtctctctatactg

SEQ ID NO: 807831 - DNA, 120 bp, Artificial Sequence
  ENSG00000280809_21 (sequence is synthesized)
acagttgacagctgatgatcccacattctcagtcatgcgaatgacctcacctgagcaccagtttgtaacggatgtttaagaggaaagcaagggaattaaatgctgcacaggaatttggca

SEQ ID NO: 807832 - DNA, 120 bp, Artificial Sequence
  ENSG00000280809_22 (sequence is synthesized)
cttctgtatagaaatagaaaaactaaatgaaacttatagtaccttccactcaactaagattcttgtgaagcaaagtatatctgggaaaatatagtaatatggttattttgtgttcatagt

SEQ ID NO: 807833 - DNA, 120 bp, Artificial Sequence
  ENSG00000280809_23 (sequence is synthesized)
gtgtgactctacttataagcactttttaatcattataatcaatcactttaaagatcttagagggaacttattaatcaaaatttaagccttctttaaaaaaaaaaaacttcccatatacta

SEQ ID NO: 807834 - DNA, 120 bp, Artificial Sequence
  ENSG00000280809_24 (sequence is synthesized)
attttgcacagaagcaaaagattagattgggattctgcctgttgtggagagacaaagacaagagtgctccagatttctgtgtttgtgtttttacttcatactttcaatgcgtccgcaaga

SEQ ID NO: 807835 - DNA, 120 bp, Artificial Sequence
  ENSG00000280809_25 (sequence is synthesized)
atagacttgtgtttctcttcttaatacacaatggttagagctcacagaatgtaagtaagagattctttgaattgcacaataagccaaggaactttcccagctaccgggaggctgaggtgg

SEQ ID NO: 807836 - DNA, 120 bp, Artificial Sequence
  ENSG00000280809_26 (sequence is synthesized)
gaggattgcttgaccccagtgggtggagattgcagtgagcagagaacacatcactgtcactctagcttgagtcacagagcaggaccttgtctcaaaaagcaaacaaaaagctgggtgcag

SEQ ID NO: 807837 - DNA, 84 bp, Artificial Sequence
  ENSG00000280809_27 (sequence is synthesized)
catgtgggaggatcacttcagaccagaagttcgaggccagcctggccaacaaggtaaaaccctgtctctactgaaaatacaaaa

SEQ ID NO: 807838 - DNA, 120 bp, Artificial Sequence
  ENSG00000280809_28 (sequence is synthesized)
aatcccagctactcatgaggctgaggcaccaggatcacttgaactgagaaggcaaagggtgcaaagaaacaaacaaacaaaacacacaagccaagaaacttgaccccagtgtttgggtct

SEQ ID NO: 807839 - DNA, 120 bp, Artificial Sequence
  ENSG00000280809_29 (sequence is synthesized)
agccaagaaacttgaccccagtgtttgggtctatctctaaaaattctgactgaataagttgcccacttttcagataggtgcccaagctcattttgtgcttctctaacagaatgctgagac

SEQ ID NO: 807840 - DNA, 120 bp, Artificial Sequence
  ENSG00000280809_30 (sequence is synthesized)
tgggtaatttattacaaagagaaatgtattggctcacagttctggaggctggaaagttcaagaccaaagtgccagcatctggtgcaagtgcaagcgtctgtgctgcatcctcacatggtg

SEQ ID NO: 807841 - DNA, 120 bp, Artificial Sequence
  ENSG00000280809_31 (sequence is synthesized)
ggcctaaccacctcttaagggtcttacctctttatactcctacaataagaattaaatttcagcatgagttgtggaagggacaaacattaaaatgacagcaataagggagaggacccctct

SEQ ID NO: 807842 - DNA, 120 bp, Artificial Sequence
  ENSG00000280809_32 (sequence is synthesized)
caaggagatgagggaaacatttactattcacgttttcaactctacctggccaggagattccaacactgcagcttctggtgactaaagagcaacctaatagagaaactaccaaggaaagct

SEQ ID NO: 807843 - DNA, 120 bp, Artificial Sequence
  ENSG00000280809_33 (sequence is synthesized)
aagtggtttccaaacaagttctctcaaggtgacacctgatgtggttctaaaatatctcagcttttgcaggttttaaaatatgacttgtcaatttcccaggcgtggtctgactcttggggc

SEQ ID NO: 807844 - DNA, 120 bp, Artificial Sequence
  ENSG00000280809_34 (sequence is synthesized)
cagagttgcattgatggcacttgagagactaatacataatccagagctccaaatgtacactgtgaaataaaactgccaagactaggagaggaaattatctccaggaaaaatgccatgcat

SEQ ID NO: 807845 - DNA, 120 bp, Artificial Sequence
  ENSG00000280809_35 (sequence is synthesized)
gtggcgctgcggctggataaagaacatcagggacaggaaggctgtaataagattccaccaccatctctgcccatcactagggctggaggcagagaaaaacttcccctactcaagaaaaag

SEQ ID NO: 807846 - DNA, 120 bp, Artificial Sequence
  ENSG00000280809_36 (sequence is synthesized)
aataaatatgtcaatttaaattaaatgacatatttcaaaattgatccaggaagtaatattgaatcagaataccctgtatctaccaaagaaatttaatttacaataactaacattcccata

SEQ ID NO: 807847 - DNA, 120 bp, Artificial Sequence
  ENSG00000280809_37 (sequence is synthesized)
aaggatacagtcctaggcagttacagatggtgaattctatcaaacactgaaatgacaaaagaatcaatcttaccaaaaccctcacaaaatagaaaaaggaacacttcccaactcatttta

SEQ ID NO: 807848 - DNA, 120 bp, Artificial Sequence
  ENSG00000280809_38 (sequence is synthesized)
tgaggccagcatcactctgataccaaaatctgacaaatcagaaaagaaaatttcagaaaatgtctctcatgaacatagatgcaaaagttcttaacaatattagaaaatcaaatccagcag

SEQ ID NO: 807849 - DNA, 120 bp, Artificial Sequence
  ENSG00000280809_39 (sequence is synthesized)
tatataaaaataatattacatcatgaccaaggagagtttatccatggaatgcaaagctgatttaacaatagaaaaccactcagatagttcactacattgacagatgagggaggaaaaaca

SEQ ID NO: 807850 - DNA, 120 bp, Artificial Sequence
  ENSG00000280809_40 (sequence is synthesized)
acacgattatcttaatatatgaacaaaaacatttgactaaattaacgtcattcatgacaaaaactcatagcaaagtaggaatagaagtgaacttcctcaacgtcataatggtcagtacga

SEQ ID NO: 807851 - DNA, 120 bp, Artificial Sequence
  ENSG00000280809_41 (sequence is synthesized)
aaaccactactgttaacatacatgatgaaatattgaactatttccttcttaatttggaggaaaaaaatcaagaatatctgctctcaccacttcaattcaacattatacaagaggttagag

SEQ ID NO: 807852 - DNA, 120 bp, Artificial Sequence
  ENSG00000280809_42 (sequence is synthesized)
ctactaaaataaggtaaacttaaacaaataaacaattttaaaagagacagaaggaagaaagggaggcaggaagaaagtttggaaagaaggaagtaaaactgtgtttgtttgcagatgatg

SEQ ID NO: 807853 - DNA, 120 bp, Artificial Sequence
  ENSG00000280809_43 (sequence is synthesized)
agaaggaagtaaaactgtgtttgtttgcagatgatgtgatatttatgtagagaattatcagacctctgagcctaagctaagccatcatatcctttgtgacctgcacgtacacatccagat

SEQ ID NO: 807854 - DNA, 76 bp, Artificial Sequence
  ENSG00000280809_44 (sequence is synthesized)
cccctactgagcaccttgtgacccccaaccctgcccgccagagaacaacccccttttgactgtaattttcctttac

SEQ ID NO: 807855 - DNA, 120 bp, Artificial Sequence
  ENSG00000280809_45 (sequence is synthesized)
cttgagggtgcgtgaaaatactgtcggaagaggaggcatttcgatctgcagccctgccgtgctgggtttctgagctctgctgctctctttctctgggtaacaggagacttgaagacatcg

SEQ ID NO: 807856 - DNA, 120 bp, Artificial Sequence
  ENSG00000280809_46 (sequence is synthesized)
cccagaaggtagagcttcaaatcctgttctagggcccagaagcagagatgctgtgctagggcctgggcaaagccagacaagaagtggttcctgctatcaggctgactaacatctatcaga

SEQ ID NO: 807857 - DNA, 120 bp, Artificial Sequence
  ENSG00000280809_47 (sequence is synthesized)
ctcaacagtgtcctttaatgtgtaaaatcttttaattttgatgaagtccagtgtatctacttttttcttttgttgcctgtgattttgttggcattttcaataaatcactgccagatctaa

SEQ ID NO: 807858 - DNA, 120 bp, Artificial Sequence
  ENSG00000280809_48 (sequence is synthesized)
ccagaaggtagagcttcaaatcctgttctagggcccagaagcagaggctaatttgggaatcgggactaaccaactgatcccactggtgaacagagaaactcaagagttcaaggcaaggcc

SEQ ID NO: 807859 - DNA, 120 bp, Artificial Sequence
  ENSG00000280809_49 (sequence is synthesized)
tcaagtccagcaaagtgtaatacccttgaaaccccaaatcctggtgggcactggtgcgtcccactcaagggtccagatgctcatttttgcatggatacactgttgaggatttttctgcct

SEQ ID NO: 807860 - DNA, 120 bp, Artificial Sequence
  ENSG00000280809_50 (sequence is synthesized)
gggatgccttccccctcctcctcacagcccatttttttctccacacatcatttctgagtctataattcctataaaattttaatatccagcttaaatgttcatctctccataattcccctg

SEQ ID NO: 807861 - DNA, 120 bp, Artificial Sequence
  ENSG00000280809_51 (sequence is synthesized)
tctgaaccctttttgtccttggtccaaaataacttgaaatgattttcttctatggaaattgtggggttttttcccattatgtaagtgccttgactcaatttgatttattacttcagcatc

SEQ ID NO: 807862 - DNA, 120 bp, Artificial Sequence
  ENSG00000280809_52 (sequence is synthesized)
tatgtagtagctttctgtgctgtgtgttcttcttctataaatgggggatgataacaacagtaccttcctcagtgagttgcagtgatgtttaaatgagttaacaacataaatggcaacaga

SEQ ID NO: 807863 - DNA, 120 bp, Artificial Sequence
  ENSG00000280809_53 (sequence is synthesized)
accagatacatagtaaatgtccaaagaagttagcaatgatgacgataatgtatatcgttataataaccccatataccattggtaaatattttggaatgaaagaataggtaaaaataatta

SEQ ID NO: 807864 - DNA, 120 bp, Artificial Sequence
  ENSG00000280809_54 (sequence is synthesized)
tcaattactttgaagcatgggtgacttgaacacccaggcccaagttccagactcccctgaggattgcttcatcatcactgggctcacctagagtctgggagtctctgttgttaggttcat

SEQ ID NO: 807865 - DNA, 120 bp, Artificial Sequence
  ENSG00000280809_55 (sequence is synthesized)
gcaagatctccaggtcttgcatgcttgttagataaaaccccacatagggttaaacagaagacccaaagacagggaactcttctcagaaggaaagaaaattgccattagttttattgctgt

SEQ ID NO: 807866 - DNA, 120 bp, Artificial Sequence
  ENSG00000280809_56 (sequence is synthesized)
gtggatgttttttaaattatctaattttgagagcctgggaaatgacaaagagcccggctgtccaattataacactggttgtgtaaacccaggagacttggagtctcttaaaatttgtgta

SEQ ID NO: 807867 - DNA, 120 bp, Artificial Sequence
  ENSG00000280809_57 (sequence is synthesized)
aagaagggctgatcataatcacaatacatcaccactgatgtgttttgtttgcatggtatcatttggttctagtgattttttcctgcattattctaggtgacatgctatctctccatcaaa

SEQ ID NO: 807868 - DNA, 120 bp, Artificial Sequence
  ENSG00000280809_58 (sequence is synthesized)
acagggaagtgaagccttggagggaatatagtaatctgcatttctcttgtatccattctttcataggacttcacagaccactggatctcacgctttggtgagagcatctcatgaggactt

SEQ ID NO: 807869 - DNA, 120 bp, Artificial Sequence
  ENSG00000280809_59 (sequence is synthesized)
tgctatcaaagcagattttagaacccatccgcaggcgttcagactcagtgtctctgcctcgaaataggcattttaaacaagatccttaggtttttctaaggcaggcatcttctggtcctt

SEQ ID NO: 807870 - DNA, 120 bp, Artificial Sequence
  ENSG00000280809_60 (sequence is synthesized)
gtatttcaaaacattgctttttatggacatataggaatacacagaggcatacatgcagtttaactggaaaaatattaagtttaactgtcatttatacattcattacaacatatttcattc

SEQ ID NO: 807871 - DNA, 120 bp, Artificial Sequence
  ENSG00000280809_61 (sequence is synthesized)
accaaatattaccaaaacttaggatgtgcaataaagattcagagtaaaaaaaagtccctcccatcatggagcttaaattcttactggttagaaacaattcatcaacaaataaatgcacat

SEQ ID NO: 807872 - DNA, 120 bp, Artificial Sequence
  ENSG00000280809_62 (sequence is synthesized)
acatccacttatacatgtgcatgtatgtttgtttattatatatgtaatatgacatcatatacactaaaggttatatatgtgtagtatggcattctatatagtatatactatatagacaat

SEQ ID NO: 807873 - DNA, 85 bp, Artificial Sequence
  ENSG00000280809_63 (sequence is synthesized)
ttggagaagagaacatccacatggattaagtcccaagctcaccctttgttagtgagaatgtagtcacgtggccatacctactaca

SEQ ID NO: 807874 - DNA, 64 bp, Artificial Sequence
  ENSG00000280809_64 (sequence is synthesized)
tgcagtggtacagtcatagctcactgttgcaggaaaaaagattttatggacatttattagttcc

SEQ ID NO: 807875 - DNA, 78 bp, Artificial Sequence
  ENSG00000280809_65 (sequence is synthesized)
ctttactttaatctcttaatcctatcagctgaggaagatgtatgttgcctcaggaccatggggacaaatatgaaatct

SEQ ID NO: 807876 - DNA, 88 bp, Artificial Sequence
  ENSG00000280809_66 (sequence is synthesized)
ccagtctcccatagcgctcccaggtttattaggaaggaggttgctctcaaaaccctgtctcttgataagatgttatcaatgacaatgg

SEQ ID NO: 807877 - DNA, 120 bp, Artificial Sequence
  ENSG00000280809_67 (sequence is synthesized)
taatttcgcctcagtcctgtggtcctgtggtctcgacctgcctccatttgccctgtgatattctattaccttgtgaagcacttcatgtctgtgacccacaccctattcatatagtccctc

SEQ ID NO: 807878 - DNA, 74 bp, Artificial Sequence
  ENSG00000280809_68 (sequence is synthesized)
attaccttgtgaagcacttcatgtctgtgacccacaccctattcatataagcttgtggggcatcacggaaccta

SEQ ID NO: 807879 - DNA, 76 bp, Artificial Sequence
  ENSG00000280809_69 (sequence is synthesized)
caaacggggcaggttccctgatagctcactgtagcctcaaattcctgatctcaagggatcctcccacctcagcctc

SEQ ID NO: 807880 - DNA, 120 bp, Artificial Sequence
  ENSG00000280809_70 (sequence is synthesized)
aagggatcctcccacctcagcctcccaaatacctaggactatactgtcaccatgcccagttatttatttcctccagtttttgtactccatctctgtgctgttctaggtaaccgatatttt

SEQ ID NO: 807881 - DNA, 90 bp, Artificial Sequence
  ENSG00000280809_71 (sequence is synthesized)
ccagtttttgtactccatctctgtgctgttctaggtaaccgatattttccatgattaaaaattatatctggccaggtgcagtggctcacg

SEQ ID NO: 807882 - DNA, 89 bp, Artificial Sequence
  ENSG00000280809_72 (sequence is synthesized)
ggccaacatgatgaaaccagtgtagtggtgtgcacctgtaatcccagcacattggaaggccgaagcaggaggatcacttgaggtcagga

SEQ ID NO: 807883 - DNA, 120 bp, Artificial Sequence
  ENSG00000225891_0 (sequence is synthesized)
actgggcttcttcctctccagcacttggggtgccctgtacatgtgaaacactcaactgactgaccacgtgatcccaggagagcagtgaggatgctcctgatacagaagagcggaaaatcc

SEQ ID NO: 807884 - DNA, 120 bp, Artificial Sequence
  ENSG00000225891_1 (sequence is synthesized)
ctttggagcagaaccaaggctttcctgtgcctcactgatcctctctgttcctgccagtctaactgacctgcaaagcctttgcactagagctcctcctgccaaacctattccatgtgtgag

SEQ ID NO: 807885 - DNA, 120 bp, Artificial Sequence
  ENSG00000225891_2 (sequence is synthesized)
aaactctattttcctatggtatcctataccctgatgacccttcccacattctaccttgtattacgataaacttgtatacatgtttttgtcctaatcagcctgtaagcaccttgactgctc

SEQ ID NO: 807886 - DNA, 120 bp, Artificial Sequence
  ENSG00000225891_3 (sequence is synthesized)
tgtcttcatggtttaaagaatatcttacatgtgcacaaccacttcatctgttgcctcacttgaccctcacaatggagctgtgagggaggtactttctgctggagacagacatggagcagg

SEQ ID NO: 807887 - DNA, 120 bp, Artificial Sequence
  ENSG00000225891_4 (sequence is synthesized)
gaattctggactgtcccccccggctcctgaataatcccaggcattcaagaatacttctcttctgctattacaatgaattacatgtggagctatgaggacttcgggcttgaacagttgccg

SEQ ID NO: 807888 - DNA, 120 bp, Artificial Sequence
  ENSG00000225891_5 (sequence is synthesized)
tagagctctccgtcttgctggaagggcttcttccaggccttggtcaggaggctccctgggtgctacatacaggattttttttgaggatatggagatgcgcaggacacgatcccagcaatc

SEQ ID NO: 807889 - DNA, 120 bp, Artificial Sequence
  ENSG00000225891_6 (sequence is synthesized)
caggtgcttacaggctgattgtacagccatgcacacagagtgccacgatgcaaaataggatgtggtaagggtcatgcagttcagaggagaaagcaagtgtggctgatgaacatcacggag

SEQ ID NO: 807890 - DNA, 120 bp, Artificial Sequence
  ENSG00000225891_7 (sequence is synthesized)
cagtgaccttcatggacagacagaatttgagctggccctttaaccaatgaggaggattcaaacagagtttgtattatcctgaaaagaaattccactaaagatgaatagcagagaactgtg

SEQ ID NO: 807891 - DNA, 120 bp, Artificial Sequence
  ENSG00000225891_8 (sequence is synthesized)
ttcagaatacaagttccacaaaggtagagatcttgtccctctggctacctgttgactctcctgtgcctaatacagtgcctgattcatactactcaataaatacttatggaatgaatgaaa

SEQ ID NO: 807892 - DNA, 120 bp, Artificial Sequence
  ENSG00000225891_9 (sequence is synthesized)
agtcctagaggtcaacttttctctccctgaccatttgtctactatccttgtataatgaccaatcaggtttgtattatcctgaaaagaaattccactaaagatgaatagcagagaactgtg

SEQ ID NO: 807893 - DNA, 120 bp, Artificial Sequence
  ENSG00000229385_0 (sequence is synthesized)
gatcctcttctccctccagttcccagtactctacccaacttgacccttcatcctaaaaatttaggaatctgcagggcacccgctgtttaagagtgtgtctctcagtatatgcacccaatt

SEQ ID NO: 807894 - DNA, 120 bp, Artificial Sequence
  ENSG00000229385_1 (sequence is synthesized)
ttctggaacccctgaatccggacagttgtagcaggcaagggatgctcccaccctcccaccggggaagaggaaatgattatgtactcacagagggtggaacataaaggtgattggaaagaa

SEQ ID NO: 807895 - DNA, 120 bp, Artificial Sequence
  ENSG00000229385_2 (sequence is synthesized)
tcaggatgtcagattgtgttggattagtcttccagccttcactgaggtctacagtatagatactggattggcttaaattgaacgttctgcaaataagagaaggtatattcttgtccaaga

SEQ ID NO: 807896 - DNA, 120 bp, Artificial Sequence
  ENSG00000229385_3 (sequence is synthesized)
ggatgtggtatctacatataggaggaaagatatacgtgtacatgtggtggctgaaccatttgattgtggatcaggatacataagcagcaagttcaaagactgaaggaacaaggaatatca

SEQ ID NO: 807897 - DNA, 120 bp, Artificial Sequence
  ENSG00000229385_4 (sequence is synthesized)
gctcataaagatgagaaagaatcagagcaagaactctggcaactcaaaagccaaggtgtcttcttacctccaaacaaccatattatttcgttagcaacgattcttaaccagactgagatt

SEQ ID NO: 807898 - DNA, 86 bp, Artificial Sequence
  ENSG00000229385_5 (sequence is synthesized)
agaaatgaagatcactgacatactggaggaaatcaaaacccaattccaggatttttaagattgcccaggctggagtgcagtgttgc

SEQ ID NO: 807899 - DNA, 120 bp, Artificial Sequence
  ENSG00000229385_6 (sequence is synthesized)
gccttccaaagtgctgggattacaggcacagtcggccaatatttttatataccagattatgtcactagtaaatagagataatttcactgtctccttttcaatctggaggcattttcttcc

SEQ ID NO: 807900 - DNA, 120 bp, Artificial Sequence
  ENSG00000229385_7 (sequence is synthesized)
ccttttcaatctggaggcattttcttccttcctttttcccttcccttctctcccctcccctccccttccctcctgtttttctttctacttactttcttacttttgcctctttgtcttggt

SEQ ID NO: 807901 - DNA, 120 bp, Artificial Sequence
  ENSG00000229385_8 (sequence is synthesized)
tagaatttccagtatgatgttaaataacaatggaaagagcagttatccttgtcttgttcctcattttagaggcttaaccctggagtttttgtctatgccccttgtgaagtttaaaaagtt

SEQ ID NO: 807902 - DNA, 120 bp, Artificial Sequence
  ENSG00000229385_9 (sequence is synthesized)
tttcccaatcatagtttgttgatggttcttataatgacagagcatttgatttgattaagtggttttttctgcttttattgcaatgatgttgtgatttttgctttttaactattgatatgg

SEQ ID NO: 807903 - DNA, 120 bp, Artificial Sequence
  ENSG00000229385_10 (sequence is synthesized)
gaaggcctgcagcttgtcctagaaccatgcaagagggaccattgaagctgaaggtggattgctgttgggtggaaaggatgtagtcactcaaaaatgctgccagaagaagagcaagagaaa

SEQ ID NO: 807904 - DNA, 120 bp, Artificial Sequence
  ENSG00000229385_11 (sequence is synthesized)
agaacaatagcttctcccgtgagacaatctcatccctccactagtgtcttctcttggaatgatctattgtgctctgagtgggtagaaaacatgatggcaagtgtatggtgctgaatcaag

SEQ ID NO: 807905 - DNA, 120 bp, Artificial Sequence
  ENSG00000229385_12 (sequence is synthesized)
cgttgtggtttctcacggagacaatcaaagcagggaaggctggattttaaattggtgagacacacactggaaatatgtaattcccagaagaaaaaaagaaactgctgaagaggggtatgg

SEQ ID NO: 807906 - DNA, 120 bp, Artificial Sequence
  ENSG00000229385_13 (sequence is synthesized)
tccagtattttggcgaggatttttgcatctatgttggtctatagttttcttttactgtgtacctttgcttctgatattgaggcaataatggtctcaaaggattagttgagaattgttttc

SEQ ID NO: 807907 - DNA, 120 bp, Artificial Sequence
  ENSG00000229382_0 (sequence is synthesized)
caggaaaactgccttgggtgccatggcgcagcctgcccacacttcaggcacagagcacagaagattctgtggtttccacacctgggaagagaaaagaaaaaccttccagtgttcaggtag

SEQ ID NO: 807908 - DNA, 120 bp, Artificial Sequence
  ENSG00000229382_1 (sequence is synthesized)
accccttgaactggcacgacctcccgtccgcacccaagtccccaccagcctgtccctctgatggttctgggctgggtgtggcagggaaagggcagaagtgagactttgacctggtgggtg

SEQ ID NO: 807909 - DNA, 120 bp, Artificial Sequence
  ENSG00000229382_2 (sequence is synthesized)
cacacgcctaggtgtaaatctagctccaacatcttacatgagaatgaattgaattcagattctttaatggctcaccctggagttttatccctcctggtaataatttcatgaccaacacaa

SEQ ID NO: 807910 - DNA, 120 bp, Artificial Sequence
  ENSG00000229380_0 (sequence is synthesized)
tgcagccaggcactgtccgtcccgggacctacgcagctgccatggaagctccgggtttcgcaggagactggaataagatcggaataattccaacagatgctccaaccatccctcatggac

SEQ ID NO: 807911 - DNA, 120 bp, Artificial Sequence
  ENSG00000229380_1 (sequence is synthesized)
cacacgcactcttggatgctgaagagcaggctggggtctggggcagcctttaggggctcttgggaccccaaaggtgtccagcttggatgtctccagcagatctttctggaaatctgggac

SEQ ID NO: 807912 - DNA, 120 bp, Artificial Sequence
  ENSG00000229380_2 (sequence is synthesized)
gctgccacctccctggagtccctcatgaagcaatgcattcagggcagaatccattgctgcctcagcccccttcaaagaccaggcccaacaccgcaccagctccttggacactgcccatct

SEQ ID NO: 807913 - DNA, 120 bp, Artificial Sequence
  ENSG00000229380_3 (sequence is synthesized)
tcccagggagagtctcgtgctcagagaggctataaatatacgccggacagtcaagagtttccgtcgccaacagaagagctgagcaaaaggtgaaataaacatcccgtggctgcaaattaa

SEQ ID NO: 807914 - DNA, 87 bp, Artificial Sequence
  ENSG00000260796_0 (sequence is synthesized)
cgaggcagaaggatcgtttaagtgagactttgtctctacaaaaaaaaaaaaatttaaattataaaaaaaaactgataagagggcagg

SEQ ID NO: 807915 - DNA, 120 bp, Artificial Sequence
  ENSG00000260796_1 (sequence is synthesized)
aaaaatttaaattataaaaaaaaactgataagagggcagggggagatgggtttctaggcagggaaataggatatgacaaactaagaaaaactcagcttgtcctaagcataaaattaaagg

SEQ ID NO: 807916 - DNA, 120 bp, Artificial Sequence
  ENSG00000260796_2 (sequence is synthesized)
tcaggttttaaaggctcccaagtcttgtaagagacacggacattatcctcaaagcagtggggagcttatttaagaaagtgaaaagaggctgatcttgaactcccgacctcaggtgatcca

SEQ ID NO: 807917 - DNA, 120 bp, Artificial Sequence
  ENSG00000260796_3 (sequence is synthesized)
atgagccaccacgcccagcccaaatggtgttttaaaggtcatcatgtctcctgggttccctaacaaacacagtccagctttttcctggcattacctggaccacctgatgccatgccacct

SEQ ID NO: 807918 - DNA, 120 bp, Artificial Sequence
  ENSG00000251088_0 (sequence is synthesized)
ctcactctccctccttctctgccatgttcactcagggtacatccaatgaggacatggatgacgaaaatgcaacattgctgacagagtttgttctcacaggacttacatatcaatcagagt

SEQ ID NO: 807919 - DNA, 120 bp, Artificial Sequence
  ENSG00000251088_1 (sequence is synthesized)
tgtacagacttttcatttcttcatgactcactcttggggatcatccgggccagagtgaatgtgaatggaagagcagtgccttcttgtggtcaccatggtttgggcagcagttgtgactac

SEQ ID NO: 807920 - DNA, 120 bp, Artificial Sequence
  ENSG00000251088_2 (sequence is synthesized)
ttccccaaggggaaaacaagtatctgggaaaaggtttgggggttataaggcccatgactcctttcacatggagatttgctctctactgcaaaattaaaagtgttattatggaaaatgaaa

SEQ ID NO: 807921 - DNA, 120 bp, Artificial Sequence
  ENSG00000260792_0 (sequence is synthesized)
ctggatcttcctgccttgacagccccacagaaaatgctaagagcccaggaaggttgtgaagggtgtgtgtgtgtttgtgtgtgtgtctgtgtgctgtgtgtgtctgtgtgtgtttgtgtg

SEQ ID NO: 807922 - DNA, 120 bp, Artificial Sequence
  ENSG00000260792_1 (sequence is synthesized)
tgtctgtgtgtttgtgtgtgtgtatgtgtgtgtctgtgtttgtgtgtgttgtctgtgtctgtgtgtctgtgtgtctgtgtgtctgtgtgtctgtgtgtgtgtcttgtgtctgtgtgtttg

SEQ ID NO: 807923 - DNA, 120 bp, Artificial Sequence
  ENSG00000260792_2 (sequence is synthesized)
tgtgtgtgtctgtgtgtttgtgtgtctgtgtgtttgtgtgtgtgtttgcatctgtgtgtttgtgtgtctgtgtgtgtgtgtgtttgtgtttgtgtgtctgtgtgtgtttgtgtgtctgtg

SEQ ID NO: 807924 - DNA, 90 bp, Artificial Sequence
  ENSG00000260792_3 (sequence is synthesized)
tgtttgtgtttgtgtgtctgtgtgtgtttgtgtgtctgtgtgtgtttgcatctgtgtgtgtgtgtgggtttgtgtgtgtctgtgtgtttc

SEQ ID NO: 807925 - DNA, 120 bp, Artificial Sequence
  ENSG00000260792_4 (sequence is synthesized)
tgtgtctgtgtgtttgtgtgtgtctgtgtgtgtgtctgtgtttgtgtgtgtttctgtgtgtctgtgtgtttgtgtcggtgtgtgtctctgtgtgtgtttgtgtgtgtatgtgtattggga

SEQ ID NO: 807926 - DNA, 120 bp, Artificial Sequence
  ENSG00000260792_5 (sequence is synthesized)
ggacagtggtcccagctcctcaggggcatcaggctctgtagcagggcccaccgtctcggcaggagggtgcaatggcctcacccacactgtccaggcagttctcttgggaccccttttagc

SEQ ID NO: 807927 - DNA, 120 bp, Artificial Sequence
  ENSG00000260792_6 (sequence is synthesized)
cagcacaggtgccttctccctcggcaggagggtgcgatggtctcacccacacggtccaggcgggtctcttgggtctccttttccagcacaggtgccttctccctaggaaacggcaaagat

SEQ ID NO: 807928 - DNA, 120 bp, Artificial Sequence
  ENSG00000260792_7 (sequence is synthesized)
gtaatgaccacactcaggtgtaaactctgtagccgggtttctaaactagaacctactgatcgtgggataaaaatcaggaaacggtgaagatgtaataaccacactcaggtgtaaactctg

SEQ ID NO: 807929 - DNA, 120 bp, Artificial Sequence
  ENSG00000260792_8 (sequence is synthesized)
cagccggatttctaaactagaagctactgatcatgggataaaaatcaggaaacggtgaagatgtaatcaccacactcaggtgtaaactctgcagccgggttctaaactagaacctactga

SEQ ID NO: 807930 - DNA, 120 bp, Artificial Sequence
  ENSG00000260792_9 (sequence is synthesized)
tcatgggattcaggtgtccctgaacttggatggaaaaacgttgcatctttactttcaccagcctctaggctaaagtgagtgttcctcaatagtgaatgtggccaaaggacctagcggtct

SEQ ID NO: 807931 - DNA, 120 bp, Artificial Sequence
  ENSG00000260792_10 (sequence is synthesized)
ccacagaacctgggactccaccgtcagcaaagtcctgtgtattttcccatcgtgtttcagttgcttcggcgtcttgaagcctcatttttgttcctgcttcaacactgttggtcatgagag

SEQ ID NO: 807932 - DNA, 88 bp, Artificial Sequence
  ENSG00000260792_11 (sequence is synthesized)
ctcatttttgttcctgcttcaacactgttggtcatgagagctgctgctagatctggatcagtaggttttttttaatctgttttcactg

SEQ ID NO: 807933 - DNA, 75 bp, Artificial Sequence
  ENSG00000260792_12 (sequence is synthesized)
ggagtacaggtgtggcggggggggaggggtctcaccatgttggccagcctggtcttgaacccctgacctcaggtg

SEQ ID NO: 807934 - DNA, 79 bp, Artificial Sequence
  ENSG00000260792_13 (sequence is synthesized)
tcagtagattaacaagaaatccaataacaattactttattattttggtaaccgtatttcaatatagtgggtgtatgagt

SEQ ID NO: 807935 - DNA, 120 bp, Artificial Sequence
  ENSG00000260792_14 (sequence is synthesized)
tattttggtaaccgtatttcaatatagtgggtgtatgagttggttctcacactgctataaagatactacaagagactgggtaatttataatcaaaggaggttttatttatttactgagac

SEQ ID NO: 807936 - DNA, 120 bp, Artificial Sequence
  ENSG00000260792_15 (sequence is synthesized)
caatcatggtggaagggaagcaggtgccttctcacaaggcggcacgagaaagaagttcaagcaggggaaatgccagctgaagcctgggcgcaggtgaccacgcaggccgagaggtcccac

SEQ ID NO: 807937 - DNA, 120 bp, Artificial Sequence
  ENSG00000260792_16 (sequence is synthesized)
gcccgcgaagacccagggaagctggtggtgcagtgcggtctgagtccgaagccctgagagccggagggctaatggcgttaatctcagtgtcagggccagagaaggtgaggtgagtgtccc

SEQ ID NO: 807938 - DNA, 120 bp, Artificial Sequence
  ENSG00000260792_17 (sequence is synthesized)
agctcaagcagcgtggcaggaagaggggggcaaattcacctttctctgccttccgcgctattcgggtcctcagcggattgggtgacaccacccaccctggggagggcggcctgctttaca

SEQ ID NO: 807939 - DNA, 120 bp, Artificial Sequence
  ENSG00000260792_18 (sequence is synthesized)
gagcccactgattcaaatgctaatctcatccagaacaccctcggacatccccagaaataacgttcaacccggcaccccacggccaggggagctgacacataaagttaaccgtcactccgc

SEQ ID NO: 807940 - DNA, 120 bp, Artificial Sequence
  ENSG00000260792_19 (sequence is synthesized)
ccgcatggagagggagcccacaggaaggagctggtgctgctgtctcgaccctgaccctgggccgtgtgggtcgttctggcccttgcccctgcttgtctgtagctcccaccccacagtgag

SEQ ID NO: 807941 - DNA, 120 bp, Artificial Sequence
  ENSG00000260792_20 (sequence is synthesized)
gaacctgccccaccacccaccatccatggacctaatcgctaagctgcagtgtgcagggggagcagtgtagggactgctcacctgtaccccgcggcagaagcgtgtgtctgccagggtaca

SEQ ID NO: 807942 - DNA, 120 bp, Artificial Sequence
  ENSG00000260792_21 (sequence is synthesized)
gggctcatgtgcgggtccatttgcttttggcttcacagacttcgtcgtttgtgagggtacccaggtcagccccatcccccagcccctccctacgtctgtaatacagctgctccctgggtc

SEQ ID NO: 807943 - DNA, 120 bp, Artificial Sequence
  ENSG00000260792_22 (sequence is synthesized)
tgtgatacagccagaggctctcgccacacacggcccgccttccgtcctagacccccagcctcttgactgagctttaaaatttgcatacattaaggctcactcttgctgtgaagttctgtg

SEQ ID NO: 807944 - DNA, 120 bp, Artificial Sequence
  ENSG00000260792_23 (sequence is synthesized)
ggttttgacagatgcacagtgtcgtgtctctgccattacaatgtcgttcacgttagtttcacagccctaaaaacccccctgtgctccaccgatccaaccatttcctctttcccgaactcc

SEQ ID NO: 807945 - DNA, 120 bp, Artificial Sequence
  ENSG00000260792_24 (sequence is synthesized)
tggcaacaactgtttccataaatgtatttttctggtgggtttttggtgaacaattttatcaaattagaaatatttcatttgtttcaatttctaatttgcccagaaatttttaaaaagtca

SEQ ID NO: 807946 - DNA, 120 bp, Artificial Sequence
  ENSG00000260792_25 (sequence is synthesized)
ccgatggcatcacttgagacattgggacactttttgccctgtcatctattcagatggtatttgcacggatcagattctgatattaaaccttccttgaattcctgggagaaacccttagat

SEQ ID NO: 807947 - DNA, 120 bp, Artificial Sequence
  ENSG00000260792_26 (sequence is synthesized)
ctatcagggtcccagcaggaaagagacccacatttagagcaggttacttgcagcagtgtttaacaaaggggctctttataaaggtagggcagagtactggaaacctcaaggggcagtaca

SEQ ID NO: 807948 - DNA, 120 bp, Artificial Sequence
  ENSG00000260792_27 (sequence is synthesized)
tgtcccagggctggccaaaggcatgcctggtggagagaattttctggaatgtgaaggagagtgctgtggagaggagccatgacattcccaaggccacctcacacagtcatctgccatcat

SEQ ID NO: 807949 - DNA, 120 bp, Artificial Sequence
  ENSG00000260792_28 (sequence is synthesized)
ttgcagatcacatgtcagcttacttagcaagcctaacagaacggacaggaaaacgtaatgttataaacacataattctccccagagaattatggggacataataaattcaatgcaattct

SEQ ID NO: 807950 - DNA, 120 bp, Artificial Sequence
  ENSG00000260793_0 (sequence is synthesized)
cattctccggccaagcccagctgcctagagcgagctccactcctccatctgttcgccggggtcctcgctcccctgccggggccggcgagacggcgtgaggccggagggggatttgcaagg

SEQ ID NO: 807951 - DNA, 120 bp, Artificial Sequence
  ENSG00000260793_1 (sequence is synthesized)
aaacctgcctgcttcccgctcccattgctccatccccgctgcctcctgcctcctgcttctctcctgcgtctttccaactctcccctgtcgccactgaggaaaggttatcaggacaggacg

SEQ ID NO: 807952 - DNA, 120 bp, Artificial Sequence
  ENSG00000260793_2 (sequence is synthesized)
ctctcaggctgccagtctcccacaccgacgctctactgcccgcatctcggccagctgggtcacccagcccctttcgactctcccctggcacgcagccttctccttcactcggcctgcctc

SEQ ID NO: 807953 - DNA, 120 bp, Artificial Sequence
  ENSG00000260793_3 (sequence is synthesized)
gctgctgctgtaattcctcttgtctcctgggagaaatgagattgctttcccaggacttccacatcccacttctatcaggtttcaccaacagggaggaagccctgtcaagatctggtgtgt

SEQ ID NO: 807954 - DNA, 120 bp, Artificial Sequence
  ENSG00000260793_4 (sequence is synthesized)
agttgcggggatttttcaagaagcagcagctaccccggcgtcggtcactgggccggggtaggggaaagagcaaaatcccagtgggtttgcgcgagggatcttctagggtcgaggcgggtg

SEQ ID NO: 807955 - DNA, 120 bp, Artificial Sequence
  ENSG00000260793_5 (sequence is synthesized)
tggggggagttggaaccgggagacaccgcttggcgcatctctccctcggtctctacctcctgtcctatgccagctccccctttaatttttttcctctcctttaatctaatttcttccaac

SEQ ID NO: 807956 - DNA, 120 bp, Artificial Sequence
  ENSG00000260793_6 (sequence is synthesized)
tccacctttgttgttaccggcgtcacacccggaccagccaatccccgccacgcaatcagcttgtcaaaaagcctcggccatccctaggaaagcaggccgcaggcgctgccccccggcggc

SEQ ID NO: 807957 - DNA, 120 bp, Artificial Sequence
  ENSG00000260793_7 (sequence is synthesized)
ggcgggcagccgcgaggggagcccagcacccggttctcgctgccccgggtggcagcggggcagcctccgacaagacgtcccttggttcactgtcctgcaggccggggatgaaaggcctgg

SEQ ID NO: 807958 - DNA, 120 bp, Artificial Sequence
  ENSG00000260793_8 (sequence is synthesized)
acagggtccaccacccactctcccactgccacggccgtggttgactgtctttgcctccccttttcagaggaaaggttatcaggacaggacgcagggagccagaagaccatctgaaggaag

SEQ ID NO: 807959 - DNA, 120 bp, Artificial Sequence
  ENSG00000260793_9 (sequence is synthesized)
taccactagtagatgttaatgaaatttcagcttctaggcccctaacttgcaggacctgcccaaggccctgaacttaattttgttttcatcatttggtatttttttgttaaaagagccacc

SEQ ID NO: 807960 - DNA, 120 bp, Artificial Sequence
  ENSG00000260793_10 (sequence is synthesized)
gaccacctccccgctaccccagaactgcacgtgtttctggccctacaaacccagatcgtcccttggaatatacacagggcaatttgtgtaggatcacactgcgctaaaagtgaggcatgg

SEQ ID NO: 807961 - DNA, 120 bp, Artificial Sequence
  ENSG00000260793_11 (sequence is synthesized)
aatcccagcactttgggagaccaagacaggaggtcttaagtgattaagcccaggagttcgagatcagcttagacaacatagcaagatgctgcctctacaaacacacacaccccctattat

SEQ ID NO: 807962 - DNA, 120 bp, Artificial Sequence
  ENSG00000260793_12 (sequence is synthesized)
ctctacaaacacacacaccccctattataatatgtcaaaaaaaaaaaaaaaaaaaggaaaagtgaggcatagaactgactttattgttttgactaggaaagagcaaagggtttggaatca

SEQ ID NO: 807963 - DNA, 120 bp, Artificial Sequence
  ENSG00000260793_13 (sequence is synthesized)
aaagtcccaacttccccaccttcttaatagtgtgtgaatctgagtgccttattaaccttccctggtcccagtttcgtatctgtaaagttagaatagcaatcctgtttaatttgcttctct

SEQ ID NO: 807964 - DNA, 120 bp, Artificial Sequence
  ENSG00000260793_14 (sequence is synthesized)
caccagggatcagaaggccaaatgagatgatgtatgtaaaattgtaaagtcctccacagatggcacttgccacattacagagaacttgagacccccccccaccaataacgttccaaatct

SEQ ID NO: 807965 - DNA, 120 bp, Artificial Sequence
  ENSG00000260793_15 (sequence is synthesized)
tccacatgcagatctggagtccaggtgtcctggctcctggccctgaactttttggctgggccaaggggcttttcggtaaagtgctttggaataaaacaggatgaacatgaatcataagaa

SEQ ID NO: 807966 - DNA, 120 bp, Artificial Sequence
  ENSG00000251080_0 (sequence is synthesized)
ttggacaccacaatgaacaaggtcccgaaggctgctgcacaaagaagagtaaaccagattctgccccaaaagactagctaaagagaagcctggattaatcggaaccaggttgccacccag

SEQ ID NO: 807967 - DNA, 120 bp, Artificial Sequence
  ENSG00000251080_1 (sequence is synthesized)
agggagaggcatgaactgagtgatcatagagataaaacaagggaagtagaactgaaggatggagagaaaccaggacctgacaattactggtgacatcatttgagcccaaatccagccatg

SEQ ID NO: 807968 - DNA, 120 bp, Artificial Sequence
  ENSG00000251080_2 (sequence is synthesized)
tacagacactgatagcagcaaggggcagacaaatgcctgtgcaaatggggcacatccctggtgaaatacaccttcaagctaaaaaacaacctgaaggctgaaaggctggactcctggtcc

SEQ ID NO: 807969 - DNA, 120 bp, Artificial Sequence
  ENSG00000251080_3 (sequence is synthesized)
tggatgaaacccagacccagagtgagaacttctgtttgtgtttgcctgccctttcctgattgattctttctgaataatgccttttaaccaatcaaatgttgcctttccattactacctat

SEQ ID NO: 807970 - DNA, 120 bp, Artificial Sequence
  ENSG00000260798_0 (sequence is synthesized)
acagtcacacacgctgacctctaaggtggtcacttggtctttattctggttatccatgagcttgagattgattttgtagtcacccacctctaaggccatctttggcttcaaaatgataga

SEQ ID NO: 807971 - DNA, 120 bp, Artificial Sequence
  ENSG00000260798_1 (sequence is synthesized)
ttcttgggctggagaaagcaataaaaagaaatgatgagaccaggggaggaaaataaaaagctcattccagaataaaattgctagtgaactaaagacacccgcaagccgagtgaagagagc

SEQ ID NO: 807972 - DNA, 120 bp, Artificial Sequence
  ENSG00000260798_2 (sequence is synthesized)
gaggtggtgagagagacctcaaaagacagagtctcactctgttgcccaggccagggtgcagtagcacgatcttggctcactacaacctctgtcttccaggctcaagcgattctcctgctt

SEQ ID NO: 807973 - DNA, 120 bp, Artificial Sequence
  ENSG00000259256_0 (sequence is synthesized)
tgggcggagctcacattcaacgtttcttgggtctaaatcttccgggcagctgtctacactttggctcaggtaccatctgctgacttcccacatcagaagaatgatcttcaacccaagaca

SEQ ID NO: 807974 - DNA, 120 bp, Artificial Sequence
  ENSG00000259256_1 (sequence is synthesized)
caggcaaagagagcatctaactgcttaaaatgagagcaggaatggctgttggcttagatagatggcaccccagagtcctgaaagaacttgcagatgtgatcacaggaccatctgaaccgg

SEQ ID NO: 807975 - DNA, 120 bp, Artificial Sequence
  ENSG00000259256_2 (sequence is synthesized)
cggggggaatggagagacagcaaaagaccggagatgggtaaatgagttccagattttccaacacaacaggaaaggaatatgtgagcaggagagaagggtcatgttggagcagccaggact

SEQ ID NO: 807976 - DNA, 120 bp, Artificial Sequence
  ENSG00000259256_3 (sequence is synthesized)
cagagcctttccgcagactgagtctggatcctttccttcagcctccaggaatactcccggctccacacccagaatggtaatccaggcaagggctctggtgtgtggccacactgccaccta

SEQ ID NO: 807977 - DNA, 120 bp, Artificial Sequence
  ENSG00000259256_4 (sequence is synthesized)
ttacctgcgggtccaaatgcagtgactcaacttctctgtgcctctctttccacatgtataaaatgaggataatgttgctattgtaagaattgcatcaattaataaacagcactcagtgaa

SEQ ID NO: 807978 - DNA, 120 bp, Artificial Sequence
  ENSG00000259256_5 (sequence is synthesized)
ggcggagctcacattcaacgtttcttgggtctaaatcttccgggcagctgtctacactttggctcagtgattttcatggtgtgatatatagtcaaccccacatcagatcacctggaatca

SEQ ID NO: 807979 - DNA, 120 bp, Artificial Sequence
  ENSG00000259256_6 (sequence is synthesized)
ttgtcgatattgggtacaacttgcctcaccccagaatttcaaggagtgtgacctgcgagtctgtatttttaccaggtaccatctgctgacttcccacatcagaagaatgatcttcaaccc

SEQ ID NO: 807980 - DNA, 120 bp, Artificial Sequence
  ENSG00000259256_7 (sequence is synthesized)
tgctctctagaaatacaattaaacaagcagcccctgtctctttttctccactttcagtcttggggaagggattggaatatgtgagcaggagagaagggtcatgttggagcagccaggact

SEQ ID NO: 807981 - DNA, 120 bp, Artificial Sequence
  ENSG00000259256_8 (sequence is synthesized)
gagaccttcagtccagctggtcttcagtccagcttgtttcacacgtgacaggaatctgaccctcagaaaataatcacatgcgcggagctcactagtggcagagcccacgacacccgctcc

SEQ ID NO: 807982 - DNA, 79 bp, Artificial Sequence
  ENSG00000259256_9 (sequence is synthesized)
ccacgcctgcctactttttgcattttctactcctgacctccagtgatccgcctgctttggcttcccaaagtgctgggat

SEQ ID NO: 807983 - DNA, 120 bp, Artificial Sequence
  ENSG00000259256_10 (sequence is synthesized)
tacaggcgtgagccaccgcgcctggctggttggtttgatttctatcagacatattttaattccctacatgatttaatgtgtaaatgtagaatttcatgttctttttagtgaaagaagttc

SEQ ID NO: 807984 - DNA, 120 bp, Artificial Sequence
  ENSG00000259256_11 (sequence is synthesized)
ttcatgttctttttagtgaaagaagttcaggtcttcagggtataatgaggtaggaaggcttagtcatctagggaaactataccatgtacttattatctttttagtgttgggattagggtt

SEQ ID NO: 807985 - DNA, 120 bp, Artificial Sequence
  ENSG00000259256_12 (sequence is synthesized)
gccagataaaatacaggatgccccactaaatttgaattgctaaacaacagggacatacttagacacaaacattattcagtgtttatctgaaattcaaattccgctgggtgtcaggcattt

SEQ ID NO: 807986 - DNA, 120 bp, Artificial Sequence
  ENSG00000259256_13 (sequence is synthesized)
agcaatttgccaggcttgctttgggagctggcttgaagttatttggatttgatgactctctttctcttctgtacaggaatctacttaccaagatggcaggagcaagtggttatcagagcc

SEQ ID NO: 807987 - DNA, 120 bp, Artificial Sequence
  ENSG00000259256_14 (sequence is synthesized)
tcattccttagagaggtttgcagtcaaaagccccattctttattgtattaaacatcacagagtcccatgttttccttcaggaatatgtgagcaggagagaagggtcatgttggagcagcc

SEQ ID NO: 807988 - DNA, 120 bp, Artificial Sequence
  ENSG00000259256_15 (sequence is synthesized)
gggcggagctcacattcaacgtttcttgggtctaaatcttccgggcagctgtctacactttggctcagtcactattattgatgggtgggcaccctgactggagcagctaccacccctggg

SEQ ID NO: 807989 - DNA, 120 bp, Artificial Sequence
  ENSG00000259256_16 (sequence is synthesized)
gtcaactgggaagcgtctggtgctgcgatcgaggcacccccagaatcatcgcactgagtaaagagagaaacctttcaaaggaagggatgcttggcagaggaaaatcagcactcccattgt

SEQ ID NO: 807990 - DNA, 120 bp, Artificial Sequence
  ENSG00000259254_0 (sequence is synthesized)
gtttattttgaatgaaacgggatcttacactcaatgagcggtaggtttagttgtgctttactgtttgattttgcatctgtatgcctgcatatatcctctacaagagatattctatctctg

SEQ ID NO: 807991 - DNA, 120 bp, Artificial Sequence
  ENSG00000259254_1 (sequence is synthesized)
ttagaaatttattttctccatttattaacaaaagactaatatatattgagactatcataactttgctgcttttatagatgctattctaaaaatgtgaaatatgcctttgaactgaattgg

SEQ ID NO: 807992 - DNA, 120 bp, Artificial Sequence
  ENSG00000259254_2 (sequence is synthesized)
cagagcctcactctgtcacccaggcgcgatctcggcttactgagaactctgcctcctgggttgacgccattctcctgcctcaacctctactactacaggcatggtggcaggcacctgtag

SEQ ID NO: 807993 - DNA, 120 bp, Artificial Sequence
  ENSG00000259252_0 (sequence is synthesized)
aaccagagctgctcctggccttttccaaccagaattcctttctccctcctgagagcttcagtagcactttaaaaataatactcctcgagcaaaactctattgcctgtgttctctgagcag

SEQ ID NO: 807994 - DNA, 120 bp, Artificial Sequence
  ENSG00000259252_1 (sequence is synthesized)
tgcatgggtcttctctgtactcttgagttcctagaggctccaccacttctaacaatgcctggccacagtagagatgtggcttgctcagtgaactgccactaagtgctccctaggcaccca

SEQ ID NO: 807995 - DNA, 120 bp, Artificial Sequence
  ENSG00000259252_2 (sequence is synthesized)
ctaaaggatcgcttactccctgtttgctcagagctcaggaggcacagcctcactagaaggtttggaaagcaccctgcggtggaagccctccagcctttccccctgagactggagggccac

SEQ ID NO: 807996 - DNA, 120 bp, Artificial Sequence
  ENSG00000259252_3 (sequence is synthesized)
ttctaagttcctctggccacctcaaccgtccactcagccagggagccaggctgtgggtgacttcctcagcactgtcccagaaaccctgtgctgtcctcagaagcagcccacctcccagag

SEQ ID NO: 807997 - DNA, 120 bp, Artificial Sequence
  ENSG00000259251_0 (sequence is synthesized)
gcgctgtcgcccggccggtagctaaggaggcccagctgtgatcccgaggctttgtaggcgccgcagccctggccctctagaggccgacggaggagtgcgggggaagttagcttgcgcctg

SEQ ID NO: 807998 - DNA, 120 bp, Artificial Sequence
  ENSG00000259251_1 (sequence is synthesized)
tctcgtcagccgtgcacgagaaaaaaaaggaccttcgagaagaacaagggagggcaagagttaccgagtacagggacatctatgtggccgctctgctttcccgccgtcacctgctgttga

SEQ ID NO: 807999 - DNA, 120 bp, Artificial Sequence
  ENSG00000259251_2 (sequence is synthesized)
actccggccgcatcgcggtgtccggagccgcctggcctggagtatgcgctgagcgtcacctaggcaaccacccctgcacctgtggatcaggtgggggaaagggaccgaccgcgttcttgt

SEQ ID NO: 808000 - DNA, 120 bp, Artificial Sequence
  ENSG00000259251_3 (sequence is synthesized)
cctgctagagttcgactccgcctggggcttggtctctgcttcttgaaaacattgtttttttattttgtttctgttttgttttgttttgagacagggtctcgctctgttgccaagggtaga

SEQ ID NO: 808001 - DNA, 120 bp, Artificial Sequence
  ENSG00000259251_4 (sequence is synthesized)
tttgagacagggtctcgctctgttgccaagggtagaatgcagtgtcgggatcatagctcactacagacttgacatcctggactcaagagatcctcctgtgtcagcctcccgagtagctgg

SEQ ID NO: 808002 - DNA, 120 bp, Artificial Sequence
  ENSG00000259251_5 (sequence is synthesized)
ggaggggaacagaaccacatcaaatggcagatatcatagaatgagaactgaatatacgcgttttgtgggaaacgcgttcttttcccctttctctaagattcgcttttaattcactagcca

SEQ ID NO: 808003 - DNA, 120 bp, Artificial Sequence
  ENSG00000259251_6 (sequence is synthesized)
ctaaccagttacctatctcattacagatataaaaaacaaaacgtagtagtgcctttttaagtatgagttacttgttatttatatatcactttcttccatgctatcgttgaactgtctttg

SEQ ID NO: 808004 - DNA, 120 bp, Artificial Sequence
  ENSG00000259251_7 (sequence is synthesized)
atgtagcacgaccttaaaagcagagcttttataccacaagatctttcaacccttgtgaaatttaaccacccattgagattcacctctttagagaactagaaattttttcctaaaatatat

SEQ ID NO: 808005 - DNA, 120 bp, Artificial Sequence
  ENSG00000259251_8 (sequence is synthesized)
tcaaaaagttgttgagatacagtacacaggaagaaacctaagaaatgctgattatttgtagtcacaagcattaataagtgctttgctacgaggaagtgtctgagaaactattcgtgtatt

SEQ ID NO: 808006 - DNA, 120 bp, Artificial Sequence
  ENSG00000259251_9 (sequence is synthesized)
tttcttaaacaacctaggcttgcacaggatcacaaagaaaaatcttaaattcaaagtccgctggagaagaaagaaaatcaaaatggctacaattggtgttgtgtattaaataaaattaaa

SEQ ID NO: 808007 - DNA, 120 bp, Artificial Sequence
  ENSG00000259251_10 (sequence is synthesized)
agtacaaagaaagacccagtcagtactaactagtactatcaagatcacattcctctcccacttttgcacactccattcctctttaagaagataaatccttaaccgtctgtttttcctagc

SEQ ID NO: 808008 - DNA, 120 bp, Artificial Sequence
  ENSG00000259251_11 (sequence is synthesized)
tggtcacaaagacaaaatactagtaagtactttggatttcttcaccatccacaaccaaataacagcctaacctgtctattttgcttttgccatctttcctaaattctccatgtttttctt

SEQ ID NO: 808009 - DNA, 120 bp, Artificial Sequence
  ENSG00000259251_12 (sequence is synthesized)
ctggaccatgccatccatctccttgaaattcacttcctagcctccagttattccttcctccagtctattctcatgaacaccggatgtgttttcccaaagcacaggtgagcttaggttagt

SEQ ID NO: 808010 - DNA, 120 bp, Artificial Sequence
  ENSG00000259251_13 (sequence is synthesized)
cacctgctcaaaaacatccaataacttcccagtgtttagaacactctcttcaaactttctccacgttctttctagtcatacactctaacaatcccgcttcctttttacattcacactgac

SEQ ID NO: 808011 - DNA, 120 bp, Artificial Sequence
  ENSG00000259251_14 (sequence is synthesized)
tatgctccaagaggaatgtaaagaagcaatatatgttctggttgagataaggcatgtaccataaaaagttaagaaagaagccaatccaaggatgtatgaataacagtataagatgatagg

SEQ ID NO: 808012 - DNA, 120 bp, Artificial Sequence
  ENSG00000259251_15 (sequence is synthesized)
aaagatggcacaggcaacatagcttggtcaagcaggtggagcaataggcacaatctcttgggagaagtgagtaacactaatgctttgtctaataaagtaattccttacagttctatggta

SEQ ID NO: 808013 - DNA, 120 bp, Artificial Sequence
  ENSG00000259250_0 (sequence is synthesized)
ctttagaagcaaatacctgcaggtagcctgcattcttcaatggttgcagagtgtttcactggaaagcaaacttaacccaggaacgaagggagggcgacagctagttggcttgtaagtaga

SEQ ID NO: 808014 - DNA, 120 bp, Artificial Sequence
  ENSG00000259250_1 (sequence is synthesized)
ctctatctcaaaagccagaggcttacaaagtggattgtgtacacagtagggagtgcaaaatgcctactggaatgtgggaagaaatatgatctccgttcatttttctcttatccctcaaaa

SEQ ID NO: 808015 - DNA, 120 bp, Artificial Sequence
  ENSG00000259250_2 (sequence is synthesized)
tccatattaggagtgtgtactcaagatttttaagtgtaagatacaagatcaaaaaacttggagacaagctggatgcgatggttcatgccctttgggaggccaaggtatgagccatcacaa

SEQ ID NO: 808016 - DNA, 120 bp, Artificial Sequence
  ENSG00000259250_3 (sequence is synthesized)
ctggccacattttaaaacttctatgaaaaatttcaaatataaacacaggtagagaaaatagtataataaatccccaagtgcccatcacccagcttcaataattatcaactcacagccaat

SEQ ID NO: 808017 - DNA, 120 bp, Artificial Sequence
  ENSG00000254562_0 (sequence is synthesized)
atgagtagtcataatatgagaagcccaagccacatggggagaccacatggagaactaacttgcctctgtcaatcccatatgatctccctgccaagtgccagcatcaaatgccaaccatgc

SEQ ID NO: 808018 - DNA, 120 bp, Artificial Sequence
  ENSG00000254562_1 (sequence is synthesized)
tccagtgtgactcagcacagtgttcacagcccatgctctcaagaatctcagcttaggaggaggcaaagaggtaaagcacaggtcaacatgcagtgttggactacatagaaagtacatatc

SEQ ID NO: 808019 - DNA, 120 bp, Artificial Sequence
  ENSG00000254562_2 (sequence is synthesized)
gtcatttagtcaggaactctgcacatttacctctgcatttatcaaatatttgttgaaggaaataataaaagaagtgaggaggaagaagaggtttcctgggagaaagcactcgaggagcaa

SEQ ID NO: 808020 - DNA, 120 bp, Artificial Sequence
  ENSG00000254562_3 (sequence is synthesized)
taggtgtcctctttcatttccactaaatatgctgctcaatgccttgtggcataacagaatcaaaacttttcagatgccctgccgctttaacaagacccaggatatgtcaaaatggctccc

SEQ ID NO: 808021 - DNA, 120 bp, Artificial Sequence
  ENSG00000254562_4 (sequence is synthesized)
acagaactttcatttgatcttatctttcgctgtcacacacatcgacctgcattttcttttttctttttgattctttatgtctgcaaatgaactgatgtaattaaaaaggtgaagaaataa

SEQ ID NO: 808022 - DNA, 120 bp, Artificial Sequence
  ENSG00000254562_5 (sequence is synthesized)
tcctcattgggcattttaagttctgtttgaaagagctgcatcacaattcttataaaggacttgttgaatcataagctgtttccttaagcaccagttatgtgggggaccttgtgccaggca

SEQ ID NO: 808023 - DNA, 120 bp, Artificial Sequence
  ENSG00000254562_6 (sequence is synthesized)
catttccaaagtgaggtcccagctggaagtataaatggttctccaattttgcagatggaattttatccaatattcagatgtataatctgcttcaagtatgtacacaggggaagtaataag

SEQ ID NO: 808024 - DNA, 120 bp, Artificial Sequence
  ENSG00000254562_7 (sequence is synthesized)
agtactgtgaattctcaactgaccattttctgacacattaaagaaatagcaaagcacttatctctgaagtctcactttttaaatatgttacaatgaattgtgatcctgttttatgtatct

SEQ ID NO: 808025 - DNA, 120 bp, Artificial Sequence
  ENSG00000254562_8 (sequence is synthesized)
acgataaaacctacggtagagactgataaggactccagatccaggctgctaatactcttcaaagtcattcagctgtggctactacatgatgtctgagtgtttccacaaggcactgttttg

SEQ ID NO: 808026 - DNA, 120 bp, Artificial Sequence
  ENSG00000254562_9 (sequence is synthesized)
gacattgggaacatcgaagtagagtgagcatcatcatgaatggaaacactttctctgaaaaaagacataaaacaattgaaagtcagcagtgtctttcttgcaaaatattatgaagatcag

SEQ ID NO: 808027 - DNA, 120 bp, Artificial Sequence
  ENSG00000254562_10 (sequence is synthesized)
gacaattagaattaggtgctttgggaatggaattaaatgagctgattcatgtaaagggatttaactgggtgccggacctgtcataaactcttaacgtgaacaggagagttactgtaaaaa

SEQ ID NO: 808028 - DNA, 120 bp, Artificial Sequence
  ENSG00000254562_11 (sequence is synthesized)
ctgagacaacaaaacagccggaggcatgaaaagaaaaagaatcccgcatgaatagcttgctatatgtaatttggttaggaacaattcacaggttttgacagctttattagagttccattt

SEQ ID NO: 808029 - DNA, 120 bp, Artificial Sequence
  ENSG00000254562_12 (sequence is synthesized)
tagtaagattcaggtgaaagtgaggtcatcactttaaaacaaaaatcctgagaacatacccagatggactcacataaatgatgtatactaatgtcgtcaagtaaatattttaaagagtta

SEQ ID NO: 808030 - DNA, 120 bp, Artificial Sequence
  ENSG00000254562_13 (sequence is synthesized)
atgagtagtcataatatgagaagcccaagccacatggggagaccacatggagaactaacttgcctctgtcaatcccatatgatctccctgccaagtgccagcatcaaatgccaaccatcc

SEQ ID NO: 808031 - DNA, 120 bp, Artificial Sequence
  ENSG00000254562_14 (sequence is synthesized)
aatcatgaattttaggaatcccagaagggagcaaagaagattctgaaaaaaagagaaatacttctctgagttggaaattggttaaatttagtgatgtttgagcctcagcttacattggaa

SEQ ID NO: 808032 - DNA, 120 bp, Artificial Sequence
  ENSG00000254562_15 (sequence is synthesized)
atgcagtgttggactacatagaaagtacatatccttcattagtgctggcaagacagatgaattaatgcctttcagggaacttccctatttgtttaatatctaactagccctaaggttaat

SEQ ID NO: 808033 - DNA, 120 bp, Artificial Sequence
  ENSG00000254562_16 (sequence is synthesized)
attcaaaattattgataaaatgcattaggagatctgatgatagatgtcttaagaagaagatcagagtttcggaaggacattctcacacagatctcagtttacctcttattccagagggca

SEQ ID NO: 808034 - DNA, 120 bp, Artificial Sequence
  ENSG00000254562_17 (sequence is synthesized)
caaccaatggcacaatcattttaatactgacatgcttcagtacaaataaatataattcagagaaaatcttccatgaatattccttacggagctggaaaaaacgttatctgaagcaagatg

SEQ ID NO: 808035 - DNA, 120 bp, Artificial Sequence
  ENSG00000254562_18 (sequence is synthesized)
ttactatgggaggattatattacgtgcactgtgttttggcaatgctttgggatacagtcattaaataggttggctgaaaattcattttactggttaattaaatccaagagtttgcaagaa

SEQ ID NO: 808036 - DNA, 120 bp, Artificial Sequence
  ENSG00000254563_0 (sequence is synthesized)
tttttaaaaaaccaacatgaataatatataatggctgacattttggaggaagcaggatctttgccttcttctatcttccatcagtggactgggagtgaccaacaatcaggaactgtgttc

SEQ ID NO: 808037 - DNA, 120 bp, Artificial Sequence
  ENSG00000254563_1 (sequence is synthesized)
agggagattgtatgggtatgtggcctgggatggcagcagatgtacccaccccctgcctagcaaagtcttctggatgtctgctttgagggtgagcagcatcaatgcctttcagttcatctg

SEQ ID NO: 808038 - DNA, 120 bp, Artificial Sequence
  ENSG00000260242_0 (sequence is synthesized)
tcaggtgggacattttgattggagagggtctctgattcagagagtgagaatgttagagttccctcgccgatgtgcctagcactgtgccatgtgttataaaggacgttgaaaagatgaact

SEQ ID NO: 808039 - DNA, 120 bp, Artificial Sequence
  ENSG00000260242_1 (sequence is synthesized)
tcatcaccttgtggaagaagcagacacattttagaagcaaagaaacaacacagagttaatgtggagaacagaggatgagataggggaaagaaaaaggcagctgctgacaggcgggagctg

SEQ ID NO: 808040 - DNA, 120 bp, Artificial Sequence
  ENSG00000260242_2 (sequence is synthesized)
taatgatggagaaagacaaacacaagactggcccataattgtgtctgagcacaaacaaaagcaagaacattgtccaaagcataagaatcataaaatatctttatttcctgccttatgcct

SEQ ID NO: 808041 - DNA, 120 bp, Artificial Sequence
  ENSG00000260242_3 (sequence is synthesized)
ataataataataataataataaataaagtagagttttaggtcaacttcattcctcttgacccctagataagccctagtcatggaactggcctcccttcctgacatatccaatccctgctt

SEQ ID NO: 808042 - DNA, 120 bp, Artificial Sequence
  ENSG00000260242_4 (sequence is synthesized)
tcctgacatatccaatccctgcttccttgaaacctcctccacagtgtacggcacaagcccaaatcctgcaagaagctctgctcagtctcttacactgatgcctcatggttctccacggtg

SEQ ID NO: 808043 - DNA, 120 bp, Artificial Sequence
  ENSG00000254561_0 (sequence is synthesized)
attgctccttctccatccaggttcttgtgcgtgcgcttctctctgctgggaagatccattgacaccttgtctctttggagaaatcagacccccttgttctgaggcttccagagacaagag

SEQ ID NO: 808044 - DNA, 120 bp, Artificial Sequence
  ENSG00000254561_1 (sequence is synthesized)
ctgccgagactttggcttcgctggaggaagtcccataaagatgggaagagtggctgctgctctgggatggtgtgaaggccatcctgcagaggcagaggggtacattggtggtgtccccat

SEQ ID NO: 808045 - DNA, 120 bp, Artificial Sequence
  ENSG00000254561_2 (sequence is synthesized)
gactaaatggatcctacctcttgtccctcccatcatcctgaggatgcctggggactggttcttcagggcatgctttctcgcctgccggccttccaccatgggatgaagcagcaagaaggc

SEQ ID NO: 808046 - DNA, 120 bp, Artificial Sequence
  ENSG00000254561_3 (sequence is synthesized)
tcttgccagaggcagacccctcgaccttggacttcccagcccccagaactgcccatgctgtgcagactgggatgtgggggtgcacctcagatgagaaggagagtggtacaggagctaccc

SEQ ID NO: 808047 - DNA, 120 bp, Artificial Sequence
  ENSG00000254561_4 (sequence is synthesized)
agctgctgtttgaggaatggatgttgtgtccacagtctgccctcaccccttgtcaacggctgggagcacgtaaactcttgcaaattatttaacctctctgtgcctcagtttcctcactat

SEQ ID NO: 808048 - DNA, 120 bp, Artificial Sequence
  ENSG00000254561_5 (sequence is synthesized)
aaatcgtggatggtaatcatgcacctgctcctctgagctgctgtgaggataaaatgcatctttatgaagcccttttgaactggggcggtgcctggcacgtagcaatcaccactcaggagg

SEQ ID NO: 808049 - DNA, 120 bp, Artificial Sequence
  ENSG00000254561_6 (sequence is synthesized)
gtcagctcttcctgccaaagggttagttcctggtcccccagggtggggaggccctagaaaggccctgagctttcacaagtttaggtgctttaagtctggggctcccagggtgctggggag

SEQ ID NO: 808050 - DNA, 120 bp, Artificial Sequence
  ENSG00000254561_7 (sequence is synthesized)
cagaccagtgggagtttagtgggcagagtcctgcctggctcacccggccccatccgtctccggtgggctcttctgctgccggttgtacaggaagaagacagtgagcacagcaactaggat

SEQ ID NO: 808051 - DNA, 120 bp, Artificial Sequence
  ENSG00000254561_8 (sequence is synthesized)
gaggaacacggccacggtgcccgccaggagcctggctgcacttcccagacccctctgggggcggggcttttctggaaacaaaagacagggaagaggattagagagagaaactcaagtgac

SEQ ID NO: 808052 - DNA, 120 bp, Artificial Sequence
  ENSG00000254561_9 (sequence is synthesized)
ccaaagagagtcagagatgtgagagagtcagaccctgaggcagtactctgcctttgacattgcacccccagctcccctccccatggtgctccagttctaggaggggctcccagccggtgt

SEQ ID NO: 808053 - DNA, 120 bp, Artificial Sequence
  ENSG00000254561_10 (sequence is synthesized)
gggatggaggctcctcctctagttccctatgaccctgtaaccccacaccctgctctgatcctgggatctggggcatggaggtagaacaagggtgagggtatctcctggacaggcagcagg

SEQ ID NO: 808054 - DNA, 120 bp, Artificial Sequence
  ENSG00000254561_11 (sequence is synthesized)
tgctgagatggggtccccaccccgtcattccatttctggccctgcagggaagattcctgttgaggagtttaacttctttcccctccctgtgcaattaaacaagcaaatgaactaatgggt

SEQ ID NO: 808055 - DNA, 120 bp, Artificial Sequence
  ENSG00000254561_12 (sequence is synthesized)
gcttcaccctcccagcttgggacagagggtgaggatcaggagggaaaggcaggagctgggagggtcgatgaagaaggggcacctgggggtgcctcccgggaaaccaagcctcttcagtac

SEQ ID NO: 808056 - DNA, 120 bp, Artificial Sequence
  ENSG00000254561_13 (sequence is synthesized)
agataggtgaaaagcccagagggctgtggtctaaggtgagggggctgagcccaccttctggacccacctggtcatggacccagaagattgctgggcttgtcgaggtatttcacagtctga

SEQ ID NO: 808057 - DNA, 120 bp, Artificial Sequence
  ENSG00000254561_14 (sequence is synthesized)
gctggagacactggtctgtccctgaagcccaggaggctgcagagactgaccctgtggccaggggcacatgctgcttctcagcgatccaggcttggctgtgaagccacagctggcccttcc

SEQ ID NO: 808058 - DNA, 120 bp, Artificial Sequence
  ENSG00000254561_15 (sequence is synthesized)
agttcctccttctgctgggctcgatttctcacctctgacctttacgaccccagcgtggagtggggggtagggactaaggagaaaatcacacacttatgtactccttcctctccactacca

SEQ ID NO: 808059 - DNA, 120 bp, Artificial Sequence
  ENSG00000254561_16 (sequence is synthesized)
tattacatataattaaacacggagagcacctgaatagagatgccaaattgcagtttgcagtaaacatcatggagccaattttcctaaagtggaattgacaagtcccttccactcactcac

SEQ ID NO: 808060 - DNA, 120 bp, Artificial Sequence
  ENSG00000254561_17 (sequence is synthesized)
tcacttactcactcactccctcctcattcactcactcactttctgtctctctccccttctctctgctccattccagtgcccggaaggagggggtatcttgctcccagtaaatttgcaacc

SEQ ID NO: 808061 - DNA, 120 bp, Artificial Sequence
  ENSG00000254561_18 (sequence is synthesized)
aacccctctctggcctgtctgcaaaggctctggccccagcatccatccatccacagctggtggctgtggccgcctttggaaggcagtttcccgtgttgtccaggctggtctcaaactcct

SEQ ID NO: 808062 - DNA, 120 bp, Artificial Sequence
  ENSG00000254561_19 (sequence is synthesized)
aggattacaagcatgagccaccgtgcctagctccagagtgatcgttctaaactacaaatcagatcaggccacctccctacttaagttcctccaagagttcctccaacagtttgtggcctt

SEQ ID NO: 808063 - DNA, 120 bp, Artificial Sequence
  ENSG00000254561_20 (sequence is synthesized)
tatcaaagcgttaagggctgaggcctttcacgacctggttcctggaggaaacgccatgccgcccccagcctggaccacttgcagctcccagacagggagcccctgcttcctctcatcctc

SEQ ID NO: 808064 - DNA, 120 bp, Artificial Sequence
  ENSG00000254561_21 (sequence is synthesized)
aggtagctagtaggagccactctgtctgccagggtctctctttcttccccttctttgccaggccaatccagcctgcaggtttaagctggacgtgcttcctccagagagccctccctgcct

SEQ ID NO: 808065 - DNA, 120 bp, Artificial Sequence
  ENSG00000254561_22 (sequence is synthesized)
ttaagctggacgtgcttcctccagagagccctccctgcctcctccactggaatggggttcctcctctggacttcccctgcactctctttcagtctcttttcttttctttttctttttttt

SEQ ID NO: 808066 - DNA, 120 bp, Artificial Sequence
  ENSG00000254561_23 (sequence is synthesized)
cgtgcctggcttctttcagtctcttttctacagactgtgattgcacgtctgacttgtctccccagccctgcacagtgcctggcatgcagaagtgctcagtaagtgtggtgaatgaatgaa

SEQ ID NO: 808067 - DNA, 120 bp, Artificial Sequence
  ENSG00000254561_24 (sequence is synthesized)
ggcttgcctgaatgtgtagtgggcagttctgggagagggtccaccgggcgggcctctggaatctcaccttccactagggggagctctcaccttgagtccagccaccaccacgctggatgc

SEQ ID NO: 808068 - DNA, 120 bp, Artificial Sequence
  ENSG00000254561_25 (sequence is synthesized)
tacgaattcagtttccctggacacaactcaaacctatatccccttttcttctcagcacagctgaggcaggctggcatttccagagggctagggtgggagggggagcagtagggaaatgaa

SEQ ID NO: 808069 - DNA, 120 bp, Artificial Sequence
  ENSG00000254561_26 (sequence is synthesized)
cacataccctgtccggctcacagagttcaggtttctcttctaccacggttggccccacatggaatccgaacaggaggaagagacaggttcaggacaaaaggctgggatttcagcccttac

SEQ ID NO: 808070 - DNA, 120 bp, Artificial Sequence
  ENSG00000254561_27 (sequence is synthesized)
tccctgcctccaggaaacttctctcagaggctttcacccatcatcccctcatggactctgcagccactttgccaagagagggtggcagctgtctctataagggccctttcatcatcctta

SEQ ID NO: 808071 - DNA, 120 bp, Artificial Sequence
  ENSG00000254561_28 (sequence is synthesized)
cagtgcaaacaaaaacacagccatccctcggcatctctgggggattggatccaggacccctagcgaatagcaaaatccaagcatgctcaaaagtcccttatataaaatggtgtagtattt

SEQ ID NO: 808072 - DNA, 120 bp, Artificial Sequence
  ENSG00000254561_29 (sequence is synthesized)
gcctataacctatacacatcctcccatatactttaaatcagctctagattactcataatacctggtacaatgtaaatgctgtgtaaatggttgtaatactgcattatttaggaataacaa

SEQ ID NO: 808073 - DNA, 120 bp, Artificial Sequence
  ENSG00000254561_30 (sequence is synthesized)
gaaaaaggtgtacatgttcagtgctgacactactctccattttctttttttctgagtatttttgatctgcagttggttgactccacggatgcagaacccatggatggatacagagggttg

SEQ ID NO: 808074 - DNA, 120 bp, Artificial Sequence
  ENSG00000254561_31 (sequence is synthesized)
actgtataagaagttttctataaatgtctgctgtggactgaactgatggaataagcatccaaaaggaatgccaccggctgaaatgctgaccctcatcaccaagataaaacattgcaggga

SEQ ID NO: 808075 - DNA, 120 bp, Artificial Sequence
  ENSG00000254561_32 (sequence is synthesized)
tgcatgaaaattacatttggggagtaaataggcagcccaagtacagagtgaagaagacctgcttagaggtggcacacatgaaaacaactcaaagatctctgtctggagaactcctgcaca

SEQ ID NO: 808076 - DNA, 120 bp, Artificial Sequence
  ENSG00000254561_33 (sequence is synthesized)
tccttcaaggcccaggtgaaatgtcgcttcagatcctcccaaacacaatgacccactcccgtcctgtgctaccccagcgctttacacacagctctgcgacagcctgtggccattttggaa

SEQ ID NO: 808077 - DNA, 120 bp, Artificial Sequence
  ENSG00000254561_34 (sequence is synthesized)
ttggggatacccagcgttcggaattccttagagctgggatgctgggtgtggctgtcacagcattgcagtgccagagtggccaaaaatgtgttgtaagtgaataaatgaattcctcaattc

SEQ ID NO: 808078 - DNA, 120 bp, Artificial Sequence
  ENSG00000254561_35 (sequence is synthesized)
agccttggaaactttcaaaatcctacatctctgatagtcatatgaaaaagtgctcaacatccttagtcatggggaaatgcaaactgaatcataataacataccactatgcccttgccaga

SEQ ID NO: 808079 - DNA, 120 bp, Artificial Sequence
  ENSG00000254561_36 (sequence is synthesized)
aagactaaaagataaaaggacggatggcaccaagagtgggcgagaagcagagccatgggaactctcatacgctgttggtgggagcgacattggcacaaccactctggaacactgattgta

SEQ ID NO: 808080 - DNA, 120 bp, Artificial Sequence
  ENSG00000254561_37 (sequence is synthesized)
tctactaaccctagttccactcccagcagaaatgagggtgatggaccccaaagttacatacaagaatgtttgtagcaactttaattgtcccagcctggagactgctcacatccccactga

SEQ ID NO: 808081 - DNA, 120 bp, Artificial Sequence
  ENSG00000254561_38 (sequence is synthesized)
tggtacaagagagaggcacactgtggccttttcacactttgggataataatacacagcaatggacaacagacctcatgggtgaggctcacagacatcatgttgactgaaagagctgcaaa

SEQ ID NO: 808082 - DNA, 120 bp, Artificial Sequence
  ENSG00000254561_39 (sequence is synthesized)
aatagtatactcgattgtattctatgaatagaatagactaggtatgactccatttctgtgaagttccagaatgggggtcatgcctgggagggcacatgaatgactcacagtcttgatccg

SEQ ID NO: 808083 - DNA, 120 bp, Artificial Sequence
  ENSG00000254561_40 (sequence is synthesized)
ggggtggtgacatgggtgtgtacaaatggaactgaagccctaagatctacgcacttcacagttgttaccgtattcctcaataaaaaagcttgaaaatgaaaaataacaaagtaccaaaac

SEQ ID NO: 808084 - DNA, 120 bp, Artificial Sequence
  ENSG00000254561_41 (sequence is synthesized)
cttacacaggatcccggcaagtaaaaatgatcacggttgagacctatcctctcgcttcctatgtcaggtggctcccggggcatttctgtggattaaactgtagaaggcactggaagcctt

SEQ ID NO: 808085 - DNA, 120 bp, Artificial Sequence
  ENSG00000254561_42 (sequence is synthesized)
tgctccggggtgaatgtggcctcacattcctgcagctggcctcagtgtcccctgcaggagggtggcccggcgcggggatcccaacccagccctgccctgagggacacatccccgttcctc

SEQ ID NO: 808086 - DNA, 120 bp, Artificial Sequence
  ENSG00000254561_43 (sequence is synthesized)
gtgggtcgtggtgcgagacgacgtcaatcagagagaaaataaaggagtggtgcgcaccacgtagccaggaaggcacagagctgggatcctacctggaacttggcaagtgtcttacttctt

SEQ ID NO: 808087 - DNA, 120 bp, Artificial Sequence
  ENSG00000254561_44 (sequence is synthesized)
gatgttgtttccatgacgagttctgtttccctgcttagggcagatacccagtggtgaaaataacaataagtaagaatactatcctagttcaacgcagctgagcgctcagtctgttctagg

SEQ ID NO: 808088 - DNA, 120 bp, Artificial Sequence
  ENSG00000254561_45 (sequence is synthesized)
tgttctgttgagtgctttacaaggagtcaattctcctttaatccttacagccgtcggtggcaagtatccctattacctgttttacaaatactccatatatgaactatctttattcatccc

SEQ ID NO: 808089 - DNA, 120 bp, Artificial Sequence
  ENSG00000254561_46 (sequence is synthesized)
agcagtctactcacgtagattgagaaataaaattcagggaaggcaggcaccttgctgaaggtctgcagagctgataggtggtggaacaagggattgatcaaggtcagtttgactctaaag

SEQ ID NO: 808090 - DNA, 120 bp, Artificial Sequence
  ENSG00000254561_47 (sequence is synthesized)
gcgcctataggtggtctaaaccccaaaaacctgcttcacgaggattacgggtgtggctccatcctgccccctacttgcctcaggtggtgacctccattgcagtcactgtcatccgggatc

SEQ ID NO: 808091 - DNA, 120 bp, Artificial Sequence
  ENSG00000260244_0 (sequence is synthesized)
ttgaatctttgatacatatttgttgaggagcttgtcagatcactacctttcactgaacagtaaaacatggatcatttatttcacctcattttgcacttcaatgcaatttcactctttagg

SEQ ID NO: 808092 - DNA, 120 bp, Artificial Sequence
  ENSG00000260244_1 (sequence is synthesized)
tggttgtacttggacagttaaatgaagactgtctttaagggtgcagggatggagaacacagcatatatgagaggtgggagggcagagacgccttgcgattcctgtgaggagggacttacc

SEQ ID NO: 808093 - DNA, 120 bp, Artificial Sequence
  ENSG00000260244_2 (sequence is synthesized)
gtctcctccaaaacagaaattcagtgctgcagagacggtagcaaagtgcagttctcttgttaaaacacaggctaaaagcagtgactgcttaacttattaagcagagaaaaccaaaatgtc

SEQ ID NO: 808094 - DNA, 120 bp, Artificial Sequence
  ENSG00000260244_3 (sequence is synthesized)
attttcaaccaaaattgagtgttagagtttatggtctctgttatgatacttttcaagacctgggaaatatttgtatcctttagtgaaaaggggaagaatcaattactgaaagccataagc

SEQ ID NO: 808095 - DNA, 120 bp, Artificial Sequence
  ENSG00000260244_4 (sequence is synthesized)
ttacagtaacggagccaattaatcctttgtcatctttgttgagtttagttttcttctgttcttagcacgtcagctagtagatctttgatgaactgttgctcctctttaaatgtttctttt

SEQ ID NO: 808096 - DNA, 120 bp, Artificial Sequence
  ENSG00000260244_5 (sequence is synthesized)
attatattgatgatgtgcactcattcagtattcttattttaagctgcagtaatcactgtacatttgattgccatctgtacttcccttgaagcagctttgcttattacagccacacctgca

SEQ ID NO: 808097 - DNA, 120 bp, Artificial Sequence
  ENSG00000260244_6 (sequence is synthesized)
tctgttttgactagcccacataacctacacatttttcatccaaagctatcccattaccttatttatgtccatttattttcatatatagtatctgccaaaatagtagcaaaagttttatca

SEQ ID NO: 808098 - DNA, 120 bp, Artificial Sequence
  ENSG00000260244_7 (sequence is synthesized)
atgtgtagatttcaatcagaaaaacctaagcaaaaggaaaaaaaagtgatattctaaaagccacacttcttttatcaccagtgcagttttttccatcatcataaacttagttttatgaaa

SEQ ID NO: 808099 - DNA, 120 bp, Artificial Sequence
  ENSG00000260244_8 (sequence is synthesized)
atgttaatatcttggatttaaacattggggtagaaatcaggacaaaatttaaatgtcatatccaggacttaatctcagatattctggtagaagatatttagataaggttgtggctgcctg

SEQ ID NO: 808100 - DNA, 120 bp, Artificial Sequence
  ENSG00000260244_9 (sequence is synthesized)
tcaagttttttaattttttaaattatataatgtcagaaaattaaatcacaaatgagccttccagattgtgaggaaaattacttggctgaaaatgactttgcataatgcccaaatcttgaa

SEQ ID NO: 808101 - DNA, 120 bp, Artificial Sequence
  ENSG00000260244_10 (sequence is synthesized)
aacaaagcaaaacaaaaatgctattacagaagttggacagcccaatgtgttaagtattatacacctggaacaagagcagcaaaactgaagctctttggaaagttatggcaacagtggtct

SEQ ID NO: 808102 - DNA, 120 bp, Artificial Sequence
  ENSG00000260244_11 (sequence is synthesized)
gggaattctgggcctttagaaataatcattcccagtgatacagggatgtgcagcatccagacactgcttaatcacagtgagctgccgtcttccctgaataagttgtatcttataacattg

SEQ ID NO: 808103 - DNA, 120 bp, Artificial Sequence
  ENSG00000260244_12 (sequence is synthesized)
aagtgaatgaaaatgtattagtatttgagaatttactattccttcacctccttgcacatgtaaattaaagatgttttggaaaatatgagaacttgatgttcactgccctagagcactatt

SEQ ID NO: 808104 - DNA, 120 bp, Artificial Sequence
  ENSG00000260244_13 (sequence is synthesized)
ctccaaccttttagattcctgcaatctgttaataaaatattgtaggacaacaactctatagactgatacatgctgctctcaatccatatactacatattaggacagcttttcttttctaa

SEQ ID NO: 808105 - DNA, 120 bp, Artificial Sequence
  ENSG00000260244_14 (sequence is synthesized)
atgagcatgaatataaatagaaattctagtattttcttcacctaccccagtgaatcatctttatattttacttgggaaactgctacagttggctagtgggtcttcacttttattgctttg

SEQ ID NO: 808106 - DNA, 120 bp, Artificial Sequence
  ENSG00000260244_15 (sequence is synthesized)
agaaatggataaaagacatagactatcacccctccaaaaatgtgcatatggccccatacaagacacatgtactgccagagcttggggaactccctagaatctactcctagaccaccctag

SEQ ID NO: 808107 - DNA, 120 bp, Artificial Sequence
  ENSG00000260244_16 (sequence is synthesized)
tgaagtaccatagaccatattgtctagatgggacaaaataataaattttgactaagaacttactgtttagagagaaaaaatagtaaataatgttcaaaatgagaagacaataactgacaa

SEQ ID NO: 808108 - DNA, 120 bp, Artificial Sequence
  ENSG00000260244_17 (sequence is synthesized)
gtctgtgatttttgggttagatgagaccacttttgatttttgaggaataaaaggagttagttttttggtcctgatgtgtaaaatgattcatggggtttcacatacagacaagtagttttc

SEQ ID NO: 808109 - DNA, 120 bp, Artificial Sequence
  ENSG00000260244_18 (sequence is synthesized)
ttttcagcaaatatttaacatatctctcaatatatttttcaccagtttttggtaaatatgcattgctataggtataccaagttttttttgttatgtttagtaactaatttcattttttct

SEQ ID NO: 808110 - DNA, 120 bp, Artificial Sequence
  ENSG00000260244_19 (sequence is synthesized)
gtatatgtaaatatagctattggaccctgcattgaaaaccttcttagtactaacaacactccttttattattaccttcatagttactttaaatgacatatttatttcgagttttacttct

SEQ ID NO: 808111 - DNA, 120 bp, Artificial Sequence
  ENSG00000260244_20 (sequence is synthesized)
ggctgagttgcaaagtctatgagaatgttacctcctgtctcagaagcttgttagttattgtgccacctaaatattgtaataaaagtgtttaaataaaaatcttcttaaaatttaaaatga

SEQ ID NO: 808112 - DNA, 120 bp, Artificial Sequence
  ENSG00000260246_0 (sequence is synthesized)
ggttgaggctttacttccatcaggtaggcctaaggcagggaccatgctgcaggagcagggcctgtaaaccagtcaatgctgctccttcatgcaacacggggacagctcggggctgagctc

SEQ ID NO: 808113 - DNA, 120 bp, Artificial Sequence
  ENSG00000260246_1 (sequence is synthesized)
cacaggcgaggggccaggcaggggtttagggggagtgaagagggacaatgaagtcttgggagtaaagatgggaataaacaggagaaaggaacgaggaggcaggtgctgggatgcagagtc

SEQ ID NO: 808114 - DNA, 120 bp, Artificial Sequence
  ENSG00000260246_2 (sequence is synthesized)
cacagcctgggcagcaggctgagtatgggctcctcactcccacctcctggccttcaaggccctacttgttgccccagacagccatctttgagaacacaggtcttgggaggaagcggctgg

SEQ ID NO: 808115 - DNA, 120 bp, Artificial Sequence
  ENSG00000260246_3 (sequence is synthesized)
acttcatgtaggcagagatcttctccaagccctgagaggggggaaaataaggccagaactcaaggtcagctgcccatgagggctgggacaaccccactgcagacacagcaggtcagggcc

SEQ ID NO: 808116 - DNA, 120 bp, Artificial Sequence
  ENSG00000260249_0 (sequence is synthesized)
agccactgttatgcaaagttcaagggcctctctcacacttagctgggggaggagtgaatacagcctttctgaagaaagaaaaattaagtaatagcaaaatcattaagtgtttatgattca

SEQ ID NO: 808117 - DNA, 120 bp, Artificial Sequence
  ENSG00000260249_1 (sequence is synthesized)
taaatacagtttttgtcaactaaaaaaataaaatatgtagaagtcaaaaaagtgtctatgattcagaaatgccaccgttagaagttgccataagagtgcacacaaaaaggacatatgggt

SEQ ID NO: 808118 - DNA, 120 bp, Artificial Sequence
  ENSG00000260249_2 (sequence is synthesized)
caaagtgtttgcagcagtgttgtcccaaataaggacattttgcaacattgtggggtggttaaaataactatagaatatgcattagaatacaatgaaaccattaaacataatgtggaagaa

SEQ ID NO: 808119 - DNA, 120 bp, Artificial Sequence
  ENSG00000260249_3 (sequence is synthesized)
tattgtatattatagggaaatgctcataatatatagtgacaatttaaaaagcagattacaaaacaatatgccaagacatgatttctgcccaagtctgccctgatgggtgagctaaccaag

SEQ ID NO: 808120 - DNA, 120 bp, Artificial Sequence
  ENSG00000260249_4 (sequence is synthesized)
gttgctgcactgtgagggcataggggctgcccctcagcccccaccccagccactgggctcctcaggaaaggacacgtgagtgtttactgcacatcctacagatgaggagctcacaaggac

SEQ ID NO: 808121 - DNA, 120 bp, Artificial Sequence
  ENSG00000260249_5 (sequence is synthesized)
cctggatgggggagtcctctgaggttgctggagctgctgcagccatcttgtcactgccaggggagagctctctctgagagcgaaggcacagtggaggaaagcagaactaagaagagacag

SEQ ID NO: 808122 - DNA, 120 bp, Artificial Sequence
  ENSG00000260249_6 (sequence is synthesized)
agaaagcgaaagtgggagagagagagagatatgaggtgacaagtgtgggtccttggatcctgcttggtgtaaagctagcctgctcctggactttacagataataaattccttcctcatca

SEQ ID NO: 808123 - DNA, 120 bp, Artificial Sequence
  ENSG00000260249_7 (sequence is synthesized)
gattaacctgggtttttgtggcttgtaaccaaaagggtctgcacggcccacacacaggctcccagctcatttcctttgcaatgagtggtaactggaggcgggcggtgcatggacctgcct

SEQ ID NO: 808124 - DNA, 120 bp, Artificial Sequence
  ENSG00000260249_8 (sequence is synthesized)
tgcaaggcttctctgttagtggtgcctggagcccactctctcagctggcacagccagtgtgacacatcagtccgggtgtgtcctggacctaccccctttctgggtgcaaaccagaactga

SEQ ID NO: 808125 - DNA, 120 bp, Artificial Sequence
  ENSG00000260249_9 (sequence is synthesized)
ggatgccgagggtggtgggggggtagtttcctgcctcagggctgtgctcctgctacctctttgcctaaaattctcccctctctgtgctcccagggccagctcctttgtatgctctgtgat

SEQ ID NO: 808126 - DNA, 120 bp, Artificial Sequence
  ENSG00000260249_10 (sequence is synthesized)
tctttgaacagcgccccctctgagaagccttccctgaccacctggctgaggacatcattctgtcccagcttccatttgctttgggagtggcctcctgacacttcacttccgtgaggcagg

SEQ ID NO: 808127 - DNA, 120 bp, Artificial Sequence
  ENSG00000260249_11 (sequence is synthesized)
gaccagttctgtcctggtcactgctgtatccccagctctagataaggcctgagacatcgtaggagtgccagggatctttggttactgagaaaacgagcagctagatcaaggttcccaaca

SEQ ID NO: 808128 - DNA, 120 bp, Artificial Sequence
  ENSG00000260249_12 (sequence is synthesized)
ccaacacgctggggacatgttgggagtcaacttagccctaccagcaggtggaactagttttgctgctccaaaacagagttctagctatggggacagccactagagagcagagctaagtcc

SEQ ID NO: 808129 - DNA, 120 bp, Artificial Sequence
  ENSG00000260249_13 (sequence is synthesized)
atgctatgctgaggggccacagtctgccctgaactgtgcctcccagcctggagctagtgagggggccgagcctgggagctgacagatgagggctcggcgtggggacttttggaggggagg

SEQ ID NO: 808130 - DNA, 120 bp, Artificial Sequence
  ENSG00000260249_14 (sequence is synthesized)
gcattttcttgatcttaccatgggggcaacagctagatgggtagggggggacccactcaaggacatactgcggcttcaggcttcgaccagcccagaacgctcgctccatctgagggtctt

SEQ ID NO: 808131 - DNA, 120 bp, Artificial Sequence
  ENSG00000260249_15 (sequence is synthesized)
gatatcagggtgtggcgtcaggagccggagcctacgggttgaaagccaagagtgggcaatcaaagctgaaaccaggcccacgacttaggagctggagagcacacagggctgaacactcga

SEQ ID NO: 808132 - DNA, 120 bp, Artificial Sequence
  ENSG00000260249_16 (sequence is synthesized)
gttggtgaccaggaaaccagggagcaaagtctccagggtgcttgggcaagaccccagatggtctgcagcaacgcacgggcaacacgggatgatcagcgctacgtggtgagaaacttacct

SEQ ID NO: 808133 - DNA, 120 bp, Artificial Sequence
  ENSG00000260249_17 (sequence is synthesized)
ccttttgcaggacaacattttccagtccttctgagtaaatcaaagagaagtctcagcttggtgattgcaggtctctaatgcttatttctctgtctctgtctctctctcttttaacaaaag

SEQ ID NO: 808134 - DNA, 120 bp, Artificial Sequence
  ENSG00000260249_18 (sequence is synthesized)
tctaccagcggcctcaggctcagggcctgtctcaggtaaaagcgggttagggtgtaataacagtgatcggtttcattgtgtttatttttgtagctactttctaattatagcaagtgattc

SEQ ID NO: 808135 - DNA, 120 bp, Artificial Sequence
  ENSG00000260249_19 (sequence is synthesized)
tgagtttccatttaggatagtaataggaagtttctttttcaagtaaatgtgcataagtaaaaggagactgctcaaaggaaaacagctggtgattgatagaacaggctgtggcattgttgg

SEQ ID NO: 808136 - DNA, 120 bp, Artificial Sequence
  ENSG00000260249_20 (sequence is synthesized)
gccccagagggaagggctgtgtgagcatgcaggaaattctgggaaggcagctaaatgcagttgctgcatgggggccaggaagcatttggagacgtggctgggcacagcttggcttttgag

SEQ ID NO: 808137 - DNA, 120 bp, Artificial Sequence
  ENSG00000260249_21 (sequence is synthesized)
gtggaactggttttgccactccaaaacagagttccagctatggggacagccactagagagcagagctaagggcattctaggccaaggggtcacagtccaccctgaactgtgcctcccagc

SEQ ID NO: 808138 - DNA, 120 bp, Artificial Sequence
  ENSG00000260249_22 (sequence is synthesized)
ctgaagccagaaagctcagggaggctagcggccctgcccaggcctcagcactgaccctgcacccctaggcccagctggatgacccctaagagcttcctggaatttggatgcagggttatt

SEQ ID NO: 808139 - DNA, 120 bp, Artificial Sequence
  ENSG00000260249_23 (sequence is synthesized)
ctgtgtgtgctgcctctcagagcatgtcactttgacgtggacatctcgggtctggttctggtgctgtccctgtctcgccacgtgaccctggataagtcatctctccaggccttgatttcc

SEQ ID NO: 808140 - DNA, 85 bp, Artificial Sequence
  ENSG00000260249_24 (sequence is synthesized)
cgtgaccctggataagtcatctctccaggccttgatttccccatctgtaaacagaggtgagtgaaatgatctttaaaggcgtgtc

SEQ ID NO: 808141 - DNA, 120 bp, Artificial Sequence
  ENSG00000260249_25 (sequence is synthesized)
agttgtgcaggttgtacagaagcatggcaccagcattgcttcttgtgaagcttcaggaagcttccacttatggtggaaggggaagggggagttcgtgacttacatggcaagagagggagc

SEQ ID NO: 808142 - DNA, 120 bp, Artificial Sequence
  ENSG00000260249_26 (sequence is synthesized)
aagagccatgtcaggctcttctaaacaaccagctctcatgtaaactaacagagtgagaactcattcattaccacggggagggcaccaagccatccatgagggacctgcccccatgagcca

SEQ ID NO: 808143 - DNA, 120 bp, Artificial Sequence
  ENSG00000260249_27 (sequence is synthesized)
aacatctcccaccaggccacaccttcaacactgggagtcacattcagcatgagatttggaggtgaccaccatgcatccaaaccatatcaaggacccatttcggtgaggggaccaggaaca

SEQ ID NO: 808144 - DNA, 120 bp, Artificial Sequence
  ENSG00000260249_28 (sequence is synthesized)
tatcccttcccctctcctccacatcctttaatgtggagttcagcaaggaaagtagggcttgggtcaaattaaagcctggtcttaatttcctggtccagttattagctgtgtaaccctggg

SEQ ID NO: 808145 - DNA, 120 bp, Artificial Sequence
  ENSG00000260249_29 (sequence is synthesized)
caagtcacttaaccccctcaggttacaatgttacaaatgatcacattttcctcaactgaaaaatgggataggaacatgtcccaagcagagctggagtgacggtgctatcaatggcccggc

SEQ ID NO: 808146 - DNA, 120 bp, Artificial Sequence
  ENSG00000260249_30 (sequence is synthesized)
agtgcctggtcacacagtaggcctggggagccctgacttttaccgcacagggagctgcttgcagagcttgttttcaattgtgggcttggcagggaactgccggcatcccaggggacaggg

SEQ ID NO: 808147 - DNA, 120 bp, Artificial Sequence
  ENSG00000260249_31 (sequence is synthesized)
tctcatgaggatgcctaatcccagctcaaagtggagaccccaggactccatcacagccagtgggggggagtggctgctgcagcagggagggcttcattggaatgaacccctttaagctcc

SEQ ID NO: 808148 - DNA, 120 bp, Artificial Sequence
  ENSG00000260249_32 (sequence is synthesized)
agtccaaatgcccagagtggttttgcaggtatggttgtgaggctggcatggtagtcccatctgcagtcccctgggatgaggcacctgtatggtagagggcccgggtggagagaagagaag

SEQ ID NO: 808149 - DNA, 120 bp, Artificial Sequence
  ENSG00000260249_33 (sequence is synthesized)
gatggggatgaacccaggaccacagatggcccagttccatggatgattttcattgaggtgccttcaagtcagttcaacactgggcttctcaacctttgaggtatgcaggtaagagtcacc

SEQ ID NO: 808150 - DNA, 120 bp, Artificial Sequence
  ENSG00000260249_34 (sequence is synthesized)
tgcggcagtgggggatgctcttgttaaagtgcagactccgattaagcaggtctagggtggggcctgaaattctgtgttcctaacaaggctccatcctgggtatggaggtcaggtaccccc

SEQ ID NO: 808151 - DNA, 120 bp, Artificial Sequence
  ENSG00000260249_35 (sequence is synthesized)
tcacctctcctgtggacccagcttttgaggggtcaggagaagaatgttcagtcccagctgccaccactctaaagtcccctagaaacaaggactaatacaggtggcgtgggagagggccca

SEQ ID NO: 808152 - DNA, 120 bp, Artificial Sequence
  ENSG00000260249_36 (sequence is synthesized)
ggcaaacagggaggtggggtaccccggtggggctgcagtgggccctgcggaaagcttgctggaggtgggggcctaaggaattcaaggacttgttccaggaacccaaggaacgagtgggct

SEQ ID NO: 808153 - DNA, 120 bp, Artificial Sequence
  ENSG00000260249_37 (sequence is synthesized)
ctaactgctgcagcatatgggagatgccaggaggagctggctgtggcaggccatcccagtccatcagacaacttgtagtggatgaagatgcagtgtccatggccagaagaaactcccgtg

SEQ ID NO: 808154 - DNA, 120 bp, Artificial Sequence
  ENSG00000260249_38 (sequence is synthesized)
gatgctcaggccaaggctgccagaagcacgaggaggggcagcattgagtgtcatcgggaaaaggcaaagtgatggtcctgaagctgccccatgtggccagtccctttttgggaagcctga

SEQ ID NO: 808155 - DNA, 120 bp, Artificial Sequence
  ENSG00000260249_39 (sequence is synthesized)
ataaatccatttcctgtgcactgtgtgggaagccaacccctcttcagagcacctctgaactcaacaggatcctacacttcttataggcctggcttgatgctgacatccttcagccccagg

SEQ ID NO: 808156 - DNA, 120 bp, Artificial Sequence
  ENSG00000260249_40 (sequence is synthesized)
gaagacctaaagatctccaggtcttgaggcacctggaacacctccacctgagaccactttaacatgatttctctgcttgagggattttggaccatgctgtgtgtattcagccctaaaaca

SEQ ID NO: 808157 - DNA, 120 bp, Artificial Sequence
  ENSG00000260249_41 (sequence is synthesized)
tgggcgagtgcccgcttgcagttcaaattctcagaggaagttccctgtactccacccagtgccaagtttagtttgtgcaaatttccttaatgtcccctcctgtacaacaggcttatttgg

SEQ ID NO: 808158 - DNA, 120 bp, Artificial Sequence
  ENSG00000260249_42 (sequence is synthesized)
tgttaaccctcatatcgggggtctaactctttgcttttccagcttttgtgctggaatatcccattaaactgtccatgttgggtattttttctttgttagtaaacatttgttgcatattgt

SEQ ID NO: 808159 - DNA, 120 bp, Artificial Sequence
  ENSG00000260249_43 (sequence is synthesized)
acattactcacagtctctatagccttgtgtgtctactggtgaattaaaaggtcactagtggtgtcctctgggagtcctcttctcactcccccagttcagtaggcagatgggtggggagtc

SEQ ID NO: 808160 - DNA, 120 bp, Artificial Sequence
  ENSG00000260249_44 (sequence is synthesized)
ccccacgccatctgggtcctgaaaaggtgggagatgggatctgggaggagcaggttattcaatctctccccctggaaagcgacgtggcgcgggccttactggggaagggcctctcccccc

SEQ ID NO: 808161 - DNA, 120 bp, Artificial Sequence
  ENSG00000260249_45 (sequence is synthesized)
agaccgagagaggcgcagttaggcccgttctcggaagccatggccgatcctgctcctgggggcgctgatactggctatttgcagcgccctctcttgtgaaaccctgcggattccgcttgc

SEQ ID NO: 808162 - DNA, 120 bp, Artificial Sequence
  ENSG00000260249_46 (sequence is synthesized)
gggaagtggagggcggtggcctccgccttttggggcttctgggctgagggaagaggatggaggggcagaaagggagtgaggtcccaaaccccaagtggaggtcgcccggggaccccccat

SEQ ID NO: 808163 - DNA, 120 bp, Artificial Sequence
  ENSG00000260249_47 (sequence is synthesized)
caaaacacttgctggggagaggttatagaggcagcaaagctctttccagcatgatttcaaatcccgtctaagggctttcagaagcctggagaaagtttcggtttcccagctgtttcagct

SEQ ID NO: 808164 - DNA, 120 bp, Artificial Sequence
  ENSG00000260249_48 (sequence is synthesized)
ttttccgcccgcaccgcggcgatgcgttcggagccgccgaggcggcagcgccatctgctgtctactttttaaattgcaggatcagatcctctcggtctctccagacctgccccgtggaaa

SEQ ID NO: 808165 - DNA, 70 bp, Artificial Sequence
  ENSG00000260249_49 (sequence is synthesized)
atcagatcctctcggtctctccagacctgccccgtggaaagggaataagattaaaccagtaaaaatagct

SEQ ID NO: 808166 - DNA, 72 bp, Artificial Sequence
  ENSG00000260249_50 (sequence is synthesized)
tatatcacgccactgcactccaggctgggagacaagaacgagactctgtctcaaaaagaaaaaaatagttta

SEQ ID NO: 808167 - DNA, 120 bp, Artificial Sequence
  ENSG00000260249_51 (sequence is synthesized)
tcacgccactgcactccaggctgggagacaagaacgagactctgtctcaaaaagaaaaaaatagtttaaaggccaggagcggtggctcatagctgtaatcccatcactttgggaggccga

SEQ ID NO: 808168 - DNA, 120 bp, Artificial Sequence
  ENSG00000254568_0 (sequence is synthesized)
caaaacaattttctacacaaatgtccttatgaaatgccatgaaccccaagtacacttgggcagaatgaacctattacttcattttccccacagccaatcacccttccccatgccttagac

SEQ ID NO: 808169 - DNA, 120 bp, Artificial Sequence
  ENSG00000254568_1 (sequence is synthesized)
catcccacttccctcagccataaatatccctaaggcttatcttgaggaggtggatttaatataagttgccaggaccagcagaccctgaaactccccacccctgcccttcctatattctgc

SEQ ID NO: 808170 - DNA, 120 bp, Artificial Sequence
  ENSG00000254568_2 (sequence is synthesized)
ttctccctttaattgcagaacagaaatgtgtgacactccctgagtgtcaatgaatgcctgatccctgcctaactcaggaaattcttgccatctctccaggtgctcccctaaaaatggtgc

SEQ ID NO: 808171 - DNA, 120 bp, Artificial Sequence
  ENSG00000254568_3 (sequence is synthesized)
tccggggaatgatctcacagaactcaagtctttaccattttatggtatcaaatttcttaagctcatagtgacaacagtacgaggatggtgcttttgacctacggtctcatacctcccttc

SEQ ID NO: 808172 - DNA, 120 bp, Artificial Sequence
  ENSG00000254568_4 (sequence is synthesized)
cttcagcatcctcgctagacccagccttgaaccctttgtttggcatgagggaccccctctcacctgggctttgggaaaggttcttggaacctctatttcctaactcacaggcccggagct

SEQ ID NO: 808173 - DNA, 120 bp, Artificial Sequence
  ENSG00000227769_0 (sequence is synthesized)
tagtgtggaaggcagtcactaagtttggtctaatggagaccacatacgaagatctaattcaacaccatgagttacccccagaagttaaataggtccctaattcagcctgctgcataaggt

SEQ ID NO: 808174 - DNA, 120 bp, Artificial Sequence
  ENSG00000227769_1 (sequence is synthesized)
tgtatcataaaagagaaatgggttctgctccctgcttaataagaaatcctgcttacttctccagcttttgaagcacaggttttatgtttgtttgggatagaatctcattctgtcacccag

SEQ ID NO: 808175 - DNA, 120 bp, Artificial Sequence
  ENSG00000227769_2 (sequence is synthesized)
cagattcacctgtttgcttcctaagacagaaaataaataggaggaaaaggatcagagtcaaaattctgagaaaaaaaaaaaatctgggccatccatccatcacaagtgttccaagtagaa

SEQ ID NO: 808176 - DNA, 120 bp, Artificial Sequence
  ENSG00000227769_3 (sequence is synthesized)
gaatcccctgtaaaaggagatgagcatgttcaagtattaagcacttaaaatgaagattatgtttggaaatcaaaatataattttgataacccattaaaagtaatgaaatggagaaaacaa

SEQ ID NO: 808177 - DNA, 120 bp, Artificial Sequence
  ENSG00000227769_4 (sequence is synthesized)
ttgatctattaggaggaacagatatcaaacaagccaatgaaccaaaggctggggcatatgagaagttctgccagaattctaggcattcccacattaacgtgaaataaattggcatgccga

SEQ ID NO: 808178 - DNA, 120 bp, Artificial Sequence
  ENSG00000227769_5 (sequence is synthesized)
tgccagggttcaccactatcttaggaatatcatgaataaagcgttagattgggtgtgccctaactgatggtcacaagcatgatactaattatcagggtgaacaaagcaggggagtaagag

SEQ ID NO: 808179 - DNA, 120 bp, Artificial Sequence
  ENSG00000227769_6 (sequence is synthesized)
catcagtaactgtgaaactctaggagtttgtcttcattctttcagtgatagaatatctagcatttgtatttcgtacatcatacacttgagttagtatctgtggaaaggataaatacataa

SEQ ID NO: 808180 - DNA, 120 bp, Artificial Sequence
  ENSG00000227769_7 (sequence is synthesized)
ggaaaagagatgcaggaagctgcagagacactggccatttatctgagaagtgcccaatgaggcatcaccggataagcacacgtcgggtcgttctcctgcttcagtaaggtctgtggcgtt

SEQ ID NO: 808181 - DNA, 120 bp, Artificial Sequence
  ENSG00000227769_8 (sequence is synthesized)
ggctctcataaaaatacatggcttcagcaatacgcatgcagttatctcagtttaaaggaaatgggttctgctccctgcttaataagaaatcctgcttacttctccagcttttgaagcaca

SEQ ID NO: 808182 - DNA, 120 bp, Artificial Sequence
  ENSG00000227769_9 (sequence is synthesized)
gattatttttcttctcttcatcatataaaaatggaaattatcaaaacaaaacatcatcaaaacaaaacatcatcaaaaacaggttgctctctgagtaaaggttttatgtttgtttgggat

SEQ ID NO: 808183 - DNA, 120 bp, Artificial Sequence
  ENSG00000227769_10 (sequence is synthesized)
gaggagggtagaataatccatctattttatttggctatagtgataagtagaggtttcaatataaacatttctcctctgagcaacttgaaagaatgatccatttagttttgtatcccattc

SEQ ID NO: 808184 - DNA, 120 bp, Artificial Sequence
  ENSG00000227769_11 (sequence is synthesized)
atgctctattttcctgcttgctgcagtaactgtggtttcatacagagtattagaactaccagcagcctgatggtcttaagcctgggtgcacaggaaggaggaccagtggcctgtgaagag

SEQ ID NO: 808185 - DNA, 120 bp, Artificial Sequence
  ENSG00000227769_12 (sequence is synthesized)
tcattaagggggctgatgcataaatattcaagcctgtgacccaccattccacctcacacaagccccctgctaactgccagtcctgttgtagttttctggaatccatataacctgttattt

SEQ ID NO: 808186 - DNA, 120 bp, Artificial Sequence
  ENSG00000227769_13 (sequence is synthesized)
tgccaaagcttcatgtagagcccttctctcttttatcacgagtaaaagttcaggtttaaaatagaacaacggatgactaatgccatttccagctgtgactgaattctccactgcctgatg

SEQ ID NO: 808187 - DNA, 120 bp, Artificial Sequence
  ENSG00000227769_14 (sequence is synthesized)
cttttcaaatgtatctgaatcagaatcgtaagtgacatgatggtactgacctcacaatagcaatgggcataaaatgataaagcagcaatattcctgagctcttggtgggtaaatagaggg

SEQ ID NO: 808188 - DNA, 120 bp, Artificial Sequence
  ENSG00000227769_15 (sequence is synthesized)
ctgcccaatacaggaacacccactttatgcatagctccctaatcaggaagttattcttcccatcaaagcaactggaaagaaaaaagataaaacaatgaagggaggagaaaacacaaaagt

SEQ ID NO: 808189 - DNA, 120 bp, Artificial Sequence
  ENSG00000227769_16 (sequence is synthesized)
cattctttcagtgataggtactgagtgtttcccatgtgtcataccctatgccaggtgctggggatgcaatggtaaaggaacagacctggcaatattcctcatggagcttgtggtctagga

SEQ ID NO: 808190 - DNA, 120 bp, Artificial Sequence
  ENSG00000227769_17 (sequence is synthesized)
ctgaatgggtcccgtcaatttcaaataacagccatgcttgttataaatgatgatagattttctactcaaaagaaacgagtgtagtttatttccacttctgtggcttctagaactttttcc

SEQ ID NO: 808191 - DNA, 120 bp, Artificial Sequence
  ENSG00000227769_18 (sequence is synthesized)
ataatgtaaccctgaaggagagcattatattcaaattggggatgatgttttaaattatttttagccccagtcccatcctattagtataaatggttgagactgtggtgtttccatttccct

SEQ ID NO: 808192 - DNA, 120 bp, Artificial Sequence
  ENSG00000227769_19 (sequence is synthesized)
agtgtatattatgtgcttcctggtgactttctaagtcaagaactgtaattgcccagggagcatgattacattctcagtgctctactttaacaccctcactttttcatacattcatgaatc

SEQ ID NO: 808193 - DNA, 120 bp, Artificial Sequence
  ENSG00000227769_20 (sequence is synthesized)
ttatcagggtgaacaaagcaggggagtaagagcatcagtaactgtgaaactctaggagtttgtcttcattctttcagtgatagacagggtctcacactgtcacttaggctggagcacagt

SEQ ID NO: 808194 - DNA, 120 bp, Artificial Sequence
  ENSG00000227769_21 (sequence is synthesized)
tagacagggtctcacactgtcacttaggctggagcacagtgtgacaacagctgactgcagcctcaaactcctggtcttaagtgattcttcccacctcggcctcctgagtagctggaatta

SEQ ID NO: 808195 - DNA, 120 bp, Artificial Sequence
  ENSG00000227769_22 (sequence is synthesized)
agtctcaggtaaccttttggtgaagtaggaacatgaattgagtgcctgctgtgttcccagcactgggtgaggtgatggctatgcagtggtgctgaagctggcaccatctcggtactcaca

SEQ ID NO: 808196 - DNA, 120 bp, Artificial Sequence
  ENSG00000227769_23 (sequence is synthesized)
cgatctcagctcactgcaagctcattgattgaggaagccatctggggggtctcactctgtcacgcaggctggagtacattggcacgatcacagctcactgcaacctcggcctccaggctc

SEQ ID NO: 808197 - DNA, 120 bp, Artificial Sequence
  ENSG00000227769_24 (sequence is synthesized)
actctagtctttcttttgattttccagctactagatatgattaaacctgtaataaatggagtgaagcctctatattacattctccagggagttttttgtggtaatttattaaataaaaag

SEQ ID NO: 808198 - DNA, 120 bp, Artificial Sequence
  ENSG00000227769_25 (sequence is synthesized)
ataaattctgttgggctaatatatttgttttaattgagctttgagggtgttgtacatttgaatgacttttacccagtagatactgaaatatgttttttaattataagtttggtgtacata

SEQ ID NO: 808199 - DNA, 120 bp, Artificial Sequence
  ENSG00000227769_26 (sequence is synthesized)
tgtgggaaaccagcaaagttccatatagtatagtcttggcttagtgagataaaagttatagaagaggacattggaaatctagccacactgtggctaataggcttggttctctgaaataaa

SEQ ID NO: 808200 - DNA, 120 bp, Artificial Sequence
  ENSG00000227769_27 (sequence is synthesized)
agtataattcagggccaataatgtggaaggcattgagaagcatatccaccaaggagcaacattatggtcattttgtctttgttattacttactgctttattctgagaacaatacaggcat

SEQ ID NO: 808201 - DNA, 120 bp, Artificial Sequence
  ENSG00000227764_0 (sequence is synthesized)
agtgatgtttgagccccagcatagatcagcatgccaggaagcagcccaccggacccacccctgatcatggcactggacattgttttccgtgcttttctcaggctggtttctgcctgtccc

SEQ ID NO: 808202 - DNA, 120 bp, Artificial Sequence
  ENSG00000227764_1 (sequence is synthesized)
aaccctggccatggctgacaaggggcccagggacactggagcagagagacctgctggtccttggggtttcttgcaaggagtgatgaaaacttgaagatcgaggattggatataagctcag

SEQ ID NO: 808203 - DNA, 120 bp, Artificial Sequence
  ENSG00000227764_2 (sequence is synthesized)
aggtgaaggagggaaattcctcgggtcaactttagcggactgatccacggggtctgccaagagacaggagctcgagggttaaacccaagcactcgggagtcagatgtatgaatctgaatc

SEQ ID NO: 808204 - DNA, 120 bp, Artificial Sequence
  ENSG00000227764_3 (sequence is synthesized)
tgtctcagagtccaggcagtgggaggaggggggatttgtttcctggctgggtggtcgtagggcatcaagggatgagcagctttggttgtctgggatttcagcagcttgaggggagctgta

SEQ ID NO: 808205 - DNA, 120 bp, Artificial Sequence
  ENSG00000227764_4 (sequence is synthesized)
gggccccagagctgtcgctgtggctgtggtgtcagaaatgtaagcaaggtgcctccatggaggttagcgagggtgcccctctgaatgccgggtggaatgcaacctttcgcatggaggagg

SEQ ID NO: 808206 - DNA, 120 bp, Artificial Sequence
  ENSG00000227764_5 (sequence is synthesized)
ccctcagcagctgacctctgtcttccctgtgtagagggagggaggctgaggctggggctgagcgaggggtaaagtaagccacgtgtctcatcagctagcctgcagcaagcacagccctct

SEQ ID NO: 808207 - DNA, 120 bp, Artificial Sequence
  ENSG00000227764_6 (sequence is synthesized)
gggagggctggttctatcctcctccttggtgtgaaatccatcaatctaatagggatccttattttcccagccaccaagtcacaatgagcaataatctcttcttgttggtgcatataaatt

SEQ ID NO: 808208 - DNA, 120 bp, Artificial Sequence
  ENSG00000227764_7 (sequence is synthesized)
tcaaagtgttttaaattcagttaataaaccacttattccctggaaacagctcctgtcatggcacagcccacttcaggaaaagttgtaccaggcagcctgtgagaacattttcaatagaaa

SEQ ID NO: 808209 - DNA, 120 bp, Artificial Sequence
  ENSG00000227764_8 (sequence is synthesized)
tgagtggaccaggaacaaattttattcctactcaatggctgtgttttctttggcagaagctagaccaagtttcacatcacagttgagaggagacgtgcataggaactgcgtcatctggtt

SEQ ID NO: 808210 - DNA, 120 bp, Artificial Sequence
  ENSG00000227764_9 (sequence is synthesized)
attgatctgtcagtaaaatgtaaacttctgactccatgggtctgtgaatcagctgcctctaaagggaaatatcccaggagtgatgaaaacttgaagatcgaggattggatataagctcag

SEQ ID NO: 808211 - DNA, 120 bp, Artificial Sequence
  ENSG00000227764_10 (sequence is synthesized)
gctgtgtaatctcaggcaagtgacttttctgttctgtaaatcaggctgatagcgggggaacctctctcacagggctgctacaaagattgcatgagattttgctcaacaaatattagctgt

SEQ ID NO: 808212 - DNA, 120 bp, Artificial Sequence
  ENSG00000227764_11 (sequence is synthesized)
tccagagtttaatacctctgatcactacaagctttgaaggcaagataaaataacttcaacatagtgaatcatctgtgaacacttcctgtgaacgtgtgactatgattatggaacactctg

SEQ ID NO: 808213 - DNA, 120 bp, Artificial Sequence
  ENSG00000227764_12 (sequence is synthesized)
accctggccatggctgacaaggggcccagggacactggagcagagagacctgctggtccttggggtttcttgcaaggtgactgtctggtccatgagctgggctggcccagtctgtctctg

SEQ ID NO: 808214 - DNA, 120 bp, Artificial Sequence
  ENSG00000227764_13 (sequence is synthesized)
ggaagcttagagacagatttgtggtccaacaacggtaagtgtatgatcatgtctaattctcatgcaggactgatccctggcttcaccctagcttgtcttcttcctccttgcttttaacat

SEQ ID NO: 808215 - DNA, 120 bp, Artificial Sequence
  ENSG00000227764_14 (sequence is synthesized)
atgcattttattataaccatgtattcgtataagccactttaaatctctcctgaagccaagtgaaataactttgtaagtaggtactgttctaggtccttgcctatggcgtattccctcttg

SEQ ID NO: 808216 - DNA, 120 bp, Artificial Sequence
  ENSG00000227764_15 (sequence is synthesized)
atctttgccattgttaacatccccattgcacagatgaggacactgaagcgcagagaggtgaaacaagcaagccaggctcagggcaacgagtgaatcatctgtgaacacttcctgtgaacg

SEQ ID NO: 808217 - DNA, 120 bp, Artificial Sequence
  ENSG00000227764_16 (sequence is synthesized)
gcctgtcccaaccctggccatggctgacaaggggcccagggacactggagcagagagacctgctggtccttggggtttcttgcaagctattacagggtctgacctggagtaaaagctcca

SEQ ID NO: 808218 - DNA, 120 bp, Artificial Sequence
  ENSG00000227764_17 (sequence is synthesized)
tgaatgccggctgtcctgtggcctccccgacacgtcccccctgctggaaggctttcctcaccatctccctcataaacaaagccaaggtcaaggctgcagcccatgagtgaatcatctgtg

SEQ ID NO: 808219 - DNA, 120 bp, Artificial Sequence
  ENSG00000227764_18 (sequence is synthesized)
taaaataacttcaacatgtgagtaccaggaggccttggtgaaaagcaagcctgccgggagataatgcctggctgggtcaggattcttggtgcttattgaccactgggcacttcagagcag

SEQ ID NO: 808220 - DNA, 120 bp, Artificial Sequence
  ENSG00000227764_19 (sequence is synthesized)
aactcatcaaagcctctgtattgggacaagggctagggtggaggggaggattgggaagggagaggggagactgtccttctttctactaaaagttactggcaagagaatgggaattaacca

SEQ ID NO: 808221 - DNA, 120 bp, Artificial Sequence
  ENSG00000227764_20 (sequence is synthesized)
ggcctggaaaagtaatttaggtattagaactttgaactctttttttaaaaacaaaagacaaaaacagctttattgggatataattgacaaataaaaattgtgtatatttaaggtgtacaa

SEQ ID NO: 808222 - DNA, 120 bp, Artificial Sequence
  ENSG00000258610_0 (sequence is synthesized)
gggtgacaagaagacttccgagcccaaagccatgccagaccttaacgggatcctttcccagagccctccatggagaaaacagcaaaatgaagcccttacctgcttgctgtctgcaaggga

SEQ ID NO: 808223 - DNA, 120 bp, Artificial Sequence
  ENSG00000258610_1 (sequence is synthesized)
gggagccgagccccagctgataatcccccagcactcacccttcctgagctgagacttcggggctgtggagaccagcacaggacatagtggtgctttttaaatttatttttaactgtttct

SEQ ID NO: 808224 - DNA, 120 bp, Artificial Sequence
  ENSG00000258610_2 (sequence is synthesized)
catatgtagcaacccctcctcccctcctgggcatgtttacacaggctctgctctgggggctggcctggctgtgaggtttctggggaggcagagaggcagggactttggggccttagtcac

SEQ ID NO: 808225 - DNA, 120 bp, Artificial Sequence
  ENSG00000258610_3 (sequence is synthesized)
atccatggtatcacctcatctcacttcctgtgagggacagggcctggctgatgtgatcccagctccccccagttcaggactgtctttcagctcctttgcccctggaggtgggggctgctg

SEQ ID NO: 808226 - DNA, 120 bp, Artificial Sequence
  ENSG00000258610_4 (sequence is synthesized)
gctgaggaggggtcaaggtgagttcaagaaagctacctgtggaaaatggaccaggttgggggggtgattgcaaagtctccccaaagcctggctcctcatgctcagtgccaggggcagaac

SEQ ID NO: 808227 - DNA, 120 bp, Artificial Sequence
  ENSG00000258610_5 (sequence is synthesized)
actggggagccaggtatagagagccttcctgtcataactgccagtcctcttcctccaaggcctctgcatattctcatgttcccctcacccatcatgccagccacccctatccctcttcta

SEQ ID NO: 808228 - DNA, 120 bp, Artificial Sequence
  ENSG00000258616_0 (sequence is synthesized)
ttagaagcagggagctctcttcttcttcccctggatccttcctttaaaatagtttcttttgtcttaagttttcatttctacgtttgtcccttcattcagtctcttaaatgacggtctcaa

SEQ ID NO: 808229 - DNA, 120 bp, Artificial Sequence
  ENSG00000258616_1 (sequence is synthesized)
gcagtaacagtagtaattgctgtaatgacggtctcaagtagtaaccagggcactctgccacaagtggcacctgaacagggactaacagggactatcaagaacaaacggagacctgaagag

SEQ ID NO: 808230 - DNA, 120 bp, Artificial Sequence
  ENSG00000258616_2 (sequence is synthesized)
acctgaagggaactgaagaggtctgcagggacaaatagagataagtagggataaatagagataaatagagacaaatagagataggtaaggaatgacagggacttgcaggaagtaacaggg

SEQ ID NO: 808231 - DNA, 120 bp, Artificial Sequence
  ENSG00000258616_3 (sequence is synthesized)
attagcaaagaccagcaaggactagcagagactagcaaagactagcagaaacttgcagggacaggcagagacagatagggacagatagggtcctacagggacttgaacgaggaagatctg

SEQ ID NO: 808232 - DNA, 120 bp, Artificial Sequence
  ENSG00000258616_4 (sequence is synthesized)
ctggaaaagaaaagaactacaaccaaccagatgaacaagaaaccctgttacaagtctgctggcagcaacataaggatgatgcccattctatttcctaggaagggataagttttaaggcct

SEQ ID NO: 808233 - DNA, 120 bp, Artificial Sequence
  ENSG00000258616_5 (sequence is synthesized)
tataaaaagtgacacaaagtgaaccgggttctataaattaccatggaaagtggtgagccaacgatttggcagaacaaaaccctgaggatatgcaaacaaaagggactatggaatttgcaa

SEQ ID NO: 808234 - DNA, 120 bp, Artificial Sequence
  ENSG00000258616_6 (sequence is synthesized)
ttgcagattaaaattgaagaagaaaacatttgagttgcaaataccgtattaaaagtggacactgcttatgactgctgtatgcaacagtttttcaggcccgaggtgataaataaaaaattg

SEQ ID NO: 808235 - DNA, 120 bp, Artificial Sequence
  ENSG00000258616_7 (sequence is synthesized)
tgctggcagcaacataaggaaatgaacaaaaagtgtgggtgcccccaaggtgtgtactaccatggaatgggagattggagggacacatggatcccaaccgtgggcctggttcccccagta

SEQ ID NO: 808236 - DNA, 120 bp, Artificial Sequence
  ENSG00000227498_0 (sequence is synthesized)
atacctactaggacgaaaagcctaagtcacattgctgctggctgggcaccaaatgctaactaacttcatcttccagggactggacctattgctgcacaattttctcagcctccactagct

SEQ ID NO: 808237 - DNA, 120 bp, Artificial Sequence
  ENSG00000227498_1 (sequence is synthesized)
gaaagactgcacagcctctctgttaggtcagaattagctcatgacatgggcatgctgagccagaaagttgtaaaagaaagggccagtagggcaagactcctggactactcagcaaacagc

SEQ ID NO: 808238 - DNA, 120 bp, Artificial Sequence
  ENSG00000227498_2 (sequence is synthesized)
gattgctcaaaaagaagtaatctctagagacctgaatcttctaaatagtaccactcctagaagaggagtcttcatttttcccctcatagatatggccatggaaggcaatgaatgagaagc

SEQ ID NO: 808239 - DNA, 120 bp, Artificial Sequence
  ENSG00000227498_3 (sequence is synthesized)
tcttccctcctaagagcaagaaaacaaagatcaaaaatctcactccaatacccaggccatgagtctttgttattccagctggcatgatgtttgatacataccacttcctactgatcttgt

SEQ ID NO: 808240 - DNA, 120 bp, Artificial Sequence
  ENSG00000274367_0 (sequence is synthesized)
ttcagccaggagagcgctgaagggatctgagctgagagcaagtctcaaactcagagaatggaggagctgccccggaagtggctgctcgaggctgcagtgaactatgatcctgcggccaat

SEQ ID NO: 808241 - DNA, 120 bp, Artificial Sequence
  ENSG00000274367_1 (sequence is synthesized)
tcgcttgaggtcagaagttcgacactagcttggccaacatggtaaaacaccgtctctacaaaaaaatgcaaaaattagttgggtgtggtggcgcgcgcctgtggtcccagctactcagga

SEQ ID NO: 808242 - DNA, 90 bp, Artificial Sequence
  ENSG00000274367_2 (sequence is synthesized)
agctactcaggaggctgaggtgggaggaacgcttgagcgggggaggcggaagttacagtgagacaacagaatgagaccctgtctaaaaat

SEQ ID NO: 808243 - DNA, 120 bp, Artificial Sequence
  ENSG00000274364_0 (sequence is synthesized)
aattgattcctttgaggcaactcaaaaaattaaatccaacagcataagaaaaacagaagaaatagagttaaaggagaaaattaaaataagataaaacaaggcttgggtgaggaccacacc

SEQ ID NO: 808244 - DNA, 120 bp, Artificial Sequence
  ENSG00000274364_1 (sequence is synthesized)
ccccatgctctaaagcctgtactcttgctagaaatgggcttagttgtggctctggctttttagcagccaaaacacaaaggaaagtgagacctggtgcccaatccacatgggtcacagtga

SEQ ID NO: 808245 - DNA, 120 bp, Artificial Sequence
  ENSG00000274364_2 (sequence is synthesized)
aaccaacaagaagctcagaggtgtggcctgagagtgatttgtcccaagggctcagactgaaagaatgcaatgtgagaggtatgccacatcttcataaataaagcacaatccatatgccta

SEQ ID NO: 808246 - DNA, 120 bp, Artificial Sequence
  ENSG00000282987_0 (sequence is synthesized)
ccccagagggcgtgttacagtgctcttttagctctgccatttgtggatggtttaggtgttaacagctcagtgggccctttgcctcgtcgcatggggtggctgccctccgccagcaagggc

SEQ ID NO: 808247 - DNA, 120 bp, Artificial Sequence
  ENSG00000282987_1 (sequence is synthesized)
aaagggccaatgtgacagccttttgttatctgcacttgtagttccaaagctcttgtctgctgtccaggaaaaatgaggtcgcacgaaccaattgaaggatgctgttattttttatcctgt

SEQ ID NO: 808248 - DNA, 120 bp, Artificial Sequence
  ENSG00000282987_2 (sequence is synthesized)
tgtgataacagaaggcactttggtcatagcaggaataaagcttcaggagacatatctactgaaaaaaaaataaagaaagacggaaagaatgaaagaaaaaagatctgggctaacaaccag

SEQ ID NO: 808249 - DNA, 120 bp, Artificial Sequence
  ENSG00000282987_3 (sequence is synthesized)
tgttcatgagtggtgttgtatcacgttgtctcctttcctcttctgaaagttttctgaagatggaatatggctatatcaatagcccatttcagtattttatctctaggaccaataagacag

SEQ ID NO: 808250 - DNA, 88 bp, Artificial Sequence
  ENSG00000282987_4 (sequence is synthesized)
agcccatttcagtattttatctctaggaccaataagacagtcctcatggtaagtgaagccagctggacttcctgtgttaacgggattg

SEQ ID NO: 808251 - DNA, 120 bp, Artificial Sequence
  ENSG00000282987_5 (sequence is synthesized)
tgtaaaatgcaccaatcagcgctttgtaaaatcgcacccatcagtgctctgtagctagccagggtttgtaaacgggaccaattagcgctctgtaaaatagaccaatcagcgctctgcaaa

SEQ ID NO: 808252 - DNA, 120 bp, Artificial Sequence
  ENSG00000282987_6 (sequence is synthesized)
gcactctgtaaaatggaccaatcagtaggattctaaaagtaaccaactgtggggaggattgagaaaggggcattctgatagaacagaaacggaatataggaagggacaaataaggcaata

SEQ ID NO: 808253 - DNA, 89 bp, Artificial Sequence
  ENSG00000282987_7 (sequence is synthesized)
taggaagggacaaataaggccaacccactcgggtcccctttcacgctgtgttctttcactgttcacaataaatcttgctgctgctcact

SEQ ID NO: 808254 - DNA, 120 bp, Artificial Sequence
  ENSG00000282987_8 (sequence is synthesized)
ggaaggaaccaactcaggacacactcataatgcccagtcaaaatcatccctgctaccgttaagccaagttgctctccttttgtcatccccagcaataaataaatgcatcttgcctgcact

SEQ ID NO: 808255 - DNA, 120 bp, Artificial Sequence
  ENSG00000282987_9 (sequence is synthesized)
tagagatgtttattttctacacttcaacttaaaatgaaagtgaaaaatagaaacttgctaatacaccatgcagcttccaacactcagtttaattcttatgaaaatacaagtaaaaataaa

SEQ ID NO: 808256 - DNA, 120 bp, Artificial Sequence
  ENSG00000282987_10 (sequence is synthesized)
cactcctggtaccactgaaaaataaaactgccacataactgaatgtcagaatctttgctatgttgcccttaatttaacgttaaatacccattagggtgctgacaggcttgcttcatatca

SEQ ID NO: 808257 - DNA, 120 bp, Artificial Sequence
  ENSG00000282987_11 (sequence is synthesized)
aggtttcatctcattatacaattaccgtttttataaaggagggatgataataagatactttttgctttcactgctgtctatacctgacccaagtctgaaagtgctggatttgtcaggtag

SEQ ID NO: 808258 - DNA, 120 bp, Artificial Sequence
  ENSG00000282987_12 (sequence is synthesized)
agaacacactttcaggtctagggagctactgaatctgtaggaggctgtttggatccaatccttcctgttggaagaagagttcccacagaaaccagagaagctcctgagactttttagaaa

SEQ ID NO: 808259 - DNA, 120 bp, Artificial Sequence
  ENSG00000282987_13 (sequence is synthesized)
atgccattcaatgcctatactctgaaacgtctattcgtgtctcctgctcatttttaagttggaatttcttaactgattcacagaagtccttaaatatttggatgctaatctattatagaa

SEQ ID NO: 808260 - DNA, 120 bp, Artificial Sequence
  ENSG00000282987_14 (sequence is synthesized)
tatatttgttctaactatcttctagtctatggcttatcttttcaaaattttaattgtgctttttgatgaagagaattttgaaatgttgaaaattaagactccatcatcagagttggctca

SEQ ID NO: 808261 - DNA, 120 bp, Artificial Sequence
  ENSG00000282987_15 (sequence is synthesized)
aaagtttaaatgtaaagatgccatttaactcaacaatttcaccctgaggtacccaagataaataaatatagattcacatgaatacttgcacataaagtgctcgtagccaaattatttata

SEQ ID NO: 808262 - DNA, 120 bp, Artificial Sequence
  ENSG00000282987_16 (sequence is synthesized)
atagccaaaagtggaaacaactcaaatgtccaaaaactgatgaatggataaataaaatgcaatatttccatgcaatgaaatattatgcagcaataaaaataaacagattattggtacatg

SEQ ID NO: 808263 - DNA, 120 bp, Artificial Sequence
  ENSG00000245479_0 (sequence is synthesized)
gaagatactcaagcagccctatggagaggcccacacactggggaggcactgcggctttctgccgacagccttgtgaatgagacaccttgaaagaggatcctccagccccagccaagcttt

SEQ ID NO: 808264 - DNA, 120 bp, Artificial Sequence
  ENSG00000245479_1 (sequence is synthesized)
caaatggttccaactctgacatgctgacaacttcatgagaggccctgagccagaaccacccaaactcctgacccattagtgtgttatgtaacaaatgtttgttgtttcatgccactaagt

SEQ ID NO: 808265 - DNA, 120 bp, Artificial Sequence
  ENSG00000245479_2 (sequence is synthesized)
tttggggcaatttgctacctctagccattgttcccagctggtgtgtagtctgactggcaggtgcccatgctttattagtggtttgatattttgactatcggccctgagtaggaggaatga

SEQ ID NO: 808266 - DNA, 120 bp, Artificial Sequence
  ENSG00000245479_3 (sequence is synthesized)
cacagagaggagatagagttgtgagtgagaggaggccaaatcgtggtgtcagagcgagaagcagcaccctggggagggctgagtcacttgtgctgtctggaggaaggcggagcaaagatc

SEQ ID NO: 808267 - DNA, 120 bp, Artificial Sequence
  ENSG00000245479_4 (sequence is synthesized)
tgcagcccagctgactgtggtctcagcttttctagcctccaggctttctcccgggttcctaagtctgtatgtgctcactggaaatgccccatgacttggggtgacatgggtgagttttct

SEQ ID NO: 808268 - DNA, 120 bp, Artificial Sequence
  ENSG00000245479_5 (sequence is synthesized)
ttgtcctagttccccgtcctgggctgggcccagggcaccggccagtgggagaaactgccttctccgcctcctacatgcactggtggtcacacctcgccccacatcagcctctccagccag

SEQ ID NO: 808269 - DNA, 120 bp, Artificial Sequence
  ENSG00000245479_6 (sequence is synthesized)
aaaaaattcaaacttagatgatttccgaagatcttaataatcaggacaaccgtgaacttctcatgcaaccgtcaatgcctgagacaatggagtgaaagctaccagatccttaagagaaaa

SEQ ID NO: 808270 - DNA, 120 bp, Artificial Sequence
  ENSG00000245479_7 (sequence is synthesized)
gtgtcccccaggactcttaaagccaccagccctgatgttggccacgggaaaagacaatcaaggaaaatctccgaccttcggtgaaatgcagagactaagggacccctgtgctgcgtgtga

SEQ ID NO: 808271 - DNA, 120 bp, Artificial Sequence
  ENSG00000245479_8 (sequence is synthesized)
aacatggcaaaaccctgtctctacaaaacaaaacaaaacaatacaaaacaaaacaaacagaaaaatagccaggtgtggtggcacgtgcctgtggtcccagctaccctggaggcctaggcg

SEQ ID NO: 808272 - DNA, 81 bp, Artificial Sequence
  ENSG00000245479_9 (sequence is synthesized)
ggtggcacgtgcctgtggtcccagctaccctggaggcctaggcggggagatcgcttgagcctgggaggtcgaggcttcagc

SEQ ID NO: 808273 - DNA, 120 bp, Artificial Sequence
  ENSG00000283058_0 (sequence is synthesized)
aaccacagctggatgcaaaacgttcgaaacgttaacgatgcccctacagatttaggagtaacaaggcggctctcacgagatgctagacagatcaaacagaaaggtggatatttggaagga

SEQ ID NO: 808274 - DNA, 120 bp, Artificial Sequence
  ENSG00000283058_1 (sequence is synthesized)
acagtcttctcccactgatgaggtaaacctcgagaccaatccagaaataaattgccaagcttctatcaaataattcaaaaggagacccaggactcttgatgatacacttgaagtcactaa

SEQ ID NO: 808275 - DNA, 120 bp, Artificial Sequence
  ENSG00000283058_2 (sequence is synthesized)
atatgaaagatgatagcatcttggaaggcaagagcagaggaaaggagaattttcacagggaagaagaaagagttggtgaaagtgaaattgctttaacaaaataatgatctctatacctcc

SEQ ID NO: 808276 - DNA, 120 bp, Artificial Sequence
  ENSG00000283058_3 (sequence is synthesized)
aaatttagaatttcaaggccccctcgaccccaacttactggtgcaaactctgtattgtaacccgatccccaaggtgattctagtgtacattaaagtgtgagagtcttgttatgaatggat

SEQ ID NO: 808277 - DNA, 120 bp, Artificial Sequence
  ENSG00000283058_4 (sequence is synthesized)
tcttatagtgctgcaatttagaacatcttttaagaattataaagacaattttgtgtctcttgtatctgaaataagtattaaaggcaaaatatatattgatatcatggcactgttcttaag

SEQ ID NO: 808278 - DNA, 120 bp, Artificial Sequence
  ENSG00000283058_5 (sequence is synthesized)
gaattaacatccagatgaattattttgcatcttttcattggaaataaaaagcccggggctgggtggcgggcgaaagaatcagagagctctgatcagtgtgtagatgtatcaatatctatt

SEQ ID NO: 808279 - DNA, 120 bp, Artificial Sequence
  ENSG00000283058_6 (sequence is synthesized)
taatatgtactccagcagagagtccaggctttaaatcattggaagcaatctctcaatttttattctcaacatgtttcacctttaggcaatattacaataaaattctctgtgggtttgtaa

SEQ ID NO: 808280 - DNA, 120 bp, Artificial Sequence
  ENSG00000283052_0 (sequence is synthesized)
gttggccattccagtggtcatacttcaaccactcatagactgctgagtgttcaaacaaggcaaacgcagagctgtgaccaacctcactgtttctataatgtcagaagcaggatccaaagt

SEQ ID NO: 808281 - DNA, 120 bp, Artificial Sequence
  ENSG00000283052_1 (sequence is synthesized)
ggagcttctagtgacccccaggagtgctgagtaaacacgcaaggtacctgcaggacccacttgtgtccattgatctctcagagcagctgggcatcgtgggtaaagaccttcacaatcggg

SEQ ID NO: 808282 - DNA, 120 bp, Artificial Sequence
  ENSG00000283052_2 (sequence is synthesized)
aacccgtagattggatcttctgaaaacatcagagaaagactatctttgccatccacactacagtaaaactttggagccttgaaccttggatttataatctcacaactgagaagggtccct

SEQ ID NO: 808283 - DNA, 120 bp, Artificial Sequence
  ENSG00000283052_3 (sequence is synthesized)
ccatactcctggaactgtacacccattggaactcttaaggatgatatacatggccaggtgaagacagtagagagaaaacagaactgaaaacattctataacaagtgaagagatgaaggag

SEQ ID NO: 808284 - DNA, 120 bp, Artificial Sequence
  ENSG00000283052_4 (sequence is synthesized)
aaaactggcttgggcccaatattcagtatggttggaaaccacttcaaggaagaggtgcaaatatattctaacttagaaggaggtaagaatcagcagaaaagaaggaatctttggagagcc

SEQ ID NO: 808285 - DNA, 120 bp, Artificial Sequence
  ENSG00000283052_5 (sequence is synthesized)
accatctctacaccaaattgagagactggaattataaggtgaatgcaattaactggcagtcgcatccatgttgagaacacagtcatccctttaatagagaacatttgctgtgcttgacaa

SEQ ID NO: 808286 - DNA, 120 bp, Artificial Sequence
  ENSG00000283052_6 (sequence is synthesized)
actcacagtgaaatggttggatccataggaagcaacatgctgaaaatggtttcaatatgatcctgttttttcactcaatagccattgattgagggtgtccagccaaaaacaatgagaaaa

SEQ ID NO: 808287 - DNA, 120 bp, Artificial Sequence
  ENSG00000283052_7 (sequence is synthesized)
tgagccaacaatagtcttaccctttgaccatattagataaagtcgcagctgaaatttgttatatgtttcaggaataacaaagcatccatatggaacatatatttggcagtgtggcagctg

SEQ ID NO: 808288 - DNA, 120 bp, Artificial Sequence
  ENSG00000283052_8 (sequence is synthesized)
atgaaaccaggaaaattagacaaattatcaattgctcgctcccaaattaccccaaaaagaaattagatccattttcagtagctttgccttcaaatttcttcattccgtgagtcaccacta

SEQ ID NO: 808289 - DNA, 120 bp, Artificial Sequence
  ENSG00000283052_9 (sequence is synthesized)
ccttctgccaaactaaatatgtctatgaacggctggaaactttaatggaaagaaacataaaactcaaactacgtaggaaaatttaagcttcttcatggaagatcttcgtggaagactagc

SEQ ID NO: 808290 - DNA, 120 bp, Artificial Sequence
  ENSG00000283052_10 (sequence is synthesized)
aagttaggaatgtgtgaagacagacaacacatcgataattccttttgtttggggtcacttctgagttagagagcaatgcaacatgctggcttgacttcaaattaaaatcagctttttcct

SEQ ID NO: 808291 - DNA, 120 bp, Artificial Sequence
  ENSG00000283053_0 (sequence is synthesized)
ggcctggtgtaatcacaaaggtccttataagaaggggcaggagatcagagtagaagaaagcaatgtgacaacagaagcaaagataggagtggtatggccagcagacaaagaatgctggca

SEQ ID NO: 808292 - DNA, 120 bp, Artificial Sequence
  ENSG00000283053_1 (sequence is synthesized)
gacaacagaagctggaggaggcaaagaacaaattttcttatgaaaggaaagaaaccagccctgctgctaacatcttgattttagtttcatttcaaacttattatctccagaactgtaaaa

SEQ ID NO: 808293 - DNA, 120 bp, Artificial Sequence
  ENSG00000283053_2 (sequence is synthesized)
gaatacatttgttttaaattactctgtttgtcaaaatttgttacaacgacaatggagaactaatacacatggagtcaagaagaaaatcaaaggggtaaatatttaatgagattagcctaa

SEQ ID NO: 808294 - DNA, 120 bp, Artificial Sequence
  ENSG00000283053_3 (sequence is synthesized)
gatagtttcattcatctacataataataaggatgaataattagtcccttgggtagaacttcataaggcatggatgtgccttgctttcatgcaactttgtgaagtccttttaaatgttatt

SEQ ID NO: 808295 - DNA, 120 bp, Artificial Sequence
  ENSG00000283053_4 (sequence is synthesized)
ggctggcctattcatttatcattgttaccatcttactttggttatctattatattcatctaggtctcaggtaagttgtgcttttatgagaccaattctatcttgtaggtttgatttttgc

SEQ ID NO: 808296 - DNA, 120 bp, Artificial Sequence
  ENSG00000283053_5 (sequence is synthesized)
ataattttcctttgatccattctctcttgatttaaaatttcactctcaaaggtcacaataattcccattatttccaaatgattcaatagacctccttctggactccaaacactaaggcta

SEQ ID NO: 808297 - DNA, 120 bp, Artificial Sequence
  ENSG00000283053_6 (sequence is synthesized)
aaatgaatcatttcttgaattgtaaagtttcttcttcaccatgtaagatagatatcttggtacccaatagctgtctaggtaatatttatatagataaggcagcagtaaatgcttatttgg

SEQ ID NO: 808298 - DNA, 120 bp, Artificial Sequence
  ENSG00000283053_7 (sequence is synthesized)
ataaatctatggataccctcccctcttactttttgctgttatataaggtaatacatttcacaataaagaaaaaactaaaatttcttaatattccttagttttgcctttaaaatcaattaa

SEQ ID NO: 808299 - DNA, 120 bp, Artificial Sequence
  ENSG00000283053_8 (sequence is synthesized)
ttactggagatctctttttgttttgatttttaaattttgtggcaatttaacaaatattgtatatatttaaggtgtacaacttgatattttgatgtgcattgtgaaatgattaccacagtc

SEQ ID NO: 808300 - DNA, 120 bp, Artificial Sequence
  ENSG00000283053_9 (sequence is synthesized)
cagctaattaacatatctattacctctacatagttaccattttatatctgtacatggagagaaattagagcaaaaatctttaatatataatgtcatgtatttcaattcactagtaatact

SEQ ID NO: 808301 - DNA, 120 bp, Artificial Sequence
  ENSG00000283053_10 (sequence is synthesized)
caattctataaccctccattgttgcacaatagagtataaaaaattaagaaacacaaatttccaagaaaatttataagaatagctgacaaaataatcaatgccaaagctctataatgtata

SEQ ID NO: 808302 - DNA, 120 bp, Artificial Sequence
  ENSG00000283053_11 (sequence is synthesized)
aatgccaaagctctataatgtatattcatatatgagtgtgcattaacaataaaaatcactctattaattttaatgttaaaattcttatattttattgtacattttctgaggtataattgt

SEQ ID NO: 808303 - DNA, 120 bp, Artificial Sequence
  ENSG00000283051_0 (sequence is synthesized)
caagctgtctccagcactgcttgtgagccgggcccacgttgctgcccagggactcggtggtgagggaggtgtgatgtgtgagtctgctggggcagccctagcgaggcacacagaggccac

SEQ ID NO: 808304 - DNA, 120 bp, Artificial Sequence
  ENSG00000283051_1 (sequence is synthesized)
ctgggaaccgacggtgtccactgatggacgttttcctgggctgaagtatttcagatgcccagtgtactcccagccctcacagcggtcagttctgcttcacgggtttcccacatgatttgg

SEQ ID NO: 808305 - DNA, 120 bp, Artificial Sequence
  ENSG00000283051_2 (sequence is synthesized)
gctttagacattacgaataaaaggaagctgcgggaggcggtcaaagtctgagacatgacaggtcaaagctgaaatcacagggggctgcgttgccttttgatgggagagccagaggctgca

SEQ ID NO: 808306 - DNA, 120 bp, Artificial Sequence
  ENSG00000283051_3 (sequence is synthesized)
ttccgaagattgcacgatgccagctcccaactgcgagggggcagatttgttggaatttctcaaatccagtctttgatacatgcgttgttccttcaattgctaataaacggtcttggggag

SEQ ID NO: 808307 - DNA, 120 bp, Artificial Sequence
  ENSG00000250027_0 (sequence is synthesized)
aaatattaacagcaacttatatgtacttctccacttgttgctccaagagatttacagatactactttgaaaacaagatgaaagccatggaatctcccgagaaaaatgtacatcttacaga

SEQ ID NO: 808308 - DNA, 120 bp, Artificial Sequence
  ENSG00000250027_1 (sequence is synthesized)
gatttgagatttcttctggctcccatgatcttctaattgtcttcttagcaagactaaacacatctccaagaaatgtgcactgccatgaatgtcttccagctatcttctatgacagcactt

SEQ ID NO: 808309 - DNA, 120 bp, Artificial Sequence
  ENSG00000250027_2 (sequence is synthesized)
cccagtgtgttctgtggaataatggtacagggtgatattctatgaagaaaaatacggaaagtaatatactccacagtccgtatattagatcggactaataaaaataaatatggaaagtaa

SEQ ID NO: 808310 - DNA, 120 bp, Artificial Sequence
  ENSG00000250027_3 (sequence is synthesized)
agtgaatactctctgtgggcctactatgtgccaggcattatgcaccagacgaaaacatatcttcttgagaagccagtgctaagtcactgttcttgttcatatttggatcccttccctttt

SEQ ID NO: 808311 - DNA, 120 bp, Artificial Sequence
  ENSG00000250027_4 (sequence is synthesized)
caggttggttcattaacggaaatattaacagcaacttatatgtacttctccacttgttgctccaagagatttacagcctctttttctgtcttcagatactactttgaaaacaagatgaaa

SEQ ID NO: 808312 - DNA, 120 bp, Artificial Sequence
  ENSG00000250027_5 (sequence is synthesized)
gaatgaataaaattaatgcccacagctactttcttctgccggtaaatatttttctgcccataatcttgctaaacagaattcatctgaacttacgttgttgccaacaaatatacgaacaat

SEQ ID NO: 808313 - DNA, 120 bp, Artificial Sequence
  ENSG00000250025_0 (sequence is synthesized)
aaggcctagtgaagagtccagatgtagacttaaagagctctggaatctcctccaagggttcagccagaagccatctgactggctatgaccagtattggggactttattcttccaaaggca

SEQ ID NO: 808314 - DNA, 120 bp, Artificial Sequence
  ENSG00000250025_1 (sequence is synthesized)
gtctatccaatttttggaccactctgatggtgtcagaggccttctgtagattgagctcaaataactcacttctagttgtcttaggtcaacaatgtgtggccacagagattaagtcaaact

SEQ ID NO: 808315 - DNA, 120 bp, Artificial Sequence
  ENSG00000250025_2 (sequence is synthesized)
gacctgtttggatattgcaggggctttctgtgccccgcctatgcgtgatttcagcgctgtggagcctttaaaacagacgtggcctggacgactgagaaggtttgctttgactctgctgca

SEQ ID NO: 808316 - DNA, 120 bp, Artificial Sequence
  ENSG00000250025_3 (sequence is synthesized)
gagggaaggtccagagtctcgtaggtcccactgtgtgctgagaattccatctgatgccctggataaccctcaagcctttgcaacagccagactaaataaagactcttgagtgattctgaa

SEQ ID NO: 808317 - DNA, 89 bp, Artificial Sequence
  ENSG00000250025_4 (sequence is synthesized)
gaggacagaacccttcagtggagacctgtttggatattgcaggggctttctgtgccccgcctatgcgtgatttcagcgctgtatgcaac

SEQ ID NO: 808318 - DNA, 120 bp, Artificial Sequence
  ENSG00000250025_5 (sequence is synthesized)
tctgcctcagcctccagagtagctggcattacagcaattaccagctgatgctgagtaacttctgcccccttaaagccaggcacatactaactggttcacctcaatctgcaccactctgct

SEQ ID NO: 808319 - DNA, 120 bp, Artificial Sequence
  ENSG00000250025_6 (sequence is synthesized)
caccactctgctgcccagtgcccagtgtgtggctattcaaggatattgcagtgtttctttggacccgtgtgagaattatgtactatgtggcacaataaatgggaatacattggttttcaa

SEQ ID NO: 808320 - DNA, 120 bp, Artificial Sequence
  ENSG00000250024_0 (sequence is synthesized)
cgccatctttgctgtttggaaaacggccattccagcctgcgagctttggagagaccaagccccctgaggcagaggccgcgcctcagcatgttacagctgttttgttgaggtgtggtgagg

SEQ ID NO: 808321 - DNA, 120 bp, Artificial Sequence
  ENSG00000250024_1 (sequence is synthesized)
ttgcttctttaaatgcgaccctgatacattcctcctccctgggcaggtccttccctctggagcctccagccacccctgcctgtgttctgttgcggaaagacttctaatttctccttgggg

SEQ ID NO: 808322 - DNA, 120 bp, Artificial Sequence
  ENSG00000250024_2 (sequence is synthesized)
aagcggcatcgttgtctggggtatgatttaatacactttaccgacctgaattcattggatatatgtaaaaatgaaggaatgcacgttattctgcttgatgctctgcagagaggagctgcc

SEQ ID NO: 808323 - DNA, 120 bp, Artificial Sequence
  ENSG00000250024_3 (sequence is synthesized)
tgagaggttgcacctgcagtcctggatgcactggccccaggggtggttggtgctgactccacatttgtctaataagatgtccagatacaaaaatgtctgtgatgtgggaaccgttacaga

SEQ ID NO: 808324 - DNA, 120 bp, Artificial Sequence
  ENSG00000250024_4 (sequence is synthesized)
tctaggagagttttttcaacagcaaaaaaagcaaagcctgtttctgtcaaagtcttttattttatttttgaatttgaccttttaaaataagattaaaacattccatcaagactcccttta

SEQ ID NO: 808325 - DNA, 120 bp, Artificial Sequence
  ENSG00000257038_0 (sequence is synthesized)
aggataggaggcggcgatggaggaggaggagcaggaggcccgggccccggcctgcggttgggagaagatatgccaagaatgtaaaccatccgctggacgctgcgcccgctcctgttgctg

SEQ ID NO: 808326 - DNA, 120 bp, Artificial Sequence
  ENSG00000257038_1 (sequence is synthesized)
ctgcggccggcgcagcctcccttcggtctccggcccggtcaggggccgcgccgaacgcagacccgccagggggaagcatgtccgagggggtggcgtcggtggctgccgcgactcccgagc

SEQ ID NO: 808327 - DNA, 120 bp, Artificial Sequence
  ENSG00000257038_2 (sequence is synthesized)
cggaggctcccacgcggcaccgtcggggctgggcgttcctggggattcagagtcggcgctgggcctcctggagccaggaccgccgaagagcttgcgcatctcggtgacgctgggccaggc

SEQ ID NO: 808328 - DNA, 120 bp, Artificial Sequence
  ENSG00000257038_3 (sequence is synthesized)
tcctcgcgctgggccctcggccgcttcttccgcggccgcgggtaagacgcctccgtctcgggtcccagcggagccgtcgtccagacgcggcgcgtcgaagcgccgggagagctggcgaac

SEQ ID NO: 808329 - DNA, 120 bp, Artificial Sequence
  ENSG00000257038_4 (sequence is synthesized)
gcggccaggggcccagacgccagcttggacacgcgccgagagggctggccccgggcagccgtggtcggccggcacgaggcgcgtcgcctcaagccgggggtgtccgtgtcctcctccctc

SEQ ID NO: 808330 - DNA, 120 bp, Artificial Sequence
  ENSG00000257038_5 (sequence is synthesized)
gcgtcgcctcaagccgggggtgtccgtgtcctcctccctcagcccggggccgccgctccagcgctccagcagcttgaacgagacgctgcggagcgcagcggcccacgccgaaagcagcgc

SEQ ID NO: 808331 - DNA, 120 bp, Artificial Sequence
  ENSG00000257038_6 (sequence is synthesized)
acgggagtgtgggaagaggacgcagagaccggagcagaggtttctctgccgcggctcaagtttctgtggccaccggccgcaacgtctccatcccgggcggcccctcccgcctcagcgccg

SEQ ID NO: 808332 - DNA, 120 bp, Artificial Sequence
  ENSG00000257038_7 (sequence is synthesized)
ccccgccgcggctggagcgaccaggggcaccgcggcaccgcctgggcgggatcccagcgcttggttcctcgactctgcgtccgcctgcccaacgcccttggctgctcgctcctggcaccc

SEQ ID NO: 808333 - DNA, 120 bp, Artificial Sequence
  ENSG00000257038_8 (sequence is synthesized)
ttttgttgcaaataaactttgcggcagaggcaagggggcggggggcggggcctcgcgcccaaaagagggggtgggctccgggcgtgcgcgagcctgggaaccgcgtggtgggagggaatc

SEQ ID NO: 808334 - DNA, 120 bp, Artificial Sequence
  ENSG00000257038_9 (sequence is synthesized)
agggaggagccgaagaagaaaaagcctgctggaggacttgcagactgaggcgaccctctggccctccagagaggtccctcgggagcccagcaggccgagctgcccccagggagtcgctga

SEQ ID NO: 808335 - DNA, 120 bp, Artificial Sequence
  ENSG00000257038_10 (sequence is synthesized)
gacacacacaaccgctgagcgtgctcagctccgcagactcgcagccagggcgccgcgtccaccgcgggccaccagcctccgcgcggaaacacctcctgcccaggggctccaacatggcaa

SEQ ID NO: 808336 - DNA, 120 bp, Artificial Sequence
  ENSG00000257038_11 (sequence is synthesized)
cctcggactcacaaactctcgtacacactgacactcagctgccacgccttccacctgcccctgcagtctggcggctcttctcctggactctccgcctggatccccgagccttttcttctt

SEQ ID NO: 808337 - DNA, 120 bp, Artificial Sequence
  ENSG00000257038_12 (sequence is synthesized)
gctctggagtacgcggctcttgcgccccctcgcggcgtgattttcccaacgcacggagtcctggacggataaagcagcacccatcccccaaaaacggagagttgtgaaaacttcctttca

SEQ ID NO: 808338 - DNA, 120 bp, Artificial Sequence
  ENSG00000257038_13 (sequence is synthesized)
gtcgttacctaatccccttagtctttttcagaccttcgcaaagcgcactgccccttcttaggccttatacacaaaaggagcttcgacgggaacgccctcgacttcccactgccaaaccta

SEQ ID NO: 808339 - DNA, 120 bp, Artificial Sequence
  ENSG00000255760_0 (sequence is synthesized)
ttttcaactcaaggcatctgagttcctcctcatcaagtcaagggaagtcgcaaaaccagacggaattcaagggaaggaaaccgactccgcctctgatggctgcaacagtatgcacattca

SEQ ID NO: 808340 - DNA, 120 bp, Artificial Sequence
  ENSG00000255760_1 (sequence is synthesized)
gggaggaaaggaattagcagtggtcatctttctggaccatctaccacagtggctaaagttaacacctagaaaggaaggtcgtgttttcagcttctttgactgctgctccaggtgtcaaac

SEQ ID NO: 808341 - DNA, 120 bp, Artificial Sequence
  ENSG00000255760_2 (sequence is synthesized)
cctgaagggtgagctgacgctaaagactgagtggttattttttccagaagaggagaaagattgaaaatgtggccggccgattctccctgatgatcacacagacagacctgcatgacagtc

SEQ ID NO: 808342 - DNA, 120 bp, Artificial Sequence
  ENSG00000255760_3 (sequence is synthesized)
ctgcatagcaccccagttacacagacgaatttccccagagctgccttaacattgagcaaatagttaaacctagggaaattggtgcccagacagcaaagctagaaatgaaacatatggtca

SEQ ID NO: 808343 - DNA, 120 bp, Artificial Sequence
  ENSG00000255760_4 (sequence is synthesized)
gtaggagccttgcgtgggcttctccctaacctggagcaaaccaaaataatagagacagtctttcattcctagtgccaggacccgtctcgggtcaacgaaatctgagacagtcaaggtaac

SEQ ID NO: 808344 - DNA, 120 bp, Artificial Sequence
  ENSG00000255760_5 (sequence is synthesized)
agaggcagctgttcgaatagattcattggagagtctaaggcagccctccagaccaagctgtaaagcagataagatagaaataatcactctggtaccacagtagacaggccttgtaggtac

SEQ ID NO: 808345 - DNA, 120 bp, Artificial Sequence
  ENSG00000255760_6 (sequence is synthesized)
tgggccgctcacagcttaatccgacttagaaagcatttttgcctctgaccttctagttgaaacaaaattagttaccagtagacttaggcaaatgctacactgcacacaggcgcataaccc

SEQ ID NO: 808346 - DNA, 120 bp, Artificial Sequence
  ENSG00000255760_7 (sequence is synthesized)
cgccgcggtcctagtgccaccagagaagccgcggacccggcccgcagataacacccgggcttgcagagcgctttcatctgcccgacgcggaaatctcctgcagcgatcttctaccttcag

SEQ ID NO: 808347 - DNA, 120 bp, Artificial Sequence
  ENSG00000255760_8 (sequence is synthesized)
cgtgcatccgcagcacccagagggcacgttaaagagagattgagaaccaccagcaaaactgctgattcagttcttatttgagacactccccaaaacaatgaagccatccttgtaattaaa

SEQ ID NO: 808348 - DNA, 120 bp, Artificial Sequence
  ENSG00000255760_9 (sequence is synthesized)
agtggcaacagaaaacacctgaaaaaaggcctcaatctgaaccatgtcaggaggtttagaacacaagaggactcacccagtgaattccagggctatcaagatcaatggagtgcaaaagcg

SEQ ID NO: 808349 - DNA, 120 bp, Artificial Sequence
  ENSG00000164385_0 (sequence is synthesized)
gtggggatcatcttcaccactgtacagatgaagaaattgaaggtcagacattcaaggttatgtggccacatgagagaaataccagagctgggatgaagactcaacggctctcagacacca

SEQ ID NO: 808350 - DNA, 120 bp, Artificial Sequence
  ENSG00000164385_1 (sequence is synthesized)
ggttgcttcttgagagaagccggatggatgtgcatgcagggaggagctgggggaggttggagaagccgcagcccagaaggggagggaggacaccatgtcagagcttgctggagcaagctt

SEQ ID NO: 808351 - DNA, 120 bp, Artificial Sequence
  ENSG00000164385_2 (sequence is synthesized)
accctgggttagagaaaggggcaaattatggatatgaaaaatgcttccctcaatgaaaaggaccctgctgagacaggatggctgtgggccaaatacccctacagtgcctgattcttttat

SEQ ID NO: 808352 - DNA, 120 bp, Artificial Sequence
  ENSG00000164385_3 (sequence is synthesized)
cttattatttatttaaacaagaccagcattttgctttagatagaaaatctctctctgctacaaaattgcaagccctgggaaaagtctccaagaatggctgatgccacagtcaaacaataa

SEQ ID NO: 808353 - DNA, 120 bp, Artificial Sequence
  ENSG00000164385_4 (sequence is synthesized)
catacatgtcggggtgaaacagtgcacagaggatgaaaaaagggaaaagctcgaggccccgggaggaaggagctgggagggtggagggcgtggaggtgtgagggcccagagggattgccc

SEQ ID NO: 808354 - DNA, 120 bp, Artificial Sequence
  ENSG00000164385_5 (sequence is synthesized)
caggtccagctttctcccggaagttgcctctgaggaacggcctacagtggcttacaactcccgggagggatgtggaatctatccccccaacagcccatgaagacttataaaagctgacag

SEQ ID NO: 808355 - DNA, 120 bp, Artificial Sequence
  ENSG00000164385_6 (sequence is synthesized)
atgcaaggttttcagccatgcctttgataagatactataaaagtaaagtagcttctgccctaaaagctgagcgctatttccagaaaatcaacaatggaaatgataggcatttcttttgaa

SEQ ID NO: 808356 - DNA, 120 bp, Artificial Sequence
  ENSG00000164385_7 (sequence is synthesized)
actggcacattcataatggacatagaagaatcaacataagaaagtagcaggtattggtctttcctgtggtccctgatgatctatccacttgacctcttcaggaacattccctggaagcag

SEQ ID NO: 808357 - DNA, 120 bp, Artificial Sequence
  ENSG00000164385_8 (sequence is synthesized)
gggaagtgctttgcttccctgtctcccgagggagaaagggcatttgatggcatggagccactctgccagccaggagccaggcccgctctaagggggctacagcatgcctcagattgctac

SEQ ID NO: 808358 - DNA, 120 bp, Artificial Sequence
  ENSG00000164385_9 (sequence is synthesized)
aggctcctctcccctcccgggtccggccttgtcggcaccaacccctcagttcctgccccatctccccactgcggttgctgtcaggcctggagcatttcctccttcactttcacgggtccc

SEQ ID NO: 808359 - DNA, 120 bp, Artificial Sequence
  ENSG00000164385_10 (sequence is synthesized)
acacccttcaagatcaacagtgaccaggccactccctgccatctgagaagcccagaaaccatcttccgtcagagggagattagcaatgaagctttctgacgtctctccctgtaccaggct

SEQ ID NO: 808360 - DNA, 120 bp, Artificial Sequence
  ENSG00000164385_11 (sequence is synthesized)
caaaaggaatttcatcctttctttccattcactgcaatgagctctcacactcatttgaaatgtgcggcctgatgacccacacacctctcaggggagccatggccccacggctgtctcccc

SEQ ID NO: 808361 - DNA, 120 bp, Artificial Sequence
  ENSG00000164385_12 (sequence is synthesized)
aaaggaagaagactcagctggtgaaggctcagtacttttccttttccgcaatcactaagtaattttctcatccttgaaagcaattttctgctgaaattcagaaagaacttattttgaagt

SEQ ID NO: 808362 - DNA, 120 bp, Artificial Sequence
  ENSG00000164385_13 (sequence is synthesized)
tacgccagtaaaagctctggaaactgtgatgggagcttgtgctggaagccgaggacagagctccatgctgattctccattcctcttatttatttgcatgatctgagctaatttctcagct

SEQ ID NO: 808363 - DNA, 120 bp, Artificial Sequence
  ENSG00000164385_14 (sequence is synthesized)
gtaatctacaccacccaccacctagaaacttcccagaaacgtccagcaggggaggggtgggaacgagaaagaaagcacccaacgctctggcagggtctgcgcagccgccagactctgttt

SEQ ID NO: 808364 - DNA, 120 bp, Artificial Sequence
  ENSG00000164385_15 (sequence is synthesized)
ctagacggtcacggccgacttagtaattcacttagaagatctcctgaaataagcacaaaatgttggcagcaaatggtcaaagggaaatgccccagttttcttaggggacggaccctgtta

SEQ ID NO: 808365 - DNA, 120 bp, Artificial Sequence
  ENSG00000164385_16 (sequence is synthesized)
ctttatcagatagcagtgtgagctgaagtgtgaagacagggcagacactaatggtattttgttcatcctgaatttttttttttggcattaattttgatctttaaaaaatattgcattagg

SEQ ID NO: 808366 - DNA, 120 bp, Artificial Sequence
  ENSG00000164385_17 (sequence is synthesized)
aaatgtaaatgcatatgagtaagtgaaagaaaccaatctggaaagtctacacaccgtacgattccagctatatgacattctggaaaaggcaagaatagagaggcagtaaaaagatcagca

SEQ ID NO: 808367 - DNA, 120 bp, Artificial Sequence
  ENSG00000164385_18 (sequence is synthesized)
aagagtaaaaaataagtcggaaagggacaaataaggttcttagggtgtggagactacatctgtgtgatagtacgatgggtgggtacatggcattatgcatttgtccaaacccaccgaacg

SEQ ID NO: 808368 - DNA, 120 bp, Artificial Sequence
  ENSG00000164385_19 (sequence is synthesized)
gacaacaccaagagggaaccctgctataaactgtggcctctgtgcgatcatgatgtgtcaatatgggttcatcagctgtgacaaatgaaccccacaggttggggatgttgacatggggga

SEQ ID NO: 808369 - DNA, 120 bp, Artificial Sequence
  ENSG00000164385_20 (sequence is synthesized)
ggctgtgcatatgttggggaaggtgatatgtgggaactctctataccttctgcccaatattattgcgaacctaaaactgctctcaaaaatatagcctaagaaaaagtaactttaatcttg

SEQ ID NO: 808370 - DNA, 120 bp, Artificial Sequence
  ENSG00000164385_21 (sequence is synthesized)
gaggcctccttcacctgtgggcaggagatgtttgtgacgttccttccggtcagcaggacttcaggaagagccgccgctaagcctgggggcaggactagccaggctccctactgaggcctt

SEQ ID NO: 808371 - DNA, 120 bp, Artificial Sequence
  ENSG00000164385_22 (sequence is synthesized)
tggaaggtgaaaagagttctggaggtagatggaggtgatatttgtacaacaatgtgaatacttagtgccattgaaccgtacacttaaaaatagttcagacggctaactttatgttgtgta

SEQ ID NO: 808372 - DNA, 120 bp, Artificial Sequence
  ENSG00000242290_0 (sequence is synthesized)
tgaaattgtgtgcctatgcaatttgttgttattttaagttcttcagctggaattttaaaaatctagatggacaattttattttatctgatcgataaatatatatccagttaagtgcctct

SEQ ID NO: 808373 - DNA, 120 bp, Artificial Sequence
  ENSG00000242290_1 (sequence is synthesized)
gaaaaattgattttggcgacccagaaagggtaaagacatgataagagaagatgcatcctgaacaacttttattttggcttgaagcatttgctgttatgctgtgtggagggaaggggaacc

SEQ ID NO: 808374 - DNA, 120 bp, Artificial Sequence
  ENSG00000242290_2 (sequence is synthesized)
tgctagttaggaacatgtggcatgcatgtactagaaggtaagctccacaagatcatgactcttcacagtggtatccctggtaagtagaagagtgcctgaaagataacaggggctcaataa

SEQ ID NO: 808375 - DNA, 120 bp, Artificial Sequence
  ENSG00000242290_3 (sequence is synthesized)
ttctcaacctggggctaatttttgcccccagtcaggggatatctgtattttttgttgtcacagttagagaagttcctactggcatttagagggtagatgccagggacgctgctaaacatc

SEQ ID NO: 808376 - DNA, 120 bp, Artificial Sequence
  ENSG00000242290_4 (sequence is synthesized)
ttacagtgcacaggacagccctgttccacagagatttatctggccccaaaggttaatagggccaaagttatgaaactctgatttatgccctttgtttctattgggctgtacctgggagtc

SEQ ID NO: 808377 - DNA, 120 bp, Artificial Sequence
  ENSG00000242290_5 (sequence is synthesized)
agatcctctgcatatttggaatgaagttcagtcctaaaggaagcaccccagaaaagcctcattgcttcatcctcattcccttcaagacctaatagaactgcccccactctaaggcaggct

SEQ ID NO: 808378 - DNA, 120 bp, Artificial Sequence
  ENSG00000242290_6 (sequence is synthesized)
aagactgcagcattgtgattggtgggaaagatacattttgcagaagcttttctggagagataaagtggccactagatggcaggtccaaaaatctgatgggagtctcacaggagggcaaat

SEQ ID NO: 808379 - DNA, 120 bp, Artificial Sequence
  ENSG00000242290_7 (sequence is synthesized)
cttagggagcagaatgtttctggcactcaatccagtgttggttcatcaataagccttggcagtttgctaaaatatcagaaagagcactggaatgggaaactgagaggtctgggttctatt

SEQ ID NO: 808380 - DNA, 120 bp, Artificial Sequence
  ENSG00000242290_8 (sequence is synthesized)
agtgactcactgtgtgacatccagagagcatgacctccccaggctcctcacttctgaaatgggagggttttgaggacaaagtctctctctgctttaacattcaatatccaacacatagct

SEQ ID NO: 808381 - DNA, 120 bp, Artificial Sequence
  ENSG00000242290_9 (sequence is synthesized)
aagttccatttcccagccttctctgcagatagctatggccctgtgaccaaattctgatttctggctggatgtcacacccacagcaatcttggaagctatgtactgaagagcctctgtcaa

SEQ ID NO: 808382 - DNA, 120 bp, Artificial Sequence
  ENSG00000242290_10 (sequence is synthesized)
cctgggtccctgaccagtctttacatgagcaagagagaaactcatgttgaaatactgagatttgggagtgtgcgtattatagaagctaatgttaccttaactaagaacactcctaaagca

SEQ ID NO: 808383 - DNA, 120 bp, Artificial Sequence
  ENSG00000242290_11 (sequence is synthesized)
atgtactagaagttaccatagagactgcatacactaagactgcagcattgtgattggtgggaaagatacattttgcagaagcttttctggagagataaaggtaagacacgagaaagaaag

SEQ ID NO: 808384 - DNA, 120 bp, Artificial Sequence
  ENSG00000242290_12 (sequence is synthesized)
gagcacagagaagtcccaaacaaccatacattctagaaaactgggacagcagagattacaactactgctataaaactacataaactgttcactcaatggctgcctgtcaggaaaatttca

SEQ ID NO: 808385 - DNA, 120 bp, Artificial Sequence
  ENSG00000242290_13 (sequence is synthesized)
agtattgtcagacagaacagacacaagatattctagaataaaaaggtaaacaagtaaacctactgaggttataggggtgacaaaagggaaatggcaagaaaacatttaaaaatgattcaa

SEQ ID NO: 808386 - DNA, 120 bp, Artificial Sequence
  ENSG00000242290_14 (sequence is synthesized)
tgctagaaaaaaaaaagaatctcagagagcaataaaatttaaagttacatttaactttaaatgtaggctgacctttggggaattatttaaattctgagtacctctgcttccttccctatg

SEQ ID NO: 808387 - DNA, 120 bp, Artificial Sequence
  ENSG00000253642_0 (sequence is synthesized)
gaaactttttgggaaagttccccaaaactttggggaactgtgttcccctgaagtttggagggtgaggagtgaaagaggttgagaagaatgagctggctggatggagtcttgttctgtcac

SEQ ID NO: 808388 - DNA, 87 bp, Artificial Sequence
  ENSG00000253642_1 (sequence is synthesized)
caccctcccaaagtttgctagttcttaagagggaggtatgagacgtatgtatagactaagtgaaaggaaaatatcttgggcccccaa

SEQ ID NO: 808389 - DNA, 83 bp, Artificial Sequence
  ENSG00000253642_2 (sequence is synthesized)
ttgggcccccaaaatcactaagctaaaaggaaaattcaagctggaaactgctcagagcaaacctgctgtaaatgcatattctg

SEQ ID NO: 808390 - DNA, 120 bp, Artificial Sequence
  ENSG00000253642_3 (sequence is synthesized)
gtaaatgcatattctgattggctcctttgtaaaagctaattagaaactcaaaagaatgcaactatttgtctctcacctacttgtgacctggaagacccctccctgcttcaagttctcccc

SEQ ID NO: 808391 - DNA, 120 bp, Artificial Sequence
  ENSG00000253642_4 (sequence is synthesized)
aggcaggaatgggctgcttggggacccagggagctcccaaggtctttcctgctgcttcctctacccctgtatttcgttcggctgtctagactgactcagcttcaggccctctgtgcatgc

SEQ ID NO: 808392 - DNA, 120 bp, Artificial Sequence
  ENSG00000253642_5 (sequence is synthesized)
tctagactgactcagcttcaggccctctgtgcatgccatgcttaataaggtaataaaaaggtaagattataaagaaggaagaggcctatcaaggaaagaaggctctttatttgctttgct

SEQ ID NO: 808393 - DNA, 120 bp, Artificial Sequence
  ENSG00000253642_6 (sequence is synthesized)
gtcatggtatccttcccattccactggcttccagcacatatgtggcaagagctcttcagcttgtgaccatcctaactggcctcaatcaaatgacacaggcaggtgtttgagtttgtgccc

SEQ ID NO: 808394 - DNA, 120 bp, Artificial Sequence
  ENSG00000253642_7 (sequence is synthesized)
tctgacctaaaagctttactgactcctgcatgctgggagaggtggtgtcgattgcagggagctttatgcagtggttgattaaacacacatctggaagactcttgggaattggcagactct

SEQ ID NO: 808395 - DNA, 120 bp, Artificial Sequence
  ENSG00000253642_8 (sequence is synthesized)
tcaaggaagagaaagtatcaggaagtcatcccagctgctgctctgaggaatcttgcttgtctaattagatcttaggctggcacacctggtggatttttcgaggcagggaataatgaccct

SEQ ID NO: 808396 - DNA, 120 bp, Artificial Sequence
  ENSG00000253642_9 (sequence is synthesized)
cacagtttaaaagatctctttccatggcaacccacaatgctttagtcaatttgagagcttgttagcatcacgtctctagtttatctttcccttataagtgagttttctttctttctgaat

SEQ ID NO: 808397 - DNA, 120 bp, Artificial Sequence
  ENSG00000253642_10 (sequence is synthesized)
ccactttcagaacaaaggaggaaatatatatgtgttttttctctttaatttcctttgttcagctcttatgccagtccgatattcctacttcttggacctttgtgagccaaccttttattt

SEQ ID NO: 808398 - DNA, 120 bp, Artificial Sequence
  ENSG00000253642_11 (sequence is synthesized)
ttcttggacctttgtgagccaaccttttatttccctttttcttatggaaaagtgcactttgattgcactggtgcttatgaaccaatgcaggaattttttttttttttttttttttttaga

SEQ ID NO: 808399 - DNA, 62 bp, Artificial Sequence
  ENSG00000253642_12 (sequence is synthesized)
gtcttgctctgttgctcaggctggagtgctggagtgcagtggcttaatctcagcacattgca

SEQ ID NO: 808400 - DNA, 120 bp, Artificial Sequence
  ENSG00000253642_13 (sequence is synthesized)
agccacagtgcctggccaatgcaggactttttaatacaaatgcatgtgaaggccctcaaatgcaaacacacagaaacatacgtaacaaaatgcacttgtttatgtactgtgtacacacag

SEQ ID NO: 808401 - DNA, 120 bp, Artificial Sequence
  ENSG00000253642_14 (sequence is synthesized)
agacctgtgagctcttgctcatatacaaacttgctctgtgcctgatgcctattaggagtgagaggttcctaactgacataaccttcttttcagaagaataaaatagaaggttactgagtc

SEQ ID NO: 808402 - DNA, 120 bp, Artificial Sequence
  ENSG00000253642_15 (sequence is synthesized)
taatgcttcagatagcagaggaccgacagctgtgactttatttggtgatggaataaataagagtctcactgtgtcacccaggattggctcgctgcatcacccaggatcggcccactgcaa

SEQ ID NO: 808403 - DNA, 84 bp, Artificial Sequence
  ENSG00000253642_16 (sequence is synthesized)
ggattggctcgctgcatcacccaggatcggcccactgcaacctccaccttccaggttcaaacgattcttctgcctctgcctttt

SEQ ID NO: 808404 - DNA, 87 bp, Artificial Sequence
  ENSG00000253642_17 (sequence is synthesized)
ctaccaaccttggccaatgcctgacctccaatttcatgaacttctcaggccctctgtgcatgccatgcttaataaggtaataaaaag

SEQ ID NO: 808405 - DNA, 120 bp, Artificial Sequence
  ENSG00000253642_18 (sequence is synthesized)
caaaactttggggaactgtgttcccctgaagtttggagggtgaggagtgaaagaggttgagaagaatgagctggctgggttggacattcagaggtgacaatggccagatcaaccttgatg

SEQ ID NO: 808406 - DNA, 120 bp, Artificial Sequence
  ENSG00000253642_19 (sequence is synthesized)
aagtgtataaaaccaagttgtgccctgaccaccttgggcacaggtcatcaggacttcctgaggctgtgtcatgggcatgcgtcctcacccttggcaaaataaaccttctaaattaaatga

SEQ ID NO: 808407 - DNA, 120 bp, Artificial Sequence
  ENSG00000253643_0 (sequence is synthesized)
gaagactgcagtaggtaatgatagcttaaacttgggaaatgtccttcttcagagacagcgtcacggacattttggagaggatcagattactctacagctgctttccctggtggacctgag

SEQ ID NO: 808408 - DNA, 120 bp, Artificial Sequence
  ENSG00000253643_1 (sequence is synthesized)
gaggcacacccctgagccaggactttaagggagagggtagaacaacctagaagctcagaagggatatggttcctgtttgcctatttccatccacaactctgccagagacgaaagcagtgt

SEQ ID NO: 808409 - DNA, 120 bp, Artificial Sequence
  ENSG00000253643_2 (sequence is synthesized)
catctggaatcatcaagaatggaattgatcaaattccttaagaaatttacttaaagtcatgattttgacagcctagtgctacctggaaaagggacagcagcagcctggagcagttttcta

SEQ ID NO: 808410 - DNA, 120 bp, Artificial Sequence
  ENSG00000253643_3 (sequence is synthesized)
gctaacaagaattttgttagctatgtggccacctagtggctcttccatggatgtcgctgatgcattgtcaggtacacagacaattgcccactaataaagaagttattatctttcttggaa

SEQ ID NO: 808411 - DNA, 120 bp, Artificial Sequence
  ENSG00000253643_4 (sequence is synthesized)
aatgacatcagactgggcttgtgcctgataattcatttctgaaggtgcaatattaagtgtcacagtgtccagctggtgatattttcagcatagaaacctgttagacacggcagcattaag

SEQ ID NO: 808412 - DNA, 120 bp, Artificial Sequence
  ENSG00000253643_5 (sequence is synthesized)
gagatggaatgaattgatttatttctcttctgaattgcttggcagtgcttcaagattgacgcatcagatttgcacaatgtgccactttaggagattatttcttccttccttcagccagac

SEQ ID NO: 808413 - DNA, 120 bp, Artificial Sequence
  ENSG00000253643_6 (sequence is synthesized)
tagaggccaccatctgtgtgaatacttcactgtgattatctctcaccatcatcaaatagttcagagcactgatcctcacgagttggacatttccccatgaaacagtagccttctgagttc

SEQ ID NO: 808414 - DNA, 120 bp, Artificial Sequence
  ENSG00000253643_7 (sequence is synthesized)
ttgcaaggaaatccattgaccctgaactggtccttaggacaggcaggcgagtggccagtgcacatctcaggaaaatcacattcatctttcgccggtctgcatatggaccctgcttttttt

SEQ ID NO: 808415 - DNA, 120 bp, Artificial Sequence
  ENSG00000253643_8 (sequence is synthesized)
atctgttgaggaaaaacaaagagactaaatcctggatacatttagggtcatactgcttccctgtactgaagtgtgatgtgagactattcaactgctgaagatctgattttaccttttgct

SEQ ID NO: 808416 - DNA, 120 bp, Artificial Sequence
  ENSG00000253643_9 (sequence is synthesized)
caagctgtccattatttcaggctgacttttattttttaatgtatcattaaataacatcaaaatggtaacttatgccctattttctcaaacaaaataaaaactcaaagaaaatggagtgtg

SEQ ID NO: 808417 - DNA, 120 bp, Artificial Sequence
  ENSG00000253641_0 (sequence is synthesized)
aggatggagctgggggcgagaggctcggagtgggaggactccccagccagctgtgctcctataagaggcagcgtttcagcttcctgaacctgtcaggacaaaatagctggaagcgcactc

SEQ ID NO: 808418 - DNA, 120 bp, Artificial Sequence
  ENSG00000253641_1 (sequence is synthesized)
tagaaatagccttggggaatgagaaggactcaggctgctgttccaaaccgctcaagtgaaacagcagacagggcactggctgtgggaacttagcagagtcccttagctttgtgcctctga

SEQ ID NO: 808419 - DNA, 120 bp, Artificial Sequence
  ENSG00000253641_2 (sequence is synthesized)
tgactcccctgtaaaatgtggatgatgatagcacagcactatgtggttgagaggagtaatgagctaatccgtgtatccaagcacaggccatggcaaataccaagcccacgattctaattc

SEQ ID NO: 808420 - DNA, 120 bp, Artificial Sequence
  ENSG00000253641_3 (sequence is synthesized)
tcccatttcatctctactaatgtcttcctgcaaaggaaggcactttggccagcagtttctatgaacaagacacgtccaaagtacagatccatgcctggatcagctgcagggtggcttttg

SEQ ID NO: 808421 - DNA, 120 bp, Artificial Sequence
  ENSG00000253641_4 (sequence is synthesized)
gttcatgaggtcatccagagctctttggagcattttctacttgctgggcttggaggacaatgcaaagatgaacaatagatgttctctgtctctttgaaggtcataatcatctggagagac

SEQ ID NO: 808422 - DNA, 120 bp, Artificial Sequence
  ENSG00000253641_5 (sequence is synthesized)
acattggcagagagactaccttaatacaatgggggagagccccatgtgaagactggagttgtgctgccacaagccaagaatgtaccagaagccaggagggagaagtggaacagatccttc

SEQ ID NO: 808423 - DNA, 120 bp, Artificial Sequence
  ENSG00000253641_6 (sequence is synthesized)
ctagcactttcagagggagcccggtcctcctaacattgggattttggatttctggcctccagagctcctgacaatatttctgttgttctaagccacacagtttgtggaactttgttacag

SEQ ID NO: 808424 - DNA, 120 bp, Artificial Sequence
  ENSG00000253641_7 (sequence is synthesized)
caactctgaaactcaagccgcattctatctgggcaaaaaatatgtgcaaaggtacagaggtgtacgggaactgcgggaacttctgagttaagtcagaattgttgttttggtggttcaaaa

SEQ ID NO: 808425 - DNA, 120 bp, Artificial Sequence
  ENSG00000253641_8 (sequence is synthesized)
ataggagaacattgacaaatttgcatggttcaagttaagctatcaagttggaataatgtaccaggttgagtggtagatgggggggatcagtttactgaataaagctccagttggaataaa

SEQ ID NO: 808426 - DNA, 120 bp, Artificial Sequence
  ENSG00000253641_9 (sequence is synthesized)
cttggagaggactcaggctaaaagtggcaagctacttccaagttccaggtgacccataggctgtgatgttgccattatgaagaaattgctgtgctcatcaacttactttgaaccaagctg

SEQ ID NO: 808427 - DNA, 120 bp, Artificial Sequence
  ENSG00000253641_10 (sequence is synthesized)
ttctttaccgaatgccctgaagtcattggaaagtcacactaccttgctttaaagtgaagaattagaattgtttctctgaagatgagggaggtgcatgaaggatgtcaggtacaacagtgc

SEQ ID NO: 808428 - DNA, 120 bp, Artificial Sequence
  ENSG00000253641_11 (sequence is synthesized)
catctcctattacctgttagctcagtgcttcatgtgcattacctcactgaattctcgcaacagcccaaaaaggtcataatcatctggagagacacattggcagagagactaccttaatac

SEQ ID NO: 808429 - DNA, 120 bp, Artificial Sequence
  ENSG00000253641_12 (sequence is synthesized)
aatgggaggaagcgatgaacaaactgcggtgcattcacacaacagcggtgctacacagcagcgaagaggagcagccgactgacacgcacaacaactcggatctcaggagcatcgcaccga

SEQ ID NO: 808430 - DNA, 120 bp, Artificial Sequence
  ENSG00000253641_13 (sequence is synthesized)
cattggaaagtcacactaccttgctttaaagtgaagaattagaattgtttctctgaagatgagggaggtgcatgaaggatgtcagccgtgtgtatgctattgagaactggacgggagtga

SEQ ID NO: 808431 - DNA, 120 bp, Artificial Sequence
  ENSG00000253641_14 (sequence is synthesized)
taaaatttatcttagaacctcttggaactatcccatcagaataactggaagccagataaaacattaggcagttcattcattttattggacgtggagttttgtcagaaccagcatttactg

SEQ ID NO: 808432 - DNA, 120 bp, Artificial Sequence
  ENSG00000253641_15 (sequence is synthesized)
tacttctcatagctgtaagcaaagcattagaattcagcaacctaatgcttttcttttctctgccaagcggggtcgtgaaatgggagagaaagcctccttgcctctgttctttgcaaacag

SEQ ID NO: 808433 - DNA, 120 bp, Artificial Sequence
  ENSG00000253641_16 (sequence is synthesized)
cacacatgcagaggcaactcctgttgccaccttcagatgtaactttccacaccctcgtctatcaatgtgcacccatcatattttacagagataggatcaggatgttcacattgtttcaca

SEQ ID NO: 808434 - DNA, 120 bp, Artificial Sequence
  ENSG00000253641_17 (sequence is synthesized)
gcttgtaagactttatttttaaaaatgttaagtgacacacaaaatgttgaaaaaaatcaccactctatgtgatgcaagtccaaatacaaaacattaaaacaaacaacttccttcccaaag

SEQ ID NO: 808435 - DNA, 120 bp, Artificial Sequence
  ENSG00000253641_18 (sequence is synthesized)
taggccttgattcaaactccagtgtgaatattcagttgaatgaatctaaacagtttctgaagcagtttaaggctcagtttttacattgatggtaaaagtaacatctctcctgcaggacgg

SEQ ID NO: 808436 - DNA, 120 bp, Artificial Sequence
  ENSG00000253641_19 (sequence is synthesized)
ctctgtgaatggaaggaaacagctcgatccaggtctctagacgtgacaagcattgactcagtggaaagtcctgcgatttttgtggtttttagaccaggcagatctgggcatgactagagg

SEQ ID NO: 808437 - DNA, 120 bp, Artificial Sequence
  ENSG00000253641_20 (sequence is synthesized)
aattcgccttgctggggtgtcctccgcaagactttcagcttctctgatcctcatttttcttatctgaaataggcctgtctcacagagctaattcccaaaacttctgtgtatttgtggcag

SEQ ID NO: 808438 - DNA, 120 bp, Artificial Sequence
  ENSG00000253641_21 (sequence is synthesized)
ggaaaggcaaaactccaagcacagagaacgcatgagttgttgcccaggtttggggttccaggaagaggatggattactaagaagcacaggggaatgttttggggtgatgaaaatgttgta

SEQ ID NO: 808439 - DNA, 120 bp, Artificial Sequence
  ENSG00000253641_22 (sequence is synthesized)
aatgttttggggtgatgaaaatgttgtatgtcttgtctttttcttttctttttgtgaaacagagtttcactcttgtcgtccaggctggagagcaatggtgtgatctcagctcactgcaac

SEQ ID NO: 808440 - DNA, 73 bp, Artificial Sequence
  ENSG00000253641_23 (sequence is synthesized)
ctgcacctcccaggttcaagcaattctccagcctcagcctcttgaataactgagattacaggcacatgcctcc

SEQ ID NO: 808441 - DNA, 120 bp, Artificial Sequence
  ENSG00000253641_24 (sequence is synthesized)
caatgggacctcaggatgtgactttatttggaagtgggtgcttgcagatgtaattgatgaagaggaggccatgctagagtaggacaggcccccaatccaatatgactagtgatcttatag

SEQ ID NO: 808442 - DNA, 120 bp, Artificial Sequence
  ENSG00000253647_0 (sequence is synthesized)
gaaggcagctgttacccaagccctgcacctccatcttcccagagtctcgtgggaaacagatttcaaacaacaacagacagcaagactgagaaactacgaaagatcagcctgcctcattta

SEQ ID NO: 808443 - DNA, 65 bp, Artificial Sequence
  ENSG00000253647_1 (sequence is synthesized)
caagactgagaaactacgaaagatcagcctgcctcatttactgtaagaatacagcatattttgca

SEQ ID NO: 808444 - DNA, 120 bp, Artificial Sequence
  ENSG00000253647_2 (sequence is synthesized)
gcgaaactccaactcaaaaaaaaaaaaaataaaaagaatacagcgtataatgcatgtaacatataaaatatgtgttaatcaactgtctatgttatgggaagcagtgtttggagctgagat

SEQ ID NO: 808445 - DNA, 120 bp, Artificial Sequence
  ENSG00000253647_3 (sequence is synthesized)
agatgacttggcagggagaagaatccactgggacattcaataacttggcattgagagtgttttcagcaccatgctgtcctcagaatagtgttagaatttatataaacacagatgtgactt

SEQ ID NO: 808446 - DNA, 120 bp, Artificial Sequence
  ENSG00000253647_4 (sequence is synthesized)
gtgccttgaaggagaatacagtcttcccaggagagacatgcaaaaccatcatagacaaacagcaagaaaacagcatcaaggatgtacatgcaccgggcagaatgtaaactggatgtaaaa

SEQ ID NO: 808447 - DNA, 120 bp, Artificial Sequence
  ENSG00000253647_5 (sequence is synthesized)
caatgagaaaggaacttggttctggtctcaactctgccacccacagctgcgtgactatgtctctgtcacactgcttctcaggtcttcaactttatcgtctcatactgagcaagagacagt

SEQ ID NO: 808448 - DNA, 120 bp, Artificial Sequence
  ENSG00000253647_6 (sequence is synthesized)
ctggacaatttatgcttctagaatggggagacaagaagaaaagaaagatagatacccaaggacttcagtgactggctcaggaagaattactcagcagtgagggggccagcatgagcccag

SEQ ID NO: 808449 - DNA, 120 bp, Artificial Sequence
  ENSG00000253647_7 (sequence is synthesized)
gggcaagaagccgggacttggaacaggaaggaaaggtgctcagctggctaacctagaggaaagtgattggctggagtgtctggtttatctgtttcagggatggttaaagattgccccgtt

SEQ ID NO: 808450 - DNA, 120 bp, Artificial Sequence
  ENSG00000253647_8 (sequence is synthesized)
aataggcaaaaattgttgccttaaagaacctagaatctaaaggggtctttgacataatacagaataacaggtcccagagattattttacagaatgttagtacctcatgatattaatagat

SEQ ID NO: 808451 - DNA, 120 bp, Artificial Sequence
  ENSG00000253647_9 (sequence is synthesized)
atataacaaaacagacttctttgccacaagacttctcagtacctttaacattttatgattttcccaaaggacaaagagtatgcagcatttcccagacttaaatttaactgtgaacacctg

SEQ ID NO: 808452 - DNA, 120 bp, Artificial Sequence
  ENSG00000253644_0 (sequence is synthesized)
ggagacaagcctataatatgggccacaagcctaaaatacttacaatctggccgtttccagtaaaaggttgctggcccctggtctcatccaactgcttgatagatgaggacattaatgctg

SEQ ID NO: 808453 - DNA, 120 bp, Artificial Sequence
  ENSG00000253644_1 (sequence is synthesized)
acatggtggcgttcctgcaggacctgggtctcctcaaccaggagatgctgcctcaagaactccccagaagcctggctgaaactttcttggaataaggctacagtctgagactcttcctac

SEQ ID NO: 808454 - DNA, 120 bp, Artificial Sequence
  ENSG00000253644_2 (sequence is synthesized)
ttaatcctccttcacaggggtcagacctacatcatggtctgatggttttcccagcgttgttggcttcttccttcttctccttcacaggcagtgccctcaataaatgctttgctcatctaa

SEQ ID NO: 808455 - DNA, 120 bp, Artificial Sequence
  ENSG00000253644_3 (sequence is synthesized)
acattaagaggagctgcttcatctcctgcagtgggatgttgtctgatggctccaacattgtccctctgcacgttgtaccaaggccagatttctcatgttctcttcccagccaatgattga

SEQ ID NO: 808456 - DNA, 120 bp, Artificial Sequence
  ENSG00000253645_0 (sequence is synthesized)
cactccagcctgggtgacagagtgaaacactgtttctaaaaataaaaattaaagaataatggatggcattattcagccatggggaggaccacctgaaatactgttacacacagtgggtca

SEQ ID NO: 808457 - DNA, 120 bp, Artificial Sequence
  ENSG00000253645_1 (sequence is synthesized)
ctgttacacacagtgggtcaagaccacttcaaaagccttatgaaaatagcacaactcaggcaaggcttttattccacaaagaaaatgcagtacattttttagttcctttaaaaaaaaaaa

SEQ ID NO: 808458 - DNA, 120 bp, Artificial Sequence
  ENSG00000253645_2 (sequence is synthesized)
atccccaacctattttttccatttggttcaattttatacatttaaaactaactgctttggtcaaatacgtaccatctttggttcacattaaaagattatggtccaaaactggccagaagt

SEQ ID NO: 808459 - DNA, 120 bp, Artificial Sequence
  ENSG00000253645_3 (sequence is synthesized)
taagaaatatcaacaaaataggaagtttgaaatacaatttaggaatggaatgcttttagagcttgtttcattgaagataataatttatctcatattgaactacattaacgatgttctggc

SEQ ID NO: 808460 - DNA, 120 bp, Artificial Sequence
  ENSG00000253648_0 (sequence is synthesized)
ctctcacaggaatcttgtttgtaccagcagatgcccttgcggctcttatctgatctatgtccactttattcctgtcattataaccactctctaagagagctgtgaatagaaataagatac

SEQ ID NO: 808461 - DNA, 120 bp, Artificial Sequence
  ENSG00000253648_1 (sequence is synthesized)
aagagggcctttaccaagaacccgaccatgctggcaccttcatctcagacttccagctaccagaactctgaagaaattgaagctcagagaagttaagatacttgctttagaacacagata

SEQ ID NO: 808462 - DNA, 120 bp, Artificial Sequence
  ENSG00000253648_2 (sequence is synthesized)
gttaggggcaaagctgggattcaaactcaaagcacttggctcacgaatctatgtagttagaagtactctattctgccttcgtaacactctcttgctttaataaagtgaatgataataata

SEQ ID NO: 808463 - DNA, 120 bp, Artificial Sequence
  ENSG00000237133_0 (sequence is synthesized)
aggaatcttaagaaagatggcttaacccagtcagaagggacaagcataattttcttccatggctatttaaagccaactgggagccgggatgggaaactactaaagtttgatgcaccagac

SEQ ID NO: 808464 - DNA, 120 bp, Artificial Sequence
  ENSG00000237133_1 (sequence is synthesized)
agcgcccactacaggaaatgaagcaatggaagaagcgcacctcatgtgaaagcatttggattttgctaggctattttctgagtagtatttgtcccgtggaaaaatacagaagaggaaatg

SEQ ID NO: 808465 - DNA, 120 bp, Artificial Sequence
  ENSG00000272788_0 (sequence is synthesized)
ccaaagtgcgtaactaagcctgggacctcacaaataagtctcttccctaatggccacctgattttcatcagacttgccctggtttcctaagcctttgggctgataactgtgtttacagct

SEQ ID NO: 808466 - DNA, 120 bp, Artificial Sequence
  ENSG00000272788_1 (sequence is synthesized)
tgttaaatatgtgcctcatttattctttcccggatccacattcattcttgggaagctctcagtggcatttgtggagaccacagcccagagccctcctggacaggatcaccgggcagactc

SEQ ID NO: 808467 - DNA, 120 bp, Artificial Sequence
  ENSG00000272788_2 (sequence is synthesized)
atattaatagattatattttcagggtctgtcttgagtggcccattctctgtaggggataatggtttttagaaaagaacttttctggatgtaacaatgaaggttacattgaggagaacgac

SEQ ID NO: 808468 - DNA, 120 bp, Artificial Sequence
  ENSG00000272788_3 (sequence is synthesized)
aaatggctcatttataaaaatgctgctggctgtgtgaatgtatcaattctagctaatctcacagtaaagaatttgtccagggactcctgctggtggaggagttgcctgtgttgaatgcta

SEQ ID NO: 808469 - DNA, 120 bp, Artificial Sequence
  ENSG00000272788_4 (sequence is synthesized)
agtgaggtctcaaaaaggagctgtgcgtgccttgtgggggtctgggcagctaccacatcattctggaattctcctgcctctgtcaaggagcctgaataaacgtggatgctatcacctcta

SEQ ID NO: 808470 - DNA, 86 bp, Artificial Sequence
  ENSG00000198711_0 (sequence is synthesized)
tttttttgttgcagagatggtgaggatgtcttgctttgttacccaggttggtcttgaatttgtggctttcgggttacaggcgtaag

SEQ ID NO: 808471 - DNA, 120 bp, Artificial Sequence
  ENSG00000198711_1 (sequence is synthesized)
ccaacgtgcctggcctgtattttattgtaattcctttttccattctcatctcaatgcatttccaaattagagaaggacatccttcttgtctcacactttaaaaaatagcagttttcatgg

SEQ ID NO: 808472 - DNA, 120 bp, Artificial Sequence
  ENSG00000198711_2 (sequence is synthesized)
caagccaacattttaacatcttttctatggccagcaatgatagtcatcttgtggaaacgtgtctgaggcattctcctgtctataaagtcaaagatctcattaagtgctttggcatgtttt

SEQ ID NO: 808473 - DNA, 120 bp, Artificial Sequence
  ENSG00000198711_3 (sequence is synthesized)
gaggaaaccgaaaggtgacccaaaactttcattatgaaagctggtatcacaggtaagcaaattacacccctttgtgacagtgtcgggtacgaggtgtgaacatttagcaggtaagatgtt

SEQ ID NO: 808474 - DNA, 120 bp, Artificial Sequence
  ENSG00000198711_4 (sequence is synthesized)
ttcattttcattggtaagaagcttatggactaaatgaaatttgctcaaattaactgtgtactgtctgccaaatatgtagataaatgagcaaagtctaggttgtatttggacaagagaaca

SEQ ID NO: 808475 - DNA, 120 bp, Artificial Sequence
  ENSG00000198711_5 (sequence is synthesized)
acaatctcttacgtcttcagtggcttcactaaaatcttcacagaaatcgagaagacgatctgaaactccagttttcaaatcaacatacctaagagctagcggaaacctgtagccatgact

SEQ ID NO: 808476 - DNA, 120 bp, Artificial Sequence
  ENSG00000198711_6 (sequence is synthesized)
tcaggcagcccttgacgcactcggaagcacgaatgctggaaggatcagacagggtcagcactactgtaaaggggcaatgcatctgttactgaaagtccctcgtcctttggttcacacaca

SEQ ID NO: 808477 - DNA, 120 bp, Artificial Sequence
  ENSG00000198711_7 (sequence is synthesized)
ggacttttagtttgtaacctccgaatcaggaaatgtaaccttcttggtttgcggtgcaatcaagggaacaagatgataatggcgtccattcaaggagtgcgcccaagctaattctgcgac

SEQ ID NO: 808478 - DNA, 120 bp, Artificial Sequence
  ENSG00000198711_8 (sequence is synthesized)
cactgtttttgactgagaactgctgtctctttggaggtcaaaaaaaccttgatttagaaagatatgcctcagacttgagagactcaatgtccaatgtgcctccacctccccttctccata

SEQ ID NO: 808479 - DNA, 120 bp, Artificial Sequence
  ENSG00000198711_9 (sequence is synthesized)
tgccatttctcacattcttttctgcacaccgcgcagtacattctgtttgggttctttcctccctaatccagttgtgtgtgtccttgcatctgtcattaaagtaacatggtcatttaacct

SEQ ID NO: 808480 - DNA, 120 bp, Artificial Sequence
  ENSG00000198711_10 (sequence is synthesized)
agactgaaaccagcaccgtctagacaaaaagcccaacactgaatctgcagcagactcctaggcaagtgctgctaacatgcatgactgcagcgtgcggagttgcagcctgagtgatgtgat

SEQ ID NO: 808481 - DNA, 120 bp, Artificial Sequence
  ENSG00000198711_11 (sequence is synthesized)
ccatggtgaatcacaagtcctgatgccagcatccacgtcaggcaacatggcgacagtgaccactcgaggcagatcatccacgccatttccatccgatgctacaaatggtgctgtcatccc

SEQ ID NO: 808482 - DNA, 120 bp, Artificial Sequence
  ENSG00000198711_12 (sequence is synthesized)
tctgtgtgggtttcatactttccacccaaccttctgcatcactgacaaaacccaggactttctgtgtcctgggattcctcaggatgtggggctttttagtgttaaaagccagatggttgg

SEQ ID NO: 808483 - DNA, 120 bp, Artificial Sequence
  ENSG00000198711_13 (sequence is synthesized)
tcacaccagtgaggaccctggcaacggaggcaggccagaaaccatccctcagagggctgctggatgtaggcaatatccagcacagggcagcccgcgctcggggtttaacacgtggggtga

SEQ ID NO: 808484 - DNA, 120 bp, Artificial Sequence
  ENSG00000198711_14 (sequence is synthesized)
tccgggtgtcacctcaggaacggagccaacaaaaccagagtgccccaaaaggccctaccccctcaaccaggccaaagcctcgcactttagggccccaggcccactctctggctctacagt

SEQ ID NO: 808485 - DNA, 120 bp, Artificial Sequence
  ENSG00000198711_15 (sequence is synthesized)
ctgtagacctccttttcagaccctgagctcctggaggggcaaggctgaacaggttcacctgaggcctgcatggaggaggaagggaaggaactagaatggaagggttgcctgtggagggga

SEQ ID NO: 808486 - DNA, 120 bp, Artificial Sequence
  ENSG00000198711_16 (sequence is synthesized)
agcagatcaggccccgacctcgggcaacgccccctgggtgaggagacaggctgcagctgactaaccaagtcccatccagtgggtgcaggggacacaggaggaagtggggcaagcagtaat

SEQ ID NO: 808487 - DNA, 120 bp, Artificial Sequence
  ENSG00000198711_17 (sequence is synthesized)
cagaaatggggaaatgtgagctgcaacatcacccaagggctgcaactctgagaggcaaagaagctgccaggtattgggagttccagagctcctggcagcagcacaggcaggcgggtcccc

SEQ ID NO: 808488 - DNA, 120 bp, Artificial Sequence
  ENSG00000198711_18 (sequence is synthesized)
cagcgagccctgtccccttgctgctggctccaccctcaactccatagccccagaaacagacccaggaggagagggattgcccgggccacagccagtttgctgggcagagaccaggccaga

SEQ ID NO: 808489 - DNA, 120 bp, Artificial Sequence
  ENSG00000198711_19 (sequence is synthesized)
ccccacctacagcatggcgcttcccccaccagcacggcaggaggtggcaagtcccagcagcacagcgggcaccctggctctaaccagagggtgggcatcgtcccaccccttcctctccca

SEQ ID NO: 808490 - DNA, 120 bp, Artificial Sequence
  ENSG00000198711_20 (sequence is synthesized)
ccccctgccgcccatgaaatgggaactgagttgcccaagagttaatcacttttctgacggtttattttattcatctttggtaacaaatggctgaaatcaattaaacttgctttcccctca

SEQ ID NO: 808491 - DNA, 120 bp, Artificial Sequence
  ENSG00000242125_0 (sequence is synthesized)
agacattccaggacttccgggcacttcgtaaggtttaaaaaggatgcttcgcgttttctctctcctttttggagacagattcgcagtggtcgcttcttctccttggatttgttaaggatt

SEQ ID NO: 808492 - DNA, 120 bp, Artificial Sequence
  ENSG00000242125_1 (sequence is synthesized)
ccaagtaactcttatttggagagaagacgatctgcacttcgcattttggcattgacatttaattttagggtcctttatatagaagggagagtaggtaaactgatttttttttttaacagg

SEQ ID NO: 808493 - DNA, 120 bp, Artificial Sequence
  ENSG00000242125_2 (sequence is synthesized)
aggtaaactgatttttttttttaacagggagggtttgacaatctttggcagacttggagcaaaagattgaggtgcatttcatgcctccttttgagagtcttgctctgtcgcccaggctgt

SEQ ID NO: 808494 - DNA, 120 bp, Artificial Sequence
  ENSG00000242125_3 (sequence is synthesized)
gcctcccaagtagctgggattacaaacataagccaccacgcccagccctcatacctcttttaaaagtcgacctgttttgcagaaagtctgctgtttttgtactaaaggctttggaatttg

SEQ ID NO: 808495 - DNA, 120 bp, Artificial Sequence
  ENSG00000242125_4 (sequence is synthesized)
tttggcatttagctaggaatgcacattctttcacctcattcatactttaagaaccacagaagtgactctgcttggccagaaggcacactgtgttggtggttatattaaaagtccttgagt

SEQ ID NO: 808496 - DNA, 60 bp, Artificial Sequence
  ENSG00000242125_5 (sequence is synthesized)
aggcacactgtgttggtggttatattaaaagtccttgagtattttgcttttcatgatctt

SEQ ID NO: 808497 - DNA, 120 bp, Artificial Sequence
  ENSG00000242125_6 (sequence is synthesized)
cccggccacttttgtatgatttctaatgtatttgtaatttacctaacaaattgcctaatctgctatgttaatgtatttatgaattaaaataaatacgactgcatgtttgtggttcatttt

SEQ ID NO: 808498 - DNA, 120 bp, Artificial Sequence
  ENSG00000242125_7 (sequence is synthesized)
tgtggaggtggctgtggtgacatcagccaagaatctgaatggtactgttgaaggaaactagcatgatagcttcagttctaaaggccctgaaacctagtctcaggtgggtcccccttgggt

SEQ ID NO: 808499 - DNA, 120 bp, Artificial Sequence
  ENSG00000242125_8 (sequence is synthesized)
tcctgaccaataggaccgtaagtctgggttgagtgcaagatgagttagaccgattctttagcttcctgcagtgtagtggaggaaaaatcgatggtagcaacgggaggttgtatccctagc

SEQ ID NO: 808500 - DNA, 120 bp, Artificial Sequence
  ENSG00000242125_9 (sequence is synthesized)
tgatgagttgtatgagcctctactacctggcgcacctccgcctgaagattgccagaattgcttgcctcatgacgtgagtcacaatggaaactttgtcaagccccctgcactggctgccaa

SEQ ID NO: 808501 - DNA, 120 bp, Artificial Sequence
  ENSG00000242125_10 (sequence is synthesized)
cataaatgttcagtaccctgaaggatgggactgaagggggatcatctagaaggtaaagttacctactggcataggggaggtgggacagccgttaagccatttggaacttgatggagacag

SEQ ID NO: 808502 - DNA, 120 bp, Artificial Sequence
  ENSG00000242125_11 (sequence is synthesized)
gtttgagggaggtgggtgagattggagtttggtggactgtagagcttgcttgccaaggtgttgaggtcagggttggtttgagaatggaagctagttactagctatgattgtgggggaaca

SEQ ID NO: 808503 - DNA, 120 bp, Artificial Sequence
  ENSG00000242125_12 (sequence is synthesized)
gctatgattgtgggggaacacagcttgatttttcttacaagctaagaggagtgaggcagtgtttaagagggcatgttaaatgcagccaggcttggtggctcacacccgtaatcccagcac

SEQ ID NO: 808504 - DNA, 120 bp, Artificial Sequence
  ENSG00000242125_13 (sequence is synthesized)
aaaccctgtctgtactaaaaatacaaaataactgggcatggtggtgtgcacctgtgggaggctgaggcagaattgctggaacccgggagatggaggttgtactgagctgagaccttgcca

SEQ ID NO: 808505 - DNA, 120 bp, Artificial Sequence
  ENSG00000242125_14 (sequence is synthesized)
gatggaggttgtactgagctgagaccttgccactgcgctccagcctggtgacagagttaagtctcaaaaaaaaggcatcttcctaaagcaattgtatttgtgcttacctgtgccaggcac

SEQ ID NO: 808506 - DNA, 120 bp, Artificial Sequence
  ENSG00000242125_15 (sequence is synthesized)
tgttctaggtaagcactaagtgggctttaatacagcatattccaatggggaatcccaggaaccaaaagactaattgtccaagtccacaactagaagtggcacctctgcagaaacaagcat

SEQ ID NO: 808507 - DNA, 120 bp, Artificial Sequence
  ENSG00000242125_16 (sequence is synthesized)
caaattccctgctcaggaagaagccagatgagtcagccccattcgtctgtatgcccagtcccatccgtgtcctgctgtaactacatagatctcacctgagtaaagtgatttttttctgaa

SEQ ID NO: 808508 - DNA, 64 bp, Artificial Sequence
  ENSG00000242125_17 (sequence is synthesized)
gttggtcaggctggttttgaactcctgatttccggtgatccaccaaatcatgtaatttaaaact

SEQ ID NO: 808509 - DNA, 120 bp, Artificial Sequence
  ENSG00000242125_18 (sequence is synthesized)
caccgcgcctggccggaaatcatgtaatttaaaactatatatgggtgtcttaggcggcatcggtcccaactctaaagtacgcgttagacgggcctgggccagaagtgggccatggagacc

SEQ ID NO: 808510 - DNA, 120 bp, Artificial Sequence
  ENSG00000242125_19 (sequence is synthesized)
tcgggacccgcagggctgccgcccgacccagcgagcctctgaaggtgcaccgccacccccactgtttatcttactgcctcatagtaggcacattgtcgttctcaatataattgcacacag

SEQ ID NO: 808511 - DNA, 120 bp, Artificial Sequence
  ENSG00000242125_20 (sequence is synthesized)
acagttttattctggatcctcatttgcctttaagaattttctcaatttttctttttatttgatcgcaccactgcaacctccgcctgctgggctcaagcaattctcctgccgcagcctccc

SEQ ID NO: 808512 - DNA, 65 bp, Artificial Sequence
  ENSG00000242125_21 (sequence is synthesized)
gcctgaccttgtggtccgccacgccaggccgaagattttcataatttggaagcattgcgtttcgt

SEQ ID NO: 808513 - DNA, 120 bp, Artificial Sequence
  ENSG00000242125_22 (sequence is synthesized)
aggccgaagattttcataatttggaagcattgcgtttcgtaattatgctttctcgtatttttgtgatttgggtcatttttatttttatatttttaggattacaggcgtgagccatcgtgc

SEQ ID NO: 808514 - DNA, 120 bp, Artificial Sequence
  ENSG00000242125_23 (sequence is synthesized)
ctggccgatttgggggtaattaacaagtccacgtgtttcatttgaatttaggatagctgggcctaattgttgtctttgcttctgcggtaccttccacatagtactaaccgcctattgtaa

SEQ ID NO: 808515 - DNA, 120 bp, Artificial Sequence
  ENSG00000242125_24 (sequence is synthesized)
agtaattagaatagctgaatatgcatgttaccagtctagaaaccgatttttttttaacaccccactgtggacagggtggaaactcgtttgctttcttgtttaagatctgtagtaacatga

SEQ ID NO: 808516 - DNA, 120 bp, Artificial Sequence
  ENSG00000242125_25 (sequence is synthesized)
atggatgaaattgtttcctattggattctgtaaatttatgcgttacactgattgtccaacgtggatacacccgggaggtcactctccccgggctctgtccaagtggcgtaggggagcata

SEQ ID NO: 808517 - DNA, 120 bp, Artificial Sequence
  ENSG00000242125_26 (sequence is synthesized)
gggctctgccccatgatgtacaagtccctttccacaacgttggaaataaagctgggcctcgtgtctgcgcctgcatattcctacagcttcccagagtcctgtcgacaattactggggaga

SEQ ID NO: 808518 - DNA, 83 bp, Artificial Sequence
  ENSG00000242125_27 (sequence is synthesized)
tttttttttggagatggatccattgcctctgcctcccgggttcaagtgattatgctaagtgattctcctgccttggcctcctg

SEQ ID NO: 808519 - DNA, 120 bp, Artificial Sequence
  ENSG00000242125_28 (sequence is synthesized)
cgtgagccaccacacctggctggattgaagtcttaatacatgtttaagaaaaattggctaaaaagtagccaggcatgatgataggtagctggaggaaggagaatcgctggagcccaggag

SEQ ID NO: 808520 - DNA, 120 bp, Artificial Sequence
  ENSG00000242125_29 (sequence is synthesized)
tgacctatactcaaacctatactccagtgccactgtactccaaccccaggcgatagcatgaggcccctcgttgaaaaagtttagggttttgctgtactaatagattaatatcttgttttg

SEQ ID NO: 808521 - DNA, 120 bp, Artificial Sequence
  ENSG00000242125_30 (sequence is synthesized)
ctcttatttggtgagtaaatctgctaattgttttttgcttatcagctctttgtcaatgatttctgtaatggaaataggattgaagagacttttattctagttggtcaggatttacctctg

SEQ ID NO: 808522 - DNA, 120 bp, Artificial Sequence
  ENSG00000230773_0 (sequence is synthesized)
gccctcggtgcctgtgcccgggctgaggagaccttcctcgacaccccacgttatgtgggtttccgcaagaccttccgccattgcctgggctttgaaagcgctttaggaacgatacggaaa

SEQ ID NO: 808523 - DNA, 120 bp, Artificial Sequence
  ENSG00000230773_1 (sequence is synthesized)
cggaggcttagaagtggaaactttacagatatggaaactgagacttagaaaaatgacccgtcaaaggctcagctcatcatgaagaatgtccatgtgactttggttaataaaatggccttg

SEQ ID NO: 808524 - DNA, 120 bp, Artificial Sequence
  ENSG00000230773_2 (sequence is synthesized)
gacatttcctaacagaaacaggccatcagtgctttttatggacagcaagcaagcagcttcccaaagcagaagaggtataactttcagcatggtcttgagccatttgcagccaaagagaca

SEQ ID NO: 808525 - DNA, 120 bp, Artificial Sequence
  ENSG00000230773_3 (sequence is synthesized)
acttgcagagggtgactggtcatctgcaaggctgacccagcttgactcttatcaacaacaagcactcctctttatgaaatcttgagggtgtctgggacctagatgctgccagatgttcag

SEQ ID NO: 808526 - DNA, 120 bp, Artificial Sequence
  ENSG00000230773_4 (sequence is synthesized)
gcctttgtcttctgtatttttgcagtcatagcaactttcctcttcttacctcctagaataccgctgtggataccaattattgggatgtgatcaatatctactgagtgatagtcagtagat

SEQ ID NO: 808527 - DNA, 120 bp, Artificial Sequence
  ENSG00000230773_5 (sequence is synthesized)
attgtaattttttttgttaactttccacacatttacatcttcctagttagactgtgggcagaactatctaaaacatcttcttacccttcgtggtgacaaataaatgacatgcagctatgt

SEQ ID NO: 808528 - DNA, 120 bp, Artificial Sequence
  ENSG00000230773_6 (sequence is synthesized)
aattttctcaattattttgagtctcccaacccattcctttcattccttaccctctcactgtctgttcccactccacagaaggaacaataattatttatgtgggtctttcaagaaattttc

SEQ ID NO: 808529 - DNA, 89 bp, Artificial Sequence
  ENSG00000230773_7 (sequence is synthesized)
tatatattataaaatatattttaacacaaatgagattatgttatgtatacagtcctgaaacttgataagacagagtcttgctctaccac

SEQ ID NO: 808530 - DNA, 120 bp, Artificial Sequence
  ENSG00000230773_8 (sequence is synthesized)
ttttgtttttttgttttgagacagagtcttgctctaccacccaggctggagtacggtggtgtgatctctgctcactgaaacctctgcctccctggttcaagagattctcatgcctcagcc

SEQ ID NO: 808531 - DNA, 120 bp, Artificial Sequence
  ENSG00000230773_9 (sequence is synthesized)
aggcgtgagccactgcacccggccttcttgttatattcttaacatctttctgtagttgtaaattcctgttttaacagctgggtagtagtccattgtataaatctgttttattaaccagtc

SEQ ID NO: 808532 - DNA, 120 bp, Artificial Sequence
  ENSG00000230773_10 (sequence is synthesized)
tattaaccagtcatctactgatgggcatttacattctgtcgagggttttttttctattacaattaatgttacaatgaaagtcattgtgaaaccatctttaatcacttatgtgagtatatt

SEQ ID NO: 808533 - DNA, 120 bp, Artificial Sequence
  ENSG00000230773_11 (sequence is synthesized)
cataaataaattcattgaagtggagctgctgcgttaacaagtatatgcatttaacattttgataagtaaagccacatttacttccatgaaagttaggccaaactatactaatataaacag

SEQ ID NO: 808534 - DNA, 120 bp, Artificial Sequence
  ENSG00000230773_12 (sequence is synthesized)
acggaggcttagaagtggaaactttacagatatggaaactgagacttagaaaaatgacccgtcaaagaggtgggatttcaccatgttgccgagactggtctcaaactcctgagctcaagt

SEQ ID NO: 808535 - DNA, 120 bp, Artificial Sequence
  ENSG00000230773_13 (sequence is synthesized)
acacaggccatacacttcactggatggaagacattctccagtagttttctgaaaaagagtatgcagaagttaaattttctgagatcttggttgtctgaaaatgtctttattctaccttcc

SEQ ID NO: 808536 - DNA, 120 bp, Artificial Sequence
  ENSG00000230773_14 (sequence is synthesized)
tgcttgattggtgcagtaactagataaagaatttgagatcaggaatgttttgcctttagaatgttgaaggctttgctccatgatgtctagtttcaagtgctgctattgagaaatctcaag

SEQ ID NO: 808537 - DNA, 120 bp, Artificial Sequence
  ENSG00000230773_15 (sequence is synthesized)
ttctgattcctagtatgtgactgattttttggtaggattttcattttgtatccaatgaaatttcaaaatgatatgcctttgtatgagtctaattttcacttattctgtcgggcatccaga

SEQ ID NO: 808538 - DNA, 120 bp, Artificial Sequence
  ENSG00000230773_16 (sequence is synthesized)
aggcccttgcagtctagaaacgggtaaattctctcgaattattcattacttctttcttcttctctgttatttcgatgttggatctcctgactgggctccacttttcttctaatttctctt

SEQ ID NO: 808539 - DNA, 120 bp, Artificial Sequence
  ENSG00000230773_17 (sequence is synthesized)
ttttttttttttttgctctattttctggagaattttctcgaatttatattccacatttctagtgacttttttcattgctgttatcacgttttcaatgtttaagagctctttttttgttgt

SEQ ID NO: 808540 - DNA, 120 bp, Artificial Sequence
  ENSG00000230773_18 (sequence is synthesized)
aagagctctttttttgttgttttttgaattttttcacagcactctatgtgcaagatcttctcttgtctttctgaggatattaatatacttttaaaaatatatagtttatttttcctaaaa

SEQ ID NO: 808541 - DNA, 120 bp, Artificial Sequence
  ENSG00000230773_19 (sequence is synthesized)
ggagctggaaaccgagggaccccggcaggcgtttccagctggactgtcgccatcttgtggcaggactgggtggccacactggcccaacggccagatccgcatgcccacaactttcttggg

SEQ ID NO: 808542 - DNA, 120 bp, Artificial Sequence
  ENSG00000230773_20 (sequence is synthesized)
ttccaaacgtacctttccttctttccccaacctgctaggaactggattttaaaatcacgttccctgaagatacctcggttctgtcctctcccaattgcacgggcgttgtcttcctaaaag

SEQ ID NO: 808543 - DNA, 120 bp, Artificial Sequence
  ENSG00000230773_21 (sequence is synthesized)
ctaccctgctctttggagagtccagtgcaagcctcactgaggggctctgtgttaaatccatcaaaaccaactcgtacgaggcgtcaatcctccaccaatttcccatgagacaaaccaatg

SEQ ID NO: 808544 - DNA, 120 bp, Artificial Sequence
  ENSG00000230773_22 (sequence is synthesized)
ggatagatctataaagctgcaactcctgtgcacacagaaatatgaagccactttcaccctctggaatccttcaggactttcagagcttacctaaatcaaccaatcagaactcacctgcct

SEQ ID NO: 808545 - DNA, 120 bp, Artificial Sequence
  ENSG00000230773_23 (sequence is synthesized)
cagccaaccagggttcagctttatctaccaatcagaactcagctcatcaaccaatcagaatgaagcaagtttgaatctttcaattaaataagggaatctgagtgagaacctgggaaggaa

SEQ ID NO: 808546 - DNA, 120 bp, Artificial Sequence
  ENSG00000230773_24 (sequence is synthesized)
cttttgccataatacccaaaccctctctttgttctctggaatgcacctttgctttacactgaaggctgtgtctccctggtttgcaaacggttcattggaataaagtctctttcttccaaa

SEQ ID NO: 808547 - DNA, 120 bp, Artificial Sequence
  ENSG00000230773_25 (sequence is synthesized)
catacacttcactggatggaagacattctccagtagttttctgaaaaagagctcagctcatcatgaagaatgtccatgtgactttggttaataaaatgtgaggaatccaaagttcaagaa

SEQ ID NO: 808548 - DNA, 120 bp, Artificial Sequence
  ENSG00000230773_26 (sequence is synthesized)
agccctgagtagccacatggaaagccaggctgtcctgctagaaagatcacatggagaggcatgaaactacatggagagagaaaccagccaagccagccttgcagccagagccattaccgt

SEQ ID NO: 808549 - DNA, 120 bp, Artificial Sequence
  ENSG00000230773_27 (sequence is synthesized)
agaaagtcatcttggaccctccagatcagaccagttgcagctgaattctactgaacaatcccaggcagcaccaggtagaacaaaagaatcacctatctgagagctgccaaattcctgact

SEQ ID NO: 808550 - DNA, 120 bp, Artificial Sequence
  ENSG00000230773_28 (sequence is synthesized)
ccccaaataatgaaatatagcaaaatgattgttttaagccactaaatttggtagtcatttgttatgtggcagtagctaaccctgaagaaagtatctgcacttgaacttccctttgtacag

SEQ ID NO: 808551 - DNA, 120 bp, Artificial Sequence
  ENSG00000230773_29 (sequence is synthesized)
tacccaggcaaccctacagacttgaaatgacttggaaccctgaacactttattagactgaggtttggcatatcttggaacttgttgcctgcttaccatttcaggtctccaggtgtgttta

SEQ ID NO: 808552 - DNA, 120 bp, Artificial Sequence
  ENSG00000230773_30 (sequence is synthesized)
tgggagatattcaaaggaatgtaccagactcaatattgaaattgattagtctccttcaactgtaattttttccccttgattattgttttaaaatttggaacaataagattgtacagagga

SEQ ID NO: 808553 - DNA, 120 bp, Artificial Sequence
  ENSG00000230773_31 (sequence is synthesized)
gaaagagaaaggatggagtatgggaaagggagaaaataaaaagaaaaagatggaggggtctcaggttggttagcatctactcagaaaggaagaaataaaattaacctccaaatgaagaaa

SEQ ID NO: 808554 - DNA, 120 bp, Artificial Sequence
  ENSG00000230773_32 (sequence is synthesized)
ggcacccaccaacataccaggctcagctcatcatgaagaatgtccatgtgactttggttaataaaatcccaggaaccaaacatgtgagtgaagaagacttagcaatgaacccagcctcag

SEQ ID NO: 808555 - DNA, 120 bp, Artificial Sequence
  ENSG00000230773_33 (sequence is synthesized)
ccaccgactgactgcaacatcatgataaccagagccagaaccactcagctgaaccacacccaaattcttgagccatagaagaatagatccagtggactgtagtctgtttaactgagacct

SEQ ID NO: 808556 - DNA, 120 bp, Artificial Sequence
  ENSG00000230773_34 (sequence is synthesized)
cacacataatgtcatggttgacagttactggttgaaggaaatccatgttgggcttctgtggatgctggattctttccttctgagaagaaatataacacactgactttgaggtgatggtgg

SEQ ID NO: 808557 - DNA, 120 bp, Artificial Sequence
  ENSG00000230773_35 (sequence is synthesized)
agaaaaagtacaagcagaagacttttcccaacttctccatagcctacatgcgtgtggaaacacttcaggttaaccacttgaagcttcagagactgcagtgaggccctggcataggaacat

SEQ ID NO: 808558 - DNA, 120 bp, Artificial Sequence
  ENSG00000230773_36 (sequence is synthesized)
tgttcacagagcaaagcagccagcgtgactgcagcacagagtaggaagggtgtggaaggagatgagagagaatgaagagggaatctttgaacttgattaccaaggagatgggatgataaa

SEQ ID NO: 808559 - DNA, 120 bp, Artificial Sequence
  ENSG00000230773_37 (sequence is synthesized)
tccatccagccactccaagaagccaagttaagaccctgcaacaaagggaattcaaagacttgagctgtccattgagaaagatctgctgcttaagttcaagttcatgtcctccagatgttt

SEQ ID NO: 808560 - DNA, 120 bp, Artificial Sequence
  ENSG00000230773_38 (sequence is synthesized)
cccccatcctccagggtcactgccttcttgtcgaacttgaatctgccttcaatttattaatggatctggttggtggcatccactgtttaccaagagcctttctacaatccacactactgg

SEQ ID NO: 808561 - DNA, 120 bp, Artificial Sequence
  ENSG00000230773_39 (sequence is synthesized)
actaacgctttcccctacttcactctactctcaagggatggaagcactgatgaagagcacagacagaatcaagtgtacatgcagaacatatggtaaccatataaagggatgatgtcaaaa

SEQ ID NO: 808562 - DNA, 120 bp, Artificial Sequence
  ENSG00000230773_40 (sequence is synthesized)
cgggcagatcacttgagtacctgctacatatctccatgattgagtctgcttactgagagaataaaagacaagtttccagaattttgagaagaagaggaagaagagcaggaggagagagag

SEQ ID NO: 808563 - DNA, 120 bp, Artificial Sequence
  ENSG00000230773_41 (sequence is synthesized)
gaagaagacaacaagaacaagagcaagaacaaagcagcttatgtaaaatactgacagcttactgcaattttacagcattcctcacaaggtggttcagaatagatccagtggactgtagtc

SEQ ID NO: 808564 - DNA, 120 bp, Artificial Sequence
  ENSG00000230773_42 (sequence is synthesized)
aagacttttcccaacttctccatagctaattaaaaactacgaattgccttgtttgcttaaactggctgccatgaaatgttgaaaatgccttaaaagaaacagcgatactaaagaggatct

SEQ ID NO: 808565 - DNA, 120 bp, Artificial Sequence
  ENSG00000230773_43 (sequence is synthesized)
ttttaaaattcctgctttgtgtggttcaagatggatgtctggactcatgcatttacaatcccttcatccaaattcttactgaaacaatattaaagatagacaaaaaagaatagaagggag

SEQ ID NO: 808566 - DNA, 120 bp, Artificial Sequence
  ENSG00000230773_44 (sequence is synthesized)
aatccattaatataccagtgaatttgatgactttctggaaaagagagagtgattaagatttaatttacagatcccacagataagtgagaacatgtgatgtttgtctctctgtgcctggct

SEQ ID NO: 808567 - DNA, 120 bp, Artificial Sequence
  ENSG00000230773_45 (sequence is synthesized)
tcacttaacataataatctccagttctatccatgttgttgcaaatgattggatctcattctttttatggctgaatagtactccattgcatggctagctttgacagtaagaagttacacat

SEQ ID NO: 808568 - DNA, 120 bp, Artificial Sequence
  ENSG00000230773_46 (sequence is synthesized)
acattctgctgggagccagcctcaacttaggggatcacaaaggaagcaagaagcagctgggaagaagtacagagcctgtgacacaactagaaaataggcacaatggcagtctgctctaca

SEQ ID NO: 808569 - DNA, 120 bp, Artificial Sequence
  ENSG00000230773_47 (sequence is synthesized)
cgtaccctgcaaaacacacctgtgttttatgctgcctttcttcttccaacaggataaattggtttttctcagcaaggataacgttggggttaaccacttgaagcttcagagactgcagtg

SEQ ID NO: 808570 - DNA, 120 bp, Artificial Sequence
  ENSG00000230773_48 (sequence is synthesized)
ggaaaagcctgggaaaatgagagacaaggaaacatctcttggctggagacacacactcagggttccttaagactgggtagtcatcttgcattgccttcacagagagagccaaaggcttcc

SEQ ID NO: 808571 - DNA, 120 bp, Artificial Sequence
  ENSG00000230773_49 (sequence is synthesized)
cttctgccacttcttgctctgttaaccaggctggattgcaatgatacaaactcagctcacagccacctctgcttcccaaactgaagtaatcctccctccttggcctcctgagtagctggg

SEQ ID NO: 808572 - DNA, 79 bp, Artificial Sequence
  ENSG00000230773_50 (sequence is synthesized)
cctccatagtagctgggaccataggcaggtgtcaccacacccaggttctgtaactggagactgccaatgaaactgccaa

SEQ ID NO: 808573 - DNA, 120 bp, Artificial Sequence
  ENSG00000230773_51 (sequence is synthesized)
cccaggttctgtaactggagactgccaatgaaactgccaaaaggcagattaacaggagaaaagacatacagacttcatctgatgttaacagtttaatttttacatgcatggaggccttca

SEQ ID NO: 808574 - DNA, 120 bp, Artificial Sequence
  ENSG00000230773_52 (sequence is synthesized)
tagaaaagaagtgaaggcctaaagaagtgattataacctgggacttatatatcattttaacaaagagtaataaattgtgaaaaggggtttgtcttctaagagctgttaattgtgagaagg

SEQ ID NO: 808575 - DNA, 120 bp, Artificial Sequence
  ENSG00000230773_53 (sequence is synthesized)
aaaatatatgggggaaactaatggaggataagggttattttagtaaagtttgtgcagatccatttcagtgctttctatctccagtgatgttattctcctgctggtatggaaaaagggagg

SEQ ID NO: 808576 - DNA, 120 bp, Artificial Sequence
  ENSG00000230773_54 (sequence is synthesized)
gagaataccttcacaaagggaaatttatgccctattttaggaagataggaggacaaagaactctttttgtgtttgctgcttcttaattgccttcagctcaaaataaatccttatgccaaa

SEQ ID NO: 808577 - DNA, 89 bp, Artificial Sequence
  ENSG00000230773_55 (sequence is synthesized)
cttcgcccttctccgtgattgtaaatttcctgaggcctccccagtcacgctgaactagtcttgctttctcacccaatctggagtagact

SEQ ID NO: 808578 - DNA, 120 bp, Artificial Sequence
  ENSG00000230773_56 (sequence is synthesized)
gagtagctgggattgcaggcacccaccaacataccaggctcagctcatcatgaagaatgtccatgtgactttggttaataaaataatagatccagtggactgtagtctgtttaactgaga

SEQ ID NO: 808579 - DNA, 120 bp, Artificial Sequence
  ENSG00000230773_57 (sequence is synthesized)
aagtgtacatgcagaacatatggtaaccatataaagggatgatgtcaaaattctcagcctccttgctcttcagtatcttcttcccctttacctcgtctggatggtgtataatgaagaggc

SEQ ID NO: 808580 - DNA, 120 bp, Artificial Sequence
  ENSG00000230773_58 (sequence is synthesized)
gtgcctcctgcctctagagtaagattcaagggaggatatataggctcctccatagggtcaagaggttttcaaaggctgtgttgtcccatccagctaccaaaacaagagacaaaattgtga

SEQ ID NO: 808581 - DNA, 120 bp, Artificial Sequence
  ENSG00000230773_59 (sequence is synthesized)
cctggagttgaaactctagtgagtgataaagaggggaagtttcctaaagcagaagttctcagtctgggggctatctgtgtgttgtgtactgaattttgtgtcctcccaaaattcagacgt

SEQ ID NO: 808582 - DNA, 120 bp, Artificial Sequence
  ENSG00000230773_60 (sequence is synthesized)
tgaagccctagtccccattgtggttgtatttggaggtggggctttgggagatgattagaattagattagttcatgaaggtgaagcccttctgatgggattagtacccatacaagaagaga

SEQ ID NO: 808583 - DNA, 120 bp, Artificial Sequence
  ENSG00000230773_61 (sequence is synthesized)
cacaagatccctctaccaattatgctagctctcctctctttctctctccaccgtctgggatacttcaggaagatgtctgtctgcaaaccaggaagaggtccctcaagcactaaatctgct

SEQ ID NO: 808584 - DNA, 120 bp, Artificial Sequence
  ENSG00000230773_62 (sequence is synthesized)
ggcaccttgatcttgggcttcccagcctttaggactgtgagaaatctttgctgtttaagcaatcccatctatggtattttgttacagcagcccaagctgactaagacactgtggatacct

SEQ ID NO: 808585 - DNA, 120 bp, Artificial Sequence
  ENSG00000230773_63 (sequence is synthesized)
tgcatgcctgggaggcttgcacatccttggacattataagtaatatttttctgaaaaggggtcataactctcatcggagagtcaaaagaccaagtctatgactcccaaaagattatatac

SEQ ID NO: 808586 - DNA, 120 bp, Artificial Sequence
  ENSG00000230773_64 (sequence is synthesized)
cactgacggagtggcccttgtgttcttatcctgtagaaccacaagaaacttgaggattggggatcctagtcctggccttcattccgtacttgcatgaccaacatctaagagtactaacaa

SEQ ID NO: 808587 - DNA, 120 bp, Artificial Sequence
  ENSG00000230773_65 (sequence is synthesized)
atatgatgaaataagaaagattcaagaggatacacatattttctttgtccaatgttgctaatatccacctgagagtttattatccataataaaatgtggaatccagtctgtacaccatga

SEQ ID NO: 808588 - DNA, 120 bp, Artificial Sequence
  ENSG00000284914_0 (sequence is synthesized)
gcaggggctgtggggagcggtcgctgcagggttggacggatgctaggccaaggtggggccagcggcacgggttcccaggtgagtggggctgggaccggatgggagggagtgacctcccca

SEQ ID NO: 808589 - DNA, 120 bp, Artificial Sequence
  ENSG00000284914_1 (sequence is synthesized)
tcacgtggaggctgagttgatgacgatgggaagagcagcgggggccaaaaagggagggacggcccggcacgccgtgcactcgatgcccaacgggcccccatttaaggtaagcatttgttt

SEQ ID NO: 808590 - DNA, 120 bp, Artificial Sequence
  ENSG00000284914_2 (sequence is synthesized)
aactgcaccgtgacacacagtattttctgaatttaagttgaactcagttcaacaaatgtttatgaactgtctacggaggagaggcactgaagtgcagcgatgactcaacgcgtacttgag

SEQ ID NO: 808591 - DNA, 120 bp, Artificial Sequence
  ENSG00000284914_3 (sequence is synthesized)
cttcaaaaggctgccagggaatgttgcagtgaatttgcctgactccagcgaatggtgcctgtgaagtccaggagcatagagctggtgtaaggaagctcaaaacccatttgcagagagaaa

SEQ ID NO: 808592 - DNA, 120 bp, Artificial Sequence
  ENSG00000284914_4 (sequence is synthesized)
ctgggcaacatagcaagacctcatctctttaaaaaagacaggtctgagcagctcctaggggccaatccctattcgaggcaacagcagagggaagacaagaagatggctacatgcacccac

SEQ ID NO: 808593 - DNA, 120 bp, Artificial Sequence
  ENSG00000284914_5 (sequence is synthesized)
agatggctacatgcacccaccacctgactgcagcagctcacaggccccccagggctggcattgcctgacccagggaatgtggcaaggggtgccaccaaggcaaacacaggaggaatcttt

SEQ ID NO: 808594 - DNA, 120 bp, Artificial Sequence
  ENSG00000284914_6 (sequence is synthesized)
agacggtgtgctggtccccacaccagcctctgacttgaagtgcctccattcccctagcaaatgcatgaaacaaaagttgtgcaggcctcacgtctgattgattctcttctctttgtggac

SEQ ID NO: 808595 - DNA, 120 bp, Artificial Sequence
  ENSG00000284914_7 (sequence is synthesized)
atacgttagacttagaaataaactcgtattaaaagatatttttaatggctttttcttcccttacttagaggcaaataatgataagctatacttcagtatgtattttaggcttgaaatcat

SEQ ID NO: 808596 - DNA, 120 bp, Artificial Sequence
  ENSG00000251867_0 (sequence is synthesized)
ggctcggcctcgccctctcgcccggcagcccggctcgcgctcgctcccgggtctgctgcacgcgtccgctgccgctgccgctgccgggccgacgcctccgaccgctctctcgtcctccac

SEQ ID NO: 808597 - DNA, 120 bp, Artificial Sequence
  ENSG00000251867_1 (sequence is synthesized)
ctcgtcctccacccccgccccgccgcgctccgggcagcgtcccgcgcggagaagggggcgggcggcggagaggtgaggagcgagcctgcagcgagcgaggccttcgaagttgagcagcgg

SEQ ID NO: 808598 - DNA, 120 bp, Artificial Sequence
  ENSG00000251867_2 (sequence is synthesized)
agtgcggggagaccctccgctgccccctctttaaagccgcgcgcgcacacaccgatcctccacacagatatccttcctccgcgcgccgaggagtcccgacgccgccgccggcttcgcagg

SEQ ID NO: 808599 - DNA, 120 bp, Artificial Sequence
  ENSG00000251867_3 (sequence is synthesized)
cgctgagggtgagaggcacgctaaactgctcggctccgccacataacgaagcgacaataaagccggcggagcgtttccgtccgaccaggccctggcggaggtcgaatggcaaatgaacaa

SEQ ID NO: 808600 - DNA, 120 bp, Artificial Sequence
  ENSG00000251867_4 (sequence is synthesized)
cggaccgtgcgcccacaatgcaccgggactggaccaggcggtgcctttcacgcgaagaggttacgaccacggacacaacctcctttgatgcattgtgcgaggcagcacctcgggccccgg

SEQ ID NO: 808601 - DNA, 120 bp, Artificial Sequence
  ENSG00000251867_5 (sequence is synthesized)
acagtagtcatttcacagaaaatgcaccgccccgagtgtcttattgctgtgatgaaatggaaatttaaataaaaggtcgaacacgtgcgttcactgggaagtattgacatgggtgttaca

SEQ ID NO: 808602 - DNA, 120 bp, Artificial Sequence
  ENSG00000251867_6 (sequence is synthesized)
cggggaggagtctgcttctacggacgttgtgagcggctccgaagattgtgtgtttaaagtcaacaattcatttttaagacttttttcgaactgtttacattacatggactttagattgat

SEQ ID NO: 808603 - DNA, 120 bp, Artificial Sequence
  ENSG00000251867_7 (sequence is synthesized)
tctgacagaatgaactggaaatgaaatcccacagttatgatcgtagtagagtttttttttccaatttagggcccttatactccttttaaaaatttttaatatgctaaatttagcaaatac

SEQ ID NO: 808604 - DNA, 120 bp, Artificial Sequence
  ENSG00000251867_8 (sequence is synthesized)
taaagtgttaagactcatctgacaatgtgagaatttaagcctatttcaggttaagaaaaaaaagatgttttcaagttatggaggggctttttactcttaagcgacatatgtattagaagt

SEQ ID NO: 808605 - DNA, 120 bp, Artificial Sequence
  ENSG00000251867_9 (sequence is synthesized)
tgaatcacgaactgataaaatgctccagataattgttgactaaaaaaaatacggcaggacaaattttttacattaatacatatgtgcagaaaatgagaaatatacatgaactctttacag

SEQ ID NO: 808606 - DNA, 120 bp, Artificial Sequence
  ENSG00000251867_10 (sequence is synthesized)
ttatagattaatgggaagggttatgttaaaggcttgaacctcctaaataatgtattaatgtaaataaagttatatatgttttatgaagaacaggtgttacaatttttagacctagtttta

SEQ ID NO: 808607 - DNA, 120 bp, Artificial Sequence
  ENSG00000251867_11 (sequence is synthesized)
tgattcttattctcttcaaaagttctttttctatttcaaaactaagagcaatatgtaaagctttgtataatatggaatatggtatgtatttcaaggttactttaaaaagcaagctttggc

SEQ ID NO: 808608 - DNA, 120 bp, Artificial Sequence
  ENSG00000251867_12 (sequence is synthesized)
tggtcccaaggtagtgaattgtctcaattggttattcacagttggttgcccgttgtaccactctttccccacttccacttgactagtcttttaaaaataaataaatatttaaataaacaa

SEQ ID NO: 808609 - DNA, 120 bp, Artificial Sequence
  ENSG00000247516_0 (sequence is synthesized)
ggggatgactcagcaggacagaagggagggaagctccagacgccacggccctcttcgagatgaaagtacctcccatcctaagggactggcgttccaggaacagctgcgctggctgagccg

SEQ ID NO: 808610 - DNA, 120 bp, Artificial Sequence
  ENSG00000247516_1 (sequence is synthesized)
gctcagtgaggcggagcggccaagccttcagtccactcccactccccgatgaaaaacccaagaccgggtagcgcagcccctccgcgcacgcgtaacacgaggagacaccgcccacacgcc

SEQ ID NO: 808611 - DNA, 120 bp, Artificial Sequence
  ENSG00000247516_2 (sequence is synthesized)
agacgcgctgtgattggccccagctaccctcggaccgagattcctattggtcccaggtgtcgagcatgcgcactttggtcgtgggcgcgtgtgtggaatgggaggaggtcgcgctgtcca

SEQ ID NO: 808612 - DNA, 120 bp, Artificial Sequence
  ENSG00000247516_3 (sequence is synthesized)
tgggcgtccttggcctgcgccacccagagatgataaatagccaaagacgtcaatggcacccatggacatagtaagcatagtaggagctgaaaaactagaagcaatgacaatgtcaactat

SEQ ID NO: 808613 - DNA, 120 bp, Artificial Sequence
  ENSG00000247516_4 (sequence is synthesized)
tttgagcaaaaagaagcagtgtcttcggaacatttgatcataaaaccagaaattaaaggatgagaaaaacatttttctgaagcttatactttcacatttcctagagagcatatttgtgtg

SEQ ID NO: 808614 - DNA, 120 bp, Artificial Sequence
  ENSG00000247516_5 (sequence is synthesized)
gatgggggtgggtaaacactcaacaaaagtttctttaaaaagaagaaaccatcctggtttgatgtaatcaatggttgcccactgctcccttcctgtgcctgtgacccttcccaaactgcc

SEQ ID NO: 808615 - DNA, 120 bp, Artificial Sequence
  ENSG00000247516_6 (sequence is synthesized)
ctgttgcttgcaggctcgcctgagctgaaaggcagccctcacatcccgtcggcacctccctggggccttctttacaccctggagaacttcacagggaatctgtgtctgtaacacaaaggc

SEQ ID NO: 808616 - DNA, 120 bp, Artificial Sequence
  ENSG00000247516_7 (sequence is synthesized)
ttcctggtccagatgtagatactaaggctgactggttatttaagtcctgcggacttactctgccaaaattatttaatcatgtaaaaataatttataattcttataaagtatccccttcat

SEQ ID NO: 808617 - DNA, 120 bp, Artificial Sequence
  ENSG00000247516_8 (sequence is synthesized)
aaatagttattgtcaaagctatttttcttatgtttatgaaagtgcttataaaattcatgttttatgaggctggagatgtatattttgtaatttcattctgatatttgttaatattcgctt

SEQ ID NO: 808618 - DNA, 120 bp, Artificial Sequence
  ENSG00000247516_9 (sequence is synthesized)
ccaatgctggttttgtttgatgagactgacattgcctaatttcaagctttttgaatgtgtattctttcagggcaagtatgaaataactagtaaaaaatatacaaatatgcttaacaataa

SEQ ID NO: 808619 - DNA, 120 bp, Artificial Sequence
  ENSG00000247516_10 (sequence is synthesized)
gtagactttctcacattgattacttacaacagctttatgtggggtgaatcagatgcctgtattacagaagcatctaatgcaaagcaaaataaaaacacttgcatgagcgcacagaggtag

SEQ ID NO: 808620 - DNA, 120 bp, Artificial Sequence
  ENSG00000247516_11 (sequence is synthesized)
gtgtggaagaaagtgaaacactattttaggttttagttacactctgctgtggtgtgctgcctagtatttgcaggttaatgcaaatactaggggttatgaattgtttctaagtttattatt

SEQ ID NO: 808621 - DNA, 120 bp, Artificial Sequence
  ENSG00000247516_12 (sequence is synthesized)
aaaaatagccttgcttcatttcttcctaaaatggagacaaatatgtatagtgtctgtgttaccagtatgtgtaagagtaatatcttaatgcgtgtaaaatgtttataggaacctgtattt

SEQ ID NO: 808622 - DNA, 120 bp, Artificial Sequence
  ENSG00000247516_13 (sequence is synthesized)
caaagagctatttttgcaagtgacactatccttttaagaaacttttttattcaaactttttcctccatttataactattctattatttcttaatgttcagaacccttttcattatctata

SEQ ID NO: 808623 - DNA, 120 bp, Artificial Sequence
  ENSG00000247516_14 (sequence is synthesized)
aggttaaattttaggtaagtaatgagaaaataataatatgtggagaagaaatgagtgaggagtcgagatgtgtgtcaatcaagaatgagtttgtcagcccttgtattatgattttactcg

SEQ ID NO: 808624 - DNA, 120 bp, Artificial Sequence
  ENSG00000247516_15 (sequence is synthesized)
ggaggggataattattgaaggatgtaatgtaagggcagtgatactatatggtatgtaagactgttaaaatcactgaggtaagctattacttgaactaagcatagaaatagagacagattt

SEQ ID NO: 808625 - DNA, 120 bp, Artificial Sequence
  ENSG00000247516_16 (sequence is synthesized)
ttaatgcatttaattatcaaaatatctaaattaaagatttgatgtggttgttcactggaaacaaatggcagacaaacagaatatttcttggaatcataaatgacatcatcctgtctccaa

SEQ ID NO: 808626 - DNA, 120 bp, Artificial Sequence
  ENSG00000247516_17 (sequence is synthesized)
ggtgacctctgcattccacgggacatgatgctggccttctacagtgctgatcagacctagtaagcacaaagtcgcaaatatcccagacaccctgaccacagacacacatgtataccaagg

SEQ ID NO: 808627 - DNA, 120 bp, Artificial Sequence
  ENSG00000247516_18 (sequence is synthesized)
acaggaataaatacctaaaactgtaaggcactgccaccttcttagatgtcttggtgagaggtccactgttcagagggcacactgagatataaggcgaaggcctttttggatctgtagtgt

SEQ ID NO: 808628 - DNA, 120 bp, Artificial Sequence
  ENSG00000247516_19 (sequence is synthesized)
gctacctctttaatgggaaatcttagaggctatcagtattgaatggtgaccagaggaaaatactgctctacatataggtctgggctgtcatacaaactgatctgctactggggcctcatg

SEQ ID NO: 808629 - DNA, 120 bp, Artificial Sequence
  ENSG00000247516_20 (sequence is synthesized)
acctagcagatccaaaagtattcaacatgtttgtggcagatgcaaatgctgtttagaaccttcgagaggtcgctgtagaagcacaatgcaaaacttcaggattttggagcaaaactttgt

SEQ ID NO: 808630 - DNA, 120 bp, Artificial Sequence
  ENSG00000247516_21 (sequence is synthesized)
tgatagctcctggtgtgctactggaccttagtagagatagaatgtctgactctgagccactaagtaaccattcaacctcttctgcccttcaagaactgggaaatgtctgaaaaaacaagt

SEQ ID NO: 808631 - DNA, 120 bp, Artificial Sequence
  ENSG00000247516_22 (sequence is synthesized)
aatgaaacgtgtgtatagcagcactccattacaagttgtagttttatatacgagattggtctcaagcaagacctaaaggtaaaagtaagaggctcagatttgcatggctcctcctcttgc

SEQ ID NO: 808632 - DNA, 120 bp, Artificial Sequence
  ENSG00000247516_23 (sequence is synthesized)
tgcattaactgctgtctctcaacgcaagcatactgtaacatattgatggaggaggaaaatgctgagtctcgtttactgataattctatgtaacatgctggcatcacctaaagtggagaac

SEQ ID NO: 808633 - DNA, 120 bp, Artificial Sequence
  ENSG00000247516_24 (sequence is synthesized)
tggtcgtgggcgcgtgtgtggaatgggaggaggtcgcgctgtccatgggcgtccttggcctgcgccacccagagatgataaatagccaaagacgtcaatggcacccatggacatactctg

SEQ ID NO: 808634 - DNA, 120 bp, Artificial Sequence
  ENSG00000247516_25 (sequence is synthesized)
gtccactgctactgcggctctggcaggactagggaggtgccccgtgtctcagatggtgcagcctccatccagctgtgtccctgaatgactagagcacagccactggtgacctgtggtgga

SEQ ID NO: 808635 - DNA, 120 bp, Artificial Sequence
  ENSG00000247516_26 (sequence is synthesized)
cgtagaatgtgggtaagagataaacttatgctacaccgctggggttcaggggctaatttgttaccacagcatagtcaaccttttctagcaccccattctgtctaaatttagtagtcctac

SEQ ID NO: 808636 - DNA, 120 bp, Artificial Sequence
  ENSG00000247516_27 (sequence is synthesized)
cccactccatgcctccccaacccttcccctggctttagtttctttgtagcactggtccccgcatgacctgtcgttgctttactttctcgcatcacttctccctgcctccagcacatgcac

SEQ ID NO: 808637 - DNA, 120 bp, Artificial Sequence
  ENSG00000247516_28 (sequence is synthesized)
taaaatttaaactccatgcctggacaaaatcaatgtttgttaaataaagtctgccagttctgtttgcgatttttcagaaacaaggaaagaaatcctatataaagttgatctgtgctttgg

SEQ ID NO: 808638 - DNA, 120 bp, Artificial Sequence
  ENSG00000247516_29 (sequence is synthesized)
cttttttcaaatggctgtgcattttttatgatgatgaatataaagtatttagcagaaatattttttattaaaattgttgagcttatggaatcaatgtagcagcctatgtgaaagaaacac

SEQ ID NO: 808639 - DNA, 120 bp, Artificial Sequence
  ENSG00000247516_30 (sequence is synthesized)
tgtgctagagagttgtctttctgccacgtgtaatcattacatttaactcaagttctccatgggagatccatgcagagatatgaaaataggacggacgtctcttccttcttaaaagttgct

SEQ ID NO: 808640 - DNA, 120 bp, Artificial Sequence
  ENSG00000247516_31 (sequence is synthesized)
ccagattttggcttcaagtgcttcctgttttttgccctcccttatccctgggagttccctctatttactttcacaaggactcttggtataaaagatatttgtatacctgggtgtgtggga

SEQ ID NO: 808641 - DNA, 120 bp, Artificial Sequence
  ENSG00000247516_32 (sequence is synthesized)
aggaattgaaggcaaaggtagcagtcatttcaagctgaacatgttaagtggtaatcgagcacttggtttttgtagtacctcctgtggccatctccacagtgtcatatttgaaagaaatct

SEQ ID NO: 808642 - DNA, 120 bp, Artificial Sequence
  ENSG00000247516_33 (sequence is synthesized)
tgtgtaagcattggtctaagggtcactgactgtgaataatgaatgcggtgacagcatggccatcttagagacaggcaggccagatattggttactttgattttagttgacaaagtttatt

SEQ ID NO: 808643 - DNA, 120 bp, Artificial Sequence
  ENSG00000247516_34 (sequence is synthesized)
tgcttttaagttttaaagcaatacagcagtgtgaacttcaagttgtaaactttcatttagaaagtttaaaatttagttgaaatataaaatattctgaatctgaataaaaagttttaaaac

SEQ ID NO: 808644 - DNA, 120 bp, Artificial Sequence
  ENSG00000247516_35 (sequence is synthesized)
ggcaaagaactatctgatgatgaaacgacccagactcaattttcccaacttcagagccttttctatccatgatccctcattcctgcctttcttgccattcctgtcctgtctctcaacctg

SEQ ID NO: 808645 - DNA, 120 bp, Artificial Sequence
  ENSG00000247516_36 (sequence is synthesized)
acaatgaagcatttatatcggatcaaatgaaactcgcatactttctgtgacttaaaatcagaagtttcccttgtcaatttcccttgccacctctaagaaaagcttatctatgttaagttc

SEQ ID NO: 808646 - DNA, 120 bp, Artificial Sequence
  ENSG00000247516_37 (sequence is synthesized)
ccatccaagaaaacccttcagcagccccattcttcaggaaccgtgaaggactatggcaaaggtaaacactttctgtgggtagaactccaaaaaatgcccccaagtgttccttttcctgga

SEQ ID NO: 808647 - DNA, 120 bp, Artificial Sequence
  ENSG00000247516_38 (sequence is synthesized)
aggaaattatcaggggtatatatctatgtacataagctaatagattgtgcagataatccaaaatgtcaaaggaccagactggaaaatgggtaacaaagaggtgtggggaagagctgtgta

SEQ ID NO: 808648 - DNA, 120 bp, Artificial Sequence
  ENSG00000247516_39 (sequence is synthesized)
tactgtgacaatagtcacggtataaaagtatttttgtcccaccgtaaatggtatgaaagaaatgctggggtatagaatgggatatgtagaagggattaagtcagtaattattaagattta

SEQ ID NO: 808649 - DNA, 120 bp, Artificial Sequence
  ENSG00000247516_40 (sequence is synthesized)
gaaggggagtcacctatgcttttaaaaacaatgtaatgtagagcttgcctccagaaaaatacatgtatatggtacatactttacactttctgaaggttcatgaaccttccaatcaaaacg

SEQ ID NO: 808650 - DNA, 120 bp, Artificial Sequence
  ENSG00000247516_41 (sequence is synthesized)
atgtctacaaacctcttagattaaaggtccaaaacatcattttcaatagcacagatctgataagaattggaaatcaactaactacctgattttaaagtgagcaaaaaatgctttaaagct

SEQ ID NO: 808651 - DNA, 120 bp, Artificial Sequence
  ENSG00000247516_42 (sequence is synthesized)
agcctccaagtagacagactaattaactgagtactttaccatattagaatctatccagtctctttcccagtctgttcctctttgccttctccgctctctaaaacaaaagaaccagaacat

SEQ ID NO: 808652 - DNA, 120 bp, Artificial Sequence
  ENSG00000247516_43 (sequence is synthesized)
tttatgaataatcttagagatcaactcacctaacccccctctccctgagttttactgatgaataaacagaccccaaagataaagtgaggcaccagcatagtgtgacaaaatcagacataa

SEQ ID NO: 808653 - DNA, 120 bp, Artificial Sequence
  ENSG00000247516_44 (sequence is synthesized)
taaggacacttgaaactcattgcacgtggtactctatggaaggaagtgtcaatgatgtggaaaacaactccgatagagagaacatcatgagagcttggaatgattacatcattggcaatg

SEQ ID NO: 808654 - DNA, 120 bp, Artificial Sequence
  ENSG00000247516_45 (sequence is synthesized)
gaaatcataaaagaagttgtgcatatggcaaaaataaaaaggtgggggtaaagggtttcaagatatgggtcttggattaattcaggacctaataaacaccacaccagagaaattcacaat

SEQ ID NO: 808655 - DNA, 120 bp, Artificial Sequence
  ENSG00000247516_46 (sequence is synthesized)
ggatgatttgatggagatgagtgctttcaaaccagtgccagatgatgaggaggaaggcatagaagatgcagggccaggaaacaagttgactttagacactctgggaggaaggatccagtt

SEQ ID NO: 808656 - DNA, 120 bp, Artificial Sequence
  ENSG00000247516_47 (sequence is synthesized)
attcaagaatgcttttgacttctttcatatgacatggacccttctacaatacaggcaataagattaaagcaaatgataaagaagaattagtactgtataaaaacatttttagagaaatga

SEQ ID NO: 808657 - DNA, 120 bp, Artificial Sequence
  ENSG00000247516_48 (sequence is synthesized)
gaagacaggaattcagatagaaattatgatgtatttctgtaaagttacactgagtgtgcctgcttcttctgactcctcttccatctcctccatatcttccacctctatcacccctgagac

SEQ ID NO: 808658 - DNA, 120 bp, Artificial Sequence
  ENSG00000247516_49 (sequence is synthesized)
ttccacctctatcacccctgagacaacaagaccaaccccttgtcttcctcctcctcagcttagttgatgcgaaaacaacaaggataaagatctttatgatgatccacttccacttaatga

SEQ ID NO: 808659 - DNA, 120 bp, Artificial Sequence
  ENSG00000247516_50 (sequence is synthesized)
ttttaagacaatttgtattctgccatcaggcttcctaagctaccttgtggatccacatgcaacagaatcagaactttcaaagcagtcaccaaacatgtaactgacaacttaaaaaaaaaa

SEQ ID NO: 808660 - DNA, 120 bp, Artificial Sequence
  ENSG00000247516_51 (sequence is synthesized)
aattcaaaatgaaattaacaagcaccaagggtgttattattctcttatatttcttttagcagcattccatcactatctgcttcttccacttcagaaacctgcaaaactgctgtagaatat

SEQ ID NO: 808661 - DNA, 120 bp, Artificial Sequence
  ENSG00000247516_52 (sequence is synthesized)
caagcagttgttctagtgaagtcaattattttttagctcactgcaaaacatctgttgacccacgttttagtcttctgttcactctcttccaagtatgtacttgggaaaacaacaggacat

SEQ ID NO: 808662 - DNA, 120 bp, Artificial Sequence
  ENSG00000247516_53 (sequence is synthesized)
caaccaggcaagctcattaccattttccacagataaatctttacagtcggtgtgaaaaatctcaccctgaactatggtggctgtagtgaaaagaaccatggacagacacaagtatgactt

SEQ ID NO: 808663 - DNA, 120 bp, Artificial Sequence
  ENSG00000247516_54 (sequence is synthesized)
gtgaacatgattcataaagcacccagagccccagtgtggcaacaccagatgaatgaaaaaggttctaccatgttatcaaaatcatgtcattctcactttccctcaacagtacctaaattt

SEQ ID NO: 808664 - DNA, 120 bp, Artificial Sequence
  ENSG00000247516_55 (sequence is synthesized)
taaaaagaatataagcataatgatgaaatactacaaaagtatcaattgagatcacactgcactcaatgaaaattatccatgtttatgaaaataaagatctgtatccaaaaaaatagcaaa

SEQ ID NO: 808665 - DNA, 120 bp, Artificial Sequence
  ENSG00000247516_56 (sequence is synthesized)
ccttcagcagccccattcttcaggaaccgtgaaggactatggcaaagtgctgccctaactggacctggggagtttcatcatactttcttcaatacaaagattgtgaatacctatgaactc

SEQ ID NO: 808666 - DNA, 120 bp, Artificial Sequence
  ENSG00000256072_0 (sequence is synthesized)
atggcctgctaagagctcagctatgctgtcagctgggggacaactctgtgaggcttgatgaccacagactttaaaccaaagaccgatccatggtgttcttctattcacagccagaaaaca

SEQ ID NO: 808667 - DNA, 120 bp, Artificial Sequence
  ENSG00000256072_1 (sequence is synthesized)
gaggtctggcaaccaaagggtgaagtcgaaatggctcttctcacttttacttctagcttatctggtttttgcctcttgcattgctttgtcacatgccttctcaagacttgttactcaagg

SEQ ID NO: 808668 - DNA, 120 bp, Artificial Sequence
  ENSG00000256072_2 (sequence is synthesized)
ttgaactggcagtgactccattgtgcaatttggaacacaagaaaaagcatggattttgaagtcagacaaatcatttacttcggttgcattggtgtgtggttcaaataacagatgtcactg

SEQ ID NO: 808669 - DNA, 120 bp, Artificial Sequence
  ENSG00000256072_3 (sequence is synthesized)
aactgttgacttgggtagatgccctgtcttccttattaaactgtgtcttactttgtaccttagtagctaatgcagtgctttgattctagcagatgcttaataaatgctactcatgataaa

SEQ ID NO: 808670 - DNA, 120 bp, Artificial Sequence
  ENSG00000256073_0 (sequence is synthesized)
agaaggggcggggcgatagggatccagagtcttggggatccagagtcttggggctccatgtgagtttgctgtaccggttgtcccggtcacggcatggggcgagcggacactccacgacac

SEQ ID NO: 808671 - DNA, 120 bp, Artificial Sequence
  ENSG00000256073_1 (sequence is synthesized)
cccccgcccccggctgcagggtttggggtccaccggggcgcatttctgatcccagtggctcttcgggtgctcttggccggaagaactcccagacctttcactcctggcctggccgatcca

SEQ ID NO: 808672 - DNA, 120 bp, Artificial Sequence
  ENSG00000256073_2 (sequence is synthesized)
cgaagactcgggccccggcgcgtccaagcagcacaatgagtagttcttgacccgaggtcgccctgaaggtgtcgcatgaagagcttgcttcacacacaacaggattcgatactttgccaa

SEQ ID NO: 808673 - DNA, 120 bp, Artificial Sequence
  ENSG00000256073_3 (sequence is synthesized)
aaccagatcgactggtctggtagcagcctgtcactccagactgtcctccaccccagacttccgcaaactgatgggctctttgcgccgtgcagggtgggaggagaagaccaaacgaagtaa

SEQ ID NO: 808674 - DNA, 120 bp, Artificial Sequence
  ENSG00000256073_4 (sequence is synthesized)
cgtctgtaaaaccccttcctggacagcgtaaggcctccacatctaagttcctgtcattaaaatggagacagcaaagccgaccctatccagtccttgggactgttatgaacagaaaatgat

SEQ ID NO: 808675 - DNA, 120 bp, Artificial Sequence
  ENSG00000256073_5 (sequence is synthesized)
gcaatgtatgaaaaactgctttgaggagaaaaacaacacagtgtgtttttggaagatgtgattgatttgtaaaccgcattaaatgctctgaaataaaatgaaagtaaaaataagtaaaaa

SEQ ID NO: 808676 - DNA, 120 bp, Artificial Sequence
  ENSG00000256071_0 (sequence is synthesized)
aaattaacacaggtcccagggctgagattttccatgtttagtttcaacccaaaggaaaattttgttagaaagttgaaagagtgtgactatttttaaataacgagacgtggggccatagtg

SEQ ID NO: 808677 - DNA, 120 bp, Artificial Sequence
  ENSG00000256071_1 (sequence is synthesized)
tcagcacagtcaaaaaggtaaaaaacatttgtatcttgctttcttccaccctccccttcaattcagatggatagactgcagaagaaaacaagggaagttaacacttcattcagagcttgc

SEQ ID NO: 808678 - DNA, 120 bp, Artificial Sequence
  ENSG00000256071_2 (sequence is synthesized)
ccatatcttgcatcacacttggatggtgtaatggaaataacattagactgggagtcaggagacttgtgttccagcagaagggaaaaagaagtctcagagtggaatattgcaacatcccat

SEQ ID NO: 808679 - DNA, 120 bp, Artificial Sequence
  ENSG00000256071_3 (sequence is synthesized)
attctcccgagaagggctgctggattcccttgctgatgaggaattaccatggggtcaccttgctacatggttcatcactgtcatccctcccttcagaaaaattaaatcattcaaaggtca

SEQ ID NO: 808680 - DNA, 120 bp, Artificial Sequence
  ENSG00000256077_0 (sequence is synthesized)
atcaggagatggggaggcagaggaaagaaaggagagatctgtggatcccgtgagcaccccaaattggaaccactccttaccgtgcctcaaggaagcaacagacctccaaactgcatggtg

SEQ ID NO: 808681 - DNA, 120 bp, Artificial Sequence
  ENSG00000256077_1 (sequence is synthesized)
tttaaagatataagagtaagtgttctttatattattacatggcaactccaatgcagtactctgtaataaagcaccctgatatttctacagaaacatttattaaagtttacattgaataaa

SEQ ID NO: 808682 - DNA, 120 bp, Artificial Sequence
  ENSG00000256077_2 (sequence is synthesized)
gtttggggttgaggggctcactggccagtttttccatgtttctcaaataaaactctggtgtcatcaagaaacatggtggagggagacatgaagactttagagacaggaaccactgcagaa

SEQ ID NO: 808683 - DNA, 120 bp, Artificial Sequence
  ENSG00000256077_3 (sequence is synthesized)
caagcaaaaagaatgctgcctgatttcctgacattaacaatgaacacagccagactcaagaggaggaagctactgggaccacggcagtcaaggaaacaccatcaacacccagtcttcctc

SEQ ID NO: 808684 - DNA, 120 bp, Artificial Sequence
  ENSG00000277558_0 (sequence is synthesized)
tagcagagaatcaccaacttttcctttggttgttaatgtttcaccatcacagtttataaagtggactgtcactttatcttctgagctgctccgcgcccctgccgacacgctcagcggccg

SEQ ID NO: 808685 - DNA, 80 bp, Artificial Sequence
  ENSG00000277558_1 (sequence is synthesized)
gctcgcctccgcgctccggcccggtccccggctcctcagcaggccgctggctccagcgcgggacccggcgtggtgcagcc

SEQ ID NO: 808686 - DNA, 120 bp, Artificial Sequence
  ENSG00000277558_2 (sequence is synthesized)
ctgtatacctagcctatactatttgtagaatacttggcataaacgtacatatgtcataagcattgaagttttttgttacatctgggattttctggcttgagtgggatgtgaattcataaa

SEQ ID NO: 808687 - DNA, 120 bp, Artificial Sequence
  ENSG00000277558_3 (sequence is synthesized)
tgtgatggttttgtgggggaactgagagaacttggcataaacaggtatacttactgatcctctctggatatttaagtgtggtaattcattcttatcactcaataaagtataggcattata

SEQ ID NO: 808688 - DNA, 120 bp, Artificial Sequence
  ENSG00000178457_0 (sequence is synthesized)
cagacatgtatctcattatcttctgcaaagatctatttgtttagccatgtgcaaatattgccctaaaatgttcacaggttccaggataaccagatgactgaggaatgttgaagattgcag

SEQ ID NO: 808689 - DNA, 120 bp, Artificial Sequence
  ENSG00000178457_1 (sequence is synthesized)
tgatggaagtgtctcagtcagcctggaagactgtatggaaggaggttgcctggccacactgtcatgtccccctctccctaaaaaagggacacatttgcctttgtgcaaggcaacacatac

SEQ ID NO: 808690 - DNA, 120 bp, Artificial Sequence
  ENSG00000178457_2 (sequence is synthesized)
ctgtgtatatactttggtctatgtattctgttatttaacattctaataatgttgatgaccttaaaatatgtttgacaatgatccttgtaaatcattattattctgccttctgcaagataa

SEQ ID NO: 808691 - DNA, 120 bp, Artificial Sequence
  ENSG00000178457_3 (sequence is synthesized)
ttgtaaatcattattattctgccttctgcaagataagaattatgggccaggtatggcacttaacgcctataatacaaacattttgggaggcccaggcaggaggattgcttgagctcagga

SEQ ID NO: 808692 - DNA, 120 bp, Artificial Sequence
  ENSG00000177335_0 (sequence is synthesized)
atgcgtggtatcaagaggtgcattgaggcgctcctgcagcctcctcccggcacgggactcctcacaacccccagcctcagcttccctgacagggcaggggctcactcttctccactccgg

SEQ ID NO: 808693 - DNA, 120 bp, Artificial Sequence
  ENSG00000177335_1 (sequence is synthesized)
gccaggaacgcagcctgcttgccttttgtccaattgggtgctctttctttgcgactgatacaaagtgggaacaaactccgcttccggtgatgcccgggccccaggaggctgggggagaag

SEQ ID NO: 808694 - DNA, 120 bp, Artificial Sequence
  ENSG00000177335_2 (sequence is synthesized)
catcatgggagccctagccagggcacagaaatgacaggcctggcccacaccacaggatggctggtggccgcaggagctctgcctcttggtgaccatccagaggctctctgacaaccctac

SEQ ID NO: 808695 - DNA, 120 bp, Artificial Sequence
  ENSG00000177335_3 (sequence is synthesized)
tcagatgttccctggagccacatggcaagagttctgccagaagagccatgagcctggcactctgtgggttctggtccctgggggggcacccgtgccccaggagcacctccccaaggccat

SEQ ID NO: 808696 - DNA, 120 bp, Artificial Sequence
  ENSG00000177335_4 (sequence is synthesized)
tgcacgctgcccagccttcaacctgaactgcccccagcacttccgagccccgacccctgcagctgtgagggaagccccgacctctgccctggccacatccttcccctgatctcatggctg

SEQ ID NO: 808697 - DNA, 120 bp, Artificial Sequence
  ENSG00000177335_5 (sequence is synthesized)
aaaagccacaccagaattcctgcaattcagtgaggcagctcttcaaaaccaagcagctggtgacgcacagggacagaggggcccaggggctgctggctgccaggaccaccgcattgcaga

SEQ ID NO: 808698 - DNA, 120 bp, Artificial Sequence
  ENSG00000177335_6 (sequence is synthesized)
cctggcaccccagggactcactgccaaagacgctcactttctgggagacacagaccccatccaggaaggggcacgagaccacgctgcaggaggccccttccaagaccgccaagcatctgt

SEQ ID NO: 808699 - DNA, 120 bp, Artificial Sequence
  ENSG00000177335_7 (sequence is synthesized)
agcagcgcagaccctgagctgggagagagggcaagaaaacacacccctggtggagatttaagatgctaatgacacatgcgacgtatgagcaagcaggtgcagctactgcacgtgtgcacc

SEQ ID NO: 808700 - DNA, 120 bp, Artificial Sequence
  ENSG00000177335_8 (sequence is synthesized)
cagaggacccccccagaacatgcttcctagcaacacctctgcccacccgctgattctctcggcaccacgggaaccaccttctctactctcactgaacacccctgggatgtatctgtaaaa

SEQ ID NO: 808701 - DNA, 120 bp, Artificial Sequence
  ENSG00000177335_9 (sequence is synthesized)
attggaacacctttcggctagaaaccagaggaagccgctcatgacacccgggagctcacagaggctctgaagtttctattcaagaaaacaactccagatggggctgatctggaagacaag

SEQ ID NO: 808702 - DNA, 120 bp, Artificial Sequence
  ENSG00000177335_10 (sequence is synthesized)
taacatcttccttttcttggtgctcgcctgccgtgctctaggtgcttttagagatgctggtctgtgtgctagggaagcgatgaaccatactgttagtctattaaacataactcaacctgg

SEQ ID NO: 808703 - DNA, 89 bp, Artificial Sequence
  ENSG00000177335_11 (sequence is synthesized)
ctcagcctctcaaagtactgggattacagtcatgagccactgtgtctggcacaagcaaatattaaaacaatgaaagtacaatggaatag

SEQ ID NO: 808704 - DNA, 120 bp, Artificial Sequence
  ENSG00000177335_12 (sequence is synthesized)
cagaagacaagagtgcgagccttctgtcatgcccggacagggccactacagggctccttggtctagcggtagtgccagtgcctggaaggcacctgttacttagcagaccaggaaagggag

SEQ ID NO: 808705 - DNA, 120 bp, Artificial Sequence
  ENSG00000177335_13 (sequence is synthesized)
gtagtgccagtgcctggaaggcacctgttacttagcagaccaggaaagggagtctccctttccctgaggaagttagagaagactctgctccagcacctcttgtggagggcctgacatcag

SEQ ID NO: 808706 - DNA, 120 bp, Artificial Sequence
  ENSG00000177335_14 (sequence is synthesized)
gatgctgtgcttcagtggtcacgctcctgatccactttcatgttccgccctgtacacctggctccgccttctagatagcagtagcagaattagtgaaagtattaacgtctttgatctctc

SEQ ID NO: 808707 - DNA, 120 bp, Artificial Sequence
  ENSG00000177335_15 (sequence is synthesized)
attaacgtctttgatctctccagaactacatagaagaaataatgacgtaagctgtcccctctctctctccgcctcggctaccaaatagggaagggccccctgtctggtggacacatgact

SEQ ID NO: 808708 - DNA, 85 bp, Artificial Sequence
  ENSG00000177335_16 (sequence is synthesized)
tgtcttaccctgccctcttgccttatatacaataaataacggcacggccaggcattcagggtcactaccggtctccacgccttgg

SEQ ID NO: 808709 - DNA, 120 bp, Artificial Sequence
  ENSG00000177335_17 (sequence is synthesized)
ctaccaaacgctgggaatatgccagacctgtgcccgtggaagactctggcctcccagcacacctccaggaacaaactccctggcccgcaggatagggatagcagccccaaccgtcaatac

SEQ ID NO: 808710 - DNA, 120 bp, Artificial Sequence
  ENSG00000177335_18 (sequence is synthesized)
aaagggattttactgagtgggctcatgggttctttaagttccccctcttaacgatcaacggtaattcaaacgtcccaaaaggagaaatgctttcttagcatatcttttacctggagtatt

SEQ ID NO: 808711 - DNA, 120 bp, Artificial Sequence
  ENSG00000177335_19 (sequence is synthesized)
tccccttctgcctttacagcaatcatgccagttctaccacttttgcaagaaagctccaagagagtcagtgtagctgaaactttgtcactgggtcacctatctagtccatatgtctgcagg

SEQ ID NO: 808712 - DNA, 120 bp, Artificial Sequence
  ENSG00000177335_20 (sequence is synthesized)
aattatactgataaatggacaactcaccatgcaatcaatctcccgctctatcctgttccctgaccggcatggtttctacttcctgtcagcacaactaggacgtctggtttctgctgggct

SEQ ID NO: 808713 - DNA, 120 bp, Artificial Sequence
  ENSG00000177335_21 (sequence is synthesized)
ctcatgggaagcctttaatcactctagctcaatatatcctctggggaccatcaacatttcctattaaagataactacacctggccgagcgcggtggctaacgcctgtaatcccagaactt

SEQ ID NO: 808714 - DNA, 120 bp, Artificial Sequence
  ENSG00000177335_22 (sequence is synthesized)
cagcagggcccagaggaagactgaccccaggctgagcaggagctgtacgcacagggcccaggggctgctggctgccaggaccaccgcattgcagaggtctcccttgcagcaagagatctg

SEQ ID NO: 808715 - DNA, 120 bp, Artificial Sequence
  ENSG00000177335_23 (sequence is synthesized)
aaccaccttctctactctcactgaacacccctgggatgtatctgtaaaaattggaacacctttcggctagaaatggaatcatgatatgttgcctggctggtcttgaactcctgagctcaa

SEQ ID NO: 808716 - DNA, 78 bp, Artificial Sequence
  ENSG00000177335_24 (sequence is synthesized)
caatgaaagtacaatggaatagaggtaggtaaatgaagttatgctgtgtaatgttctgaattgttcatgagggcacaa

SEQ ID NO: 808717 - DNA, 120 bp, Artificial Sequence
  ENSG00000177335_25 (sequence is synthesized)
cagggtgctagtgcacagacaaacttcagcgaatcagagcagccctcggactcctcaccctcctggggatcgaatgagtcctgcacagcagcaaagccagaacatccggctctccatctc

SEQ ID NO: 808718 - DNA, 120 bp, Artificial Sequence
  ENSG00000177335_26 (sequence is synthesized)
ccaccctgtcctcagcacagtcacccaaaggagaactgtctgcctcacgcccccaccccagtccccattcctccctcccatccttccctgcaattctcacccagagccccatggctgtac

SEQ ID NO: 808719 - DNA, 120 bp, Artificial Sequence
  ENSG00000177335_27 (sequence is synthesized)
tgcacctcctctccttagcgcccccacccaggaccctcccaggcctggtccacccctcctcactttcctccctctggctgattctcagccacttgccctgcaggcttgccagagagagga

SEQ ID NO: 808720 - DNA, 120 bp, Artificial Sequence
  ENSG00000177335_28 (sequence is synthesized)
aggtggggcagggagaggccctgccctcagcggctcctcccctcaggctcttcctgactggcccagaacaagggtgggttcctgaatttccatttcacaggaacttgctactggagcaat

SEQ ID NO: 808721 - DNA, 120 bp, Artificial Sequence
  ENSG00000177335_29 (sequence is synthesized)
ctgctgtctcgcccttacaagcagccggccctgaatcctctctctcagggcgtcctatctcttctgcatcaaactttcaaaatgttctttctcctttgcaatacattgctctgtgctgca

SEQ ID NO: 808722 - DNA, 120 bp, Artificial Sequence
  ENSG00000177337_0 (sequence is synthesized)
gcaaatgtcagcgccagcccagtcaaaagagcttgaaacctaccaagccggaggactgtgctgtgcctctctcgcccacattttccccaagcactctcaggaacctggcaacagactgag

SEQ ID NO: 808723 - DNA, 120 bp, Artificial Sequence
  ENSG00000177337_1 (sequence is synthesized)
tgtctgttccacggatgtaaccacagcacacgcgtggctcacgatggatatctgagagccagcgaactttctttacctcctagtatcatttcatgaaaattagtagcacctgcacaatgg

SEQ ID NO: 808724 - DNA, 120 bp, Artificial Sequence
  ENSG00000177337_2 (sequence is synthesized)
ggccttggagacaggaataaaaggaaaaatctggaatggaatcacatgacgcaacaggctatgaagactccctgcccggctgctatatgtctggtaaacagaataaatagtacttgagca

SEQ ID NO: 808725 - DNA, 120 bp, Artificial Sequence
  ENSG00000177337_3 (sequence is synthesized)
acagcagctgcccctgcaaatgtcagcgccagcccagtcaaaagagcttgaaacctaccaagccggaggactgtgctgtgcctctctcgcccacattttccccaagcactctcaggaacc

SEQ ID NO: 808726 - DNA, 120 bp, Artificial Sequence
  ENSG00000177337_4 (sequence is synthesized)
gatcaggcactgctgtctgtctgttccacggatgtaaccacagcacacgcgtggctcacggtactagtgtgataaatgcttgttacatgaaggcgtgaacagggatgagaagagacttcc

SEQ ID NO: 808727 - DNA, 120 bp, Artificial Sequence
  ENSG00000177337_5 (sequence is synthesized)
tggagaaacaaaaggactaacaatcaggaaggggaggtgatcggggcaggagtaaagtggacacctcagcaaagccattcgctgtgatctctgattgtgcagtgtcatgtcctgtcacca

SEQ ID NO: 808728 - DNA, 120 bp, Artificial Sequence
  ENSG00000177337_6 (sequence is synthesized)
gagccccctcgtgtttgatgttggccaatgccgccagcatgatctagcaggccaaatcctaatctaccattctctgacaccagctggtcccctgggtcgtccacccgatgtcccccattc

SEQ ID NO: 808729 - DNA, 120 bp, Artificial Sequence
  ENSG00000177337_7 (sequence is synthesized)
tccccacttggcctcccccacaggctctcggcaaaggaccgtgggaggcacctgtgacactgcccttttcctgtgcagctgtttttcttcttcattcttttcactcctcgttactctttt

SEQ ID NO: 808730 - DNA, 120 bp, Artificial Sequence
  ENSG00000177337_8 (sequence is synthesized)
ttttttcactctcagcccacacaaaactaggaactttgttattctacttatttttctgtactctgtctgtttgcacacagatggatatctgagagccagcgaactttctttacctcctag

SEQ ID NO: 808731 - DNA, 120 bp, Artificial Sequence
  ENSG00000177337_9 (sequence is synthesized)
gggtagctggttgttttaagatgggaccagggtattgtgcacttattgccaattcttgcttcagtaagtggggtggctgtgcagagtgagtggcctgtgtatgaaccagggtccgtccca

SEQ ID NO: 808732 - DNA, 120 bp, Artificial Sequence
  ENSG00000177337_10 (sequence is synthesized)
tctaatgagagtccggtcaggctgagtcctcaccaagacttcagcgtggattcatcagtaaccttggttcactggcaggcttgctggactttggagaaaaggctgaccctcccccaaagc

SEQ ID NO: 808733 - DNA, 120 bp, Artificial Sequence
  ENSG00000177337_11 (sequence is synthesized)
agcccattgctgccactgccctaggaacagagggcctggagccagggcttgacctggtacaggagcttttgcacaaggccggctcaaacctccaaacctggggaaacaggatgcatggtg

SEQ ID NO: 808734 - DNA, 120 bp, Artificial Sequence
  ENSG00000177337_12 (sequence is synthesized)
aagtgaagaagaaagaaaatgcatccaccgttccttcctgttggtgtcagcacgatgaggaataattacctggatctggaaagcaggcgtgtgggaggctgcaggcccccctgatctgtg

SEQ ID NO: 808735 - DNA, 120 bp, Artificial Sequence
  ENSG00000177337_13 (sequence is synthesized)
tagttaggcacttaatttttcatcctcctccttctctctgccctcccgaaaccgccgttttcaaaggaaaaacagaaaaacgtatctgggtaacccgtgtaatactgtttacatcagccc

SEQ ID NO: 808736 - DNA, 120 bp, Artificial Sequence
  ENSG00000177337_14 (sequence is synthesized)
aatactgtttacatcagcccacttggcccagaaaggataccagctccttactgatgctcagataacagggttagtgcttaaaaaaattatgccttgggccgggtgcggtggctcacgcct

SEQ ID NO: 808737 - DNA, 120 bp, Artificial Sequence
  ENSG00000177337_15 (sequence is synthesized)
agagatctattcaactgatagcagccgcctcttctggggagagcagatctttcagaaagcactggctgcgctgctaatcaaacgcaacattgttctcagcaaggaggaagaatggaaagt

SEQ ID NO: 808738 - DNA, 84 bp, Artificial Sequence
  ENSG00000177337_16 (sequence is synthesized)
gggaggctgaggcaggagagtcgtttaggcctgactgcactccagcccaggcggtggagtgagtctccatctcaaaaaaaaaaa

SEQ ID NO: 808739 - DNA, 120 bp, Artificial Sequence
  ENSG00000237208_0 (sequence is synthesized)
aacagaggtcaacccacaccttgatttcaacttggcaaaaccttaagcagaggactcagcgaacatgtgcttggacttctgaactacagaactgtgagataataaattggtgtaattata

SEQ ID NO: 808740 - DNA, 120 bp, Artificial Sequence
  ENSG00000237208_1 (sequence is synthesized)
agttgctaaatttgtagtcatatattatctgaaatagaaaacaagtgcaatcatttagcacattaataagtatttacttttattcaggaattatgtaactttatttagtatttgcttagt

SEQ ID NO: 808741 - DNA, 120 bp, Artificial Sequence
  ENSG00000237208_2 (sequence is synthesized)
aataattattgtgagtttttgagcatgggaactatgtcttattatcttttttatgctcaatccctatcagaagttgtgtattaaataaatatttgtcaaacaaataaacaaatggtgcct

SEQ ID NO: 808742 - DNA, 120 bp, Artificial Sequence
  ENSG00000277621_0 (sequence is synthesized)
tgagccacggtgcccagccatgtgtgtgggtctgattctagaaggaattatcttgtaagtcctaagggagaggtcagaagctcttccttctccccaccccacccccactccctccaagga

SEQ ID NO: 808743 - DNA, 120 bp, Artificial Sequence
  ENSG00000277621_1 (sequence is synthesized)
ttctctgggtgtgtcagtctgcagtgtggacagaaggacatgcccttcagaatcctaccaacgtgggctcaaatttctatcctgccacttacccgctgtattccctgggtcaacttattc

SEQ ID NO: 808744 - DNA, 120 bp, Artificial Sequence
  ENSG00000277621_2 (sequence is synthesized)
aaacatcttctatgcaattggaggaaaaagattttctctgcagcagtgtaataattaaatgagatcatacatgtcaagtaccacataatcatgacataataaaaccacttaactttccaa

SEQ ID NO: 808745 - DNA, 120 bp, Artificial Sequence
  ENSG00000274090_0 (sequence is synthesized)
aggaacatctcaccaattttaaatcagggagatcacacataaagaaactctcctttccttccaactggtggggttcctcatgtgatggatgtctccaattccaagcaatattacagctag

SEQ ID NO: 808746 - DNA, 120 bp, Artificial Sequence
  ENSG00000274090_1 (sequence is synthesized)
acagctagcagttcagtacctctctgctcagcagtgaaggaaatctaatggaaacttagaaaaagaatgaaaactctatccctagttttctaaggaacacatatggcacagagacaggac

SEQ ID NO: 808747 - DNA, 120 bp, Artificial Sequence
  ENSG00000274090_2 (sequence is synthesized)
tggcagcaaacaaagataaatgaagagtcaccctcagtgaaatcctgactgctgctttaagttctctaccacattttggattttagtgttaggattatttctgaaggagtcttctgaacc

SEQ ID NO: 808748 - DNA, 120 bp, Artificial Sequence
  ENSG00000274090_3 (sequence is synthesized)
atctgtatacccatagttattcaattgtttaactcattttctgagcaaccaagttctcagtgcagagaactcaattatgttgtttgcttttctgatccaccatcttctgtgtgcactcat

SEQ ID NO: 808749 - DNA, 120 bp, Artificial Sequence
  ENSG00000274090_4 (sequence is synthesized)
gataggatgaacatgggatgaaatcatatttgtaatgaattatagaatgatccctgaaggtagagtacttgtaattatatttatatatcttttgtggttcatatctcataagcgatagat

SEQ ID NO: 808750 - DNA, 120 bp, Artificial Sequence
  ENSG00000274090_5 (sequence is synthesized)
ccatgcttatcatgttaatcgtgttattcattggatttaggatctgacttgcctccaccggagactgcttccaagtctgatttttgcaagtcactgaacatttcttcctggtcgtaaaat

SEQ ID NO: 808751 - DNA, 120 bp, Artificial Sequence
  ENSG00000281365_0 (sequence is synthesized)
gggcctggtctcaagacacagtcagttggggatcagaggccacactcatcgtagcagagaggcaggaacagctgggcgagggtccttctgtgacatctactgcatcactgggctctgtga

SEQ ID NO: 808752 - DNA, 120 bp, Artificial Sequence
  ENSG00000281365_1 (sequence is synthesized)
agtgactcagctgccagaactcacacaatattctgcaccaaaacctcacgggaaaaatgcatcacgaacctcagacttaaacagcacaacaggctcctcccaggtctccagctacacaac

SEQ ID NO: 808753 - DNA, 120 bp, Artificial Sequence
  ENSG00000281365_2 (sequence is synthesized)
gtctccagctccacaaacctcaaattagaacagcagcactggctacacccagtctccagctctacacctctaacttgaactacagccaccagctccttcctgggtctccggctccacaga

SEQ ID NO: 808754 - DNA, 120 bp, Artificial Sequence
  ENSG00000281365_3 (sequence is synthesized)
ccttaaacgaaaacagcagcactggctcctccccaggtccccagctacagaccctcaaacaagaagaacagcagcaccagctccacctaaagtctccagctccacacctcaaactagaac

SEQ ID NO: 808755 - DNA, 120 bp, Artificial Sequence
  ENSG00000281365_4 (sequence is synthesized)
ttcagcacccgctcctccccgagtctcaatatctgtgaccctcaaaataaaacagcaggaccagctcctcctctggtcttcagcttcacgaccttaactgtaacagcaccacccgctcct

SEQ ID NO: 808756 - DNA, 120 bp, Artificial Sequence
  ENSG00000274092_0 (sequence is synthesized)
gagcccttcccgaacgccctcagccggcgtgcccgggcgataccttcgcaacccgatccgcgcgcgggccccggatcctacctgcgcgcccctgctccattcgccgtccgggcgcccaag

SEQ ID NO: 808757 - DNA, 80 bp, Artificial Sequence
  ENSG00000274092_1 (sequence is synthesized)
cgggaagtgggggacccctgggtggcccttccctggcccgcgccgcgcggggctttcctgggcgcggagacccagcccgc

SEQ ID NO: 808758 - DNA, 120 bp, Artificial Sequence
  ENSG00000274092_2 (sequence is synthesized)
cccagcacctcgctgggtgtcttgccgcgcgcttcctcccacgccgtagcccgaggtcacgcccagcggagaactctgcagtggatccccttggtctcggaataaaacgcccacgccgac

SEQ ID NO: 808759 - DNA, 120 bp, Artificial Sequence
  ENSG00000274092_3 (sequence is synthesized)
caggcctccaggacctgctcctgcctggcctccgcggcctcttttgcgccggggcagttgcgtttggtgggggagggctgggcgactggaatcctcctccccttcctaacagcccggctt

SEQ ID NO: 808760 - DNA, 120 bp, Artificial Sequence
  ENSG00000274092_4 (sequence is synthesized)
ccaagtgagagtggttgcacattcttcaataaatgtttacccaactcctactccagccacatttggatagtaaaacagcccttcaatcagtaactagtacaatctgtcgggcactgcaaa

SEQ ID NO: 808761 - DNA, 120 bp, Artificial Sequence
  ENSG00000248876_0 (sequence is synthesized)
atttccactgaccaattctcatggagaattgagtaattaatcagtttataaaatctataacaactataaaaatattgaattcattgtgtttttgcccattgatttttgtcaaatatttta

SEQ ID NO: 808762 - DNA, 120 bp, Artificial Sequence
  ENSG00000248876_1 (sequence is synthesized)
atcacaataaacattttaaatttatgaaaggaagaccaaagtacatttggaggaggaaatctctcatttctgtttttgagcattctttctcaggaaacagaacatatttttaaagagaaa

SEQ ID NO: 808763 - DNA, 120 bp, Artificial Sequence
  ENSG00000248876_2 (sequence is synthesized)
catctcaacacatctggtgtgatcttctagttatctagtttaagccaaaaaaggtggcatcatctgtttttctttcatacattttgaaacatgagtttctgaaagctatttcctaacata

SEQ ID NO: 808764 - DNA, 120 bp, Artificial Sequence
  ENSG00000248876_3 (sequence is synthesized)
ctaactgataatgaggaacagtgcgctggctgcccctccaatagtgccaaggtatttcccattagaattgttttcactttggaattgtcagtaatatttttactctaggatagcctattt

SEQ ID NO: 808765 - DNA, 120 bp, Artificial Sequence
  ENSG00000248876_4 (sequence is synthesized)
tcctaacttgaaggagatacatgaatggaagcacagagaaggaagaataaacagattgatatatttacagttatgtggcagcacagcagagaaagatttcaaaaagaaatattagataag

SEQ ID NO: 808766 - DNA, 120 bp, Artificial Sequence
  ENSG00000248876_5 (sequence is synthesized)
aaagtcaatgtcataggtcacagattaaactccttctcctgcaaagcatgcttccctatactacatcttaattcacccttgttattcaataccaagagtatttgaaaacagaattaaaat

SEQ ID NO: 808767 - DNA, 120 bp, Artificial Sequence
  ENSG00000279066_0 (sequence is synthesized)
taaaggggagagaatcaaaatcaataaaatcaggtgtggtggagatgggaggcccctgcttaatgctaaaatcacaggtctctgtgaaaatcaataacggccccaaagataaatgcacaa

SEQ ID NO: 808768 - DNA, 120 bp, Artificial Sequence
  ENSG00000279066_1 (sequence is synthesized)
acggccccaaagataaatgcacaatggacattaactggccaatcccaaaggaagaaacaaaaaaggccaataagcatataagaaaatgtgaaggccaggagcagtggctcacgcctgtaa

SEQ ID NO: 808769 - DNA, 76 bp, Artificial Sequence
  ENSG00000279066_2 (sequence is synthesized)
taaaatgcaaaaaatagccatggatagtggcatggggctgtagtccaagctactcaggaggctgagataggaggat

SEQ ID NO: 808770 - DNA, 120 bp, Artificial Sequence
  ENSG00000279066_3 (sequence is synthesized)
gctgtagtccaagctactcaggaggctgagataggaggatggcttgagcctggtgttaggtttttttaaagggaaggcgagggttaaagaaagacagagagagagagggcgtctctacag

SEQ ID NO: 808771 - DNA, 120 bp, Artificial Sequence
  ENSG00000279066_4 (sequence is synthesized)
caacagaggtatagtgcagaaacctacagaggggggaccagcttaatgccagagcccaccgccgcttacaggctggggtacttacaggcctggacgggaggggtttgggcagtagggctt

SEQ ID NO: 808772 - DNA, 120 bp, Artificial Sequence
  ENSG00000279066_5 (sequence is synthesized)
ctgcctgggaagatgttgagagatgttcccatgatgaggcagttgggtccttgttcccagcagaatatgatcaggatgttccttcagctgggcctttgcccagcaaggtatgttcgggat

SEQ ID NO: 808773 - DNA, 120 bp, Artificial Sequence
  ENSG00000279066_6 (sequence is synthesized)
gtggtcgggtggtcgggatgttcctgggccgtgtggtcaggatgttgggcaggatgttcctcacagcccaaaccccgtggaatgtttcacttcaacctgggtctggaaaacagcaggggg

SEQ ID NO: 808774 - DNA, 78 bp, Artificial Sequence
  ENSG00000279066_7 (sequence is synthesized)
aatgtttcacttcaacctgggtctggaaaacagcagggggcttacaaaatggtgcagtttggattaacacccaggacc

SEQ ID NO: 808775 - DNA, 120 bp, Artificial Sequence
  ENSG00000279066_8 (sequence is synthesized)
agaaagaaagaaaatgttaaaccctcatagtactcaaatcaaagaaactaaatcaataatgcaacaccatcctggctaccaaactggtaagccttttttaaaaattataagacttgggct

SEQ ID NO: 808776 - DNA, 120 bp, Artificial Sequence
  ENSG00000226800_0 (sequence is synthesized)
aaattcactgggtgcgctggaacgcggcacacagtagtagtatgccctgcttaatacatacaggacatatttgaggccccttccaggggtggggtgggaggacagagggatggggggtgc

SEQ ID NO: 808777 - DNA, 120 bp, Artificial Sequence
  ENSG00000226800_1 (sequence is synthesized)
accagacgacacagccagactgagaaaggtggtcccagagcagagacagggacctcgacgcatcctccatacccgctgcggggaaatggaccccaccagccagcacggggaggaaactga

SEQ ID NO: 808778 - DNA, 120 bp, Artificial Sequence
  ENSG00000226800_2 (sequence is synthesized)
ggcctggcgaaagaaagatgcggcctgaggtgggacgtgaacccgcggccctgcagcccagacagcggccccggagtgaccaccagcttcaccgaagcccctttactgtgcccccgagga

SEQ ID NO: 808779 - DNA, 120 bp, Artificial Sequence
  ENSG00000226800_3 (sequence is synthesized)
cacctgcctgccgttccccagggccgtcaccgccgatagcggtagcgcttgaagtgaaaccacagctggaagatgccgttggcaaactggcagcggaagccgtggcggtgcgagtattcc

SEQ ID NO: 808780 - DNA, 120 bp, Artificial Sequence
  ENSG00000226800_4 (sequence is synthesized)
cactcgcggttgacgatcttgaaagcgatgtcctcgtagggcggccccgcgtggaagcgcaggatggcgaaatccttgttgtcggcgcaggcctccaggaagtactcgggcgtggagcgc

SEQ ID NO: 808781 - DNA, 120 bp, Artificial Sequence
  ENSG00000226800_5 (sequence is synthesized)
ttgtcgatgaggtcggggtagaagatgttgaacttgtatccctgcacgatcttgggcggtgggttgtcaaagtcgtagtgcgtctggttgtacttgttccactcgaagcccgtgtgcacg

SEQ ID NO: 808782 - DNA, 120 bp, Artificial Sequence
  ENSG00000226800_6 (sequence is synthesized)
cggttgaagaagcgcggcttgcgtggccggtacttgtcggcccacaggacggaggctgcccagggagtgctcggacagcggccggtaaaagcttccaccacctgtggccccaaggccagt

SEQ ID NO: 808783 - DNA, 120 bp, Artificial Sequence
  ENSG00000226800_7 (sequence is synthesized)
ggcttcggccgggaaatgaggctggagaagccccgcccccagctcgccccactggccccaccccctggcctccagccccgcccttacccgtgacctggagctgctggcgcgagagctgca

SEQ ID NO: 808784 - DNA, 120 bp, Artificial Sequence
  ENSG00000226800_8 (sequence is synthesized)
ggcgctgcaggtcctcatccggttccagcacgtgcgcgtccagtggcagctcgtgcgccgtgagcagccgcgggctgtacctgccggcgtcgtagtcgtccaggctctgctggatcaggt

SEQ ID NO: 808785 - DNA, 120 bp, Artificial Sequence
  ENSG00000226800_9 (sequence is synthesized)
cctcctccatgagcaccgcctcgccctcgccctcgccctcaccgtccccgtcgccgtcgccctctgtcggggtcgcgccgtccacctcggcctccgcggggccgccctccgaggagggcc

SEQ ID NO: 808786 - DNA, 120 bp, Artificial Sequence
  ENSG00000226800_10 (sequence is synthesized)
cgggcggggtgggcgccgcgtcctcaggctccaggctgggaggagagagcgttggaggcgcggaggctgcccacggcccctccatcctgctccgcgtctgcatcggcgtccccggggtgc

SEQ ID NO: 808787 - DNA, 120 bp, Artificial Sequence
  ENSG00000226800_11 (sequence is synthesized)
cggccgggcctacctgcggctgggggactggggctcctgcttgaggatggggaacagcggctcgctctccacgccctgctcctgcttcagtttgtacagcttctgccgcagcacgtcctg

SEQ ID NO: 808788 - DNA, 120 bp, Artificial Sequence
  ENSG00000226800_12 (sequence is synthesized)
gtggcgctcacgcagcctgggacgcagagccggggtcacccgcatggaggcgaaggggctccgcgccccacccccaccgagattctcacgccccttattgctgcaaggaccctgagaagg

SEQ ID NO: 808789 - DNA, 120 bp, Artificial Sequence
  ENSG00000226800_13 (sequence is synthesized)
tggcgagcagccacggctctggctgggacctttgcccaggcttggtcagttcagggtcaaggcttatgggagagaggacgagaggacgcaggtaccctggtgaaccatcccatggcaggg

SEQ ID NO: 808790 - DNA, 120 bp, Artificial Sequence
  ENSG00000226800_14 (sequence is synthesized)
agaggtgggtctctgtctcacgctgcagtctcagtgtcttgtggctggggctggccaggagaaggggcccagcaggacaccagccaacaagcatgataaatttagagacatttacaaatt

SEQ ID NO: 808791 - DNA, 120 bp, Artificial Sequence
  ENSG00000223949_0 (sequence is synthesized)
agctctcagtatgtgtaaactatgacatgcaggccaattcacctagaaaggcctattttcaaaagctcatgtcctctgaattgaggaaccacagatcagatcagcctcttcaaccccccg

SEQ ID NO: 808792 - DNA, 120 bp, Artificial Sequence
  ENSG00000223949_1 (sequence is synthesized)
cgaggctcccattcatgtaagacacccatggctttgtaatggcacccaacgctctgggctggcatgaaaattgtgtgactcacatcatgtgcctccccaagaagagtttcttagcaggca

SEQ ID NO: 808793 - DNA, 120 bp, Artificial Sequence
  ENSG00000223949_2 (sequence is synthesized)
tatgcccctccagcaccatcctgcattctgcttccaagatacatgagctttctgaagagctggtgagaatgctgaaacttcctggccttggtttcccatctggtaaaatgaggaagacca

SEQ ID NO: 808794 - DNA, 120 bp, Artificial Sequence
  ENSG00000223949_3 (sequence is synthesized)
aagcttaactctcacaaggaatatgcagatgaggaaaccgaagctcttggggtaacacgacttgtgaaactgcatgctactcctcagtggcagggtggggactctggacagaggaactgg

SEQ ID NO: 808795 - DNA, 120 bp, Artificial Sequence
  ENSG00000223949_4 (sequence is synthesized)
caaggtcttctagacctttgacgtgcataaactggcaggtttacagaataacgaggaaaacaaagtgaaacaaaagactgtacccgtgtgctaagaatttattacccgcacatcaaaaaa

SEQ ID NO: 808796 - DNA, 120 bp, Artificial Sequence
  ENSG00000223949_5 (sequence is synthesized)
agctgactagtttgtggaatgtaatggatgagctaaacttggagcagggggctgagacacagatttcctgtgctgtcgagctattgcagatctcagcagataacaaagctattatcctgg

SEQ ID NO: 808797 - DNA, 120 bp, Artificial Sequence
  ENSG00000223949_6 (sequence is synthesized)
cagaaatggaagcatcctcaaatcctgtcagatggcagcatggacaaaaattacaagcaaatgtatttttaagctgatgcactttcttaagtctggctcctaaaagcaaaacatgctctt

SEQ ID NO: 808798 - DNA, 82 bp, Artificial Sequence
  ENSG00000223949_7 (sequence is synthesized)
agggagaagtctaagagacaaaatcaataaggctagagaagattggctttctctggatactgtaccttatccatgtgaacag

SEQ ID NO: 808799 - DNA, 120 bp, Artificial Sequence
  ENSG00000223949_8 (sequence is synthesized)
ttggctttctctggatactgtaccttatccatgtgaacaggagattttatagtgacttgtttcagtataaacaaagaggactggaataactgattgctgaggactccaatcatggcagca

SEQ ID NO: 808800 - DNA, 120 bp, Artificial Sequence
  ENSG00000223949_9 (sequence is synthesized)
ctgtatgatatgaatgtaaaataagcatgactgactgcaacaagaaggcagcctgaatctacctgaagaatcctcaggccatccgatttgatgatatagtcagtaggattgtttggtttg

SEQ ID NO: 808801 - DNA, 73 bp, Artificial Sequence
  ENSG00000223949_10 (sequence is synthesized)
atccgatttgatgatatagtcagtaggattgtttggtttgctagtaacataaattcaaagcttcaggaaggag

SEQ ID NO: 808802 - DNA, 120 bp, Artificial Sequence
  ENSG00000223949_11 (sequence is synthesized)
acacacacacacaaacaccaaagcttcaggaaaaaaaaggcagactaaattatatggtaagtaggctgtttcattgaactgaaatgcaaaagtaaaccggagatgtaagttgtcacaaga

SEQ ID NO: 808803 - DNA, 120 bp, Artificial Sequence
  ENSG00000223949_12 (sequence is synthesized)
tgtgacttgctcctccttgccttccgtcatgattgtgaggcgctcccagccatgtggaactgacgaaacactggaactctccagaataaattggtacctgggtctcttctgaagtgagct

SEQ ID NO: 808804 - DNA, 120 bp, Artificial Sequence
  ENSG00000223949_13 (sequence is synthesized)
ggtacctgggtctcttctgaagtgagctgctcttaggagcttcaaatgagggtctttgaagccacatgaaaattgatgagtggttgtaacatccaagctaccaaatcagacacacttgta

SEQ ID NO: 808805 - DNA, 61 bp, Artificial Sequence
  ENSG00000223949_14 (sequence is synthesized)
aaacttatccatcacgatcaagctggcttcatccctgggatgcaaagctggctcagcatat

SEQ ID NO: 808806 - DNA, 120 bp, Artificial Sequence
  ENSG00000223949_15 (sequence is synthesized)
tccctttgaatactagtacaaggtaaggatgccctcttctcaccactctattcaacatagtattgaagttttggccagggcaatcgggcaagagaaagacaaaaagcatattctaatagg

SEQ ID NO: 808807 - DNA, 85 bp, Artificial Sequence
  ENSG00000223949_16 (sequence is synthesized)
aggaagagagagagtcaaattgtctctatttgcagacaccccaaaaactccttaagctggtgagcaacttcagcaaagtctcagg

SEQ ID NO: 808808 - DNA, 84 bp, Artificial Sequence
  ENSG00000223949_17 (sequence is synthesized)
cgggaaatgatctcctattcattaaatgtttctgggaaaactgtctagccacgtgcagaaaactgaaactggatcacccttcct

SEQ ID NO: 808809 - DNA, 89 bp, Artificial Sequence
  ENSG00000223949_18 (sequence is synthesized)
aaatgatctcctattcattaaatgtttctgggaaaactgtctagccacgtgcagaaaactgaaactggatcataggatggattaaagac

SEQ ID NO: 808810 - DNA, 61 bp, Artificial Sequence
  ENSG00000223949_19 (sequence is synthesized)
gacataggcatgggcaaagacttcataatgaaaacgccaaaagcaattgcagcaaaagcca

SEQ ID NO: 808811 - DNA, 120 bp, Artificial Sequence
  ENSG00000249375_0 (sequence is synthesized)
tcatggagcaccaggggctcggggctgccctgcggggaggactccgtcgaggagagcagagaatccgaggacggagagaaggcgctggagtcttgcgaggcgcaggacttgggcgagctg

SEQ ID NO: 808812 - DNA, 120 bp, Artificial Sequence
  ENSG00000249375_1 (sequence is synthesized)
ctgtcgttgagagggtaggggaagaccaccgaggggtcgatgcactctgaggcggcggcgctcagatcctgcaggttggctgcagaaggtccgaagaaagaggagttactggaggaaaaa

SEQ ID NO: 808813 - DNA, 120 bp, Artificial Sequence
  ENSG00000249375_2 (sequence is synthesized)
gtggttcagaggtgactattcaaccgcataagagatggtgaaaattaacctatcaccactgctaatgaacatcaccctatggagaaccgagacacaaaagggaagattcagaatgtgtga

SEQ ID NO: 808814 - DNA, 120 bp, Artificial Sequence
  ENSG00000249375_3 (sequence is synthesized)
cttgtataaaataaaaccagtttcccccgaccccaacaccttctttgaacatctctttctccacctctcaaaaaatttcctactgagttggtcctctagtgaaaagagcagttaataaga

SEQ ID NO: 808815 - DNA, 120 bp, Artificial Sequence
  ENSG00000249375_4 (sequence is synthesized)
cgtggtgaagaaaaagccagcgaacttaggggtgagactgaagcccctcagggtggctgagctgctatttgaaaaattccttcaagtcacgtgcggcctgtcaagagatgaggtgaagga

SEQ ID NO: 808816 - DNA, 120 bp, Artificial Sequence
  ENSG00000249375_5 (sequence is synthesized)
agagaatgataaatatctatctccagtggaaggatcattttgaaagaagggctgttagattaaaaaccaagctagccagggaacgttaaaggaagagaagttctcacaagcattttaatg

SEQ ID NO: 808817 - DNA, 120 bp, Artificial Sequence
  ENSG00000249375_6 (sequence is synthesized)
ccaagcatgtgttccaacgagaggaacacaggaaagctcttcagcagatgagaaaatgaaattcggcatcactaattcataggaatgataacaaaaacggcagtgaagaaaatctgtgca

SEQ ID NO: 808818 - DNA, 120 bp, Artificial Sequence
  ENSG00000249375_7 (sequence is synthesized)
ttttaaaaaatgcatgttttttgcttagtgttgtcccttcccctcctggcttttagtatactgcattcattaaagtagctgagaagaaaaatagtagatgctgttaacgtcaggcctgag

SEQ ID NO: 808819 - DNA, 120 bp, Artificial Sequence
  ENSG00000249375_8 (sequence is synthesized)
agcttccatatcctgtgttgcgttgagttttgggtttgtttccttattcactgtcttctagatctcagaccctagcagaaggtctcagaatggacctagtaaactttggtcatacctcca

SEQ ID NO: 808820 - DNA, 88 bp, Artificial Sequence
  ENSG00000249375_9 (sequence is synthesized)
ttgagacaggatctctcactcgactcactgcagtcttgaacttgccaggctcaagcaatcctcctacctcagccttctgagtagctga

SEQ ID NO: 808821 - DNA, 120 bp, Artificial Sequence
  ENSG00000249375_10 (sequence is synthesized)
ccaggctcaagcaatcctcctacctcagccttctgagtagctgagaccacagggatgtgaagagacagggtctcactatattgccccggctaatctcgaactcctggactcaagcaatct

SEQ ID NO: 808822 - DNA, 120 bp, Artificial Sequence
  ENSG00000249375_11 (sequence is synthesized)
cctgacttcagaatcagaagtagctctgcttttcctgagaagtggtgcgggttttgccttatggatgctaactgagactggaacatgttcccttttttgtatcagctgctggtacaaaat

SEQ ID NO: 808823 - DNA, 120 bp, Artificial Sequence
  ENSG00000249375_12 (sequence is synthesized)
tgagagttgagagccaaaactgtacccttatcacctgtcagtaacttaaggagtctgagaatatctgttgaccagagataaactatcgggaggctttgaagtgctgtaaatgctttacct

SEQ ID NO: 808824 - DNA, 120 bp, Artificial Sequence
  ENSG00000249375_13 (sequence is synthesized)
atttgaggtttcattattattttgtcttttacatttagtcattttctgcaagaggggagaaaaacggcttatgtgacattataaaaatatgaaaagtcaaataaaaaacaagccaatgca

SEQ ID NO: 808825 - DNA, 120 bp, Artificial Sequence
  ENSG00000249375_14 (sequence is synthesized)
aacttaaggaggaagtcagctaccatgcctccaggacactcaagtaaccccatggagatgacattgcagagaagaactggtcgaaagccagtacccactttgccatctgtgtgaacaatc

SEQ ID NO: 808826 - DNA, 120 bp, Artificial Sequence
  ENSG00000249375_15 (sequence is synthesized)
cacctttgagtgggtcctccagcccacatcaagccttcatataacagcagtcctgaaggacattttattgtaacctcgtgaaaatcgaagtaggaactcaccagccaagttgctcctgaa

SEQ ID NO: 808827 - DNA, 120 bp, Artificial Sequence
  ENSG00000249375_16 (sequence is synthesized)
gaacatcaccctatggagaaccgccttgcagcataagtgctggataatgataatgttcagcatttattgaatgcttgtcatgattgtgccagacactgtggagaagtcaggcaccatgtt

SEQ ID NO: 808828 - DNA, 120 bp, Artificial Sequence
  ENSG00000249375_17 (sequence is synthesized)
atgaggacactcaagcaaccctgtagaaagttccatgtggtgaggaactgatacctccaatccatggccagtaccaatttacttagcatgtgagtgcatcctggaagtagatcctcttgt

SEQ ID NO: 808829 - DNA, 120 bp, Artificial Sequence
  ENSG00000249375_18 (sequence is synthesized)
ctcagccatgcctgaagctgactgccatctcatgggaggcctcaagccaggactgtccaggcgagctgctcccatattcttgatccacagaaactgtgaaataattaatgtttatggttg

SEQ ID NO: 808830 - DNA, 120 bp, Artificial Sequence
  ENSG00000249375_19 (sequence is synthesized)
tttcaagtcacttacattttaagttcatttgttatgcagcagtagataatggaaactctgtaaacaggagcccagtctggggaggatggagatagtaatcaggagaggcttcctggagga

SEQ ID NO: 808831 - DNA, 120 bp, Artificial Sequence
  ENSG00000249375_20 (sequence is synthesized)
ggtgttagctgagctatgtcttgtagaatgaggaggagttctgagtaggagttagtgaggcagagagtgttggggtgctaaggctttccgggcaggaggaacaatatgtataaaggacca

SEQ ID NO: 808832 - DNA, 120 bp, Artificial Sequence
  ENSG00000249375_21 (sequence is synthesized)
cttcaggccccatcttctctgcaaagtcttccctaaccattcactgcctgagtcattcatttacttactcattcattcgacaaagctttgatgagagcctcctatgtcctgggctccatg

SEQ ID NO: 808833 - DNA, 120 bp, Artificial Sequence
  ENSG00000249375_22 (sequence is synthesized)
cagagtactggggttgctgtaagttgcatattctgagactgctcagttaggcatagaaaactcaaatgcccacaagggctaggcaagtaatgcaagccagggaagctgagtggtgcactg

SEQ ID NO: 808834 - DNA, 120 bp, Artificial Sequence
  ENSG00000249375_23 (sequence is synthesized)
ggagtcaggggtgaggccagagagaagcggagagcccaattcccaagaaaggcccaccatttctcagctccagttgtcagctggcatgccagaatgtaagcccaaatctggccagatctt

SEQ ID NO: 808835 - DNA, 120 bp, Artificial Sequence
  ENSG00000249375_24 (sequence is synthesized)
ccaatttatcaagatatctagaaattgtattttagtataaagtctcctaattttcaaaaggcagccagcccaaacttgttgtcaaatttctctctttccagccttctgttcaggagctcc

SEQ ID NO: 808836 - DNA, 120 bp, Artificial Sequence
  ENSG00000249375_25 (sequence is synthesized)
atgagttggctggtggagacttcagcttctctcctgcgctgaccgcaaaactttgtcctctgccttctggttagcttgagtcctgtgtgactggtgcaatgactaattgtctcaatagtt

SEQ ID NO: 808837 - DNA, 120 bp, Artificial Sequence
  ENSG00000249375_26 (sequence is synthesized)
ttctaagtggtggcatgtaacacttgagctccactgatctcccaggaggggaaagaaagttggtgtttattcacatgcagacttccatagctcctcagcaaagccctctgtagcccaaca

SEQ ID NO: 808838 - DNA, 120 bp, Artificial Sequence
  ENSG00000249375_27 (sequence is synthesized)
ccattatggtaaaggtgtcgaagcaaaattacagaatgtaaggtagttaatctggtggacagtgagcactttgtgcatttctgaagccacgatacctactgatagcatccagggttggcc

SEQ ID NO: 808839 - DNA, 120 bp, Artificial Sequence
  ENSG00000249375_28 (sequence is synthesized)
gacagtgagtttatggaagccttcctgtgtgcaaacatggggctgtgcatacagaagcttatttaatcctcccaacagccctggaagattggtgttatcattgttctcatttgcagatga

SEQ ID NO: 808840 - DNA, 120 bp, Artificial Sequence
  ENSG00000249375_29 (sequence is synthesized)
gaaaacagagtcccagggaagcttactgatttgtccagggtcttgcagccaataagaggcagggcaggcatctcttctgggactgttaagtctatgttcttatctactctgctgtaattt

SEQ ID NO: 808841 - DNA, 120 bp, Artificial Sequence
  ENSG00000249375_30 (sequence is synthesized)
ttctccctggagctgaaaaaaagaaagcactggggtttctgagttcttattggagaggaacagagcaatgacaatctgatcggaggagggtcaggctgtggggcatgtaaagcagtgcct

SEQ ID NO: 808842 - DNA, 120 bp, Artificial Sequence
  ENSG00000249375_31 (sequence is synthesized)
atagagcaggcacagcttattgttttgttttgtttttttttctcttagaatgaggtgctttcccttcttctcctcctacccccaagtaagcccttggtgatgccactgagagggacctag

SEQ ID NO: 808843 - DNA, 120 bp, Artificial Sequence
  ENSG00000249375_32 (sequence is synthesized)
ttatgaaaggaatttcaaggacaacccatatgtcagatttagtgacatagtttgtactgagcttgtgagttattagtcaggtgagtctttttctctgttgtatcatgtaccttgatctgt

SEQ ID NO: 808844 - DNA, 120 bp, Artificial Sequence
  ENSG00000249375_33 (sequence is synthesized)
ggcgggaagcggcacaaaggagaggaaatgccataggctttggagcctgggaaatgtaagtttcaatccagattcactcactaactaggtgtgtgaccttggacgcgttgtagcctgtct

SEQ ID NO: 808845 - DNA, 120 bp, Artificial Sequence
  ENSG00000249375_34 (sequence is synthesized)
gagctccagtctccccttccggcacacgaggtcaagaatatgcaatttacagcaacctcagggctcttcgtggagcctgggacagaggaggctctcaccaaagccttgtcaaatgaataa

SEQ ID NO: 808846 - DNA, 120 bp, Artificial Sequence
  ENSG00000249375_35 (sequence is synthesized)
gtaaatgaatgaatcagtcaatgaatggttagggaagactttgcagagcagatggggcttgaagcggtcctggaggatttaatacgtggaaaagaggagggagaaaattgaagagaggga

SEQ ID NO: 808847 - DNA, 120 bp, Artificial Sequence
  ENSG00000249375_36 (sequence is synthesized)
attgtaggcagggaaatgacataaccagcagcttggtggagagaattccaggcttagaggataatgaaaggccaatatggcttctggtggaggagaggatggcctaggaggggcctgcac

SEQ ID NO: 808848 - DNA, 120 bp, Artificial Sequence
  ENSG00000249375_37 (sequence is synthesized)
cgacttccccatcctgattaaatttcctcagtggccaaagagcgctaggtgctgacactaatagttcctttaacagggcctttcatctcctattcaaagtgctttgcaagtgttaattaa

SEQ ID NO: 808849 - DNA, 120 bp, Artificial Sequence
  ENSG00000249375_38 (sequence is synthesized)
atctccaaacacctcatgagataaatattatttatccaccttttgtagatgaagacatttaggcacaaagagcggtgattttcccagggcaatgtctagatgggtgtccattcccacctt

SEQ ID NO: 808850 - DNA, 120 bp, Artificial Sequence
  ENSG00000249375_39 (sequence is synthesized)
cattccagaattgccaaaacatgtctttagaagaaagcagaaaaaacaaatcagatcttttttgccatcccccctcctataccctcatacatataaaaaacagaaattaggacaaaaaaa

SEQ ID NO: 808851 - DNA, 120 bp, Artificial Sequence
  ENSG00000249375_40 (sequence is synthesized)
agatgttatttcagatatttcttagttattttaaagtccccccaatgcattctcaaatgtatacctcccttcccaattttttagaacttacaggttacaaggttgagaaaattgttcagt

SEQ ID NO: 808852 - DNA, 120 bp, Artificial Sequence
  ENSG00000249375_41 (sequence is synthesized)
tgaatgattcacaggtatattcaggcctaaaaatccatgctttatatttctcgtctgtaacacgggacccctctttcagagttgttgtgaggattaaaggagtaaatttatacaaaagca

SEQ ID NO: 808853 - DNA, 120 bp, Artificial Sequence
  ENSG00000249373_0 (sequence is synthesized)
ttgccctcaaggacatgcataaaaagctaacggggcatggcaacatacagaaaaatgaagcaagcaggaaaagagcagatctacccactgggtctggagacctggatggcagtggaggct

SEQ ID NO: 808854 - DNA, 120 bp, Artificial Sequence
  ENSG00000249373_1 (sequence is synthesized)
ggcatctatggtgtaggagtgaggcaatgtagaaggagagaatcaaggaagaagtttagagtcagatcatcccagcttactaataagcaagaagtcagcccatctgcccattaccctgca

SEQ ID NO: 808855 - DNA, 120 bp, Artificial Sequence
  ENSG00000249373_2 (sequence is synthesized)
acagtccccacggcatcctctctgtccttaaataaatagatccaaggcaagatgaatgaatgggttcagggaaagataaatatctccagaaaaatgcaataaagagaaattttgagccaa

SEQ ID NO: 808856 - DNA, 120 bp, Artificial Sequence
  ENSG00000257859_0 (sequence is synthesized)
agctgattttctgacagccccttctcctctcctcactggatatccagtttccagggtctgtgtgtggtgggaagcaaactggcctgaggttccatccactggtagaaatgaccccaaaga

SEQ ID NO: 808857 - DNA, 120 bp, Artificial Sequence
  ENSG00000257859_1 (sequence is synthesized)
cttcccatgcagggagggcaaagaagaaagtgctttggaatggagataccccttttcctcctcctgaatgtatcagagttagttatcaatgctgactgagtgtgcactctcctagacacc

SEQ ID NO: 808858 - DNA, 120 bp, Artificial Sequence
  ENSG00000257859_2 (sequence is synthesized)
atggggagaggcagaagaggaaaccagatatgatccttcttcttgggactctcctgacctaggaaaagagacagatgaatgcagataactgagtctatatacagagactgccacaagctc

SEQ ID NO: 808859 - DNA, 120 bp, Artificial Sequence
  ENSG00000257859_3 (sequence is synthesized)
acactttactgaatgttcagacctagtcatacatcctaagggcattgttggaagcttctggaactaagtctctggggatttgaatcaactcagaagactgactcattcacttggctgtgg

SEQ ID NO: 808860 - DNA, 120 bp, Artificial Sequence
  ENSG00000257859_4 (sequence is synthesized)
aggctgttccagatattaggagctatgtatgtggagccccggatttgggccaaaagatgcatttgactggagagaagggattgagatttgagcagttgttggacaacacagaaatgaaac

SEQ ID NO: 808861 - DNA, 120 bp, Artificial Sequence
  ENSG00000257859_5 (sequence is synthesized)
agccgtagcaaacttgcctgccgtgatttctctgctgagataatgggacttttcagactccctgtaactgagatctagataaaaagagacgtctggaaaaaaactggtcccaattgtcgc

SEQ ID NO: 808862 - DNA, 120 bp, Artificial Sequence
  ENSG00000257859_6 (sequence is synthesized)
ttggctttgctttcataactatctgagtgtggcatatgtcagactttgaaatgctgggtctcttggaaatacaaataccatctgggtctggataattcccagaaacctaggctactcagt

SEQ ID NO: 808863 - DNA, 120 bp, Artificial Sequence
  ENSG00000257859_7 (sequence is synthesized)
aggaaatgaggagctggaaacataataccgagaccaggggcttgtccttgggccaccctgtctcgtgtcctggacacagtcacatgactcgtacagaaaatgtcactgggaagacaccat

SEQ ID NO: 808864 - DNA, 120 bp, Artificial Sequence
  ENSG00000257859_8 (sequence is synthesized)
aaggctcatcttttcacgacacagtgacctctgttatggacatcttgatttctctttgagaagccatccctcccccagtgtgtatagtctagcagccaagtccgccttgcctctggccaa

SEQ ID NO: 808865 - DNA, 120 bp, Artificial Sequence
  ENSG00000257859_9 (sequence is synthesized)
gggcagcctgaaactcaaacagggcccatcccttatccctggatggaaatcttgagcagagtgcctgacgggactgaagatggctgaaattccagcaagcagacagtggttctctgaaga

SEQ ID NO: 808866 - DNA, 120 bp, Artificial Sequence
  ENSG00000257859_10 (sequence is synthesized)
caaatccctcttttgctggttggacaaagattgtttctgttgcctgcaatcaaataacccaaaaggatgaacaggtgaaatcataaacatacttttaagtgcctggaatatgcctgcttc

SEQ ID NO: 808867 - DNA, 120 bp, Artificial Sequence
  ENSG00000257859_11 (sequence is synthesized)
tgtccatctttcaacccacttgcatcagaagcccccttggaggatgagagcctgtcctgtgaaccatggtggttcagagtggaacacagcagagtgtggaacaccaggaatttagagcaa

SEQ ID NO: 808868 - DNA, 120 bp, Artificial Sequence
  ENSG00000257859_12 (sequence is synthesized)
tcagtgaaatatgatgtaggcctctatgtcagaaaaattactaataagcagttgattattagtaatcaataatagccttcccattttatatcgagcacagcagtcagcatgttaaaaaca

SEQ ID NO: 808869 - DNA, 120 bp, Artificial Sequence
  ENSG00000257859_13 (sequence is synthesized)
aggactgctggacaccagctgcgatgaaatgctttatcagaggacggcccttgatgtctatgtccatttgcaagtgcggcattaattacaaggctggtttaagtataatcagtaagttta

SEQ ID NO: 808870 - DNA, 120 bp, Artificial Sequence
  ENSG00000257859_14 (sequence is synthesized)
tatgctggatgctcaagatgatttctggctaaacatggaatttctatttctattttccttatgttaaaagccggaacagcaaaatgtattcctaatgtcactattatgacatttacatcc

SEQ ID NO: 808871 - DNA, 120 bp, Artificial Sequence
  ENSG00000257859_15 (sequence is synthesized)
cgaaaagttgcagtaactgatcaatacaatagtggaatgcctggaaacctgttccttttttgctaaaaaaaggagggcactttttatgtctttgatgtgaagttcatgttctttgacagt

SEQ ID NO: 808872 - DNA, 120 bp, Artificial Sequence
  ENSG00000257859_16 (sequence is synthesized)
gattgatggaatatgctacagaaaaggctgattacattttactagagaagtaaaaaagaaatgcaggagaatcccacagctctgggattgaatggaaagcaaaggaggagctcctctagg

SEQ ID NO: 808873 - DNA, 120 bp, Artificial Sequence
  ENSG00000257859_17 (sequence is synthesized)
gggctatgggatgcctctgtgtagctattgaatctctggggccatggatgagaatttgcttggtcagtaggtcagcattcaagagtatgggctggatgcagagtaaacgacctgctgaga

SEQ ID NO: 808874 - DNA, 120 bp, Artificial Sequence
  ENSG00000257859_18 (sequence is synthesized)
gtaatggccactgctttacttctgtcttcaaaatcctgaacaagctcctcttttggccaactctaacctggaaccatgcagattaggaagagaaagagaagtggattgtgagaaagattt

SEQ ID NO: 808875 - DNA, 120 bp, Artificial Sequence
  ENSG00000257859_19 (sequence is synthesized)
tagcttggtcaagttgataacgggatgattcagaagaatgcaacccttatcaactaggtatatctcttttttcctacatttattgtccaaataaagcaaaatcatgctttcacctgcctg

SEQ ID NO: 808876 - DNA, 120 bp, Artificial Sequence
  ENSG00000257859_20 (sequence is synthesized)
tgtgtcctctcaatggcatctcccgctatcagctatcaatatgtgttagcagaatctaataacgacctaattggcaacagagatctgaacagatgtctcacttaataaaaaggctttgtg

SEQ ID NO: 808877 - DNA, 120 bp, Artificial Sequence
  ENSG00000257859_21 (sequence is synthesized)
gccagcaagctgaccccttttgggcttagctgggctttggtactttgtgtgtgaccccttttggcagttgtcattaatcagtcagacaaactggttgattgttgattgctgtgtgtacca

SEQ ID NO: 808878 - DNA, 120 bp, Artificial Sequence
  ENSG00000257859_22 (sequence is synthesized)
agtctgcgggtcaaacctggacccctggagtgtacttagaccaggttccctgaactctgaccacggccttgtcttctgtcatctcatttaatacacgcacaggctagactcaagggcttt

SEQ ID NO: 808879 - DNA, 120 bp, Artificial Sequence
  ENSG00000257859_23 (sequence is synthesized)
attggcatcaattataaatagctattgtagccagattcttcacccacccattcaccctgtgaatccctggtggattactatggacccttcatcgcatagatttaaagttagttatcaatg

SEQ ID NO: 808880 - DNA, 120 bp, Artificial Sequence
  ENSG00000257859_24 (sequence is synthesized)
actcgtgatgctgatgcgcccaattagagtctgtagttaaggcccctgggattgttctgggccctggaaaagaatggcagcagagttagttatcaatgctgactgagtgtgcactctcct

SEQ ID NO: 808881 - DNA, 120 bp, Artificial Sequence
  ENSG00000257859_25 (sequence is synthesized)
agagagagatgatgaggtggcttgagaagagtgacagaaatgtctctggatgggattctggaccttctgggaggaggcttctttgaaggccacctggcgatcgcgtggtttctgattctc

SEQ ID NO: 808882 - DNA, 120 bp, Artificial Sequence
  ENSG00000249379_0 (sequence is synthesized)
agggcctttgggaggcaattgggaggacctcctttgggaggtcatgaaggccctaccctcataactggtattacgaagagacatctgaagagctagttagctccttccaccatgtaagaa

SEQ ID NO: 808883 - DNA, 120 bp, Artificial Sequence
  ENSG00000249379_1 (sequence is synthesized)
cacagcaagaaggcaccatgtatgaaccagagagcaaaagctctcaccacacaccgaaactgccggtgacttgatcgtgaacttcccagcctccagaactagcagcatctgaagagccac

SEQ ID NO: 808884 - DNA, 120 bp, Artificial Sequence
  ENSG00000249379_2 (sequence is synthesized)
ttttaggagccagcctgcctttccaggtgacactggacactttcatctgagaaccctgtcacatgacagttgtttcctttcttcctcctctcctgggaatgctgctgcttcgatgaccca

SEQ ID NO: 808885 - DNA, 120 bp, Artificial Sequence
  ENSG00000249379_3 (sequence is synthesized)
agagcctaagaagggtagctgtttctcaatacactgagagagagttctttctccgtcctgaccatcttgggacccgatggcaagactggaaggatttatatctccttttgtacagaaaac

SEQ ID NO: 808886 - DNA, 120 bp, Artificial Sequence
  ENSG00000249379_4 (sequence is synthesized)
tgcctccccatgttggtttgtgaagtgaaatgcatataaaacagaggattccagactctcagaagtcaatacataaataaataaaaataaaactgagaagatacctcaaaatggtcagac

SEQ ID NO: 808887 - DNA, 120 bp, Artificial Sequence
  ENSG00000249379_5 (sequence is synthesized)
tccaggtgtattttctcttcaaacagtgtcagtgggtctctaataaagagatgagcaacatgctgggccaggagatgatcaatgcctgcaaaaagagatcacatgggaactcactgcaaa

SEQ ID NO: 808888 - DNA, 120 bp, Artificial Sequence
  ENSG00000249379_6 (sequence is synthesized)
gcgagagataccacttcctcttagtccagaaagacgacaggatagctcaggaagtttgaagaaagggtgtctagaagcttgaaatagctggtttgattagtatcctcacctcacccagta

SEQ ID NO: 808889 - DNA, 120 bp, Artificial Sequence
  ENSG00000249379_7 (sequence is synthesized)
ttttatcctgcggacactgcgggagtgtcagcgttttattcactacttacacaatgcctgctggggcactggtgtggacctagacacagacctccaaagtaagctccttttgctaaaaat

SEQ ID NO: 808890 - DNA, 120 bp, Artificial Sequence
  ENSG00000249379_8 (sequence is synthesized)
caagaaaatctcacaagtatttggaacctgaaactttaggaacaagtagcctcatgagagaagttaaagactttgcactaaaaatagaaaccagaccaggagtcagcaaaaaagtgtaaa

SEQ ID NO: 808891 - DNA, 120 bp, Artificial Sequence
  ENSG00000249379_9 (sequence is synthesized)
agagctttgaagaactaaaggcgtacattcaaacccagaaagatggagtagaaacccaccttcctgcaacagctgttcgtagatctctttatctatcgtcaagtcgatgtcattatattt

SEQ ID NO: 808892 - DNA, 120 bp, Artificial Sequence
  ENSG00000249379_10 (sequence is synthesized)
ctcaccacacttagataaatagctgtctattgagtcatatcgggatttactgatcctatagttattgttcttcaatggctaaagattaaaaatatatataaatgaatatgctatataaaa

SEQ ID NO: 808893 - DNA, 120 bp, Artificial Sequence
  ENSG00000249378_0 (sequence is synthesized)
agacatctgggcaagtcaacaggaaggtggatatccaaatctctctcttcgcaatgagtttccagttagatggaggagagagtaataaaacacagagctgagattcctgacttcacagat

SEQ ID NO: 808894 - DNA, 120 bp, Artificial Sequence
  ENSG00000249378_1 (sequence is synthesized)
ccctgaggagatgtttactaaagggaatcttctggtcactgttaccttcctccgtacttacctgcctcatggataacactgaagaatgcagtttacttacatctttttctgtttgacaga

SEQ ID NO: 808895 - DNA, 120 bp, Artificial Sequence
  ENSG00000249378_2 (sequence is synthesized)
agacagttattagaacccgaaaggaagaagctatacgactggggacacatgtcttagaagcacactcattagataaagtgtcgcatactctttgataagatgtaggacaagccaggatgc

SEQ ID NO: 808896 - DNA, 120 bp, Artificial Sequence
  ENSG00000249378_3 (sequence is synthesized)
tctcccaggaggctcttcaggagagaggggagggagaaggtcagagagtcaccttcccaggtttcatggctgctgcagggagaaagggcgaggggaagtgactcagaacacccgtgtcct

SEQ ID NO: 808897 - DNA, 120 bp, Artificial Sequence
  ENSG00000249378_4 (sequence is synthesized)
tgataaggtttgatgtgctaatttcagcacctccacttcatgtctacactgtggacatatacttttttgttgttttggggtttttgtcatgtttcactcactttctctattattctttat

SEQ ID NO: 808898 - DNA, 120 bp, Artificial Sequence
  ENSG00000249378_5 (sequence is synthesized)
atgtttcactcactttctctattattctttatagcaggacttgctttagagtcattactttctgttaaagttgttccttcaaaagttgacaattactggctgggcacggtggctcacgcc

SEQ ID NO: 808899 - DNA, 120 bp, Artificial Sequence
  ENSG00000249378_6 (sequence is synthesized)
acaattacttttcattggcttcttcacacctaacacctatcttttcacacaaggcagaaataaattgctattagctaatctgctaaatccacttagaaatataatcaagaaaaaggaaaa

SEQ ID NO: 808900 - DNA, 120 bp, Artificial Sequence
  ENSG00000249378_7 (sequence is synthesized)
ctaacattgactatttttcctaactgcttatagaaactccaggctgtcacccatctgttctctcatcaaagtagttttgggccagcaactatttcagacatttctacagtttcagatgtc

SEQ ID NO: 808901 - DNA, 120 bp, Artificial Sequence
  ENSG00000249378_8 (sequence is synthesized)
tcactctgcctatgactgtatgttgtacttgaggactggacgcacagggtaaagtgcaaatagcaagcattcaggtccaactctcctccttctggttaacaatatgaaagaaagaggtag

SEQ ID NO: 808902 - DNA, 120 bp, Artificial Sequence
  ENSG00000249378_9 (sequence is synthesized)
agaaagaggtagtatcggaattattttagttcaatgtagccattataaaatgtgtatatattttaaaacatcatgtggtacatgataaatatatacaacttttatttttcaataaaaaat

SEQ ID NO: 808903 - DNA, 120 bp, Artificial Sequence
  ENSG00000249378_10 (sequence is synthesized)
gatcttcccatcaggcctttcaagtagctgggactgcagtgcacaccactatgcccagctaattatttactgattttttttttttgtagagatagtctcactatgttgcccaggctggtc

SEQ ID NO: 808904 - DNA, 85 bp, Artificial Sequence
  ENSG00000249378_11 (sequence is synthesized)
accagtctgggtatgatattacttttggcaaatatgaaaatgttctaaaattaggtaatggatgcacaactctgtgtactaaaaa

SEQ ID NO: 808905 - DNA, 120 bp, Artificial Sequence
  ENSG00000249378_12 (sequence is synthesized)
taaaattaggtaatggatgcacaactctgtgtactaaaaactcttgtttcccactttaagctagttgttgtgctttgtgatatgtaaagttcatctcaataaagctgttttaaacagaaa

SEQ ID NO: 808906 - DNA, 120 bp, Artificial Sequence
  ENSG00000249378_13 (sequence is synthesized)
agtacaggctttggtccacagagacaacaatactttcaatactcttttgttctgccccagaggagctcaacacagaattgcctagaacaagaaactggtgagagaagctgcagcctgttg

SEQ ID NO: 808907 - DNA, 120 bp, Artificial Sequence
  ENSG00000249378_14 (sequence is synthesized)
agactccacaagactgaagatatgaaaagaggaaatatgcatgaatgcccgcacggagaaccacccccacctgctgctcccgctctaatgatcacgcccattatcaactgggggatggct

SEQ ID NO: 808908 - DNA, 120 bp, Artificial Sequence
  ENSG00000249378_15 (sequence is synthesized)
tacccttgggacatcaaaatgaccaaggcagtgtctgctaagtatttgctgagactctgctatgattctttcaagtctaaagacagttatctgaatgatatccccgtgacagtggactcc

SEQ ID NO: 808909 - DNA, 120 bp, Artificial Sequence
  ENSG00000249378_16 (sequence is synthesized)
tgcacattcacagtcctggaaggagcctgtccacattggcattctggaagtccataaaagacaaacgcatatgcagtccccgagaaagcattgttgtaaacaaatctgcactagatggaa

SEQ ID NO: 808910 - DNA, 120 bp, Artificial Sequence
  ENSG00000249378_17 (sequence is synthesized)
tgagccactgcacccagccgaaatattttcttttctttttctttctttccttctttttaaaaaaattctgtagctgatccctgatggcttttaatttgaataaaactttatttaaagaaa

SEQ ID NO: 808911 - DNA, 120 bp, Artificial Sequence
  ENSG00000249378_18 (sequence is synthesized)
tagtgctgaagactacacccctgtgtagtcccacacaggctaccccagaccagcctggcgggctctgcactaggcctcccatcaggcgagagccaacgctcctcagcccggctccacctc

SEQ ID NO: 808912 - DNA, 120 bp, Artificial Sequence
  ENSG00000249378_19 (sequence is synthesized)
attcagaagaaagtgtgtctcccggcctcacattgcgctgaatgcaaggataccgagataaaccaggctttccttcgctcagagtacagttgcagacttggtaatgactgagccaagcca

SEQ ID NO: 808913 - DNA, 120 bp, Artificial Sequence
  ENSG00000249378_20 (sequence is synthesized)
agctaagtcagcagatgtgcgaacattttagaggtaacatcataaactagaacagaggagctcttgggaagaaaaagggcttggaaattatacctggaaagataccgctaataatgatca

SEQ ID NO: 808914 - DNA, 120 bp, Artificial Sequence
  ENSG00000249378_21 (sequence is synthesized)
agaagaaaaaacaaatccagtttggaagtgagcaatcatttatgatgtaaaatatttcttagaaatggaatctagataatgcttggaatatgctttaaactacctatatttaatttgttt

SEQ ID NO: 808915 - DNA, 120 bp, Artificial Sequence
  ENSG00000249378_22 (sequence is synthesized)
ttcttgtgatttttgtattgtttggtgtaaaataatcttaatctttccaggtggtgtctaattaaggcacatttactgatatgagtcattttctaaatatactttatctaagaaaattta

SEQ ID NO: 808916 - DNA, 120 bp, Artificial Sequence
  ENSG00000249378_23 (sequence is synthesized)
aaatttttggatcaactaaaaactctctcaattattttagagttaactcttccaaattctaaaatgtattcataaattatatacaactattttaatggtcactgtgggcccaacttctgt

SEQ ID NO: 808917 - DNA, 120 bp, Artificial Sequence
  ENSG00000249378_24 (sequence is synthesized)
atataaatttaccttcttattttacaggtgctaatgtttaaagatacttaaatatgccaatttctttcctctatgtagaagtttgaaatacattctatgccctgagagaaccctttgaaa

SEQ ID NO: 808918 - DNA, 120 bp, Artificial Sequence
  ENSG00000249378_25 (sequence is synthesized)
tcgcatactctttgataaggtaaggctccctggacgagatgttttacaggtaccatgagctcagtgaattgcttttggaaagacactcagcggagtgggcaccacgaggttaggagaagc

SEQ ID NO: 808919 - DNA, 120 bp, Artificial Sequence
  ENSG00000249378_26 (sequence is synthesized)
tcataattaatttcttattaattttataggctagattttaattgttatgtctaaatagtagtgtctggtacgtggtagataatcaatgtgacttgaataaatgaataagtctgttaacga

SEQ ID NO: 808920 - DNA, 120 bp, Artificial Sequence
  ENSG00000249378_27 (sequence is synthesized)
gttcactgagcttgagttccggctgcaacttggccttgagatttttgaaacgttgatatggaagataaagaaaaacgcagattcctgtcttctaaggaacaaaggctggaagacagttct

SEQ ID NO: 808921 - DNA, 120 bp, Artificial Sequence
  ENSG00000249378_28 (sequence is synthesized)
gcagattctgcctttgagggattagagggatgtgcccaggaccagatcttcagttatgcaaatataccttagagaccacagtaagaaagacatcgctctgaaatgctctggtcccaagga

SEQ ID NO: 808922 - DNA, 120 bp, Artificial Sequence
  ENSG00000249378_29 (sequence is synthesized)
aaatattgctctatataataatggaaaacgttgtctgtgtatcatgctgagctgcattttattttgtacccttgagagagcttttattttcttataaataaggattggtcttgttctggg

SEQ ID NO: 808923 - DNA, 120 bp, Artificial Sequence
  ENSG00000249378_30 (sequence is synthesized)
atggaccaagaacacttcacaggactcagagaggaacccgaaaggaagaagctatacgactggggacacatgtcttagaagcacactcattagataaagtgtcgcatactctttgataag

SEQ ID NO: 808924 - DNA, 120 bp, Artificial Sequence
  ENSG00000249378_31 (sequence is synthesized)
gaacccgaaaggaagaagctatacgactggggacacatgtcttagaagcacactcattagataaagtgtcgcatactctttgataagttgcctgtaagagattgggagccgagggcctga

SEQ ID NO: 808925 - DNA, 120 bp, Artificial Sequence
  ENSG00000249378_32 (sequence is synthesized)
caccctggtaatgaaggaagacccaggcccaggcaggggcggtgtcacaggcacaggggctcgcaccctgggcactgacggtggctgtcgcaccagggccgctccttgcagaaacctcac

SEQ ID NO: 808926 - DNA, 120 bp, Artificial Sequence
  ENSG00000249378_33 (sequence is synthesized)
tgagcctgtgcctgttgagtagcttcatgaggagcggatatcaggcagagaaagcccgggcaagagagtgacacacggggcttctgcccagaacacgtgcgcccacaatcccgggagctg

SEQ ID NO: 808927 - DNA, 120 bp, Artificial Sequence
  ENSG00000249378_34 (sequence is synthesized)
tgttatgtgctttcaaaactttgtgttgtataggaccctcttttagctgaatatttttcaagcagtaagcctgtcctgcatcgcacatgtactgggacacccatggacaaaatcataaga

SEQ ID NO: 808928 - DNA, 120 bp, Artificial Sequence
  ENSG00000249378_35 (sequence is synthesized)
ctctgtcttcctgacagatttccctcctctcctggggaattctctaatgatgtcactctttttttgtgccctgtatggtttttttttttcagtttcttctgtgtgatgcacgtgatgctg

SEQ ID NO: 808929 - DNA, 120 bp, Artificial Sequence
  ENSG00000249378_36 (sequence is synthesized)
ttacactgcagggtagcgtttttaaaaaatctgatttacagtttgtcctactattatatattttgcttataaaaaccttgtgttttttcaaaaattcctaacagacttatttaggtctaa

SEQ ID NO: 808930 - DNA, 120 bp, Artificial Sequence
  ENSG00000249378_37 (sequence is synthesized)
ctgacctaaaataaaccacacatggtacagtgtacagtttgatgggcttcgacataagcacatataatgggttgaattatgtccctcacgagatatgttaaagtcctaaaccctgtttct

SEQ ID NO: 808931 - DNA, 120 bp, Artificial Sequence
  ENSG00000249378_38 (sequence is synthesized)
catttgcgaatagggcctttatttggaaatagggtcattgcaggtataattagctaagatgaggttgtagtggagtggagtgggcccttaatccccttaatcctaaatgaggggtgtcat

SEQ ID NO: 808932 - DNA, 120 bp, Artificial Sequence
  ENSG00000249378_39 (sequence is synthesized)
cataagaaagacactggcaaacagatacagacacagagggaagaacgccacatgacaaggaggcagggggtggagtgatgctgccacacgtcaagaagaacctgcggccaccagagttag

SEQ ID NO: 808933 - DNA, 120 bp, Artificial Sequence
  ENSG00000249378_40 (sequence is synthesized)
aagaggcaagaaaggattctctcgtggaggcctcggactggcatcgccttgccaacaacgctgatggtgggcttccagcctccagaattgtaaggcaataaattcatgttgttttaagcc

SEQ ID NO: 808934 - DNA, 120 bp, Artificial Sequence
  ENSG00000249378_41 (sequence is synthesized)
agacagttattagaacccgaaaggaagaagctatacgactggggacacatgtcttagaagcacactcattagataaagtgtcgcatactctttgataagtgactcagaacacccgtgtcc

SEQ ID NO: 808935 - DNA, 120 bp, Artificial Sequence
  ENSG00000271709_0 (sequence is synthesized)
gagcgctcgctggctggctggctaacggaaaggctggctggactcggggatccagccacactgctggcgggcagcatgctgtccaccctgcgggtgcctttctcagactagggcccgcat

SEQ ID NO: 808936 - DNA, 120 bp, Artificial Sequence
  ENSG00000271709_1 (sequence is synthesized)
gaattccgcctcccgggagaagctgacgtcggcatgccttccaggggcagcggctgccctccagggtctggaacttgggggtcatgctgcctccaactcctgactctgtggccccaagag

SEQ ID NO: 808937 - DNA, 120 bp, Artificial Sequence
  ENSG00000271709_2 (sequence is synthesized)
ctggaacctcagcacctccaaagctcacggacccgctggtgagggctgcccggactgctgattccactcagccactcaccacccgccctgtctgccaggtgccatgtgcaaggatgctgc

SEQ ID NO: 808938 - DNA, 120 bp, Artificial Sequence
  ENSG00000271709_3 (sequence is synthesized)
attttctgctaatgggggtgggggatggcaggagacataatggggtggggaggggtcattgctattgtcgtcatcactctttgtcaccccaatggcattctataccttcttttgcatctg

SEQ ID NO: 808939 - DNA, 120 bp, Artificial Sequence
  ENSG00000271709_4 (sequence is synthesized)
atctcaaggcatcaagaatatgaaaaacagctcttctgtccccaaaagggagatcttaccttaagcaatgggattaccattaagtacaagacatttgacattaaaccattaagcacaaga

SEQ ID NO: 808940 - DNA, 120 bp, Artificial Sequence
  ENSG00000279579_0 (sequence is synthesized)
gtggcacccagagtcggtcctgtagctgggccggcttggggcttggttctatgtccctgtgggtcggtgcaagggccaagaggaacccgtaggcctcagggaatcccagggggccggacc

SEQ ID NO: 808941 - DNA, 120 bp, Artificial Sequence
  ENSG00000279579_1 (sequence is synthesized)
agtgttccctagttgtggaagcagacgcatgggcgaatcgcgggagggcagggcctgaagagcaggtgcgggccacggacccaggcggaggctgggaggacaggcgtggggtcccagcag

SEQ ID NO: 808942 - DNA, 120 bp, Artificial Sequence
  ENSG00000279579_2 (sequence is synthesized)
gcggaggctgggaggacaggcgtggggtcccagcagtgaagcgggttctagaggcacaggagcgggtaggagaggccagtggccctaggcccagagtctgcaggccgcgctcctgtcctg

SEQ ID NO: 808943 - DNA, 120 bp, Artificial Sequence
  ENSG00000279579_3 (sequence is synthesized)
tgcccatctgtcccagtgctaacacacagttctcaggagactttccccattcccagaggagtagtgtgaaacgcgtgcgccgctagtcttaaacttggtgtttgtattagttgggtttcc

SEQ ID NO: 808944 - DNA, 120 bp, Artificial Sequence
  ENSG00000279579_4 (sequence is synthesized)
gattccacaagggagatggcataatagatgatggtcgtcagccttaagggtacttcagtcttaactgtgtgttacaaagtttgaaagggagggttccctatgaataagaagcacacttga

SEQ ID NO: 808945 - DNA, 68 bp, Artificial Sequence
  ENSG00000279579_5 (sequence is synthesized)
ttgaaagggagggttccctatgaataagaagcacacttgaaagaacagccatgtttccagtgtcctct

SEQ ID NO: 808946 - DNA, 120 bp, Artificial Sequence
  ENSG00000283462_0 (sequence is synthesized)
acattccagatgggtggagctagggaaagccttcatggaaagggtttcatctttctgaacattcaccacactggtggacaaatcctttttgtgtgaggaagatgtggctgttgggagagt

SEQ ID NO: 808947 - DNA, 120 bp, Artificial Sequence
  ENSG00000283462_1 (sequence is synthesized)
caagtaattgaatgacgtgaatttcctggagtttccataagttcctgtaaatttagcctccaactgaaataaaccaactgaatgtaagacatcagaccctaaagaaccaaagttgttatt

SEQ ID NO: 808948 - DNA, 120 bp, Artificial Sequence
  ENSG00000283462_2 (sequence is synthesized)
tctgtggaagaccagccaacctattctcacagctgaaacaatggatctggcctgcagagtgttaaggcattctccaagtttcaaaacaagagtacaccattttgaaggcctataaataga

SEQ ID NO: 808949 - DNA, 120 bp, Artificial Sequence
  ENSG00000283462_3 (sequence is synthesized)
aagaatttttcaaatattaattcagtaatgacctctgtctttggaaaagataattgcaatgtgttactgcgaaccaatttaaacctgtatttctcattgcatttaatatttaattttgtt

SEQ ID NO: 808950 - DNA, 120 bp, Artificial Sequence
  ENSG00000283462_4 (sequence is synthesized)
ttttatcattatatatcaacagttctttctggagcaaagcaatcctatttgactttttttttttttaaccttatagtgcacacacacatgtatgtgtagggttatttaaacaaggaaaca

SEQ ID NO: 808951 - DNA, 120 bp, Artificial Sequence
  ENSG00000283462_5 (sequence is synthesized)
tttacatcaaaatgtgcaaagagttatcctggaatagaaatgctgaaaatatattttcaagaagttttaaaattctaggctggcctcaatgtattcagtagcatgccagaaacagaaaaa

SEQ ID NO: 808952 - DNA, 120 bp, Artificial Sequence
  ENSG00000283462_6 (sequence is synthesized)
aaaatttaatctctccatttgcttattcctattaacatatatagaaaaaaaacttgctctaaacctaatgcctatgcgatatgtttgtttcctgatgctgatgataaatcataaccgggc

SEQ ID NO: 808953 - DNA, 120 bp, Artificial Sequence
  ENSG00000283462_7 (sequence is synthesized)
acttggttatattttttaatgttctacatttctagcactgctactgtattcacaatgagctttatatctgacagtaattttattttcaggttcagtcatatgatgcctttctataggaat

SEQ ID NO: 808954 - DNA, 120 bp, Artificial Sequence
  ENSG00000283462_8 (sequence is synthesized)
ttcaattaccaaagtccttcatccagaaagtgctgttgatttccagtaattcttattctgtttgatttcttttttttttcctcctagtttaacacatgccagttggtgtcgactgagtta

SEQ ID NO: 808955 - DNA, 120 bp, Artificial Sequence
  ENSG00000283462_9 (sequence is synthesized)
aaaatcttgaaataagcctggcactgtgtcagtacataggttaaaaaatgaaacaaaaaaatttaataaaatatacgctagaaatggaaaataagattagcagtggcatttcttgtcata

SEQ ID NO: 808956 - DNA, 120 bp, Artificial Sequence
  ENSG00000283462_10 (sequence is synthesized)
aggacattttctgtctatgcacacaaaataaaaccagctcagtgtagctgaagaagagaggaaagagagaggtggtataaattgaaagacgaaaaggcagagactgagtgtacagaagcg

SEQ ID NO: 808957 - DNA, 120 bp, Artificial Sequence
  ENSG00000283462_11 (sequence is synthesized)
cgttgagagcatgcagtcagctggcaagaaaaggcaactcgaagagcctcagaaggtaaaacctcagttggcagataaagtgggtaagaagcaagttttgaaataaaatagcaatagcat

SEQ ID NO: 808958 - DNA, 120 bp, Artificial Sequence
  ENSG00000283462_12 (sequence is synthesized)
aagcaacttgaaggaagatgaaaagagcaaggtgataaaagtatgcaagagtctttggagattattagtaattttagggaattacaatgatgaaaagttataagggaaaaagactttaca

SEQ ID NO: 808959 - DNA, 120 bp, Artificial Sequence
  ENSG00000283462_13 (sequence is synthesized)
tattctttaataaaagaaaattacctgtcaaaatctgtctgcatagacactagtattagattcttgttcttcaagaaaaaggcatgtctgctggtcaggctgaggtatcatctatcctct

SEQ ID NO: 808960 - DNA, 120 bp, Artificial Sequence
  ENSG00000283462_14 (sequence is synthesized)
atttctctaaataatgtttttctgataaaatatgcaaatacacaatacacatatatattttgtgtgtatattatgtgtatatgtgtgtgtgtgtacatacttatacataaaataaacact

SEQ ID NO: 808961 - DNA, 120 bp, Artificial Sequence
  ENSG00000283462_15 (sequence is synthesized)
ctggaactaaaatttcaaagaaagtcaaagaaaatagacaatagtggaactccacaaaacttaccagtaacctgaaatagtgtaacaaatttaaaattaattcccataaatcttctacat

SEQ ID NO: 808962 - DNA, 120 bp, Artificial Sequence
  ENSG00000283462_16 (sequence is synthesized)
gttaactcaaaacctggccatatctcgtataacaaggggtatgtctgagctcttctgctcaacctcctgccagctctgtatttcccagtcttcatgatgggtatcaagaaaagggaaaat

SEQ ID NO: 808963 - DNA, 120 bp, Artificial Sequence
  ENSG00000283462_17 (sequence is synthesized)
aagaaagacttggcatttgagttttgaaggttagagctacatatttgatgatcaagagctctcaaactgcacctggatactaattctgaatggaaacttacaattgtaaggtggacaaat

SEQ ID NO: 808964 - DNA, 120 bp, Artificial Sequence
  ENSG00000283462_18 (sequence is synthesized)
cagccctttttaaaattgtatcttttatagaaacatcattatatggaacaattggaagaagcaaatttatttaaatgtgcatttttaaggcatttcaacaaaagcataactagcagaagt

SEQ ID NO: 808965 - DNA, 120 bp, Artificial Sequence
  ENSG00000283462_19 (sequence is synthesized)
acaaaaaattctgaatcagttaaaagactatcctcagaatatgcgattaaaatccacatacaagccatgaaataaaattcagaagtatgaactatagcataacatacaactgatattcca

SEQ ID NO: 808966 - DNA, 120 bp, Artificial Sequence
  ENSG00000283462_20 (sequence is synthesized)
acccattaaaataatatctaagactaataaaatactactttaaacaacttatcaaagtcatccattcttttgtagcatgcctttatagttgcatcatagtcatcaaatataagtaacatt

SEQ ID NO: 808967 - DNA, 120 bp, Artificial Sequence
  ENSG00000283462_21 (sequence is synthesized)
aaacatttaattacaagtaactcgtaactctttcagcccagtgcatatgcccagctttttatttaaatttgtatttagtttcacttaaccttttaaccttttgaattaatagcaaatatg

SEQ ID NO: 808968 - DNA, 120 bp, Artificial Sequence
  ENSG00000283462_22 (sequence is synthesized)
ggtgtgagccaccacacccagcccttaataacattttatgtagattgtattttaacatttaccaggcctaaataaaatgtccctgctttggaagatatatttttttaagcataaaatgat

SEQ ID NO: 808969 - DNA, 120 bp, Artificial Sequence
  ENSG00000283462_23 (sequence is synthesized)
ttaagcataaaatgatgaattagcaattccctataataaagtgattcatgtttattacttaaaatttttcatagcaatagaaattcaagcaaaactatcacaataatctattttaaaagt

SEQ ID NO: 808970 - DNA, 120 bp, Artificial Sequence
  ENSG00000283462_24 (sequence is synthesized)
cacttaacaacaatataaggatcagaattgacttttgatgcctagctccttgtattgatttcctcaattattctgaacaagaacagccattaatcagaaaagtctgaagaacgttaaggt

SEQ ID NO: 808971 - DNA, 120 bp, Artificial Sequence
  ENSG00000283462_25 (sequence is synthesized)
ctagtttttcagactactagaatattctaaaattccgaaaaagaaagaacaaagattctaatttcagaggcttttaaaatgcctaatttcagtaggtctcaattgtaaagattccatttt

SEQ ID NO: 808972 - DNA, 120 bp, Artificial Sequence
  ENSG00000283462_26 (sequence is synthesized)
aacagcatgggtaaactaaaatacgttttgctagcacctactgatgcagatgtgcaactgaagtaaaagaatatactttgaaaagtgtaaaatgccatgtaaataaaaagtattataaat

SEQ ID NO: 808973 - DNA, 120 bp, Artificial Sequence
  ENSG00000283462_27 (sequence is synthesized)
cacatttcataaactcagttgatcaagaaatgtaattatagttttctataaaataattttatttggagtccagattcctccctgtggtagaacttaatctaggcaattcaccaccatctc

SEQ ID NO: 808974 - DNA, 120 bp, Artificial Sequence
  ENSG00000283462_28 (sequence is synthesized)
cccattcttctatttcctacttctgggatgtgttcacagatcaaaagaatgagcgcgcagtgtaaaggtgtactttgccaggatcgttaggtatgccctgagcatctaccgagatgcctc

SEQ ID NO: 808975 - DNA, 120 bp, Artificial Sequence
  ENSG00000283462_29 (sequence is synthesized)
tggtcacatagtgccttcaatcttagttcatgcacattattctaaatcatctgtctttccaaaccatcaagtcaagcccagcttttcctaatatattagtatccttctgtggtccatagg

SEQ ID NO: 808976 - DNA, 120 bp, Artificial Sequence
  ENSG00000283462_30 (sequence is synthesized)
actattctttgacaagcaccactaaagtctgtggagccaagtttctgtctattcctctgccacttgtgtgcatcttccacccctcccaggctatcacaggtgcccagaaactctgccaag

SEQ ID NO: 808977 - DNA, 120 bp, Artificial Sequence
  ENSG00000283462_31 (sequence is synthesized)
tttttctaagaccttctctactcggggcttgtttcctgatgccatgttgctacctccctgagcattaccctgaaatgaggaaaaaataaagtcctgggaccacttgtacatgcaccctac

SEQ ID NO: 808978 - DNA, 120 bp, Artificial Sequence
  ENSG00000283462_32 (sequence is synthesized)
ttagaatttctgtctccattcctccggctcaggctgggagatgtagtgtgaggcccttcttctcagatacccaccactgtctaaactctactatatttgtcttgataccctcttaccatg

SEQ ID NO: 808979 - DNA, 120 bp, Artificial Sequence
  ENSG00000283462_33 (sequence is synthesized)
ttgttatggaatctcctttagcctcagggaaagaaaaccttgttcttataataggtaagaactttaatctgccaaatctatattatcaaaaaatcctctacttattaacctcattcaact

SEQ ID NO: 808980 - DNA, 120 bp, Artificial Sequence
  ENSG00000283462_34 (sequence is synthesized)
cagcaattcaggcataattgcaatcattttaggcttctttacccaggattgcattagatttcaagaggctgtgccagggcagggaggacaaccatctcaacagagacttcagctacattt

SEQ ID NO: 808981 - DNA, 120 bp, Artificial Sequence
  ENSG00000283462_35 (sequence is synthesized)
aactccagtaggtccacaaacatcagtccatgtaggtacaattaaaccagccattttccaactgcagggcttcttcagacactcctgtccattcatttacttatatgacttggccagaga

SEQ ID NO: 808982 - DNA, 120 bp, Artificial Sequence
  ENSG00000283462_36 (sequence is synthesized)
cacaggggctcattctgttatttagggcccatactgaagcatgaaacttctgcactccatctgtttatccctgaccaaacatgtcttacagccttctctgggtcctgacattgtctgtgc

SEQ ID NO: 808983 - DNA, 120 bp, Artificial Sequence
  ENSG00000283462_37 (sequence is synthesized)
tttatgcggaaagggaaggacgagtcatctgtgtccccaaattgccccaaaacattattgcttcacccaggcccattcctggcaagcaatggctcccaacatcttttccttaggaatcca

SEQ ID NO: 808984 - DNA, 120 bp, Artificial Sequence
  ENSG00000283462_38 (sequence is synthesized)
tcctatctacttatgtattattttgtggcacaattattcttcttcttggagtataggacgtaaaaaggagccataacacttggctatcaatttgaattggctacttgaatgtgaaaattc

SEQ ID NO: 808985 - DNA, 120 bp, Artificial Sequence
  ENSG00000283462_39 (sequence is synthesized)
agaattaatgtgctttgttttctctgctttctgtggtcttatcccttttctgaaacaaggaaggtgaatgctgagcttctgaatgaagaaagtttccgtaggagaaggaaactgttaaaa

SEQ ID NO: 808986 - DNA, 120 bp, Artificial Sequence
  ENSG00000283462_40 (sequence is synthesized)
gggttttagttactccactcagaaacataaaatttattttgtattcaaattgattagtccttttattttctttatgatttttacctttggaatttttcatgggatcagtaacctggttta

SEQ ID NO: 808987 - DNA, 120 bp, Artificial Sequence
  ENSG00000283462_41 (sequence is synthesized)
cagaaaacagtattaaataggttgaggaaagctaggctacattaagtaaactgtcttccttttagttctttaatattaaggaataaaaatgcatggcacacacaataaagaccacactaa

SEQ ID NO: 808988 - DNA, 120 bp, Artificial Sequence
  ENSG00000283462_42 (sequence is synthesized)
aagatttgtataaattataaggttttatataaatattatattattataatctgagctcctaggaaatatatatcctcagtgatctaaatggtattatcattgtcagtagaaaagggagag

SEQ ID NO: 808989 - DNA, 120 bp, Artificial Sequence
  ENSG00000283462_43 (sequence is synthesized)
agtagaaaagggagaggaaacatttaccagtttggataaaatggaaaaaaaaatatatatatatatagaaaactgcatctttttgttccaaacacaaaccatccacaaacacatcaaaag

SEQ ID NO: 808990 - DNA, 120 bp, Artificial Sequence
  ENSG00000283462_44 (sequence is synthesized)
tgttctgattccctacctgtgcaatagaatatataagaaaatgtaatgttcccagtaattcagcgtataacaaaagctatatgttatttatctttagctaccgttgttctttcaacttgg

SEQ ID NO: 808991 - DNA, 120 bp, Artificial Sequence
  ENSG00000283462_45 (sequence is synthesized)
tcataaaatatatagatctagccattagtatattgtgatttctctgtcttgacattgttatcttgtatgcaaaatattctcatattgaatgttattccaatggtatgtttttaacatttg

SEQ ID NO: 808992 - DNA, 120 bp, Artificial Sequence
  ENSG00000283462_46 (sequence is synthesized)
aaaaagtacaggacaatgacaggaaagctggagtcaaaaatccctgagcaaacaaggatgttcacctacatctccaacactgaattgaaattgcaggcttgactaatcatttgctattcc

SEQ ID NO: 808993 - DNA, 120 bp, Artificial Sequence
  ENSG00000283462_47 (sequence is synthesized)
agtcttgagtcttcctaattataatgataaagataaagttaaaaagcacctgaagcacacatagcaggactttaattccaagactgccctgctttttttttttttttaatagctttataa

SEQ ID NO: 808994 - DNA, 120 bp, Artificial Sequence
  ENSG00000283462_48 (sequence is synthesized)
gttcagtgtgcacttagctttccataagaatcacttatctactagttaatttccaatcctcaagaaatgcagagaaattgggatggccttagcataaattctcctctttcacaagacata

SEQ ID NO: 808995 - DNA, 120 bp, Artificial Sequence
  ENSG00000283462_49 (sequence is synthesized)
actagaaaaaacccataggacaattgtggtttttgaaataaaagtagtcaaattacactgatatataaagaaatggcaatttatgtttgatgaggtatacatctttatagaatggattga

SEQ ID NO: 808996 - DNA, 120 bp, Artificial Sequence
  ENSG00000283462_50 (sequence is synthesized)
aaacgatcaatattaatgtgatctagattacatgaaactccaaatttattgtgtaattacatacttaaatatcataccaacactttgttttgttcatttttaaggttatcgtatttttat

SEQ ID NO: 808997 - DNA, 120 bp, Artificial Sequence
  ENSG00000279571_0 (sequence is synthesized)
catctgttttattcagtttcttcagtgtgtccagcagtttctgtggggtgaggatgtgtgtggatcctggaggaggcagagaagacagtgagcttgccagttctggtttccaacacttcc

SEQ ID NO: 808998 - DNA, 120 bp, Artificial Sequence
  ENSG00000279571_1 (sequence is synthesized)
tttcctgcgcttctcgattcccagatctgcacccacccccctccccaaccctggtctgggtatagtggaagcagggaggggagtcagaattggggttggggtcccgtcgcaataggcctg

SEQ ID NO: 808999 - DNA, 120 bp, Artificial Sequence
  ENSG00000279571_2 (sequence is synthesized)
ggagatatttgggggctgtggataaacaaaacacatcctctggctcaggcagggtcccaggctgcaccaaggaacgagctgcctcaccatcagggtgcagagccatctgcaggtgatggg

SEQ ID NO: 809000 - DNA, 120 bp, Artificial Sequence
  ENSG00000279571_3 (sequence is synthesized)
taaactccaggtgaagccagggagagaaattccaaacatggcaaggcagggaaaggctgaaaatggggccagagttggtagggggaccatgtgtggaaagcatggtgcctgggagaggaa

SEQ ID NO: 809001 - DNA, 120 bp, Artificial Sequence
  ENSG00000279571_4 (sequence is synthesized)
gttgataggcaaagccccctgggagaatccactgacctctgggagccagccagttggtactgccctggtgggtgggacctcaggtgtgagagggaaagggccaggggacctgaggcctta

SEQ ID NO: 809002 - DNA, 120 bp, Artificial Sequence
  ENSG00000279571_5 (sequence is synthesized)
ccttgcagagaccgcgtattgtaagagattagaaatgcttgcaaaaatttaagctaatggaattagatatacttctactgcaaaaataaaaataaaaataaatgaaagtctttgtcataa

SEQ ID NO: 809003 - DNA, 120 bp, Artificial Sequence
  ENSG00000278627_0 (sequence is synthesized)
gggggaagctgtggccagtcaatattgggcagaaccagaagatcctgctggcagaagagtccctagagcttccaaagactaggtttctgtcctctgattgaaaatgtgagtggacaactg

SEQ ID NO: 809004 - DNA, 120 bp, Artificial Sequence
  ENSG00000278627_1 (sequence is synthesized)
tgctcagtgtgcatcagactgaggagtgtgtcctaacctaaaaagctgttttaacccaaaactcataaccacaaatccgacacttagtgatattactgggctcgactgcattcattagac

SEQ ID NO: 809005 - DNA, 120 bp, Artificial Sequence
  ENSG00000278627_2 (sequence is synthesized)
tgaatgagtgagcaaatgaataaatgaatgaacaagcaaacaaatggagagcaatgataaaattcatctactcagaaaaggacggcacactatgattctgttgatatgagaggtcctgca

SEQ ID NO: 809006 - DNA, 120 bp, Artificial Sequence
  ENSG00000278627_3 (sequence is synthesized)
taggtcaatatagagacacaaagtatattagaggtgattggggctggggtggggatggggattgactgttcttacaaggtttctttggggagtgaaaatggtgtgatattagatcatggt

SEQ ID NO: 809007 - DNA, 120 bp, Artificial Sequence
  ENSG00000278627_4 (sequence is synthesized)
gatgggtgcataactctaaatacactaaaatcattgaattgtctatttcatatgggtgaattttatggtatatctcaataaagaagtttttaaaaagttttcagaaacttccaaagacaa

SEQ ID NO: 809008 - DNA, 120 bp, Artificial Sequence
  ENSG00000278626_0 (sequence is synthesized)
gtatatttaatatattcattttattttaattttatgtaggttcctcattccttcatatgtgtattacatttccctggaactatcacgtattttatatacttagcaatggaaagctcctgg

SEQ ID NO: 809009 - DNA, 120 bp, Artificial Sequence
  ENSG00000278626_1 (sequence is synthesized)
tttcagttgtctgtgcagcaggcagggggaggagaagaaaatgggtcacactcctgaccctgcctgcatagccacaggttcccaaaagcagaggtccctgctgtgcaccttccctgggac

SEQ ID NO: 809010 - DNA, 120 bp, Artificial Sequence
  ENSG00000278626_2 (sequence is synthesized)
gggtatgggcccaggtgcagctactgaatccagtgcaagagtggaaataagcttccaaaacagtatcacctgagagagaactgagtccatccctgtagtaccatctgagttacagcttcc

SEQ ID NO: 809011 - DNA, 120 bp, Artificial Sequence
  ENSG00000278626_3 (sequence is synthesized)
tgggcaaaggctcagaatcataaaaactttacatatgtgtcatgtgctgtgattcttctgtgtcactgtatgttgagctatatctgtgtggtgccacttacacttaatgagatgagattc

SEQ ID NO: 809012 - DNA, 120 bp, Artificial Sequence
  ENSG00000278626_4 (sequence is synthesized)
cttctacttgtttcacgtcactcgtgatctctgaagctacttcagatttctgctttaatatgtaaagagcatgtcaatcatcacccacattcttaccataataaaagtctggaaaattga

SEQ ID NO: 809013 - DNA, 120 bp, Artificial Sequence
  ENSG00000278621_0 (sequence is synthesized)
cagtgtaagatattatagggtatagggaaccgataacttgttgggattatgttgtccacctgcatcttagagcaatcaaatcgctcaggactaaccaagctggaatctcctcgaatgctg

SEQ ID NO: 809014 - DNA, 120 bp, Artificial Sequence
  ENSG00000278621_1 (sequence is synthesized)
actgcagcattcagtaaaagagcaaagctcctgggtcgtttcatcctgggctgcgtggctcaccaattggacagtcctgcttgttgcagatctggttttctgttacatcaccaacgcagt

SEQ ID NO: 809015 - DNA, 120 bp, Artificial Sequence
  ENSG00000278621_2 (sequence is synthesized)
tttctgtacccctcctccacaggtgacagaacagatgtcccatggtgaccaaggaccccagcctccattgactgtaagaagatgaaccacaggcaacaattaagatcaactttcaaatcc

SEQ ID NO: 809016 - DNA, 120 bp, Artificial Sequence; identical to SEQ ID NO: 421111
  ENSG00000278621_3 (sequence is synthesized)

SEQ ID NO: 809017 - DNA, 120 bp, Artificial Sequence
  ENSG00000276282_0 (sequence is synthesized)
tttttgttttcaagctcttaaacattatttatttaattaaaacaattttaacctttaaaaatatattttctttttgtatctccaaatagtttacttctctctctttcttttgttgttggt

SEQ ID NO: 809018 - DNA, 120 bp, Artificial Sequence
  ENSG00000276282_1 (sequence is synthesized)
ttttcttaaacttctactgttctagttctcattcttaatattttctctttgggactgcggcctttttccttttgctttgcctaatttactagtcatgataccagttgtgtacttcagata

SEQ ID NO: 809019 - DNA, 120 bp, Artificial Sequence
  ENSG00000276282_2 (sequence is synthesized)
cctgacttgtcatattatattatattggaaattatgtttaagcttcttaagctgttagcttcttgagggcagggaaccgtgttgccttctgtttttattcttgttgcctaacactggcct

SEQ ID NO: 809020 - DNA, 120 bp, Artificial Sequence
  ENSG00000276282_3 (sequence is synthesized)
tggcacatggattagatgctctacaagtgtttgttgtaactgaaccattaattcttctacaaaagtttctgtaaggtctaactagttaggttcagaagtgatatttaaaatgtttaataa

SEQ ID NO: 809021 - DNA, 120 bp, Artificial Sequence
  ENSG00000276282_4 (sequence is synthesized)
ttgttattgcatggacactgactaataaatatgaacagataacagacaaactatttgtagagctgaataaggcttttgagtattttgatattctctattataataaataatcttaacttg

SEQ ID NO: 809022 - DNA, 120 bp, Artificial Sequence
  ENSG00000233456_0 (sequence is synthesized)
agtgctcagcaggcagaactgtcacactgcgcacctgggacctgactggaagcaaagagaagctattcttcagaacccagcaaaacaccttccttggactttataggcacctcagtgttt

SEQ ID NO: 809023 - DNA, 120 bp, Artificial Sequence
  ENSG00000233456_1 (sequence is synthesized)
accactaccctttgaggtgaacccctaagctgggatggactgtcgcatggccgtcggtgcctgtgtctccccgtctccaagcctcctctctccctcccagtgccccgtcatcttcatccc

SEQ ID NO: 809024 - DNA, 120 bp, Artificial Sequence
  ENSG00000233456_2 (sequence is synthesized)
actagaagcccaagcctcttctagtgaccctacattctcagagccccgaagcagagaacagaagctgcttctacagccgctccagacccagaggccagacctcacttgtgagctgtttac

SEQ ID NO: 809025 - DNA, 120 bp, Artificial Sequence
  ENSG00000233451_0 (sequence is synthesized)
gcttttattaatataaatttgtagatttgaaattttttcaaaattctctttgtgctactgtctaaactaaacaatataggaaaattataatagagcagaaacatcgcatataagcctaat

SEQ ID NO: 809026 - DNA, 120 bp, Artificial Sequence
  ENSG00000233451_1 (sequence is synthesized)
aaaagagaattccagccaggtgtgtgagccaccatacccggccacaaatttatattttaaaagtttgtataacataaaatgtgtaaaaccgttaaataaaggaaatattaaaatcttttt

SEQ ID NO: 809027 - DNA, 120 bp, Artificial Sequence
  ENSG00000233451_2 (sequence is synthesized)
tgaagaaaacaaaattaatttttatacgtggaatatgtgtcccttcacgaagaatggtattttatataagtttaaggtaactttcaatgcaattttgttacaaagttacagaaagatgca

SEQ ID NO: 809028 - DNA, 120 bp, Artificial Sequence
  ENSG00000233452_0 (sequence is synthesized)
ggtccaaacatgaaagaattcccaacatcaagattgattgaaacatattcaatgggatgtaggctggtggcagaaagtagaccctggagaacaggagcacttggtttcaaataaaatacc

SEQ ID NO: 809029 - DNA, 120 bp, Artificial Sequence
  ENSG00000233452_1 (sequence is synthesized)
tgcattaaatattcagctttcctgcacctttatcattacatttgatttgcaaagaagatagaagtcttaagtcactgtacaaagagaaagatataaaagtttaaaaagatacaatgactt

SEQ ID NO: 809030 - DNA, 120 bp, Artificial Sequence
  ENSG00000233452_2 (sequence is synthesized)
ttggcatcgatttggggaaaatgctttcaaactctaaaatcttataaagatggggaaaataattactaataaaggcctactacggccttttatatgtgtaactggatcttggttcatgct

SEQ ID NO: 809031 - DNA, 120 bp, Artificial Sequence
  ENSG00000233452_3 (sequence is synthesized)
gagcttaaaatttgatcttctgaatatcagcagaaagactctttctggtgaatacagatcttctgagcaattatcgactgactttgtcattagactgccctttcagaaggtacaaaaaaa

SEQ ID NO: 809032 - DNA, 120 bp, Artificial Sequence
  ENSG00000233452_4 (sequence is synthesized)
ttcctcatggtctcggaggggctcccccgcagcccgggaggggaggcacagggggtccccgggcgggggagaccacccggggccgaaggcagcttcgaccgcggaaacggaggagtggga

SEQ ID NO: 809033 - DNA, 120 bp, Artificial Sequence
  ENSG00000233452_5 (sequence is synthesized)
gtgtgaggagaaatatgcaatgatgacatttccaagaagtgatggcatctggcgctaaggacaaagaatgggattttgccacagggatcttattctcccacatgttctgtctgaaggaga

SEQ ID NO: 809034 - DNA, 120 bp, Artificial Sequence
  ENSG00000233452_6 (sequence is synthesized)
aagttatctgaggccttatatgatgcaaaactttggactcaaagaaattaaatcacttgcccaaggttacatagctgcccctggcaaacaccattctactttccgtctctatgaatttga

SEQ ID NO: 809035 - DNA, 120 bp, Artificial Sequence
  ENSG00000233452_7 (sequence is synthesized)
ctactcgaagtacctcatgtgaaatgttggtgccaaatgaacttttctggttcttctgaatatgccactgttgctggagaaatgtcactgctagagaacagaagactattattccaaagg

SEQ ID NO: 809036 - DNA, 120 bp, Artificial Sequence
  ENSG00000233452_8 (sequence is synthesized)
gtatttgagactgactgaatcaggtctggaacattattgaaatgagacccacaaaagaagagatactgaggtggtgaccagatggatataaacgggctgtggaaaaagagaatgcatggc

SEQ ID NO: 809037 - DNA, 120 bp, Artificial Sequence
  ENSG00000233452_9 (sequence is synthesized)
caaaaatggtggtgctctctgtccaaaaactgaggccctatgaccatgaatgaagccagagggcaggtaggaatagatcatttgctccagaagaagctggttgccatgtcttgaggacag

SEQ ID NO: 809038 - DNA, 120 bp, Artificial Sequence
  ENSG00000233452_10 (sequence is synthesized)
taaaccctctggggaggttcctgtggtaaggaacaagggctcctggcaatagcctctgagtgagccaccttgaaaatggattgtccagccccagtcaagctttcagatgactgtagctcc

SEQ ID NO: 809039 - DNA, 120 bp, Artificial Sequence
  ENSG00000233452_11 (sequence is synthesized)
ctcatgagatcccaagctacaaccactcagttaagttatgccaaaattcctgattcacagaaattgacatacaggagaggtcacagttaagatcttgatgttctatcttgacccataata

SEQ ID NO: 809040 - DNA, 120 bp, Artificial Sequence
  ENSG00000233452_12 (sequence is synthesized)
taggaacttcatcttttgggaagcaccagggagagctgcctgtgcctggcagaagctgcccatgccccactgataccccacagtacttcctgttctgcttagtactcctgcttctttcta

SEQ ID NO: 809041 - DNA, 120 bp, Artificial Sequence
  ENSG00000233452_13 (sequence is synthesized)
caaacaactgtgattctctacctgggagcttcctctggccacaggagcctgctcacctgattgggacaccctagcagtactggctcatagatggaagggacttgccttgtcgctgatgag

SEQ ID NO: 809042 - DNA, 120 bp, Artificial Sequence
  ENSG00000233452_14 (sequence is synthesized)
actttcgacttggacttttgagtcaatgctggaatgagttaagactttggggaactgttggaagggtgtgattgtgttttgaattgtgaggacatgagattttgaagaggctaatggcag

SEQ ID NO: 809043 - DNA, 120 bp, Artificial Sequence
  ENSG00000233452_15 (sequence is synthesized)
ttcccataatccccacgtgtcgtggggtggagccggtggagataattgaatcatgggaacactttcccccatgctgttattgtgattgtgaattctcacgagatctgatggttgtataaa

SEQ ID NO: 809044 - DNA, 120 bp, Artificial Sequence
  ENSG00000233452_16 (sequence is synthesized)
gaacactttcccccatgctgttattgtgattgtgaattctcacgagatctgatggttgtataaacgccttccctcttcgctgggcactcatttttctccttcctgccaccatgtgaagaa

SEQ ID NO: 809045 - DNA, 120 bp, Artificial Sequence
  ENSG00000233452_17 (sequence is synthesized)
gaacacactcagaaattttctcaacacagtttctatgcagagaagagatgtgggacagatttgaactgctgtcatatttgtatgaacccaagacattttccaagaccaagagggataaag

SEQ ID NO: 809046 - DNA, 120 bp, Artificial Sequence
  ENSG00000233452_18 (sequence is synthesized)
acagcaatttctatgactggcattttacgtgcatgcactgtttccaagtgttcttgtgttctgtgccttaaacattctgtgttgcaactttatgaattgaattaaagataatcccaagcc

SEQ ID NO: 809047 - DNA, 120 bp, Artificial Sequence
  ENSG00000233452_19 (sequence is synthesized)
tgctacagaacaagtgtcttggttcacagcaaagaggacaaagaaaacagcaagttttagggggttgaatcctggattcccctggcaaacaccattctactttccgtctctatgaatttg

SEQ ID NO: 809048 - DNA, 120 bp, Artificial Sequence
  ENSG00000233452_20 (sequence is synthesized)
agcagtgtgagacaggactaatacacaaaggatttgaaatcacaaaggagctgttttctgctccaccatggaagtctcacatgcatcacatctattcatatccatttgccacaactagac

SEQ ID NO: 809049 - DNA, 120 bp, Artificial Sequence
  ENSG00000233452_21 (sequence is synthesized)
aaaaagtcctttttaaaatctgcctagagatcaggaagtattatctctggatgcctaggcaggagaggtgaatcagatattggtgggcactagtgtgttctatgatacatagcttaataa

SEQ ID NO: 809050 - DNA, 120 bp, Artificial Sequence
  ENSG00000233452_22 (sequence is synthesized)
aaataagtttcagataaatctaaatatacattagaatactgtaaccacagtagaaaaaaatattggctcctttttgtgataaactaatgatggtaaatgcaccctatttaagcaagaaaa

SEQ ID NO: 809051 - DNA, 120 bp, Artificial Sequence
  ENSG00000233452_23 (sequence is synthesized)
gaaactgatctgccataaagaaaacaatgacatatttaactacaaaatatgttacaaaatattaatatccctaatggacaaatgagttccaataaatggataacaaaaaaccaataagtc

SEQ ID NO: 809052 - DNA, 120 bp, Artificial Sequence
  ENSG00000233452_24 (sequence is synthesized)
tgtagaaaaatggagaaaatatatttgcagaatatttatacaggtggtaatgaaattgacaatgatgtttatcatcagcagtaaacagtaaaaagtttcacccaccaggactatagaaat

SEQ ID NO: 809053 - DNA, 120 bp, Artificial Sequence
  ENSG00000233452_25 (sequence is synthesized)
ttttcaaatggataattttcagaatcagcaaagttatagaaaagtaggtaccagttgcacataccattggaggaaatgtaaaatatagttaccttgtggaaagtaatctgatgtaatata

SEQ ID NO: 809054 - DNA, 120 bp, Artificial Sequence
  ENSG00000233452_26 (sequence is synthesized)
ttaaaattttatccatgtatgtcctataattcagcaattccatgttggggaatccatacaaagaaatacttatacacatgcagaaggagctaagtttaagaaagcacacatttcagcggg

SEQ ID NO: 809055 - DNA, 120 bp, Artificial Sequence
  ENSG00000233452_27 (sequence is synthesized)
aaaaaaaaaaaaaaaagaaagaaagcacatatttcaatatcatctgcaatggtataaaatcatgctaatttaaaaatccattaataaggactggttaaacagtttatagtttattcacta

SEQ ID NO: 809056 - DNA, 120 bp, Artificial Sequence
  ENSG00000233452_28 (sequence is synthesized)
gactggttaaacagtttatagtttattcactatatgtaattttataagttaccaaaatcatagacttactgtaaaatgatttttcaattagtaacttttcaccataacttttttggggta

SEQ ID NO: 809057 - DNA, 120 bp, Artificial Sequence
  ENSG00000233452_29 (sequence is synthesized)
cctcctagcttggcggaatactctgctctgatggaagtaccatcctggtccaaacatgaaagaattcccaacatcaagattgattgaaacatattcaatgggtggtgaccagatggatat

SEQ ID NO: 809058 - DNA, 120 bp, Artificial Sequence
  ENSG00000233452_30 (sequence is synthesized)
gcgggaaaaactttaagcatgaaataaaagatgggttgtgataaaagaggactgaagaaggaaaaggaatgaaaggttctgccatccttcatggcagcccactccacttggtatgagata

SEQ ID NO: 809059 - DNA, 120 bp, Artificial Sequence
  ENSG00000233452_31 (sequence is synthesized)
ctgctcccttggctgaaagttaactgctgtactccctccactttctataaatgactccctgtgcctttccttcaccacacaactcacactctcttccttcctagtgagtccactaaggct

SEQ ID NO: 809060 - DNA, 120 bp, Artificial Sequence
  ENSG00000233452_32 (sequence is synthesized)
tcactgcattattacatttatttcatttaggaaaaactgactttattttccttcaaattgttttttattgtttatatgagcttggttttattgtcattctatttttctccatgaaaatag

SEQ ID NO: 809061 - DNA, 120 bp, Artificial Sequence
  ENSG00000233452_33 (sequence is synthesized)
agaaaaatagggtcgaaaggttaggttgggtggaaaggaattatattttttctcactaaaattgatgtaaatatcgttttcaattgaatgattttacacagtggcacagtttcaggtatg

SEQ ID NO: 809062 - DNA, 120 bp, Artificial Sequence
  ENSG00000233452_34 (sequence is synthesized)
ttgctaagcaggaaagttgttaaccaaagcatgaatgtattaaggagatgtatgcagaatgacatgcaaggttatctatgattgctgagtgagaaagagcaagttgctgagtattatata

SEQ ID NO: 809063 - DNA, 120 bp, Artificial Sequence
  ENSG00000233452_35 (sequence is synthesized)
ctcgaagtacctcatatgccactgttgctggagaaatgtcactgctagagaacagaagactattattccaaagggtatttgagactgactgaatcaggtctggaacattattgaaatgga

SEQ ID NO: 809064 - DNA, 120 bp, Artificial Sequence
  ENSG00000233452_36 (sequence is synthesized)
aaaaaaaaaaaaggcctggactgatctgaaatgaccctattaataacaattatgtccaggtctgtattgcatacttgtcattcattacaggatcttgagacacaatgcaaaggatcacat

SEQ ID NO: 809065 - DNA, 120 bp, Artificial Sequence
  ENSG00000233452_37 (sequence is synthesized)
cgcagctctgtaacttgttaactataagattttgagtaacataacaccttactccttaaaattgcttaaaaaaaatctgaacatcaggaatattctacttcacagggtcgttgtgataat

SEQ ID NO: 809066 - DNA, 120 bp, Artificial Sequence
  ENSG00000233452_38 (sequence is synthesized)
taaatgtagtaatcaatgacaatagtgccagatacagtagatagcctacactttgcagctactatttctatctatcatccatctattaatatatatcatctatctttaacttatcatcta

SEQ ID NO: 809067 - DNA, 120 bp, Artificial Sequence
  ENSG00000233452_39 (sequence is synthesized)
tcttgttccagttttttaaaatgaacatgtattaactttgtaaaaaattaaggctataagatgtgctgagcttttggaatagattttcctgtactatatatgactgccagtgggagaatt

SEQ ID NO: 809068 - DNA, 120 bp, Artificial Sequence
  ENSG00000233452_40 (sequence is synthesized)
ggtgcttgcctctggataatgctgacttcctctagagtggtcaccaaggtgaaatgttggtgccaaatgaacttttctggttcttctgaatagacccacaaaagaagagatactgaggtg

SEQ ID NO: 809069 - DNA, 120 bp, Artificial Sequence
  ENSG00000233452_41 (sequence is synthesized)
tttttttttttttttttttgctgtgccctgctgtgttcacccttacagaggacatctggtcatgtagcaaagagaattattcagtacgtttttccaatatcccctcagtcaatcagtcaa

SEQ ID NO: 809070 - DNA, 120 bp, Artificial Sequence
  ENSG00000233452_42 (sequence is synthesized)
tcagtcaacaagttatttattgagcacttgctgatgtgagcaacacagggctaatatgatagagttggctgcttttaaactcaatgcatcaattaaataacactgcatgattttgacttg

SEQ ID NO: 809071 - DNA, 120 bp, Artificial Sequence
  ENSG00000233452_43 (sequence is synthesized)
gcatacctcaaaggacaatattttccaaggccactgtgaactctgtaatgggaagctcacccactaatttcacatggaatcatgcattttggcctcatccccagtgtaagcttaaaggcc

SEQ ID NO: 809072 - DNA, 120 bp, Artificial Sequence
  ENSG00000233452_44 (sequence is synthesized)
gtcagatacaaaacattcaagaccaaattctgtcctcaggtgttcaaagaccttgctcatctggtctttacatattatgactgagaatgaacacccagaaagcaaatagagttggctgct

SEQ ID NO: 809073 - DNA, 120 bp, Artificial Sequence
  ENSG00000233452_45 (sequence is synthesized)
tttaaactcaatgcatcaattaaataacactttgcatgattttgacttggcatacctcaaaggacaatatttttcaagaccactgtgaactctgtaatgggaagcttacccactaatttc

SEQ ID NO: 809074 - DNA, 120 bp, Artificial Sequence
  ENSG00000233452_46 (sequence is synthesized)
acatggaatcatgcattttggcctcatccccagtgtaagcttaaagactgtcagatacaaagcattcaagaccaaattctgtcctcaggtgttcaaagaccttgttcatctggtctttac

SEQ ID NO: 809075 - DNA, 120 bp, Artificial Sequence
  ENSG00000233452_47 (sequence is synthesized)
atattatgactgagaatgaacacccagaaagcagtagaataagaaggacatttcttttttcaacatgaagttttgaatgttttcataaattttggattagagaccaggatacagtgggag

SEQ ID NO: 809076 - DNA, 120 bp, Artificial Sequence
  ENSG00000233452_48 (sequence is synthesized)
taagaatgaccactgggagtttgtgacaatgcttgctgacactttgtcatccgaatactctaccctctgtgactcaggcttcaatggacatataaagagattaattaaaccttttggaaa

SEQ ID NO: 809077 - DNA, 120 bp, Artificial Sequence
  ENSG00000233452_49 (sequence is synthesized)
gaggggtttctggtaactcaactcattaattcacactgctcagtgcactgggcctgaggaggtggttggcttgggaggagtggtgatgtagggccgtgaccacatcacaagccacaggtg

SEQ ID NO: 809078 - DNA, 120 bp, Artificial Sequence
  ENSG00000233452_50 (sequence is synthesized)
actctggaatctgaataattcttggggccaccctggcatttggcacaagatgggaaagccaaattttcacatgggtgttctcttctagttcagtggacaacatttgagaatgaactcaac

SEQ ID NO: 809079 - DNA, 120 bp, Artificial Sequence
  ENSG00000233452_51 (sequence is synthesized)
ccaggatagtgttgccagataaaatataagacactcagtgaaatttgaatttcaggtaaaccacaaataatttcttagtctaagtatgtctaaaatattgcattggactatgtattttta

SEQ ID NO: 809080 - DNA, 120 bp, Artificial Sequence
  ENSG00000233452_52 (sequence is synthesized)
aaaattatgttaaaatttaggtttacttgtaattcagatttacctgggtatcttgcattttttatttgctaaatctggcaatcttaaatcagaactttctctctgtcagttacattataa

SEQ ID NO: 809081 - DNA, 120 bp, Artificial Sequence
  ENSG00000233452_53 (sequence is synthesized)
gcaagaagcagcttagggtgttactgtgagactttctgtggattccatcttgcatagctctgtaaattagtcctaactcatctggcagtacaagtttagcaagggcaactcttggtcaac

SEQ ID NO: 809082 - DNA, 120 bp, Artificial Sequence
  ENSG00000233452_54 (sequence is synthesized)
acttggatgggacactacctggaaaaagctttaggggcattactgcacactggttaataatgtgagtttggagtcaagtgacatgagtttgaaacctgactttgcactgctagttatgta

SEQ ID NO: 809083 - DNA, 120 bp, Artificial Sequence
  ENSG00000233452_55 (sequence is synthesized)
acttagggccaattacttaaccttcctgtacctcagctgcttcatctgtgaaatggggataatggtatctaatctaaagttgtaaggattaatggagaagtacacataaggtgcttggca

SEQ ID NO: 809084 - DNA, 120 bp, Artificial Sequence
  ENSG00000233452_56 (sequence is synthesized)
atatcacaaaaactatgtaaatattatttttgcttgtgagatccagataaacttctggatatatttttacttattgtaaaagttaattagactgcttatattaacattaaactcaagtca

SEQ ID NO: 809085 - DNA, 120 bp, Artificial Sequence
  ENSG00000233452_57 (sequence is synthesized)
ccaattttaaattaattcattgcataaaagggtttaacttaatcatatgttcctgagtatctgcttaatcaaaccatgctataactattttaattgcatgactctgtacacagaaccact

SEQ ID NO: 809086 - DNA, 120 bp, Artificial Sequence
  ENSG00000233452_58 (sequence is synthesized)
ggagtctccatgttattcaggtttgtcaatttctactgtaatatcacaccaggggaatgagaatgttccatgaaaaagatccagggaaaattaaaaacttttaaaattatttttaacgta

SEQ ID NO: 809087 - DNA, 120 bp, Artificial Sequence
  ENSG00000233452_59 (sequence is synthesized)
tgatgattctatcaatatgagatgagaaaatagaaaatatgagataatgagttcaagagcttttaatgaggaaaagagactaaaaatttgctgagcaagaaaactctatcatgccattaa

SEQ ID NO: 809088 - DNA, 120 bp, Artificial Sequence
  ENSG00000233452_60 (sequence is synthesized)
atggcaaagtataaatataatttagaattccatctttggtctatgaaagaagactcattccacccaatctcttagtttttaatcagccagacatagtaaattttttcagcttcaattgaa

SEQ ID NO: 809089 - DNA, 120 bp, Artificial Sequence
  ENSG00000233452_61 (sequence is synthesized)
acataaatgaaaatataataccatttacatataaatgaaattatatccagttacagagtaatttctacttgaaattggagaaaacaataatgtatttcaaaaggtctggaaaagggaatt

SEQ ID NO: 809090 - DNA, 120 bp, Artificial Sequence
  ENSG00000233452_62 (sequence is synthesized)
ttgaaaaagacctactcggaattgaaaacccattgaccaacgccagctgcgtctataggcctggtgtccaatgcctccagggttcatgctgtttttctggacttggccccttgtgagtct

SEQ ID NO: 809091 - DNA, 120 bp, Artificial Sequence
  ENSG00000233452_63 (sequence is synthesized)
gtgggtgcactattcccagagaaacttcagttcttacacacatcttttcagcaatggcatttgcaaagggcctctcagagccatgaaaggggcatattcaagccctgacacccagggaag

SEQ ID NO: 809092 - DNA, 120 bp, Artificial Sequence
  ENSG00000233452_64 (sequence is synthesized)
gatccctagtgtaatgattcttctgggatggggctaggtttcctggtgctactgtaagagcttccagggaaatatacagagaccctggggtagtccttcaactcttgcagaggagccttc

SEQ ID NO: 809093 - DNA, 86 bp, Artificial Sequence
  ENSG00000233452_65 (sequence is synthesized)
gaccctggggtagtccttcaactcttgcagaggagccttcaaatgctagcctcattgctgatgagcaaaggggcagagttgctagg

SEQ ID NO: 809094 - DNA, 62 bp, Artificial Sequence
  ENSG00000233452_66 (sequence is synthesized)
cagaatggctgaatctgggagacggagcttgcagcgagtggagatcgcgccactgcactcca

SEQ ID NO: 809095 - DNA, 120 bp, Artificial Sequence
  ENSG00000233452_67 (sequence is synthesized)
gagactctgtctcaaaaaaaaaaaaaagagggatacaattgagatcaatacatataacgtacggtacatagcatcacatagaaggactcattgagcatttgcctgttcacatggctgggc

SEQ ID NO: 809096 - DNA, 120 bp, Artificial Sequence
  ENSG00000233452_68 (sequence is synthesized)
ggctgggcagaattcttgctctcactcaggtctcagggcctttgtcctgtactccacagagggattgtgcaggcctttgttttccattggaattaatttgaattctttacctaagtggta

SEQ ID NO: 809097 - DNA, 120 bp, Artificial Sequence
  ENSG00000233452_69 (sequence is synthesized)
cctgatatgcttcaacccagttcttgaaaacaaaacaaacgtgtatgtaaagcttctttggaactttgagtaagaaatttggcctatttttaagtgccaagagggaaaaagatgaatact

SEQ ID NO: 809098 - DNA, 120 bp, Artificial Sequence
  ENSG00000233452_70 (sequence is synthesized)
taatggattccatggctttttgtgagttgtgttgtttggaataaattgaaaaaagttttaagcaagctgttatggcttataactggataaatgtagcaatctaatatcctgttttatcca

SEQ ID NO: 809099 - DNA, 120 bp, Artificial Sequence
  ENSG00000233452_71 (sequence is synthesized)
ggttcataggaagtgaagatggtttcctatctgctgatactctctggaaaactcaaaccactttattattaatttttccaaggcagctatacatatacttgcttgtgatcctgtacttaa

SEQ ID NO: 809100 - DNA, 120 bp, Artificial Sequence
  ENSG00000233452_72 (sequence is synthesized)
gcctagtctttggtaagcaggtatgcaaagatgactaaagtaagtggcaaatacagcaggtgagaaagctagaacaagagcagtgtggactagcagagaatccaggaagaactaaagctt

SEQ ID NO: 809101 - DNA, 120 bp, Artificial Sequence
  ENSG00000233452_73 (sequence is synthesized)
acatggatgtccatagtgaaaagccacaggagatggccacctgaacccaatgcatctcttataattaatttcaaataagaatgttagaaaacacatttctgttctctggaacaatgctat

SEQ ID NO: 809102 - DNA, 120 bp, Artificial Sequence
  ENSG00000233452_74 (sequence is synthesized)
attggacgaagctagccaacaaatctgttaataattataaaatacctgaagcactttttatttgcaataaaacatatacaaatgctttgtattattttaaccaataaaaaggaaagaatt

SEQ ID NO: 809103 - DNA, 120 bp, Artificial Sequence
  ENSG00000233452_75 (sequence is synthesized)
taaatagatttttatgtaccctgatatttaaacctactcacactgctaatttggacctcaaattttgacttgaaactcagtcttcattttttcttttttgacctctatgtaacttcctct

SEQ ID NO: 809104 - DNA, 120 bp, Artificial Sequence
  ENSG00000233452_76 (sequence is synthesized)
tgatgccacccagacccatgacccatgccaaagaactgattcaactggttctgtgactcccacccatgaagtcactcaggacatgaagacagttttgacactcctgtgatttcatccctg

SEQ ID NO: 809105 - DNA, 120 bp, Artificial Sequence
  ENSG00000233452_77 (sequence is synthesized)
accaaatcgcagttcccattccttagcaccccacacacaccaaatcatcctaaaaaaccctcacctccaaattcatggggaggcagatttgagagatattgcccatcctccccactcagc

SEQ ID NO: 809106 - DNA, 120 bp, Artificial Sequence
  ENSG00000233452_78 (sequence is synthesized)
gctggagaaatgtcactgctagagaacagaagactattattccaaagggtatttgagactgactgaatcaggtctggaacattattgaaatggctcatagatggaagggacttgccttgt

SEQ ID NO: 809107 - DNA, 120 bp, Artificial Sequence
  ENSG00000233452_79 (sequence is synthesized)
gatgacgctagagctggcagcatgaccagcactgtgtaaatcacccagacagacaacaacacaacatccatgaatagatggcagagttagcaagaaaaaatagcttggaggatggaaaaa

SEQ ID NO: 809108 - DNA, 120 bp, Artificial Sequence
  ENSG00000233452_80 (sequence is synthesized)
ccaaaggatactccagctaagaaagtatggacgcttcccctagtttagaatgcacttcagatggattccaagctagaacaaggtctatctggaggtgaagtcatgtgacatgaactaatg

SEQ ID NO: 809109 - DNA, 120 bp, Artificial Sequence
  ENSG00000233452_81 (sequence is synthesized)
agatttttagagactttctttgacctgtgggtcagaaacttgggtgtgtgaaattctgtagggagttgtgcttcctcagaaggtttcactgttcaacttacaaaattctttgcactcaga

SEQ ID NO: 809110 - DNA, 120 bp, Artificial Sequence
  ENSG00000233452_82 (sequence is synthesized)
aatggagtcttcgtgtcatgccatctggtttcagtgctggattgtgaagtgtgggcttccagatggatgctctgtgcctggatgctgacctgagagtgcagcagggagggctctggggag

SEQ ID NO: 809111 - DNA, 120 bp, Artificial Sequence
  ENSG00000233452_83 (sequence is synthesized)
aaatattctagagatcactgacgcatttgagggaaattgaaaacaaaacgaaacagaacaaacagaagccttaaacagtaaaataacagcaagatgaaactgatttaagacaatcaaata

SEQ ID NO: 809112 - DNA, 120 bp, Artificial Sequence
  ENSG00000233452_84 (sequence is synthesized)
acatcgtttcctgttcattctccaaacacaagctttctctcgctttgacagaagcagaaagacccggagaaggccgggatgtcctcaatttccttcttttctgcttactcctttaaacat

SEQ ID NO: 809113 - DNA, 120 bp, Artificial Sequence
  ENSG00000233452_85 (sequence is synthesized)
atatcacaggaaagctggattgctctgcagtgagtgaaacgtggaaaggcctttccccaccaagcagtaggccaaattgtaacagtaagatgtatttgaaataaaatggttcatagatca

SEQ ID NO: 809114 - DNA, 120 bp, Artificial Sequence
  ENSG00000233452_86 (sequence is synthesized)
acgggaagaacctggggagatggtaaccacgttaatcatagtaaactgggatgaaaagacagagaataacacaatatagagacttttttaattattagaggaaaagataggtccaatagc

SEQ ID NO: 809115 - DNA, 120 bp, Artificial Sequence
  ENSG00000233452_87 (sequence is synthesized)
atgactagaggctttgaaaagtaaagacagctcaaaaggaacaaaattctcaaagcattgtaattgtacaatcctagctcaccttcatgagaggaaagtttaagaaacaggcagcaggag

SEQ ID NO: 809116 - DNA, 120 bp, Artificial Sequence
  ENSG00000233452_88 (sequence is synthesized)
ggggcttgctgtctatttttagaaagattttggccaaaaaaggaagtgttagcacaaaaagaagagtcaatttttacagacacatgaggggtagtgttttccaaaaagaccgaaacgtgg

SEQ ID NO: 809117 - DNA, 120 bp, Artificial Sequence
  ENSG00000233452_89 (sequence is synthesized)
cacaattgtattcacctttgtaactccagcacccactataagggcaaggccccccaaatgtcttccattgattttgtcatttggagaatttgctcccaggttcatatgagaaggtacggc

SEQ ID NO: 809118 - DNA, 120 bp, Artificial Sequence
  ENSG00000233452_90 (sequence is synthesized)
acacttttgttggagcctgaatgcaagagccattctcactgggatgccacagctctggagacttcttatagatgttgtttggaacactccaggcttggagatgggcctttagacactgcc

SEQ ID NO: 809119 - DNA, 120 bp, Artificial Sequence
  ENSG00000233452_91 (sequence is synthesized)
gcctgcattgactttcttccctgctgtgcctttctttccattcccctgccagtgcttcctggaatcatctccctcatcaatcatttgttcctaaattctgtctgagtctttaccaaaatc

SEQ ID NO: 809120 - DNA, 120 bp, Artificial Sequence
  ENSG00000233452_92 (sequence is synthesized)
gagtcatcgtccctcttctcccctcctcacattctcttcactgggggaggatggattgagttgactggcaaattcgggagaaggagtttgcatcggagtgcgtgactcagctgaggctgg

SEQ ID NO: 809121 - DNA, 120 bp, Artificial Sequence
  ENSG00000233452_93 (sequence is synthesized)
gctctgtttcttcagaatgaagtgcattcagattcgatgtgtatcctgtctctgggaagccccatgctctgctcatcttagcatgattactaaggtacactctgcccttgcaaggggaag

SEQ ID NO: 809122 - DNA, 120 bp, Artificial Sequence
  ENSG00000233452_94 (sequence is synthesized)
gcccgagatttgctgctggcaggctcagtgggagttggatgttttatgtaacctgattgtggatatagatcaattcatgcttttcaattcagtcctctctctaataaactgctgtcataa

SEQ ID NO: 809123 - DNA, 120 bp, Artificial Sequence
  ENSG00000233452_95 (sequence is synthesized)
attaaatcacttgcccaaggttacatagctgccacccaggagcttacaatttatgtgaggaaacagattgtatacatatacagataattaaaaatatatatgcccctggcaaacaccatt

SEQ ID NO: 809124 - DNA, 120 bp, Artificial Sequence
  ENSG00000233452_96 (sequence is synthesized)
tggatgccctagagtagtatgaggacttaattctctgaggaactccaggaatcaaaggactcagcagcatgtcacagaggaggactgaatcacaaatgaagtagatttagaggtacctct

SEQ ID NO: 809125 - DNA, 120 bp, Artificial Sequence
  ENSG00000204092_0 (sequence is synthesized)
taagaaaactgagacacagaaaagtcacacaagattatcgaggtcaacacagagaacagtggaacctgcacctgaccccaggcaggcggaaccttcatgaccacaccacaccaccacagg

SEQ ID NO: 809126 - DNA, 120 bp, Artificial Sequence
  ENSG00000204092_1 (sequence is synthesized)
gaacaggcagggaaaacaatgggtctagcaggacaaaagtgacatttcccagagtttcttgctgtttggatctggctgcagtttcagttttgccaagaagaggcatttccatgagctctg

SEQ ID NO: 809127 - DNA, 120 bp, Artificial Sequence
  ENSG00000204092_2 (sequence is synthesized)
ttgcagcaactggtatatccatggtcttgtcaccagcttcctgaattcggggcagctggagccacactagtggtccttccttgcaggggcagcagctgtctcctggtctcagaatcacag

SEQ ID NO: 809128 - DNA, 120 bp, Artificial Sequence
  ENSG00000204092_3 (sequence is synthesized)
ctgtggggatgcaaccttaagccaaaagcctagcggtgggtggtcctaaacttcttttgtctaggccctctgatccctctgtaagtcgctatttcccttattaaatctctttctgctgga

SEQ ID NO: 809129 - DNA, 120 bp, Artificial Sequence
  ENSG00000204091_0 (sequence is synthesized)
agttggcagttatttcgcaaccttcatctgttcctggaagatacccgtagcctgccttccttcttgacaggctgatttaggggtgctccccaagaagatcaggactgctgaaagaatgaa

SEQ ID NO: 809130 - DNA, 120 bp, Artificial Sequence
  ENSG00000204091_1 (sequence is synthesized)
gaagaacttacttggcctaggatgtggctagagaacggagcgcactttcacttacctggcaaggtggttttggaagtttccacggaagccttcccagggccgctgctgcccgtcctcgcc

SEQ ID NO: 809131 - DNA, 120 bp, Artificial Sequence
  ENSG00000204091_2 (sequence is synthesized)
taggtgtggagcttcccgaccggctggggagggaatgtcctgcgggagccgccgaggaccctctttagcctcttccctggcttggctgcagctgcagtctggtactcgcccattctgctc

SEQ ID NO: 809132 - DNA, 120 bp, Artificial Sequence
  ENSG00000204091_3 (sequence is synthesized)
ttcttcacctccgtattttctctctcacggaagaagaattccattctcccatcccaggaaggagagtgccctgcgtgccacgaaagagcccaggacccacaggacaaatacgtcactggc

SEQ ID NO: 809133 - DNA, 120 bp, Artificial Sequence
  ENSG00000204091_4 (sequence is synthesized)
agacctgccttcgccagcgccagcccatctctgaaacctccagcatttgtgccccggtccggcccctcccaggcctgactctttccgtgaacggtcactgcgcaggatcaagctacaatg

SEQ ID NO: 809134 - DNA, 120 bp, Artificial Sequence
  ENSG00000204091_5 (sequence is synthesized)
agcccccccaccccttaggaagatccatccctgtggaaccttgcccaggcttaccagcctttgctgaggaaaccgagcatgtgactgttgacatcttggaaaggactagaccatgagatc

SEQ ID NO: 809135 - DNA, 120 bp, Artificial Sequence
  ENSG00000204091_6 (sequence is synthesized)
ttccttgctccaatcccagacagactccggcatgagatagtggaggagaattctggctccaggagcatattcagctgatggctaaagggaccagaagatcaattatcccaacaataatag

SEQ ID NO: 809136 - DNA, 120 bp, Artificial Sequence
  ENSG00000204091_7 (sequence is synthesized)
gaaaataaccagggaagagcctgtaatctgggcctacttcctcagaatagcagtttgcagaaatcccactggttgtaagaacagagaaagccccacccagcttgctgaagccctgagacc

SEQ ID NO: 809137 - DNA, 120 bp, Artificial Sequence
  ENSG00000204091_8 (sequence is synthesized)
ttcactgcaggcacactgagaacagaagatacagaagtactcaggctgtacttatgaaaaatcaatactcacagacttttaaagaaaagttactttgcatttgggaagggggaatcctga

SEQ ID NO: 809138 - DNA, 120 bp, Artificial Sequence
  ENSG00000204091_9 (sequence is synthesized)
gacagtgactgttgcctagcctggctgacaattatatcccttaacaaaaaagtgttcctgaggtcttttcgaatttcaacactgtaatggtgaaaaaatagaaaattctcttgagggaaa

SEQ ID NO: 809139 - DNA, 120 bp, Artificial Sequence
  ENSG00000204091_10 (sequence is synthesized)
taccagcctttgctgaggttgatctattgtccctccttgtccccatcaaaatatccagcactccaccttcagggagtagacttgaccctcaaatagcaagttcagccttcccaggtctag

SEQ ID NO: 809140 - DNA, 120 bp, Artificial Sequence
  ENSG00000204091_11 (sequence is synthesized)
gttccctgggaggtcaagattcgtctggttccttagtacagagggctagctgtgagttggaatccccctatgagctttagaatcagtcaagaggaattgggccccttcccttcatccctc

SEQ ID NO: 809141 - DNA, 120 bp, Artificial Sequence
  ENSG00000204091_12 (sequence is synthesized)
ttcttttccctttttgtcccagagctcagctctgactcaaaagtttttccatttaccatcaacatggaaacttggctcctcacgtaggtatattatcccccttttgtacatggtcttgtt

SEQ ID NO: 809142 - DNA, 120 bp, Artificial Sequence
  ENSG00000204091_13 (sequence is synthesized)
gatccaaactccctttctgtgaaagaggcctgtggggctcaagaagcctggtcagccagccaggctagtcccacatacctcagaaccagtttaataaaggctctatgtcattcttttttg

SEQ ID NO: 809143 - DNA, 120 bp, Artificial Sequence
  ENSG00000204091_14 (sequence is synthesized)
gcagatgtgtagccccattctggcctcctctcctctcaaggaaaggggagttgtcttcaactgatggcccctccccaaagcctagccccctccttctccatgcctttctcctgtatccca

SEQ ID NO: 809144 - DNA, 120 bp, Artificial Sequence
  ENSG00000204091_15 (sequence is synthesized)
cctggcacctcccaaacactatctgccgctgcagttccttgttgaactgttctggttttaattccattccctgcaattggagcctgaataatgagttatttcacaggaagattgatctgg

SEQ ID NO: 809145 - DNA, 120 bp, Artificial Sequence
  ENSG00000204091_16 (sequence is synthesized)
gtattagggcatcatttagtttgccattacaacagccaattttggttacatgctcagctgtgaaggggaaatgggccagcctgctggagctttctaaagcatggagctgagaacggtgca

SEQ ID NO: 809146 - DNA, 120 bp, Artificial Sequence
  ENSG00000204091_17 (sequence is synthesized)
gtcttcagggatctggtgagcagacggctacaggatttgtaccccaggattaaagccagaaaccaaaagaccatctgccggtacccacaggagggaggatgcaggtcattttcatgtgca

SEQ ID NO: 809147 - DNA, 120 bp, Artificial Sequence
  ENSG00000204091_18 (sequence is synthesized)
ctgccagcaaagccctcttcaacccactggagtcagcaggcccagtgcttcataaaccaagttatgagagcagagctgagaatttctaaggagcctcctttttaaagcctttcacttcac

SEQ ID NO: 809148 - DNA, 120 bp, Artificial Sequence
  ENSG00000204091_19 (sequence is synthesized)
ctcgctgccgcctcgctcccatttctcccttccctccctatggtaactgatgaagggttggggctggtggaacccagatctggggtcagaagttccccttgtcaagtcccaagtcttcca

SEQ ID NO: 809149 - DNA, 120 bp, Artificial Sequence
  ENSG00000204091_20 (sequence is synthesized)
aagacactttaccctttgtgggcatgcccgctcaactggaaagtgacacaatcataatgccctaatccagaattcttgtgagaatgggagtaattatgtaaatatctttggaaaacagat

SEQ ID NO: 809150 - DNA, 120 bp, Artificial Sequence
  ENSG00000204091_21 (sequence is synthesized)
gtgctgccaattacattttgtgattttaactttgtcttatttctctgctgttttgtcttcctatgtatcaagtttcttctgatttttttttttcttttataggaacggtcactgcgcagg

SEQ ID NO: 809151 - DNA, 120 bp, Artificial Sequence
  ENSG00000232325_0 (sequence is synthesized)
cttttgtgaaggaaagagtccattgaagagcaaaattcattgttgtcttaagaaattgtcacggttaccccagtcttcagcaactgccacgctgatcagttagcagacatcaacactgag

SEQ ID NO: 809152 - DNA, 120 bp, Artificial Sequence
  ENSG00000232325_1 (sequence is synthesized)
gtggggagaagtggaaggaaggacgcacgagagccagcctgcgacacctaaggacagaaacacctccctcagcccagccggctgctgactccatgcgaagagggacaccaacccttacaa

SEQ ID NO: 809153 - DNA, 120 bp, Artificial Sequence
  ENSG00000232325_2 (sequence is synthesized)
tctcacagtgtcctgcccctgcccctgcccctgtgagggcgatgctccttccatcaaaaccagagtgtcccagctctagattccccacccaatctcctgtggctgtctcagcacctccgt

SEQ ID NO: 809154 - DNA, 120 bp, Artificial Sequence
  ENSG00000232325_3 (sequence is synthesized)
atgcggcccctgacctgccccccctcccatcactgaataggactccttttctcctggatttcctgtaggaagtttcaaaatgctctccaggttttctgtgggtggattatctctctggat

SEQ ID NO: 809155 - DNA, 120 bp, Artificial Sequence
  ENSG00000232325_4 (sequence is synthesized)
ctttctaagtgagtcctgtgtttcaccacagctccccccacacagttgagcagctataccgtggggaggcttggtcctcttgccccatttgtgtgatgtctattgtagtcatgccagggg

SEQ ID NO: 809156 - DNA, 120 bp, Artificial Sequence
  ENSG00000232325_5 (sequence is synthesized)
cctgacgtcagagctccaccctgacatgtgctcatgccggtttacaaaccctcccaggaccaggcccccatccctcttccaggacaggctctggagctccagctattaacagaaacattc

SEQ ID NO: 809157 - DNA, 120 bp, Artificial Sequence
  ENSG00000232325_6 (sequence is synthesized)
cagccagcatccccagcgaccctcagcctcccacgccgctgtgtcttcatgaccacagcctggccaccacacagctccccctcgaggactgtgaccacttccagccatggtctctttggg

SEQ ID NO: 809158 - DNA, 120 bp, Artificial Sequence
  ENSG00000235111_0 (sequence is synthesized)
agattgaccggccgcgtcgaggtgtttccgggttcagactgacaggccgcgccgaggtgtttccaggtttggattgacctgccgagccgcagtgttttccgcggaggcgtggactttctt

SEQ ID NO: 809159 - DNA, 120 bp, Artificial Sequence
  ENSG00000235111_1 (sequence is synthesized)
ctttgcacgtcgtggtgtttggagacgatcctccctggccggcgggattcatgacccttcgcgcagttgccccgtccagatccacgtgcaggactggtctcgcgtgacacacgcggccgg

SEQ ID NO: 809160 - DNA, 120 bp, Artificial Sequence
  ENSG00000235111_2 (sequence is synthesized)
cacctttcagacggaagtggaggggctgacgtgccgtgggcagagctctagccaggctgcccagagcgcgtgtcatgtccgtgtccatgaagatggtgtctctgtgtataggtcactgca

SEQ ID NO: 809161 - DNA, 120 bp, Artificial Sequence
  ENSG00000235111_3 (sequence is synthesized)
ggggggagaggaaagagctccgtggaccttgcaggacgcagcctgtggggaaggggctcccgttctcgcctgcatcccgcagccctggggtgtggtttcctgtcttaaaccacctccatc

SEQ ID NO: 809162 - DNA, 120 bp, Artificial Sequence
  ENSG00000235111_4 (sequence is synthesized)
agcctggattatgttcaaattgtggagcgcagcgccggagggggcctgcatccccaccgtcccttcatgtccaggtgcggtgtctccgtcccagagaaactgcatggagtccccccacgg

SEQ ID NO: 809163 - DNA, 120 bp, Artificial Sequence
  ENSG00000235111_5 (sequence is synthesized)
ttcccactggagccagacctcagactcggagctcctcagtctctgctgggtcagaggcagtgcgttcattttaggagcaaagttgaattcaaatttggatgagcacacgaggcccctggt

SEQ ID NO: 809164 - DNA, 120 bp, Artificial Sequence
  ENSG00000235111_6 (sequence is synthesized)
ggagctattccttctgcctttgaaagttctgttgagaagttgcacataatgacgttagcagtcttcgctaggcataggatgttttaatgaatagtcttccgtttccagtcatctcttact

SEQ ID NO: 809165 - DNA, 120 bp, Artificial Sequence
  ENSG00000235111_7 (sequence is synthesized)
ttaaaacatgtctctattatagaactaaaaaatgcccatcatagagggaaatattggaatacaatgaaataaaaaagaaaattcaaataaataatccataacttggttatccagaggcaa

SEQ ID NO: 809166 - DNA, 120 bp, Artificial Sequence
  ENSG00000235111_8 (sequence is synthesized)
ctcctgttaatttttttggatatatttcattcctaaagttctatctttttaagattgtcatgtagggaacacaggaatcacatcccgtgcccccttcctttcttaaaatagcatagttga

SEQ ID NO: 809167 - DNA, 120 bp, Artificial Sequence
  ENSG00000235111_9 (sequence is synthesized)
tgccttattaaaatctttttttattatagtaagtaataaatttcagccagatttgcatgtgtggattgcatattctcttattttctctcttttcatgttaaattattgatgccgtgaata

SEQ ID NO: 809168 - DNA, 120 bp, Artificial Sequence
  ENSG00000235111_10 (sequence is synthesized)
caaacaactccctcccacgcttgctttgctttccaattaacgcaaaatgcgaagccagtctcgtgtgccgtgtgccgcaggtcgttggggctaacttttgaagagcaagagagaggagcc

SEQ ID NO: 809169 - DNA, 120 bp, Artificial Sequence
  ENSG00000235111_11 (sequence is synthesized)
ctttgggaggtgaggcggctccagggaggggcttggtaaggagctgccgggtctgagtcacagtttctgcagtttcgtggggatccaggtgtgctggctgagaagcctctaggaaaagat

SEQ ID NO: 809170 - DNA, 120 bp, Artificial Sequence
  ENSG00000235111_12 (sequence is synthesized)
ccgggtccttccttcactcggggccacccaccaggagccagcccgccacatgttcttgggggcatcccagcacgggtctgggtgtgccgtgcaggagctgtgagtctaatttcagggtca

SEQ ID NO: 809171 - DNA, 120 bp, Artificial Sequence
  ENSG00000235111_13 (sequence is synthesized)
gctgctggactcagctaggttttcccagcgtatggggtgagaacgctcccacctgggctgggggctcagacactcgagctggcttgacagaggcagccccaacccatattctccttggct

SEQ ID NO: 809172 - DNA, 120 bp, Artificial Sequence
  ENSG00000235111_14 (sequence is synthesized)
ttttttttttttttttgttacctcccatccatcatccaaaaaaacacatgcccagcagagaatcgctgcttctgctgcctgctcctggctgatttccaggcgacccatgcctgtgtggct

SEQ ID NO: 809173 - DNA, 120 bp, Artificial Sequence
  ENSG00000235111_15 (sequence is synthesized)
atgcttcttgttaagatattgaaaaactccagtgccagttggcaaatagcgcagtagtagctggaatgagtagtggcgttaattagtaacgaaaatcctaacgtaactgcactcgtttga

SEQ ID NO: 809174 - DNA, 120 bp, Artificial Sequence
  ENSG00000235111_16 (sequence is synthesized)
gccagttgtcctaagtgccacaattacccttggtaaatgggtctctaatggtgtggttttagtcaatagtagaattattaaatacgtagaattctttagtagcattataaggtccagaca

SEQ ID NO: 809175 - DNA, 120 bp, Artificial Sequence
  ENSG00000235111_17 (sequence is synthesized)
aattggggatataactgctgttagttcaggggaagctgaaagaggatttgcactgcaaacagtatttttgatgcaaacatacattctcccctgtaagttacctaaggacgtggtccacag

SEQ ID NO: 809176 - DNA, 120 bp, Artificial Sequence
  ENSG00000235111_18 (sequence is synthesized)
gagatgggcttggagccctgatggctgatgcggtggtcaccgagtggacagaggtggagcaggtggaggtgggtgtgtctgcacttgaggaggggtgagcaaaggctggggtgggagagc

SEQ ID NO: 809177 - DNA, 120 bp, Artificial Sequence
  ENSG00000235111_19 (sequence is synthesized)
agggagcaggcagtacccagtgggtgttgaggggtcaggaggagtgcaggcacccaggtccatgtcatgtgggtgtgtacctggccattatgattcaaagcatgtccagctgtgctcccg

SEQ ID NO: 809178 - DNA, 120 bp, Artificial Sequence
  ENSG00000235111_20 (sequence is synthesized)
ctggcaccaggacttacgactgcccattccatgggaaagtcattggaaaagtccagtgccgttccctgtgtcaaaatgtgacccagacagggtcatcatgtagctagcaatggccacatc

SEQ ID NO: 809179 - DNA, 120 bp, Artificial Sequence
  ENSG00000235111_21 (sequence is synthesized)
aaagatactatgaacaattttaaacaacaccaccaacaaaatcatttataatagcatccgagacaagaaatacttaagaataaacaaatgtgcaacacacacacactgacaaatatagtg

SEQ ID NO: 809180 - DNA, 120 bp, Artificial Sequence
  ENSG00000235111_22 (sequence is synthesized)
cattcatgagagaaatttaacaaagaactaaatagatggaaggatatacaatgttcatggatcataagactcaacactgttgatttcaattctacccaactggtctgtagattcaatgta

SEQ ID NO: 809181 - DNA, 120 bp, Artificial Sequence
  ENSG00000235111_23 (sequence is synthesized)
atccccaaagatgttttgtagaaatggcaaactgattttaaaatttatgtataaatgcaaaaaattgaaaataagaaaaataattttggaaacaaaaaataaagttggaagacttatcct

SEQ ID NO: 809182 - DNA, 120 bp, Artificial Sequence
  ENSG00000235119_0 (sequence is synthesized)
gccgccagcagtcctggaaggtgggaatgatctggagaccaggagtaagaagacctgagtttagatccccagcctggattcagttctgagtgcctcagttttcccttccacaaaatgagg

SEQ ID NO: 809183 - DNA, 120 bp, Artificial Sequence
  ENSG00000232328_0 (sequence is synthesized)
ggaaggcgtgagtccagcattgtgagacagcagtgccgagagccttctctgagtaaggcaggaagccttcccaattccagtctccaagttttattctttcctgaatcaaggacaatgcca

SEQ ID NO: 809184 - DNA, 120 bp, Artificial Sequence
  ENSG00000232328_1 (sequence is synthesized)
ggcttttgggcgtggaggccctctctacatgaattcccatatgaggctcttctatttcaacagcctccaaattggaatgtattttgaagccccccatacagccccctgttgtcattgacc

SEQ ID NO: 809185 - DNA, 120 bp, Artificial Sequence
  ENSG00000232328_2 (sequence is synthesized)
ttgtcattgaccctaaatctgcaggcacaggaaattggtccacaccctgctctgtacggctgccctatggagtcttgctctgtcaccatgctcgagtgcagcagcgcgatctcggctcac

SEQ ID NO: 809186 - DNA, 120 bp, Artificial Sequence
  ENSG00000232328_3 (sequence is synthesized)
ctcctgacctcgtgatccgcccgcctcccagagtgctgggagtacaggcatgagccactgcactgggccaatagtaatattttaagggtaagaaaaatcagtatcttatagagtatcaat

SEQ ID NO: 809187 - DNA, 120 bp, Artificial Sequence
  ENSG00000232328_4 (sequence is synthesized)
atgtgcttccatggactggtcttgtacctgcgggtatcagccattgcattcgagcaagtgctccagccaggaagctccaacagaagcctgcccttccatgtgaagatctgtaaaccactg

SEQ ID NO: 809188 - DNA, 120 bp, Artificial Sequence
  ENSG00000232328_5 (sequence is synthesized)
ggaaatgagatatcaccagcctatgggaaatacacaagacccactccagcagggagaaactccattacatctcagcccatgtgactgactcagaaggctgtggaagcaaatatgtactca

SEQ ID NO: 809189 - DNA, 120 bp, Artificial Sequence
  ENSG00000232328_6 (sequence is synthesized)
catgctccagcgtgaactcagctcaagaaacaaagtgaccttggttgtgctttgggcataggtggagaaaagatggaagaataagacagcaggaggctgacccagaagagcaggttctgg

SEQ ID NO: 809190 - DNA, 120 bp, Artificial Sequence
  ENSG00000232328_7 (sequence is synthesized)
ggaactctagagcaagatgtgtctcctctggtttagcagagaacaaatatgaagagtaggaattccctgtaggagtccctgtaagaagagcagaaatggcacattatcttcactgcttct

SEQ ID NO: 809191 - DNA, 120 bp, Artificial Sequence
  ENSG00000232328_8 (sequence is synthesized)
caccactaattacataaatctagaagctactgtaaatggctacttttaaaaatacactattttcgaaaaagcttggctgtgatgtagggcctatagccccaaaggttaacagtatagcaa

SEQ ID NO: 809192 - DNA, 120 bp, Artificial Sequence
  ENSG00000232328_9 (sequence is synthesized)
acaaattagaaagcaagaacccagaaacagaagaagaaaacgtattcctcagaatggacaatacattgagaataggcattgcatttgtttctgagcatcccaaaaaaacagagagaaaaa

SEQ ID NO: 809193 - DNA, 120 bp, Artificial Sequence
  ENSG00000232328_10 (sequence is synthesized)
tgaaaatgtggatgatcaggaccaagttattctcccgtaaggccacagtctgctggagggaatgacatctccagccagctcttctccagagaaccctgtttcctctctcctgcttactct

SEQ ID NO: 809194 - DNA, 120 bp, Artificial Sequence
  ENSG00000232328_11 (sequence is synthesized)
tcaagacttccctttgatgtcacctggtctgtgagacagcctttcctgggacccccccacggagagagaacccactcataagactccaaaatgccaaggcgcccagcttctcatgcccac

SEQ ID NO: 809195 - DNA, 120 bp, Artificial Sequence
  ENSG00000232328_12 (sequence is synthesized)
ctctgagctgtgaggcagaggcctgtttattttgggttgatgagtaaatcatgtggaacagaatcaaaagctctgctgaagtcaacacagatgacatctgtcacttcctcttaatccatc

SEQ ID NO: 809196 - DNA, 120 bp, Artificial Sequence
  ENSG00000232328_13 (sequence is synthesized)
ttcaaacgtttgccagcaatgactccatgccctctttctctcatgcactggtgaaggaaaacaatgaattttcaccctattgtttatcttagaagggtcaggttttgaggtcaaacatca

SEQ ID NO: 809197 - DNA, 120 bp, Artificial Sequence
  ENSG00000232328_14 (sequence is synthesized)
gtgtaaaattttgtcttaaaaaatgcacatgcattctaactgctaatagctcatatgcccatctttgaaatcaaagttcttgtttctttacgaatgtgcccactgcaaggatatcaaagc

SEQ ID NO: 809198 - DNA, 120 bp, Artificial Sequence
  ENSG00000232328_15 (sequence is synthesized)
attggcagacattaagtcagtggctttgcctaagccaggctttctctcattgaaaagggagggatctatttggggagagagtctctgggggccgtgatttatccagtttgattacatgga

SEQ ID NO: 809199 - DNA, 120 bp, Artificial Sequence
  ENSG00000232328_16 (sequence is synthesized)
acactggtctctgtttatttgctgcaacatggcatctgccttgggaggagatgctccacagtcgactagagcctctgccagctgtggccacttgtcttcaggctgcacctgtgtgagtcc

SEQ ID NO: 809200 - DNA, 120 bp, Artificial Sequence
  ENSG00000232328_17 (sequence is synthesized)
gagggcaccaggagcttgtcttgctggtggagctggggaaccccaggacccgtgcgcctcaaacctgggccaggagtgaggagctggcctcccctaggctgaacttgactcacagaccgg

SEQ ID NO: 809201 - DNA, 120 bp, Artificial Sequence
  ENSG00000232328_18 (sequence is synthesized)
tttggtgtgggccatccagttgaaaggagttgtcaatgtttaatatttgctaggcttcacagaaaatttaaacttggaatatttttctgaaaatgtggatgatcaggaccaagttattct

SEQ ID NO: 809202 - DNA, 120 bp, Artificial Sequence
  ENSG00000287034_0 (sequence is synthesized)
ggagacaatggaaggaggaagaaagagggagggagaaagaccctagtgtctgtcctcagcggctgcggccagggctggagaggtgttcatggcccaggaaggacagaaaagaaaccactg

SEQ ID NO: 809203 - DNA, 120 bp, Artificial Sequence
  ENSG00000287034_1 (sequence is synthesized)
cctgagggtctggctcagctctgcaatccctcctccccagctgtgagaattggggccctctgggatacgcccccatcaggcggggagacaacggggatccaggccacatagagtctatga

SEQ ID NO: 809204 - DNA, 120 bp, Artificial Sequence
  ENSG00000287034_2 (sequence is synthesized)
tgtcttaagcactggagggtatcagtagagagaagtatgagaagtatgagaaagtgctgaagaaatcacgggatgcttcctggagaaggacatagctttggcttgaccctctgctgctgt

SEQ ID NO: 809205 - DNA, 120 bp, Artificial Sequence
  ENSG00000287034_3 (sequence is synthesized)
aatgggatcatgttctcaaccagcctccctgacatgagttgattgcaccaaaaccctatggataaaagagttgttgccatagaaaaagagacaagcgcgatttgcagagcaagctgaagc

SEQ ID NO: 809206 - DNA, 120 bp, Artificial Sequence
  ENSG00000287034_4 (sequence is synthesized)
cccagagatcttccctgtccccacagacccctgctgtgcccatttggtcagccctgcctcgagcccagtgggatccccccgctacgccccatccacatttcaaatgacagcattgtcagg

SEQ ID NO: 809207 - DNA, 120 bp, Artificial Sequence
  ENSG00000287034_5 (sequence is synthesized)
ctttggctatcttccccttctgcaaatgggaaactgaggctgcaagaagggaagtgacttgctcaaagacaccttgcaatttggtggcagcctggagctcagaccccctgactcccatgc

SEQ ID NO: 809208 - DNA, 120 bp, Artificial Sequence
  ENSG00000287034_6 (sequence is synthesized)
agggcctaccactccatccccctcaaaacccacaaagattccgttctgttctgtcctcagccaacgcggtggcccacccaccttgggcgaccagagccaagaggttgtttgtctgtttta

SEQ ID NO: 809209 - DNA, 120 bp, Artificial Sequence
  ENSG00000287035_0 (sequence is synthesized)
atttacagccttactgcagctgagctatgcgcgactacacggaactccggactacatatcacagaatgctggagttgggggaaaaacagaacagtaccgccctcctggactacacttccg

SEQ ID NO: 809210 - DNA, 120 bp, Artificial Sequence
  ENSG00000287035_1 (sequence is synthesized)
gaatgtccaagccttctgatgtggaagtgtccaactaccttgagctcctggttttcatttcccagaatccctcacttctctttaggacatagcatctgtctcctccagaggatgcagcaa

SEQ ID NO: 809211 - DNA, 120 bp, Artificial Sequence
  ENSG00000287035_2 (sequence is synthesized)
ctggatgccatattggaagcagacagcagcagccctcaccagatgttaaacctgccagcatcttgaccttggacttcccagcctcaagcactatgacagataaatttatattgtttataa

SEQ ID NO: 809212 - DNA, 120 bp, Artificial Sequence
  ENSG00000287035_3 (sequence is synthesized)
caggaggatttccacaattctctgatgagagtggctcaccatgccccggctatttgtataatgtgatttatgctgaattccttctgggaatctagaattttggcccaagctggcctatgt

SEQ ID NO: 809213 - DNA, 120 bp, Artificial Sequence
  ENSG00000287035_4 (sequence is synthesized)
gaccagttccaaaacaaaacacaacgtagtgcctagggcactaagtctccattgagcttactgggtagacatttcacatgtttcaatgctgaaaaaacagtacatcatgaatgattctac

SEQ ID NO: 809214 - DNA, 120 bp, Artificial Sequence
  ENSG00000287035_5 (sequence is synthesized)
agggagtggattattggaagcctgtacctgatttcttctggacttcatcccatgcacattttccctttgctcaactgacttggtatcttttactacaataaatcatagtgactatgataa

SEQ ID NO: 809215 - DNA, 120 bp, Artificial Sequence
  ENSG00000287036_0 (sequence is synthesized)
gactcatccttcagaaatctagacacgagggaaacagtgcaaagctagtctaacctggccttaggatttgttctgctcagagcaccaccaggcctacttcatctgtctgctatgttcttc

SEQ ID NO: 809216 - DNA, 120 bp, Artificial Sequence
  ENSG00000287036_1 (sequence is synthesized)
attctgtgcaatatcaaaacggagaaatatccatcacatgcagctaaacaagaactgccctcaagataagcaagattaaaacaattacaactcacccagctcacggacgctgagtaactg

SEQ ID NO: 809217 - DNA, 120 bp, Artificial Sequence
  ENSG00000287036_2 (sequence is synthesized)
gtacattcatccgccttcatgtcctgaaaagaccttttgaggtatggggcctaattttaatacatttaaatgttaaatctccaccccaaagtgaacctgggttgtatgttacatgcatgt

SEQ ID NO: 809218 - DNA, 120 bp, Artificial Sequence
  ENSG00000287036_3 (sequence is synthesized)
ttgttcaatatgcatgtgtcgggactaccttcatgaatattcgtagttcttcctgtaacctgttgaatacgtatgtttggccaccctgtccagcatgaagcttctgtcccagcccctcct

SEQ ID NO: 809219 - DNA, 120 bp, Artificial Sequence
  ENSG00000287036_4 (sequence is synthesized)
ccttcgaagtgcctgactccggtcttggccagaggcacacttctgagcctgcaggatggccaccttgcaggctgtaaccctttacaagaaataaaatctcctctcctcacaatttataaa

SEQ ID NO: 809220 - DNA, 120 bp, Artificial Sequence
  ENSG00000287037_0 (sequence is synthesized)
acagagaataaagaccttgtgaagtctatggtctccctagatcagatttagaaaccacaaagatcaaagtgacaagtacccgtccaaaattttctggatgactttctttagaaaaggggc

SEQ ID NO: 809221 - DNA, 120 bp, Artificial Sequence
  ENSG00000287037_1 (sequence is synthesized)
ttctggatcaagacaaatttccttcccgttcttcagggaggctctgaaggaaagaaaaagaagatacactcatgagataccaaggttgaagacccaggctgcgggatttctctcttgcca

SEQ ID NO: 809222 - DNA, 120 bp, Artificial Sequence
  ENSG00000287037_2 (sequence is synthesized)
aggtcacagcggacacagcagcacagaacttacaccacttccaccttggagcactgtgggcctatggcgaacacttgcagattactgatcattttgggatgaactccttgcgtggtctgt

SEQ ID NO: 809223 - DNA, 120 bp, Artificial Sequence
  ENSG00000287037_3 (sequence is synthesized)
aaacaaacgcaacgcagctctctcaacacagcagcggcaggaccagctggggaagaaagagagacaccctttatagggcaggttgctgggagagttccctggaacgcagcgaccccgcag

SEQ ID NO: 809224 - DNA, 120 bp, Artificial Sequence
  ENSG00000287037_4 (sequence is synthesized)
aggctgggatgcacctctgtgcccgagtgcgagtgcgtcccgcgcgccatgcgctctcaccgctggcgatgggccctggctgcgtcagcagcagcagcagcaccaacagcgcgcacaagg

SEQ ID NO: 809225 - DNA, 120 bp, Artificial Sequence
  ENSG00000287037_5 (sequence is synthesized)
agctcgaaggaccggggacacgggccgcgcggctggacaggaggctcatagtggtcaagagagcgctgcgagcggtcgcgggttcctgaactgggtggaggagcggagattggaggagcg

SEQ ID NO: 809226 - DNA, 120 bp, Artificial Sequence
  ENSG00000287037_6 (sequence is synthesized)
aagattggaggatccggagcactgtggcttcctcgtgccttctgcactccttttatctacactcatctctccccactgacaggaaactcaagctttgggatgctggggaaattccctgaa

SEQ ID NO: 809227 - DNA, 120 bp, Artificial Sequence
  ENSG00000287037_7 (sequence is synthesized)
agaggcaggtcattctaggtttcttgaatgactttatgaatctctggacttcaaccagctttggaagccaagataacatgataacaagagacccttgtctcttgccacttgaagtcagtg

SEQ ID NO: 809228 - DNA, 120 bp, Artificial Sequence
  ENSG00000287037_8 (sequence is synthesized)
gcctgaaaggaccactgaattttgttaactcccctacagatcacctactttgaaaatccatgctttttccattcattctcttctccagaggaaattgctgttctgatttttagttttgcc

SEQ ID NO: 809229 - DNA, 120 bp, Artificial Sequence
  ENSG00000287037_9 (sequence is synthesized)
tactcttgaactttttaaaaacggaatcatccaatgtgtactcttttatgcctggcttttttttgctcaacttaatgtctgtgagattcacacatgttattgtgaatattagtagtatac

SEQ ID NO: 809230 - DNA, 120 bp, Artificial Sequence
  ENSG00000287037_10 (sequence is synthesized)
tttgtattcaattaaatattcattgaataattcaaattaagcattcaattgtagaaatatatgcaggtttatttattcattcatctgttgttggacagttgggtcattttcaatagtttg

SEQ ID NO: 809231 - DNA, 120 bp, Artificial Sequence
  ENSG00000287037_11 (sequence is synthesized)
actattatgaagtggctgtaaacattattatataagtctttttgcacatcataggaaaagattgccataaaattattgtcactcttcctattgagatgtggcacctatgtttcatacccg

SEQ ID NO: 809232 - DNA, 120 bp, Artificial Sequence
  ENSG00000287037_12 (sequence is synthesized)
tgaatctgaactggccctgtggctggttttgatcaatataatttggcagaactgatgctgtgtaacttgtgcaaggatatctacagcttccaccttggtcttttggaatgattcttcttg

SEQ ID NO: 809233 - DNA, 120 bp, Artificial Sequence
  ENSG00000287037_13 (sequence is synthesized)
gaacccaacccctgtgctttgagaagcctgagctatgtgtagaggccgtatggaagagaaccaaggcactccagctgatgggcctcactgggctcccagctgagagccagcaccaacctg

SEQ ID NO: 809234 - DNA, 120 bp, Artificial Sequence
  ENSG00000287037_14 (sequence is synthesized)
caaccgtgtaagcaatcgtcttgtactttccaacctagtcaaatttcagatgtctgcaactccagccacatggagcaaaagattcacagagatgagtccagtcccctatcaacccagata

SEQ ID NO: 809235 - DNA, 120 bp, Artificial Sequence
  ENSG00000287030_0 (sequence is synthesized)
attaaaggagcctgaagtaaagatgcaagaacatgtcttgggaaagatcagaccatctagttgcaggaaagcaagctcagggctcccactgattctgcatgatggtcaggagtccagata

SEQ ID NO: 809236 - DNA, 120 bp, Artificial Sequence
  ENSG00000287030_1 (sequence is synthesized)
caccttagttgggttttctactttggggtctctccaggctacagtgaaggtgttggttggaccatgttcccatctgaaagcctgaagaaagaagaatcttcttccaaactctctcaagtt

SEQ ID NO: 809237 - DNA, 120 bp, Artificial Sequence
  ENSG00000287030_2 (sequence is synthesized)
gttgggagaattcatttccttacagtcacaggactgagagcttcaagattttgttttgttttgtttctgttggctctcagcttctacaagccacctctgagttctttgccacatggtcct

SEQ ID NO: 809238 - DNA, 120 bp, Artificial Sequence
  ENSG00000287030_3 (sequence is synthesized)
ctccgataggcagttcataacatgacaacttgtttcttcaagaccagcaggaaagtgagagagtgagtcggctatcaagacagattcttacataatataacataatcatgggagtgatat

SEQ ID NO: 809239 - DNA, 120 bp, Artificial Sequence
  ENSG00000287030_4 (sequence is synthesized)
cccatcacatttgtcatatattgtaatgcatgtattacattacatcatgggagtaacatcctatcacctttgccttattcttctggctggaagcagttcacaagttctacccagtcttac

SEQ ID NO: 809240 - DNA, 120 bp, Artificial Sequence
  ENSG00000287030_5 (sequence is synthesized)
ggtagctattcaaagatccagagaaatgagcctgagttacctacaacaatgttcagattgattaatgtattcttgagttagctttccttcctttcatgtcttaattttcctagcccctca

SEQ ID NO: 809241 - DNA, 120 bp, Artificial Sequence
  ENSG00000287030_6 (sequence is synthesized)
ctcctattcactgggatctcttcccaaaatcaactatccgcacagaagttattgtctcagactccgatttcagggaagaagccaggctaagatagcagaagagaataaacttgtataaat

SEQ ID NO: 809242 - DNA, 120 bp, Artificial Sequence
  ENSG00000287030_7 (sequence is synthesized)
ggtatgctacaagttaggagggatggtaggcaggaggttctcctcctcagaaattaattaccccctacccatatatttctctacactataatgaggcagtgctaaaagttcatggaagaa

SEQ ID NO: 809243 - DNA, 120 bp, Artificial Sequence
  ENSG00000287030_8 (sequence is synthesized)
agcatgctaaaggtgctttctctatgcaaatctcaagatacagcatcttaactctctctttcataaaattagaattggcccaagatactaaattgggctaggctggcaagtggggttcaa

SEQ ID NO: 809244 - DNA, 120 bp, Artificial Sequence
  ENSG00000287030_9 (sequence is synthesized)
gtagtttccattgtagggagagaaatttaataagtgtaaacctggcagagctcaaaaaagagcaacagaagtacttgaatacaagggataaaactattaaagaacatttttcacaaataa

SEQ ID NO: 809245 - DNA, 120 bp, Artificial Sequence
  ENSG00000287031_0 (sequence is synthesized)
gggcgggctttcggggatgcggtctggattctggaggaggcctcggcgcgcagctgggcgagtactaactgtttgcactctcatcagacctgcctcggtcatgggagaagttgaagactt

SEQ ID NO: 809246 - DNA, 120 bp, Artificial Sequence
  ENSG00000287031_1 (sequence is synthesized)
tctgcaatgcagcatcttcaagcaatacacacatggatgaaaatcctaaagtttgcatgaaggaccaataacggtagtttccctgcccctctaccagaacccctgggatcagcgcctgcc

SEQ ID NO: 809247 - DNA, 120 bp, Artificial Sequence
  ENSG00000287031_2 (sequence is synthesized)
tgcctcctttcttctatgtaatcggcggccacctcccctagctcttgctgctaaccatgcttcccggacacctgctgccttcgtaggtcagggtctcacctcctcgggccaattctgacc

SEQ ID NO: 809248 - DNA, 120 bp, Artificial Sequence
  ENSG00000287031_3 (sequence is synthesized)
aaacagcaccctgtggggttgccctgtcttagtaaactgctgtttatctcattgaaattcagtttaggtcatttcactcttatgtttaagaaacttttctgcccgatctcctatgatagc

SEQ ID NO: 809249 - DNA, 120 bp, Artificial Sequence
  ENSG00000287031_4 (sequence is synthesized)
ggatatctcctctagcctgtttgaatttctcaagtgatttattttactgaatatatttgtggcctgtacttttcagtgcctagaaacaggcaaagtgagggagctcctttgctagatgat

SEQ ID NO: 809250 - DNA, 120 bp, Artificial Sequence
  ENSG00000287031_5 (sequence is synthesized)
cttcagagcctctcccagctgtgaccagaaatggaaagccagagaaggatgcctcggggtggaaacgggatgacagccagtggtttctccacacatggacttgccagaacctttcccgaa

SEQ ID NO: 809251 - DNA, 120 bp, Artificial Sequence
  ENSG00000287031_6 (sequence is synthesized)
atgctaggttggaaaactcacagctgattaattaccgcagtccacggcttactccgtcgggtggacacagcgtccctcccctctggaggatgcagcaacaaaatgcctccttggaagctg

SEQ ID NO: 809252 - DNA, 120 bp, Artificial Sequence
  ENSG00000287031_7 (sequence is synthesized)
agagcagccctcactggacaacagaacctgctggcgctgtgatcttggacttcccaacctccagaacagactgactgtagtcataaagcaggatggacagcatccagctgggtcttgagt

SEQ ID NO: 809253 - DNA, 120 bp, Artificial Sequence
  ENSG00000287031_8 (sequence is synthesized)
ggtggcccataccgatgtggactcccatgatctggactggctgggaggatgctactgcctggtggccccacgcctgttggccatgggagttttggccttcacgtgttaactgaaataatg

SEQ ID NO: 809254 - DNA, 120 bp, Artificial Sequence
  ENSG00000287031_9 (sequence is synthesized)
aacaccatggtgctccaggtctctcgctcccatccaggcattctccacctgatatctctctggagggtggatgcttttgtcagctgtgtcctcaataaactgcaaccaggcatggggcaa

SEQ ID NO: 809255 - DNA, 120 bp, Artificial Sequence
  ENSG00000287031_10 (sequence is synthesized)
gagggaagagatttaaattcattttctggggggaagagtcacctcctactggaatcaagagctaaaaagagttctcccatgtgtgcagtgccacgtaacttccggtgtaatgccacgaaa

SEQ ID NO: 809256 - DNA, 120 bp, Artificial Sequence
  ENSG00000287031_11 (sequence is synthesized)
cacccacacgtggaaaacacagttgccagttcttcctcctccaccgtgcagctccggggagctgtggggagccagccccctccagaattatctgatgccagcgttggcgtggacataata

SEQ ID NO: 809257 - DNA, 120 bp, Artificial Sequence
  ENSG00000287031_12 (sequence is synthesized)
atgaacaaataagcatttttttaaattgacaaggtgaaaaagaaggtttaggattaaggaatcttgcctgaggattagtcgaatgtcagtgaggagaaataacactgaatagacccaaaa

SEQ ID NO: 809258 - DNA, 120 bp, Artificial Sequence
  ENSG00000287031_13 (sequence is synthesized)
tatgttttcaggaaacctcgaaaatgctttctgcataatattatatctccctctgctagaactgccaattttgagtttctcactatttttattttcttgagaaatgatcatttttataaa

SEQ ID NO: 809259 - DNA, 120 bp, Artificial Sequence
  ENSG00000287031_14 (sequence is synthesized)
tagccttttaaatgtcaaactaactggttgaataatttatctctacttcttatcctgaataactcaacccttgcttgattttctaaagggttgggggaaaggggttctcagacataagcg

SEQ ID NO: 809260 - DNA, 120 bp, Artificial Sequence
  ENSG00000287031_15 (sequence is synthesized)
cccagaataaatccttctgtctgttagaggctttggctgtctcctttcccgcgggtggtgtgggctccctgtggctggaaggcggctgtccttccgacggcttgcttccgcttggctctg

SEQ ID NO: 809261 - DNA, 120 bp, Artificial Sequence
  ENSG00000287031_16 (sequence is synthesized)
ctcgctcttcagtcacagccacagcagggtccatgaaggcagatgacagacgggaacccccaagaggcacctaaccagggatcacgtgtgctttccatgaagccacaggaggaccatgac

SEQ ID NO: 809262 - DNA, 120 bp, Artificial Sequence
  ENSG00000287031_17 (sequence is synthesized)
tcactcctcagagcagcaacccagggctgcggcatgatgggcctggtcggcgctgggtgcctcgttcggtgccggcaggaaccagcacgcactcaggctgatgagaccaggagggtcagc

SEQ ID NO: 809263 - DNA, 120 bp, Artificial Sequence
  ENSG00000287031_18 (sequence is synthesized)
tggaccctgaccatggttctcaaagggtgtgccaggacctgcaacagaagcaccacttgggaacttgtcagaaatgcaaattcttgcccctcctctaggcccgctgaatcctaaactctg

SEQ ID NO: 809264 - DNA, 120 bp, Artificial Sequence
  ENSG00000287031_19 (sequence is synthesized)
gaggtggggccaagccatctgtgaatgaactcccgctccgggtcgcaccgacccaccctcacgtgtgagaaccccggtctaggaccctggttctccaactcgcctgtatatgttttcaaa

SEQ ID NO: 809265 - DNA, 120 bp, Artificial Sequence
  ENSG00000287032_0 (sequence is synthesized)
ggaagacaacaggggtaatgtgccattttcgtcatatcatatcaagaatacatagtatctctgggcatggtggcagtccataaaaattagctgggtgtggtggcaggctgctcaggaggc

SEQ ID NO: 809266 - DNA, 60 bp, Artificial Sequence
  ENSG00000287032_1 (sequence is synthesized)
cagtaggaaacacatgatattgaccttcaccacctggccacctggtagtatttgtcaggt

SEQ ID NO: 809267 - DNA, 120 bp, Artificial Sequence
  ENSG00000287032_2 (sequence is synthesized)
tgaccttcaccacctggccacctggtagtatttgtcaggtttccccactgtaaagtaattcccacctgccttccacactgagctctttggaaggaagtcactgtgtgcagccaagaagga

SEQ ID NO: 809268 - DNA, 120 bp, Artificial Sequence
  ENSG00000287032_3 (sequence is synthesized)
gcagggagttatgcctcactgctttgaggatggagtatctacgtaaattatttggaattcttctctatggagggatttatctcttgcctcccaattatttatttattcaatccatttatt

SEQ ID NO: 809269 - DNA, 120 bp, Artificial Sequence
  ENSG00000287032_4 (sequence is synthesized)
tgtgttagtatagactcatggatatttattttatacattgggttttaatccaatatgactttattttattgctaaaattgtttcagctttggccattgggagctctttcaggtggctcct

SEQ ID NO: 809270 - DNA, 120 bp, Artificial Sequence
  ENSG00000287032_5 (sequence is synthesized)
atgttcctatttaattgctgtataataattgtacatattaatgtggtacatgtgtcattttgatccgagcatataatgtgtactcaaatcagggtaattgggatatccatcacctcaaat

SEQ ID NO: 809271 - DNA, 120 bp, Artificial Sequence
  ENSG00000287032_6 (sequence is synthesized)
ttatcatttctgtgtgttgggaacattccaaatcttcctttcttgctattttgaaatacacagtaagttcttgttaactatagtcattgtactgtgctatcaaacacgagaacttatttc

SEQ ID NO: 809272 - DNA, 120 bp, Artificial Sequence
  ENSG00000287032_7 (sequence is synthesized)
ttttatctaactgtatttttgtacccattaaccaacttctcttcctgcctccccctcaccctttcctggcctctggtaaccaccaatctactatcttcttgagatccactttttagctct

SEQ ID NO: 809273 - DNA, 120 bp, Artificial Sequence
  ENSG00000287032_8 (sequence is synthesized)
cccatgagagtgagaacatgtgatatttgtgtttctgtgcctgatttatttcatttaacataatgtcttcctgtttcattcatgttgctgcaagtgacaagatttcattccttttcatgg

SEQ ID NO: 809274 - DNA, 120 bp, Artificial Sequence
  ENSG00000287032_9 (sequence is synthesized)
ctgaatagtactttattgtgtctatatgccacattttttaatccattcatctgttgatggatacttaggttgattctacatttttgctattgtgaatagtgctgcagtaaatatgggagt

SEQ ID NO: 809275 - DNA, 120 bp, Artificial Sequence
  ENSG00000287032_10 (sequence is synthesized)
gcagatatctctggtatactggtttcctttcttttggatagatacccagtagcaggattcctggatcatatggtggctctatttttagctttctgaggaacctccacactgttttccata

SEQ ID NO: 809276 - DNA, 120 bp, Artificial Sequence
  ENSG00000287032_11 (sequence is synthesized)
cttcatggcctcaagcatgttattttctgtctttttgatcatagccattttaactggagtgagatgatatctcattgtggttttgatctgcatttccatgctaattagtgatgttgtgtt

SEQ ID NO: 809277 - DNA, 120 bp, Artificial Sequence
  ENSG00000287032_12 (sequence is synthesized)
cctttgatatatccccatcattgagacttttcttttgagcacttgcttatttcctggcataataagatgttccaggctcatcttgtatattttctgctccagtgctagaatcagccattt

SEQ ID NO: 809278 - DNA, 120 bp, Artificial Sequence
  ENSG00000287032_13 (sequence is synthesized)
ctccaatgagcttttgggagatatttgctttcttgattacagttaggattttctcataagggaagtttgttgatggcctgcaaacaaatagtaaaatagtatgtgatgtcatgaaaatta

SEQ ID NO: 809279 - DNA, 120 bp, Artificial Sequence
  ENSG00000287032_14 (sequence is synthesized)
attgtatttttccttctagattttgcatatagaagacggtaattttaaaaacagtgaaagaagaaatgtatctgagaattcaatcagtcaatagactttagacatctgaaaagaaaacac

SEQ ID NO: 809280 - DNA, 120 bp, Artificial Sequence
  ENSG00000287032_15 (sequence is synthesized)
aagaggttcggttggtgcaatgttcctttcttcccaggactttctggtcttcaaggctttctcatgagacagaagactgatggatgtagaagtttctaagaggacagttacgctgccatg

SEQ ID NO: 809281 - DNA, 120 bp, Artificial Sequence
  ENSG00000287032_16 (sequence is synthesized)
ttttgaagcaggaagacgttaccacttctcaaaggtctttaattgcctgaccactgcttctctttggaaggctgtcagggtgatggaatctcagatcacagcacagataaaatggacaaa

SEQ ID NO: 809282 - DNA, 120 bp, Artificial Sequence
  ENSG00000287032_17 (sequence is synthesized)
gaaagaaagatacaagaaggatgtaaaaatgtccataatgaactcatgtatcttgcggaaacctctaatctaatgagaatggattttgttgagaagattgtacaccaacaattaattatt

SEQ ID NO: 809283 - DNA, 120 bp, Artificial Sequence
  ENSG00000287032_18 (sequence is synthesized)
catggcagagacatcattaagatttcattttgtttaaaggcctctaagtgacttaggaaattaggttaagctagagaagaatttcaagaaagagacaagggaaagcttttcgttatattg

SEQ ID NO: 809284 - DNA, 120 bp, Artificial Sequence
  ENSG00000287032_19 (sequence is synthesized)
actttttctaatattttccagatagatattttgacttggtacataaattatactctgactaaaaatctccaatgatttgtctgagtaagagtcttcacatgggtggatcatataccagtg

SEQ ID NO: 809285 - DNA, 120 bp, Artificial Sequence
  ENSG00000287032_20 (sequence is synthesized)
tggtcagatggaagcagatggacagagatttgtgaaaggattaggaggttcattccagaattctataataattcaatttggctttttggttaggaatgtagtgaggagtctccttgaaat

SEQ ID NO: 809286 - DNA, 120 bp, Artificial Sequence
  ENSG00000287032_21 (sequence is synthesized)
gacaatgggatttgtgcaacctgtgacattttgcactcaaggatccttttcccagtgccctatgggatgtgagcacctgttcacttacagtacatgtaagataagacacttttaataaaa

SEQ ID NO: 809287 - DNA, 120 bp, Artificial Sequence
  ENSG00000249086_0 (sequence is synthesized)
ggggaaggaggggacgggacaaagaggaaccagcgaagggtccaggcctgcgatgatggtgagggaggtggcaggttgacgaggggctggacaagaacggccgacgaaggagaagaacag

SEQ ID NO: 809288 - DNA, 120 bp, Artificial Sequence
  ENSG00000249086_1 (sequence is synthesized)
cagtgggcccctggctgggcacacctcatcccagcctccccctacccctggccccccataagcctcctcctcctgggcttccaggctctgctggtcagacctccctccctgcccaacggg

SEQ ID NO: 809289 - DNA, 120 bp, Artificial Sequence
  ENSG00000268078_0 (sequence is synthesized)
agcattccttgacttgcagacatcttcccagtctcccttccatcttcacatgggcttctcagctgtgtggtccctgtatgtcctgtctctttattaggccaccctcagtgaatttagaat

SEQ ID NO: 809290 - DNA, 120 bp, Artificial Sequence
  ENSG00000268078_1 (sequence is synthesized)
tccccagtgactagctcagtcctccgcagacaggaagctccaagcaaacgtctagtaaataagtgaatgaatgagtgatcagaatgcactcttctttgttggtgccatcccttaagccct

SEQ ID NO: 809291 - DNA, 120 bp, Artificial Sequence
  ENSG00000268078_2 (sequence is synthesized)
tctaagtgtgacttgttttgactcaatggcaagtccattgacttaaataccttgaccagttctctcatcctaaagtgtctgggagtgtacaaaagcaaaaagagaacaccaagttgctta

SEQ ID NO: 809292 - DNA, 120 bp, Artificial Sequence
  ENSG00000287038_0 (sequence is synthesized)
aggagtagctgtccgggtctctggctagctcctgtcccaacttctttttcttccctcgacggtcgggagggatcactgggtgctacaccgctggggcgtcccaggcaggagagacttcgc

SEQ ID NO: 809293 - DNA, 120 bp, Artificial Sequence
  ENSG00000287038_1 (sequence is synthesized)
tctcagaagcgcccccgtgtcatccacaactcccacgaaaggagcttcccaagaggagtttgttttacccggaatgggctgcaggaattaattgcttacagagagtaaacttttgcccgt

SEQ ID NO: 809294 - DNA, 120 bp, Artificial Sequence
  ENSG00000287038_2 (sequence is synthesized)
tgtttttttgttttttgtgctttttttaaccaaagcttgcatttgtgctccgcgtagtttctattgcaacagagcgctactctgccttttcaactgtgagacagaggattgctgaggatt

SEQ ID NO: 809295 - DNA, 120 bp, Artificial Sequence
  ENSG00000287038_3 (sequence is synthesized)
tctgccctctggggcttcgcgaatatctatggcttcggacctgctagcggaaaacgcaaagttgcccagcttggagatggcaccaggttcctttgctctggcgctggatgctccgctccg

SEQ ID NO: 809296 - DNA, 120 bp, Artificial Sequence
  ENSG00000287038_4 (sequence is synthesized)
ccacccaccgccgccgtctccatcgagaatctcctcaaaatcaagggagttcttgactgtccctctccaaattggaaggcggttgactttgccgggaaccgagttcctgagcggcaaacg

SEQ ID NO: 809297 - DNA, 120 bp, Artificial Sequence
  ENSG00000287038_5 (sequence is synthesized)
tggagtcgcagagcgcagaagtgaagatttaatacaaaagatgaaacttgtaggatgacctctagcagcgctactcacagctctgaaatcgatccagagcattccacagtgagcgttgcg

SEQ ID NO: 809298 - DNA, 120 bp, Artificial Sequence
  ENSG00000287038_6 (sequence is synthesized)
gctcccaggggctccggaccggtaacttcaggcgcaagtctgaatttcagggatgaacctgctttggattctgtttgagccgactcagtgcagaggcagtgacaggggctgtgggtttag

SEQ ID NO: 809299 - DNA, 120 bp, Artificial Sequence
  ENSG00000287038_7 (sequence is synthesized)
gggtgatggatccatgaaggctgccacttggagcgagcagacagttggcgataccctcccactaacttgctccgctgctccgggctgttcacagacagacccacgcgtaaggatttagag

SEQ ID NO: 809300 - DNA, 120 bp, Artificial Sequence
  ENSG00000287038_8 (sequence is synthesized)
tgaaatcggtgatgaggtgctaaggaataaaaagaggcattttgtttgcgtgtgtattagtttgccaggattgagtttttaggtttgatgtcctaaaatgtatcttcgacagtgactctt

SEQ ID NO: 809301 - DNA, 120 bp, Artificial Sequence
  ENSG00000287038_9 (sequence is synthesized)
ttgcagcctttcaagaggaggatgttcggcagtattttggaacctggtatgaatctatacattgtctgcgtgccgcaatatttgatgcctcttcgagttctaattcttattcctaattaa

SEQ ID NO: 809302 - DNA, 120 bp, Artificial Sequence
  ENSG00000287038_10 (sequence is synthesized)
taaatgactgttcctgataatgaagtgggaataagaattataataaactatttccaacaaaaggccatctttaacttatgatttctgattgtataagcctatcaattaccaataaaatat

SEQ ID NO: 809303 - DNA, 120 bp, Artificial Sequence
  ENSG00000287038_11 (sequence is synthesized)
tctgcagactattaggcatgaattgcagagctgtaatgaagagactcacttggttcaagaaaattcagaatttagagcgactcctctccaaaaagattgcatcaatgccggagatcaaaa

SEQ ID NO: 809304 - DNA, 120 bp, Artificial Sequence
  ENSG00000287038_12 (sequence is synthesized)
catatgaaggatgcagatgacacaaagctgggagacattgccaataaaaacaaaaatagaatccagagtgaaaatgatttggtaatctcttcattcctattgaaattcaacaggaattta

SEQ ID NO: 809305 - DNA, 120 bp, Artificial Sequence
  ENSG00000287038_13 (sequence is synthesized)
aagcccagccagtatgctaaaaacatcaaatacatagagaagaaatgcctttcactggaggggacatctgtgtttataccaatcgatgatgtgataatgttacaacacatttaatatagt

SEQ ID NO: 809306 - DNA, 120 bp, Artificial Sequence
  ENSG00000287038_14 (sequence is synthesized)
cttaaattgtttcaaaagaaacacggattcaggtttacatgaagtaatagatacagaaaatatgctgctactcagaccatatctgaattgttttgttaaattatctgttatatttttggg

SEQ ID NO: 809307 - DNA, 120 bp, Artificial Sequence
  ENSG00000287038_15 (sequence is synthesized)
tgtatagtgttaaaatctgtctctgcagaggaagctagccagcattgcatgagaatctaaatatcatgtcatatatggaatggttgaagagtctctttcaccattacaaatagcatgaca

SEQ ID NO: 809308 - DNA, 120 bp, Artificial Sequence
  ENSG00000249085_0 (sequence is synthesized)
gcggggctaggaaaattgctgcctgggtcggctgggcctgtgggcctgcgtccgacagcgcgcggccgtgctttctaagcgggctcggcagcaccagacttcaccggcccggcgcggggc

SEQ ID NO: 809309 - DNA, 120 bp, Artificial Sequence
  ENSG00000249085_1 (sequence is synthesized)
tcacaagtgctcgcactccctgcggccggcgcgctgaccggagcctctgggtctcgcacgcagcagctgcagacgctgcccggcgcggtggggctgtgagcaaaacggcccgccggtgtg

SEQ ID NO: 809310 - DNA, 120 bp, Artificial Sequence
  ENSG00000249085_2 (sequence is synthesized)
tgctgggccctcctaggtggatggccctgccccagcctaacttctgtaccccagcataacctccaaagtaacagccgtgccctgggagcctgttcaacactgaacatatcccacaataac

SEQ ID NO: 809311 - DNA, 120 bp, Artificial Sequence
  ENSG00000249085_3 (sequence is synthesized)
actgttccagcgtcgctggtaaaaagcagaaatggcttcgctggaggcatcgacaaatctaatgcagtaacctcattttacagaagagaactctaagaggataactaacttggccaagat

SEQ ID NO: 809312 - DNA, 120 bp, Artificial Sequence
  ENSG00000254009_0 (sequence is synthesized)
atctcctgcaggtctagtcagaccctcctgcatagcaatggaaacacctatttgtattggtaactatagaagccaggcgagtctccacagctcctgatctatggggtttccaatggggcc

SEQ ID NO: 809313 - DNA, 120 bp, Artificial Sequence
  ENSG00000254009_1 (sequence is synthesized)
tctggagtcccagacaggttcaatagcagtgggtcaggcacatattttaaactcaaaattagcagggtggaggctgaggatattcgactttattaatacatgcaagctacataatatcct

SEQ ID NO: 809314 - DNA, 120 bp, Artificial Sequence
  ENSG00000254008_0 (sequence is synthesized)
gagtccccatggccccagcagcaagcccctgcctctctcctgtccggctgctgccccactctgaggcccaggttctcttctcccaagagcgagtgcgttgggtcaaggtcaccccatctg

SEQ ID NO: 809315 - DNA, 120 bp, Artificial Sequence
  ENSG00000254008_1 (sequence is synthesized)
gaagctacctagaccccagcaatgttacctgacctgtgacacctttgttcctgtgtcctcctctgtgccgcccatggtgaatgtggcttctctgtctacatggatgcactcccaccacac

SEQ ID NO: 809316 - DNA, 120 bp, Artificial Sequence
  ENSG00000254008_2 (sequence is synthesized)
tgggagcttctggggcacaggagtcctgctttacttcctatgttgagcccagggactgcccaagataatgcccagtgcaggaatgtttccaccaggggtcacaggaatggctctgctgcc

SEQ ID NO: 809317 - DNA, 120 bp, Artificial Sequence
  ENSG00000254008_3 (sequence is synthesized)
ctgggggctgagttggccacctgtctggtgccaccaagttaacaagcaaagcagcatgaaggcagtggctggggaatcaaccctgattatcaaggataggaggcctgaagaaccacatga

SEQ ID NO: 809318 - DNA, 120 bp, Artificial Sequence
  ENSG00000254008_4 (sequence is synthesized)
gggacctccaagcctgaaagcctcagagtgatggtttgactcacaccaccagtaaaataacttccaacaagctgagcaagaagaaaaggggaattgtggcaaattgcattttccgaaaat

SEQ ID NO: 809319 - DNA, 120 bp, Artificial Sequence
  ENSG00000254008_5 (sequence is synthesized)
ggtcaccttaccactattccatcaagaggtggtgctatggtttgaatgtgtcccccaaagttcatgcgctgaaaactttacgtaaacacaaatgcaatagtgttgaatggtgggaccttt

SEQ ID NO: 809320 - DNA, 120 bp, Artificial Sequence
  ENSG00000254008_6 (sequence is synthesized)
caacactatcgcaagggtgattaggtgctgatggctctgccctcatgaatggattgtcattgttgagggagtgggttcctgatgagagaatgggtacagcctttccctctttctcacatg

SEQ ID NO: 809321 - DNA, 120 bp, Artificial Sequence
  ENSG00000254008_7 (sequence is synthesized)
ggtacagcctttccctctttctcacatgtgctcttgtccttctgccataagatcatggagcaagaaggctcttgaaagatgccggtccctggaccttggacttcccagcctccagaactg

SEQ ID NO: 809322 - DNA, 120 bp, Artificial Sequence
  ENSG00000249084_0 (sequence is synthesized)
ttaaagacagatcttcaacatccctgacggcagcaaatatgtctatgatagtaacacggggtgaagcggctgagtggaagaagatatagagtgctgtagagaaaagtattggagaacaag

SEQ ID NO: 809323 - DNA, 120 bp, Artificial Sequence
  ENSG00000249084_1 (sequence is synthesized)
aagagtgatgcagaaaatgaaacgcagggacacaaagaaaaagcacgcagttctggacatatttatgaagacttaagctgggacttcctctgcacaccagctccctcccctgcccccagc

SEQ ID NO: 809324 - DNA, 120 bp, Artificial Sequence
  ENSG00000249084_2 (sequence is synthesized)
tctacagacatgaccgcacttcccacctcccgggtttcccacagccgagtggtgccctgagtctcttcctatgtccaatcctatggttttgtttcctttgctttttctttcctgcccact

SEQ ID NO: 809325 - DNA, 120 bp, Artificial Sequence
  ENSG00000249084_3 (sequence is synthesized)
ttggctcatttcctttctcattcttactgaactgagaagttggaatgcttcaatcaacagcactgtgccgacagcctctctcatcctggatcgcagcccctaagacatgtcttcctggat

SEQ ID NO: 809326 - DNA, 120 bp, Artificial Sequence
  ENSG00000249084_4 (sequence is synthesized)
attccagggttctttcacatatctaacacatactgcatcttcactgctgcatcccaattttcccagacccacaatgtgaaaatttttattatttggtcctgaaaccttttgcatcatcct

SEQ ID NO: 809327 - DNA, 120 bp, Artificial Sequence
  ENSG00000249084_5 (sequence is synthesized)
acctatcaaatctgccacagtccttgttgacttttaaaaagttttactagggtaccacgtccagtgtcttgaccccaggctggtaaccatcgcttgcccattactctgcaccagcttctt

SEQ ID NO: 809328 - DNA, 120 bp, Artificial Sequence
  ENSG00000254001_0 (sequence is synthesized)
cccaccagaaggaaccaactctggacatatcttggcaacccagatgggactatctccaagcacatgaattacatgcataaatactggacctccagcgatcatcttgagggtgtgaaaaga

SEQ ID NO: 809329 - DNA, 120 bp, Artificial Sequence
  ENSG00000254001_1 (sequence is synthesized)
accacattacaatgctgggctgcttatcactgcaattttattatgaagaggagaaaaaaataaattttattgaagttgtttcattgtatctctgttattgtatcagccaaattgattttc

SEQ ID NO: 809330 - DNA, 120 bp, Artificial Sequence
  ENSG00000254001_2 (sequence is synthesized)
tagcagatacaagatatgtagtgtataccagttgttgtctttctataacagtaattttcctttggtggaaaagtttgcttccactatgcatgattttaataaatataatctttctttgga

SEQ ID NO: 809331 - DNA, 120 bp, Artificial Sequence
  ENSG00000254001_3 (sequence is synthesized)
taatttttcctggaattggtgccaatttactcatgaaaggataactatacgaatccttcctacccatcccctgtagtggaatgcattcgctctaaatcatgatgttcctgccaaaaaata

SEQ ID NO: 809332 - DNA, 120 bp, Artificial Sequence
  ENSG00000254000_0 (sequence is synthesized)
ttgctttattgctctgctcttaccatcttgaaattcataatcattgtcaaacaaagagtcccatgttttcttttggactgggccctgcaaataatgtagctgtacatggagctgatgttt

SEQ ID NO: 809333 - DNA, 120 bp, Artificial Sequence
  ENSG00000254000_1 (sequence is synthesized)
ggtgaccatgagagaacagggaggtgaacagtacgcaaccaagtgaagaggaaagtgtggctgcttgcaccatctagcagcctttcttgttcagtgcacctcattaaaaccacagaaaat

SEQ ID NO: 809334 - DNA, 120 bp, Artificial Sequence
  ENSG00000254003_0 (sequence is synthesized)
agcaccctaccttgtcctctgtgaaggaggccacccaaactgtctcactggttctaggtacacaaaacccaaatctgagaaatccactagattggcagaagcaaagggactcagtaccac

SEQ ID NO: 809335 - DNA, 120 bp, Artificial Sequence
  ENSG00000254003_1 (sequence is synthesized)
aggaagttcgcttttctgtgtcactatatcaaaagctaccacaaatgcagacaataacggctctttaatattaaagggaaaagctaacctgtccagctacagcagcaaagtaaccataca

SEQ ID NO: 809336 - DNA, 120 bp, Artificial Sequence
  ENSG00000254003_2 (sequence is synthesized)
tttcttctttcaccactgagggcttttgtgcaaggccagacaactgcccgcctgcccgcccttcacaaggctcacctccccaccaccgggcacactctgccaacactccacccctctctt

SEQ ID NO: 809337 - DNA, 120 bp, Artificial Sequence
  ENSG00000254003_3 (sequence is synthesized)
ccattcacaccccgtaatttaaaaactggcgacttagaccataaagagttgctgtgaaagtgatgtctacatatgtaaagcaacttttaaaatccctattaacctgaaggttactgaggt

SEQ ID NO: 809338 - DNA, 120 bp, Artificial Sequence
  ENSG00000254002_0 (sequence is synthesized)
aggagagaggaacctgcagcttgaggaagttcagagaaaacccagccctttcaccaagctgtgaagaagccaagcagttctcatggaaaaaccacatatatgtatttctgccaagaggcc

SEQ ID NO: 809339 - DNA, 120 bp, Artificial Sequence
  ENSG00000254002_1 (sequence is synthesized)
aaggaagtgccctggtgttaagaactcagcctctgaaacccgccgcccagcttcgagtcagcgacgtacttttgttgtcccggccttagtatccccgctgcaataagaggtactcagctc

SEQ ID NO: 809340 - DNA, 120 bp, Artificial Sequence
  ENSG00000254002_2 (sequence is synthesized)
aaaccatctgggtgaggattaaaggagttcatatccataaaggactagaacaggtcctggcaccacgtaaacattcttatcatcaaatgtgaaaaaacaaagttctctaagatttcgaaa

SEQ ID NO: 809341 - DNA, 120 bp, Artificial Sequence
  ENSG00000254002_3 (sequence is synthesized)
ggagcggagagagactgacggcggaggcgggggtcagggcgcggacccggaccccagccccatgggggacagagtccaaaaaaaccggccgggtggaggatgcagccgggcgtggtggct

SEQ ID NO: 809342 - DNA, 120 bp, Artificial Sequence
  ENSG00000254002_4 (sequence is synthesized)
ctaaaggcagaaatcaagctgacctaagcaaagacctgaaggagctatgaggacatctggcagaagaggcaagaggctggccagcggctataaacaagttaagggactcctctgagcctc

SEQ ID NO: 809343 - DNA, 120 bp, Artificial Sequence
  ENSG00000254002_5 (sequence is synthesized)
aacatcccatccctggaatggagagaaggacgtctgccctgcttatctcaaaaggacatcgatgagatcatagaagcccaagctgaggttacatctgatgctaaaaactagacgagaaag

SEQ ID NO: 809344 - DNA, 120 bp, Artificial Sequence
  ENSG00000254002_6 (sequence is synthesized)
ggtctgtctgaccctcaaggtcagcaatgtgtgtgcaactcccctctcggggtctggggacgcagccatgtgttccatcgcacaccaggctttggggatattgtagggctcagaccgccg

SEQ ID NO: 809345 - DNA, 120 bp, Artificial Sequence
  ENSG00000254002_7 (sequence is synthesized)
actgctagtttattaaaagagcagctgccatcccgccgcgcagtgggacagagagctgcagcccggcgcaggctcgaccccgcagggaaccgcgacccggggataggcagctctggactg

SEQ ID NO: 809346 - DNA, 120 bp, Artificial Sequence
  ENSG00000254002_8 (sequence is synthesized)
acacacacacatgcacacacgcacgcacacacacacgcacgcacagccgctaggcctagagtttatttttccaggggctggtggggactccgctcccgcggcgggcggcggcactggaat

SEQ ID NO: 809347 - DNA, 120 bp, Artificial Sequence
  ENSG00000254002_9 (sequence is synthesized)
gttaattgaaacggagctggcgagcgcggcgcagataagcgtcgcccagcagcgtccccgcctgcggctccccgaatcagcgatccgggaaggccccgccgcctctctggccgctgaggg

SEQ ID NO: 809348 - DNA, 120 bp, Artificial Sequence
  ENSG00000254002_10 (sequence is synthesized)
ttttcttttccacgctgaaggagtggaacgcgcgcggaggcagctcggcgcccgcaaacccccggagtcagcccccgacggtctgtcccagaactaaacggtctccgccacccaaagccg

SEQ ID NO: 809349 - DNA, 120 bp, Artificial Sequence
  ENSG00000254002_11 (sequence is synthesized)
agaagctaagaggccggctgggggagggtgacacggagaaatggagaagcccacccagcggttacataccggcagatttttatttcctttaactggttggttcttctaaacatttaatgc

SEQ ID NO: 809350 - DNA, 120 bp, Artificial Sequence
  ENSG00000254002_12 (sequence is synthesized)
aagaaatctctcggcccgcttcactttactctccacccatgctcttcccctaaccctgagaattttgcacagattttcggggttcgcgcggagcgcctctgaaagtgatggcggacaaac

SEQ ID NO: 809351 - DNA, 120 bp, Artificial Sequence
  ENSG00000254002_13 (sequence is synthesized)
cgtcaaaaaggcctcagcatagcaatttaggaaaagatcgtatcagatccttaattcacaccatacactctaatacactcgaaagtaagcaaagaaattataacaaataccagaataaaa

SEQ ID NO: 809352 - DNA, 120 bp, Artificial Sequence
  ENSG00000254007_0 (sequence is synthesized)
aaaggaacagggccttccattgctcttttctaggtgggcagcctataggaaaggggatttacaacagtggaaaggagcagtaaaagtgctgtggttaacgcgaatcacatgcccccagaa

SEQ ID NO: 809353 - DNA, 120 bp, Artificial Sequence
  ENSG00000254007_1 (sequence is synthesized)
cagcctgtgattcccaagtctaccctgagtttacagaatcaaaatttccagggtgcaagacttaatcacttgcactgcttttaagctcagcaagtatatcagtccattttgtatatcagt

SEQ ID NO: 809354 - DNA, 82 bp, Artificial Sequence
  ENSG00000254007_2 (sequence is synthesized)
aacatggctggggaggcctcaagaaaagcagtcatggcagaaaaggaagcaagacaccttcctcacaaggaacaggaaagga

SEQ ID NO: 809355 - DNA, 120 bp, Artificial Sequence
  ENSG00000254007_3 (sequence is synthesized)
atctcgcgagaactcactcactagaaacttgccaggaaaccacctccatgattcaattacttccacctggtctctcccttgacatgtgggaattatgaggaaggcaattcaagatgaaat

SEQ ID NO: 809356 - DNA, 120 bp, Artificial Sequence
  ENSG00000254007_4 (sequence is synthesized)
attgggtggagacacagccaaacatcaccttggggcacaggctcaaaaacagtccacaggataccatcactgagctggaatacaacatggggcatctgaaaagaagaaccaaaatagatg

SEQ ID NO: 809357 - DNA, 120 bp, Artificial Sequence
  ENSG00000254007_5 (sequence is synthesized)
cctggtcttcaactaaattacctgttcatctttttccaggaaaccttggaacaccaaggaatcagcagtcaaacgagctcagtctctcagaacacatgtgggggaattgagtatttcaac

SEQ ID NO: 809358 - DNA, 120 bp, Artificial Sequence
  ENSG00000254007_6 (sequence is synthesized)
ttttaggtagacagtttctacaagctaaatagtggaacgaaaggagccaaataaagaagttataaaacacgtgcatatttagcccctactttttattaaactaagactttttattcacat

SEQ ID NO: 809359 - DNA, 120 bp, Artificial Sequence
  ENSG00000254007_7 (sequence is synthesized)
tcaaagaagaggacttgctcaacacacctgccacaactcacctgcagggtctatcaaactgagttcctgattcagtaaatccagggaggggactgacgatttgaatttctaacaagctcc

SEQ ID NO: 809360 - DNA, 120 bp, Artificial Sequence
  ENSG00000254007_8 (sequence is synthesized)
aggtgaactgctctctgaagatcagaatttgagaaagactaaattagccagttcagtggtttccaaactggagtcttttatctacccagagaattttttgtttgtttaaatgcagattcc

SEQ ID NO: 809361 - DNA, 120 bp, Artificial Sequence
  ENSG00000254007_9 (sequence is synthesized)
gagggcagtattcttcacttctacttcccagaaacagtaaggagattaattagcacctgtgaaggttttgtactatcttggctcagagaaaagtaatggtgccttattcttcgagtattg

SEQ ID NO: 809362 - DNA, 120 bp, Artificial Sequence
  ENSG00000254007_10 (sequence is synthesized)
tttcatttgaatcataaatagggaaacttatttttttaactaaaagtataacttctaaaaattactgaattcaagcaggattaaaaaacgactctactgggttttccacactatcaaaga

SEQ ID NO: 809363 - DNA, 120 bp, Artificial Sequence
  ENSG00000254007_11 (sequence is synthesized)
cttcttttgtcttaactattactctggagaatgtcagatgcaacatggtttcctttttgtacaaagggaaaacatactgaagcatgattttaaaagaatttcagaaggagctgtaaaaca

SEQ ID NO: 809364 - DNA, 120 bp, Artificial Sequence
  ENSG00000254007_12 (sequence is synthesized)
aagtcacatcgaacattgagcactgatattattctttagagagttgatgtctaggctaatgcactgtgacccgaggatttgttttcaagttagggcaatggttctcaaactttaacaata

SEQ ID NO: 809365 - DNA, 120 bp, Artificial Sequence
  ENSG00000254007_13 (sequence is synthesized)
ggacatttcaaataacccagaaagacagatccccagggaaatgcctgacgattatttccaaattcttgactaacctggggctttctctcccttggactgctggatgtctcctgctgctca

SEQ ID NO: 809366 - DNA, 120 bp, Artificial Sequence
  ENSG00000254006_0 (sequence is synthesized)
gtcaccataagcttttgatagggcttttgtctttccctttctcatacatttttctgtcctagagaaagtgggagatttaaaaattatgtattctgtctttgcttgggtactgtgaagtca

SEQ ID NO: 809367 - DNA, 120 bp, Artificial Sequence
  ENSG00000254006_1 (sequence is synthesized)
ggtatatttgtagagttgggttagcgaggtagtgacaatttccttttaaagatgtatatcttctttctccccaattctttccaaagaaattactgatgctgaggaagatcctgaggataa

SEQ ID NO: 809368 - DNA, 120 bp, Artificial Sequence
  ENSG00000254006_2 (sequence is synthesized)
agcaacaaacgcagtctggaaccagtgacattaaagacctgaaccctgcacctcatcttgggacaattctaagggctacctgagttccacatattatcaaggactcagctgaatcttttg

SEQ ID NO: 809369 - DNA, 120 bp, Artificial Sequence
  ENSG00000254006_3 (sequence is synthesized)
gggccatggagggccaaggtcatggcagagcctcaattgtctccacagggagcggttatggacaacctaagagtcttgctctgttgcctaggctgaagtgaagtagtgtgatctcggctc

SEQ ID NO: 809370 - DNA, 89 bp, Artificial Sequence
  ENSG00000254006_4 (sequence is synthesized)
catctaggggaaaacagaagtatgaggattgagacttcttctgaaaatcagtgagtggctctctgcagtggttacagaaatgccccagc

SEQ ID NO: 809371 - DNA, 120 bp, Artificial Sequence
  ENSG00000254006_5 (sequence is synthesized)
agtgagtggctctctgcagtggttacagaaatgccccagcatggactccctcctgtaaactggctctgctgtcccagcagtgacggaaagcactcaatttgttttctcttggaagagaca

SEQ ID NO: 809372 - DNA, 120 bp, Artificial Sequence
  ENSG00000254006_6 (sequence is synthesized)
gagtggctgtcagtttactgcaatattttggactgcctggaaaattcaatgtacaacaggagaaaggagaggcaggagacagactctggaatagaagtcaaagacaaagaggctcgtaaa

SEQ ID NO: 809373 - DNA, 120 bp, Artificial Sequence
  ENSG00000254006_7 (sequence is synthesized)
aggcagtctggaaccagtgacattaaagacctgaaccctgcacctcatcttgggacaattctaagggctacctgagttccacatattatcaaggactcagctgaatcttttgagtcttgc

SEQ ID NO: 809374 - DNA, 120 bp, Artificial Sequence
  ENSG00000231156_0 (sequence is synthesized)
gcgaccgcccggagcccagcgcctctcaaccttgcccgggctcggaacgtcgcggggcgtgttctccgacacagagaattcgtgtgagccgactggcctcgccctgacctgcccctctta

SEQ ID NO: 809375 - DNA, 120 bp, Artificial Sequence
  ENSG00000231156_1 (sequence is synthesized)
acggaaaaccgctggtgcagggtttgcgagtagctggttgcgtccgccgggacccgacagaccggcaggcccagagaactccgggactgtctggggaacgcgccaggcccatgtcggctg

SEQ ID NO: 809376 - DNA, 120 bp, Artificial Sequence
  ENSG00000231156_2 (sequence is synthesized)
gggcgctcggagctgggagagggcggagagcctccatccaggccggagcatcccagagcccgaggtgcggagcagcatggagcgcccgaggcgggcggcgccagggccagagtctaccca

SEQ ID NO: 809377 - DNA, 120 bp, Artificial Sequence
  ENSG00000272944_0 (sequence is synthesized)
agcacggccggtccccgcccccgcctgccggagggagccagcgggatcccccacgttacctcgaaggtcgagcccctggacggcggagggactttggaaaagctcggaattgaccgaggg

SEQ ID NO: 809378 - DNA, 120 bp, Artificial Sequence
  ENSG00000272944_1 (sequence is synthesized)
gagccagagaagaggttggaaaccttttctcccaccacgggcggtttaagatggaggaaaacgctcttttattgaaataaaagaagtctaagctgacctgcggttgcttctttaggagag

SEQ ID NO: 809379 - DNA, 120 bp, Artificial Sequence
  ENSG00000272944_2 (sequence is synthesized)
tcgacgtgtctgcgtccagcgcgcccgggctgagctgcagactcgcgcctgccaccgccaccctctgccaccttgccctgttttgtctttatggcgcttccccctctgaaatactctttg

SEQ ID NO: 809380 - DNA, 120 bp, Artificial Sequence
  ENSG00000272944_3 (sequence is synthesized)
cggggagttttgtggctctatcactcgcttcttccctggctccccagatgcctggagagcggggacctacttggtccccaacgtccagtccgcagcagggctccgtcactgtctccagag

SEQ ID NO: 809381 - DNA, 120 bp, Artificial Sequence
  ENSG00000272944_4 (sequence is synthesized)
actgaacgaatgactttctagcagtaaggaagtccccgctggccccgtccccctgcacacgccgtggacctcgcccagggcccaggacgccccgagatggccttgggcagggaaccagtt

SEQ ID NO: 809382 - DNA, 120 bp, Artificial Sequence
  ENSG00000272944_5 (sequence is synthesized)
gtggatttcccgggggcagggttgggggcagtccctggaaccgggcctagcccgtctgggagcggtggggtagaagtgaaaggcttaagtgtgggtgcggggacttgcagccgcacagac

SEQ ID NO: 809383 - DNA, 120 bp, Artificial Sequence
  ENSG00000272944_6 (sequence is synthesized)
aaggcagaccgggactgggaagctgcccggagcggctgctgcgactctccgctccgacctagccggggcagccctccctgccccgggagaagacggcgagcaggaggacccgcagagccc

SEQ ID NO: 809384 - DNA, 120 bp, Artificial Sequence
  ENSG00000272944_7 (sequence is synthesized)
cgcccggctgctccggccccgggggcactggcaccatcgggctgtggtcttttcccgatgcccgagccgtggacgcggccacctaagagcggtccggcgaaggcagcgcagccggtgtcc

SEQ ID NO: 809385 - DNA, 120 bp, Artificial Sequence
  ENSG00000272944_8 (sequence is synthesized)
catttccccaggcgctggcaggggcactgattcctagcaatgaggcctcccttccccttcccaggccgcccctcctctgactccctccagagcagggccgagttttcctggggagcctgg

SEQ ID NO: 809386 - DNA, 120 bp, Artificial Sequence
  ENSG00000272944_9 (sequence is synthesized)
gtcccggcggccgggcggccgctgggaggtggaggagcctctccagccccggccgcagctcatcgtgagccaaccgcgccacctgccggccagatgcgggagtgtgcggccccggaggaa

SEQ ID NO: 809387 - DNA, 120 bp, Artificial Sequence
  ENSG00000272944_10 (sequence is synthesized)
gggcgagcggacaaagaccgcaacccgcaatccgcaaccccgcagagaggtggtgcgtgcgtttgggcgagcttttcagccaccgccaagtctcgtgcactagggctactcctaccgtgg

SEQ ID NO: 809388 - DNA, 120 bp, Artificial Sequence
  ENSG00000272944_11 (sequence is synthesized)
ggctgcggacagcgctcaagaggtcctggagtctgtcgtgactctcgcctgctggatttcaaaagatggaatcggaaagcgtttcaaggagaaactcctaacaaaccttccgggggttgc

SEQ ID NO: 809389 - DNA, 120 bp, Artificial Sequence
  ENSG00000272944_12 (sequence is synthesized)
ctgagtggctgctctcggaaaagcggatcctaaataaagcgggagggttatagggcgacgtcgaggagaggacaggtctcgagtcactgctacagtttcaggtcactgggctccgcagca

SEQ ID NO: 809390 - DNA, 120 bp, Artificial Sequence
  ENSG00000272944_13 (sequence is synthesized)
gatcgtgttttctcccgtggctcgagagctgcgctggtttctcatgcaaactcagagccgagctaatgacatgagcaacttttacttttacacaagatgagcacgcgtgccgaggcgctg

SEQ ID NO: 809391 - DNA, 120 bp, Artificial Sequence
  ENSG00000272944_14 (sequence is synthesized)
ggcggcggctgtgtgagttggtggcccagacgaacagcttgtgcgagactctgggcatttcggtttctagatacaagatttgcttaaatgtcacagtccaaagaagtggatttcagtcat

SEQ ID NO: 809392 - DNA, 120 bp, Artificial Sequence
  ENSG00000272944_15 (sequence is synthesized)
tgtagctactgattgcacacaagtaaaaagggaaaaaatatgtactcgggggatatatgtatgtgtgtgtgcgtgcataaattatttaaaataactgcactaaatccctttaagaaatgc

SEQ ID NO: 809393 - DNA, 120 bp, Artificial Sequence
  ENSG00000272945_0 (sequence is synthesized)
ctatttcatggttattgagaacatgggatctgtcctcagaccgtccagactcaaattgcagcctcctcttagtgtgtggctctggacaagtgacctaacccttgtaaacttcagtttctg

SEQ ID NO: 809394 - DNA, 120 bp, Artificial Sequence
  ENSG00000272945_1 (sequence is synthesized)
aatctgaaatggggatgacagcagtactgaaatcacagggttgtttctgggatgaaatgtggtagttacctgtaaaggacttagtacagggcacatgacagtgatcataacgataacatt

SEQ ID NO: 809395 - DNA, 75 bp, Artificial Sequence
  ENSG00000272945_2 (sequence is synthesized)
gtctcgctccactccacctcccaggagaatcacttgaacctgggatgtagaagttgcagtgagccgagatcgtgc

SEQ ID NO: 809396 - DNA, 76 bp, Artificial Sequence
  ENSG00000272945_3 (sequence is synthesized)
gtccgaatgagactctgtcacaaaaaaaagaactttattctcggatccaaacactggaaacctaggattccgtgtc

SEQ ID NO: 809397 - DNA, 120 bp, Artificial Sequence
  ENSG00000272940_0 (sequence is synthesized)
tgttcatccatacaatgatgctctgaggagcacacaaggaaggtgcaaatttgataaaatgtgcatgatgtaaggagcataaaccccctcaggaaagagttgctgccttttcactaatgt

SEQ ID NO: 809398 - DNA, 120 bp, Artificial Sequence
  ENSG00000272940_1 (sequence is synthesized)
accaacaaacaacagggcctgtgtctggggcttacaccacgacatgtggtcctcgcagcaccattgctcagaggaagaaaccaagatctcgaggaactgagtaatttgcccacgttcaac

SEQ ID NO: 809399 - DNA, 120 bp, Artificial Sequence
  ENSG00000272940_2 (sequence is synthesized)
aagttggtgcaaaatgaagagtggctcccgtatttcagactttaaggccgacgatcttccatctgtgctctgggggcaagatgggaggtccacagataaaattgcgggcggtatccccca

SEQ ID NO: 809400 - DNA, 120 bp, Artificial Sequence
  ENSG00000272941_0 (sequence is synthesized)
tgtccacaggggcaggcaccactcagaacagacccttccactgatcttgcccatctgatgttaccatgtttgttgtaaaggaagagactggcattctggacaactggcatcagagactgg

SEQ ID NO: 809401 - DNA, 120 bp, Artificial Sequence
  ENSG00000272941_1 (sequence is synthesized)
ctgacatggagaacccactctgtgtgtgctgagggcagggcactcaccagtgcagaggcagaagtgggtgcctgtcctcgagggttaacccgctttgcctcccgcccacagcccctccac

SEQ ID NO: 809402 - DNA, 120 bp, Artificial Sequence
  ENSG00000272941_2 (sequence is synthesized)
cttctaaaagctcaagagatgatcagactgaaacacccgcccatcttgctgttctgcctaggctggaagacctggcccaggtcatggaggcccctgctccacttgccagattcgcaggag

SEQ ID NO: 809403 - DNA, 120 bp, Artificial Sequence
  ENSG00000272941_3 (sequence is synthesized)
tcttctgaccagagctgtcgcaccttgctgctgccactggcactgctgccattctcatcctcttgggggccttcattggtgccacattctttgtagccacctgggctgtcagccatgagg

SEQ ID NO: 809404 - DNA, 120 bp, Artificial Sequence
  ENSG00000272941_4 (sequence is synthesized)
tcagggcccaagcttaatgacctgttttttaattcaggaaggtaaatctcgttctctcgtcacacccggaattacaggtccatttgtcctcagtgggagttgatctttgattcctacaaa

SEQ ID NO: 809405 - DNA, 120 bp, Artificial Sequence
  ENSG00000272941_5 (sequence is synthesized)
gaacaataaagtccggtgaattcccatacctccagtcatcaggcacagttactggtcggtgcagggcaggccagaagtgaccaaggcccaagagactcagacggccattcacaggcatca

SEQ ID NO: 809406 - DNA, 120 bp, Artificial Sequence
  ENSG00000272941_6 (sequence is synthesized)
ggcaggtgtgattgtgggcaggacagcagctcaggagagagccctctgacctccccaaagctggtgccccctacaggcagccaaagccaaccagagatacctcctgcagcctctgtgctg

SEQ ID NO: 809407 - DNA, 120 bp, Artificial Sequence
  ENSG00000272941_7 (sequence is synthesized)
actgactcagcacaggaggaacggaaggaggcggaggcccctaatgttccttctcattaccaccccaaatgccactgtcctctgggtgcccagcccattcaatccctaaaatacctctta

SEQ ID NO: 809408 - DNA, 120 bp, Artificial Sequence
  ENSG00000272941_8 (sequence is synthesized)
atggcctctccctcatctggccaactcgatttctctactcttctatggtggctcagttaaatgaaactgagggcattttatttcacaataaagtctcattggccaacacgccgcccttaa

SEQ ID NO: 809409 - DNA, 120 bp, Artificial Sequence
  ENSG00000272942_0 (sequence is synthesized)
gaggtgacacctcccaatcacacagacattgcaggctcagagggaggagcccctttgaaagaggtgagcagagtctggggcatttgtgcaaatgttgatgaggtccccagacaactcaca

SEQ ID NO: 809410 - DNA, 120 bp, Artificial Sequence
  ENSG00000272942_1 (sequence is synthesized)
gcctcccaggaaaccctaactggggaagaaaagatgaggataagcagagcccaccatgggtgagaagagaggaaagccagggtctccaccacccaggtcctcagtgtccctcctccgtgt

SEQ ID NO: 809411 - DNA, 120 bp, Artificial Sequence
  ENSG00000272942_2 (sequence is synthesized)
gcccggccctgtcctgtgggtggagggtgaggagagggagagaaggaagggttggcagttttataagagctggacctcctcctatgagtagatgaaatagtttaatgagattggttttgg

SEQ ID NO: 809412 - DNA, 120 bp, Artificial Sequence
  ENSG00000272942_3 (sequence is synthesized)
tcagactcccaatataagctcttggtcgctgtggtgaaagttcgtgtgtattcatcccctgagaaggttccctaacccttactgtgtcttctgtgtgaggagtgcagctctaagcactca

SEQ ID NO: 809413 - DNA, 120 bp, Artificial Sequence
  ENSG00000272942_4 (sequence is synthesized)
gggtactgtttcccagtgaatcttaatgaaatgtttggagaatttttatttcctccatttagcctaaccagaacagaaacgtcagctctagaggtagaacaggtcactcagagtcacccg

SEQ ID NO: 809414 - DNA, 120 bp, Artificial Sequence
  ENSG00000272942_5 (sequence is synthesized)
agcaatcactgctgcatgagctgctgacttgaggtctaagtgatgggaaagttcacctttctacctagttgcctctgaaaatgtatcctaaaatgaaataaacacgttgtttatagctaa

SEQ ID NO: 809415 - DNA, 120 bp, Artificial Sequence
  ENSG00000272948_0 (sequence is synthesized)
acttggtaatgcctgccctcctcaaatgtccttagtctcctcaactctagccctccaccgctttctccctggggttctgaagagccggcgcccccttgtctgtctgcggccaggcgccgc

SEQ ID NO: 809416 - DNA, 120 bp, Artificial Sequence
  ENSG00000272948_1 (sequence is synthesized)
accctgcccttcccgcgggagcggttccggtcaccctcaggggtgcggcccctgcgtgctagtcctgcaaagcgctgattggccggcggctcggttgcctcgcgtcccagcgccagctgg

SEQ ID NO: 809417 - DNA, 120 bp, Artificial Sequence
  ENSG00000272948_2 (sequence is synthesized)
caggcgcgtgtcctggaaccgggtgttaaatattcagatccgtgcgccccgcgtgaagggtggaaaggcacggcccccaggctctggggcttggagattggttgcaaatgaaagactgaa

SEQ ID NO: 809418 - DNA, 120 bp, Artificial Sequence
  ENSG00000272948_3 (sequence is synthesized)
agctggagtgaatctgcctattatttttattcccagcaacagctgaccccagatacagtttgtgggggtggggggcgttactgcagggcagggcagtgcactgttaacgtacttcgttta

SEQ ID NO: 809419 - DNA, 120 bp, Artificial Sequence
  ENSG00000272948_4 (sequence is synthesized)
ttgagttaaaatctcttgtaaatgttataaatgaggattttgccaataagcagaaggtcaaatttcattttgacaaatgatttaattaaataatgcggtgaaaagtgctttttgtttaaa

SEQ ID NO: 809420 - DNA, 120 bp, Artificial Sequence
  ENSG00000265163_0 (sequence is synthesized)
tgccctcataaaagagatcctggagagatccctctctcgccctctttccaccaagtgaggatataagaagtcagccatctggaaactagggagagaaccctcatggaacctgaccatgcc

SEQ ID NO: 809421 - DNA, 120 bp, Artificial Sequence
  ENSG00000265163_1 (sequence is synthesized)
caaaagatgcttccagtttcaccttggcctgggcaactgcagacagtcttcttggatgatgcttgtgactcttcccgcaacacctgagtggcccctcatggttgggtacatgggtcccaa

SEQ ID NO: 809422 - DNA, 120 bp, Artificial Sequence
  ENSG00000265163_2 (sequence is synthesized)
agctgagcctgaagtcgatgctgggaactgagtcaccaagggcatggatgcttccatcaaggcagacaagatttaaaaacctagtttcagtggcactaatgagaccaatagcaaacccaa

SEQ ID NO: 809423 - DNA, 120 bp, Artificial Sequence
  ENSG00000274629_0 (sequence is synthesized)
ggatccactgagagttggttagctgtgattaatactgtcatctgtgaccatgaaaatctatagtggtttgccccattacatatctgaaacattgtcttatgaaaacaaaatgaaacaaaa

SEQ ID NO: 809424 - DNA, 120 bp, Artificial Sequence
  ENSG00000274629_1 (sequence is synthesized)
ttaaataaaattgaagataaaaatactctggaagcacaggatatctgacaagaatcttcagcacaaagcacatgtttgaaaacgtgaaacgatgactctttggaggacaatagctaaata

SEQ ID NO: 809425 - DNA, 120 bp, Artificial Sequence
  ENSG00000274629_2 (sequence is synthesized)
tccaagaatcatcagtaaagaaaacaaaacgcagcacattcacattttcccgaggaactgtaaagatgatctctacagggataaacgttgtaaagcctgaagctcaatcaactgatgttg

SEQ ID NO: 809426 - DNA, 120 bp, Artificial Sequence
  ENSG00000274629_3 (sequence is synthesized)
atttaatagaagagatggtcgtcttaatatttaatgatttaaaagaacttcccagtccatgcgaagagtacagtccaagaataaatcaaatttctgaacgcattttatgctacatatgtg

SEQ ID NO: 809427 - DNA, 120 bp, Artificial Sequence
  ENSG00000274629_4 (sequence is synthesized)
tatactttgcgatcctcaggtgttcgtgccaaatattctctctcaataagtccttcaatacgtttcttaataacaactggacttggtaagaatcgcgccttcaactgctgagttacctaa

SEQ ID NO: 809428 - DNA, 120 bp, Artificial Sequence
  ENSG00000274629_5 (sequence is synthesized)
aaaagaaagtagatagtatttttatataaacacataaaaattcgtatctttgaacagaactgatatgtcattttaacactcagagactgaactttactaactggattaccaaagataaaa

SEQ ID NO: 809429 - DNA, 120 bp, Artificial Sequence
  ENSG00000274629_6 (sequence is synthesized)
aggaaacaactcatacctaaccacaggaagttgacttaccatggttggacttccattaaattcaagaaaaatacaaatgtttgtcactattggtagatcagaattttcaaaagaaaatgc

SEQ ID NO: 809430 - DNA, 120 bp, Artificial Sequence
  ENSG00000274629_7 (sequence is synthesized)
tacatagtggatgaattcaatgcaattaaggagtcaagtgtcctcgactggcaaccagaagactacatctggcagttgtaccatttagactgtggtcaagtcccaagctcttttctctat

SEQ ID NO: 809431 - DNA, 120 bp, Artificial Sequence
  ENSG00000234244_0 (sequence is synthesized)
ggcggcgccaccgcgcgccttcctcagccgctgttaaccccggggtctagagaagcactgagaggactcctcagcctgtgccagataatttccactggatattaataagatcctgtggtg

SEQ ID NO: 809432 - DNA, 120 bp, Artificial Sequence
  ENSG00000234244_1 (sequence is synthesized)
atgttaaccaggtttgagcactagcattcctaatgtgcattgaacacctcctgtcttatgcttatttatgccagttttagcggttttccaaatctctaaggcgctgtgcacaattaaaat

SEQ ID NO: 809433 - DNA, 120 bp, Artificial Sequence
  ENSG00000234244_2 (sequence is synthesized)
cctactgtacaacacagtggcccttgtatgaagatccaagacacatatggaaattaaagatttaattatcactcctttggaggatttgttggccatcagcaacttgggcttaacttgggt

SEQ ID NO: 809434 - DNA, 120 bp, Artificial Sequence
  ENSG00000234244_3 (sequence is synthesized)
tgggcttaacttgggtccaattttataattttagtaaattataataatatttatgatatctataactatatactagtgcttggtcttattgttcagatatagctatagtttttcttgttt

SEQ ID NO: 809435 - DNA, 120 bp, Artificial Sequence
  ENSG00000234244_4 (sequence is synthesized)
ttttttattttgttgaattaattttgtctttcatcggtatttgttagttcctcatttttttgtgtctttctgtgtatgtaaataggtaattcctctaaataacatttcttttgttatcaa

SEQ ID NO: 809436 - DNA, 120 bp, Artificial Sequence
  ENSG00000234244_5 (sequence is synthesized)
ggaaaggaacctctgcagcttagaggcagcagtctatcacccttttgtcagagaacctttgtagaagagtcaatgttttttgccatttgaaaatctctgtttctgcaagatgccatgcta

SEQ ID NO: 809437 - DNA, 120 bp, Artificial Sequence
  ENSG00000234244_6 (sequence is synthesized)
ggcactgtacacaattaaaatgagttcccatctccaaggaatttgcaaccatagacagcacagtgaagacaggtgttaacttgaaggctgtacacaaacagtgaattctcaagtctcctc

SEQ ID NO: 809438 - DNA, 120 bp, Artificial Sequence
  ENSG00000234244_7 (sequence is synthesized)
ctctacgtgcctggcggcggcgccaccgcgcgccttcctcagccgctgttaaccccggggtctagagaagcactgagaggactcctcagcctggcgctgtgcacaattaaaatagcagag

SEQ ID NO: 809439 - DNA, 120 bp, Artificial Sequence
  ENSG00000234244_8 (sequence is synthesized)
tactcagggtaatatttttaacatattaaaaagaattaaggaggaagagaaattggaagtatgtaaagatgggaaagcttaatagttgtagctatttgggaagacagtgatgtgaaggaa

SEQ ID NO: 809440 - DNA, 120 bp, Artificial Sequence
  ENSG00000234244_9 (sequence is synthesized)
tgaaggaaataattattacctacttacataaaattcagtattccttatagttttaaagagctagtcttttaagaaacaattgctattttttaaaaaaataaaaatattatacatccccaa

SEQ ID NO: 809441 - DNA, 120 bp, Artificial Sequence
  ENSG00000265168_0 (sequence is synthesized)
gaatgttttgctaccatttatttgctgtatggtatgtactcaaggcatgagtcagggcttctgtactaccctctgatcccaggagacagggcaggcaagaaggagagcccagggagaagc

SEQ ID NO: 809442 - DNA, 120 bp, Artificial Sequence
  ENSG00000265168_1 (sequence is synthesized)
tgttctgacttctagcaatttcttctgccctcagtcatgaggggctccctatcctcccatcctatggtcccaggtatacatgatggtcactcagggccttgtacacagcagccaagacct

SEQ ID NO: 809443 - DNA, 120 bp, Artificial Sequence
  ENSG00000274624_0 (sequence is synthesized)
gggccaggcactttgacctcatgaagttggccttgtctcccaattcgtgcattttcggagcaatgtcacttccttactctgagatctctctggtactactttttgtcatttctctctgct

SEQ ID NO: 809444 - DNA, 120 bp, Artificial Sequence
  ENSG00000274624_1 (sequence is synthesized)
tcttcttaaactcagttttttgaacccggaatcaacaacatcaaaaattcctagattttactgtatttttttgctgtgggaaattgtctgacactcagtcaaaacacaggtatttactca

SEQ ID NO: 809445 - DNA, 120 bp, Artificial Sequence
  ENSG00000274624_2 (sequence is synthesized)
ggacctgctggctgctggtcagcactggatgagaggttctgcaggattacacatgaacagcacatcacagttcctaacatgaatgaacatataagctatttggaaagaaaagatgataga

SEQ ID NO: 809446 - DNA, 120 bp, Artificial Sequence
  ENSG00000274624_3 (sequence is synthesized)
gcaagatccagggttggggtttggcattgtgtgcatagtgggggcaaaaaaggcagtcctgtgtggttgaccctgtggccaaggctgagagagatgatttgtatgatcaagagaggctga

SEQ ID NO: 809447 - DNA, 120 bp, Artificial Sequence
  ENSG00000274624_4 (sequence is synthesized)
tggactatgtgaagtgtatatcttatctcaatcacccaacactttatattgaaagtgaggatatcacacaagtaaattttgtttgtgtttatataacttggcacttatgttttcaatatc

SEQ ID NO: 809448 - DNA, 120 bp, Artificial Sequence
  ENSG00000274624_5 (sequence is synthesized)
atgttgtaaaataaatgtctttaaaattagactaattaccgccaccctccagtcatcagcacagcttctgctgtggagatgtgcaagttgggaaataaacgaaacatcattatgtccata

SEQ ID NO: 809449 - DNA, 120 bp, Artificial Sequence
  ENSG00000240973_0 (sequence is synthesized)
ctaggacatgctagatattcaaagcttgttgaataaatgactgaaaggatgcagaattttcaaaattccctcttcaagtacttcttctacaggaatgggtagagtgggaagtgaggagac

SEQ ID NO: 809450 - DNA, 120 bp, Artificial Sequence
  ENSG00000240973_1 (sequence is synthesized)
agggtgggtatgtgggtgggaatagggcaagtgacttaagctggtgtgggtgggctccagtatccacttctacttcaatcagagcaactcaacaatgctacatatataagcccactatga

SEQ ID NO: 809451 - DNA, 120 bp, Artificial Sequence
  ENSG00000240973_2 (sequence is synthesized)
aaattggatattgaatcagctgggaaaatgaattccttactgagcatttcaacttaaacttgggttccaagtggattaaacagatgatgttgtaacactgttatcagcctgacaggaaat

SEQ ID NO: 809452 - DNA, 120 bp, Artificial Sequence
  ENSG00000240973_3 (sequence is synthesized)
gcatagagacaccagtcctcgtttcttaaagtggaggagcctcagctagcaaattgccacttattagcttgtctcacctataaaagagccatggaagagaagtgcaagagaactgaagtg

SEQ ID NO: 809453 - DNA, 120 bp, Artificial Sequence
  ENSG00000240973_4 (sequence is synthesized)
atttcctgatgacagcagggggtgctctcactagactgaaggacagatacattctcagagcagtaggaaaggaataacacattgccttactacgactctatatgagactttagaagtgcc

SEQ ID NO: 809454 - DNA, 120 bp, Artificial Sequence
  ENSG00000240973_5 (sequence is synthesized)
caactttgataaatacttaaaaatgtatttttgaaaagtcattaacttctggaatataggattcagccaccacacttagaatgtgtgaaactgtggtgcaatttgtaacaggatgtacac

SEQ ID NO: 809455 - DNA, 120 bp, Artificial Sequence
  ENSG00000240973_6 (sequence is synthesized)
cacatttttaatcagggaattgtgttttttaaagctaagagacctgtagtgaattaaggcatttggctcagccaaacattccaatcacgaaacgatcgaagaggaaatctatagaatctt

SEQ ID NO: 809456 - DNA, 120 bp, Artificial Sequence
  ENSG00000240973_7 (sequence is synthesized)
attataaacttacaaaaaggataactgtgggtctcggccataaactgaagtaatacagatgaactggacacatatgttgcacaataggtgattcagagcaatatagcctatgctgtttta

SEQ ID NO: 809457 - DNA, 120 bp, Artificial Sequence
  ENSG00000240973_8 (sequence is synthesized)
tgatatggaaagcaatcaaatcttatttgcaaaaaattcagatcaattgaattttaatgagaagcaggtgctggagtgtagcatccacaaagaattctgggaatgtttaaaattagtccc

SEQ ID NO: 809458 - DNA, 120 bp, Artificial Sequence
  ENSG00000240973_9 (sequence is synthesized)
atatttgccaggagacagttgggtacataaacttttttatttcttgattcatgggtctattcggactgtagattgctctgccattctgagttcagcaatttgaataaattatgctgaaaa

SEQ ID NO: 809459 - DNA, 120 bp, Artificial Sequence
  ENSG00000231149_0 (sequence is synthesized)
atacacagaggtgccgggaggagaagggacgcattggcccaccgcctcgtgagtccaggcgccgtaattggtgcttcacgcatgtcgtctcagtaatcttcataacagccttgcaaggga

SEQ ID NO: 809460 - DNA, 120 bp, Artificial Sequence
  ENSG00000231149_1 (sequence is synthesized)
aagtcatttgcttgaggttacataactggcaagatgtcaggaatgaatataaaccagcatcgattgagcacctactattcggcaggatctgtgctgtgattcttatccttgtgcaaaccc

SEQ ID NO: 809461 - DNA, 120 bp, Artificial Sequence
  ENSG00000231141_0 (sequence is synthesized)
ggttgccacttcaagggactacatcatgatgtcctgtttctaatgacctcccaatcatcctgcagaagattcttcaaatggggatcaacatgtccttatttaaggtttgtgatgaagaaa

SEQ ID NO: 809462 - DNA, 120 bp, Artificial Sequence
  ENSG00000231141_1 (sequence is synthesized)
caaccaagtccaaaggttctttacacagccaatagctggtgctacaagcagatcaaaaccaggattgatggtaatggaagaggaacagactggaagagctggctcttctggcagtttttt

SEQ ID NO: 809463 - DNA, 120 bp, Artificial Sequence
  ENSG00000231140_0 (sequence is synthesized)
agtaagatatggttctcaaggcctggagaggcaaaccatgtccagaaaaggtccctgatgatagaactccctgagtattcttgcagaaatgaatatccaccaggcttcttcttttttttt

SEQ ID NO: 809464 - DNA, 68 bp, Artificial Sequence
  ENSG00000231140_1 (sequence is synthesized)
atggagtctgtctctgtcgcccaggctggcgtgcaatggtgggatcttggctcactactcaggaggct

SEQ ID NO: 809465 - DNA, 120 bp, Artificial Sequence
  ENSG00000231140_2 (sequence is synthesized)
ttgaacccaggaggcggtggttgcagtgagccaaggtggcgccaccgctctccagcctggcaacagagcgtgactccatctcaaaaaaagaaaaaaaaaaatttcagggatatttatgta

SEQ ID NO: 809466 - DNA, 120 bp, Artificial Sequence
  ENSG00000231140_3 (sequence is synthesized)
aaaaaaaaatttcagggatatttatgtagtgacctgttatttaatttttcaataatataaatctgtttcaagaaaaagaaattttaaataaactcttatgattttctttctcctgaaaat

SEQ ID NO: 809467 - DNA, 120 bp, Artificial Sequence; identical to SEQ ID NO: 804453
  ENSG00000231140_4 (sequence is synthesized)

SEQ ID NO: 809468 - DNA, 120 bp, Artificial Sequence; identical to SEQ ID NO: 804454
  ENSG00000231140_5 (sequence is synthesized)

SEQ ID NO: 809469 - DNA, 120 bp, Artificial Sequence; identical to SEQ ID NO: 804455
  ENSG00000231140_6 (sequence is synthesized)

SEQ ID NO: 809470 - DNA, 120 bp, Artificial Sequence; identical to SEQ ID NO: 804456
  ENSG00000231140_7 (sequence is synthesized)

SEQ ID NO: 809471 - DNA, 120 bp, Artificial Sequence
  ENSG00000231143_0 (sequence is synthesized)
ctgtccacagtattgaagatatccttatatgcatagaccttgctggttcagtggcagtggctagatcatgagtgagcatctcttttagagcaagtctacacagagggagtggtttgtatg

SEQ ID NO: 809472 - DNA, 120 bp, Artificial Sequence
  ENSG00000231143_1 (sequence is synthesized)
aaacaccatcttcaactcagccatttttctcttggttttgaaaaaaccagagaataagcaagaggaggacaaagaaaatcacttagtgacactgtccaacaatcctgagagtgtttctgg

SEQ ID NO: 809473 - DNA, 62 bp, Artificial Sequence
  ENSG00000250577_0 (sequence is synthesized)
agtcttgaacttctggcctcaagtgatcctcctgcctccaaaagtgctgagattacaggcat

SEQ ID NO: 809474 - DNA, 120 bp, Artificial Sequence
  ENSG00000250577_1 (sequence is synthesized)
tttcttacattgctttgaagaaataaaaatctttttcaaattgattactttgattattcaatttgcttcgatgtgacctctgatcataggttgtataacagtggtgtagtctttgcagtg

SEQ ID NO: 809475 - DNA, 120 bp, Artificial Sequence
  ENSG00000230898_0 (sequence is synthesized)
tgctgcggtgaagaccaaggatcgccgcggctcctcaaccgccaggggccgcaggctacgggcggtcgcgtccgggacttttatatttaccaaattttcataactccgcacccgcctcct

SEQ ID NO: 809476 - DNA, 120 bp, Artificial Sequence
  ENSG00000230898_1 (sequence is synthesized)
ttcagaactagactctgagcaggtggcaacgacaatagctaaaaggtttagggcctgccttctacctgctgttacaatgtaggtctagaacaccctaattagccagtctgcagcctacag

SEQ ID NO: 809477 - DNA, 120 bp, Artificial Sequence
  ENSG00000230898_2 (sequence is synthesized)
accctttttctggaaattcaacctcatttcacttattaatctaaaactctagagctcccaaggcaacattaaaaagcacagactttgggtcaaggaagtggctcatgcctgtaatcccag

SEQ ID NO: 809478 - DNA, 88 bp, Artificial Sequence
  ENSG00000230898_3 (sequence is synthesized)
ccagcactctgggaggctgaagtgggaggatcacatgagcccaggagttcaagaccagcccaggcaacaaagcgcaagctggggtatg

SEQ ID NO: 809479 - DNA, 120 bp, Artificial Sequence
  ENSG00000230899_0 (sequence is synthesized)
actttgagatctggcagagcctggagctccgtactctgctgatggtgtctgcttccctcagaccaagttgttattagcagaattctggagccatggtgtctcaatcaatccaattttcct

SEQ ID NO: 809480 - DNA, 120 bp, Artificial Sequence
  ENSG00000230899_1 (sequence is synthesized)
gtgaacggtagcagtgaaagcatacatcaatgacttgctcctgacgagaatgggaatgcttctaacatttcacattcaagagaaggagccttggagaattcgttgaataattgcccgtat

SEQ ID NO: 809481 - DNA, 120 bp, Artificial Sequence
  ENSG00000230899_2 (sequence is synthesized)
tttgggattatttggaagagttaatatggtgattcgttttccctgaccacttgggggaactgacccacaaaactgcctgccttagaacggtagagggtggattgagctttaaatacattt

SEQ ID NO: 809482 - DNA, 120 bp, Artificial Sequence
  ENSG00000230891_0 (sequence is synthesized)
ctctatttgacttcaactacaagagagatgccaagctgagaccagttaagccacagaactcttttaccttcgttaactcaaacctgcacccatctgaagtgaaaccagcaaccatttaac

SEQ ID NO: 809483 - DNA, 120 bp, Artificial Sequence
  ENSG00000230891_1 (sequence is synthesized)
agcaaacagtagcagcagcatgcaccaaaagagaatggaaagtgaaaagaacacaacagatcattttaaaagtagtgtgtcaattgcctggttctccactgacagctaaaattaaacaaa

SEQ ID NO: 809484 - DNA, 120 bp, Artificial Sequence
  ENSG00000230891_2 (sequence is synthesized)
tagcaaaatagatattttgactcacagaaaatgaatgtttgcaaagattcaccaagaaataaagtcaaccaaaaaagcaaagtcatggaaaagaatttttcatccagtgactaccaaatg

SEQ ID NO: 809485 - DNA, 120 bp, Artificial Sequence
  ENSG00000230891_3 (sequence is synthesized)
gaggaattatcgtcttgaaggggaacgtatcaatcacttaaggaaactagatgggagactgaaggtggcaaaaggagaggcatagcaaatggaagaaggtgtcctagagtcactcttaaa

SEQ ID NO: 809486 - DNA, 120 bp, Artificial Sequence
  ENSG00000230891_4 (sequence is synthesized)
atgccacattccaactcaactgaacctttagacgaatgtagccctagcctctatttgacttcaactacaagagagatgccaagctgagaccagttaagccacagaactctttcagaaaag

SEQ ID NO: 809487 - DNA, 120 bp, Artificial Sequence
  ENSG00000230891_5 (sequence is synthesized)
tccacaaaaggcagcttttcagggctattcctgtctacacgccctctgaataaccatctcaaaatatgttcaagaagtatattttggaggtggcattgcagatgggatctcaaagccaag

SEQ ID NO: 809488 - DNA, 120 bp, Artificial Sequence
  ENSG00000230891_6 (sequence is synthesized)
tttgagaagtttgagatattaggttggtgcaagagtaattgcaggttttaccattacttttaagagcacaaggaccaaacatatgaatatttacactaaaaaataaactagagttgcttc

SEQ ID NO: 809489 - DNA, 120 bp, Artificial Sequence
  ENSG00000230894_0 (sequence is synthesized)
cagccattaacctgtccatcttcagaacctgaatcggtagccaaatctcagcagacagagctacgtaatgccagataaatcttcttgctgaatgagagacccatcctaccagcataaaca

SEQ ID NO: 809490 - DNA, 120 bp, Artificial Sequence
  ENSG00000230894_1 (sequence is synthesized)
acatttgaacactctagcccccagccttaccagccagctctccattctctacacacagagtctttgttgggacactccaggccagttatttcaccatcctgagtctggtccctctctgag

SEQ ID NO: 809491 - DNA, 120 bp, Artificial Sequence
  ENSG00000230894_2 (sequence is synthesized)
gcccagggacatatattcagttcaggtttgaattaaggaaagatactactaccttgatgggggatcaggaccacaggaccaaattgaaccaggcaagactgaaggggccaagggatagag

SEQ ID NO: 809492 - DNA, 120 bp, Artificial Sequence
  ENSG00000230894_3 (sequence is synthesized)
gatccccctcccgaaggagccaactggaaggcaacaattggatggcctgttaaagaagaaagaagcttaggacagggagaatgccactttccagtattacaaaaatatcctttaggcaag

SEQ ID NO: 809493 - DNA, 120 bp, Artificial Sequence
  ENSG00000230894_4 (sequence is synthesized)
gaagtaaattccgcacttagaggaagaggggtgggcaagaagtgtccacattcacaggtatttgttctcaagaagtgaggcacctgtgattctcaaaatagtagagtcgaaaggaaaaaa

SEQ ID NO: 809494 - DNA, 120 bp, Artificial Sequence
  ENSG00000230894_5 (sequence is synthesized)
aaaagggaggtggaaggggagaaaaagaaacaaaaaactaccttttgggcaaaaggaatggaatggccaaggctacattatatacaagccaaaagaacaatttccattgaccttgaggaa

SEQ ID NO: 809495 - DNA, 120 bp, Artificial Sequence
  ENSG00000230894_6 (sequence is synthesized)
tgtgtaagggcaaagtcataagccgagtttaattgataatttcactgtccatatgtgaagaaagagcaatgaaccacaagacttgggctcaaggcccagctctgcctctaacatgctgca

SEQ ID NO: 809496 - DNA, 120 bp, Artificial Sequence
  ENSG00000230894_7 (sequence is synthesized)
ggacctaggatcagtcctttcctgtctccaggactcaattttcttgctatacaatgaagggattgtacggagtgatctacatggactagcagctctaaggtttgtaagactgtattataa

SEQ ID NO: 809497 - DNA, 120 bp, Artificial Sequence
  ENSG00000230894_8 (sequence is synthesized)
actttgaagagaatgagggaagggtccaaggattctcctttgcagctttcctagaaaaccatgtatcttccccatgaaaggaagaatacaaataatgatggtcaaatttactgaatgcct

SEQ ID NO: 809498 - DNA, 120 bp, Artificial Sequence
  ENSG00000230894_9 (sequence is synthesized)
attatgtgccacatactaatgtccatagttaagagtcaaactaagacccaaagccaaaagaaagtattgtacccaaggccacataactagtaagtgatgtaactgagacttcagatatca

SEQ ID NO: 809499 - DNA, 120 bp, Artificial Sequence
  ENSG00000230894_10 (sequence is synthesized)
aactaactccaagcctgtgctgaacaccgttctcttcatctacccagccactttttgttgttattgtacctttgtttgtttattcttccattcactcatgctaccaatgttccctaagta

SEQ ID NO: 809500 - DNA, 120 bp, Artificial Sequence
  ENSG00000230894_11 (sequence is synthesized)
ctttctctgtgcacgaaactgtgtaaacaccagtaagcatgagaaaagatctatcaggaagttcacagttgagcaaaagaaacaagaaaccgtgatcaggaggtttagaaaagttatctt

SEQ ID NO: 809501 - DNA, 120 bp, Artificial Sequence
  ENSG00000230894_12 (sequence is synthesized)
tctttccaaagcaccattctgattatgtttacgatcctcaaaaggcttcaaaggttccccttttcctacaggataaagtccaagtagcttagcctgttttcttatccctctgagatctgg

SEQ ID NO: 809502 - DNA, 120 bp, Artificial Sequence
  ENSG00000230894_13 (sequence is synthesized)
tccctgtcttgtctcctctcgacatcattcattcaacatttgttaagtgctgactatgtgccagacactgtaccagagtcttggaatgcaatgctgagtggcacagacttaggccctgct

SEQ ID NO: 809503 - DNA, 120 bp, Artificial Sequence
  ENSG00000230894_14 (sequence is synthesized)
ctcctggagcttgcagatattaatcaaattatcacactgatacagaattaggcaatcctttaaacttccagtggtccagccccacttgattcaggatccttccttccagcagaggttccc

SEQ ID NO: 809504 - DNA, 120 bp, Artificial Sequence
  ENSG00000230894_15 (sequence is synthesized)
agcccaggaagtacatagtcatgcagttctccttggactctttagataaccagttgatctttaataaagtgatttgtctaattaatcaaccaggaacatctgcttctgaagagagaactt

SEQ ID NO: 809505 - DNA, 120 bp, Artificial Sequence
  ENSG00000230894_16 (sequence is synthesized)
ttcttggatcccatgaataaatgtttattttattttaacatagtttttcaacaacaggttaaaattgctggctacacactactatggaatgccatgatctccctccagaggagtctctgc

SEQ ID NO: 809506 - DNA, 120 bp, Artificial Sequence
  ENSG00000230894_17 (sequence is synthesized)
ttaaagttaattgcttattacttatgttcccaatttaatcctaaatttcaagaaggcagagtttttgcctattcttgctcatcatcgaatacccagcactttgcccagtgctaggcacgc

SEQ ID NO: 809507 - DNA, 120 bp, Artificial Sequence
  ENSG00000230894_18 (sequence is synthesized)
tgttctgtacatgtgctggttaggcatccttaactacataaagccttaattcaaaatgagactgtggcagacatagatccttaccttaaaaaaaaaaaaaagttttcagaaggtgaaaca

SEQ ID NO: 809508 - DNA, 120 bp, Artificial Sequence
  ENSG00000230894_19 (sequence is synthesized)
gagcctgagaggaaaagcaactttccaaaagccacagagaaagttgatagcttaattgaagttggaaccaaagagaaccagaagtcctgaactcctgctataccacacccactcacacac

SEQ ID NO: 809509 - DNA, 120 bp, Artificial Sequence
  ENSG00000230894_20 (sequence is synthesized)
ccaagcttctgttgtacatgaatttacatcagagagtcactgagccgactcttttagatgtagaagagaccatcttcatgggagaaactcttgcctgcccccaaacaagacctctgactg

SEQ ID NO: 809510 - DNA, 120 bp, Artificial Sequence
  ENSG00000230894_21 (sequence is synthesized)
aggaatatattcaatcactccctctaacccaaactccccaaaacactatttcctattatgtctccataaccaaattcaacccacccaaatctcaagattagatctgtgagctcacaaagg

SEQ ID NO: 809511 - DNA, 120 bp, Artificial Sequence
  ENSG00000230894_22 (sequence is synthesized)
cctaatcacccaattaagaggaggaaaacctgatcctttctaaacaaagtgaaatgtgaggtaacccagttgctgagattaagtctcactcaggaagaagcaaaggagctaggagagaat

SEQ ID NO: 809512 - DNA, 120 bp, Artificial Sequence
  ENSG00000230894_23 (sequence is synthesized)
gggtgggtcattcattaaacggaattttccaggaaatttgagtgatgtgtctccccagatctcagtgttccaggccccagaacaatgctggaggcaaggccctggctttaggaggaccat

SEQ ID NO: 809513 - DNA, 120 bp, Artificial Sequence
  ENSG00000230894_24 (sequence is synthesized)
gggggtgaagacagcattactctccttgcccgaaatccctaggtactatctggggcattctgatctctcactggacaaatggcctgctatcaatgatgaactttatactcaggcccaaaa

SEQ ID NO: 809514 - DNA, 120 bp, Artificial Sequence
  ENSG00000230894_25 (sequence is synthesized)
aattccaagagaaaagtgcttagaaagataaactatagcccactaccatcatttcaatagactcagaaaattcaacatccatttcaaatggaaacaaaacaaagcttttgcagcaaacta

SEQ ID NO: 809515 - DNA, 120 bp, Artificial Sequence
  ENSG00000230894_26 (sequence is synthesized)
gaaatagaagatacctccttccatgtaataaagggcatataccataaaaaaatacaactagcattatacttaatggtgaaagactaaacgtctaaaattagaaaaaaggcaaagatgtct

SEQ ID NO: 809516 - DNA, 120 bp, Artificial Sequence
  ENSG00000230894_27 (sequence is synthesized)
gttcttaccacttctgttcatatagtactaaaagtcctagctacagcaattagacaagtaataaataaataaaagtcatccaaattggaaaggaagaagtataattgtctctgtttgcag

SEQ ID NO: 809517 - DNA, 120 bp, Artificial Sequence
  ENSG00000230894_28 (sequence is synthesized)
atgacatgatcatacatatagaacactttaggaagaactgagttttccaacactggaggcatgttaccagtgcatgttcaagggcatacaaaaatgttaaagagaaagcaagactagatg

SEQ ID NO: 809518 - DNA, 120 bp, Artificial Sequence
  ENSG00000230894_29 (sequence is synthesized)
atctcttaagatccttccaactctgatacagaagaggtactccaagacaaagaatggagtatgccaaataaacggtagagagaatgagtgagtgcactatgttgagaaggaaaagacttt

SEQ ID NO: 809519 - DNA, 120 bp, Artificial Sequence
  ENSG00000230894_30 (sequence is synthesized)
gtgctgaaagggtcaagaagcctttgtggaagaagcaacacttgagtagttttgatctagactatggtctataagaacaagcactgtgctgggcataagactgacctggttttatatata

SEQ ID NO: 809520 - DNA, 120 bp, Artificial Sequence
  ENSG00000230894_31 (sequence is synthesized)
tataaaaattatctggttcaggaattgaaagacagtttggcataccgttaagggcaaggactcagatagacctggattcaaatcccaattctgccttagacaagtgatttctcctgacag

SEQ ID NO: 809521 - DNA, 120 bp, Artificial Sequence
  ENSG00000230894_32 (sequence is synthesized)
agcatcaattttctcctcttcaatatgagaataacaacttctagcttatagaattgctggaagaatttgtgaaaatgtatttgatgttcccagtagagtgcctgtcatacagatgtgtgc

SEQ ID NO: 809522 - DNA, 120 bp, Artificial Sequence
  ENSG00000230894_33 (sequence is synthesized)
agtatgtaattggtagtgattactctgagaaggtgtttggactttggttaattacttactgatttctggaatgagacctttatgactgatacaaaaatggacacataaaccaatggaaca

SEQ ID NO: 809523 - DNA, 120 bp, Artificial Sequence
  ENSG00000230894_34 (sequence is synthesized)
gaatagagaactcagaaataaaaccatacacccaagccatctggtcttctacaaagttgacaaaagtaagaaatgaagaaaggactccttattcagtaaatggtgctgggatagctggct

SEQ ID NO: 809524 - DNA, 78 bp, Artificial Sequence
  ENSG00000230894_35 (sequence is synthesized)
ttaagtcctccaactataagaatcctagaagaaaacctataaaacaccattctcaatgtcagccttgggaaagaattt

SEQ ID NO: 809525 - DNA, 120 bp, Artificial Sequence
  ENSG00000230894_36 (sequence is synthesized)
ataaaacaccattctcaatgtcagccttgggaaagaatttatgattaagtcttcaaatgcagctgcaacaaaaacaaaaattgacagtgggatctaattaaagagctttcgcacagcaaa

SEQ ID NO: 809526 - DNA, 120 bp, Artificial Sequence
  ENSG00000230894_37 (sequence is synthesized)
agaaattatcaataaacagacaacctacagaatgaaagaaaatattcaaactatgcatccaacagaagtctaatattcagactctgtaagaaacttaataagcaaaaaacaaataactcc

SEQ ID NO: 809527 - DNA, 120 bp, Artificial Sequence
  ENSG00000230894_38 (sequence is synthesized)
aataaaaaaatgggcaaaagacattaacagacacttctgaaaagaagacactcaagcagccaataaacatgaaaaactgctccacattactagtcatcagagaaacagaaatcaaaacca

SEQ ID NO: 809528 - DNA, 120 bp, Artificial Sequence
  ENSG00000230894_39 (sequence is synthesized)
aatggctattatcaaaaagtcaaaaaacaacagatgctgatgaggctgtacagaaaggggaacacttattcactgttggtgagaatgtaaattggttaagccactgtggaaagtagtttg

SEQ ID NO: 809529 - DNA, 80 bp, Artificial Sequence
  ENSG00000230894_40 (sequence is synthesized)
gaaaggggaacacttattcactgttggtgagaatgtaaattggttaaagaattatcattcaacccagcaatcccattact

SEQ ID NO: 809530 - DNA, 120 bp, Artificial Sequence
  ENSG00000230894_41 (sequence is synthesized)
aggcagaagacagcaagaccagtaagaggtggtttaaataagagacataaagtagtggtgtgggaactatttcacgaagaagatgaaggaaggacggttggcaggcagaaggcaggacag

SEQ ID NO: 809531 - DNA, 120 bp, Artificial Sequence
  ENSG00000230894_42 (sequence is synthesized)
atcatactactagttattgaataactgctagttattgaaactgtactgcctgccaggctgtatgctaggcactttctcattttacacccctctcccaaaatgtcaaggagatgttaagta

SEQ ID NO: 809532 - DNA, 120 bp, Artificial Sequence
  ENSG00000230894_43 (sequence is synthesized)
atccctgacacctggctcatatggtaggctgcgtgatgatggagccgagagctgaaccgcccaaggacagagggcctcagcaggaactttgggaatcagcatattgatacctaagtggag

SEQ ID NO: 809533 - DNA, 120 bp, Artificial Sequence
  ENSG00000230894_44 (sequence is synthesized)
acctctttccagacccagaaactggagcatgcaaggccttggggaaatgaccagcaagttcatagcccaaggtttctctgactggttggagagtctaatgtattccgtcatgccgtctaa

SEQ ID NO: 809534 - DNA, 120 bp, Artificial Sequence
  ENSG00000284070_0 (sequence is synthesized)
cagagaagccagagaagtccaggcctgtggaagccaaacaggagagcgtgggccggaagggcggtcaggatcgggggacgaggtcgctctccctggagaacgaaccctaaggtgcgtagc

SEQ ID NO: 809535 - DNA, 120 bp, Artificial Sequence
  ENSG00000284070_1 (sequence is synthesized)
ctgggattccctccctgggggtcctgtcccccgacatttcacaggccttctgagctgccttccaaggaggactaacacggcaacaaaagacccatttctgcacaaaaatccttctggaaa

SEQ ID NO: 809536 - DNA, 120 bp, Artificial Sequence
  ENSG00000284070_2 (sequence is synthesized)
gaaaaagaagaaagccaagaatggagtcaaaacgctacccagtgctgaccaagcctctcaaaccctgttagaagtggagtgtggtttctaagtcagggaaatggaagaggccccacccac

SEQ ID NO: 809537 - DNA, 120 bp, Artificial Sequence
  ENSG00000284070_3 (sequence is synthesized)
acagggacagggccacggcccccacaggatgaagcagcagcgtttattcaagatacaacagtgagggaatccagtcacgttcccttctccccagagagggcgcttcttgacaagtgattc

SEQ ID NO: 809538 - DNA, 120 bp, Artificial Sequence
  ENSG00000284070_4 (sequence is synthesized)
agtagaaatcttttggactctataagttaagttcataaaaaccactgctttcaccctgtctcccagggccaggcctggactccgagatgaactggcttggggcgccctcgggtggccaca

SEQ ID NO: 809539 - DNA, 120 bp, Artificial Sequence
  ENSG00000284070_5 (sequence is synthesized)
taaaaaacccacagtctgaggccagcctggggctttcagacctgggcgggatctgcccaggccacctgtccttctgctttgggccgctgtctcttggcagatggcctgacacctgggggt

SEQ ID NO: 809540 - DNA, 120 bp, Artificial Sequence
  ENSG00000284070_6 (sequence is synthesized)
ggcccaaggatgcctcagaaaatcttgattcccactctacagatggcccgattagccagaggtttccaggccatctgtccgcctccaggagatggactgggacctttagacatcggtgga

SEQ ID NO: 809541 - DNA, 120 bp, Artificial Sequence
  ENSG00000284070_7 (sequence is synthesized)
gaacaggatgctctgtctcttgctgttcagggcagggatggcctccagccgcaagaagtacagcagcacctcgtcctgccctcgcagagtggggaagaggagagtggctcagaggggggc

SEQ ID NO: 809542 - DNA, 120 bp, Artificial Sequence
  ENSG00000284070_8 (sequence is synthesized)
tcacagctgctggtggggaggtctttggggcccaagcccccaagtccacctcaggtgctagaaacccctgctggtgtcatgaaccccttacagtgagacgggggtggggtggggtcctga

SEQ ID NO: 809543 - DNA, 120 bp, Artificial Sequence
  ENSG00000284070_9 (sequence is synthesized)
caaggcatgacttgttgggtggggggtgattatttattttagagatgcacagggccttgctctgtcccccaggctggagtacagtggctccatcatggatcactgcagcctctaactcct

SEQ ID NO: 809544 - DNA, 120 bp, Artificial Sequence
  ENSG00000284070_10 (sequence is synthesized)
gggctcaagcaatcctcctgtgtcagcctcccagatacctaggattacagatgtgtgccacaatgcctgactaatttttctttgtattttttctagagatggggtttgctacattgccca

SEQ ID NO: 809545 - DNA, 76 bp, Artificial Sequence
  ENSG00000284070_11 (sequence is synthesized)
acacttggggtggttttaagcccccagcaaggtgcaccagcaggaccaggaggtggcctgggcaccccctatcact

SEQ ID NO: 809546 - DNA, 120 bp, Artificial Sequence
  ENSG00000284070_12 (sequence is synthesized)
ccagcaggaccaggaggtggcctgggcaccccctatcactcccatccatgcaaacctagaggaccgaagcagagggtgctgtttcaacgccaccaccaggagagaggcagaggggctgtg

SEQ ID NO: 809547 - DNA, 120 bp, Artificial Sequence
  ENSG00000284070_13 (sequence is synthesized)
ccgtgctagagtcctcagggagggagtgacctcgaccctggctgtgctgcaagctgactccagccttggggtcagcagcacccggcgaacagcagcaggaggagccgctagagcagctgc

SEQ ID NO: 809548 - DNA, 120 bp, Artificial Sequence
  ENSG00000284070_14 (sequence is synthesized)
tcatgggcagagctgccctcgggcaactcctgccaccaccccctccccagggagcccaaggcaggggaggctcagcatggaatgaaacaggggagtgagggacacaaggaggtgggaagt

SEQ ID NO: 809549 - DNA, 120 bp, Artificial Sequence
  ENSG00000284070_15 (sequence is synthesized)
gggagggtcccagccccaccaagtacacagagaccccctcgtcgtcctggacaccacaggggcacctgcaggctgggagaccaggtcctctgtgcatgggcccgggaggcagacctgccc

SEQ ID NO: 809550 - DNA, 120 bp, Artificial Sequence
  ENSG00000284070_16 (sequence is synthesized)
taagggtgatgcagaggccacaggtgctgcacgcaccagcacccgctctagacatcagcctccaggttgactaagggtcaggtcatgtttgaaaccatgcttggctggaccaggacccat

SEQ ID NO: 809551 - DNA, 120 bp, Artificial Sequence
  ENSG00000284070_17 (sequence is synthesized)
ggcaagagcacccaggcaccctccttcagccctggtctgcaggaaggaggacagcagactttaggaccccatagcacagcagtgctgactatttcagcctcttggtctccttgaggagta

SEQ ID NO: 809552 - DNA, 120 bp, Artificial Sequence
  ENSG00000284070_18 (sequence is synthesized)
gggatggggagccctctggggatgggcaaggccttccaggacaggctcggttctggtcccctgctttttgaggttgggttaaaatgccgaccacggcagaggggttacagctcaggttcc

SEQ ID NO: 809553 - DNA, 120 bp, Artificial Sequence
  ENSG00000284070_19 (sequence is synthesized)
cagtgctcaccgatgccctctgcgaagttggggtagaactcgtcagtgaagaggggctcgggcagctcacggaagtacagcttcagcgtgcctgcgatggcgttcacgtccatctcgctc

SEQ ID NO: 809554 - DNA, 120 bp, Artificial Sequence
  ENSG00000284070_20 (sequence is synthesized)
atcatcaccgacacgtccttgttatctggaaagagcacggaaatgcagcggcctccttgaagatcctgataaatgaagaaaagacacagagaaggatgtgacatgcctgggccatggagc

SEQ ID NO: 809555 - DNA, 120 bp, Artificial Sequence
  ENSG00000284070_21 (sequence is synthesized)
actctgagatctcatcgcggacaccactgcccacacctccatcccgtcctgcgcaggccgacactcactgacgttgaagcctgccttcagtgcctggatgtccgtggccacaccggacac

SEQ ID NO: 809556 - DNA, 120 bp, Artificial Sequence
  ENSG00000284070_22 (sequence is synthesized)
gcggtagatgcccacctcctccatgcctcggcgctcgatctcctccacgcactggcgcatgatgtagggcaccttggacctctctctcctgcgggaggagggaatgttctcagtgtccta

SEQ ID NO: 809557 - DNA, 120 bp, Artificial Sequence
  ENSG00000284070_23 (sequence is synthesized)
acagccccgcttgggccataacacaggaggcctgctccctatctgcacacccggaggtggggtgaggacggtgacgaaggtacccaggtctggggctgcacacagagccttctgcatgcc

SEQ ID NO: 809558 - DNA, 120 bp, Artificial Sequence
  ENSG00000284070_24 (sequence is synthesized)
tgtcctccctctgcaagctctgtcctcatggcatgtgctttctcaggaacctttcaagcggccagaacccctgcgaatcacacatgacctttgcgggaaggtcaggaggcctgtctaagt

SEQ ID NO: 809559 - DNA, 120 bp, Artificial Sequence
  ENSG00000284070_25 (sequence is synthesized)
caagtcagcacaggaagggcatctgacagattccaggcctggggttagcagcctgtgcccccggctgggaggtcagacccggtgttggtcctgccacccacgtgctgtgtgagaggagaa

SEQ ID NO: 809560 - DNA, 120 bp, Artificial Sequence
  ENSG00000284070_26 (sequence is synthesized)
tccctgacccctgccctgggccttaacacacatccgacgaatgaatgaagggttgcctcagcaccggtgctccaagtcctgcgatgctaagtgcttttctcctctgagtcttagcaatgg

SEQ ID NO: 809561 - DNA, 120 bp, Artificial Sequence
  ENSG00000284070_27 (sequence is synthesized)
acaattccaatacctccacacaggacactagagtaagaatccttcacagttagaacgcagtgctgtgcggaggccctaacttgagttctgttttgcacctggatttaccagcacatcaaa

SEQ ID NO: 809562 - DNA, 120 bp, Artificial Sequence
  ENSG00000284070_28 (sequence is synthesized)
gctgcttcgcaagccccctcattagcagggcttatctgggggagctgctcatggagtcctcgctgctcatgcccacagccctcccagagtgctatgcgagtggctgccgtgcagttgggg

SEQ ID NO: 809563 - DNA, 120 bp, Artificial Sequence
  ENSG00000284070_29 (sequence is synthesized)
gtggggcgtggtgtttagacacagataggagtccagggtatgactgatggaggccccggcccacgtgaccagcaaggtcagaggcccagccagattccatcctggggaagcaaatgaatt

SEQ ID NO: 809564 - DNA, 120 bp, Artificial Sequence
  ENSG00000284070_30 (sequence is synthesized)
ctcagaggaagtggtctatgtctgcatgaactgctctcaaaccaaacaggcttctcttggcaactgactcgtgacaaaggggcaggggttatggccattcaacaggaatctgggaccgtg

SEQ ID NO: 809565 - DNA, 120 bp, Artificial Sequence
  ENSG00000284070_31 (sequence is synthesized)
actaattccaagcaagggcagaaaaccctgcacttgggcagttcctggagccagcctactgcttccaagcaaggtggcaaggacattcctgagctggtttgcaggaaacacaggaggtag

SEQ ID NO: 809566 - DNA, 120 bp, Artificial Sequence
  ENSG00000284070_32 (sequence is synthesized)
ctgaagacgccgtgttccctggggcctgacctcaccgtgcagtggccatgcacagagaggagagacccacacatgctcttttctgcagaaacagctgaagggacaggcaccctcagtgcg

SEQ ID NO: 809567 - DNA, 120 bp, Artificial Sequence
  ENSG00000284070_33 (sequence is synthesized)
tgagcccaagcccctccccactcacttggtgaccacagcaatcttgactccgaagacccctgtctgttttcgggacggcatcctcttcaagctgaactccctgctgttgaacttgaccga

SEQ ID NO: 809568 - DNA, 120 bp, Artificial Sequence
  ENSG00000284070_34 (sequence is synthesized)
gagctttacttcgatctacagtggggagaaggggcacagtcctctaatccttctggtcctcacagcccaaggtcccaaggacccctgggagtctcatcaaatatttccacccccaaggca

SEQ ID NO: 809569 - DNA, 120 bp, Artificial Sequence
  ENSG00000284070_35 (sequence is synthesized)
tgcagaggtctcagcatgaggtggagccgcccctcggggaagcccctagtctacttcagcaagagccaggattgttgaagatgatataaacgactggtttctgcagaagcacctcctaaa

SEQ ID NO: 809570 - DNA, 120 bp, Artificial Sequence
  ENSG00000284070_36 (sequence is synthesized)
atccccgctgcttctcttgcttgcttgctttttttttagatatgggatcttgcaatgttgcccaggctgtaatcaaactcttgggctccagtgattctcctggctcagcctccagagtag

SEQ ID NO: 809571 - DNA, 120 bp, Artificial Sequence
  ENSG00000284070_37 (sequence is synthesized)
ctgagattatagtgtactgtgaccagctttctcttagtaacaattaaaaattaagaaggaaagacagaataatgtaagaaaaagccaagaatctcaaatattaacattttaccatttata

SEQ ID NO: 809572 - DNA, 120 bp, Artificial Sequence
  ENSG00000230896_0 (sequence is synthesized)
gataatttatagactaagctataactcatgtgcctttactatttctagttacagagaatctgtattctgattcaaaacagatttacaaaatacttctacaactaatttctcattgtctag

SEQ ID NO: 809573 - DNA, 120 bp, Artificial Sequence
  ENSG00000230896_1 (sequence is synthesized)
tagcaactgaaaatgacactttgaaggggtgtgctttgcacagctgtggcagaaatgtaatgtcaaggcagtcagtgttttaacaggtcccgaagatccctgaaaataggtgactgtaaa

SEQ ID NO: 809574 - DNA, 120 bp, Artificial Sequence
  ENSG00000230896_2 (sequence is synthesized)
acagaatgaaactccatctcaaaaaaaaagatgtagaactagataggcctgctcattagaatatcaagatggctccagcttgacttttctttcctaatttatatgtactagtggctttat

SEQ ID NO: 809575 - DNA, 120 bp, Artificial Sequence
  ENSG00000230896_3 (sequence is synthesized)
tttaaatagtttcctttgaaaataatcattttgaccagctattatgtgtttggtggtaagggacaagttgttatctgtaccatgccaaatatcctaataaaaactggaaaacatgtccaa

SEQ ID NO: 809576 - DNA, 120 bp, Artificial Sequence
  ENSG00000248343_0 (sequence is synthesized)
ggtattcctctgaggagagccagaagtctttgccaataataataataataataataaaaagagagtctctgaggagaaacttctgtctcagtttatgcacaggctgccttacaactcctg

SEQ ID NO: 809577 - DNA, 120 bp, Artificial Sequence
  ENSG00000248343_1 (sequence is synthesized)
tggaattagctgttagcgcctcaatcagaaattcctttaaaatgctagagaagccagatacagctacaacagtaacagggaggtgagaaaacacggcttctcagtgtggtgaccaagttc

SEQ ID NO: 809578 - DNA, 120 bp, Artificial Sequence
  ENSG00000248343_2 (sequence is synthesized)
ttctgtggcaacagacaggctgccggttcacacttgtagtaacccagctctggttcggctcggcatcccctctccagaagcagttgcaacctcacagaccattcagagggaggcggggcc

SEQ ID NO: 809579 - DNA, 120 bp, Artificial Sequence
  ENSG00000248343_3 (sequence is synthesized)
cctgaacatgccggatcttgtctgaaacttctctaaatgcaagacaatacaaactagcaatgccttcttcaaaagccaaacacacttaaagttttatgaaaataattttcattttgctaa

SEQ ID NO: 809580 - DNA, 120 bp, Artificial Sequence
  ENSG00000248343_4 (sequence is synthesized)
tgtttcatcaatgcttccttcttgcgtggatagcttcatgattccagaaactcaagaacattaactgaacaatcaactaaaacagtgcaagtaatgactccacaagacagcgcaagtaat

SEQ ID NO: 809581 - DNA, 120 bp, Artificial Sequence
  ENSG00000248343_5 (sequence is synthesized)
gactctatagccaatggataaataagaaaatgaggtgattattttaattagcaaatctatttgcaaaggacccttcacggatcctcaagtttctgttttgccatgtttagtgcatttcaa

SEQ ID NO: 809582 - DNA, 120 bp, Artificial Sequence
  ENSG00000248343_6 (sequence is synthesized)
ttgcaaatgtcaacaattgcattttttggattctaatctccagcagcataataaataatgtgcactgcatttgtcattttaagatgacagcactcagcggtaagaacctaacaaacaaaa

SEQ ID NO: 809583 - DNA, 120 bp, Artificial Sequence
  ENSG00000276916_0 (sequence is synthesized)
cagctcctagtttagtggcccgcacacgggacacccacacctgtgaagaaatctgtggctggaaaagagctgacggactcagcagtcacagcgtgaactgcccttatggacagagaagct

SEQ ID NO: 809584 - DNA, 120 bp, Artificial Sequence
  ENSG00000276916_1 (sequence is synthesized)
atacactcggagtcacggaggccgggactggagaggcagagggccggagtgtagatggagaggagcaaaggattaatattcagaatgtatcaagaacgtctgtaaatccaaaccaaaaag

SEQ ID NO: 809585 - DNA, 120 bp, Artificial Sequence
  ENSG00000276916_2 (sequence is synthesized)
taacctaatgggaaaataggcagaatatctgagcaaataacttacgggagaagaaacctaaatgatgaacaaaaaggaagacatgagcctcgctagtattcggggtgcaggctgatggga

SEQ ID NO: 809586 - DNA, 120 bp, Artificial Sequence
  ENSG00000248346_0 (sequence is synthesized)
tttagaagcactgttgatttcaccacagataaatattttgtttgctattcttgaatatgtatactcaaggggagttattgaccagtttgaatgacaacgaagcctttacaaagaaaagat

SEQ ID NO: 809587 - DNA, 120 bp, Artificial Sequence
  ENSG00000248346_1 (sequence is synthesized)
ttagctagtgggcagaactgacctggacctggcctgtaacagttacttcaagaagcaggaaaaaaacctaaatgtttctactgtttactacccaggactgaacagaagtagctgtgcaac

SEQ ID NO: 809588 - DNA, 120 bp, Artificial Sequence
  ENSG00000248346_2 (sequence is synthesized)
tgaggcaggaggcttccagaggcaacagccaagactaagccatcaaccacagggccaaacccagtaaaaaagaaaaataagaacacttccacttaaagaactgctgcaattatactgttc

SEQ ID NO: 809589 - DNA, 120 bp, Artificial Sequence
  ENSG00000248346_3 (sequence is synthesized)
cttttttttttccattaacatgtctttccttttatgatggcgagagttaatattaaggtgtgcatatatgtttgttaaacgatctcattttgcaattaaaagtttgcacttatattaata

SEQ ID NO: 809590 - DNA, 120 bp, Artificial Sequence
  ENSG00000248346_4 (sequence is synthesized)
aggatgacgtggcctttgccattgctgagaacccattttgcacgcaatgttttcccggataataaatgacacagctgggatttattcaggtgttctgactccaaagtccttgctcctgat

SEQ ID NO: 809591 - DNA, 120 bp, Artificial Sequence
  ENSG00000248346_5 (sequence is synthesized)
tgaagtgatatttgagctggaacctgagtgaatgatggaatggagaagtcaggtacagagctgtggggatagcatcacaggactgaacagaagtagctgtgcaaccaccactagaagcct

SEQ ID NO: 809592 - DNA, 120 bp, Artificial Sequence
  ENSG00000273399_0 (sequence is synthesized)
cttgccgtaaacctagaacattttgtgccatcagtttatgcatttgctgcaattccaggacaatggggaaaatcctgttttatactaacaacaacaaccatgaaactatactactagtag

SEQ ID NO: 809593 - DNA, 120 bp, Artificial Sequence
  ENSG00000273399_1 (sequence is synthesized)
ctgacatttactgacttcttattaaatgccatgcatggtactgagagccttacaggcattacctcctcaaatcctcaggactatgaaatcatcccttattatctctattttccaggtaag

SEQ ID NO: 809594 - DNA, 120 bp, Artificial Sequence
  ENSG00000273399_2 (sequence is synthesized)
ccccccagattatgtattttgggcattgatactactgagtttccatctttaggtgcatcttcgctggtatcaattggaggaactggagaagatgcactggcgctgtgagacagaagtcat

SEQ ID NO: 809595 - DNA, 120 bp, Artificial Sequence
  ENSG00000273399_3 (sequence is synthesized)
tctcagccaggagtgtcattttctccttggagtctctaacttcaggattctgtgatttggccataaataataaatatggtttagtagaggttaataaaatgtttgttgaattactgccaa

SEQ ID NO: 809596 - DNA, 120 bp, Artificial Sequence
  ENSG00000273391_0 (sequence is synthesized)
taagtagagaccatgcccatcgtcgaccggactgcggtcagcctccttggcgtctgaggtgggcgtgctcggggcgaacgcccgccccgagtggcgtggacgcgtcctggttctcgtgcg

SEQ ID NO: 809597 - DNA, 120 bp, Artificial Sequence
  ENSG00000273391_1 (sequence is synthesized)
cctttcccggccgggagcaggcctgtctcgccgccgccggggccgcgttccttccgctgcgtggggctttaaggctcctcggctgggaagtgtcaacttcaggagaaagcgcccgaaagc

SEQ ID NO: 809598 - DNA, 120 bp, Artificial Sequence
  ENSG00000273391_2 (sequence is synthesized)
tcgcgggcggcttagtctgaatgtgaaaccataaaaactcagcgtattctcagctactggggaggcgatctcggggagcagggagccagcggcgctggccgcagggaagcctggattctg

SEQ ID NO: 809599 - DNA, 120 bp, Artificial Sequence
  ENSG00000273391_3 (sequence is synthesized)
aagcccggcccgtgactggggccttggcttcagttctacccctcgtagggctggtggaggtggtcacacgtctgctatggcgtggctgttagaacaaactggaataaaatacttagccct

SEQ ID NO: 809600 - DNA, 120 bp, Artificial Sequence
  ENSG00000273396_0 (sequence is synthesized)
acgtgaatgggccacaacatctaaaggaactggggcacctgggagttttcatttccattatttcacttggagccagtggttttcagagcggggggccagtggcaccacagagctgccttt

SEQ ID NO: 809601 - DNA, 120 bp, Artificial Sequence
  ENSG00000273396_1 (sequence is synthesized)
gaatgaccttggatgagcgactattcacccccattatattctccatctgtcagatggagactgtgatgtaaaccccatgtggctgggaggactaaccaaggtccacatctccagggccgc

SEQ ID NO: 809602 - DNA, 120 bp, Artificial Sequence
  ENSG00000273396_2 (sequence is synthesized)
gttgaaggtgtcagcctattggaacctgccctctcagataggtaagatccaaagatgtcagccgcaagcttccagtccctggatgagaacttagagtagggccaagagagctctctcagg

SEQ ID NO: 809603 - DNA, 120 bp, Artificial Sequence
  ENSG00000273396_3 (sequence is synthesized)
gataaaaatagagttgctgtgaagatgaagtaaatgaagacatgctgagaactcagaacaacgcttggcaacagtaattgtttaatacgtgctattattaacaagtaatagtctttccca

SEQ ID NO: 809604 - DNA, 120 bp, Artificial Sequence
  ENSG00000273396_4 (sequence is synthesized)
acactcagcgctccgggagccagcagggcctggagggcccacctcctcctcagccttaacccttgcctgcccaccccaacccctcgtggaatggggggatggtggttggttttgaagtca

SEQ ID NO: 809605 - DNA, 120 bp, Artificial Sequence
  ENSG00000273396_5 (sequence is synthesized)
aacagatattgtttcagctttaagctttaccatgccacatttctaaacttcggtttcctaatctgtacagtggggataatgatgcccgtccggctagtgtacaaaattggatgagggcat

SEQ ID NO: 809606 - DNA, 120 bp, Artificial Sequence
  ENSG00000273396_6 (sequence is synthesized)
tgcaaaaggacgtgaatgggccacaacatctaaaggaactggggcacctgggagttttcatttccattatttcacttggagccagtggttttcagagcggggggccagtggcaccacaga

SEQ ID NO: 809607 - DNA, 120 bp, Artificial Sequence
  ENSG00000273396_7 (sequence is synthesized)
gctgcctgtgagtagaaggggagatgcatctgtcctgttgtgggttaaattgtggcccccccaaccctcccctgccacaaaagatatatgagagtcctaacccctgggaacagtgacctt

SEQ ID NO: 809608 - DNA, 120 bp, Artificial Sequence
  ENSG00000273396_8 (sequence is synthesized)
atttggaaatggagtctttgccgaagtaatcaaattcagataaggtcctattggagtaggtggacgcttcatccaatatgactgctgtccttcaagaagacagaaatgtggaaacagaca

SEQ ID NO: 809609 - DNA, 120 bp, Artificial Sequence
  ENSG00000273396_9 (sequence is synthesized)
cactggagtgagcagctacaacccagggaaccccaaggaattgctggccaccaccaaagcccagagaagcagggcaagcctctacccagggtttcagagggagacggccttgccagtctc

SEQ ID NO: 809610 - DNA, 120 bp, Artificial Sequence
  ENSG00000273396_10 (sequence is synthesized)
ttggtttcagacttccagccctcagattgtgggaaaacacattactgctgttttcagccatacaatttgtggtactttgttaggaccaccttaggaaatgaatatgcatcctaacaggac

SEQ ID NO: 809611 - DNA, 120 bp, Artificial Sequence
  ENSG00000273396_11 (sequence is synthesized)
aacttcgattccaagtctcgtgtggtggggccaaagagcccttgccctggagtcacacagaccctgatgtgcagtggggatcccaccatgctgaacgacttgccccattctcccagagct

SEQ ID NO: 809612 - DNA, 120 bp, Artificial Sequence
  ENSG00000273396_12 (sequence is synthesized)
acgggaccacgatgccccccgtcacaggttggagggaaagagtgaacgaggtccgggcacggtgtctctcgcctgtaatctcaacactttggaaggccaagatgcgtggatcacttgagg

SEQ ID NO: 809613 - DNA, 120 bp, Artificial Sequence
  ENSG00000273394_0 (sequence is synthesized)
tccgaactacgtgagaccgtggagccgccagccttcattcagactccggcaacaggcggtgagggagctttccaccgcaaaatgttatccaagtacctcccccagtttcgctgaccttct

SEQ ID NO: 809614 - DNA, 120 bp, Artificial Sequence
  ENSG00000273394_1 (sequence is synthesized)
cttaaaggcccatcactgctgccggatctgttcatttagcaacctgttcgtttcatgatttctggctagcagcctttacattggaccagcaggcctcgctagtacttttgttccagtcgt

SEQ ID NO: 809615 - DNA, 120 bp, Artificial Sequence
  ENSG00000273394_2 (sequence is synthesized)
catgtacacgtttcactaccgcaggctttctagttttgtttttaagtagaaaaagaagaaaaactacaactcagaaattttcaattttattaatattcaatttacgtaacaggctcaaat

SEQ ID NO: 809616 - DNA, 120 bp, Artificial Sequence
  ENSG00000273394_3 (sequence is synthesized)
tttattaattgaattctgcatccatacgaatttagtcttaatttataaagcaacttacttcgatactcttccttgaagtatgttataaaatacaacgtttaaataaacatcacaaaaata

SEQ ID NO: 809617 - DNA, 120 bp, Artificial Sequence
  ENSG00000259380_0 (sequence is synthesized)
gttctgcatgcgatttaaaaaaattgttctggtaatactctgttcaacactacaagtaattctgcatcaagagaaagctccaaatattctaacaaccattcagcatttccaatgatctta

SEQ ID NO: 809618 - DNA, 120 bp, Artificial Sequence
  ENSG00000259380_1 (sequence is synthesized)
gatccacgcttggtgcgaaaactgaaaacgagagaaaggaaacgctgtggccaggtccatctgatactgtgaaatatttcttatcttgattttctcctggataagatcctggagcttggt

SEQ ID NO: 809619 - DNA, 120 bp, Artificial Sequence
  ENSG00000259380_2 (sequence is synthesized)
gagaagtgtaatgtgtaggggttctaaaagccagaggccttgctaaatttagatttggttcttgcttatgtaattttccctgtgttttcaattatttatacaaatatattatttatatat

SEQ ID NO: 809620 - DNA, 120 bp, Artificial Sequence
  ENSG00000259380_3 (sequence is synthesized)
gtctggaacttgtgcttttagcactcaataagcaggaataatttataggattacggagtgcttcctgtccttacctttcagagtatgttcttttgcattgttaattaattgttatatttc

SEQ ID NO: 809621 - DNA, 120 bp, Artificial Sequence
  ENSG00000259380_4 (sequence is synthesized)
agccttcctttcccagcagtcttgtggtggtgcttaactagtcagagagataggatctatatttatcatcatatgcatgttccaaaatccaggttaattattttattagccattcctcta

SEQ ID NO: 809622 - DNA, 120 bp, Artificial Sequence
  ENSG00000259380_5 (sequence is synthesized)
gcctagctacccattgcggggagggggctgcgtgtcggtggcatgacccaacaggtcatgttccttaagtacagtgagagcctgctgaaagaggaagccagcttccaggcctaaatggaa

SEQ ID NO: 809623 - DNA, 120 bp, Artificial Sequence
  ENSG00000259380_6 (sequence is synthesized)
gttgcctgtgcttcaggtttcttttttgcctccactttccaaaaacaatctagttcttgacctatccttttctccaccctccctcaacaccttttttcctctgctgccttgcactggcct

SEQ ID NO: 809624 - DNA, 120 bp, Artificial Sequence
  ENSG00000259380_7 (sequence is synthesized)
caggcacctacccaggctcctgaccatgggtctggatttgggctactgctagagacgctgcctgatttttgcccttgtctctctacagtgctcccttccagttgttccccacgtctggcc

SEQ ID NO: 809625 - DNA, 120 bp, Artificial Sequence
  ENSG00000259380_8 (sequence is synthesized)
ctccttttccttggttctcaccttgtcttggatttcagagattcaggccctgcaacacacaggactggatgacagctgctcagagtcaacctggcacataccccagagtggtgcttgcat

SEQ ID NO: 809626 - DNA, 120 bp, Artificial Sequence
  ENSG00000259380_9 (sequence is synthesized)
gtaaggaggcctaggcactctgggaatcgaaggcctgaaagtggctccactggctgagggctgggcaaggtagcagcgcaacatctacttctgcctttttctccacagtctcctcagtat

SEQ ID NO: 809627 - DNA, 120 bp, Artificial Sequence
  ENSG00000259380_10 (sequence is synthesized)
tccctggagcaaatggagagaggtgttggttgtttccccctgaggctggagtatattgctgtctaatcataggtttcagaagagtaaatatagtgagatacataaactttccctctgtga

SEQ ID NO: 809628 - DNA, 120 bp, Artificial Sequence
  ENSG00000259380_11 (sequence is synthesized)
aataataataataataataataaataaaggcatgaggcctttggctgtgatggagtcctttgagcttagcctttcttggattccttctaaccttttgacggagctatcaggtcagcagcc

SEQ ID NO: 809629 - DNA, 120 bp, Artificial Sequence
  ENSG00000259380_12 (sequence is synthesized)
cactctcagaccatttaccctgaaggtgagcaactagcttaccacagtcatagatgtttataaggatgtagaccatctatgcctttggcttgacatgaaaagacaacagaatataaacaa

SEQ ID NO: 809630 - DNA, 120 bp, Artificial Sequence
  ENSG00000259380_13 (sequence is synthesized)
aataattcataggaaaaagggccattgaagagctttcctctttccttttctcagcattgtcagcaatttgttttctttttcatgacatgctaaataggtatcaggcataatacagtatac

SEQ ID NO: 809631 - DNA, 120 bp, Artificial Sequence
  ENSG00000259380_14 (sequence is synthesized)
taggttgtcagtatgtattcaatgaaggattgttgggtgatgaaagggcatcccagtttaaaatatggaactctccagacctgggcttattcatactgggaacaccttctgaaacatcac

SEQ ID NO: 809632 - DNA, 120 bp, Artificial Sequence
  ENSG00000259380_15 (sequence is synthesized)
atatacctcaggagccctgacagcagctttcaagtcttaaggaatgcagctgcagatgctcctggttaggtgagactgattggccacagcactggctgtctggagcctgcctccctggtc

SEQ ID NO: 809633 - DNA, 120 bp, Artificial Sequence
  ENSG00000259380_16 (sequence is synthesized)
tatttgttctctagcacactttgatggatagatgccagaaggttctggtgccttgtggggccaactagacggtcagggaactccacccaatccaagctgattaggccaagtaggcagtag

SEQ ID NO: 809634 - DNA, 120 bp, Artificial Sequence
  ENSG00000259380_17 (sequence is synthesized)
ttaactgtgtgaaaggtgaaggagaggattctgggaaagatactgtaaatgccctcggcaatgagttttcataaattcatctggccacagagtgtatactagctccatatttaaaatatc

SEQ ID NO: 809635 - DNA, 120 bp, Artificial Sequence
  ENSG00000259380_18 (sequence is synthesized)
atttaaaatatcttaaattttaagagtaatttatgtttgtcatttaacaaatgaaaaaagcgtagatgaatataaggtaaaaagtccccctccggccgggcgcggtggctcatgcctgtg

SEQ ID NO: 809636 - DNA, 70 bp, Artificial Sequence
  ENSG00000259380_19 (sequence is synthesized)
cggcgtaccaggagattatatcctgcacctggatcggagggtcctatgaccatggagtctcactgattgg

SEQ ID NO: 809637 - DNA, 79 bp, Artificial Sequence
  ENSG00000259380_20 (sequence is synthesized)
gcttaaaaaacggcgtaccaggagattatatcctgcacctggatcggagggtcctatgaccatggagtctcactgattg

SEQ ID NO: 809638 - DNA, 120 bp, Artificial Sequence
  ENSG00000259380_21 (sequence is synthesized)
aggcaaaactcctatctgtgggcttctcatattgtctcatctctaaaagcacatccaatcctgacactactaagagaaatgagaaagctatctctgtactttcgacggaaccaatcttag

SEQ ID NO: 809639 - DNA, 120 bp, Artificial Sequence
  ENSG00000259380_22 (sequence is synthesized)
agtaattgtctggagattatggaacctattgcctctgaataattgagtaacagagtgaatcatatcacttgaaggtgtttggactcggactgcaaccataccattgactctcctgggttt

SEQ ID NO: 809640 - DNA, 120 bp, Artificial Sequence
  ENSG00000259380_23 (sequence is synthesized)
ccagcttgctgactacatctcttggactttacctccataatcacatgagccaattccttacagtaaatctttctttctctcagtacagatatagatatagatatatatcctgttggttct

SEQ ID NO: 809641 - DNA, 120 bp, Artificial Sequence
  ENSG00000259380_24 (sequence is synthesized)
gtttctcaggagaactcagactaatatactcccttagtcatgcaatcatcataagctatttggcatgacagcatcctgaatggattgctatttgaactaaggaaagggtcagctcttaaa

SEQ ID NO: 809642 - DNA, 120 bp, Artificial Sequence
  ENSG00000259380_25 (sequence is synthesized)
tagtaactgatggtttgccagtcataggagtgcaggcctttttgtctctctgaatatctagttgaccatttgctagagagaagtacttgcttggactcatgcttactgcatccatgtctt

SEQ ID NO: 809643 - DNA, 120 bp, Artificial Sequence
  ENSG00000259380_26 (sequence is synthesized)
ttccatgcctctctcaatttgtaaaacaaatggcctctaggtttctggtcatatatttagagacttaagagcaagatactcccttacatttaaaacacagaaaaacttggtgttgtctca

SEQ ID NO: 809644 - DNA, 120 bp, Artificial Sequence
  ENSG00000259380_27 (sequence is synthesized)
ttaggacaataaaatctttgtgcctgattatattgttcaaaatggccaaagcagtatctccactcctacatgctcttatagaaccaggctactttgcattaagagatggagtttatttcc

SEQ ID NO: 809645 - DNA, 120 bp, Artificial Sequence
  ENSG00000259380_28 (sequence is synthesized)
cctctccttgaacctgagtaggcttgtcacttctccagccagtagggtataacagaagtgatgctgtgtgacttctgaagctaggtcatagaaaggatacggcttccgcctggctatctc

SEQ ID NO: 809646 - DNA, 120 bp, Artificial Sequence
  ENSG00000259380_29 (sequence is synthesized)
ttttggaatgcagccatagtattgtgaagaagccaaggtcacatggagggcccatgtatagatgttccagtcaacagctattaagttcccagccgacagctagcattaattgtgagtgaa

SEQ ID NO: 809647 - DNA, 120 bp, Artificial Sequence
  ENSG00000259380_30 (sequence is synthesized)
taggccttcagatgattccagcttccagccttcaattctttcagtatcagacatcttggagcaaatacaaaccattctttctgtgcctgtccaaatttctgacctacagatctatgagca

SEQ ID NO: 809648 - DNA, 120 bp, Artificial Sequence
  ENSG00000198454_0 (sequence is synthesized)
acagacacactccgtcccacccaccaccagcgctctggagcctgccccgggccagggaacagcttggcctgatcctgctgacgcctcagggcaggacagggcagggaggctccaggcggc

SEQ ID NO: 809649 - DNA, 120 bp, Artificial Sequence
  ENSG00000198454_1 (sequence is synthesized)
cacccatgctgggcacacagtggactctcgcacggtgtcttctgccgtcacaccctgacccagggctggccgggagccttcggggcgacagctccgaggatggacgtaggggccagctgc

SEQ ID NO: 809650 - DNA, 120 bp, Artificial Sequence
  ENSG00000198454_2 (sequence is synthesized)
tgccccagagtcctgccccctgcagccctgtgtggagccctgggactcctgtgggtgggcctcaccctgctggggacggtccagccacagcgccagggcccccagaggggcctgaacttg

SEQ ID NO: 809651 - DNA, 120 bp, Artificial Sequence
  ENSG00000198454_3 (sequence is synthesized)
cctttccacaagatctgtctccagcctggcctcagaaaggagcggggacccaccctgcaaacgctgggccaggacccctgtcccggagaagcagccagctcagaacccccttggaggccg

SEQ ID NO: 809652 - DNA, 120 bp, Artificial Sequence
  ENSG00000198454_4 (sequence is synthesized)
aaatgacgagatggaggctacgccgagaccaagcgccaggagaagggacccaggccaagctgctcggtgaggccctgagcacggcgggaaggggccatgcaggaccccctgagggctggg

SEQ ID NO: 809653 - DNA, 120 bp, Artificial Sequence
  ENSG00000198454_5 (sequence is synthesized)
ctggggagggaggggtctccccagggctcaccccccttcttggcacagggcaggggaaggagctggatttagacctgagggagaaatttatcagatttgaccagatcctgggcatcagcc

SEQ ID NO: 809654 - DNA, 120 bp, Artificial Sequence
  ENSG00000198454_6 (sequence is synthesized)
ttgaccacattcccttcctgccccagactggccccggcaggccttgggggtgtggggtaggcaagcagagaccacactgatgcggggaggttggcccagagccctgcaggccaaagcctg

SEQ ID NO: 809655 - DNA, 120 bp, Artificial Sequence
  ENSG00000198454_7 (sequence is synthesized)
gggccgggcagcagtgtccgccgaggagagggtgtctggtgcctgaatgacacaacctgagaggcaccagccccaatcctgtccgtgcagcccagcggggaggactgcccaggagaccat

SEQ ID NO: 809656 - DNA, 120 bp, Artificial Sequence
  ENSG00000230234_0 (sequence is synthesized)
gatgttaggtctctgagatcatagtaatgcagtcagcaatgaaacctacctggttaattagagaaacacagctccatcaatgtaagagagaagtctgggctgccgagtgtctgacgggac

SEQ ID NO: 809657 - DNA, 120 bp, Artificial Sequence
  ENSG00000230234_1 (sequence is synthesized)
acaccctcacccgcttacgctacgaccagcaaaagcaaaccccgcagctgcctgccagccgggaagaaggactgtgtttccatgttgtgagtctcctcattgcagccagatgatgaattt

SEQ ID NO: 809658 - DNA, 120 bp, Artificial Sequence
  ENSG00000230234_2 (sequence is synthesized)
gctgctggctttgtgcgaaaccgagaaatacccagcgtccagctgagggcccgggtggcaacaaaatcaagctgatgaattaaagaaatatggcctggtcaggatgcctggaggcctcag

SEQ ID NO: 809659 - DNA, 120 bp, Artificial Sequence
  ENSG00000230233_0 (sequence is synthesized)
caggagagaggaaagtgacaatgaacattaaagctgaactcctgcattctctctcaatggagcatgaaataaggcatgtcatcatgtcagcgtatgctaggaaggatttgcttagacccc

SEQ ID NO: 809660 - DNA, 120 bp, Artificial Sequence
  ENSG00000230233_1 (sequence is synthesized)
ggtccttttagtatgatgcagctatgacattcagtcttcaactcactttgtgctgatggtgtccaactcaagcccacacatgatacttttccttattctcccagaagtctctacactgct

SEQ ID NO: 809661 - DNA, 120 bp, Artificial Sequence
  ENSG00000230233_2 (sequence is synthesized)
gaagtatggggttaaaatagaagattgttgacagatagcatactggatgtaaaggagcacatcttgggacaaaaagaagagctctgaagaataatatttcttgacagataaaaattatct

SEQ ID NO: 809662 - DNA, 120 bp, Artificial Sequence
  ENSG00000230233_3 (sequence is synthesized)
aaacacagtcatgcctcttcatgtctatattgtctgtggttccctctacactacaacatcaagtccagcagttgcaatggagatatctggcctgcaaagttcaaagtatttactattttg

SEQ ID NO: 809663 - DNA, 120 bp, Artificial Sequence
  ENSG00000230233_4 (sequence is synthesized)
tcatgtaagaaaaagttcactgattccttgcctacaatgctcaccaggaaagcattgtttatattgagttgggcatataaaattaacacgtttttattttgcacatagataacaattatt

SEQ ID NO: 809664 - DNA, 120 bp, Artificial Sequence
  ENSG00000230233_5 (sequence is synthesized)
gtcaaagaatcctgagggatataaaatataggacagaaatctgggccttgaattacacctcaaaactagcaatcattaacaaatgagaacagctaacaactaaaatatgagtattgattt

SEQ ID NO: 809665 - DNA, 120 bp, Artificial Sequence
  ENSG00000230233_6 (sequence is synthesized)
tatatgcaatagcgtttaaaataaaggatcagatcaatgttgaaatatacgaggaaaatttcatgcagaggaaatggttgtgcttttaaggctgggatcttttggttagatgtaggaagg

SEQ ID NO: 809666 - DNA, 120 bp, Artificial Sequence
  ENSG00000285300_0 (sequence is synthesized)
ggtccctgcctcctccaggctggcatccgcctctggctcttgggctttatgaggcactttctgtccctcagggtccccagcagaccatctgcagtgatgcaggcccggtccggaagacgt

SEQ ID NO: 809667 - DNA, 120 bp, Artificial Sequence
  ENSG00000285300_1 (sequence is synthesized)
ggcctcatccactgtcttcactaggaagaagattcatgaggcagcctccctggtccccagctcctgtggctttcaggaaggagaagcctccacacttgtcacctgtggtaacccaaccct

SEQ ID NO: 809668 - DNA, 120 bp, Artificial Sequence
  ENSG00000285300_2 (sequence is synthesized)
ggttgcccaccccagcagccactgctgaggtctagtccttactacctatgggaggtgccctggactctggcctgtcctccacaggaccaccaaaacgtgatctgatggagcctcaccccg

SEQ ID NO: 809669 - DNA, 120 bp, Artificial Sequence
  ENSG00000285300_3 (sequence is synthesized)
caggtgaacccatctggattcgtccttgcttgttagaaccagactggaacaacaaatagtgtggcttcctagcttgcttcttcacctgtaccaagtggacagcacctccctcaacgttgt

SEQ ID NO: 809670 - DNA, 120 bp, Artificial Sequence
  ENSG00000285300_4 (sequence is synthesized)
cctgaggaagaaatttggcaatggattcaaacatgcagcgctgggctcaacacacacagagtgagggctaatggatgctggaggaagacaggagttcaatgtgcactcatttcacgctga

SEQ ID NO: 809671 - DNA, 120 bp, Artificial Sequence
  ENSG00000285300_5 (sequence is synthesized)
tttcttcaggtcctggtctgtgatgcatgctggggacacagccaaaatccatccctggccctggcttttgggtctcagcacctggaagagcaggcagccatggagcagcaacaccagcta

SEQ ID NO: 809672 - DNA, 120 bp, Artificial Sequence
  ENSG00000285300_6 (sequence is synthesized)
tgatagacacagcaggaggacccttacctgcaagctgcagtggggtggggacttcagaagaggccacttgtgagctggccatgttgggggagcagactttgcgctcctggagagcaggga

SEQ ID NO: 809673 - DNA, 120 bp, Artificial Sequence
  ENSG00000285300_7 (sequence is synthesized)
ctgtgcatctgtgctcacttcccagtgccgtggcacagggcagtgacgccaggacagataatgccacacgcggctgctctttgcagagtgctccccgccaggcactgggctcagtgctct

SEQ ID NO: 809674 - DNA, 120 bp, Artificial Sequence
  ENSG00000285300_8 (sequence is synthesized)
ccctgcaggccttctctcagccacgatccgagtcctgctacacacagagctctgcaatcagcctgacgattccacgccgcccagctcaaactagctgaggcgctgcagacctcagccaac

SEQ ID NO: 809675 - DNA, 120 bp, Artificial Sequence
  ENSG00000285300_9 (sequence is synthesized)
gttgtttcctggggcccctgaagtgcctgaccctgagcaagttcaaggagcacacagggaggaggagccagggacagagtcagagtcagtaggcacagagctcttggcagcctgggatga

SEQ ID NO: 809676 - DNA, 120 bp, Artificial Sequence
  ENSG00000285300_10 (sequence is synthesized)
ggaggggagtcacagggaccctgaatgggaatagagttccagtctcgcaactgtgtcttgtcttatagcaggagctccccaaagcagactctgggtcaaagattcaactgcaagtaattt

SEQ ID NO: 809677 - DNA, 120 bp, Artificial Sequence
  ENSG00000285300_11 (sequence is synthesized)
gcttaggagatgcccccaggaagtgctacgagagaggcagaaggcaggcagggaggcaggaagcagggagagccatgaaaatgtgtggtaaggaggttacagctcaggtcctggcttggg

SEQ ID NO: 809678 - DNA, 120 bp, Artificial Sequence
  ENSG00000285300_12 (sequence is synthesized)
cccccagggagtgccctctgagagcctatgtggaagcaacctcagagctttctctctggaaggtcgatgaagctgtgttgctaacccaccaacttccaccctcataggtgagggctgcag

SEQ ID NO: 809679 - DNA, 120 bp, Artificial Sequence
  ENSG00000285300_13 (sequence is synthesized)
cttttctggcacttctggcttgccctgggcttgccctggcagagtgagagccctgagtcagggagactctgggagccaattgcatgcttgggaactgcctgcccatgacacccaggggaa

SEQ ID NO: 809680 - DNA, 120 bp, Artificial Sequence
  ENSG00000285300_14 (sequence is synthesized)
cccgatgggccggcatggacagcttctgccactggctcccaaaacagcagtgcacacataggaggaggaagcaggacgacttctggattagagcctctgggcttacaggaaccaactctg

SEQ ID NO: 809681 - DNA, 120 bp, Artificial Sequence
  ENSG00000285300_15 (sequence is synthesized)
agctgaagccactggccaggctcttgaatatgataagagaatcacagcatgcggctcagcacgtggctcaaggcggatgtcagccccgctggacaccatgctcccctcagccctgcatct

SEQ ID NO: 809682 - DNA, 120 bp, Artificial Sequence
  ENSG00000285300_16 (sequence is synthesized)
tctttcaggctgtcccttctgcccggacaacgctctcccactcccctcccctcctcacccctagtcccttcacctaattaactcctgggcattcctcggggctctgtcttaatgtcacct

SEQ ID NO: 809683 - DNA, 120 bp, Artificial Sequence
  ENSG00000285300_17 (sequence is synthesized)
cctctgagagccctccttgatgctccagattgggtcaagcatattatgaaccatcacaaggccatgcattcctcctgcagaacctgagctcaacagaaataaatcaaaacttcactcacc

SEQ ID NO: 809684 - DNA, 120 bp, Artificial Sequence
  ENSG00000248545_0 (sequence is synthesized)
gggccccacgatattcatccacagcacccactctgcgccagtgccctgctggacctgtggatactatggttaatgaaggtctcatgtcccccatcaaatgacagttgagaaagggatcgc

SEQ ID NO: 809685 - DNA, 120 bp, Artificial Sequence
  ENSG00000248545_1 (sequence is synthesized)
caagcagaaactctcagtgatgtgtctgtgtccccaggcttacagggtcccttgtaaatcagctgccccatgaagatggaacatgaaattttgtggggatgccagacctcccaccttcct

SEQ ID NO: 809686 - DNA, 120 bp, Artificial Sequence
  ENSG00000248545_2 (sequence is synthesized)
acagagggagctcttttcagggctgagcgacagggtgcactcattgactcagagacactggcaggggtcatagaggttatccgtatctataagtcagaccagtgtccaaggaagttctgc

SEQ ID NO: 809687 - DNA, 120 bp, Artificial Sequence
  ENSG00000248545_3 (sequence is synthesized)
gtagctttgagtgacaaagtaactaatctccagccctggttattgagaaactcctgaattgtttgcactgagctgccggtttcatccagaattcctggcaaaggtgttagaacggctcca

SEQ ID NO: 809688 - DNA, 120 bp, Artificial Sequence
  ENSG00000248545_4 (sequence is synthesized)
tgattggtcagtgaaatcatcaccatcttcccagaactcagaatcaccagtgatttttagtataaatacggcagagctggaaacctggaaaatagaacaaaatgaatggattggttatcc

SEQ ID NO: 809689 - DNA, 120 bp, Artificial Sequence
  ENSG00000248545_5 (sequence is synthesized)
taccgctgaagcaatcaaaacagcacaacttgggaagagaaaatttagggttcacaattgtttttagttctgtaattaagccaatcattcgaacacaaatatgttatttaaaaataaaaa

SEQ ID NO: 809690 - DNA, 120 bp, Artificial Sequence
  ENSG00000248544_0 (sequence is synthesized)
tttaatcaccattttcagaaggagaagagaggccaccttctgtcctccgctgaggatttgagtccttttgcccttggtgagaacaccaaagaggaccgccggaataccctgcactccagt

SEQ ID NO: 809691 - DNA, 120 bp, Artificial Sequence
  ENSG00000248544_1 (sequence is synthesized)
ggatcagctgacaccatccagactggtatctggctcaaggagttctgccatctcacccaggaacagaaaacagcaagagaaactcacttcgaccctccatgattccatctccaacctgat

SEQ ID NO: 809692 - DNA, 120 bp, Artificial Sequence
  ENSG00000248544_2 (sequence is synthesized)
acaggtgtgagccaccgcgcccggccccatgattagcttttaatcaccattttcagaaggaggttggtggcatgcgggggccgggctggggtggcttcctcagcatgacgtctgtgcaga

SEQ ID NO: 809693 - DNA, 120 bp, Artificial Sequence
  ENSG00000248544_3 (sequence is synthesized)
atgacgtctgtgcagatgaggctttgcatcgtgctccaaaaatacttaccatgttttgccagaagagaggccaccttctgtcctccgctgaggatttgagtccttttgcccttggtgaga

SEQ ID NO: 809694 - DNA, 120 bp, Artificial Sequence
  ENSG00000248544_4 (sequence is synthesized)
acaccaaagaggaccgccggaatgcgagttcaaaagcagatttcaatcctaaatctcttaaacagtcagcattggcttgtctcactagaataccctgtttctcttctagaattcttcccc

SEQ ID NO: 809695 - DNA, 120 bp, Artificial Sequence
  ENSG00000248544_5 (sequence is synthesized)
tgcctgcccccaaaatgtgaagcttgctgaaatcaacttgaaaggagatagcacatgccttttgtttctccgctctccccctatttctcttccttcctgctccctgcataatctgaattc

SEQ ID NO: 809696 - DNA, 120 bp, Artificial Sequence
  ENSG00000248544_6 (sequence is synthesized)
tctgaaggcaggaggaagccaaggtcagattcaggcaaggtaaatttctgatgtgtgtggacacggaagagaagatgtctaaaaggcaactagatgtgaggcctaggccctgcagagtct

SEQ ID NO: 809697 - DNA, 120 bp, Artificial Sequence
  ENSG00000248544_7 (sequence is synthesized)
gcagagtagatctgagcttggaagtcagcatgggatggaggctgaccccaggggaaaggaactgtgcaagtgcaaggtttgcataagtgggtgcttctcagggtgaccaagacccttccg

SEQ ID NO: 809698 - DNA, 120 bp, Artificial Sequence
  ENSG00000248544_8 (sequence is synthesized)
cctctgactatatgagacccaagagaaaaacagcacaaagtgctccttgagttcaagggaatacataaattctgaacatttccatgtctactagcatacaacctaaacagggataaaaag

SEQ ID NO: 809699 - DNA, 120 bp, Artificial Sequence
  ENSG00000248544_9 (sequence is synthesized)
acacctttcaagtcagaaatagggaagatgccacttctctgcatttgctgctacctctttattcctttctttaggtcaccaaatatctattgagtgcttgctctgtgatctggcagacaa

SEQ ID NO: 809700 - DNA, 120 bp, Artificial Sequence
  ENSG00000248544_10 (sequence is synthesized)
ctcaaaggcacagagatgaagatgaaacacaccatggagccagggaagggcctggatgctgtgggaaacactacaacaggtagagctctgtaaaaatgagatttcaatgaagtttaccat

SEQ ID NO: 809701 - DNA, 120 bp, Artificial Sequence
  ENSG00000248544_11 (sequence is synthesized)
ctagtggagaagagatccaaggacacccgtgactgagaaataaaacagaatcaattgggtgcaataggagaagttgctgacaaagggctttggagactgagaagagagagaaacaccacc

SEQ ID NO: 809702 - DNA, 120 bp, Artificial Sequence
  ENSG00000248544_12 (sequence is synthesized)
aagttccttgcagagaaaggcatttgataaaatgtgtgttgaataaaaggaccagcggtttgtggaggatgaggaaatgatggctgtgagatgggcctgagaggaggggcagggttttga

SEQ ID NO: 809703 - DNA, 120 bp, Artificial Sequence
  ENSG00000248544_13 (sequence is synthesized)
actgggaggaaaggtgccatcccattcaggaggaggatgaaatcagggataaaatgaggtggctgatatgaaaggagtggggcatccttggcttgggcttgtgaggagtgtgggccacag

SEQ ID NO: 809704 - DNA, 120 bp, Artificial Sequence
  ENSG00000248544_14 (sequence is synthesized)
tgctatgggcagtcaggagccaggctttcagttctaacggggcttagagaaaaggccgattcaagtctctttgctgatggcaagaggaggaaagggggctcttggtaaccgaggacctgc

SEQ ID NO: 809705 - DNA, 120 bp, Artificial Sequence
  ENSG00000248544_15 (sequence is synthesized)
ttcttaagcgctggagacttcgcattcattacctcacttaacactaagaactctgtgaggtagctcctcagtcccagcacttttcaggcgtggaaactaaggcttagagaaggagtgtac

SEQ ID NO: 809706 - DNA, 120 bp, Artificial Sequence
  ENSG00000248540_0 (sequence is synthesized)
gtccgggtgttgggaaccctgagggggcggtcttgggagcctgtgcctgggaaggatatttggaggcaggggcccagcagcgggagctgagtccggtccggcatggcgtgtccaggggac

SEQ ID NO: 809707 - DNA, 120 bp, Artificial Sequence
  ENSG00000248540_1 (sequence is synthesized)
ttttcgggactgagtgaggggcgccaggcggggaggctcaaggccctccgccggtttttacctattttctttctttcttttttgccttccgcagggaggcagaatctgggtaatggaagg

SEQ ID NO: 809708 - DNA, 120 bp, Artificial Sequence
  ENSG00000248540_2 (sequence is synthesized)
gagaatgggctcgctatctgcccagagcttccctggactgcaggaacccgtcctataagcaaccccgaaacttcggggcccgaggaccagggaagaccccctttccttgctgtcttgaca

SEQ ID NO: 809709 - DNA, 120 bp, Artificial Sequence
  ENSG00000248540_3 (sequence is synthesized)
gggttgcagaagccaaggagttcggcagggagacggggctcctggggtggttaaggacgcggtgaccacccctgggcgggagctgactcccgcgggcccggaggctctagctcactctac

SEQ ID NO: 809710 - DNA, 120 bp, Artificial Sequence
  ENSG00000248540_4 (sequence is synthesized)
agcaaatgcttttgttcccggaggctgccctgggggaaagacgccccttacccctgccttcgaccctggagagcccagtgcccgcccgggcagggctggagcccgagtcgccccaggcag

SEQ ID NO: 809711 - DNA, 120 bp, Artificial Sequence
  ENSG00000248540_5 (sequence is synthesized)
agtccgccgaggcctggggtgggagccgcgacttctggatctgcctccgagctcagctagaagactgcgcgcacctcgtccggcgccgtccggcgcgcagaagcgggtctaatgtttata

SEQ ID NO: 809712 - DNA, 120 bp, Artificial Sequence
  ENSG00000248540_6 (sequence is synthesized)
acgttaataatgacagttagggagggctgtggagccgggaaccaagacctcatcccgccgccgcccacgtctttgatcattaaagaaacagacaactaatcaggtgtgtggaagtagggg

SEQ ID NO: 809713 - DNA, 120 bp, Artificial Sequence
  ENSG00000248540_7 (sequence is synthesized)
tgggggaggggagggtgacaaggttccaagccgctagcgcagagggtcccagattcagaatctgccgaatccagactaaggcttctaaccaggctggagccgaccccagacagacccagg

SEQ ID NO: 809714 - DNA, 120 bp, Artificial Sequence
  ENSG00000248540_8 (sequence is synthesized)
aatggagagctggagcccctggccgctttctgcggatcgacccttaacttcaacgtcgcgaacccggagcgtcgggagggtggggagggttgaaaccggttggatctggggacttgctcc

SEQ ID NO: 809715 - DNA, 120 bp, Artificial Sequence
  ENSG00000248540_9 (sequence is synthesized)
agcgactccatccgcgctgttctagggcccaagcctggtccgcgcgcgccccctgctggaagccgcttgccgggcgcagaggcgggtcaacggcagagggtgctggctgggcgaggaaga

SEQ ID NO: 809716 - DNA, 120 bp, Artificial Sequence
  ENSG00000248540_10 (sequence is synthesized)
tgtggctggaaccctgcaccaaggcgaccgctgctcacggctctgcagtcccgcggcgcgatacgccagtggggcgcgcttaaccaaagtcccgaggctttacttcccgtgcccacccag

SEQ ID NO: 809717 - DNA, 120 bp, Artificial Sequence
  ENSG00000248540_11 (sequence is synthesized)
tctatgtcccaggtatcagcaacctctggtccactacacaacacaggcgctgtccctacttcgcgctgcgtagtttccagtgcccagggcgtctcctaattcttgagcgactagtccctg

SEQ ID NO: 809718 - DNA, 120 bp, Artificial Sequence
  ENSG00000248540_12 (sequence is synthesized)
gagtcttatgactttgtcaggggcctattaaaataaatgtctgagatctggaaaaaaaaatctgttggcgctaacaggggcaaagaaaactgcaaaattggaagtaatcgatgtttgatt

SEQ ID NO: 809719 - DNA, 120 bp, Artificial Sequence
  ENSG00000248540_13 (sequence is synthesized)
gaatgtttaagacatgcgacattgtgcaaacgattctgttgcaactgcactcagagttgtacttgcccttgtattttaatgtggcacgcggaggatttaatggacttgcctaaagatgtg

SEQ ID NO: 809720 - DNA, 120 bp, Artificial Sequence
  ENSG00000248540_14 (sequence is synthesized)
ggaagggcctctgagaataagaaagccggggcccagatgggcatcaaacatccccagcatagcagccggttaaggctgcggagaccttccccaaggctgccctccagtcagaagcccctg

SEQ ID NO: 809721 - DNA, 73 bp, Artificial Sequence
  ENSG00000248540_15 (sequence is synthesized)
gagaccttccccaaggctgccctccagtcagaagcccctgaacactcactacttcccatctttcagcttctgc

SEQ ID NO: 809722 - DNA, 120 bp, Artificial Sequence
  ENSG00000248540_16 (sequence is synthesized)
cctcaagaagctgctttccttttctaatttccagtcgaaagatcactcctcagggaagccaggccctgtttatactccctcctccggcctttccttgtacaggttctatgtagtcgtcag

SEQ ID NO: 809723 - DNA, 120 bp, Artificial Sequence
  ENSG00000248540_17 (sequence is synthesized)
gcgggcaggtcctagcgtcagactccattatgtactgactgtgtgtccttagccaagctatttaacctctctgtgcctcaagaaaaaaaggcataaataagagtactgaccaggcgcggt

SEQ ID NO: 809724 - DNA, 120 bp, Artificial Sequence
  ENSG00000248540_18 (sequence is synthesized)
aaaaaaaaaaaaaaaaaaatacctatgcttttcggtcaccttgaggattaaatgaatcaatgtacgcaaagcacttagtacctgacacttagtgctcagtacttgagatacgttttttat

SEQ ID NO: 809725 - DNA, 120 bp, Artificial Sequence
  ENSG00000248540_19 (sequence is synthesized)
tgctcagtacttgagatacgttttttatataatagctgaattagccattattattgccttgcagagtgggacacaagtttgataaaaggttctgctgcacacacccctacaggcttgtgt

SEQ ID NO: 809726 - DNA, 120 bp, Artificial Sequence
  ENSG00000248540_20 (sequence is synthesized)
cctgcctcctccacaggggagcaccttggctctgcccccagacctcttcaccaccaccaccccctttgcacacacacacaccatgggtatatgtagaaaccagatttactattattattt

SEQ ID NO: 809727 - DNA, 120 bp, Artificial Sequence
  ENSG00000248540_21 (sequence is synthesized)
gtaaaggtttctagtttcagatacttagactgatgcttgtcagcatgcctgtttgcaaagagagacccgcaactgcagacttggtggaaggtttttaattaaaactacattctgtttaag

SEQ ID NO: 809728 - DNA, 120 bp, Artificial Sequence
  ENSG00000248540_22 (sequence is synthesized)
tggggaagagagacaggctaagagcgcagcgtctaaagagaccacccggcccggggttccgaggctgctttgtaaattaaatatgaacagactggtgcgctcacactccaagcgtccctc

SEQ ID NO: 809729 - DNA, 120 bp, Artificial Sequence
  ENSG00000248540_23 (sequence is synthesized)
cctctcccctactcctgccgtcgctacgggcggcccagcgggctgagaccatcgcatcttgctcagccccagttcagaacacagaacttcacaccgcctgctcgggcctggagtcccccc

SEQ ID NO: 809730 - DNA, 120 bp, Artificial Sequence
  ENSG00000248540_24 (sequence is synthesized)
ccgccgacccatggggagggcgcaaggcgcctttcagggaaggtgtcttcgaaaatggtcgaggggtgagagcactgtgacccgtccctgccggggatcctgtggtgggacagccaggat

SEQ ID NO: 809731 - DNA, 120 bp, Artificial Sequence
  ENSG00000272112_0 (sequence is synthesized)
agggtgaccaactcattcctttgcctggaattttccgttttagcacttaaagtcctatatcccaggaaacccttcagttctaagcaaactgggatatttggtcaccatatttaagttcca

SEQ ID NO: 809732 - DNA, 120 bp, Artificial Sequence
  ENSG00000272112_1 (sequence is synthesized)
aataaacattggacaagtttgaataggaggtggcacattttaacaaaacaagtagtaatcttggtctttgccctaaaatggaactgttaaccaaatactgtccatataaagtaaagattt

SEQ ID NO: 809733 - DNA, 120 bp, Artificial Sequence
  ENSG00000272112_2 (sequence is synthesized)
gacagcagaatagtattccattgtatgacttcaccatcatcttattaaatctgttccttactgatggacttttcgtgtctttccagtgttgtgctacaataaacaagtctgccataaatg

SEQ ID NO: 809734 - DNA, 120 bp, Artificial Sequence
  ENSG00000272112_3 (sequence is synthesized)
tctttattcatctgttctgtaaactggcaaattctgtgtaacaatttgttttgaaaataaggtcttcctgctaaaaacaaaactcaaaaagccacaggattaaagagtctttcatcttgg

SEQ ID NO: 809735 - DNA, 120 bp, Artificial Sequence
  ENSG00000272115_0 (sequence is synthesized)
gggcggagcagcgcgggttggaagccgcaggggcgccggctgcagcggctcggggtcggccggggggtgcgtccgcgccagacccaggacggctgcagggagaagcgactccgctcgtag

SEQ ID NO: 809736 - DNA, 120 bp, Artificial Sequence
  ENSG00000272115_1 (sequence is synthesized)
caggacggctgcagggagaagcgactccgctcgtagctcccgggttcagggggcgcgccggaatccagaagagggggcgcggcgcctcgccagtgtctggggctccgagaaagcttccta

SEQ ID NO: 809737 - DNA, 120 bp, Artificial Sequence
  ENSG00000272115_2 (sequence is synthesized)
gccgcacgccccctctgcccagtgtccccgcgcagagcgacccccgccgccaacactcccgcggaggacgcaggaccccgcgagcccagcgctgtccgcccgccttgctcactgctgcct

SEQ ID NO: 809738 - DNA, 120 bp, Artificial Sequence
  ENSG00000272115_3 (sequence is synthesized)
acccagggcgggcccagtgccagcttccgggagcttggatcctggatcaggcacgggcctaggacctagaaacggaatcatgagaaataaaacaagaaagtatcgttacgcccaagaaaa

SEQ ID NO: 809739 - DNA, 120 bp, Artificial Sequence
  ENSG00000272114_0 (sequence is synthesized)
tggagctcttgctacctctttcctctttctgctggtttccaaaatccacagtgatttggggaagtagagcaatctccccaagccgtcggcccgattcaagtggggaatggcaagcaaaaa

SEQ ID NO: 809740 - DNA, 120 bp, Artificial Sequence
  ENSG00000286332_0 (sequence is synthesized)
ttttttttttttttttgtcagggtccaggggcactgttcaatccactgtagcatgggaagccctgataaaaagagacacaggacaaaattaaagttgtgaaaattatatacgtacttcac

SEQ ID NO: 809741 - DNA, 120 bp, Artificial Sequence
  ENSG00000286332_1 (sequence is synthesized)
gtgattctagtctactgccacacaaggctctggtggagatgtagcaactggaatctttcaaaaccgtgtgagccagaggcagccatagggatattatggttgcttgtttattcagaagtc

SEQ ID NO: 809742 - DNA, 120 bp, Artificial Sequence
  ENSG00000286332_2 (sequence is synthesized)
actgttgtgtggttgaaagagacatgggctactcctctctgcttgaaacagaaaattccgtgagagactcacgcaacctacaagaggctgggttgcctcatggttcatctcaatgatgtc

SEQ ID NO: 809743 - DNA, 120 bp, Artificial Sequence
  ENSG00000286332_3 (sequence is synthesized)
ctcataaaggaaactccagtcaggtagccctcaaagcattgaaaacaatgtaatttttcctgaaatctcatgaagctgcaccgaagaggaaacccatacatagcatattttcttaaaatt

SEQ ID NO: 809744 - DNA, 120 bp, Artificial Sequence
  ENSG00000286332_4 (sequence is synthesized)
ccgtctcacatttcttttttaatatttcacacatcacagatggcagttacctaaaattcccactttttatcccttaacattttgcaaatcctccccaaattttttgcactctggctcttc

SEQ ID NO: 809745 - DNA, 120 bp, Artificial Sequence
  ENSG00000286332_5 (sequence is synthesized)
tttctccctgtcctctggttttcctgatctcaattttatccccttttacatgtaaatcagtctagatggctgtagtattttttcattttcttgaccactgtttccttcttatgagatcca

SEQ ID NO: 809746 - DNA, 120 bp, Artificial Sequence
  ENSG00000286332_6 (sequence is synthesized)
taaagcgcaaagcaaatctacaccgaaaactctggaattaaccaggatttgaattgagcagtttgattttgctacttagtaacaatgtgattttgggtaaatttcttaaactctctgatt

SEQ ID NO: 809747 - DNA, 120 bp, Artificial Sequence
  ENSG00000286332_7 (sequence is synthesized)
ctctctctttttttctaatttgtaaaataaagccaataataccaaattggtagagatggtttgaggattaagtgaaacaatatattttcagattcctatcacaatgctggccatattagg

SEQ ID NO: 809748 - DNA, 120 bp, Artificial Sequence
  ENSG00000286332_8 (sequence is synthesized)
cggtttaaaaaaatgctggtcgttttctttttcttttctttgtagaaagatctccttgtagagacaaatcacaatcaaagactttttggttaatgtggaacgagatcatgtgaattagag

SEQ ID NO: 809749 - DNA, 120 bp, Artificial Sequence
  ENSG00000286332_9 (sequence is synthesized)
cacatggcgctctaaaggctccatgctaagaataactgacagatccatgctacggcaaaaattgttttgcaatgggaactacggctaggggtctgcctcccatcaaggatttatttatgg

SEQ ID NO: 809750 - DNA, 120 bp, Artificial Sequence
  ENSG00000286332_10 (sequence is synthesized)
aggaattcccaaaatacaggaagaatgttcaaatagtagcagccaggaaatttccaacatctgctacactgggtcactctgaattggtctttttggcttctttctgtaatttccattttg

SEQ ID NO: 809751 - DNA, 120 bp, Artificial Sequence
  ENSG00000286332_11 (sequence is synthesized)
ggaaatcaggagttgtgactcacagtggtaaatcttcacacagttgaaatatgccttattagcacaatctattttagtattattaatgccatagtataaatatgtacagcattagaagta

SEQ ID NO: 809752 - DNA, 120 bp, Artificial Sequence
  ENSG00000286332_12 (sequence is synthesized)
gtcaattagtggaggctgatttttattttacttctatgttggctttactttcaaaatatatgttatgttattattgttttccttttcttcattttcattgctacctttcttggtccaagc

SEQ ID NO: 809753 - DNA, 120 bp, Artificial Sequence
  ENSG00000286332_13 (sequence is synthesized)
aggtgatgagatagagcactaagaggtctgggactcttccgcccctacacagcagccttgccctccacatggcagctggagtgatctttataaaaccacacatgagaacatgttcctcct

SEQ ID NO: 809754 - DNA, 120 bp, Artificial Sequence
  ENSG00000286332_14 (sequence is synthesized)
ctgatggcttcacaccacatctggaataaaaccctaacatcctaccctgaccgagtgggccctatgagttccccttgcctctctgagcacatctactcccccgctcatgctgggtcggcc

SEQ ID NO: 809755 - DNA, 120 bp, Artificial Sequence
  ENSG00000286332_15 (sequence is synthesized)
ttctatccgtacctttgaccatgtattccctctgctttgatctcttcccatctattcttacagggctggcttcttcttgccattcaggtctcaatatctcctcagacagactcctagccc

SEQ ID NO: 809756 - DNA, 120 bp, Artificial Sequence
  ENSG00000286332_16 (sequence is synthesized)
cttaatctaacgtagacctgcttctactccaatcattatcgttctgctttatctttgtagtgtgtgctactctctgacattttgaattatttgttttcttgcttattgtctgtgtagggg

SEQ ID NO: 809757 - DNA, 120 bp, Artificial Sequence
  ENSG00000286332_17 (sequence is synthesized)
agaaaagatttctttcctcactcattgtaaagttcatggccaacaaccctatgacaaaagagtaataagcaaaaagcttgcaaatgcatttcatgtaaatcttacatgacatgtgagcct

SEQ ID NO: 809758 - DNA, 120 bp, Artificial Sequence
  ENSG00000286332_18 (sequence is synthesized)
tcagaagcaaagccccaaagacccagggaaaactgtatttttatggacagccatacagaagtataattgaaggacaaaagggtctgatccaaaggtaacaaactgggagaaatgtagtaa

SEQ ID NO: 809759 - DNA, 120 bp, Artificial Sequence
  ENSG00000286332_19 (sequence is synthesized)
gacctgtttgttcagtttcttctgtgtgggcacctgccacatgagtgtcttcaggggagaaggaacagaagaggtcggagagtgacgatcctgggttttatggtctgcttcaggggagga

SEQ ID NO: 809760 - DNA, 120 bp, Artificial Sequence
  ENSG00000286332_20 (sequence is synthesized)
aagcctgagagaaggtcagagacgccttcctacttctgctgttttttcagtttccaaggtgtcagtcatattttggggtatcacacctgaagcctctgcgagaccacaggtctgtgtgcc

SEQ ID NO: 809761 - DNA, 120 bp, Artificial Sequence
  ENSG00000286332_21 (sequence is synthesized)
tgtccagtgtctgggacataacaggagcttaaaaagcattctctccacacggggatttaccgtagacatgtttgtgaaaaccaaacaaatccttaattcctctccccctgcaaggtgtcc

SEQ ID NO: 809762 - DNA, 120 bp, Artificial Sequence
  ENSG00000286332_22 (sequence is synthesized)
ttcctccatttagagctgcccttttccagagttcccagggtctctgggtcattaccaggttcccttatcacaaagagaaagagtggaagtttcctatgttttctctcctcaacctccagt

SEQ ID NO: 809763 - DNA, 120 bp, Artificial Sequence
  ENSG00000286332_23 (sequence is synthesized)
cagttttctccattccaggctgcctttgctgtgtgcaaagctcaattgtctgcctcaattttaataattcagtgttgaatgggcacatttgcatatgcaaatatttgaagaattgaaatg

SEQ ID NO: 809764 - DNA, 120 bp, Artificial Sequence
  ENSG00000286332_24 (sequence is synthesized)
gcaattaacagatgtatatttgggattaatttaaaatattttttgtcttttcctgtttactttcatggtccagcagtaattctgatcttagtgacttgctgtgattcctccatccaatgt

SEQ ID NO: 809765 - DNA, 120 bp, Artificial Sequence
  ENSG00000286332_25 (sequence is synthesized)
gtttccaggtctactctagccagagtcagatttctaaaagatgctgtgctgtctttgaatacgattgaaaaatcaccattttaacccctttatagaacctaataaagcatttcagaagta

SEQ ID NO: 809766 - DNA, 120 bp, Artificial Sequence
  ENSG00000265984_0 (sequence is synthesized)
atgcggctccatttttaaaactaattgttgccacagataggcgactacatctctggaagcagcagctccatgctggatgtggtggaagaatcgagagggaatggactggaagtttggaat

SEQ ID NO: 809767 - DNA, 120 bp, Artificial Sequence
  ENSG00000265984_1 (sequence is synthesized)
gtcctttccctcctccactcggaagacatagttgtctttttttaaatcatgttttgtaccgaaatatttttattttataattgaatccctgttgttgggcctttaaaaacccatagaaac

SEQ ID NO: 809768 - DNA, 120 bp, Artificial Sequence
  ENSG00000265984_2 (sequence is synthesized)
attgttatgtgccacgaaggtgggaaacacggctttctcagtcattgctgtactcccacaattctgggtcatgcacacaatacaggtttagtaaataaaatccgtatgtttttggcccca

SEQ ID NO: 809769 - DNA, 120 bp, Artificial Sequence
  ENSG00000265987_0 (sequence is synthesized)
tttttcagacagagtcttgcttttgttgcccaggctggaggcatgatgtttggaggtacttatctatagcctttcacagaacgtcaaagaagtgtcataagtattctgaagctcttcata

SEQ ID NO: 809770 - DNA, 120 bp, Artificial Sequence
  ENSG00000265987_1 (sequence is synthesized)
ctgccaaacacattgaaagacaatttaacttccaagtttaagtgttctaggacaactccaacatctcttcagagttgacagtaagcttggctaatgttagaaacaaaagtccccagtaag

SEQ ID NO: 809771 - DNA, 120 bp, Artificial Sequence
  ENSG00000265987_2 (sequence is synthesized)
tcagccgtatctgcatggacaaagcagtcctgagtgctgctaaattaactgagaaaacttttcaacactcatgtcttactaagtctgtttcattcagaacattccatacacatctttagc

SEQ ID NO: 809772 - DNA, 84 bp, Artificial Sequence
  ENSG00000265980_0 (sequence is synthesized)
gcaacctagcttaaaggatcctcatagactgcagcgacgattctgtgcacagactaaggaaggagaagctgcaggagcactatc

SEQ ID NO: 809773 - DNA, 120 bp, Artificial Sequence
  ENSG00000265980_1 (sequence is synthesized)
agtagagacagggttacaccatgttgtccaagctggtctcaaactcctgtcagtgattcttaagtgatctaccaagactctatgggtgtttctttatgacaatgcaaaatggactaacag

SEQ ID NO: 809774 - DNA, 120 bp, Artificial Sequence
  ENSG00000265980_2 (sequence is synthesized)
aggtgatcacattgataggagggataaaatcatttgaggtgaagaagttaaggaactgagggtcaagatgcttgaagaatagtcatcatggatgtttacatcactataaattatgaaaga

SEQ ID NO: 809775 - DNA, 120 bp, Artificial Sequence
  ENSG00000250432_0 (sequence is synthesized)
gcacccccagtctttccatcctcctcattcgtctaggggcacccgaatcccctattccttatttcccctatcactcaggcactggcagggtccttggcccactcctgttggccgccgcgg

SEQ ID NO: 809776 - DNA, 120 bp, Artificial Sequence
  ENSG00000250432_1 (sequence is synthesized)
atgtgcctgagacaggtttgaccaggcaactgaaaagacatccctaagggaagacaaagcaaaggtatgaaaggaacacacgtccctgactgactaggaggaacagagctgcctgctgtc

SEQ ID NO: 809777 - DNA, 120 bp, Artificial Sequence
  ENSG00000250432_2 (sequence is synthesized)
gcgaggatcactgccgctagctcctttgaaagcagaattaagaggcagtgcaggaaggcacagcaggaaggctcatggttagaccacagagaaggaagcagccactgctggggacctacc

SEQ ID NO: 809778 - DNA, 120 bp, Artificial Sequence
  ENSG00000250432_3 (sequence is synthesized)
cggtgctggtcactgacaagctgtctcattaaaccttctcagaccctcaacccctcttagtatcttatcctcattttacagatgagaagactgcggcccagagaggtccaatgccagtgg

SEQ ID NO: 809779 - DNA, 120 bp, Artificial Sequence
  ENSG00000250432_4 (sequence is synthesized)
gatcagcttcgatgggatgcgcacagactgacctcttctccccagccccttcaacttcccagagctgcagggggcctgggagttcttggtaacagcacattaaacctctgtttgtgggaa

SEQ ID NO: 809780 - DNA, 120 bp, Artificial Sequence
  ENSG00000250432_5 (sequence is synthesized)
ctccctgcctgtagttccagagggaagaagagggggaaaaaaggatgaagagaattatttcagtgctgggggaggtgagcttatagcagggatttagatgggaattacctcatgggatag

SEQ ID NO: 809781 - DNA, 120 bp, Artificial Sequence
  ENSG00000250432_6 (sequence is synthesized)
gagcaattttctccctctccaggcctcttacagatgtgaaacaactggcagatctgactttcccacccctaaccatcggaggggatgatgtgtcttgaaacctgtgcctctcgattgaga

SEQ ID NO: 809782 - DNA, 120 bp, Artificial Sequence
  ENSG00000259981_0 (sequence is synthesized)
ccacctccatctttctctctctctctcactgcttcctctgggggaagtcagctactacctagtgaagacactcaggtagcctcctgtcaagtcacagagatctcttaacaaccatctgag

SEQ ID NO: 809783 - DNA, 120 bp, Artificial Sequence
  ENSG00000259981_1 (sequence is synthesized)
acaccctgagccagaaccatccagctaagcccctcgcagattccccacccacgaaaatgctgagatgacacgatttctttagctgtgtagctgggctggaaggctgcggttggctgaagg

SEQ ID NO: 809784 - DNA, 120 bp, Artificial Sequence
  ENSG00000259981_2 (sequence is synthesized)
ccgactcctgtgattgacggaaaggaaacagccattgaaagaggaggagcaagaaaattggcactagttgcctacttaaagctaaaaattagaaaaataaattaataagaactttcaaaa

SEQ ID NO: 809785 - DNA, 120 bp, Artificial Sequence
  ENSG00000259989_0 (sequence is synthesized)
ctgactcaggctgaggcggctgcccctgtgctggtgccatgtctagtccgcaggccccacaccggtgacctgccctcatctcatctcctactggagcccgagggtaggaatttgtttttc

SEQ ID NO: 809786 - DNA, 120 bp, Artificial Sequence
  ENSG00000259989_1 (sequence is synthesized)
ctggaacgtggcggcctcgtggattctggaggccgaggcctccgcatcctggtgaggcctctgtgcgtgtcccttcctcagcacagcgtcgcctgcctgtggccgggacccgacgtcttt

SEQ ID NO: 809787 - DNA, 120 bp, Artificial Sequence
  ENSG00000259989_2 (sequence is synthesized)
ttcgcctccttgcctctgagttctgtttcgtgtggggggtgagtctcaggctcccacgttcctgccgcacagcattgctggaggagacatctcctcgcttcatttgtctgtcccgccagg

SEQ ID NO: 809788 - DNA, 120 bp, Artificial Sequence
  ENSG00000249639_0 (sequence is synthesized)
ctcacaatggccagctttgttcctgcatgggtttgaggaacacaaactctgctatgtccaccagcaccctgtggcccaggacctgccatcatcttcaacaggaaccaaggaaagccgatt

SEQ ID NO: 809789 - DNA, 120 bp, Artificial Sequence
  ENSG00000249639_1 (sequence is synthesized)
cattacaatgctggctaatacccacaggaacactgaactccactgtgtgggagcttgaggggcctgtgctgcccatgccgagtgtccaccatctcacactgcttctaacaccttcaagcc

SEQ ID NO: 809790 - DNA, 120 bp, Artificial Sequence
  ENSG00000249639_2 (sequence is synthesized)
catgagctggaggcttcctcagaagaaccctaaaatcaagggggattctggtgccaagaaaaatagcccaacccagcttcacagctgtgagcctccaatgcgccccaggaagctgccatc

SEQ ID NO: 809791 - DNA, 120 bp, Artificial Sequence
  ENSG00000249639_3 (sequence is synthesized)
accatgggtagcgcgacctggcttgattttgccaaaacaaaggaaaattcctccagcaatttctgtgaatttgttttgcaaaactgaattgtctgcttttaattcccctataccaattaa

SEQ ID NO: 809792 - DNA, 120 bp, Artificial Sequence
  ENSG00000258056_0 (sequence is synthesized)
ctcatgtgacgcggtaacagctgcggcctgagtcactgggcccggcgcggggtgggccgagccccccgcccggccagggccacgtggcccctacccggaagaaggcgcccacccccgcaa

SEQ ID NO: 809793 - DNA, 120 bp, Artificial Sequence
  ENSG00000258056_1 (sequence is synthesized)
agggaaagccgcaagggcaagacctcggggcgcctggggcccccctctggcgctatacctccgtgccaactcggggtaggagagcggggcggagcgcagcctgggtcactctggttcaga

SEQ ID NO: 809794 - DNA, 120 bp, Artificial Sequence
  ENSG00000258056_2 (sequence is synthesized)
gaagcggacgagggatcctagtctgagaaaaggggaggaagcccttccccgaagccacgctacccagtcaatcaagacacgtccgcgtcgggtcccgccctctgggggaggattgacaag

SEQ ID NO: 809795 - DNA, 120 bp, Artificial Sequence
  ENSG00000258056_3 (sequence is synthesized)
gtctgtgcttccagcctcccagacagctcctgcatccgtctgtgatagcgagggcttgggggaagacacgaaggcaggagaggcttacatcctctggatttccccgtcttatcccagaag

SEQ ID NO: 809796 - DNA, 120 bp, Artificial Sequence
  ENSG00000258056_4 (sequence is synthesized)
acaaagccaggtgagggctggaagcgggctagggggatcaagctgcctccctcccttgtgtgccaggggtggtccccagaaggagctgatctgaacaggccggagagtaggaccggccgt

SEQ ID NO: 809797 - DNA, 120 bp, Artificial Sequence
  ENSG00000258056_5 (sequence is synthesized)
cacacccccacacctccagcctcggccccactccttgggctcttaaggtcctgcctcaagaaccacttcctgagtcttagtgtatgtgtgtacacaaagaatgaaagaagtctctagagc

SEQ ID NO: 809798 - DNA, 120 bp, Artificial Sequence
  ENSG00000258056_6 (sequence is synthesized)
aggaaggagatccgggctgggctgagaagcatcttccaggatcacggccttcccgcgggacacaccaagcccattccggatcttgctcttcctgaccatggctggcaggctgtggaggag

SEQ ID NO: 809799 - DNA, 120 bp, Artificial Sequence
  ENSG00000258056_7 (sequence is synthesized)
gagcggagagcagaagaaaggagtattcatcaggttccttattgtgctgccactagatgccaggcatgtgctaggcttgggggctgcaaggagaggaagacagcggccctgccctctgct

SEQ ID NO: 809800 - DNA, 120 bp, Artificial Sequence
  ENSG00000258056_8 (sequence is synthesized)
agcaggcagaaccgagttctggccacactgtgaagaaaggcagaagcctgcggtggcagctggttaagctcagagggagggaaagggagaggagaatggatttcacggagcagaaggatg

SEQ ID NO: 809801 - DNA, 120 bp, Artificial Sequence
  ENSG00000258056_9 (sequence is synthesized)
tgctcaaggtgaccttggagaataaaggggagagctccagggacagagaagcagtcgactgtggaaaaaaaaggagcattttgtaaagtacatggcaggttggggttggctggctcaaag

SEQ ID NO: 809802 - DNA, 120 bp, Artificial Sequence
  ENSG00000258056_10 (sequence is synthesized)
ggcttgggacggatgtggtgagatgggctgaaggtggtctgaagatcaagattgagagactagatacataacaaccaactgcaatgtttggtccttcattgaatggttgaacaaaccagc

SEQ ID NO: 809803 - DNA, 120 bp, Artificial Sequence
  ENSG00000258056_11 (sequence is synthesized)
tgtgaaagacattttgggacatacagacatggactgagaattagacataagaaaattattttgttaactgttatcatggttaacaaaacggtcatataatatgattatgtagagaagtta

SEQ ID NO: 809804 - DNA, 120 bp, Artificial Sequence
  ENSG00000258057_0 (sequence is synthesized)
ccaggacgcgagctaagtctgcccggccggcgcgcgccgcttccgctttggtgggaaggacctcccttcccccttatagaaacactttctccaggccgggccgggcttggtaaacctcag

SEQ ID NO: 809805 - DNA, 120 bp, Artificial Sequence
  ENSG00000258057_1 (sequence is synthesized)
ccgtgcctgggtagaggacgccgggctgggccgagcgggggtggaatgagggcgtctagaacagagaaaactaagtaggatggggtcgtccccccagtaatctggaaaacagttacagca

SEQ ID NO: 809806 - DNA, 120 bp, Artificial Sequence
  ENSG00000258057_2 (sequence is synthesized)
acaggctcctctcatcagacggcagtgctggtcgtttcctcactggtttgcggggaaggctgggcagaaaaaggatgcaaccttgttctcaaccacttgctatctcggtgaggatgagga

SEQ ID NO: 809807 - DNA, 120 bp, Artificial Sequence
  ENSG00000258057_3 (sequence is synthesized)
aaagcaaacagcccatccaggcccctgcagagcctcagagcttcaatatcattcccattagtccttaattaaacacctatttgcccttgcctaaataccgtataaccctcacagcctgca

SEQ ID NO: 809808 - DNA, 120 bp, Artificial Sequence
  ENSG00000258057_4 (sequence is synthesized)
ttgtagtgactgccccagaaatgtaggttctcacctgggttctgcagggaaatacgaaggaatccctaggtacagtctccgcctacttcattaaaatttcttttgttgcgagtatacaaa

SEQ ID NO: 809809 - DNA, 120 bp, Artificial Sequence
  ENSG00000258057_5 (sequence is synthesized)
ggatgcagcttagagtatcatattagtccaataaaggaacataaaaagtaaggcaagttagggtgctcagattggctaggattaagagttcttttctgaaggaggtttatttaaatacgg

SEQ ID NO: 809810 - DNA, 120 bp, Artificial Sequence
  ENSG00000258057_6 (sequence is synthesized)
aatttgaagggcagagagagcttgagtagggtccaggcagggtaaaggccacaaggagattcagataggaaagagcaaattatctgcgtgggaccgtgagcagatcaccgtggtacgttg

SEQ ID NO: 809811 - DNA, 120 bp, Artificial Sequence
  ENSG00000258057_7 (sequence is synthesized)
ggaagtgggagaaattaatggaggaggtttcttatggaggagagcagaataaggatatggatgtgacaagacataagataaagaagtcattttgggttcttgagcatagaggtagtttga

SEQ ID NO: 809812 - DNA, 120 bp, Artificial Sequence
  ENSG00000258057_8 (sequence is synthesized)
gtacccccaccagctttctcatttttttgcttaaaaaatattttattcttttcttttctctgagatggagtctcactctgtcccaggttggacggagtgcagtggcacaatctctgctca

SEQ ID NO: 809813 - DNA, 120 bp, Artificial Sequence
  ENSG00000258057_9 (sequence is synthesized)
tcggcctcccaaagtgctaggattatagatgtgagccaccatgcccggcccttaaattattcttaacgtgcaataaaatgcacacatcttaggtgctttgtttggtgaatttcaaaatat

SEQ ID NO: 809814 - DNA, 120 bp, Artificial Sequence
  ENSG00000258057_10 (sequence is synthesized)
catcttaggtgctttgtttggtgaatttcaaaatatacacctatgtaattaacacccaaaacaagatactgaaccaccaccctataaagttccctcatgcccctttatagttgatcaccc

SEQ ID NO: 809815 - DNA, 120 bp, Artificial Sequence
  ENSG00000258057_11 (sequence is synthesized)
cacacccaccaccaccctcccctggcaacttcctgaattatagcaccatagatttgtctgcatttgtatttcacatatatggagctttacagtatgtacttgtgtctgtatcctttagct

SEQ ID NO: 809816 - DNA, 120 bp, Artificial Sequence
  ENSG00000258057_12 (sequence is synthesized)
tagtaatgtttttgagatccatccatgtgtatcagtaatctgttcttttttattgctgagtattattccattgcatgaatatatcacaatgtgtttatccattcttcaattgatggatat

SEQ ID NO: 809817 - DNA, 120 bp, Artificial Sequence
  ENSG00000258057_13 (sequence is synthesized)
ttgggtatttccagttggggttatgatgaatatggctgctattaacattctggtgcaaatattttcatagacatgttttcatttctccttttcaccttatttcttgatgatagtggcatc

SEQ ID NO: 809818 - DNA, 120 bp, Artificial Sequence
  ENSG00000258057_14 (sequence is synthesized)
ttcggaagcctacagcattgtgaattcttattcaatcatctaacattgaatagggatcagtgggctagttctgggattacaacaaaaagtagacatggtcctttcctcaaagggcttgaa

SEQ ID NO: 809819 - DNA, 120 bp, Artificial Sequence
  ENSG00000258057_15 (sequence is synthesized)
tcagggattggatgagtctctatggtttgttttgccctgaagagcagaaggcttctgtcccaactggtgttgccaaagcaacatattaattccatgccatgatcctgggtcaagatctgc

SEQ ID NO: 809820 - DNA, 120 bp, Artificial Sequence
  ENSG00000258057_16 (sequence is synthesized)
acaatctgattgggcatgtcacctcggatggcaagggagtggaagtggtcaaaatcatggagtcccagctttcggagacgccttgcagctgcccggtaacacttccagggttggggctcc

SEQ ID NO: 809821 - DNA, 120 bp, Artificial Sequence
  ENSG00000258057_17 (sequence is synthesized)
acaaggaggtagtggcagagggaggaaagatgggccaggaactcccataggccatggtctccatgattcagatgaatccacatggttattgacatgcagaagccaatgtcaaaaactgaa

SEQ ID NO: 809822 - DNA, 120 bp, Artificial Sequence
  ENSG00000258057_18 (sequence is synthesized)
cgtccaaattggcttaagaaagagctcaagagaaccttccgggtcctttgattcatgaagtccagggtgataaaagtcaaggcatcaggaaaaggacattctttttcggctcgcttcacc

SEQ ID NO: 809823 - DNA, 120 bp, Artificial Sequence
  ENSG00000258057_19 (sequence is synthesized)
aggactggatctatgtcgcagcagaggagacggaattctcttgaggcatctgagcaggtttccccgtcaggtagggagaggaagtgtttgtatagagccacactcagatcctagaggaat

SEQ ID NO: 809824 - DNA, 120 bp, Artificial Sequence
  ENSG00000258057_20 (sequence is synthesized)
ccaaaacagctttgtcactgcagttctcaatcagtgaatggaagagaaatctgtatcattctcccactgagaatgccacttacctctggctgtataggatgtgaggttcctaaaccataa

SEQ ID NO: 809825 - DNA, 120 bp, Artificial Sequence
  ENSG00000258057_21 (sequence is synthesized)
cctaaagaggttgtgcaaaaattttctacagagtaggctctcagtgccctccaggggtcacatgctgtaatgcatcatccccatattttcctgacactgatgatagattgggttgtatag

SEQ ID NO: 809826 - DNA, 120 bp, Artificial Sequence
  ENSG00000258057_22 (sequence is synthesized)
ctgaaagttacagccaaatggatgcagcaaaggaacctacagcagtatttcccagcttaagtaatatgctgataaactcactctttttctgggtatctcaagaccccagggcggaagaaa

SEQ ID NO: 809827 - DNA, 120 bp, Artificial Sequence
  ENSG00000258057_23 (sequence is synthesized)
ggggtccagaggcataaccagtgtctcttaccaggaaagtgaggaatacagcaagcacaatcttacaaaaacctgcttctcagacccgcggtgggggaagtctggattccaaagtcctca

SEQ ID NO: 809828 - DNA, 120 bp, Artificial Sequence
  ENSG00000258057_24 (sequence is synthesized)
tcattgctaaaagtcactgctaacaaccttctagacaagtccaatgatttgtgatttttaccacattagcaccttttttactcttaagtcaccatctcctttctctaactttgaattctt

SEQ ID NO: 809829 - DNA, 88 bp, Artificial Sequence
  ENSG00000258057_25 (sequence is synthesized)
ctcttaagtcaccatctcctttctctaactttgaattctttttttttttgagacaaagtctggttctgtcgaacctctgcctcccagg

SEQ ID NO: 809830 - DNA, 120 bp, Artificial Sequence
  ENSG00000258057_26 (sequence is synthesized)
caaagtgctgggactataggaatgagccactgcacctggcctctttgatttctataaccattataactaactcaaatttgtgtttttccacatagtattttcaaggcatttttctgttta

SEQ ID NO: 809831 - DNA, 120 bp, Artificial Sequence
  ENSG00000258057_27 (sequence is synthesized)
ctactttgtttgcttggtgtaacaagcatgtgaggaaaatatttatttatgccttttctgcaggtgaagaaaatgcacaatggaaaccacccagatgtccagtgatagtggcatggacaa

SEQ ID NO: 809832 - DNA, 120 bp, Artificial Sequence
  ENSG00000258057_28 (sequence is synthesized)
ataaatgtggtataatcatgaagatagaatactaaatagcagttaaaaaatgaaggcacccagcttggtgcacaacatggatgattctcacaaatacataatgttgagaaaaaaagcaag

SEQ ID NO: 809833 - DNA, 120 bp, Artificial Sequence
  ENSG00000258057_29 (sequence is synthesized)
ccataacagaaaatatatgaaaagcatccatttacatgaagctcaaaaatgggtgaaattaaagtacatcattcagggaagaaaaacagtacactataaagaaaagcaaggaaacaacag

SEQ ID NO: 809834 - DNA, 120 bp, Artificial Sequence
  ENSG00000258057_30 (sequence is synthesized)
aacaacagaaggctagttgttacctctgggtagagatagaggtttatgaacaggaaaaggcatataggggaagttgtggggtgctgaaaatgtttattatttatttatttatttattttt

SEQ ID NO: 809835 - DNA, 120 bp, Artificial Sequence
  ENSG00000258057_31 (sequence is synthesized)
atcttactctgtttcccaggctggagtacagtggtgtgatcactgcaaccttgacttcccaggctccagagatcctcctacttcagccttatgagtagctggaaccacaggtgcacacca

SEQ ID NO: 809836 - DNA, 86 bp, Artificial Sequence
  ENSG00000258057_32 (sequence is synthesized)
cgagctcaagcaatccaccagcgtcagtctctgaaaatgctgggattacagcgtcagccactgcacccagcagttttttgggtttt

SEQ ID NO: 809837 - DNA, 120 bp, Artificial Sequence
  ENSG00000258057_33 (sequence is synthesized)
tacagcgtcagccactgcacccagcagttttttgggttttttgttgttgttttatttgagacagggtctcacttcgtcacccaggctggggtatgtggcacaatcaaggctcactgcagc

SEQ ID NO: 809838 - DNA, 70 bp, Artificial Sequence
  ENSG00000258057_34 (sequence is synthesized)
actgcagcctcgacctcctgggttcaagcgatcctcctccctcagctctctagagatggggttttgccat

SEQ ID NO: 809839 - DNA, 120 bp, Artificial Sequence
  ENSG00000258057_35 (sequence is synthesized)
ggctgggaaaggagtttttaaaattgaaaaaaaaaagcacccataaattatggtacatctatccaatgaaacattaggaagctgctaaaaaaagaatgtggtgatataaataatctcaga

SEQ ID NO: 809840 - DNA, 120 bp, Artificial Sequence
  ENSG00000258057_36 (sequence is synthesized)
acccagctaattttttcattttttgtagagacagggtctcactgtattgctcaggctggtcttgaactcctgagatcaagcgatcctcccactgtggcctcccaaagtgctgggattata

SEQ ID NO: 809841 - DNA, 120 bp, Artificial Sequence
  ENSG00000258057_37 (sequence is synthesized)
caaaacatttttgtaatctggctgttttccagttggatggactctgagtgcaatctcaatgtctttcctgatcagtaagaggaagaaaggagctgttgtataatctttggtccacttgct

SEQ ID NO: 809842 - DNA, 120 bp, Artificial Sequence
  ENSG00000258057_38 (sequence is synthesized)
atataggaatagatctttactgctacatatacataattctgtacggaacagtcatgttccttggattctgacagcatcgccaatatgtgctttgaaacctcctacctggcacagatatga

SEQ ID NO: 809843 - DNA, 120 bp, Artificial Sequence
  ENSG00000249637_0 (sequence is synthesized)
tgggagtaccattgatcccgccctcatctgaggtgacgggaaagggccgggaaatttccacttctgaataaaatgactgctgaagtgatgacccgcaagaattggtcaaatttggagtag

SEQ ID NO: 809844 - DNA, 120 bp, Artificial Sequence
  ENSG00000249637_1 (sequence is synthesized)
acttcaccctgcgcttggtgaaacttctacgtcaaggatgcaagaggcgccgaagtaacgcagctcccacctgtcgctctccgctgggcgccgagactatggccggagaatagctgcacc

SEQ ID NO: 809845 - DNA, 120 bp, Artificial Sequence
  ENSG00000249637_2 (sequence is synthesized)
gggattggagaaaggaagccatcagtcttaggaaggctccaccttcctgccattgcctggttggaggagcgtagcgtcagtcactagagcagtcaccacctctgggacaggattcccaac

SEQ ID NO: 809846 - DNA, 120 bp, Artificial Sequence
  ENSG00000249637_3 (sequence is synthesized)
cagggagagccacagcgagtgagaggggagattcttcctctcgtggaggccttggccacccttccaggctcagagtctcccaagaccctccaggacacagcccaaccctgcctcagctta

SEQ ID NO: 809847 - DNA, 120 bp, Artificial Sequence
  ENSG00000249637_4 (sequence is synthesized)
gctgcaggggtagacttgattatccaaagcagccccagacaggcaagctggatggctgtgaagaggtggaccctggtcagaggcacatgccgcaagagtagcaggtctggctggtgtttt

SEQ ID NO: 809848 - DNA, 120 bp, Artificial Sequence
  ENSG00000249637_5 (sequence is synthesized)
gctggcatcaacaacagcttcaccctattagtgaactaggggaacaagaggaagaggaaagcagggcactcaggtgattttaatgggctcacctgaatgctgctgagcgctgccaccccc

SEQ ID NO: 809849 - DNA, 120 bp, Artificial Sequence
  ENSG00000249637_6 (sequence is synthesized)
atatacaggaagatgccatagagcacaggcattggaatgaactggtagaaagaagcagagagttatcaaagtttacctctgccaacctcccagatgccccaggatgcccagatgccctag

SEQ ID NO: 809850 - DNA, 120 bp, Artificial Sequence
  ENSG00000249637_7 (sequence is synthesized)
atccctctagcatctagcatccaggtctgcccaggccttgcctttcctttcacatgtttcatgccgatcttattgaatcctcaaatcaattagatgaagtaaatgttattattgccttca

SEQ ID NO: 809851 - DNA, 120 bp, Artificial Sequence
  ENSG00000258053_0 (sequence is synthesized)
agctgtagaccggagctgttcctattcggacatcttggctcctccccaagagttctggagtctgagaagtcaaggatcggggtgctggcctattcagttcctggtaagggctgtcttcct

SEQ ID NO: 809852 - DNA, 120 bp, Artificial Sequence
  ENSG00000258053_1 (sequence is synthesized)
gactcggtagagggaagagaagcagcttgactggacagaggtgacttgacttcagagggatggcaggactttggaggagagacaacttgactttggagagactgcttgacttcagggaag

SEQ ID NO: 809853 - DNA, 120 bp, Artificial Sequence
  ENSG00000258053_2 (sequence is synthesized)
agctgacctgagacagctgaactttgggggaagattacctgcctgtcctgtcccctctccagctctcctctccactagagccatttccattgctaaataaaattctccacttccaccatc

SEQ ID NO: 809854 - DNA, 120 bp, Artificial Sequence
  ENSG00000258050_0 (sequence is synthesized)
ttgaagctcagggctgctgtccagccctgtccactcccctgtcaagggattgtatcatcattgcgaaacaagcatataatcttctacgacttccaagtacatacataatggcacaaagga

SEQ ID NO: 809855 - DNA, 120 bp, Artificial Sequence
  ENSG00000258050_1 (sequence is synthesized)
ataatggcacaaaggaattatagtttttcagagctcttccctgaaaccagatgccatgacaagttgctttaaggcaagttacttgccaggcttggtggtgtgcacctgtagtcccagcta

SEQ ID NO: 809856 - DNA, 120 bp, Artificial Sequence
  ENSG00000258050_2 (sequence is synthesized)
aaacaataaataaataaataaatgactcatgaatactgccattgttccagatagcagcagaatccttttctgggaataattatttggtgatttttatggaggatacaatttgctggcatc

SEQ ID NO: 809857 - DNA, 120 bp, Artificial Sequence
  ENSG00000258050_3 (sequence is synthesized)
ctagtgaaactgtactcatttttaaaatgtttagtatacaatataaaagactaagatttgaaagactgaaaattgtacatcgttcagaggttatcagtgttcattaaaatgtcactaatt

SEQ ID NO: 809858 - DNA, 82 bp, Artificial Sequence
  ENSG00000236308_0 (sequence is synthesized)
ttccccgagacaaagtctcactctgtcacaggctggagtgcaatggcaggattacggctcactgcagcctgaaactcttgaa

SEQ ID NO: 809859 - DNA, 120 bp, Artificial Sequence
  ENSG00000236308_1 (sequence is synthesized)
ggaccacaggcgtgagccaccatgcctggccactgctatttttcttaatgaaagaggaaatgtacagaattgacattaagactaaatgcaggaaaaattgattcagtagacattttatgg

SEQ ID NO: 809860 - DNA, 120 bp, Artificial Sequence
  ENSG00000236308_2 (sequence is synthesized)
gggaggtaccatatctgaattaaagtacaagtcccatcttaatggagaaaattgattgctgaagcaaaaaggtacagaacaaaccattcaatttcaatggtcacattgtgaagaagctta

SEQ ID NO: 809861 - DNA, 120 bp, Artificial Sequence
  ENSG00000236308_3 (sequence is synthesized)
ccactcatttaatttgaccaaaaatgctattattgaagataattgatgacataatcctagtatatccctgagtaacggcagataaggatttaaggttgaggatattccccaaatgctctt

SEQ ID NO: 809862 - DNA, 120 bp, Artificial Sequence
  ENSG00000233154_0 (sequence is synthesized)
tctttggctttgctacctctcttcccttcccattgtttttcctcccccctcctaggttctcacatcgctttcctgtttccctctcctgcaatatggatttgacatattaatcattacagc

SEQ ID NO: 809863 - DNA, 120 bp, Artificial Sequence
  ENSG00000233154_1 (sequence is synthesized)
acacgaggtcatctgcaatggcactggtgctgtggctgtatcagcatggctctgatgtcccttcggggcaggcaacagttcagggaggacttacaagcaagctctggaacttgaagtctc

SEQ ID NO: 809864 - DNA, 120 bp, Artificial Sequence
  ENSG00000233154_2 (sequence is synthesized)
aagagatgacaaatagtcaattctcaaaaaatgaagaaaagaaaaacttgtttcttcatgtttgctaaccctatctatatctatggttttggccaataaattcactgtgtttaaatcctc

SEQ ID NO: 809865 - DNA, 120 bp, Artificial Sequence
  ENSG00000233154_3 (sequence is synthesized)
tgtgcagagctcagagacagcgtctaagagggcggctgacaatctgcctcaaacacaaacacatgacaaatatagttctgcagtgaagactttagccccacggggaaagctgagactcag

SEQ ID NO: 809866 - DNA, 120 bp, Artificial Sequence
  ENSG00000233154_4 (sequence is synthesized)
gagcctgatggcataaacaaggcgaaaggcttggtagcaaatcagaagacttgtttttggaagctgaaaacttacttcggcaacaacagtcctccatggctccctgtttgtgctcttgct

SEQ ID NO: 809867 - DNA, 120 bp, Artificial Sequence
  ENSG00000233154_5 (sequence is synthesized)
ttcatgtaggggcactggactgcctagagttggaggaagggacccttatgtgtctccagaagccttcctttccattcctgtggggtctgacagttgttggaagaaggcctgcaggtccag

SEQ ID NO: 809868 - DNA, 120 bp, Artificial Sequence
  ENSG00000233154_6 (sequence is synthesized)
ggcttgtaaccagccctgcttagataatccttacagcagcagctctgcacagtatcattctcccctgtacaaatgaagagacggaagctcgaattctcacacgacacccttgcagcactt

SEQ ID NO: 809869 - DNA, 120 bp, Artificial Sequence
  ENSG00000233154_7 (sequence is synthesized)
gaaccactccaggattctcttctgctggtcacccaactattctcccaggtcaccggggttacttacaatcttggatttagggttgccagatttagcaaataaaaatacagcatgcctggt

SEQ ID NO: 809870 - DNA, 120 bp, Artificial Sequence
  ENSG00000233154_8 (sequence is synthesized)
tcaagtgaacagtgcttaccgcttcaagcatccagtctcagcaataagaggagcacatctccaaatttataatgaaagacaagcaaagtgggacttcatggccttggctggacaccaagt

SEQ ID NO: 809871 - DNA, 120 bp, Artificial Sequence
  ENSG00000233154_9 (sequence is synthesized)
gatagctaatttttgcagcagggaagacgaaataacaagtccctggattgcaattttggtttctccttctgttctcaaacaaaaaattgtttaaataataaactcttgtcttcatcataa

SEQ ID NO: 809872 - DNA, 120 bp, Artificial Sequence
  ENSG00000236303_0 (sequence is synthesized)
ctgctacgcggtacccggatggcctctctccgggtcttcgggggtgcgcgtcttccggccgaccctcctcctgctcctgctatgttgctgacccacgctgctggcgcgagtggtcttgcc

SEQ ID NO: 809873 - DNA, 120 bp, Artificial Sequence
  ENSG00000236303_1 (sequence is synthesized)
cctcgggacccgaggagggaggagttcttcgttcccttcagctttcaggccccagggagaacctttcagtcacaggcagcctaggttcaagaagaagaaaacctgaggcctcggctcacc

SEQ ID NO: 809874 - DNA, 120 bp, Artificial Sequence
  ENSG00000236303_2 (sequence is synthesized)
ctgacagggaagtggcgtggggaccgctaaaggactgcgaggttccactgcccagggctgtctaaccgcttgctttagactgtgggtgcacggagtccgtcactcagcctccaggaccag

SEQ ID NO: 809875 - DNA, 120 bp, Artificial Sequence
  ENSG00000236303_3 (sequence is synthesized)
ctctggggagggaggcgcctctccagcacccagatccccagcctgcagcgcctcggggccagtgtggcccggaatggcagctttgtcacacactgccgctggagtgggacttggcgtggc

SEQ ID NO: 809876 - DNA, 120 bp, Artificial Sequence
  ENSG00000236303_4 (sequence is synthesized)
ttttctggagggcgacctacatcaaggggcatgcatgcgccctttgagctacagatttctcagctgggaatgaattatgaatgtcctttagccttggccgagagggtgtacagctctgca

SEQ ID NO: 809877 - DNA, 120 bp, Artificial Sequence
  ENSG00000236303_5 (sequence is synthesized)
gtgttcctgtcggaaactggaaatagcctgagtgttctccattatgaattagtgcaaatgaaacacggctgagccttacggtggcataggatgcagtcattagaatacaacattcgaaaa

SEQ ID NO: 809878 - DNA, 120 bp, Artificial Sequence
  ENSG00000236303_6 (sequence is synthesized)
aggaagagctggtcgtttggtaaaagcttgtaacagataaagttctaaatggcatcaaaagaacagacttagtaaatctcattttggttaaagatgagaaataaaaataatacgcctgaa

SEQ ID NO: 809879 - DNA, 120 bp, Artificial Sequence
  ENSG00000236303_7 (sequence is synthesized)
acctgtcctgcctgcttcatgaggtggcatgatgtcattttgtcattaggcaccaccgtggggactgcatgttgtcaatggacccactatgctcatgatgctccttatcgagttctaccc

SEQ ID NO: 809880 - DNA, 120 bp, Artificial Sequence
  ENSG00000236303_8 (sequence is synthesized)
cggctgtcaccgcaggccaggatgtgcactctcaacagcccaggctttgagggctgctctggagtatgatggatactgtagctgttcgcttttgaaaaagaaagacctgtggcgagagca

SEQ ID NO: 809881 - DNA, 120 bp, Artificial Sequence
  ENSG00000236303_9 (sequence is synthesized)
tgagtgcttccctggtgctgggctctgtgttgaagactcagatcctccgtcttggggtctcgtcattatttgagtgcttcctcggtgctgggctctgtgctgaagactcaaatcctccgt

SEQ ID NO: 809882 - DNA, 120 bp, Artificial Sequence
  ENSG00000236303_10 (sequence is synthesized)
cttggggtcttgtcattatttgagtgcttcctcggtgctgggctctgtgttgaagactgaaatcctccgtcttggggtctcgtcattatttgagcgcttcctcggtgctgggctgtgtgc

SEQ ID NO: 809883 - DNA, 120 bp, Artificial Sequence
  ENSG00000236303_11 (sequence is synthesized)
tgaagactcaaatcctccgtcttggggtctcgtcattatttgagtgcttccttggtgctgggctctgtgctgaagactcaaatcctccatcctgagggcccttctgcatagaggcttgtc

SEQ ID NO: 809884 - DNA, 120 bp, Artificial Sequence
  ENSG00000236303_12 (sequence is synthesized)
tcacatatgaacggacacagaaacatcggcacaggcttcctttgattgaaactcctacttggttcttttctggatctcaagaagtggatggttgtcagctcttgggagcagatgcaggtg

SEQ ID NO: 809885 - DNA, 120 bp, Artificial Sequence
  ENSG00000236301_0 (sequence is synthesized)
cgcagcaggccgcaggcgttggcgggcagcggcacggccggcagggtcggggtccacaccagggcgcagaggacggccgaggcgtgtctgggccggcagccctggtagcaggcggggaag

SEQ ID NO: 809886 - DNA, 120 bp, Artificial Sequence
  ENSG00000236301_1 (sequence is synthesized)
gaagaggtcggagaggcagcgctccacgctgaaggccgccagcagccagagccccaccgcgaaccacaggaagtcaggggttggggagtgcggctcgggccttggctcctgtgccttgcc

SEQ ID NO: 809887 - DNA, 120 bp, Artificial Sequence
  ENSG00000236301_2 (sequence is synthesized)
tggcttgtggtgaacactggacagtaagatgttcttgataagagagtttttccttccacggactgcgttccgcagctcctgggtggggtgcagagtgtgtcagctcaagccagaaattcg

SEQ ID NO: 809888 - DNA, 120 bp, Artificial Sequence
  ENSG00000236301_3 (sequence is synthesized)
gtcgtaaagatgctgtttctcttcacgtttctcaaatggacttggcttcggaaatcacttctgcaacacaaaccagcagcctgtgcagctctgggcgggggcatgccggctacccagctc

SEQ ID NO: 809889 - DNA, 120 bp, Artificial Sequence
  ENSG00000236301_4 (sequence is synthesized)
aaacgcacggcacagctcgtgtggcccaggggcacctcctgccaccctgcctgctgcctccaccccagatgccggtcctcgctgctctccgggacctctcccggcgtggctccacctcct

SEQ ID NO: 809890 - DNA, 120 bp, Artificial Sequence
  ENSG00000236301_5 (sequence is synthesized)
cctcgaggtcaccgtccaggcctgtttcaactagcgcctccaagccttgcttacctgcctcctgtttgggtgaaacttggagcatctctattaacttagttggtagctccggtcacctgc

SEQ ID NO: 809891 - DNA, 120 bp, Artificial Sequence
  ENSG00000236301_6 (sequence is synthesized)
agtcaccaggggcccagagggacgcacagagggagaccggctgcctgggtccctcctggctgcctcaccatcaggggcgggatgaggagctcagcctcagccacagtgcgcaaggtgaag

SEQ ID NO: 809892 - DNA, 120 bp, Artificial Sequence
  ENSG00000236301_7 (sequence is synthesized)
ggaggacttcccctgtctaagggccattgggagtgggatggcctaatttctggggtcgctttctattgggcacttcaaacagtgctgggcaagggcagtcgtttgaggcagcttggagtg

SEQ ID NO: 809893 - DNA, 120 bp, Artificial Sequence
  ENSG00000236301_8 (sequence is synthesized)
aagttcttagggaggaggtcctgcgcagctcggccagccccggtcaggcccaggcagccaccaaccctggtttctccatcacccctgacccctcccacagccccttctcgtgtttgccca

SEQ ID NO: 809894 - DNA, 120 bp, Artificial Sequence
  ENSG00000236301_9 (sequence is synthesized)
ccgtctaggccatgcttccactttctcacctggctgggtatcccctatggggcacgggtgtcggccccgccgaggctgggctttggtctgtcttgttctctctgggaggggtctggtgcg

SEQ ID NO: 809895 - DNA, 120 bp, Artificial Sequence
  ENSG00000236301_10 (sequence is synthesized)
ggtggaatacgtggagggagcctccgtggggggagcaactgctcccggtgttgcaaggaggacagagccaatgcccgccccatcgtgtcatggccgacggtggcctcagaagatgtgtcc

SEQ ID NO: 809896 - DNA, 120 bp, Artificial Sequence
  ENSG00000236301_11 (sequence is synthesized)
acgtccccagtcgctggaagctgtgcacgagctcttcctggagaaaaggcccttggcagatacaaggattttgagatgagctcgtcctggagtatctgtgtgggccctaaatgcaatgac

SEQ ID NO: 809897 - DNA, 120 bp, Artificial Sequence
  ENSG00000236301_12 (sequence is synthesized)
aagtgtccctatacaggaaaggagaggagggacactggagagcagggggaggccacgtgaggttggaggccagcaggggttacacagccacaggccaaggagggccagagccaccagaag

SEQ ID NO: 809898 - DNA, 120 bp, Artificial Sequence
  ENSG00000236301_13 (sequence is synthesized)
ctgaaagagatgaggaagcaccttcccctggagccctcagggagcgcggccctgctgccaccttgatctcagacttctgtcctctgtaaccaagggaataaagtcctgctgtgtgaagcc

SEQ ID NO: 809899 - DNA, 120 bp, Artificial Sequence
  ENSG00000236306_0 (sequence is synthesized)
cttttttcttccagtcaattttttctttgatctacagaacttgcttcttttctctgaagttttcacaatacagcatgatagaaggagcacagagtgccagaggcagggaattcctatgct

SEQ ID NO: 809900 - DNA, 120 bp, Artificial Sequence
  ENSG00000236306_1 (sequence is synthesized)
tcactagtgactcataagaaaacttaatagaaggtctctactgcctgctggccctgcagtacctgattgatgtggtcccaaactaaagtaggctaaccttcattgaaccaagcacttcag

SEQ ID NO: 809901 - DNA, 120 bp, Artificial Sequence
  ENSG00000236306_2 (sequence is synthesized)
agccatgggaagaagtatgggggaaggagtccttgtactctggcaatgaggaaaacaaacattaacagtgcaagacacagtgagagtcacagatccatggatggacgatccttttgagga

SEQ ID NO: 809902 - DNA, 120 bp, Artificial Sequence
  ENSG00000236306_3 (sequence is synthesized)
caatagagggggaatttggataagtttcctgagtgagaaaccttccagatggcaatctgaaagttagctgttccttctcaaaacacagagctttctcaagagaaagataacaccctcttt

SEQ ID NO: 809903 - DNA, 120 bp, Artificial Sequence
  ENSG00000236306_4 (sequence is synthesized)
catcagagcgagcgagctttcttcatggtggcaatttccagtctccagtgcaaggaggggaaactgaaggagaataaggcggttacattcagttagagcctgagagcagaatttggttag

SEQ ID NO: 809904 - DNA, 120 bp, Artificial Sequence
  ENSG00000236306_5 (sequence is synthesized)
gaaagttttcccatgggccaacgtggatatgtttctgtaatagtctgctcagccttctacaacaagatgtcgcagactgggtgacttaaaccagggatcctcaaaccctggcaatggatc

SEQ ID NO: 809905 - DNA, 120 bp, Artificial Sequence
  ENSG00000236306_6 (sequence is synthesized)
ggtacgggtcagtggcctgttaggaatcaggccacgtagcaggagtccatatttggaataacaacaatataacactcctttggtagttatattttctcaccttctttacagaagaagaaa

SEQ ID NO: 809906 - DNA, 120 bp, Artificial Sequence
  ENSG00000236306_7 (sequence is synthesized)
tccttacttagaaaggctcattctaggggaaaccagctgccatattaagaaaacagtcctatggaaagggccatggaacaaagaagtgacttctgccaacaacctcatgagtgaacctag

SEQ ID NO: 809907 - DNA, 120 bp, Artificial Sequence
  ENSG00000236306_8 (sequence is synthesized)
aagtggctcatctagtcctggtcaaatcttatggactgtggctccaactgatagtgtgactgtaacttcataagagacgctgaaccagaccacccaataagacactcccagattccctac

SEQ ID NO: 809908 - DNA, 120 bp, Artificial Sequence
  ENSG00000236306_9 (sequence is synthesized)
tctcaaaagttgtgtgaaataatcacccccagttgtattaaactgctaagttttggggtagtgtgttacacagcaataaatcataaatacaacatccaagcaataaatttctatgataaa

SEQ ID NO: 809909 - DNA, 120 bp, Artificial Sequence
  ENSG00000236306_10 (sequence is synthesized)
aatgtccaagggaagctggtatcttcaagaaggtactcatgataagaagagtgaggacgcacacctttaacttaatatgcagcagagacaagacttttcttcaaacccaagtgctctagc

SEQ ID NO: 809910 - DNA, 120 bp, Artificial Sequence
  ENSG00000236306_11 (sequence is synthesized)
accatgcatattttgaaaatagtgactaagcacataaaagtaaaagaaaaaattgcattcatggactcctactctaatggatgtaagaggtgactctatctaaaataacactgggagaga

SEQ ID NO: 809911 - DNA, 120 bp, Artificial Sequence
  ENSG00000236306_12 (sequence is synthesized)
cttcaaacagagcagctgaagagcagcaaaggcagggaaagggctttctctgatctacccttaaccgactaagacactgtattaggatctggtgacatagtgggatagaaggacaaagcc

SEQ ID NO: 809912 - DNA, 120 bp, Artificial Sequence
  ENSG00000236306_13 (sequence is synthesized)
cgtagcaggaggactttgctggttactagacatttcgagctgaccaagggaataaaatgaatcttatatcatcttgtcactgctgctgctcctgccattgtacccgaagaaccttggata

SEQ ID NO: 809913 - DNA, 120 bp, Artificial Sequence
  ENSG00000236306_14 (sequence is synthesized)
gccatgattttaatggaaaactgccttggacactgtggctgctagctattattgtctcttctcattttcttttccatgcaactttgtggtcctctcacaaaaatacagtttgtacatact

SEQ ID NO: 809914 - DNA, 120 bp, Artificial Sequence
  ENSG00000236306_15 (sequence is synthesized)
ttgtgttacagagatgaagtagacctaattgtgacatccttttcctcttttatgccctttttatttatccttatgttgcatttatccaaattaattcaatggggcagtctaacaaatcta

SEQ ID NO: 809915 - DNA, 120 bp, Artificial Sequence
  ENSG00000236306_16 (sequence is synthesized)
gtttacatttcattaattatgggcatgttaataacaactcttaaccccaaacattaccacagttcagggacaaaggttattaaggaggatataaattctctatatgtactggatggctcc

SEQ ID NO: 809916 - DNA, 120 bp, Artificial Sequence
  ENSG00000236306_17 (sequence is synthesized)
tagaaatacctgatgttttgcagttgaggcaaaacatcctctaacacaagaatacaatgtttacaaggcatccgaggacctttccaatcaggaataacagcacagaactcaaagaggtca

SEQ ID NO: 809917 - DNA, 120 bp, Artificial Sequence
  ENSG00000236306_18 (sequence is synthesized)
acacagactagagtacgaagcaaaccagaaggggttatgagtctcatgctctaccaactgagctagtcaggtgaccatagaagagaaacaggacacagaagtgacccaattacttcccag

SEQ ID NO: 809918 - DNA, 120 bp, Artificial Sequence
  ENSG00000236306_19 (sequence is synthesized)
tcctcaaactggagttaggactcatcactaataaggaaaattgctgattattgttcatacttgaatatggtatgtaggtgattatgtatacatttaagttaatcagtcactgcattcatt

SEQ ID NO: 809919 - DNA, 120 bp, Artificial Sequence
  ENSG00000236306_20 (sequence is synthesized)
taaccattttgaaattcagttgtttttaatacatttatttgattgaaaagttaagattaaaacaaattaaaaacccaaatgtacatcagcaatggatcattcttacaattctatacaatt

SEQ ID NO: 809920 - DNA, 120 bp, Artificial Sequence
  ENSG00000236306_21 (sequence is synthesized)
tcattcttacaattctatacaattgaatactaataaacaataaaaagaagaagctatagttacactaaataaggatcttcagtaaaagaagtcaaacacaagtttatctaatattttatt

SEQ ID NO: 809921 - DNA, 120 bp, Artificial Sequence
  ENSG00000236304_0 (sequence is synthesized)
gcttctcactatttttaagacggacaagacttgagtccagctgaagtctgagaggaagacgtaaacagggagaggctggaggcagaagagagcatgacggggctttatactgttggttaa

SEQ ID NO: 809922 - DNA, 120 bp, Artificial Sequence
  ENSG00000236304_1 (sequence is synthesized)
acttctgccggcggacgcagcagcaggcggccagcgtggtgaggaggatggcagagaccagtatgaaggcctccaggaaccccagcctttcccagaaaaaggtctgacttccacaatcac

SEQ ID NO: 809923 - DNA, 120 bp, Artificial Sequence
  ENSG00000236304_2 (sequence is synthesized)
cgggctcaggctcaccgcccccagcttctgtctccgccaacccgttctgacccactcactgctaaatgcctgacaactgctcaaaagctctactctgacaatgaggcagcttggcttaaa

SEQ ID NO: 809924 - DNA, 120 bp, Artificial Sequence
  ENSG00000236304_3 (sequence is synthesized)
cttctccacggtgaagtccaggatccccagcagggccttcgaggctgtttgtagcccctgccaacctgtcccccacctcccaccccagcccacatgcagtgaccacagctgaccactgcc

SEQ ID NO: 809925 - DNA, 120 bp, Artificial Sequence
  ENSG00000236304_4 (sequence is synthesized)
catcatgcgctcccacacccactgctggggcctgctccctgagctggttatgccatccccaaccagatccacacatgaactcttcacactgagcttcagggcctcctccaccagggagcc

SEQ ID NO: 809926 - DNA, 120 bp, Artificial Sequence
  ENSG00000236304_5 (sequence is synthesized)
gatgtgcatgccttggacctgactagcaagtcaatttttcctaatgaatgagtcccagacatcatcagtttagtaaaggtctgaggcactgaatcaatcacttctctaggaggaaagaaa

SEQ ID NO: 809927 - DNA, 120 bp, Artificial Sequence
  ENSG00000236304_6 (sequence is synthesized)
atgcataattgatattttcaaaatatagtcaaagacgggtagagcaagaagagttcagctgacccacttcccagatgtgaacactgaggcctgaagatggcagtgacttgcgtgaattca

SEQ ID NO: 809928 - DNA, 120 bp, Artificial Sequence
  ENSG00000236304_7 (sequence is synthesized)
cagtgagccagtggctgagctggtagggagggaacacaagccggtgtgttcctcccctggtccagctctgcgcttcctcctgagagccccaaggtgagtagggggaggaagagacctgcc

SEQ ID NO: 809929 - DNA, 120 bp, Artificial Sequence
  ENSG00000236304_8 (sequence is synthesized)
cagcctcaggcctccgtgtggctcttcttactccatgcagcacagtgactccatgtagcctccaagggaggcagcttcacaggggcctcaggaggcccagggatgccccgtcagttgggc

SEQ ID NO: 809930 - DNA, 120 bp, Artificial Sequence
  ENSG00000236304_9 (sequence is synthesized)
acctgtgtgaacctgaaacctgcccagctgccttgcccatccttgcccttcctccctcacaacctctctgtctgcaggggccactaaacatagcctcctcctcacagcccttaccccctg

SEQ ID NO: 809931 - DNA, 120 bp, Artificial Sequence
  ENSG00000236304_10 (sequence is synthesized)
gggcattccttacttaaagcagaaacaacaaaatgacctgtgatggagccccagctgtgtcaggctgcgtgctgagtgcagagaccccctaccccattaaatcttcccaggcattgttca

SEQ ID NO: 809932 - DNA, 120 bp, Artificial Sequence
  ENSG00000233153_0 (sequence is synthesized)
cgttggcctggaaacttcttccaggctaagcctgagtcttcaccagacactgcagcacgaaggcccttctgccttttggctcgccctggcccagaatgcgcaccagccggtagagaggag

SEQ ID NO: 809933 - DNA, 120 bp, Artificial Sequence
  ENSG00000233153_1 (sequence is synthesized)
cttcgggccgtttagccctggggcaagagaaagaggcccactgcaatatgctgtgaagaatacataagaagtcaaactgttgacctcttttccccagcccgttccaaaactacatccctg

SEQ ID NO: 809934 - DNA, 120 bp, Artificial Sequence
  ENSG00000233153_2 (sequence is synthesized)
gtgcacctctacggaaagttcagatgaaagagctaattccccttgatctctcttcttgttcagagtggaggaaaaacatataccatcccttccatcaatcctcagcataactttgccagg

SEQ ID NO: 809935 - DNA, 120 bp, Artificial Sequence
  ENSG00000233153_3 (sequence is synthesized)
gacactggtaacaagctacttttacctcagaagttggagagtatcacttgacccacattgtgtatgtgtaaatatctttattcagtgtatatacaatatattcttaatttgactctcaaa

SEQ ID NO: 809936 - DNA, 120 bp, Artificial Sequence
  ENSG00000233153_4 (sequence is synthesized)
ggtgcaggcagtgggacgaggaggccttttacccccatccaccgcagcccttgacttcacgctcgcctcgaagctttcgcaaagtagatacggggactgaccctgttgacacactaaccc

SEQ ID NO: 809937 - DNA, 120 bp, Artificial Sequence
  ENSG00000233153_5 (sequence is synthesized)
agtatgaaacattgttttccaaatactgtcagcaagctattgaatatgttgttcctgatttatgaatgagattttcatcagcagaaacttatgacaaatgaccaattacattgtcactgc

SEQ ID NO: 809938 - DNA, 120 bp, Artificial Sequence
  ENSG00000278816_0 (sequence is synthesized)
agagcactgcattgaaagggatctgaggctacatctgcactcagtggcaaagagtgttgtgatcaattagtaatgtctgccacaggcagagaaatgagctgtgaataatgtgccatcttt

SEQ ID NO: 809939 - DNA, 120 bp, Artificial Sequence
  ENSG00000278816_1 (sequence is synthesized)
tgatatcataatatgttatacaagcatacaaatgaatgtcttcatatttttgatagcataaattccaggctgtattgtgttttttaaaaggcaagtttggagaataaactgtatactaca

SEQ ID NO: 809940 - DNA, 120 bp, Artificial Sequence
  ENSG00000278817_0 (sequence is synthesized)
cgcgaggcgcgccgcgatcggggactgtcctaagacgggcggggcgcgctgcgctagggactgtcataaaaggggcgggacgcgccgcggtcgggatgacgtgagctgggggcgctcgtc

SEQ ID NO: 809941 - DNA, 120 bp, Artificial Sequence
  ENSG00000278817_1 (sequence is synthesized)
gctgcagccggcggctagcgggcgtccgcgccatggagcgctacgcgggcgccttggaggaggtggcggacggtgcccggcagcaggagcgacactaccagctgctgtcggcgttacaga

SEQ ID NO: 809942 - DNA, 120 bp, Artificial Sequence
  ENSG00000278817_2 (sequence is synthesized)
gcctggtgaaggagttgcccagctcattccagcagcgcttgtcctacaccacgctgagcgacctggccctggcgcttctcgacggcaccgtgttcgaaatcgtgcaggggctactggaga

SEQ ID NO: 809943 - DNA, 120 bp, Artificial Sequence
  ENSG00000278817_3 (sequence is synthesized)
tccagcacctcaccgaaaagagcctgtacaaccagcgcctgcgcctacagaacgagcatcgagtgctcaggcaggcgctgcggcagaagcaccaggaagcccagcaggcctgccggcccc

SEQ ID NO: 809944 - DNA, 120 bp, Artificial Sequence
  ENSG00000278817_4 (sequence is synthesized)
ataacctgcctgtgcttcaggcggctcagcagcgagaactagaggcggtggagcaccggatccgtgaggagcagcgggcgatggaccagaagatcgtcctggagctggaccggaaggtgg

SEQ ID NO: 809945 - DNA, 120 bp, Artificial Sequence
  ENSG00000278817_5 (sequence is synthesized)
cacactggagaaggcgggggtggctggcttctacgtgaccaccaacccacaggagctgatgctgcagatgaacctgctggaactcatccggaagctgcagcagaggggctgctgggcagg

SEQ ID NO: 809946 - DNA, 120 bp, Artificial Sequence
  ENSG00000278817_6 (sequence is synthesized)
gaaggcagccctggggctaggaggtccctggcagttgcctgctgcccagtgtgaccagaaaggcagccctgtcccaccatagccacaggcagcagaagtctgggcagagttcatcttctt

SEQ ID NO: 809947 - DNA, 120 bp, Artificial Sequence
  ENSG00000278817_7 (sequence is synthesized)
gacctttggccactgccttcccagctgcccgcagggggttccccctgctgaggagagaccaggtggaccccagctgcctgtcacccttcatctgggacttgctgtcaaaccctaggatag

SEQ ID NO: 809948 - DNA, 120 bp, Artificial Sequence
  ENSG00000278817_8 (sequence is synthesized)
tctcataaaggggaggctgggccagcctgctgctgtctgcttcagggccaggcagagagtgaggctgggggttctcacaccttactccaccgggcacatcccaacctgcactggggccca

SEQ ID NO: 809949 - DNA, 120 bp, Artificial Sequence
  ENSG00000278817_9 (sequence is synthesized)
ctcgagtgcttgttctggtctcagccgctcccttggcagctgcagcccccatgcagaagaggctcccaggcccaagctctgtgtgacccagagaaataaagatgcctcagtgtggcccgc

SEQ ID NO: 809950 - DNA, 120 bp, Artificial Sequence
  ENSG00000235198_0 (sequence is synthesized)
ccaaagattggatgaaccagtggcaagaaaatgccaggtggaaacatcccaacagacagtccatgagcgatggtggaactctgtgctgcaccacccacatgcctcgcagctgagtccttc

SEQ ID NO: 809951 - DNA, 120 bp, Artificial Sequence
  ENSG00000235198_1 (sequence is synthesized)
catcacggacctatccggctgagaagttccattggtccagctccttcactacccagcacaggtaatgacaacgcacttgaggaaactcgataggttggctaccttgaaatggagaaggag

SEQ ID NO: 809952 - DNA, 120 bp, Artificial Sequence
  ENSG00000235198_2 (sequence is synthesized)
gtcaagaaacacatatcctaactttcagaaggaactgtctgggataattaatcaacacatcaccaacaccaagggattgttttatatcagaagacgtataattaaaaaaaaacaatagca

SEQ ID NO: 809953 - DNA, 120 bp, Artificial Sequence
  ENSG00000267857_0 (sequence is synthesized)
gcggccgccgccgcggcactgctacgggacgagccggagcgcttggccatggcggcccgatccgcactggcgctgctgctgctgctgccagtcctgctcctgccggtgcagagccgctca

SEQ ID NO: 809954 - DNA, 120 bp, Artificial Sequence
  ENSG00000267857_1 (sequence is synthesized)
gagcccgagaccaccgcgcccacccctaccccaatcccgggtggcaactcgtcagtgagcaggcccctgcccagcatcgagctccacgcctgcggcccataccccaaaccaggcctgctc

SEQ ID NO: 809955 - DNA, 120 bp, Artificial Sequence
  ENSG00000267857_2 (sequence is synthesized)
ggccccgctggccctgtggcccattctcctgtagggacgcccagccagccacctctaagtcgccgctgggactggcctgccccattgagcaacagagacgcttgacagccgcccgcctcc

SEQ ID NO: 809956 - DNA, 120 bp, Artificial Sequence
  ENSG00000267857_3 (sequence is synthesized)
attccttgacttcacccagaaatgggtccagaaaactgaatcccaccagcactggtttggagcaaccggacaccgaggtttcacctccagggattccatgaagagcctcaatggagatgc

SEQ ID NO: 809957 - DNA, 120 bp, Artificial Sequence
  ENSG00000267857_4 (sequence is synthesized)
cacatcctactgagttaaagatgggctgaggaacttgggtacccacaagtctgccttgggaatcaaaagaaaatatttacctttagtttggttcattaaatgcatgaagtcaaaatatga

SEQ ID NO: 809958 - DNA, 89 bp, Artificial Sequence
  ENSG00000267852_0 (sequence is synthesized)
gggcggggcgctcccggggacctggggctgctgctccccgagccgtagtggtaccatctaggctcactgcagcctccacctcctgggtt

SEQ ID NO: 809959 - DNA, 120 bp, Artificial Sequence
  ENSG00000267852_1 (sequence is synthesized)
gtgatcctcctgcctcagcctcccgagtgctggaattacagctttgcagaggcaagcgtctatgatttaaatgctagctttgccgcttactggctgaaagactttaaatgacaataacaa

SEQ ID NO: 809960 - DNA, 120 bp, Artificial Sequence
  ENSG00000267852_2 (sequence is synthesized)
aataacaaaaaatgaagaggatgatgatgatgatacaagataccattgcccgtgtgtaccagacatcatgctaagtgagtgctacccacatcatttttctttcttttcttttcttttctt

SEQ ID NO: 809961 - DNA, 120 bp, Artificial Sequence
  ENSG00000267858_0 (sequence is synthesized)
gttagtcgccatctttgagtggggcagacgtgggccgcttttgctcgcggtcacttcatcttaagttgtatatatgtgcagagcgcggcgcgggtggtcacctccgctgctgccgccacc

SEQ ID NO: 809962 - DNA, 120 bp, Artificial Sequence
  ENSG00000267858_1 (sequence is synthesized)
cgcccggcctgcctttgaccctatgggtcacagacaaggcagggtgatcgcggcaagaccctgagtgagactagatgcgttacccagagggtgcgaggtcgagtaccttccctgtcccat

SEQ ID NO: 809963 - DNA, 120 bp, Artificial Sequence
  ENSG00000267858_2 (sequence is synthesized)
cccaggaggccatccaggataccaggactgggagagaatgcccagtggtgattcctgcatagtcctaggaggtgtcttgggcccaggctctggagttggaggctcagtttcaggtagggg

SEQ ID NO: 809964 - DNA, 120 bp, Artificial Sequence
  ENSG00000267858_3 (sequence is synthesized)
ctggaaactggagggctccatcttctctgataggacctcctggccctgcacctggactgtgacctggggaggtgcccccaccatcagaagtcctaccagagagtaaggctggccgcaacc

SEQ ID NO: 809965 - DNA, 120 bp, Artificial Sequence
  ENSG00000267858_4 (sequence is synthesized)
tctgattgaggtaaactaacaaaacatgtattgtgccagagagtggtaagcactgtggagggttacagtggtgtaggggaagacctgtcggggtggacacttggggaacgcgacgtgggg

SEQ ID NO: 809966 - DNA, 120 bp, Artificial Sequence
  ENSG00000267858_5 (sequence is synthesized)
gcggaatcgggccgctattggcgtgggcctcaagttccagcggacacgcactgcagcctctgcgcttcccccactatctggaaaaggggatggaggcgggggtcagcttcccatccaatc

SEQ ID NO: 809967 - DNA, 120 bp, Artificial Sequence
  ENSG00000267858_6 (sequence is synthesized)
ctgccggtcagcgacttccggccgtcaccacggaaactgccagccccgtgagcgcatggtgtggcacttgcctgcggaggggcccaggcgccactcctctgattctgcagatgctccccc

SEQ ID NO: 809968 - DNA, 120 bp, Artificial Sequence
  ENSG00000267858_7 (sequence is synthesized)
aggagtggcttctggccaaggccaagccccttctttgaaactgcctttcagcctgtgttacctgcacccaagtcacccactggagggttgggggagaggggctgtgtgaaggacctggac

SEQ ID NO: 809969 - DNA, 120 bp, Artificial Sequence
  ENSG00000267858_8 (sequence is synthesized)
aatgggatggaaggggaagatggctagggcaaaacaggcaatggcactgggtcctggagacgctgccctgaagcctgcagtatgctgaacttatgctctcagcatctgtccactttcacc

SEQ ID NO: 809970 - DNA, 120 bp, Artificial Sequence
  ENSG00000267858_9 (sequence is synthesized)
taagctgcgtttccactggtttgctgctgaatctactcctgactgaaaccttccaatgtgcatggggccagggtgggagaagccttcagctctagcgatgggaatgatcaccacagggca

SEQ ID NO: 809971 - DNA, 120 bp, Artificial Sequence
  ENSG00000267858_10 (sequence is synthesized)
gggaaactggcccagggcctgcagcctttgcttctcagactggctggggttccatctgcagggtcctacaccctcatcacctgctgcttgtgaacacgagaacaggaaagtcttgaaaaa

SEQ ID NO: 809972 - DNA, 120 bp, Artificial Sequence
  ENSG00000267858_11 (sequence is synthesized)
tctggcaaagcgtggtgctgcccagggtgaggccgagctggatgatgctccagtcctgaaccccactcgtggacactcactcacccatctccggggtccgcccggctcccggcgcagccc

SEQ ID NO: 809973 - DNA, 120 bp, Artificial Sequence
  ENSG00000267858_12 (sequence is synthesized)
ccgcctcatcctgggggccaagcctccactcttcaaggtgccaagtcaacctgaaaccctgggagagacttgggtcatagccaagatggcaggtacctacggagggtcccgaaatacact

SEQ ID NO: 809974 - DNA, 120 bp, Artificial Sequence
  ENSG00000267858_13 (sequence is synthesized)
tcccagaagtccaggcggcaacttccgctccagggtgccaagccctgggcgctcccgcaaggactgcccggattcgttccccgcgcttccggtctcactggggagccggaatccccgagt

SEQ ID NO: 809975 - DNA, 120 bp, Artificial Sequence
  ENSG00000267858_14 (sequence is synthesized)
ctgcagccaccgcccccgtccacacgatagccctcccggttaagaggaccccgccctcacctctgcgctcagcgggccgctccgcgctcctgagcacgcgcagtcttcgacttccccctc

SEQ ID NO: 809976 - DNA, 120 bp, Artificial Sequence
  ENSG00000267858_15 (sequence is synthesized)
ttgcctaggctgttcttgaactcctgggctcaagcagatgatcctcttaccttgacctcccgaagtgctgggacttacagctgcggctttaggaaggaatctgcgtttatgaaggggatg

SEQ ID NO: 809977 - DNA, 120 bp, Artificial Sequence
  ENSG00000267858_16 (sequence is synthesized)
gtttctacaccctctcctcccttcccctagcggtggtcgcaatgatcaggtcatactcctggccgcttcttcccatgctccccgcctcgaatccgtgcgtcggcatgcgcaagcctctca

SEQ ID NO: 809978 - DNA, 120 bp, Artificial Sequence
  ENSG00000267858_17 (sequence is synthesized)
ggtacaacagacggcagcaccgcctaccagatcgcgcatgccccccaccacgttttcctcacttctctacgggccttcctgagattagcaggatcctgcaccaatcacggccgtcattag

SEQ ID NO: 809979 - DNA, 120 bp, Artificial Sequence
  ENSG00000267858_18 (sequence is synthesized)
aggggcctctgctacttcctagaccgcaaaatggagaaaggcttggcccgatgctttccggcagatgtagtcagcaggcccttcgtgtgtacgtgcgcgcgcggcgcgatgacgttcctc

SEQ ID NO: 809980 - DNA, 120 bp, Artificial Sequence
  ENSG00000267858_19 (sequence is synthesized)
tgtgatcatgggcgaggggcgggccctgaacgtctccatggtaacctggggacacgactcgacatcgcctgggtaacccggagacgcggcgggcgttgaaaatgcaatggggcatgtggg

SEQ ID NO: 809981 - DNA, 120 bp, Artificial Sequence
  ENSG00000267858_20 (sequence is synthesized)
atgaagaggtggggaagggtactggggcagagagatgccgatcgatagaaacagcgaggagagacggagagagaccagagactcaagggcaaagagagacgaaggaccggcgggaggaag

SEQ ID NO: 809982 - DNA, 120 bp, Artificial Sequence
  ENSG00000267858_21 (sequence is synthesized)
agagagagagacagagagacagactcacagactgggaggaccggagactcgacgcgaggagagacagtgaaaataagtgaacaaacatagagacacgggtccaagttataagagggctga

SEQ ID NO: 809983 - DNA, 120 bp, Artificial Sequence
  ENSG00000267858_22 (sequence is synthesized)
gtggatcagagggtcagggccgggcaaacaggtgtcagaacagttagcaagagagaggcagatcagaaagggatgcagatgaaagagacacaaagaaggaaacgcagaatgggttcacag

SEQ ID NO: 809984 - DNA, 120 bp, Artificial Sequence
  ENSG00000267858_23 (sequence is synthesized)
agacaagaaatgcagatatccagactcaagaggtagacaagaagggagagggacagaaacaagaagggagaaaagggacagaaattagagatacagtaagatggattgacagttttcgaa

SEQ ID NO: 809985 - DNA, 120 bp, Artificial Sequence
  ENSG00000267858_24 (sequence is synthesized)
gacctagagaaagatgacagcacgaagagagacagggagaatccgaggtaaaactgttaggaaaacttaggagtccagatgctgtccagttatatgctaccctgtacaggttgataggtt

SEQ ID NO: 809986 - DNA, 120 bp, Artificial Sequence
  ENSG00000267858_25 (sequence is synthesized)
tacaggttgataggttgcaaatgctttctgtccagtgtatcgctttgtagctcactaagcagttttgtatccaactttgtgcttttatttcagtgtttttctttttctttctttcttttt

SEQ ID NO: 809987 - DNA, 120 bp, Artificial Sequence
  ENSG00000267858_26 (sequence is synthesized)
gctggaattacaggtgtgagccaccgcggccggccagtgtttattcttcctttcctgtcttcctagaatcatcttgctgcttccctcagtacggtaaataaatcttttgacacatgctca

SEQ ID NO: 809988 - DNA, 120 bp, Artificial Sequence
  ENSG00000235192_0 (sequence is synthesized)
atttggcagagcctcgccaatttggggcgcacctccccttcctgggatgctctcagaaggcaaaccaattcccagaagagagggaaaaacagccacaacagagagaacctttgctgtccc

SEQ ID NO: 809989 - DNA, 120 bp, Artificial Sequence
  ENSG00000235192_1 (sequence is synthesized)
tgtttggaaagagattgggatttcctggagagggcttgcttctactgcaggtttgtttaaaagctcaacatctattctggaagagaacaacgcagactccaggaagatggcgtgtcattt

SEQ ID NO: 809990 - DNA, 120 bp, Artificial Sequence
  ENSG00000235192_2 (sequence is synthesized)
tggaatgtgtcttgctgctcttctcatcaaaggtaaagtcctcttcttcaccttttaacctagagtagctgtgcaactttctttgaccaatcaaatatggtggaagtgatgttgcgtgac

SEQ ID NO: 809991 - DNA, 120 bp, Artificial Sequence
  ENSG00000235192_3 (sequence is synthesized)
gccctgagatcaccacaccatgaagaagtctggggcgaaaggccatgtggagtgagaggctcagcttcccagatgatctcactgagcacagcccccagccacctgccagctcaatgcaac

SEQ ID NO: 809992 - DNA, 120 bp, Artificial Sequence
  ENSG00000235192_4 (sequence is synthesized)
ctggtgatggacccaagcaaataccagcagaagaatcacctggtcaacccacagaatcatgagaaatactaatttgttgttgtcttaagccacagggtgaagactatatttgctcacata

SEQ ID NO: 809993 - DNA, 120 bp, Artificial Sequence
  ENSG00000235192_5 (sequence is synthesized)
aattgtgtccttataacagaaaaagcttcttagggctggtgcggtggcttattcctgtaatcccagcactttgggaggcggacgcaagcagatcacttgagttcaggagttctagaccag

SEQ ID NO: 809994 - DNA, 120 bp, Artificial Sequence
  ENSG00000229876_0 (sequence is synthesized)
ggcaaagttcagcatcatcctctctgctgaaataaccaacatggtgctcattaattggtcatgtgagcactaaggataaccaccctcccctcctcaatcaggatcacaaatgctagcttt

SEQ ID NO: 809995 - DNA, 120 bp, Artificial Sequence
  ENSG00000229876_1 (sequence is synthesized)
catatggatttcaagctgggtgaaatgactttttttgcttgtaaagaagaaatgatgatggaggtctcatcaggaagtgatgcagaagactgggacagacgggggtttcaccatgttggc

SEQ ID NO: 809996 - DNA, 81 bp, Artificial Sequence
  ENSG00000229876_2 (sequence is synthesized)
tgcacccagcccatcataagtattttcatgtatcatcatgtattttagaaaatggtattattgactatatatcagttcatt

SEQ ID NO: 809997 - DNA, 120 bp, Artificial Sequence
  ENSG00000229876_3 (sequence is synthesized)
gtatcatcatgtattttagaaaatggtattattgactatatatcagttcattgtgtgcacacattttatttaattaatttgctcttttcagttatttagttttctttttttgttattata

SEQ ID NO: 809998 - DNA, 120 bp, Artificial Sequence
  ENSG00000229876_4 (sequence is synthesized)
atatatgtccttatacataaatctgagtatgaatctaggattatttacttaaaatgaatttccagacacaaattgtggggttaaagtgggaggagcatttttaaagcttttgatatatac

SEQ ID NO: 809999 - DNA, 120 bp, Artificial Sequence
  ENSG00000229876_5 (sequence is synthesized)
cgctaaattgtcttataggaatgtataaattatgaaacaaccagctgtccatgtgagaccatgcatttccttatccaaatgaagttaaagaaattatttgtcagcttttttggtggtatg

SEQ ID NO: 810000 - DNA, 120 bp, Artificial Sequence
  ENSG00000229876_6 (sequence is synthesized)
actttttacaggtttttcttatgtttgttggttgagtttttttttttaatgtctatgcctatcttagtatctatgcctattttaattttttaatgtctatgtactttcttttggagcatg

SEQ ID NO: 810001 - DNA, 120 bp, Artificial Sequence
  ENSG00000229876_7 (sequence is synthesized)
atgtctatgtactttcttttggagcatgttgtatgatattttataaataaaaggtgttaactctgtcattatagtgtaaatatatttcccaatatgtttttaaattttcatttatgatat

SEQ ID NO: 810002 - DNA, 120 bp, Artificial Sequence
  ENSG00000229876_8 (sequence is synthesized)
aatatctatatttaaatgactttgtccagatgtagtgactcatgcctgtaatcacagaattttgagaggctatgtcaagaggattgcttgaggccaggagttcctggccagcctggacga

SEQ ID NO: 810003 - DNA, 120 bp, Artificial Sequence
  ENSG00000229876_9 (sequence is synthesized)
tgaggccaggagttcctggccagcctggacgacacagtgagacccctatctctaaaaaagttttttttcaaacaatcctgccacctcagcttcctaaagtgctgggattacaggcatgaa

SEQ ID NO: 810004 - DNA, 120 bp, Artificial Sequence
  ENSG00000229876_10 (sequence is synthesized)
tccacgtttttacgtatcaatcctgcattcaaacatttactcattctgaaacaaattttagtatatgttataaggtattgatccaaatttttacgtttataaatagttaacatctccaaa

SEQ ID NO: 810005 - DNA, 120 bp, Artificial Sequence
  ENSG00000229876_11 (sequence is synthesized)
tctccaaaccatttattgatattaatttcaccttcatcatattgtaaattatagttttgattttcctttttgacaatgaattatctaagaggatactttagaattttcaaacttaataaa

SEQ ID NO: 810006 - DNA, 120 bp, Artificial Sequence
  ENSG00000224885_0 (sequence is synthesized)
ctggcaggcacagggagtgaaggccagttctccttggagcattctctaacttagtgacctggcctgggagactcctcagtgttcagatggctgtcccctggcaggcacagggagtgaagg

SEQ ID NO: 810007 - DNA, 120 bp, Artificial Sequence
  ENSG00000224885_1 (sequence is synthesized)
ccagttctccttggagtccccgggacctgcctccatgcttgttgttgtgaaggggtcagaaagaagatgtgtgtttgttgccgtctactgcatctcacttggaactgagtcactcatccc

SEQ ID NO: 810008 - DNA, 120 bp, Artificial Sequence
  ENSG00000224885_2 (sequence is synthesized)
tttggaacttttctttcagaaatgctctaaaagtcagcttcagtgccatctgagaaaatctctctgctgtgtttttgtaggatactttttggctcctgataatttagccctatgaatcat

SEQ ID NO: 810009 - DNA, 120 bp, Artificial Sequence
  ENSG00000224885_3 (sequence is synthesized)
ctttttcattcatcaggctggcctctgagatttttgactattttgagaactgtaccctgaaaaacaagatttctcctaatgaagaacacacagaagcctgtgctgttggaattggcactg

SEQ ID NO: 810010 - DNA, 120 bp, Artificial Sequence
  ENSG00000224885_4 (sequence is synthesized)
tccggagttcacagacaagatgggtccaggggaagcaatagatgtaatctgacactagcaagacttggattctctcccacacaacccagccatcaataaaacggcagtatctaggccaga

SEQ ID NO: 810011 - DNA, 120 bp, Artificial Sequence
  ENSG00000224883_0 (sequence is synthesized)
agttttaaagcactacaaaagagtagaaataagaccacccttcatccaatccttccaccagctctcagagctcatcttagaagagccagggtcacagccatttgggggaaagaaatggga

SEQ ID NO: 810012 - DNA, 120 bp, Artificial Sequence
  ENSG00000224883_1 (sequence is synthesized)
tccttggtgctgcccgccaccaggcctgcagcagccccacagccttccgtaccaacgaccatgatgttgaagtcgaaaccggtcttcatggtcttcttgcgcatctgctcgatgatggtg

SEQ ID NO: 810013 - DNA, 120 bp, Artificial Sequence
  ENSG00000224883_2 (sequence is synthesized)
ttgggcctggaagggatcttagtatcatccagtccaggtccctcatttcatagacaaagagactgaggcctggaggagaaagaactcaactaagaacacagagcaggtcagaggtaaaat

SEQ ID NO: 810014 - DNA, 120 bp, Artificial Sequence
  ENSG00000224883_3 (sequence is synthesized)
ctgggccagtgccaggttctctggttgctgggcactttcaaatgcacctcactgctctgaagcccacatctgtgcatctaacccaggggctgctccatcttggcactaatgacatttgag

SEQ ID NO: 810015 - DNA, 120 bp, Artificial Sequence
  ENSG00000229873_0 (sequence is synthesized)
ggactgcgacagtgtggcgttcccagcgcggcaacaaaagtaaccccggcgatgacaggcgcccggcggtaacaaaagtaacaagcggaggccccgtcggcccgccccgggctcccgcag

SEQ ID NO: 810016 - DNA, 120 bp, Artificial Sequence
  ENSG00000229873_1 (sequence is synthesized)
attggggttcagtcggcaccttctacatgacatggtggagtgtgcattacataaagcccccaggttacagacaggacccctggggccaggagaggtgggtgccttgtgatctgcgtcatg

SEQ ID NO: 810017 - DNA, 120 bp, Artificial Sequence
  ENSG00000229873_2 (sequence is synthesized)
gaagcaacgtcaagctgaagacattggggtgcgatggctggccaggacagcttgtctcctcgtccgcacacggaacgctggatttcactctgtgacccagccagcggtctcatctcacag

SEQ ID NO: 810018 - DNA, 120 bp, Artificial Sequence
  ENSG00000229873_3 (sequence is synthesized)
ccgcagctttcagcaggaaggagcccactggtgcctgcctgacctacgagggcccgcaccgttttgccctcctaacattttgtatttgaagtgcttgtcacagtccacaaaataaccact

SEQ ID NO: 810019 - DNA, 120 bp, Artificial Sequence
  ENSG00000229873_4 (sequence is synthesized)
cagaatctgttactattttgtttatatgttgtatcaagtgaatgttaataagtcatctaagtgtatgctttagttataaatcttggaaaaataaaaacttccttttggaggaaaagtgaa

SEQ ID NO: 810020 - DNA, 120 bp, Artificial Sequence
  ENSG00000224888_0 (sequence is synthesized)
tatgccctaaaatctgggccctgggcaagcacacagcaggagagacaggcccccggtgggctatgggcagaacacgagggctccggcaattgggctgacaccgtccctgagcgtcaggga

SEQ ID NO: 810021 - DNA, 120 bp, Artificial Sequence
  ENSG00000224888_1 (sequence is synthesized)
tggccctgccagcacctgccgttctctgggcctcactttccttgaaagggtgggaaaggtggccctgaccccctttccagctctgcgcacctgaagactctcaggacccccaccccaggg

SEQ ID NO: 810022 - DNA, 120 bp, Artificial Sequence
  ENSG00000224888_2 (sequence is synthesized)
ccgtggcttcatttgcttcattcagaaacacattgcaaaatggaaaatcaagggttagggtaaagaaagaaagtagccagaaagagcccccaggccctcccaaggcgacgtggccaacac

SEQ ID NO: 810023 - DNA, 120 bp, Artificial Sequence
  ENSG00000224888_3 (sequence is synthesized)
agagttcccaggccagcccctgccctggacgagcggcctcctggggccactgggccacctggagcagctcccagagctaacagcacaagacagcatagccacattctctggggaggggtt

SEQ ID NO: 810024 - DNA, 120 bp, Artificial Sequence
  ENSG00000224888_4 (sequence is synthesized)
gggggacctggaggccccccatggggtcttggggatcaacgacgcggccactcagctgccctgggggtcttgggggttggtcagtgacatggccactcggctgccctgggggtctcgggg

SEQ ID NO: 810025 - DNA, 120 bp, Artificial Sequence
  ENSG00000224888_5 (sequence is synthesized)
gtcactgacaccgacccgtggatgtcctgggcccccgagggggcggcaggcagaggtgcggcgcgagcatgcgagagcgccaggcggccaccagggggcagcaccggcctccgccccgcc

SEQ ID NO: 810026 - DNA, 120 bp, Artificial Sequence
  ENSG00000224888_6 (sequence is synthesized)
ccccgcacccagccataccttgcagtgtgcggtactcaccaggccgccgcaggacggagctctggccggtcagctcgtgcacgatgcagttatcagcctcggtgtcgggtgctgtgggca

SEQ ID NO: 810027 - DNA, 120 bp, Artificial Sequence
  ENSG00000224888_7 (sequence is synthesized)
ccacgtgctgtgggcaagcagcgctgagccatgcacgggctggccgggcgccccccacgctggcgtctccacctgcctggctgctcacctggtcagactcccgttcctggggccactggt

SEQ ID NO: 810028 - DNA, 120 bp, Artificial Sequence
  ENSG00000224888_8 (sequence is synthesized)
ccagctctgctagctccagctcccgagcctcatacccctttgccgcctccttcctctgcagagaccagcgtcttgagcccaaaccagctccacaccccacccagaggcaggaggtcctga

SEQ ID NO: 810029 - DNA, 120 bp, Artificial Sequence
  ENSG00000224888_9 (sequence is synthesized)
gaccagccccatggcctggcctcagcccacccaccatgggtggcaggtgctcacctggccggaggggcggtacgcgcggagcttgcgcagagaggccgtggcgtagcacagcagcaggag

SEQ ID NO: 810030 - DNA, 120 bp, Artificial Sequence
  ENSG00000224888_10 (sequence is synthesized)
gacgccggggctggcatacacaggccagtccaggccggtgttgaggaccagcgcgtgggggctggagcagttggtgggacccacgaagtccttgagacccagcaccctgtccagagaaga

SEQ ID NO: 810031 - DNA, 120 bp, Artificial Sequence
  ENSG00000224888_11 (sequence is synthesized)
cccgtcacagcctaccaccccagaggcagtggggccacaggggctagacgagccaggtgggcgggaccagggtggcaggaaaaaggggctgtgtggcaagccgttacctagcccagatgc

SEQ ID NO: 810032 - DNA, 120 bp, Artificial Sequence
  ENSG00000224888_12 (sequence is synthesized)
cggcaggcgggagcagagcctgtgccaagggcatctggtagcagtagaggcagatgagatggccggcgccgaagcaccccaccgcgacgcagagtctgctgaagccccgagtgctgatgg

SEQ ID NO: 810033 - DNA, 120 bp, Artificial Sequence
  ENSG00000224888_13 (sequence is synthesized)
gaaagtggcaggcccaccaggtgcagagggccaggaagagcagcagtcatcagggaactcccaagacccctcccagtgtgactgccagtgccccctgcctcggtgcgtacctgccagtgc

SEQ ID NO: 810034 - DNA, 120 bp, Artificial Sequence
  ENSG00000224888_14 (sequence is synthesized)
aagcagtgttacggccaggacccgcccagccgccaccagcagccagtgggccgtgactcggaaacgagcggccagccgtgacctccgtgtaggggccagcgttgctgcttcctgcagccc

SEQ ID NO: 810035 - DNA, 120 bp, Artificial Sequence
  ENSG00000224888_15 (sequence is synthesized)
tgccgtcgggctggcatccacatccctctcatcatcatcctgccaaggtcacggacaggggcaaggtcaggtgtatcgcactgacgccacctctccagcccacacctgcccagccaggag

SEQ ID NO: 810036 - DNA, 120 bp, Artificial Sequence
  ENSG00000224888_16 (sequence is synthesized)
cgtgggaggcggccacatccacagctgctcctctgagggccacaggacagcctccccgggcacaggccccagccgtccctgaggtctgcctgacaccttcctacttcctcactcaagctc

SEQ ID NO: 810037 - DNA, 120 bp, Artificial Sequence
  ENSG00000224888_17 (sequence is synthesized)
acagttcctgcaggccttcctggtagcagctcccaccctggccgaagacccagggtctgtcctgccaagcccaggcacgtgatgaccttgccaggtacagacagaccacagactgtccta

SEQ ID NO: 810038 - DNA, 120 bp, Artificial Sequence
  ENSG00000224888_18 (sequence is synthesized)
agggacatggccaggctccagggtctcctgtgtacccctgccagccttctgggtggctctgcctggaagataggggtggtactcctgccctccccaagcctctggggggacagaggtggc

SEQ ID NO: 810039 - DNA, 120 bp, Artificial Sequence
  ENSG00000224888_19 (sequence is synthesized)
cagctgcctagaagaagtgacaggccggcctggggctggggagagagacctgccgggcctgttttccctggacctgactaaagatttcccagaacacagccatttcccaaacaccaggga

SEQ ID NO: 810040 - DNA, 120 bp, Artificial Sequence
  ENSG00000224888_20 (sequence is synthesized)
aagccaggtgtggtggaaagaacacggctgtcgtcagatgccctggctctggcctggctgccaccggcccagtgtccccatctgtgactcgggggctctcctggtggctgaggcgccagg

SEQ ID NO: 810041 - DNA, 120 bp, Artificial Sequence
  ENSG00000224888_21 (sequence is synthesized)
tgcccgggctgagaccgcaggctgtggggctggacgataggccccaccccagctctgacagtctccgtgctctgcaggccgaggcaagtcacagcctctcggagcctattccccttctgt

SEQ ID NO: 810042 - DNA, 120 bp, Artificial Sequence
  ENSG00000224888_22 (sequence is synthesized)
caaatgggatgggggcttgacgggacagatgaaccagaccagtcctgtcctcacaggcctccagggctgcaggggctgctgggaggctccgaggccagggtaacagggagatcagggcag

SEQ ID NO: 810043 - DNA, 120 bp, Artificial Sequence
  ENSG00000224888_23 (sequence is synthesized)
gagaggcccaggccctgagcccacccctctcagagaccacacagcagctgggggcgaggctggatcagaacgcagggcgccatcgctcaccccacccacagcctggccctggccctggcc

SEQ ID NO: 810044 - DNA, 120 bp, Artificial Sequence
  ENSG00000224888_24 (sequence is synthesized)
ctgggaaatcttctgagcagagccgtgaaaaatgagcatttctgggagtggaaagaacagaggcagctgctgtgagagaacaggtgtgaggccaccgaggggcaggcccggccctgactt

SEQ ID NO: 810045 - DNA, 120 bp, Artificial Sequence
  ENSG00000224888_25 (sequence is synthesized)
ggggtatgaggccaccgaggggcaggcccggccctgacttggggtgtgaggccaccgaggggcaggcccggccctgacttgggccccacgtgccgcagccatgctgcagacgcccctcac

SEQ ID NO: 810046 - DNA, 120 bp, Artificial Sequence
  ENSG00000224888_26 (sequence is synthesized)
cctcctctagcggccagcacccctcgggctggctggcacactccgtcgcatgcctgcaaacacgtgtgtgtgttgcccatatgtgggagtgagggtcgcccgggggccctgccaggccgg

SEQ ID NO: 810047 - DNA, 120 bp, Artificial Sequence
  ENSG00000224888_27 (sequence is synthesized)
gtcatggggcttctagatctttcggaacggtatcctgcaggtgcctggtgcccccagctcactctgaagtctgtccacgctggccgcccagggcgcagctgcacactcaggctcccatca

SEQ ID NO: 810048 - DNA, 120 bp, Artificial Sequence
  ENSG00000224888_28 (sequence is synthesized)
caccaagatgaagatgaccagagtccagccacccagccccttcccagcagccaaactctaggaagctcatgccccatgcccccatcagcatggaggggctgacgagggaggggcgggtct

SEQ ID NO: 810049 - DNA, 120 bp, Artificial Sequence
  ENSG00000224888_29 (sequence is synthesized)
cttggaggacaggcagcagcacagtcctcatgagcgctggaccccctcaaatgcccggaaaagccacttgacctccaggtccccgttcccacttctgaaatgcgggcaccagccttgccc

SEQ ID NO: 810050 - DNA, 120 bp, Artificial Sequence
  ENSG00000224888_30 (sequence is synthesized)
catggggtggcgacaggacaggcaggagggcaggccgcctctgcaggctgagcaggtgtactcgacctaccgtgtggcttggggaacccctttccctctcgggactcctctagaagttga

SEQ ID NO: 810051 - DNA, 120 bp, Artificial Sequence
  ENSG00000224888_31 (sequence is synthesized)
ggcccatgtgcgtggcgagcatcagctatctgacgagtgggcactgggagggtgaggtgggaggaggctgggtgcccggggcagggagttcgtgggccaggacacccaggtggccataaa

SEQ ID NO: 810052 - DNA, 120 bp, Artificial Sequence
  ENSG00000224888_32 (sequence is synthesized)
tcctggctgagcctggggatggcaagtgtgggcccaggcagggacgagagggtctgagcagtcaacgttgggtgtcgcaggccccagctcatgccctgtccgtgtgagggggccatagct

SEQ ID NO: 810053 - DNA, 120 bp, Artificial Sequence
  ENSG00000224888_33 (sequence is synthesized)
cagagattcccggggccggacctccaagtcttgtagcagctaaagttcactctgcctcccactccgaggacagaggccctgcttcaggcccgtcgctcctggggtccaggcccctgctgg

SEQ ID NO: 810054 - DNA, 120 bp, Artificial Sequence
  ENSG00000224888_34 (sequence is synthesized)
ggctctgggccgacagcctgtttgcctgtaagtgcatggggcctgctggggccgccccttctcagcccttctgcagtggctctccagccagacccactgcccagcactgcaggtttccac

SEQ ID NO: 810055 - DNA, 120 bp, Artificial Sequence
  ENSG00000224888_35 (sequence is synthesized)
caccgcgtggccccaaataattcccctgtgaagagttcctaagggcacagatgccatgtcggggcgtggaggtttctgactagaggcagagcccgagtagaaacaggtctgaacggatgg

SEQ ID NO: 810056 - DNA, 120 bp, Artificial Sequence
  ENSG00000224888_36 (sequence is synthesized)
aactgcaggctgggccccggggtgggatttggaacttcctcctctctttaacaccaacttacaaccaaaacgtctacatctgttttaaaaagattaaaataaccctcaaaatggctgaga

SEQ ID NO: 810057 - DNA, 120 bp, Artificial Sequence
  ENSG00000224888_37 (sequence is synthesized)
gactagagcaaacatcagaccagatcccgtctgaaaaccaaatggccacaaagaagggtgctgaggccggggctgtttgaatgcagaggacacgtttgacgatggcactgccaggagacg

SEQ ID NO: 810058 - DNA, 120 bp, Artificial Sequence
  ENSG00000224888_38 (sequence is synthesized)
ggaccacgggtgtggggctgtgggctcagacaccctcacccaggagacgcatgctcgaggcagcacttgggtgtgaggcatcacggccgacccgcacggggcccggagaggacgcagtgc

SEQ ID NO: 810059 - DNA, 120 bp, Artificial Sequence
  ENSG00000235191_0 (sequence is synthesized)
tagttttcactgagctcccatccagggggatttaaggggactgcaggaggaaacaagtggctgatttgggcgtccctccaggtgcccgaggcttccaagatgctcacctccttggtgaag

SEQ ID NO: 810060 - DNA, 120 bp, Artificial Sequence
  ENSG00000235191_1 (sequence is synthesized)
tcagatgatccacctgtacatctggaagagagggaagagtccaacacctgagggcatgttctttcagaacccccatcttgggccagacatgatccaaagaagtcacggacagcactaggg

SEQ ID NO: 810061 - DNA, 120 bp, Artificial Sequence
  ENSG00000235191_2 (sequence is synthesized)
aagcccagaagacagcttgaacctggggcaatcagggaaggcttcctggaggaggtgatcccacgactgagtctgatgcttacaataataaccataataaaaactaacatgtagtgccta

SEQ ID NO: 810062 - DNA, 120 bp, Artificial Sequence
  ENSG00000224771_0 (sequence is synthesized)
agacgtgtgcagaggtggaaaatggcagttgcccgcagcgcgttcccagcggaggtcgagccaggtgacgctctgccttcctgcttcaagctcgtcccataagcaggggtgccttctgca

SEQ ID NO: 810063 - DNA, 120 bp, Artificial Sequence
  ENSG00000224771_1 (sequence is synthesized)
gtctgtgcagtaccgcatatttccccatctgtgtgctttctgttggtggttttgctgtttgaaatggccccgaagcgtggtgctgccgtgctgttttgtgttcctcagcccagaaggccc

SEQ ID NO: 810064 - DNA, 120 bp, Artificial Sequence
  ENSG00000224771_2 (sequence is synthesized)
ggctgtgccctacggagaaaaccgtgtgttaggcagcttcatccaggcgtgagttatggtgccgttggccgggagcccaacgttaatgagccaacgatagatattaaataagagaacttt

SEQ ID NO: 810065 - DNA, 120 bp, Artificial Sequence
  ENSG00000224771_3 (sequence is synthesized)
taaccttgggttctcactaagcatcaattctgtgactggctctgtggggtagagatgaaaaggctcactcagttccagcccctgcagatcccccaggaccctggcagcagcagatctatg

SEQ ID NO: 810066 - DNA, 120 bp, Artificial Sequence
  ENSG00000224771_4 (sequence is synthesized)
agcccacatttccccctgcttgtgaggatcacaccaagagagacattcacatcctggcctcacaaagaagagatggcaaagtggaaaaaggccggagtccccaaccctgagccctttacc

SEQ ID NO: 810067 - DNA, 120 bp, Artificial Sequence
  ENSG00000224771_5 (sequence is synthesized)
ctgtctcagtcttttataacgaggtgtgtgtgcttgggcaatgcctctctcttctgggactcagtgtacccatctctgctgtggggaggttggactagatgagagtttcccaaactccag

SEQ ID NO: 810068 - DNA, 120 bp, Artificial Sequence
  ENSG00000224771_6 (sequence is synthesized)
ttgtttctttccctccctccacacctggagatcagaacacctgtactaaaaagtactgaaaatctttattcaaatgagctcactttttttcaaccaaaataaacttattttagagtgaaa

SEQ ID NO: 810069 - DNA, 120 bp, Artificial Sequence
  ENSG00000238224_0 (sequence is synthesized)
tttgtcagactcttacattgacagggtgaagacactacccaggagaaaacagtgagggcagggttcaaggccaactcccacacagtcaggagaaatgtggatgcaattgtgctgtcgatt

SEQ ID NO: 810070 - DNA, 120 bp, Artificial Sequence
  ENSG00000238224_1 (sequence is synthesized)
attttaaaggtctgcatctcctcatccctatccgaatgcgtttccttctttaagaacgtgattctaaacggaagcgctctacatggtgtgagcctgttaccaagaatacatctcccgaga

SEQ ID NO: 810071 - DNA, 120 bp, Artificial Sequence
  ENSG00000272717_0 (sequence is synthesized)
ggaagctaaggaagcgtttctgacgctctggcgcctggacttcctctcaccctcgcccccacatcaccccgtcgccaccgggagctgcacgagtgcgacacgcaagggagcgcaggtgtc

SEQ ID NO: 810072 - DNA, 120 bp, Artificial Sequence
  ENSG00000272717_1 (sequence is synthesized)
ctcgcggtcccgcatcacatccgcaagccgatttccccagctcgggggctgttatctggcccggattccgcaggatggcgggtccaccccagcgcccccactccccgccctccttcgggt

SEQ ID NO: 810073 - DNA, 120 bp, Artificial Sequence
  ENSG00000272717_2 (sequence is synthesized)
cgccaggccctcgggtgattcagaaattcatcaaatccaaatggcagcgggctctctgtcaggcaggaaacaagccgcaccgaaggctcggcaggttcctccttgctgctgtggtaatgg

SEQ ID NO: 810074 - DNA, 120 bp, Artificial Sequence
  ENSG00000272717_3 (sequence is synthesized)
gagccgccgagtggagctaacgaggaaggaaggaccctccgtctggcgcgcctctttcccgcgcctcccgccctgtacgtgtgatgtccccagctgtctctctgtttctccaagtgccaa

SEQ ID NO: 810075 - DNA, 120 bp, Artificial Sequence
  ENSG00000272717_4 (sequence is synthesized)
ccacttcacagattcaggcgtcctcaagtggagaaaaccattgggcacccggcttccggcccggccacttagtgtcgttatggcgctgcctcttacaggtggcggtaaagggcgactgta

SEQ ID NO: 810076 - DNA, 120 bp, Artificial Sequence
  ENSG00000272717_5 (sequence is synthesized)
aatagccgattaaacagatgtaaatgtacacaatgtaccgtggaattaccgggtgccgctctgggcacccgccaagaacagctactgcatggaggggaggagggagcaaaaaaaaagtaa

SEQ ID NO: 810077 - DNA, 120 bp, Artificial Sequence
  ENSG00000272717_6 (sequence is synthesized)
ttccattttgttttctgatcaatgaatgagactttggggatttcaaaatacttccagcgcccaggagactactccttgcttttggctctgtgcttaaatggtagatatttttgtcaagta

SEQ ID NO: 810078 - DNA, 120 bp, Artificial Sequence
  ENSG00000238221_0 (sequence is synthesized)
gcttctccagctttctggcaataccaaggggcagacccgggaatgggttgttcagtcactgctgtaccgcccatgagcggcagagggcagcaaaacacactcatcggacgggcatcaagg

SEQ ID NO: 810079 - DNA, 120 bp, Artificial Sequence
  ENSG00000238221_1 (sequence is synthesized)
gagcctgaggataaccagagcttgaaaatgcaatcaacccatgaaaatgtttttaaagaccatgattctgttcatcaaggagacatttaaagttataagaatcatctgaagtatgaatga

SEQ ID NO: 810080 - DNA, 120 bp, Artificial Sequence
  ENSG00000238221_2 (sequence is synthesized)
aatctatacagttcattccatcgtcaacatctaaaacaatgctgaaacagagcaagctttccagtcttactttacgagcaaaatcaagatctacatactacaactttcacttacgtttct

SEQ ID NO: 810081 - DNA, 120 bp, Artificial Sequence
  ENSG00000238221_3 (sequence is synthesized)
ccatctaacccatcctctctttcaataactgtaactgtttgattgaagactgcatcttggaatacattgccctgtttaagaaaataaaataatcagaaaaatctaaatgcaataaaggaa

SEQ ID NO: 810082 - DNA, 120 bp, Artificial Sequence
  ENSG00000235652_0 (sequence is synthesized)
ccctgtcgggttttacctccccccgggagagctcagccctggatcccggcgggcggcggagcctctctggagcccggacgggacagcccaccagggtctgcttctgtgaggggccgaggc

SEQ ID NO: 810083 - DNA, 120 bp, Artificial Sequence
  ENSG00000235652_1 (sequence is synthesized)
gccgaggcgtcattccgcgaaggctcttcattcgatgtacaaaaaccacaagattatctaaatagatgcagaaaaggccttcgataaaaatcctcattccttcatgttaaaaactctcaa

SEQ ID NO: 810084 - DNA, 120 bp, Artificial Sequence
  ENSG00000235652_2 (sequence is synthesized)
gaaaaccagcacaagacaagtttgccctctctcccaacccctattcaatatagtattggaagttatggccacggcaatcgggcaagagaaaaaaatgaagagtatttaaatgggaaaaga

SEQ ID NO: 810085 - DNA, 120 bp, Artificial Sequence
  ENSG00000235652_3 (sequence is synthesized)
aaatgaagagtatttaaatgggaaaagaggaagtcaaactatctttttttgcaggtgacataatcctatatctagaaaacccattgtctcaacccaaaagcttcttaagctgataagcaa

SEQ ID NO: 810086 - DNA, 120 bp, Artificial Sequence
  ENSG00000235652_4 (sequence is synthesized)
aatcaaagtgcaaaaattgctatacaccaacaacaggcaagccaagagccaaatcatgaatgagctttgattcacaattgctacaaaaagaacaaaatacctaggaatacagctaacaag

SEQ ID NO: 810087 - DNA, 120 bp, Artificial Sequence
  ENSG00000235652_5 (sequence is synthesized)
gcagtcccggcggggacgcgcacgccgccctctgaccccgcagcgtcgtggctagagtagggtctggagagagctcccactgtggcgagtcctgtcgttggattcccgcggcgccccgta

SEQ ID NO: 810088 - DNA, 120 bp, Artificial Sequence
  ENSG00000235652_6 (sequence is synthesized)
aggctccgccccggcggtgctaccaaaccctgttcgattttagaatcgtacattcccagagggaatcctagacccctcattttacagttgaggaaacaggcccaagtagcatgacttgtt

SEQ ID NO: 810089 - DNA, 120 bp, Artificial Sequence
  ENSG00000235652_7 (sequence is synthesized)
cgcgccgctagtcgaaggagcagcagccccgatcccttgactctggggcactgctttccctttagctcatttttggaggaaatgggtgcgcccttgctcgacctttggtgattgccgcca

SEQ ID NO: 810090 - DNA, 120 bp, Artificial Sequence
  ENSG00000235652_8 (sequence is synthesized)
cttctgccatgattgtaagttttctgaagcctctccagccatgccaaactgaaaagaagcataagctgcaataaaaatttggtttcaagataacaaagtcagtccccaaaaatcagtatt

SEQ ID NO: 810091 - DNA, 120 bp, Artificial Sequence
  ENSG00000235652_9 (sequence is synthesized)
cccaaaaatcagtattgagagtcactgacattaaatgatgaagatacgaggatggtgtggggacctttactcttcgaagatgagctatacatgcccctgaaaaggctgtctgaagacagg

SEQ ID NO: 810092 - DNA, 120 bp, Artificial Sequence
  ENSG00000235652_10 (sequence is synthesized)
ggaaggctggagatggcaactttggcctctgccaagtactcgtgctattttctgtatgtgatactatctgttttgtaactcagaggcaacaccacatacctagcataaggcttgaactcc

SEQ ID NO: 810093 - DNA, 120 bp, Artificial Sequence
  ENSG00000235652_11 (sequence is synthesized)
ctttggggttatcaattacttacatagccttcctctaagggaaggcttgcaagtggttcatattcgacccttccatgtgataagcattcatgtgggcttcacaatgtaacagaggtacac

SEQ ID NO: 810094 - DNA, 120 bp, Artificial Sequence
  ENSG00000235652_12 (sequence is synthesized)
agagattcttgtaaacagaaaattttataaaactgttaactgatctcactttgaagaagtcttactgactagatgtcatttatcagagtagacaggcttaaaatgcattgcttgtactag

SEQ ID NO: 810095 - DNA, 120 bp, Artificial Sequence
  ENSG00000235652_13 (sequence is synthesized)
actgttgtaatgcatttttttgtttttgcattggtttttaattcatttaattggtttacactcatttttttttttacattccatttttgcatttgtatgccagttaaaaattatgaaatg

SEQ ID NO: 810096 - DNA, 120 bp, Artificial Sequence
  ENSG00000235652_14 (sequence is synthesized)
gcacattgtgggattttgtttagctaaattctagaaaaattgaaagataccttttattcgacttaagcctgaggttattcagcacggtgatctctgcatttttgaaaggttgtctcgtcg

SEQ ID NO: 810097 - DNA, 120 bp, Artificial Sequence
  ENSG00000235652_15 (sequence is synthesized)
tttaataaacgtaaataacttaagcacattggaagagctattaaatgagagcaggagattaaaaagacatgatttcttactttatccacctgacaggatagcttgcattggtgattaacc

SEQ ID NO: 810098 - DNA, 120 bp, Artificial Sequence
  ENSG00000235652_16 (sequence is synthesized)
ttgcattgttaaattcatttcctaaatatttaggtaagtagttggtttgatcattatttgtaaagtattagtagttgcatgttgaattatcatgttaagatttttagtttgttgttcatg

SEQ ID NO: 810099 - DNA, 120 bp, Artificial Sequence
  ENSG00000235652_17 (sequence is synthesized)
tgatatgaaagataacaattcctaaaactgaatgcatgcatggcttattcagctcaggtcacatacaaagagaaatgtgacgctgcaataaacatagcagagctatctgggtttgaagca

SEQ ID NO: 810100 - DNA, 120 bp, Artificial Sequence
  ENSG00000235652_18 (sequence is synthesized)
aaaaggctatgacgttaggtatatgcactttacattgtatgtatctttttagttctagtgaactcatctggaatcatgttacagaaaatgattctccaggtccaaacacatttaagttta

SEQ ID NO: 810101 - DNA, 120 bp, Artificial Sequence
  ENSG00000235652_19 (sequence is synthesized)
atgactgggactactctaacaattgcggctatctcattttgtctcattggttcattagcatagcacccatttaagaacaactacttctaaacacagtaatatttcagaggctataaaata

SEQ ID NO: 810102 - DNA, 120 bp, Artificial Sequence
  ENSG00000235652_20 (sequence is synthesized)
atagagaaagaaaacttaaaaaatcctttgtttgcagccaagaaaatgtgaggatcagatttgtacttgttttgaacaattggaaactgtcacaattgtttttaagatgtaataaatgta

SEQ ID NO: 810103 - DNA, 120 bp, Artificial Sequence
  ENSG00000235652_21 (sequence is synthesized)
tataaaatatgggattctatagtattagccattttgatatcttttgttgaaagaaaaaaccaaaaaaccccatatgttctaagtctcagaaatcaaagaattccacaattttcatttcca

SEQ ID NO: 810104 - DNA, 120 bp, Artificial Sequence
  ENSG00000235652_22 (sequence is synthesized)
cttacagaaataaataaaaacagtttttgtctaatacagataggtttttttatatatatgtaatttgattttacaaaattgaagcatatcaaattgttttctctaaaacatagctcagaa

SEQ ID NO: 810105 - DNA, 120 bp, Artificial Sequence
  ENSG00000235652_23 (sequence is synthesized)
aagcatgggccttctgaatctcagcatgacatgttattagtaaaagaatgtaagatatggagtcaggggacctgggctccactgtttacttgctacatgtcctaagaaagtttcaatata

SEQ ID NO: 810106 - DNA, 120 bp, Artificial Sequence
  ENSG00000235652_24 (sequence is synthesized)
tctgaacttcagttctctacctttaaaacagtaaagatattaattatatcaacttcacaagattgttgggtaaattaaacacgtaaatgtacatgaaagctctttttaatatgtgaagag

SEQ ID NO: 810107 - DNA, 120 bp, Artificial Sequence
  ENSG00000235652_25 (sequence is synthesized)
ctataaaaataacagtttgatttaatttcatataaaagaatcaatggatacctccttttaactgaagaataagcaccaaaagcatgtgtgtgttttcttcagttgaattacatcactcta

SEQ ID NO: 810108 - DNA, 120 bp, Artificial Sequence
  ENSG00000235652_26 (sequence is synthesized)
taaacctagagtaagaaaatgcaccttaactaagcaccaaagcctctcggacaaatgggatctagggaatggttctatgagttttccaggcagctaactgggagctaataagtcctgagg

SEQ ID NO: 810109 - DNA, 120 bp, Artificial Sequence
  ENSG00000235652_27 (sequence is synthesized)
gtcaaagagggtcctttaaaactctgaaggctcaaagaaaaggaagccaaataagaacatttgtattacatcaaatggctaggatgtaacaagctactccttattcagcaatttcaaagt

SEQ ID NO: 810110 - DNA, 120 bp, Artificial Sequence
  ENSG00000235652_28 (sequence is synthesized)
ccattaattcctcacagaagaagaaacacttcgttattatcacttgcaacgatttgcttatgtgaacatggcattctcttgttcaaaaggtcaaagactcgtgcttaagggaggaacaac

SEQ ID NO: 810111 - DNA, 120 bp, Artificial Sequence
  ENSG00000235652_29 (sequence is synthesized)
tggagtgaaataacaactctaccatgaattcagatatcactggctaaaaagtctagttacacaagaacatgggaaagaaaaagaatccaagacatcagtataataatgattaaaaaaaaa

SEQ ID NO: 810112 - DNA, 120 bp, Artificial Sequence
  ENSG00000235652_30 (sequence is synthesized)
accctgccatatttccatgttataataaaacaaaatcataaaaactgcaatatttacagatacatcaatcttacaacatataaaaactttaacaataagaaaaattaagagtagggaaag

SEQ ID NO: 810113 - DNA, 120 bp, Artificial Sequence
  ENSG00000235652_31 (sequence is synthesized)
cagataattttaaggtaatcattaatacattaaaaaatctatttggagttaactgtttacactaacaccactttacacataatagaaatatgaatattttcattgtttttgttttcagta

SEQ ID NO: 810114 - DNA, 120 bp, Artificial Sequence
  ENSG00000235652_32 (sequence is synthesized)
gcaagatgcagaagaaacaaataactgtctaacattaacttattgtaaggagttgtattactgcaaaattactaggtgtaaagttatggtataagcctactcaaaaaatgggttaatata

SEQ ID NO: 810115 - DNA, 120 bp, Artificial Sequence
  ENSG00000235652_33 (sequence is synthesized)
attcaccatctacttaaaatattactaacaagatattggtgaatcatgtgctaaagatactgaaggcccttccaaaactgagatctatgtttgttcaatataccaggtcatataaaacta

SEQ ID NO: 810116 - DNA, 120 bp, Artificial Sequence
  ENSG00000235652_34 (sequence is synthesized)
gactagtttactttcttattccaactgttttatgagtgatcttatcataagaaaagtacacattacctctcttaattcccttgcatcatcagatatagatactatttgggacaaaaaata

SEQ ID NO: 810117 - DNA, 120 bp, Artificial Sequence
  ENSG00000235652_35 (sequence is synthesized)
aatgttttattaggagtgtaaaattaagaatctttatagatcttttggaaacagtatattgaaaaggactcaataagtactaagccactgtataaccagaacaataaacaaattcattca

SEQ ID NO: 810118 - DNA, 120 bp, Artificial Sequence
  ENSG00000235652_36 (sequence is synthesized)
actaggaacagtgttactgttatctactgggtttttaaaacttgtaactttgctctacagctatgaaagtttattaatacactaaagtccatggaatgaatcaagtgtagttcattcaag

SEQ ID NO: 810119 - DNA, 120 bp, Artificial Sequence
  ENSG00000235652_37 (sequence is synthesized)
ctcttcagtttctttggtaaataggtctgccaggtcagccacagtcaagacagaggcctctgaatgctttgctgatgagttcgtgtgactgcaaggtttcccaaatgagcacagtcagaa

SEQ ID NO: 810120 - DNA, 120 bp, Artificial Sequence
  ENSG00000235652_38 (sequence is synthesized)
agaaaccccaagccatcagcgattatatttgtagtaatacgaactagacacatattttttcttaagtttttgtaattgggatataagaaactcccagaggaaagcaagtgataaaatctt

SEQ ID NO: 810121 - DNA, 120 bp, Artificial Sequence
  ENSG00000235652_39 (sequence is synthesized)
tgttataccttgtcaaagtgaagatttctatatattacttttagtgtttgtcaaagtgttttttctctgtgcaattaatagaacaaagaataaaactcttgactactgctactaaggctc

SEQ ID NO: 810122 - DNA, 120 bp, Artificial Sequence
  ENSG00000235652_40 (sequence is synthesized)
tcaccttacaaattaccttcttaccacctgaagttaatttgtttcaagagaatttcaaacaactcataactgctattttattaaaacaacctaaataaaaatcactgaagtctgatacac

SEQ ID NO: 810123 - DNA, 120 bp, Artificial Sequence
  ENSG00000235652_41 (sequence is synthesized)
aaggaaaacaagaactttaaaaagccttcatgttttaggtaaaaaggcccttgtggaagcctctttccttcccagaaaccatcaatggaagaaaatttctagtttcaaattgcttctttg

SEQ ID NO: 810124 - DNA, 120 bp, Artificial Sequence
  ENSG00000235652_42 (sequence is synthesized)
ctatgtgacaatcccttctaaggcaataatctcttccttgggtaccatccaatcctacctacctcctaaagatgtagaaagatttatgttttcaaaaagatttaaataaattataccata

SEQ ID NO: 810125 - DNA, 120 bp, Artificial Sequence
  ENSG00000235652_43 (sequence is synthesized)
gattatccttgattggcagaatgctagttccacacttcctacaagaacactggctactctacagatactctctatattctgggaaaagatttcaggatcatataatataaaaaatggcaa

SEQ ID NO: 810126 - DNA, 120 bp, Artificial Sequence
  ENSG00000235652_44 (sequence is synthesized)
taccacaagagacaaaccaaggctgagggactcatcttgatgaagacaaaaaaagacatgacaactaaataagatttatgattccaaattggatcctgagccagaaaaaaaaaatgccat

SEQ ID NO: 810127 - DNA, 120 bp, Artificial Sequence
  ENSG00000235652_45 (sequence is synthesized)
attgggcctaccagtaaaaatgtaaaagaactacaggttagataatagtattgtattgatgttaagtttcctaattttgaagattgtacaaaagtcatgtaagagtatgcccttttctat

SEQ ID NO: 810128 - DNA, 80 bp, Artificial Sequence
  ENSG00000235652_46 (sequence is synthesized)
agattgtacaaaagtcatgtaagagtatgcccttttctattaggaaatgcactgtgatggttaatattgaatgtcaactt

SEQ ID NO: 810129 - DNA, 87 bp, Artificial Sequence
  ENSG00000235652_47 (sequence is synthesized)
aactggctgagtcttccggccttcatctttctcccattctggatgctttctgccctcaaacatcggactctaacttctttagcttct

SEQ ID NO: 810130 - DNA, 120 bp, Artificial Sequence
  ENSG00000235652_48 (sequence is synthesized)
ttctgccctcaaacatcggactctaacttctttagcttctggactgttagacttacaccagtcatttgccaggggctcgcaggcctttggccacagactgaaggctacactgtcgacttc

SEQ ID NO: 810131 - DNA, 120 bp, Artificial Sequence
  ENSG00000235652_49 (sequence is synthesized)
aaggctacactgtcgacttcgctacttttgaggttctggggctcagactggcttctttgctcctcagcttgctgacagcctattgtgggactttaccttgtgattgtgtgagtcaatact

SEQ ID NO: 810132 - DNA, 120 bp, Artificial Sequence
  ENSG00000235652_50 (sequence is synthesized)
ccctttcatatatatatatatatcctattattactgtccctctagaaaaccctaatacatatgcattaaaaatgtttggtgaactattttcaaatagtttcctaaaattcataaaattta

SEQ ID NO: 810133 - DNA, 120 bp, Artificial Sequence
  ENSG00000235652_51 (sequence is synthesized)
tgtcctgtcatataacacactgcgatgagtcttcggatgtggcatctaacaaaaaagaaagctgcacatggtcactctgtgtgttgagttgaaactgaggttcagaaagagcaagtgatc

SEQ ID NO: 810134 - DNA, 120 bp, Artificial Sequence
  ENSG00000235652_52 (sequence is synthesized)
cagagctaggactgtatgttctagctccacgtctgatcaacatccatggacaataacaggaagctgctggaaggtacacatcttgggagtttgccctttgaagctcacctgtggaccttt

SEQ ID NO: 810135 - DNA, 120 bp, Artificial Sequence
  ENSG00000235652_53 (sequence is synthesized)
tgtgtttgcttccccttctgccatgattgaagctgctggaaggtacacatcttgggagtttgccctttgaagctcacctgtggaccttttttcctttcgaaaagaagcataagctgcaat

SEQ ID NO: 810136 - DNA, 70 bp, Artificial Sequence
  ENSG00000235652_54 (sequence is synthesized)
gatgatgatgtaaatggtcatactgcccaaagcaacttataaattcaatgttattcccattaaattacca

SEQ ID NO: 810137 - DNA, 120 bp, Artificial Sequence
  ENSG00000235652_55 (sequence is synthesized)
agcaacttataaattcaatgttattcccattaaattaccactgacattcttcacataattagaaaaaactattttgaaatttatatggaaccaaaaaagagcctgaatactgaaagcaat

SEQ ID NO: 810138 - DNA, 120 bp, Artificial Sequence
  ENSG00000235652_56 (sequence is synthesized)
ccttagcaaaaagaacaaaggtggaggcatcaggctagctgacttcaaactatacgatagggctacagtaaccaaaatagcacggtactggtacaaaaacagagacatagaccaatggaa

SEQ ID NO: 810139 - DNA, 82 bp, Artificial Sequence
  ENSG00000235652_57 (sequence is synthesized)
cacggtactggtacaaaaacagagacatagaccaatggaaaagaatagagaatacagaaataagactgcacacctacaactg

SEQ ID NO: 810140 - DNA, 87 bp, Artificial Sequence
  ENSG00000235652_58 (sequence is synthesized)
cgccttaccatgtaaaaccccaaactataaaaacactagaagaaaacctgggcaataccatttaggatataggcattggcaaagatt

SEQ ID NO: 810141 - DNA, 120 bp, Artificial Sequence
  ENSG00000235652_59 (sequence is synthesized)
ctgggcaataccatttaggatataggcattggcaaagatttcatgatgaaaacactaaaagcaattgcaacaaaagcaaaaattagcaaatgggtctaattaaactaaagagcttctgca

SEQ ID NO: 810142 - DNA, 71 bp, Artificial Sequence
  ENSG00000235652_60 (sequence is synthesized)
taacaaacatgaaaaaagccttcacatcactaattattagataaatgcaaatcaaaaccaaatgagatacc

SEQ ID NO: 810143 - DNA, 120 bp, Artificial Sequence
  ENSG00000235652_61 (sequence is synthesized)
aattattagataaatgcaaatcaaaaccaaatgagataccatcttacatcattcaggatggtgattattaaaaagtcaaaaaatgacagatgctgatgaggatgtgaagaaaaaggaaca

SEQ ID NO: 810144 - DNA, 120 bp, Artificial Sequence
  ENSG00000235652_62 (sequence is synthesized)
aaattagttcaaccattgtggaaaacagtctggtgattcttcaaagacaaagaggcagaaataccattctacccagcaatctcattactggttatatactcaaaggaatataaatcattt

SEQ ID NO: 810145 - DNA, 82 bp, Artificial Sequence
  ENSG00000235652_63 (sequence is synthesized)
gacatagaatcaacctaaatgcctatcagtgatagattggataaagaaaatgtacatatacaacatggaatactatgcaggc

SEQ ID NO: 810146 - DNA, 120 bp, Artificial Sequence
  ENSG00000235652_64 (sequence is synthesized)
ctatcagtgatagattggataaagaaaatgtacatatacaacatggaatactatgcaggcataaaaaggaatcaggtcatgtgcttcgcagggacatggatggagctggaggccatcatc

SEQ ID NO: 810147 - DNA, 120 bp, Artificial Sequence
  ENSG00000235652_65 (sequence is synthesized)
tgcatgttctcacttacaagtgggagcaaaatgatgagaatacatggacacatggcggggaacaacacacactagggtgtgttggagagtagggagaggatcaggaagaataactattgg

SEQ ID NO: 810148 - DNA, 120 bp, Artificial Sequence
  ENSG00000235652_66 (sequence is synthesized)
acacacactagggtgtgttggagagtagggagaggatcaggaagaataactattggataatgggcttaatacctgggtgataggatgatctgtgtagcaaaccaccatggcacacattta

SEQ ID NO: 810149 - DNA, 120 bp, Artificial Sequence
  ENSG00000235652_67 (sequence is synthesized)
cccctagtatctcaggatgtaactgtatttaaagataaggtgtgtatagaggtggttatgctaaagtaaagctgctaggatgggggctctaatcccgtatgaatagtgtccttataaaaa

SEQ ID NO: 810150 - DNA, 120 bp, Artificial Sequence
  ENSG00000235652_68 (sequence is synthesized)
gccatcaggggcctgtccgcacagggaaacaccatgtgaggatacagaaaacaaccatctgcaagaaaggagagagatcttagaagaaaacagacctgccagcactgtaatcttcaactg

SEQ ID NO: 810151 - DNA, 120 bp, Artificial Sequence
  ENSG00000235652_69 (sequence is synthesized)
tttctgaagcctctccagccatgccaaactcattttgcacagagcttggcagttacatagtagatgttgaacaatttcttctgtgtttcagctgtcaaactgttctgaatgtgtgaggct

SEQ ID NO: 810152 - DNA, 120 bp, Artificial Sequence
  ENSG00000235652_70 (sequence is synthesized)
tttctgaagcctctccagccatgccaaactatccagtggataatcaactaagagctaggcatccttttagatttgataagaaacattttacaacctaccctctctctgaagtctgccatc

SEQ ID NO: 810153 - DNA, 88 bp, Artificial Sequence
  ENSG00000235652_71 (sequence is synthesized)
acaatcctttatcttaacctgaacattcctttctattgatcccaagtctttagacaaattcaaccaactgtccacccgccccactttg

SEQ ID NO: 810154 - DNA, 69 bp, Artificial Sequence
  ENSG00000235652_72 (sequence is synthesized)
ggaaggccccactttgagttgtctttatgcctctctaaaatatataaaaccaagctgcaccccgaccac

SEQ ID NO: 810155 - DNA, 120 bp, Artificial Sequence
  ENSG00000261186_0 (sequence is synthesized)
gcgcagggacgggcgcggtcagtgcctgagatccctgcgatcgctgggagatgacggtgaagacctgagatttaggcctgcgcggcgggtgacgacgccggtccgggtcttcactggagg

SEQ ID NO: 810156 - DNA, 120 bp, Artificial Sequence
  ENSG00000261186_1 (sequence is synthesized)
acgctggccggggccttcaggtgttctcgtggcctgaggacgcgcgtccctgagaatgtgcgtgcccgcgccgcgcgggtcccacaggagcctgggcagccccgccgccgcatttccacc

SEQ ID NO: 810157 - DNA, 120 bp, Artificial Sequence
  ENSG00000261186_2 (sequence is synthesized)
ctgcggccgtatttccacccgctgggcgccaagcccgggatgactgcactctagggcatcactgcgcgctcacactcagcattcaggcacaagcacgttctctttataaacagtttcgaa

SEQ ID NO: 810158 - DNA, 120 bp, Artificial Sequence
  ENSG00000261186_3 (sequence is synthesized)
tcttgtcgagtctttctagaaggttgaaatgccctggaggagcagcgtgaatagttttttccaattaggaaaaaagaatgtggggcggctggagggagagaggcaggccgagaaggccag

SEQ ID NO: 810159 - DNA, 120 bp, Artificial Sequence
  ENSG00000261186_4 (sequence is synthesized)
cctcagtttcctcctagaaacatggaggtggcggtgcacgctacaggatttctgtaagaacagatgagttaacgtgtgcaaaacatttaaaacagtgtctggtgtgtagcaagcaaatat

SEQ ID NO: 810160 - DNA, 120 bp, Artificial Sequence
  ENSG00000261186_5 (sequence is synthesized)
gagtattagtcttttccttgttaaaatgtgtgcatctacatttggtgcacattacaggaagtgtatagtatggattcatattttggaaaagtaattttagaagttatttctgatgtgctt

SEQ ID NO: 810161 - DNA, 120 bp, Artificial Sequence
  ENSG00000261186_6 (sequence is synthesized)
attgtaatagtgtttcttgaccacatgcttttagataatgtgaaggcaatgaagcaggcaatattgcttgcacatccccaatttaaacacctgtctgtccctccttccctctctcctttc

SEQ ID NO: 810162 - DNA, 120 bp, Artificial Sequence
  ENSG00000261186_7 (sequence is synthesized)
ttttcttccttaccctctctctttattccttccttcattcccttcaaggttgcggattattccattatataaatgtatcaatttattagaatagtttctatgatgtctatgatgggcttt

SEQ ID NO: 810163 - DNA, 120 bp, Artificial Sequence
  ENSG00000261186_8 (sequence is synthesized)
agattgtttgcaatagtttgccattacaaataatgcccagtagtgctgtggtttgatttaacttgtgaaggtatatttccaaataaatcgctatgattggattgttgtgtaaaccaaaaa

SEQ ID NO: 810164 - DNA, 120 bp, Artificial Sequence
  ENSG00000280213_0 (sequence is synthesized)
gccgagatggtgccattgcactccagcccaggactctatctccaaaaaaaaaagaaaggaagaaaaataagcacaggcatgtgtggagacctggaggcagggctgcccctcacgaaccat

SEQ ID NO: 810165 - DNA, 120 bp, Artificial Sequence
  ENSG00000280213_1 (sequence is synthesized)
gcagggctgcccctcacgaaccatccacaatgccaaggaaaccagaagcaaacgtccagcagcagggagcgcagggcatgtgaaaccgacactgaggaaacagccacgggagagagcaca

SEQ ID NO: 810166 - DNA, 120 bp, Artificial Sequence
  ENSG00000280213_2 (sequence is synthesized)
cagggagaaaggaaggctcgggcactcccttgctgtggttcaggcctgttctaccacccctggggtcaccatcgcccacggaccttcctgctgggtgcctgtagcacggcacctcctgac

SEQ ID NO: 810167 - DNA, 120 bp, Artificial Sequence
  ENSG00000280213_3 (sequence is synthesized)
aggtcaggtttaagggaagtttgctggataactaaaatgaggctggggggaggagggagcagggaggagctagcccacaggagccaatgcaggcctgaccccactggtgccggactgact

SEQ ID NO: 810168 - DNA, 120 bp, Artificial Sequence
  ENSG00000280213_4 (sequence is synthesized)
cagggagagtcattagggctgctttctcaggctggatgagcactgggggttgggggcttgccctggcccaccccaccactcaggaaaccttccctcagcaggacctgccctgcacagatc

SEQ ID NO: 810169 - DNA, 120 bp, Artificial Sequence
  ENSG00000280213_5 (sequence is synthesized)
atgggcagcctccctctgctccccacttccacagccccagactccatctcaaccgcagccaggagtcactgctaacaccacaaaggacctgttcctgcaccagcacgggccagctctggg

SEQ ID NO: 810170 - DNA, 120 bp, Artificial Sequence
  ENSG00000280213_6 (sequence is synthesized)
ggcaggtgcccaggacagagtcacgagtggcaagcagacaataaacaacaggcaagatggacagactgattgccgggaggatgtggcaggaggcactggaacggtggtggaggaacccca

SEQ ID NO: 810171 - DNA, 120 bp, Artificial Sequence
  ENSG00000280213_7 (sequence is synthesized)
gccctggggacagacctccacccgtgcacagacctccaagctggagcctgctctggaacactaagggcagcagcagaggttgaagaggggcagacgcaggaacgttggggacacgctcgg

SEQ ID NO: 810172 - DNA, 120 bp, Artificial Sequence
  ENSG00000280213_8 (sequence is synthesized)
ggaacagtgagaaaagccctaggctggggcagaggaagtcctcgatggcacaagcatcaggacacaaagtgcaagaaatgtgcctaagacaagaggcagttccagggcagaccggggccc

SEQ ID NO: 810173 - DNA, 120 bp, Artificial Sequence
  ENSG00000280213_9 (sequence is synthesized)
ctggagaagggtgctgcaatctatcctcactgcctggagcttccctcctgtcccttggtaaccacaccaaagaaagataacaacagtctctgcctcgtgggacacagcgagggccaccgt

SEQ ID NO: 810174 - DNA, 120 bp, Artificial Sequence
  ENSG00000280213_10 (sequence is synthesized)
gcccagcccaccgtctgtgcacagggcaggcccagatggctgctgccaccaacctgtgtcatccaggagtgcctttctcaagagctctcagtgcttatctagcgttggcctgccccacct

SEQ ID NO: 810175 - DNA, 84 bp, Artificial Sequence
  ENSG00000280213_11 (sequence is synthesized)
agagctctcagtgcttatctagcgttggcctgccccacctcgggttaaatcaaaacctctttgggaggccgaggcgggcagatc

SEQ ID NO: 810176 - DNA, 83 bp, Artificial Sequence
  ENSG00000280213_12 (sequence is synthesized)
acaacgcctctttggaaccagcagaggaacagactcaggccctattagactccagccatgcaaagttcctagtcactgcccac

SEQ ID NO: 810177 - DNA, 120 bp, Artificial Sequence
  ENSG00000280213_13 (sequence is synthesized)
attagactccagccatgcaaagttcctagtcactgcccactgggagggtgtggacctgaagggacgcagggccaggggaaagctctttctgctcagcagctcctggagaggagcgaccct

SEQ ID NO: 810178 - DNA, 120 bp, Artificial Sequence
  ENSG00000280213_14 (sequence is synthesized)
gtgccgggacacccttccccctgcggcatccagcgcagcccatctctgagggagtcctggctcacagcgtttctgacaggagtcacagcctgaacccaggcaagaggcgcctgagtggga

SEQ ID NO: 810179 - DNA, 120 bp, Artificial Sequence
  ENSG00000280213_15 (sequence is synthesized)
acaaccccttcctggggaccccgcgggctccccaagggacacttcagacccggaagggaggggcagcgcccagagcgccctcttgcagccccgggcactgcgtggccaccgccccctgac

SEQ ID NO: 810180 - DNA, 120 bp, Artificial Sequence
  ENSG00000280213_16 (sequence is synthesized)
ggccacggccccaaaggcgccgcgcagggcccggctcccagaggggccactcggggtgacgaaccggggtgggggcgggttcctcccgctgcacccccacaacttccccacttcatgctc

SEQ ID NO: 810181 - DNA, 120 bp, Artificial Sequence
  ENSG00000280213_17 (sequence is synthesized)
ttgcaaagcccccgcagaggctcgaaggtgccacgcgcgtgcgaggcaatccgaaggcaccgtgcgccgcagcacctccaaatcctaagccctggcctcgcgggtcgggcagggccacac

SEQ ID NO: 810182 - DNA, 120 bp, Artificial Sequence
  ENSG00000280213_18 (sequence is synthesized)
cccgagccgacaacatagaccaactcgcacagtcgagcaggcacacagcccgccgggcgctcgaggccgagggccccacccaccgggggcagagaccaaggtcaacgctgggggtgcgca

SEQ ID NO: 810183 - DNA, 120 bp, Artificial Sequence
  ENSG00000280213_19 (sequence is synthesized)
cccggactccttccccgagccccgaggagcctgccggcttgggccaggtccgtcctcccggccgcttcaagcccgcggggttccacccggcacgtgggagaacggggcgccgccgcctgg

SEQ ID NO: 810184 - DNA, 120 bp, Artificial Sequence
  ENSG00000280213_20 (sequence is synthesized)
cctccgggagtgggggacttgggctcgcggcggggacggaccacccgcccagctcggccggatctgcagccccttcccgctcgccagtggagtggaggcgaggcccacgcctaccggtcc

SEQ ID NO: 810185 - DNA, 120 bp, Artificial Sequence
  ENSG00000280213_21 (sequence is synthesized)
tcgcacgcggtctcgcttttctcagcctgccggcctggtgtgtctcgggccgtaggtggcgacgtgggcgaaggatcagcgtccgcgcgggccgggggcgcagccatggcgctcggaggc

SEQ ID NO: 810186 - DNA, 120 bp, Artificial Sequence
  ENSG00000280213_22 (sequence is synthesized)
ctctttgcgggcctggccgggcggcgcgcatgggccgccgggagctggcgggtccctctcttgcccaccgcggactacaagccccacaaggccgcgcgtcgcggactacaagccccacaa

SEQ ID NO: 810187 - DNA, 120 bp, Artificial Sequence
  ENSG00000280213_23 (sequence is synthesized)
ggccgcgcgtcgcggactacaagccccacaaggccgcgcgtcgcggactacaagccccacaaggccgcgcgtcgcggactacaagccccacaaggccgcgcggcgggcatgggggacccg

SEQ ID NO: 810188 - DNA, 120 bp, Artificial Sequence
  ENSG00000280213_24 (sequence is synthesized)
tagttcggcagcctccgccacgtgcctggagggccccgccccctgtttttcaccacaaactgagccgcacaaaaaccctggaaaaaaatcaataaacatttatttgatacagtcatttta

SEQ ID NO: 810189 - DNA, 120 bp, Artificial Sequence
  ENSG00000280213_25 (sequence is synthesized)
atacatacagtgatggcccgtccccacgccactcgggaccagggcgcggggcggggacgaggaccggggacagatggtcacaaggcgggcggggcccgaactcaccgttgaaacatctcg

SEQ ID NO: 810190 - DNA, 120 bp, Artificial Sequence
  ENSG00000280213_26 (sequence is synthesized)
caaataaacactttgtagatagaatatatatgtatatatatatggttacaagtgatagctggaacctctttcaaaatgcacttatgtactgagaactggcattaaaaaacccaaaccaag

SEQ ID NO: 810191 - DNA, 120 bp, Artificial Sequence
  ENSG00000249306_0 (sequence is synthesized)
agagagggagcaatgaaggatgtctaaggtcatcagcaacgtaaagccaacagcatcatcctgagtcatgtttgaacctgagggaaagaaacatatgttcgaagaggttctgaggctgct

SEQ ID NO: 810192 - DNA, 120 bp, Artificial Sequence
  ENSG00000249306_1 (sequence is synthesized)
gcacccgatatcatacctggttggccctgggaaagggcccacctccaatacataaacacaaccagctttgacagtgagccctgaagcatggcattgagaagctgcctaagaaggaggcag

SEQ ID NO: 810193 - DNA, 120 bp, Artificial Sequence
  ENSG00000249306_2 (sequence is synthesized)
atccatcagcctgggtgcccgactgattaccctgagcagagctccccagcccacctgtgatggacgcatggagcttgagcaaggaataaatattcgttgctggactctgattacactgga

SEQ ID NO: 810194 - DNA, 120 bp, Artificial Sequence
  ENSG00000249306_3 (sequence is synthesized)
atgtgtgaatcaacgcatgaaggagtgagtgagcagctaaccaaatgaaagaatactcagatatctggggtacagttcccctccaggtttgcacagcatctgctgaagtctccactagaa

SEQ ID NO: 810195 - DNA, 120 bp, Artificial Sequence
  ENSG00000249306_4 (sequence is synthesized)
actcaatggaaggtccccaccggaaactgaaagtctcctagagtggctttgagttgcggtttcaccctccctgcagatccacaggggaggctggggcagatggaaaataccaacttgatg

SEQ ID NO: 810196 - DNA, 120 bp, Artificial Sequence
  ENSG00000249306_5 (sequence is synthesized)
gtctgtggccacaccatgctgctccccaaggcccctcagaatttcactgcccaatatggtagcgcccagcctgaaacgtggccagtgtgaattgagatgggctggaaatgcaccagactt

SEQ ID NO: 810197 - DNA, 120 bp, Artificial Sequence
  ENSG00000249306_6 (sequence is synthesized)
ccaagagctggacaaaaaccatatacgtaaagtatctttgttttacatatttgtactgatgacacaatgaaatcatatttagggtattttctgttacataaaatacattactaaaattaa

SEQ ID NO: 810198 - DNA, 120 bp, Artificial Sequence
  ENSG00000249306_7 (sequence is synthesized)
gtgtaagagaaggaacacaggctcagacatcagtgccatatctgaagacattcagctaataacaggatggagtccaatctgaaacaactgtcacgctgagcctaattgctgaagatggtt

SEQ ID NO: 810199 - DNA, 120 bp, Artificial Sequence
  ENSG00000249306_8 (sequence is synthesized)
cctggaggtggtttgtggccaaccgtcaattacttgggctgctgtgcagtggggatagaaggatgattagaatccacagacaacccattggcctttgtttaccattaacttctgttttct

SEQ ID NO: 810200 - DNA, 120 bp, Artificial Sequence
  ENSG00000249306_9 (sequence is synthesized)
ccaccagccaagctcctccagacccaggagatggctcttccctctgtgtagcacactctttccagtcaaggggtcttgcactgctatttccccttctgctttgcttggttcattcttact

SEQ ID NO: 810201 - DNA, 120 bp, Artificial Sequence
  ENSG00000249306_10 (sequence is synthesized)
gaccctccaaatactgaaggaatgaatggagaaataagtaaatgagagatgtggccaagagtctccaagagaggaaattaaaaaatcctatacctgtgaggaactggcccacttgcaaaa

SEQ ID NO: 810202 - DNA, 120 bp, Artificial Sequence
  ENSG00000249306_11 (sequence is synthesized)
gcttgcccagctgaggcattggagcagggcattttgatagtggctggagggcaggcagctcaacctctaaacccccctggtctgggcaccaagtcctgtcctgggcacgggacacagtcc

SEQ ID NO: 810203 - DNA, 120 bp, Artificial Sequence
  ENSG00000249306_12 (sequence is synthesized)
tccagcgagaccaaacccagcttctctacagcaccaggaagaaggcaagctgggccaccagggcgcggccccaggaaggaaaatcctccatggtcctgttgacagatgtggtatcaaatg

SEQ ID NO: 810204 - DNA, 120 bp, Artificial Sequence
  ENSG00000249306_13 (sequence is synthesized)
ccttccccagctttggggccacagagggacagaaaccgcaggcaggctggcctgggaatgaacctacaccagcctgaagtcagaagagcctctaggagcctccagcctggactcttttta

SEQ ID NO: 810205 - DNA, 120 bp, Artificial Sequence
  ENSG00000249306_14 (sequence is synthesized)
cttttccatccagctgtttggcattggatactgctgcctctgcttgacttgagaatgtgtgagaaaagctgtgtttagacaactgaaaaccatgagcttgaaagtagtgggggcacactc

SEQ ID NO: 810206 - DNA, 120 bp, Artificial Sequence
  ENSG00000249306_15 (sequence is synthesized)
ttggagactccagttgctcaccagcttggacaaaccactggactcaaatgatcaggtagaaattcatcactggagagaacacagtggaatggcttcagcgaaaactcactctgaaggtct

SEQ ID NO: 810207 - DNA, 69 bp, Artificial Sequence
  ENSG00000249306_16 (sequence is synthesized)
acagtggaatggcttcagcgaaaactcactctgaaggtcttcagggcaactttaagacttgcccctggc

SEQ ID NO: 810208 - DNA, 78 bp, Artificial Sequence
  ENSG00000249306_17 (sequence is synthesized)
ctaaaaatccaaaaaattagccgggcgtggtcgtgggcgcctgtaatcccagcaactcgtttgaagacagccgagatt

SEQ ID NO: 810209 - DNA, 120 bp, Artificial Sequence
  ENSG00000249306_18 (sequence is synthesized)
aaaaaaaaaaaaaaaaaaaaaaatacttgccccggctttttgtgtgatggactttctatttacagacgtgatatttatctatgactttactcagagtctggctcatagaccagaaggact

SEQ ID NO: 810210 - DNA, 120 bp, Artificial Sequence
  ENSG00000249306_19 (sequence is synthesized)
ggtatctcctggagcttgcaggaaatgcaaaatctcaaacccctgtattagtcagggttctccagagaagtagagccaatgggatagagacagggatagggatgatagagatggagatag

SEQ ID NO: 810211 - DNA, 120 bp, Artificial Sequence
  ENSG00000249306_20 (sequence is synthesized)
aggtagagatccattgattcctctgttaataaattggctcatgcagttgtgacaatttcgaaatctgcaaggtatgtcagcaagctggagacccagggaacagttgatgttgcaccttga

SEQ ID NO: 810212 - DNA, 120 bp, Artificial Sequence
  ENSG00000249306_21 (sequence is synthesized)
gtacaaaggcagtgtgtctggagccataatatcttcttgttaggaagactttggtcttttctcttctggccttcaactgcttgggtgaggcccgtccccactacagaagacaatagtctg

SEQ ID NO: 810213 - DNA, 120 bp, Artificial Sequence
  ENSG00000249306_22 (sequence is synthesized)
ttctactcagagtctactgatttaaatgctcatctcatcccaaaaaataccctcacagcaacatttagcctgtgcatttgaccaaacaactgggtaccatgccccccctcccaagttgac

SEQ ID NO: 810214 - DNA, 120 bp, Artificial Sequence
  ENSG00000249306_23 (sequence is synthesized)
acacaaaattgaccatcataccctccccacccccagtcttactgaatgagagagaatctgtgcttcaacaagatccccagaagaggtataagcgcagggaagtctgagaagcaccacctt

SEQ ID NO: 810215 - DNA, 120 bp, Artificial Sequence
  ENSG00000249306_24 (sequence is synthesized)
tgaggcttatccaggatgcccacatgagccttctctggatatgtcagatccccttcctggccccctagacacctcctccactccccaaacttggaagcaacattgtggggaagcaggcag

SEQ ID NO: 810216 - DNA, 120 bp, Artificial Sequence
  ENSG00000249306_25 (sequence is synthesized)
tgaggcgctcagtctaccacgttgtgagatacacagctccatctgtgtatcatgatttgatccaagggaaaacaaaagatccagaaacataagtacttttttgtgagctctcaaaaactt

SEQ ID NO: 810217 - DNA, 120 bp, Artificial Sequence
  ENSG00000249306_26 (sequence is synthesized)
cctgtgacaagatcaggtcgttgatgcgagagccacacttgtttctttttcctctttattctccacctctgacataatacttagcataaaaaaaaatccaataaacaccactgaatcaat

SEQ ID NO: 810218 - DNA, 120 bp, Artificial Sequence
  ENSG00000249306_27 (sequence is synthesized)
cctgagaaccccactgcggatgagaacaaacgtttgttcggctgaccctttctcagatcccgcccactgagaagtgacagtccctcctctccccgcctctccctgacccccagctctccg

SEQ ID NO: 810219 - DNA, 120 bp, Artificial Sequence
  ENSG00000249306_28 (sequence is synthesized)
cggcgggatctgagccctctcctgctggacttgtggtacttgctgaacaatctcgtgttgttgtctgcccgctgggagagaacactgataagagaggcgattaggtgactaaatctgctg

SEQ ID NO: 810220 - DNA, 120 bp, Artificial Sequence
  ENSG00000262983_0 (sequence is synthesized)
acacagttcctgtctgaggaggctgcctcccccatatatagtaggatgcctactttcagaaggtagtagatgaagcctagagttgccaccacacctgcaaaggcagccacagcagccaca

SEQ ID NO: 810221 - DNA, 120 bp, Artificial Sequence
  ENSG00000262983_1 (sequence is synthesized)
gctttggaaccaacatctccagcagtcttgtgccctttggtgtccatagcacctacaaaggaagcagacatttgagtcttaagtatttttaaataaggatcagatgagccgacacctggg

SEQ ID NO: 810222 - DNA, 120 bp, Artificial Sequence
  ENSG00000262983_2 (sequence is synthesized)
atctcagccaagccagagaagacccgtggcaaggaaaactggaagaaaagaattgtgatgtaagactttgatttggaggtagatgtttccgaattcatgccagaaattgctgtgtggttg

SEQ ID NO: 810223 - DNA, 120 bp, Artificial Sequence
  ENSG00000262983_3 (sequence is synthesized)
tcataccaaaaggcctgctgtgggatgcagtggaagaagcacatgaaccctgactgtgcccttagatgtcattatacttctttgaacttctgatcccaagaggcagctggaagatctaag

SEQ ID NO: 810224 - DNA, 120 bp, Artificial Sequence
  ENSG00000260859_0 (sequence is synthesized)
ggaaagaaacatcattaaacaccattaagttccagtgagctgagatcttaccactgcactccatcctggggacagaacaagactccgtctcaaaaaggaaaaaaaaaaagaatattatct

SEQ ID NO: 810225 - DNA, 120 bp, Artificial Sequence
  ENSG00000260859_1 (sequence is synthesized)
agagaaggtgccttgtggggctggtgtcgcctttaagctgagtggactgttggctgtcctggggagatggggaattcagcacagtgcaggcagcagctagggaaggagctggagctggac

SEQ ID NO: 810226 - DNA, 120 bp, Artificial Sequence
  ENSG00000260858_0 (sequence is synthesized)
atgcgagtgtggcccctttgcattacgagctgccggagccagagctcagaacttgcttggacgcggtctgcaaggggctgggcgtggggctgaacggcttctcttcctctcctgcagcag

SEQ ID NO: 810227 - DNA, 120 bp, Artificial Sequence
  ENSG00000260858_1 (sequence is synthesized)
tgcttcatcgttgcaagggccacaagatgcaccagggctgagatggcaaccaggagcaaaggagtgcctggtgaggtgtactctgacatggacacaaagctgataaaagactgcctggta

SEQ ID NO: 810228 - DNA, 120 bp, Artificial Sequence
  ENSG00000260858_2 (sequence is synthesized)
tgccagagagagcaggatccctggaagagatggccatctggacttcccaggaccacaggccaagcacagtggctcatgactataatcccagaactttggaaggctgagaagtctcactac

SEQ ID NO: 810229 - DNA, 120 bp, Artificial Sequence
  ENSG00000260855_0 (sequence is synthesized)
ggtagggttttgccgatgcttcccctaacctgtggaggcaagtacccctgagaactagggatgccctggggcagagtcctggagacaagtgttggaggagatggtaccgcactggctgaa

SEQ ID NO: 810230 - DNA, 120 bp, Artificial Sequence
  ENSG00000260855_1 (sequence is synthesized)
aatgggaacggcagagagcaggtagtgtgacgtgatggaggagatggtaccgcactcactgaaaatgggaacagcagagagcaggtagtgtgacgtgatggaggagatggtaccgcactc

SEQ ID NO: 810231 - DNA, 120 bp, Artificial Sequence
  ENSG00000260855_2 (sequence is synthesized)
actgaaaatgggaacagcagagagtggcactgggattcagtttctatttccctgagtattagtgaaatgcctgttcaaatcctttgccgatttttttcgaatgtgctttccaacatatta

SEQ ID NO: 810232 - DNA, 120 bp, Artificial Sequence
  ENSG00000260855_3 (sequence is synthesized)
tctttttttaaatcttaaaagtaatagtttattctgaatactaatgcttgctaaataatattaatatattttccaggctgtggtttatttgaaactttgtttaaggtgtctttcatttaa

SEQ ID NO: 810233 - DNA, 120 bp, Artificial Sequence
  ENSG00000260855_4 (sequence is synthesized)
ccagttattcttttttattgtgagctacgtagaacagaaaagtaccctaaatatattgacaggcctaaagtgaacacacctgctctagagagcccactgcctggaactcctcctgtcacc

SEQ ID NO: 810234 - DNA, 120 bp, Artificial Sequence
  ENSG00000260855_5 (sequence is synthesized)
ttcttcctgtcccagaagcaactgccagcctgacttgtgtggtcaccattttcttgcctttctcaatagttttgccacctagagtatatccctaaacagtatattttgccctctttgaat

SEQ ID NO: 810235 - DNA, 120 bp, Artificial Sequence
  ENSG00000260855_6 (sequence is synthesized)
gtttatagaatcatgttggatgtcatctttcgtaacttggtttccatcactattggaagactcttcttgttgcctgtggctgttgttcactttcatggcaatgtagtgttacacagcata

SEQ ID NO: 810236 - DNA, 120 bp, Artificial Sequence
  ENSG00000260855_7 (sequence is synthesized)
gaggggccaaaatttacccgtcttcggtgaacatgtattagggatgtttccagtttggggctactatggaagagggttttatgaacagcagtgcacatcaactaagatttctgtagtgtt

SEQ ID NO: 810237 - DNA, 120 bp, Artificial Sequence
  ENSG00000260855_8 (sequence is synthesized)
tttcaactggcccctcatctgaaccacagaacggaagtgatttgaataactgttttctcagttctttcaagaatggtgtgtaactagtgccatcctagacacatatgacagagttagctt

SEQ ID NO: 810238 - DNA, 120 bp, Artificial Sequence
  ENSG00000260855_9 (sequence is synthesized)
atttcgtatgtcagatgcctcagtgcagtaggttctcaaacttgaaggcagaatcatggagagggtttgttgaaacacgtgttactaggcctcacacccagagattctgattcagtaggt

SEQ ID NO: 810239 - DNA, 120 bp, Artificial Sequence
  ENSG00000260855_10 (sequence is synthesized)
ctggggtggggccctggattttgcatttctgacaagttcctagatgctgctgaagctgctaggccatagggcacacttcgagaatctctgcctgaggcattagggctttaactctgcaga

SEQ ID NO: 810240 - DNA, 120 bp, Artificial Sequence
  ENSG00000260855_11 (sequence is synthesized)
accagttcagctgtgaaggaaggaagagttgaattgcaggcttctaggttctagtatcttcaacttttaataagtaaatgccaaataatttttaaatggttgtaccaatttatactcctc

SEQ ID NO: 810241 - DNA, 120 bp, Artificial Sequence
  ENSG00000260855_12 (sequence is synthesized)
tcagccatacatgagagtttctgttacttcatatcttcaccaaaacttgatattgtcaagctttttaatttttgccagtatggaaggttaataatggtatctcattgtggtatcagttag

SEQ ID NO: 810242 - DNA, 120 bp, Artificial Sequence
  ENSG00000260855_13 (sequence is synthesized)
tatttcccaaactattaatgcgattaagcacttctccatatatttattggcatttttaatttcctcttttgtgaagttcctgttcaaatcttttgaccatttttttttctattgggttgt

SEQ ID NO: 810243 - DNA, 120 bp, Artificial Sequence
  ENSG00000260855_14 (sequence is synthesized)
cattccttctggctttttcattttggtgtcttttgatgcaccaaagttcaccattttaatttagctgactttatcggtctccctctttaaagctaggggggtgtgtgtgtgtgtgtgtgt

SEQ ID NO: 810244 - DNA, 120 bp, Artificial Sequence
  ENSG00000260855_15 (sequence is synthesized)
gtgtgtgtgtgtgtgtcatgcataagaaatccttttccactgtgaggtcgtaaagacagtctcctaaagtatcttctgaaagcatttgaggcagggcatggtggcttatgcctgtaattc

SEQ ID NO: 810245 - DNA, 120 bp, Artificial Sequence
  ENSG00000260855_16 (sequence is synthesized)
agttcgagaccagcctgggcaacataacaagaaccccatctctatttttaaaatatttaaataaataaataaaagcattagggttgtgccttccacatttagctctttaattctcacctg

SEQ ID NO: 810246 - DNA, 120 bp, Artificial Sequence
  ENSG00000260855_17 (sequence is synthesized)
agctctttaattctcacctgaaattgatttctggggtagttttagataggaatccagtttcatttgtccccatacatattcctaattccccagcactgtttattgaaaagtccatccttg

SEQ ID NO: 810247 - DNA, 120 bp, Artificial Sequence
  ENSG00000260855_18 (sequence is synthesized)
ccacattgatttgcagttccactcggttgtatatcaagtctgtagtcctgaataaatctgtttctgagccttctgttctttttctttggttatttatctatctttgggccaacaccttac

SEQ ID NO: 810248 - DNA, 120 bp, Artificial Sequence
  ENSG00000260855_19 (sequence is synthesized)
cttactgcctctgttacagaggcattaaaatgaagtgttgatatcaggtagggcaagtctttctgtcttgttcttgggtctggtctcatcttggctagtttttgcttttgcaattccata

SEQ ID NO: 810249 - DNA, 120 bp, Artificial Sequence
  ENSG00000260855_20 (sequence is synthesized)
caaattgtagaattatcttgttaggttctattacacttgattggaattacaatgactcttggggaagagttgacagatgtacaataacaaatcttccaaaccacggagagatggcagttt

SEQ ID NO: 810250 - DNA, 120 bp, Artificial Sequence
  ENSG00000260855_21 (sequence is synthesized)
ctctatctatttatatccttttaaacatctctcaaataagttttaaaattttctccgtacaactcttacatattttatgtcagctataggcctaagtattccatatatttgatgcaatta

SEQ ID NO: 810251 - DNA, 120 bp, Artificial Sequence
  ENSG00000260855_22 (sequence is synthesized)
tcaatggtgtcttttattttaaaaataattttctgcttgctgctgttatattcaaatacagttaatttttaaatcttgatttttgtatctagcaactttgtaattcatttacaaattctt

SEQ ID NO: 810252 - DNA, 120 bp, Artificial Sequence
  ENSG00000260855_23 (sequence is synthesized)
ggggattttctgtctatacaagcaggtcatctgggatgatactagaggcagcgcagtatagactggggaacagcaccggcagggtctggacctcagcgctgccacagatgagtcatgtgt

SEQ ID NO: 810253 - DNA, 120 bp, Artificial Sequence
  ENSG00000260855_24 (sequence is synthesized)
ctttagacacgttccatgaactgtaaaataaggtgaataatagtacctgcctcatagggttgctgtgagaattgagacagtaaatgtaaagcaggttgtaagtgttacataagtgtatgc

SEQ ID NO: 810254 - DNA, 120 bp, Artificial Sequence
  ENSG00000260855_25 (sequence is synthesized)
tattattgtaattacttttctttcctttccagtcatactttgtatttcttttccttactgcactggctagaacctaaaggacagaggtcaagaaagctggcatccctgacctcctgatct

SEQ ID NO: 810255 - DNA, 120 bp, Artificial Sequence
  ENSG00000260855_26 (sequence is synthesized)
gaaaagaaaagctttcagtcattcatcactaagcattttgtccactgtgtgtttgtcttaagattgcctttatcagattaaggaatgtccattttattcctagtttgccgagaattttta

SEQ ID NO: 810256 - DNA, 120 bp, Artificial Sequence
  ENSG00000260855_27 (sequence is synthesized)
ttgtcataggatgtttaatttggccacatctttttctgcatctgttgaagtaatcaaattattttatcttataatctcttaatatgatgaattacattgggttttataatgataaaccaa

SEQ ID NO: 810257 - DNA, 120 bp, Artificial Sequence
  ENSG00000260854_0 (sequence is synthesized)
ggtctccggacgccaggagtcgcggagggccgaccaggatgaagaaacttcaggcggagtcccaggagagcagcgcgggatcccagcctcagcctgcccagacggagaggtgcagaccga

SEQ ID NO: 810258 - DNA, 120 bp, Artificial Sequence
  ENSG00000260854_1 (sequence is synthesized)
cctccaagaagatggttctaactcctcccgccctctcttcccattgagaaatggagccccaccgcgacacaggcttggagaagaagtcgagaacgggatgtggcaaggatctctgtcact

SEQ ID NO: 810259 - DNA, 120 bp, Artificial Sequence
  ENSG00000260854_2 (sequence is synthesized)
ctgtatcccgcctgggctctgacctctacactgtcctccctcttgctctgtctgccatgtttctgacgggcctggatgcttcttggtctggctcagtgtcttccacagagaacacttttg

SEQ ID NO: 810260 - DNA, 120 bp, Artificial Sequence
  ENSG00000260854_3 (sequence is synthesized)
agtccatcagggagaaactgtgtggaaatccatttcgtgaatgttgtcatcataaatcatcaaaatgtcatctgatagaacatatttttctaagttaatttacttatgagacatttacaa

SEQ ID NO: 810261 - DNA, 120 bp, Artificial Sequence
  ENSG00000260857_0 (sequence is synthesized)
agacatgcgcagtgcggccgtccctagaggcgggttaacggccgcggacctggcagttctcaggcttctccaagggagaagcccccttgccagggtctcgatttcccgccaaccaacaaa

SEQ ID NO: 810262 - DNA, 120 bp, Artificial Sequence
  ENSG00000260857_1 (sequence is synthesized)
ggttcatttgcctcttatggcctgcgcgggagggttgccatgctgtcacaaatcctcctctgcatcccaggagtgccgcttggtcctcgggctcgcagcgtggcccacacctgggtcggg

SEQ ID NO: 810263 - DNA, 120 bp, Artificial Sequence
  ENSG00000260857_2 (sequence is synthesized)
cacaggggaagggcctgaccctgctgcatccattttttagattaagtactgcacgactactcgcttctgaaactgtcataagaaactgcctcagctccctgcagggtggacacacaagag

SEQ ID NO: 810264 - DNA, 120 bp, Artificial Sequence
  ENSG00000260857_3 (sequence is synthesized)
cagaatctccgtgggacatctctttggagcatcaatattactacagtatttggaagacacaaatttaaataatttctaaggtaaagaatggaacatttaagacaaggctggaaagtcatc

SEQ ID NO: 810265 - DNA, 120 bp, Artificial Sequence
  ENSG00000260857_4 (sequence is synthesized)
tgcctttaataactcatctgtgcctcacatgtcagactttctccaagaaaaaaactaaggagaacttatttccattcttataagtagtaaaaataataaatcatatcaagtcaattgaaa

SEQ ID NO: 810266 - DNA, 120 bp, Artificial Sequence
  ENSG00000260857_5 (sequence is synthesized)
tcacggggacgctcccgccactgtgataaagaggagaaaacgtcacaggggaagggcctgaccctgctgcatccagtaaggaaacagccacagggaagggaccccgtaagccactttggg

SEQ ID NO: 810267 - DNA, 120 bp, Artificial Sequence
  ENSG00000260857_6 (sequence is synthesized)
atgcgtagtgcagcccgtccctagcggtggggtaaaggtcctgcccttttacacatgcggagtgcacccgttcctaggggtggggctaacgggcctaccgtttcagacatgctcagtgca

SEQ ID NO: 810268 - DNA, 120 bp, Artificial Sequence
  ENSG00000260857_7 (sequence is synthesized)
gcctgtccttaggcgtagggtaatggtgggcgacctggcagttcttgggctccttgggatcccctcgagaagcccccttgttagtgtatgaaaccgtcagttcactgccagtaatgaaaa

SEQ ID NO: 810269 - DNA, 120 bp, Artificial Sequence
  ENSG00000260857_8 (sequence is synthesized)
acatccaccacttctctgaccccacgcaggctgcttcccaggcctcatggtactagtgtggacctcctggctgtgattaatgcaggtcagcaggaccagagcgtcccttggtccctccca

SEQ ID NO: 810270 - DNA, 120 bp, Artificial Sequence
  ENSG00000260857_9 (sequence is synthesized)
gaaagttttcagatattagttgttgatttatttttgtaacccttttaattcttctgactctctcctctccttctcagactgaatgattccatgggtctctaagcctcggtttattttctt

SEQ ID NO: 810271 - DNA, 120 bp, Artificial Sequence
  ENSG00000260857_10 (sequence is synthesized)
taaattttgttgatttgcttttctaccccatttaattttttctgtctctctcttcttctcagaatcaatcatcccacagataggtctaaggctctgttcattttcttttaaactattttt

SEQ ID NO: 810272 - DNA, 120 bp, Artificial Sequence
  ENSG00000260857_11 (sequence is synthesized)
acttctatcctcagattggttaaattatattgctatgtcttctgtttctgatatatagaaaagctcacaattatttttattatttttctatgtggtcatttttcatttctctgctgatgt

SEQ ID NO: 810273 - DNA, 120 bp, Artificial Sequence
  ENSG00000260857_12 (sequence is synthesized)
tccacatctgttcatttatgagaatattttcctttgcccccatgagcatgcttataatagctgccttcaaattcttgtctgctgattatgtcttggacatcttggagatgtctactgcct

SEQ ID NO: 810274 - DNA, 120 bp, Artificial Sequence
  ENSG00000260857_13 (sequence is synthesized)
gctttttatcttgtgtatgtattatattttcatgtgttttcacgcatctcctgaattggaaaattgtgcactagagactgtatagaagagttaaagagactctggattctgttttgtccg

SEQ ID NO: 810275 - DNA, 120 bp, Artificial Sequence
  ENSG00000260850_0 (sequence is synthesized)
ctgacaagagaaggagaaatcgttggcctctgcgtgacatggagggtccccccacctgcaagcttttgtgtttgctggatcttggacagtaccctggcgaaaagcattcggcaagattat

SEQ ID NO: 810276 - DNA, 120 bp, Artificial Sequence
  ENSG00000260850_1 (sequence is synthesized)
gtaaaagagacagcttggaatgaaggtgggtgtaaaaggcaattggatgtgaaagggcaaatgtcctgactttggggacttgcctcagcttcactaatctcagtgacagttgcggtatag

SEQ ID NO: 810277 - DNA, 120 bp, Artificial Sequence
  ENSG00000260850_2 (sequence is synthesized)
agccataattaccgtgtgtcctcttggctcagcataaaaagaataatattccacctactattgatgtctgtgcttcctgtgtactgcaggccctcaataaacatgtgttgaatcaataaa

SEQ ID NO: 810278 - DNA, 120 bp, Artificial Sequence
  ENSG00000260850_3 (sequence is synthesized)
tcctggagttaggccttcaaccaaagagctgggccatccgtggcaatgcctcccaggcttgggagctgggaaaaggccccaggagctagggcatcctgattgttctttcaaagaaatccc

SEQ ID NO: 810279 - DNA, 120 bp, Artificial Sequence
  ENSG00000260850_4 (sequence is synthesized)
tcttgttcttagtcaacatgctggataccagctaaaaaatgcaaaatgatcttcaggcagggatggcacaggacccttgctgagctgtgaagcctggctgtgaggattcctgcatggaaa

SEQ ID NO: 810280 - DNA, 120 bp, Artificial Sequence
  ENSG00000260850_5 (sequence is synthesized)
catcaacatgttgccagattggtatacgactcaacaccacactgacatgctgctcccaaacagtgcctttgaatcaagacccagtcatcgtattcgaagaaaaaggaaatatccctgacc

SEQ ID NO: 810281 - DNA, 120 bp, Artificial Sequence
  ENSG00000260850_6 (sequence is synthesized)
atgttgggacttaacactgcttcacagagtccatggagttcctggtgactaatgccatccacaagatctgaaggtgttgtgtaacctagacctggcccttctctcagtgcatccccctct

SEQ ID NO: 810282 - DNA, 120 bp, Artificial Sequence
  ENSG00000260850_7 (sequence is synthesized)
ccagagtgaccaactcagagaggtcatgtgcttaagggtgagaaccactacaggacaaaaatgagctccttttttccagtctcagcccaggagggatcttcacagagaaagcaagcccag

SEQ ID NO: 810283 - DNA, 120 bp, Artificial Sequence
  ENSG00000260850_8 (sequence is synthesized)
cccatccccacagctggctccctggtgcccattctgaaaggctggacccatcctgacctgtccctgccccaaggactgcctggtgagggatggcttaccaacactgtgactcagtccttc

SEQ ID NO: 810284 - DNA, 120 bp, Artificial Sequence
  ENSG00000260850_9 (sequence is synthesized)
gcacattgccggtaatgttggcattagtagattacatttaaatttaaaaattccttttatggggtttaagaatagagacaagacacccatgcaataaagaaaggaggagactttgcctgg

SEQ ID NO: 810285 - DNA, 120 bp, Artificial Sequence
  ENSG00000260850_10 (sequence is synthesized)
tctaatggagaagctggagctgcattgttgggtacagtggccagtggctacacctggcttttgagcccttgcacagtggcaaggacacattgagatgtgccctaggtgcaagatacacac

SEQ ID NO: 810286 - DNA, 120 bp, Artificial Sequence
  ENSG00000260850_11 (sequence is synthesized)
aggatttcaaagactgagtatgaaaaaagaagaaaaaatgtctcattaatatttttatattggttgcatgtggaagtgataacattttggatataaagttgacctttgaacagtatgggt

SEQ ID NO: 810287 - DNA, 87 bp, Artificial Sequence
  ENSG00000260850_12 (sequence is synthesized)
tccacttcctcctcctcctcctcctcctcaacctgctcaacgtgaagatgatgaagatcaagaccttcatgatgatctacttccact

SEQ ID NO: 810288 - DNA, 120 bp, Artificial Sequence
  ENSG00000260850_13 (sequence is synthesized)
cccttttgcggttcaaaagccactgtcactggggtacataggcagttttaaaaaaggctacaattcatatgcaaactagaggaggatttccatgatttcataataaaatgttgaaacgct

SEQ ID NO: 810289 - DNA, 120 bp, Artificial Sequence
  ENSG00000260850_14 (sequence is synthesized)
acagatatttgtgtaatcatcctttatgtattgccagtgcggaataataacatatcaaagccccaacctacctcatctgcctggtacagccaaggcataaataaaggggaacaatggaat

SEQ ID NO: 810290 - DNA, 120 bp, Artificial Sequence
  ENSG00000260850_15 (sequence is synthesized)
tactattactcactctccgagagccagcgacatcactgtatcctttataattgctggcaagaagattaatgttttgttaaatatcagagcaaggtcacaagggggcttgcaggcctgtct

SEQ ID NO: 810291 - DNA, 120 bp, Artificial Sequence
  ENSG00000260850_16 (sequence is synthesized)
aaacatctagtctttaagctccttctccctcacttgctcttttttgcggaaatgaacttgtagcatttcctctaattatggtgatttttgctactgaaagcgggcctacatcatcgcttg

SEQ ID NO: 810292 - DNA, 120 bp, Artificial Sequence
  ENSG00000260850_17 (sequence is synthesized)
actctgaacatgctcacacacacatgcatgcatgctcacacacacatgcatgcatacacacacacacatatacacacacacatcttccccaaataatatttggggacaggcctgacttaa

SEQ ID NO: 810293 - DNA, 120 bp, Artificial Sequence
  ENSG00000260850_18 (sequence is synthesized)
ctgcagaatatgggcaacgttgttatgaggtgaccttggccttttaaccaacgtggataattcattgcctgtcgctgtgcacagctcgtgcttaaaaagtgaactttattggggtcctca

SEQ ID NO: 810294 - DNA, 120 bp, Artificial Sequence
  ENSG00000260850_19 (sequence is synthesized)
gggggctccctagcaaagactggtatcatcgttcattgcgcttctgttttgtttagcccatacgcctgtccatacagatgtttccaacagcaaacagttcatgacccagaaagaaaaaaa

SEQ ID NO: 810295 - DNA, 120 bp, Artificial Sequence
  ENSG00000260853_0 (sequence is synthesized)
gaaaggttaatggctttttttttagtagacattactgagaaaactggctcattatatcacaaaaagtgaaacttggatctcatatataaaggtgtatttcactgaatttttttttttttt

SEQ ID NO: 810296 - DNA, 67 bp, Artificial Sequence
  ENSG00000260853_1 (sequence is synthesized)
gtattttcagtagagacaaggtttcagtcttgaattcctaacctaaccatgcccagccgatttctct

SEQ ID NO: 810297 - DNA, 120 bp, Artificial Sequence
  ENSG00000260853_2 (sequence is synthesized)
tttttttttttttttaagagacaaggtctcgctgtgttgcccaggttcctagggaggaaggcaagagagactaccaaaaaaagcttcttagaagacaggatgcttcacacctggaatccc

SEQ ID NO: 810298 - DNA, 120 bp, Artificial Sequence
  ENSG00000260853_3 (sequence is synthesized)
aggtctcgctgtgttgcccaggctataaaacggggttttatagatgaagaaagagaagcacagagaggacagggaagctggattggaaccataccttaagctcacattactagggtctca

SEQ ID NO: 810299 - DNA, 120 bp, Artificial Sequence
  ENSG00000260853_4 (sequence is synthesized)
gaatccactcccaagggtgatcctgaagggttcactgtcaccctccggggtaagccacctcttttccccaagcgattcattccccacatgaaactcaacagtccttctatcccttcttct

SEQ ID NO: 810300 - DNA, 120 bp, Artificial Sequence
  ENSG00000260853_5 (sequence is synthesized)
taacctttcaggagtcacccaagagtcctgcctgcctccgcttacccctccaactcacttcctgctcccagggcccaagggccctggcctcactcacagaaactctgtctttttcttctc

SEQ ID NO: 810301 - DNA, 120 bp, Artificial Sequence
  ENSG00000260853_6 (sequence is synthesized)
ttctttatccttagtcctcagctttgtcttccagggagagcctggtgatggggagccctcatggtagagaccactcgaatctgccagctctgcctctgggggcagaggaagagaaggtag

SEQ ID NO: 810302 - DNA, 120 bp, Artificial Sequence
  ENSG00000260853_7 (sequence is synthesized)
aagggggttatccaagggaggccagcgaaggccaagaagaaacaagtcagaggcttcaagaaggtcctaggaaaggaggagaccacggagcccctggcacacacagggccacatgataat

SEQ ID NO: 810303 - DNA, 120 bp, Artificial Sequence
  ENSG00000260853_8 (sequence is synthesized)
attgggaaagggggcaggggatgagactgctatttagtataaagatagctcatattaacttaaaattaacttaaatttctcatgaaaggaaaccaggtattattttctataatatagaaa

SEQ ID NO: 810304 - DNA, 120 bp, Artificial Sequence
  ENSG00000260853_9 (sequence is synthesized)
tttctatttgcccgctgtcaataaaagatcatcacaaaccacaaaaataaatactgtgaaaattaaaaaatgataagaaaccctagatcagtggctctgaaccagggacaattttgcctc

SEQ ID NO: 810305 - DNA, 120 bp, Artificial Sequence
  ENSG00000260853_10 (sequence is synthesized)
tgcggggacatatagcaatgtttagagacaatattggttatcaaaatgtggagggcgagggggctgaggtataatacttcccagggatggaagtcaggatgccgctaaactttctacaat

SEQ ID NO: 810306 - DNA, 120 bp, Artificial Sequence
  ENSG00000260853_11 (sequence is synthesized)
gcacaggacagtttccaacaccaaagaattttccagtccaaaaaatgccagtaatgctgaagtcatgaaatcctgtcctaactaactatggcagctgcaagaggcctatgattctgcatt

SEQ ID NO: 810307 - DNA, 83 bp, Artificial Sequence
  ENSG00000260853_12 (sequence is synthesized)
gcctcgacttcctgggctcaggtgtagtacacatcaccatgcctggttaattttttatttttctgtagaaacagggtctcatc

SEQ ID NO: 810308 - DNA, 87 bp, Artificial Sequence
  ENSG00000260853_13 (sequence is synthesized)
ctcctgagtagctaggactacaagtacacatcaccatgcctggttaattttttatttttctgtagaaacagggtctcatcatgttgc

SEQ ID NO: 810309 - DNA, 120 bp, Artificial Sequence
  ENSG00000260853_14 (sequence is synthesized)
ctttgagccattgtgcccagccgatcctgcatttctagcaagcttccaacggatgccatatatggctgggcccacgttttgagtatcagggatagaggtaccttttacgtagcacttctg

SEQ ID NO: 810310 - DNA, 120 bp, Artificial Sequence
  ENSG00000260853_15 (sequence is synthesized)
tgtcctaggtactgtcctaaagcatatatctagccaagaggcagctctctctatattccctttcgttaattctcaccaaaatcagcaccaaaatggggtctactattatccccactttga

SEQ ID NO: 810311 - DNA, 79 bp, Artificial Sequence
  ENSG00000260853_16 (sequence is synthesized)
atcagcaccaaaatggggtctactattatccccactttgataatgaggaaattgaagcactgagaaattaagaaacttg

SEQ ID NO: 810312 - DNA, 65 bp, Artificial Sequence
  ENSG00000260853_17 (sequence is synthesized)
ccatctctactaaaaatacaaaaaagccagacatggtggctgggagatggaggttgcagtgagct

SEQ ID NO: 810313 - DNA, 76 bp, Artificial Sequence
  ENSG00000260853_18 (sequence is synthesized)
gccactgaaaaaagaaactcgcctaagatcacacagctattaagagatagagctgaggccgggcacagtggctcac

SEQ ID NO: 810314 - DNA, 69 bp, Artificial Sequence
  ENSG00000260853_19 (sequence is synthesized)
ctcaaaacaagaaaaaagaaactcgcctaagatcacacagctattaagagatagagtaagatgggcgga

SEQ ID NO: 810315 - DNA, 120 bp, Artificial Sequence
  ENSG00000260853_20 (sequence is synthesized)
ctttgtatgaaatcacccatcacaaaggtgacaacaaactcgtatatttttaaagcacttggtcaggcatgatggctcacacctataatcccagcattttgagaggccgaggcgggaggt

SEQ ID NO: 810316 - DNA, 120 bp, Artificial Sequence
  ENSG00000260853_21 (sequence is synthesized)
ttgcttgaggtcaggagttcaagatcagcctgagcaacaaagcaagatcccatctccatttttttttttttttaagagacaaggtcttgctctctcacccaggctgcagtgcagtggcga

SEQ ID NO: 810317 - DNA, 120 bp, Artificial Sequence
  ENSG00000260853_22 (sequence is synthesized)
aagccatgggctgccagtttgcagcctctgccttagttgcttgactgatgcactgtgcatcagtaatggtaatgtctgttatcattcctggtgttgaaacagggtcatccctacaaaaat

SEQ ID NO: 810318 - DNA, 120 bp, Artificial Sequence
  ENSG00000260853_23 (sequence is synthesized)
atcaggcttcgccaggaagctggtggagttcagggtgactgagtgacatctgctgtgtccagggcagtgagagcaagcccaggagggaagcccaggttcctagggaggaaggcaagagag

SEQ ID NO: 810319 - DNA, 120 bp, Artificial Sequence
  ENSG00000260852_0 (sequence is synthesized)
aacatcgagaaggagagggaacgatgactacaaacaagatggccttctcccccgacccgacctccttcccaggcactcacacgccctcctgtccacaaccctccgcgtgtgtggtacctg

SEQ ID NO: 810320 - DNA, 120 bp, Artificial Sequence
  ENSG00000260852_1 (sequence is synthesized)
acgggagtcgcagtccatctgctgccttcccgctgccatttctactcgtcaggaacaatggaaaggtgaaaaggaaagaggactacaagcaagatggcggaagagggacatacacctgac

SEQ ID NO: 810321 - DNA, 120 bp, Artificial Sequence
  ENSG00000260852_2 (sequence is synthesized)
tagtagtcgatcttacgaggtgcgatgggattagtagttttatagccttccagtgttccttaagaatggcggaaccaggaggacgaggagactaccgtaaagatggcaggctacctagcc

SEQ ID NO: 810322 - DNA, 120 bp, Artificial Sequence
  ENSG00000260852_3 (sequence is synthesized)
tctcccggtctccgctttccaccaccttgggcacctcgcccgcctgtggtctcgaaatcccccccaccagtggcgcacggcctgacgggagttgcagtctcccggctcccgtctatcatc

SEQ ID NO: 810323 - DNA, 120 bp, Artificial Sequence
  ENSG00000260852_4 (sequence is synthesized)
tcaagtcgagacaatggaaggggatggggcggggccaccggcaaagatggcggctgcagggccggggcgactgcgacatgggatgtgtagtccaggcgtctggcctcttccctgcggaaa

SEQ ID NO: 810324 - DNA, 120 bp, Artificial Sequence
  ENSG00000260852_5 (sequence is synthesized)
tgagggagaggactacgaaaaagatggcgacctcgcccctcgacctctgcgccggtgcctgctgggaaatgtagttccttgccgagtccaacagagaaaggacgtcgctgttgaaatgtg

SEQ ID NO: 810325 - DNA, 120 bp, Artificial Sequence
  ENSG00000260852_6 (sequence is synthesized)
aatcccggcggacacgccaaattgcgaggcgacggaaacggaaagactcttttctcctctctccgccaccggcttctgaacagcctggcgggaaatgtagtcccaagctttcactcgcga

SEQ ID NO: 810326 - DNA, 120 bp, Artificial Sequence
  ENSG00000260852_7 (sequence is synthesized)
gtggaggggaaggatttatgtcaccagtggggatcagtgcgggtgggggagaaaaacgtcgggcgatccgggaataaagaatgtccgcctctccatggggcgaggacttcgcgtttcagg

SEQ ID NO: 810327 - DNA, 120 bp, Artificial Sequence
  ENSG00000260852_8 (sequence is synthesized)
ggagggcccttaaaggaaggcagcaggaatcagtcttgtcgaacaggggggcgtggttctcgtcgagagtgcattcacactcttgttccctagaaagcctgggcacctcccactcgattc

SEQ ID NO: 810328 - DNA, 120 bp, Artificial Sequence
  ENSG00000260852_9 (sequence is synthesized)
ctgctcctcagacctccgggaatcagtgtcttacaagacgtgcgggctccggggaaaaggacctggagtcacagcgaatccccgccccgccccgggaagccaccaaaccttgctttttct

SEQ ID NO: 810329 - DNA, 120 bp, Artificial Sequence
  ENSG00000260852_10 (sequence is synthesized)
catctgcaaaatggggacaatggggataatgatccccacctcgaagcacagttgtgagtgttaaacaagccaatgttcttgtcaccaaagtgcccaactctggcacggggcacgcggtgg

SEQ ID NO: 810330 - DNA, 120 bp, Artificial Sequence
  ENSG00000260852_11 (sequence is synthesized)
tagatccctttctaaggtcccttccagcccagccgttctgggagcccaggaatccatgatgccggacagagttcgctcctgtgagaagaaaactgacccgcaggctcctcccagattgaa

SEQ ID NO: 810331 - DNA, 120 bp, Artificial Sequence
  ENSG00000260852_12 (sequence is synthesized)
ccgacccccgcccctcctcatcggggtcctccagcgtctgttaccgagcactgctcccagggggcgctcaatctccattcgactgaggtactacaaacacgatttccgcaacctggagtt

SEQ ID NO: 810332 - DNA, 120 bp, Artificial Sequence
  ENSG00000260852_13 (sequence is synthesized)
ggaggcattgcaggctgtccagcctcatcccctgcctgatatccagtcagccttggaggcctctgcctagacacttcaactgcctatgcaaatggaacggcttctcatctttctgccgtt

SEQ ID NO: 810333 - DNA, 120 bp, Artificial Sequence
  ENSG00000260852_14 (sequence is synthesized)
ttttggttttttttgtgtgtgttttaaggtcttgctctgtcacttgggttggagtgcagttgcaggatcatagtttgctgcagcctcgacctcctgggcttaagcgatcctcctccctca

SEQ ID NO: 810334 - DNA, 120 bp, Artificial Sequence
  ENSG00000260852_15 (sequence is synthesized)
cctcctccctcagccttgtgaatacctgggacttcaggcacgcgccactacacccagctaatttttaaactataatttttttttgttcagacgaagtctcgctatgttgcccaggctggt

SEQ ID NO: 810335 - DNA, 120 bp, Artificial Sequence
  ENSG00000260852_16 (sequence is synthesized)
ttctgaccccaagacagccccctccccttccctctgtcttctgtgtttggcagaccagccccagcgaggacttgttggttgtggtttttctatcagggaagtcaatggctggccagtgta

SEQ ID NO: 810336 - DNA, 120 bp, Artificial Sequence
  ENSG00000260852_17 (sequence is synthesized)
gtgtgaagtcccagcttggcagagacttgcccaaggctggataggaggcttctttgccgctcaggctttatcagtcaggaaatccttagccctccctagaggattggctgtcccctctat

SEQ ID NO: 810337 - DNA, 120 bp, Artificial Sequence
  ENSG00000260852_18 (sequence is synthesized)
cctcactgcttgaatttggtgttgcatgattgatttctaccctgttccctctgcttgagggctatcctccccatgcccatctcacttctccaccaagttcactgttcatcatttacaggt

SEQ ID NO: 810338 - DNA, 120 bp, Artificial Sequence
  ENSG00000260852_19 (sequence is synthesized)
actgttcatcatttacaggtctctatttatgtatttattatttatttttctactttcccacttttctaaaaggtctctatttaaatgccactgtcaatcccagcactttgggaggcctag

SEQ ID NO: 810339 - DNA, 65 bp, Artificial Sequence
  ENSG00000260852_20 (sequence is synthesized)
tgggaggcctaggcgggcggatcatgaagtcaagagttcgagaccagcaatggccaatgtgcctg

SEQ ID NO: 810340 - DNA, 88 bp, Artificial Sequence
  ENSG00000260852_21 (sequence is synthesized)
gctgagatcgtgccactgcactccatcaatcaatcaatcaatcaatcactgtcctggccagttgcagtggctcacgcctataatccca

SEQ ID NO: 810341 - DNA, 120 bp, Artificial Sequence
  ENSG00000260852_22 (sequence is synthesized)
ggctcacgcctataatcccaacacttcgggaggccaaggtgagaggataacttgaaactaggagttcaagaccagccaaggcaacatagtgaggccccatctttacaaaaatacaaaaat

SEQ ID NO: 810342 - DNA, 120 bp, Artificial Sequence
  ENSG00000260852_23 (sequence is synthesized)
acaaaaatacaaaaattagctggacgtgtagtcccagctacttaggaggctgaggggcaaggattgcttgaggctgagagattgagcctgcagtgagctatgacgatgccactcgctgca

SEQ ID NO: 810343 - DNA, 120 bp, Artificial Sequence
  ENSG00000260852_24 (sequence is synthesized)
tgcattcaagtctagatgacagagcaagaccctgctcctggacatactactaagtgctttcagcatttcatgtggtcctcataaaaatcttgagggccgggcatggtggctcacgcctgt

SEQ ID NO: 810344 - DNA, 80 bp, Artificial Sequence
  ENSG00000260852_25 (sequence is synthesized)
ctaaaaatagaaaaattagccaggtgtagtggtgtgcacctgtagtcccagctcttcaggaggctgagaaaagagaattg

SEQ ID NO: 810345 - DNA, 120 bp, Artificial Sequence
  ENSG00000260852_26 (sequence is synthesized)
actctatctcaaaaaaaaaaaaacccacacaaccttatgaggtagaattccattttagagacgaggaaactgggaccctcaattatgcagaatggatgagtggtaccgccaaaattcaaa

SEQ ID NO: 810346 - DNA, 120 bp, Artificial Sequence
  ENSG00000260852_27 (sequence is synthesized)
ccccagactcccgaactcatgctcagaactattacaacatgcagaaacaacaaatccagtcatgtgtgcatttaatttggcatagcaacaacaacacatttctcaggcaaaatggatttc

SEQ ID NO: 810347 - DNA, 120 bp, Artificial Sequence
  ENSG00000260852_28 (sequence is synthesized)
aggcaaaatggatttccagcttctcttgaaaagtcctgaaatctagtccaggaccgtggattgtatttaaaaaaataaaaatagaagaagaaaaggccgggcatggtggctcatgcctgt

SEQ ID NO: 810348 - DNA, 66 bp, Artificial Sequence
  ENSG00000260852_29 (sequence is synthesized)
cacctgtagtcccagctactcaggatccaatgccactacactccagcctggacaacagagcgagac

SEQ ID NO: 810349 - DNA, 120 bp, Artificial Sequence
  ENSG00000261728_0 (sequence is synthesized)
tcaacattcaaaactgaccaaggaaccccactagctagacatgtgtagtgattaccagcaaacctcaggccaggctcactcaggactggctacccccaggaaggaggggtggcatgccag

SEQ ID NO: 810350 - DNA, 120 bp, Artificial Sequence
  ENSG00000261728_1 (sequence is synthesized)
taaggaacctggcctcagcagcaagttgtttttttctgcaagtatcgtgtatttcttctccaaccaattttgttccccttggttcctgggaaccattatatcgttaggttaatggaccat

SEQ ID NO: 810351 - DNA, 120 bp, Artificial Sequence
  ENSG00000261728_2 (sequence is synthesized)
tggtttatccacctgtatgttgcctgaattttggccattcaaccatgcattcctggtgattgggtttacaagtactagtttcctaagtccaacatcatgttcagatatctcgtgacgata

SEQ ID NO: 810352 - DNA, 120 bp, Artificial Sequence
  ENSG00000261728_3 (sequence is synthesized)
aattggtgtagtaaccatggtatgtcagcaaagagatggccccactcattaaaaatatgttggtattggaggcttcaaaaacttgtatatttgttactgatatatagaacaaataaatgg

SEQ ID NO: 810353 - DNA, 120 bp, Artificial Sequence
  ENSG00000261728_4 (sequence is synthesized)
ccaaatacaaaattgtgcagaacccagattatctagtatctaataaagaattaataaagaatatgtattaatgtagatgtctttatttacatattaatggcttttttcaaattggccaaa

SEQ ID NO: 810354 - DNA, 120 bp, Artificial Sequence
  ENSG00000261728_5 (sequence is synthesized)
tttttcaaaacaattacatattaaaaattgagatacatggaaattctaacaatagatttatagtcattcttggggtgggcattaacactttttggtaacttctgtaagttaattatagtt

SEQ ID NO: 810355 - DNA, 120 bp, Artificial Sequence
  ENSG00000261728_6 (sequence is synthesized)
taacttcctaattaattaattctgtatgttaatttatagtttaacttcctagacgctttggtgtctttttttaccctcactttaaaatacacacaatagtttaaatatatcacatttggt

SEQ ID NO: 810356 - DNA, 120 bp, Artificial Sequence
  ENSG00000261728_7 (sequence is synthesized)
caaaagttcaaattattttattatttaaagcatgtagaaaaaatataatagttaaaattcctgtgaaaaattctaatacagaggaatcacatggctatgtttggaaagataatatttctt

SEQ ID NO: 810357 - DNA, 120 bp, Artificial Sequence
  ENSG00000261728_8 (sequence is synthesized)
taaaaatgtgttgttttttatgttttatgtttgcgataagcattactgaagtttgattgaagaacttcatgatttttatgttttactttcttgtattgagaaatagtggtccattgttgg

SEQ ID NO: 810358 - DNA, 120 bp, Artificial Sequence
  ENSG00000261728_9 (sequence is synthesized)
ctaaatcagtatcttctatcatatcagcctcacatataacaagaataatcgcaaggacaacaacaaatttgaatgtttcctttgtgcctatgctcctatcatgttatattcattcttata

SEQ ID NO: 810359 - DNA, 120 bp, Artificial Sequence
  ENSG00000261728_10 (sequence is synthesized)
aatctaacaactaacaattaatttgaagttagacacacaggatttactcatcagtattagagcattcactgctagccaagaaggttactatccctggtgctgaaactgctctgtgtagtc

SEQ ID NO: 810360 - DNA, 120 bp, Artificial Sequence
  ENSG00000261728_11 (sequence is synthesized)
cttgtggttgaagaattaaaacagtttctcttagacatttcctttcattgaaattatgaattggataaatgttcataccttaaaggaagtattaaatttcacatatgttaacatcttaat

SEQ ID NO: 810361 - DNA, 120 bp, Artificial Sequence
  ENSG00000261728_12 (sequence is synthesized)
taatgtaagattaatattctacttatgactatgttttagtattgaaaaatgagtttctgatgagtttcattagtttctagagaaaacaatggtttaaaaaatttcagtacataagacatt

SEQ ID NO: 810362 - DNA, 120 bp, Artificial Sequence
  ENSG00000261728_13 (sequence is synthesized)
gaggagtctatgaatgttccagaaatctgaaaacatataccactaatcaaagtttctccattcatgttgactagcatttgccttaggtgtcagaattaatggatttgtgttaaaaataaa

SEQ ID NO: 810363 - DNA, 120 bp, Artificial Sequence
  ENSG00000261728_14 (sequence is synthesized)
cacctgaaatctaattccctagctgcattataacacactagattacaagtactaagcttttatttaatgcttataacggctttaaattgtagcaaaatgggcttcccccaagaggactgc

SEQ ID NO: 810364 - DNA, 120 bp, Artificial Sequence
  ENSG00000261728_15 (sequence is synthesized)
tttgttgatcctaagatggggtcataagccagaagttaactatgctttcatatattcttgtaagtagaagtacagtgttggtgtaaattctccttagatggataggtaagcccagaggaa

SEQ ID NO: 810365 - DNA, 120 bp, Artificial Sequence
  ENSG00000261728_16 (sequence is synthesized)
ataatggtcattggcaccatatgaccgtatgcaattcatatgcatatttatatcaagaaaagaacattataggtctggtgagaccctatttttttctgacagtgtcatctgtatttacgt

SEQ ID NO: 810366 - DNA, 120 bp, Artificial Sequence
  ENSG00000261728_17 (sequence is synthesized)
gtctatttcgggaatttggaagtcaagggattctatgctggattgtgaagcatctgtttctgcttgatgtagctactcaattttgtattcttgactaataaagtcataaacataatgcaa

SEQ ID NO: 810367 - DNA, 120 bp, Artificial Sequence
  ENSG00000261729_0 (sequence is synthesized)
cagggtaattggctgttctccagcataagaatgcaagttattcatgagctttgtgagcttgcttctgactaacacagactgttttcactagggagcacagggacaaaaagagttgtgaag

SEQ ID NO: 810368 - DNA, 120 bp, Artificial Sequence
  ENSG00000261729_1 (sequence is synthesized)
ttttgagtcttcaggattattcctttcaagtatgtgataacctgtgattcttctccccaactattttctaaccgtccccgaccttttccacttcctttcatttcgtagtgactaccagaa

SEQ ID NO: 810369 - DNA, 120 bp, Artificial Sequence
  ENSG00000261729_2 (sequence is synthesized)
atttaccaaggaagctgccatgaaataacatgtttcttttagaaatacaactgactcaatagacagctatggatgtgctgttattttggagatacaagagaagaatcagtagagctacat

SEQ ID NO: 810370 - DNA, 120 bp, Artificial Sequence
  ENSG00000261729_3 (sequence is synthesized)
tttcttggcactccaaaatgtggatttcaaaactgttagttcagaagtgttcaacttttgctgcccactggaattatctggagagctgcaaaaggacactgatgcctgggctgcacctcc

SEQ ID NO: 810371 - DNA, 120 bp, Artificial Sequence
  ENSG00000261729_4 (sequence is synthesized)
tagaggtcttgatttgatcaatccaaaggaaggcctgggcagtaaatttttaaaagttccacagcatttctgatggcctcacggatcaggagtctgcaagaccaccctcaggcttcatgc

SEQ ID NO: 810372 - DNA, 120 bp, Artificial Sequence
  ENSG00000261729_5 (sequence is synthesized)
atactcatgtttgtggtttattagagtgaaagactacagattagagtcagcaaaaggaaaaggtgggtagggcagagtctaggagaaacaggacacaagcttccagttggcttctcccaa

SEQ ID NO: 810373 - DNA, 120 bp, Artificial Sequence
  ENSG00000261729_6 (sequence is synthesized)
aggtgttgcatgaacagcacttaattatcttagcaacaatgtaacacacatgtaaatttttgcatcctatgaatctcatctgagccttggtgtccaaggatttttattggggttagtgac

SEQ ID NO: 810374 - DNA, 120 bp, Artificial Sequence
  ENSG00000261729_7 (sequence is synthesized)
aaaggcatgcagcggctatgggacaacattaactactcagtctccagcccccagaggtcagtgtggttcaacaactgatgcagtgcggttcaacaacttagacgacaaaaacactcctgg

SEQ ID NO: 810375 - DNA, 120 bp, Artificial Sequence
  ENSG00000261729_8 (sequence is synthesized)
caggcaggagatttcaagagagctcagaggtcacctcctggatgtcagccaaggaccagtccttttttttttgaatgtgcagggtttgagtaacccaagactgctgtgttaacctttttc

SEQ ID NO: 810376 - DNA, 120 bp, Artificial Sequence
  ENSG00000261729_9 (sequence is synthesized)
tggacacctatatacatatatttgtctgttctttggattctccattgaactgggtattgctgttactgtttttgccttcctagttcctcattaatgggctaaaataaatctttgacacgt

SEQ ID NO: 810377 - DNA, 120 bp, Artificial Sequence
  ENSG00000261720_0 (sequence is synthesized)
gcccacgatggctacagagctccaaggaggaggcttcctggaggaggcggcccagctcatcagagaaccagcatgtcttccccttgggttctgggaccagcacttttaacgataagtcct

SEQ ID NO: 810378 - DNA, 120 bp, Artificial Sequence
  ENSG00000261720_1 (sequence is synthesized)
tttggaccacgctgatccgggctgagacctgtcgcctgccgcgcgccttgggcggaggttagacaggccgcgcacctccaagctttgacacgtccttcctccaaagggtggaggccccac

SEQ ID NO: 810379 - DNA, 120 bp, Artificial Sequence
  ENSG00000261720_2 (sequence is synthesized)
agggacctctgccatcggaaccgcgggtttctgccgggccggaggcgcctgagagatctccgcggaacggcgcgtgaacctgcggccgcggcggcgggtccggatggagatggacgctgg

SEQ ID NO: 810380 - DNA, 120 bp, Artificial Sequence
  ENSG00000261720_3 (sequence is synthesized)
gcccctcgcccctgcatttggcagacctgatgcggagcccgagggtggctgttggcctggggcggggaaggggctctctagatcgggggtcccacctgctgggcttggggagcccatttg

SEQ ID NO: 810381 - DNA, 120 bp, Artificial Sequence
  ENSG00000261720_4 (sequence is synthesized)
gccttctctgattggtctggagttgcaggtgaggccacctcaggaagctgctgtatctgagggagcccgggccgccctgggggacgctggggtttgacttctggggctgggggctgcacg

SEQ ID NO: 810382 - DNA, 120 bp, Artificial Sequence
  ENSG00000261720_5 (sequence is synthesized)
ggtgggtcggggtctgtctgggttggggtccgcggccgcgtggggtctggattggcgtctgcctggcttgggggtcctcagccgcatgcagtttgggtcgaggtcgggggtccgcggccg

SEQ ID NO: 810383 - DNA, 120 bp, Artificial Sequence
  ENSG00000261720_6 (sequence is synthesized)
cgtggggtctgggtcggggtctgcctggcttgggggtcctcagccgcatgcagttcgggtcgaggtctgcagctgcgtggggtccggctctcatggcccctgtgcctggacttcgctctc

SEQ ID NO: 810384 - DNA, 120 bp, Artificial Sequence
  ENSG00000261722_0 (sequence is synthesized)
cggacaacggaaaggcagctctatctgaaggtgaaactgctctagctaacagggaaagctctttaaaagaccatcaaagagacaccctgcacaatgcctgctttccggaggagcctcgcg

SEQ ID NO: 810385 - DNA, 120 bp, Artificial Sequence
  ENSG00000261722_1 (sequence is synthesized)
acaaactcactcagagaagaaacaagaatcgtgttttcctggcatctacgagaagcgctttattagaagcgctttatttttcctctagatttcttttctaaaaaatgaaaaacaaaaaca

SEQ ID NO: 810386 - DNA, 120 bp, Artificial Sequence
  ENSG00000261723_0 (sequence is synthesized)
gccccagaaagctgccttctaccatgtgaggacacatctatgagccaggaaatgggctctcaccagacagtgaatccgccagcaccttgatcttggacttcccagccaaaagaatgggtc

SEQ ID NO: 810387 - DNA, 120 bp, Artificial Sequence
  ENSG00000261723_1 (sequence is synthesized)
ttgctctgttgccaggcttgagtgaagtggtatgatttcagctcactgcagcctccacctcccagtcaaggctggtggcatgcatctgtagtcctgctactcaggaggctgaggtgggag

SEQ ID NO: 810388 - DNA, 120 bp, Artificial Sequence
  ENSG00000261723_2 (sequence is synthesized)
ttcagtgagccatagtcatgccactgtactccagcatgggcaacagactgagaccctctctcaaaaaagcaaaaacaaaaaaacaaccaaggcagtatgaattcggagaaggaaacatca

SEQ ID NO: 810389 - DNA, 120 bp, Artificial Sequence
  ENSG00000261723_3 (sequence is synthesized)
atgaaggctggaatagtacaacagaactcaagatctttcagattctttcaagactcaagcctaggttattacctgcacttaaaaccagctgacagagacaaagatgaaggaaaaacaaat

SEQ ID NO: 810390 - DNA, 120 bp, Artificial Sequence
  ENSG00000261723_4 (sequence is synthesized)
cactccttgggaattacatacctgatctctctgatttccaaatttcccaaagctacacacacgagattatacacatcaggcactggaactatctgtaatactggaacctaaataaaacaa

SEQ ID NO: 810391 - DNA, 120 bp, Artificial Sequence
  ENSG00000269534_0 (sequence is synthesized)
tctgccatgactgtgaggcctccccagccgtgtggaactccccagttccccaggaccttgcatatggcctgcagctcctcactgtcctcgtcgtaggaggccagcaggaagcccccgtac

SEQ ID NO: 810392 - DNA, 120 bp, Artificial Sequence
  ENSG00000269534_1 (sequence is synthesized)
gaggccagcaggaagcccccgtaccggccggcccgcttcccccggcccaggctcctgctcgctggccctcaacacacccgtcctccactcgaggggaaaccccaggagcttcgcacaatg

SEQ ID NO: 810393 - DNA, 120 bp, Artificial Sequence
  ENSG00000269534_2 (sequence is synthesized)
ccccaggacctgaggaagatccacctcacgccaatgtggagttggaaagagagggaccttgaagatgtccttgaaagaatcttaaggaacctcaggggtcctcagaccacactttgagaa

SEQ ID NO: 810394 - DNA, 120 bp, Artificial Sequence
  ENSG00000269534_3 (sequence is synthesized)
ctgctgcccaagtgtggcttcctggccatgtgaagtggcagagtcggaaatggaagtcagaggggcagctgccaggctcacaccccaccccgtcacccctcagctgcccctggacaggaa

SEQ ID NO: 810395 - DNA, 120 bp, Artificial Sequence
  ENSG00000269534_4 (sequence is synthesized)
gctggaactcacctctccattgaggtagatgaggtcgaaggcgtacaaacacacctgcacctggatctcagacgcatccacctcctgggttggggcacaacggagttcgtgagtgcagga

SEQ ID NO: 810396 - DNA, 120 bp, Artificial Sequence
  ENSG00000269534_5 (sequence is synthesized)
tgtgagggcggccatgctgctggctccaggtgctggatcgttaacggctctcagctaattccgacaacctcattccccttcaccagatatttgctctcctagacttttctgcagctaatg

SEQ ID NO: 810397 - DNA, 120 bp, Artificial Sequence
  ENSG00000269534_6 (sequence is synthesized)
gcagtgacatggcacagttctggccaatgagatggaaaaggggaaacctgtggggtgcaggttgtggggttttccagaacagatcttctttcatagtaaaacaacagagatgcccgaaaa

SEQ ID NO: 810398 - DNA, 120 bp, Artificial Sequence
  ENSG00000228082_0 (sequence is synthesized)
agttaccgcctggccactgggtaaacctccgcagcagagagacctactttatgtttcattttcaagctcctatggagcccagcagagagagctgacaaggaggaatactgcgaggggctc

SEQ ID NO: 810399 - DNA, 120 bp, Artificial Sequence
  ENSG00000228082_1 (sequence is synthesized)
gggaaattaggagtttgaaacatccaactaagaagcctaaggtttagactgcatcatattctaataacaacaggattataatatcaaatgagactctctgaccctgcaaatctggaacca

SEQ ID NO: 810400 - DNA, 120 bp, Artificial Sequence
  ENSG00000228082_2 (sequence is synthesized)
gctgtatagggactttgaacctcccttttctccaatctgctggtgtttgtcatcctaatatatacctcatattttctttctgaaaataatttttaaaatatacccatcatacatacggca

SEQ ID NO: 810401 - DNA, 120 bp, Artificial Sequence
  ENSG00000180422_0 (sequence is synthesized)
cacacacctccacacgcgcacatacacacacatgctgacaggtgtgcacatatgcgcacgtgcacacacaaatacgcacgcacagcacacacagacacataagtgtccataaacaacaca

SEQ ID NO: 810402 - DNA, 120 bp, Artificial Sequence
  ENSG00000180422_1 (sequence is synthesized)
gatctggcctcagagccaccctccaggtgcggctgccccgggccccaggtgcggctgcaccgtgctgtggtgacagccacagcaggatcagagcagcctcaaggcccttcaggagccggc

SEQ ID NO: 810403 - DNA, 120 bp, Artificial Sequence
  ENSG00000180422_2 (sequence is synthesized)
agagctggccccaggctgagcttggggaggtgagcccaggcctgggaccgacgcttcctaattggcgggcagagtccatgcagcccctcccagtctacacggaagcccacgtgtccacct

SEQ ID NO: 810404 - DNA, 120 bp, Artificial Sequence
  ENSG00000180422_3 (sequence is synthesized)
cctgcttctgctgtccccaggacagtgaaatttactaatgtggattaagaacattttttaaataaaaaaacattttacacattgaggacggaagagagaagattacggccaaccaacccc

SEQ ID NO: 810405 - DNA, 120 bp, Artificial Sequence
  ENSG00000180422_4 (sequence is synthesized)
gtgcacttccccgcccaggttcatggagtctgagccctctggcctcctgagcctctgggctctgtcaccaggtgggcgccttccccagcccgtgaggctcgctgctcacgggggccccga

SEQ ID NO: 810406 - DNA, 120 bp, Artificial Sequence
  ENSG00000180422_5 (sequence is synthesized)
tgcctgagtgatgtcatggatttaggtttcagtgctggcacatgtggcccgcagagctcagctcctctgtgagggacgtttcggctcctgtgggctttgctgtcccccatgctgactctg

SEQ ID NO: 810407 - DNA, 120 bp, Artificial Sequence
  ENSG00000180422_6 (sequence is synthesized)
cctcacttggttgtcctcaggtcactctgtgcggtgtgcactgaccccagccagtggatgttccccgtccaagagcaaagctacagtcggctgcaggtgcagtgacttttgcacagtgga

SEQ ID NO: 810408 - DNA, 120 bp, Artificial Sequence
  ENSG00000180422_7 (sequence is synthesized)
cttacttgattttgcctgatgccttccaaggaggctgtgcacagcaggtgtgagatgccccatctcaccaaccggccaacatcccgatgggagatgttgagttttcaccacgctgctgag

SEQ ID NO: 810409 - DNA, 120 bp, Artificial Sequence
  ENSG00000180422_8 (sequence is synthesized)
tgtgacgtggaatcttcttattttagcttgcatttccctgattacaagtcaggtggaacatctcgaatatgtttctgggccatttgattttcctgcaagtcacctgttccagttctttgc

SEQ ID NO: 810410 - DNA, 120 bp, Artificial Sequence
  ENSG00000180422_9 (sequence is synthesized)
ccatttcctgttgggttggtcaatattttttgtgattacacgttggatacgtggctggcctttggcttgcctttgacttcgtttgttctatcgaagcatgtgcagaattgttaaatttta

SEQ ID NO: 810411 - DNA, 68 bp, Artificial Sequence
  ENSG00000180422_10 (sequence is synthesized)
gtttgttctatcgaagcatgtgcagaattgttaaattttaatgtattcaaatgcattaatctcatttc

SEQ ID NO: 810412 - DNA, 120 bp, Artificial Sequence; identical to SEQ ID NO: 613842
  ENSG00000180422_11 (sequence is synthesized)

SEQ ID NO: 810413 - DNA, 120 bp, Artificial Sequence
  ENSG00000180422_12 (sequence is synthesized)
tggagcctgggctcaagccatcttcccacctcagcctgccaagtagctgggaccacagacatgtgccactgctgcgcccagctagcctttaatatttttaaatgctgtaagatctgcagg

SEQ ID NO: 810414 - DNA, 120 bp, Artificial Sequence
  ENSG00000180422_13 (sequence is synthesized)
tttttttccaaccaagtttatagcttttcaccccacggatccccgaggccatgacaggcagtgacctccttggggcacccgcagagtcctcccccccatcttgggagggcttgtccagtt

SEQ ID NO: 810415 - DNA, 120 bp, Artificial Sequence
  ENSG00000180422_14 (sequence is synthesized)
tcagttttgtttgtttactaggctttgttttacagtcactagttaaatttactaagatttttcaacttcttgtctcaagggacttcattttaataaacaatatcttttctcttttctttc

SEQ ID NO: 810416 - DNA, 120 bp, Artificial Sequence
  ENSG00000180422_15 (sequence is synthesized)
cacaagagagacgaggtcactggaggataaacatccgtgactgcacctcatgatccatcacgcacgacggccgcagcatctcctgccagctgccggcacagacaagagcacgggatggac

SEQ ID NO: 810417 - DNA, 120 bp, Artificial Sequence
  ENSG00000180422_16 (sequence is synthesized)
gaccgcggtagcaacgtggggctcatctgcctctctctgagcaggaagcccctcaggctcacacggggagccaccaggctggactgggtgcagcttacggacgtggcgcgtgctgtgggc

SEQ ID NO: 810418 - DNA, 120 bp, Artificial Sequence
  ENSG00000180422_17 (sequence is synthesized)
gtcgggccgcggctcctccatgcagtacttacactgctgtctgcagatcgcacccaatcaggagggaatggtccaggcaggtgggcaaggccacggtttggccagggtggtcctgcgggc

SEQ ID NO: 810419 - DNA, 120 bp, Artificial Sequence
  ENSG00000180422_18 (sequence is synthesized)
agtactgagcccgccctgctgggcaccccacagcccctgtggctctccagctgccactgaggccggacgcctcatgaggaggctcccatctgtgggtggcagaatgacggccccgaagac

SEQ ID NO: 810420 - DNA, 120 bp, Artificial Sequence
  ENSG00000180422_19 (sequence is synthesized)
cccccgcttcctcacccgaagaccccccgcttcctcacccgaagaccccccgcttcctcacccgaagaccccccgcttcctcacccaaagaccccccgcttccttgccccgaagaccccg

SEQ ID NO: 810421 - DNA, 120 bp, Artificial Sequence
  ENSG00000180422_20 (sequence is synthesized)
cttcctcaccctgggacctgtgagttcacacagcagcggggacctgcgactgtggacggcacatcagctccctcaacagggaggctgccctgggtgacccgcgagggcacagggtacctc

SEQ ID NO: 810422 - DNA, 120 bp, Artificial Sequence
  ENSG00000180422_21 (sequence is synthesized)
cgtcctgctgagtggaagagggaggccatggcggaggcgggcgtgagggggactggcctgccactactggcttcgtgaggggcccccagccaaggagaggcctcccgaagccggaagagg

SEQ ID NO: 810423 - DNA, 120 bp, Artificial Sequence
  ENSG00000180422_22 (sequence is synthesized)
cggaaaatggattctcccaggagcctccagaaggaaccttggtgttggtggaatgggatgtgagaggacacgcgggtgatgtgtcttgggtcacaccagttcccggtccccgcaccagcc

SEQ ID NO: 810424 - DNA, 120 bp, Artificial Sequence
  ENSG00000180422_23 (sequence is synthesized)
cgccctgggcgggaagcctaagaggaatggaggggccatcgtggggctctcccggaaactggccccgggtgcctcggtccctgcgtcagtgcggggtttcggtggccgccctgctggctc

SEQ ID NO: 810425 - DNA, 120 bp, Artificial Sequence
  ENSG00000180422_24 (sequence is synthesized)
cggcaagagctgggggcgtgaagccaggcccaggtgggctgtggcggcatccaggtggaaggacgtggaggactcggaggcggaggggtctccagggcagggcagggccagttgcctggg

SEQ ID NO: 810426 - DNA, 120 bp, Artificial Sequence
  ENSG00000180422_25 (sequence is synthesized)
gccatctgctgtgtccaggagcccggcgctgccactggccttgccccaaggcccagctctgcccttcatcccttcagcacctccccgtaccttccttccatgggtcttaagctgtggcaa

SEQ ID NO: 810427 - DNA, 120 bp, Artificial Sequence
  ENSG00000180422_26 (sequence is synthesized)
gtccttaagctgggacggccagcgccagccctgcccccaacaggtcactcagcggctcggagcccacgtcctcctcggtgacacaggaaaatggtgcagttgtgcaagggcatgagaggg

SEQ ID NO: 810428 - DNA, 120 bp, Artificial Sequence
  ENSG00000180422_27 (sequence is synthesized)
tcccgtggaaggcacattccagaaggttctgtcccatggaaggcacgttccggaaggttccatcccatggaagccacgttccagaagtttccatgctgtggaaggcatgttccggaagtt

SEQ ID NO: 810429 - DNA, 120 bp, Artificial Sequence
  ENSG00000180422_28 (sequence is synthesized)
gcagaggccgctcggtcctcaggagctgagcatcaccctgggagtctcaaggagggtgtcccctggccttagcgggcagccagggccagcatgtggtctgtggcagccggtctcagaggt

SEQ ID NO: 810430 - DNA, 120 bp, Artificial Sequence
  ENSG00000180422_29 (sequence is synthesized)
ggcctggttcgcagtcttgctggatggagatccccagctcctagggcaagggcaggtggggtggggccgcctcggtcagctgataggaactgaactgagaaggctgtgagccgctgagtc

SEQ ID NO: 810431 - DNA, 120 bp, Artificial Sequence
  ENSG00000228084_0 (sequence is synthesized)
tgctctgctggcagcccctggttcctgcttcaccgtcgcgtggaggcctggggcactgctttctgctacacctctcctaggagcgcgaaacagatggagtgacactcgtcgagggcctct

SEQ ID NO: 810432 - DNA, 120 bp, Artificial Sequence
  ENSG00000228084_1 (sequence is synthesized)
gcgggactgtctgtttgcagagggtgccaaggtgtccactgcgtaaggaagggcaaagtcctttggggcaaagaaccctgagaggaacggggagatggattttgaaagcaaacgaaccct

SEQ ID NO: 810433 - DNA, 120 bp, Artificial Sequence
  ENSG00000228084_2 (sequence is synthesized)
ctgccaaccaaccagtggtctgcaagaaggcttgttcttccacttcacccaccctgactgagatcttgagactgaaggaaacccaaagccgtaccaccaatgggcctagtgtcatcaacc

SEQ ID NO: 810434 - DNA, 120 bp, Artificial Sequence
  ENSG00000228084_3 (sequence is synthesized)
gggagaggaaaaagaaaactgggcccagaggattgcagagttatgagggaccaaccccttcctggctgcatggatcacagcattaccttttaaaagtgttccagtagctgtgttggaaac

SEQ ID NO: 810435 - DNA, 84 bp, Artificial Sequence
  ENSG00000228084_4 (sequence is synthesized)
cattaccttttaaaagtgttccagtagctgtgttggaaaccctctaaccacggcagcccattcagccatgtaagcaagtcgcca

SEQ ID NO: 810436 - DNA, 120 bp, Artificial Sequence
  ENSG00000220256_0 (sequence is synthesized)
ggatgaagaggaagctgagagccgcagatggaagcttcctcctcccgtgtgcagcgttctgcatactggaggcagaggacctggactgacagctatgaggacctggactgacagctatga

SEQ ID NO: 810437 - DNA, 120 bp, Artificial Sequence
  ENSG00000220256_1 (sequence is synthesized)
ggacctggactgagcagctatgagcacctggactgacagctgtgaggacctggactaaacggctatgaggacctggactaaacggctatgaggacctggactgaacagctatgagcacct

SEQ ID NO: 810438 - DNA, 120 bp, Artificial Sequence
  ENSG00000220256_2 (sequence is synthesized)
gactgagcagctatgaggacctggactgagcagctatgaggacctggactgagcagctatgaggacctggaatgagcagctatgagcacctggactgagcagctatgaggacctggactg

SEQ ID NO: 810439 - DNA, 120 bp, Artificial Sequence
  ENSG00000220256_3 (sequence is synthesized)
agcagctatgaaccttgagcagggaatgtctctgtgcctcagtttccttacttgtaaaacaaggaagtggaaccagagccccccccattcttgctcatgcactcccacggtcctggacaa

SEQ ID NO: 810440 - DNA, 120 bp, Artificial Sequence
  ENSG00000220256_4 (sequence is synthesized)
tactgagcaatctacagatatcaacgtagcataatttgagcctccttgtttttctaaaatgggaagattttaactgagaagcagccttttcaagaataccatagttactctattgcatac

SEQ ID NO: 810441 - DNA, 120 bp, Artificial Sequence
  ENSG00000220256_5 (sequence is synthesized)
tggaactccagctgcattctattacatcagtattatataatacctctttctctcttaaaaaaaaataaaaaaagtcctgtaaagagcagaactaaagtattacagagaacaacaagaggc

SEQ ID NO: 810442 - DNA, 120 bp, Artificial Sequence
  ENSG00000220256_6 (sequence is synthesized)
atttttcacgattagccacttaattcgaaggattaggactcaagcataataccgcacaggaagggagcattgcataattaaaaactcttttataaactgcagcattaaaactgccatggc

SEQ ID NO: 810443 - DNA, 120 bp, Artificial Sequence
  ENSG00000220256_7 (sequence is synthesized)
cagtgagcttgggagtgtttccatggtggagtgctattatcggcctaagatgcttctcagaaatgcaattccaagttcataaacccagcgaggacccgcactcccaattccaggcagttt

SEQ ID NO: 810444 - DNA, 120 bp, Artificial Sequence
  ENSG00000220256_8 (sequence is synthesized)
ttgaagcactgtggaaaatccggtgacgtaggatgtgcccgttcccccagcaggggtggctgccatgctgttgacagggatgggtgtggacgcagagagagcccaggcagacgaggtggg

SEQ ID NO: 810445 - DNA, 120 bp, Artificial Sequence
  ENSG00000220256_9 (sequence is synthesized)
gagcacgggtgagcaatggggctgccatggaattaaagcatgcggctctaggggccccaggaagccaggaggacagaagcccaaccacccgaaacagaggaggaggagtgaggccatcag

SEQ ID NO: 810446 - DNA, 120 bp, Artificial Sequence
  ENSG00000220256_10 (sequence is synthesized)
gtgctaagggggtcactggagcccctaggacatggcctctgactgcacgcccagacctttcagcatgcccacatgctcctgcagccagggcctcggcagcttgccttcccatcccctgca

SEQ ID NO: 810447 - DNA, 120 bp, Artificial Sequence
  ENSG00000220256_11 (sequence is synthesized)
gcagcaggtccagtcctgcctcgtctccctcgcaagagggctcagggctgctgcgtggaaggaaacgaattgtccctgcaacagtctctcacccaggaaaaccccacacagcacacagct

SEQ ID NO: 810448 - DNA, 120 bp, Artificial Sequence
  ENSG00000220256_12 (sequence is synthesized)
cgggagttggtccttggatgttggggatgagcttccctcccagccccttctgccttcccaggaagcaagcccaggggcggcatctggactcctctctgtcccccatgctcctgcctggtg

SEQ ID NO: 810449 - DNA, 120 bp, Artificial Sequence
  ENSG00000220256_13 (sequence is synthesized)
cacgtgccttgtctgaaaggagagtctgagagcagggaccttgtgcttggctccactcagtgcctcctgctttcccacaggacggggccttgctgcctgcaggtgccctcatccacgtcg

SEQ ID NO: 810450 - DNA, 120 bp, Artificial Sequence
  ENSG00000220256_14 (sequence is synthesized)
ccagtgcccgagctgaccctcgtgggctcgtatggactacagggttagtgactttaaaaaaaaaaaaaatcaagttagcctaactcacaagtccaagcaaacaaataaggaaacaaggcc

SEQ ID NO: 810451 - DNA, 120 bp, Artificial Sequence
  ENSG00000220256_15 (sequence is synthesized)
ccttgccaggggtcctaatgcggccggagtctatcccagcaggtcaagcccctgcactgctggcatcccatgcagcaacttccaaatgtgctgccatgaaaagccctgctcctgcctttg

SEQ ID NO: 810452 - DNA, 120 bp, Artificial Sequence
  ENSG00000220256_16 (sequence is synthesized)
agctgtgtctaatctactgtgcttcaggagagcaggagcagtacccagcttctcctagggaatggccactaccctatctgctggacgtggctctggatgaatcaaagaagttcctttgac

SEQ ID NO: 810453 - DNA, 120 bp, Artificial Sequence
  ENSG00000220256_17 (sequence is synthesized)
cttgccacatttacccggaggtgttttgactccatggcagatactttgcccatttgccacagagcagatggttactgagagttcgtagagctgttagaaacttatgaaagagcctgatga

SEQ ID NO: 810454 - DNA, 120 bp, Artificial Sequence
  ENSG00000220256_18 (sequence is synthesized)
gccataaagtggaccagctgtggacaagagcaattatcaagagtaatggctcaggattacctaagaaatacaaacacatttttttcaattcaaaattaatattacagcagacataacaca

SEQ ID NO: 810455 - DNA, 120 bp, Artificial Sequence
  ENSG00000220256_19 (sequence is synthesized)
aaataaagccaacaataactgaagcaaaagttattatagatttaaaaagctataaaactgaagcatacagcaaaagttgttttagattaaaaattgaacaatcagtcattgttaacattg

SEQ ID NO: 810456 - DNA, 120 bp, Artificial Sequence
  ENSG00000220256_20 (sequence is synthesized)
aaaactataaaaattgaactggggaaattagaaattatcagtggaaaatgcaactgacagtatgtaaaaatacagatgttaaatttaaaatttgtattgacagaagaagaagaatttttt

SEQ ID NO: 810457 - DNA, 120 bp, Artificial Sequence
  ENSG00000220256_21 (sequence is synthesized)
ttaaatttagagctgtgcaaattattcgagaaatttggctttgtagaagtaatggccacaaaaagaagactcattagagcagaagattcactttttgaaattagactcgagtaaggaaaa

SEQ ID NO: 810458 - DNA, 120 bp, Artificial Sequence
  ENSG00000220256_22 (sequence is synthesized)
aaaaacaaaaagcccacaaaaagaaaggatgagtcaagttatcaccgaaaaataaaaatggaaacaatttggttaactgctgttagaaaattgacccaaaaactaaactgggttcatgga

SEQ ID NO: 810459 - DNA, 120 bp, Artificial Sequence
  ENSG00000220256_23 (sequence is synthesized)
atttgcttcagaaaacgcttccttgacaaatgtcaacagttgttttaattctgattaacgtgatgggtcatgaacttggagtcaagagctctcagggtgaaaatgcccactgagtcaaaa

SEQ ID NO: 810460 - DNA, 120 bp, Artificial Sequence
  ENSG00000220256_24 (sequence is synthesized)
tggcagagtccgaacagcctcactgcggagggccctgcagtcgtggggttcagccccccgccggctcaggtgggctgctcatgccacaccatcccctatggggaatccaatgtgtgtctg

SEQ ID NO: 810461 - DNA, 120 bp, Artificial Sequence
  ENSG00000220256_25 (sequence is synthesized)
tcgagcacagcccaccacagtccttcaacaagatttaatatttggactctgcaaggaggactttcttccttctagaccacaagccacaagaatctggacatgaaacagtccagtactcac

SEQ ID NO: 810462 - DNA, 120 bp, Artificial Sequence
  ENSG00000220256_26 (sequence is synthesized)
catgacagccaggtggagacacctgtttaagaacaaagctgatgtggtttggatgttttttctctgcaaatctcacattgaaatgtgatccccagtgtgggaggtggagcctggagggag

SEQ ID NO: 810463 - DNA, 120 bp, Artificial Sequence
  ENSG00000220256_27 (sequence is synthesized)
gtgactggatcatgggcgtggatctctcatgaatggtttagcgccgtcctcttggtgatgagtgagctctccctcagttttttcctgcaagatctggttgtttaagagtgtggtgcctcc

SEQ ID NO: 810464 - DNA, 120 bp, Artificial Sequence
  ENSG00000220256_28 (sequence is synthesized)
cccttccttctggctctggctcttgccacatgatgtacctgctcccttccaccttctgccatgattggaagcttcctgggccctcaccagaggcagatacccataccatgcttcctgtac

SEQ ID NO: 810465 - DNA, 120 bp, Artificial Sequence
  ENSG00000220256_29 (sequence is synthesized)
gaaaagcctgcatcatgtgggaataaatgaggctgcatgtgatcaaatacccggaaaacaatggcgtaaaccagagcaggggctggggctcagctgtggccggacacccaccacgtgccc

SEQ ID NO: 810466 - DNA, 120 bp, Artificial Sequence
  ENSG00000220256_30 (sequence is synthesized)
atgggatgcttccaggtccccttctagaccagcagaagcccaggacacctgaccgccactggacaagcacatggggaaaatgagccccccttctccacgggttccccaacacctcagaag

SEQ ID NO: 810467 - DNA, 120 bp, Artificial Sequence
  ENSG00000220256_31 (sequence is synthesized)
tccaggaagacacagtgatgattcatacattttgccaaagagggatgatttcatgaaatctccaaatgatcacgataacatcccagccattagggatactaagccagccaccgaaattgg

SEQ ID NO: 810468 - DNA, 120 bp, Artificial Sequence
  ENSG00000220256_32 (sequence is synthesized)
cagagaagccctcatctttgagaggagtaggaagcaacacatatactctatgtccagaattagaatccatactggcatgctgttcctatacatcaacccgaaccccagcccccaacccca

SEQ ID NO: 810469 - DNA, 120 bp, Artificial Sequence
  ENSG00000220256_33 (sequence is synthesized)
ctcactggaggcagaatggtgtgggttcagcctcagctcagatgctcactagccagaagaccagaaagcacctacctccctaagcaccaacctcttcatctagaacatgaaagtcacatc

SEQ ID NO: 810470 - DNA, 120 bp, Artificial Sequence
  ENSG00000220256_34 (sequence is synthesized)
cttctcctgcctctgtccccaaagtgagctaagctcagaagagccaagcccaggaaagtatttagaaaatggatccattgaacagctcttccattgcaggtcagattcttcaatgaattc

SEQ ID NO: 810471 - DNA, 120 bp, Artificial Sequence
  ENSG00000220256_35 (sequence is synthesized)
tttaattgaaccatttgttaactaatatcatgtgttggcttttggttttactatgttttagtacaaatatccagggacaaactcttcagctgactacatctgatgactaaattgttcaat

SEQ ID NO: 810472 - DNA, 120 bp, Artificial Sequence
  ENSG00000220256_36 (sequence is synthesized)
ttcagctgactacatctgatgactaaattgttcaattgcttctgtaattttctctatcctggtgatgacatcttgagaggtgaagccagctgtgcttctgggtcaggtggggacttggag

SEQ ID NO: 810473 - DNA, 120 bp, Artificial Sequence
  ENSG00000220256_37 (sequence is synthesized)
acaaataagggaataaaagctggccactgccagcttgctgcgggaacatgctcaggtctgttcttttgtcttgattataaatcttgctgctgcttgctctttcggtccgcaccaccgtta

SEQ ID NO: 810474 - DNA, 120 bp, Artificial Sequence
  ENSG00000220256_38 (sequence is synthesized)
atcttgctgctgcttgctctttcggtccgcaccaccgttaagagctgtgacactccccgcgagggtctgtggttgcgttcttgaagtcagcaggaccagaaacccacgggaaggaaccag

SEQ ID NO: 810475 - DNA, 120 bp, Artificial Sequence
  ENSG00000220256_39 (sequence is synthesized)
ttccggacaaaatctcaggcccagtcaactgtcacctgatcccaactctagccagactcagttttaagtcccgtcgactgccacctgaacccaactcaagccagactcatttaagaggag

SEQ ID NO: 810476 - DNA, 120 bp, Artificial Sequence
  ENSG00000220256_40 (sequence is synthesized)
agtgagcaaagccacaccccctccctgttgccagtctcttcgtgcgtgggcaactggttctgcaaccagttcatatgtcaatgggccattaatcgtgctgtaaaacgggccgtaaaatac

SEQ ID NO: 810477 - DNA, 120 bp, Artificial Sequence
  ENSG00000220256_41 (sequence is synthesized)
ctccccactgaaatacccgtggaggagccttgggagccaggactatgggtcagtgctccgccgcagggatttctgtctcccacggtgtggtcagtgagctggagtgcgaccaggtcccca

SEQ ID NO: 810478 - DNA, 120 bp, Artificial Sequence
  ENSG00000220256_42 (sequence is synthesized)
ctggcacctctctctctttgggttggattcttggaactgagaccccctagccgcagcccccctctgctgtgcgtctgccactttccgggccatgaatacatgttcatgtctacaccacgc

SEQ ID NO: 810479 - DNA, 120 bp, Artificial Sequence
  ENSG00000220256_43 (sequence is synthesized)
tggaaccattttctgtcccacctcgggactgggtggcacgtgagagcggccagggagagaccgcatctgggaaggcacagctggctgcagggaacggccgccctggaagagcccgtgggc

SEQ ID NO: 810480 - DNA, 120 bp, Artificial Sequence
  ENSG00000220256_44 (sequence is synthesized)
ccagcaacccagggttctagtacctggtgactgaccctttctggtaagagaatagtgatgaactttgaagttatctggaggtgagttccgttcttccttgtgagatgactgaggggtggg

SEQ ID NO: 810481 - DNA, 120 bp, Artificial Sequence
  ENSG00000220256_45 (sequence is synthesized)
ggctgaaattctgcatggagctggggtggtccttttggtggaggccagacactggcctttgggctccgcaggtgagctgcagcgaaggtcctcagtcagccagatggatggtgcgaggag

SEQ ID NO: 810482 - DNA, 120 bp, Artificial Sequence
  ENSG00000220256_46 (sequence is synthesized)
ccagggagcccacctgctatgcctgggaaaatggtttgtcttccaggacaagtcattctacaacctgcacagagctccggagctgcagagagggagctcgttgtatccattcgtctgtgt

SEQ ID NO: 810483 - DNA, 120 bp, Artificial Sequence
  ENSG00000220256_47 (sequence is synthesized)
ctttatatattcatgaatgtgaatggtatagagtcactgctcaccgtgggataaaaggcaatttttagaaagcatctgttctgtgttctcaacaagactcaggaaactctgtgaaaagag

SEQ ID NO: 810484 - DNA, 120 bp, Artificial Sequence
  ENSG00000220256_48 (sequence is synthesized)
atggagagcgagataactaagtgacagactgggatgaaaatggaattggctgaggagtagcaggaaggaacacgcaggctgggcgaggcgctggggacagcagggaagggaagttccacc

SEQ ID NO: 810485 - DNA, 120 bp, Artificial Sequence
  ENSG00000220256_49 (sequence is synthesized)
tgagcaaagctgtgaactcagcttcaagaccccacgctgctgcagaaacctgctggggatggagaggacaaaccccagacaccgtcgtgggatgtagaggggaaggacaaagaacaaaat

SEQ ID NO: 810486 - DNA, 120 bp, Artificial Sequence
  ENSG00000220256_50 (sequence is synthesized)
gaaaaccccccacgatggcaaagacgacgggcaagaacgattgggcgtggcgcgcaggagtggtccccgcgaagacagcgtcagagggaagggaacacatcccagccacagccaggcagg

SEQ ID NO: 810487 - DNA, 120 bp, Artificial Sequence
  ENSG00000220256_51 (sequence is synthesized)
agggagaagcctcggagctgaagcaagccccgagtctgttatcagcaaaggtcaggccaaggcccggggaaaccgtgaaatgttgtgtacacacgttgcacactctcaagaagcttaaaa

SEQ ID NO: 810488 - DNA, 120 bp, Artificial Sequence
  ENSG00000220256_52 (sequence is synthesized)
atactgagtatcataatagcgagcagctatgaggaaaagccactatgagcctactgctggctcaggttccagtcttcgttttaaacgcatgagtgttaaagttaacttctctggccgggt

SEQ ID NO: 810489 - DNA, 120 bp, Artificial Sequence
  ENSG00000176515_0 (sequence is synthesized)
cctcaaataagagccacaaacgtggaagatatatccaaaggaaccaaattaaaggactggagaaagtctaggtgagatggctttgtcccgttgcaggcgagttccaagcacagagaacca

SEQ ID NO: 810490 - DNA, 120 bp, Artificial Sequence
  ENSG00000176515_1 (sequence is synthesized)
aatggtttccacagagaacatgtgtagaagggattgtaacccacaactgtctgaacccaagcactaagcttcaaaccagactctgtgctgcttctgctttatacacaggccctggctgaa

SEQ ID NO: 810491 - DNA, 120 bp, Artificial Sequence
  ENSG00000176515_2 (sequence is synthesized)
aacccttgactttaccaggcatgcaaggagatgctaagtccactttggctgcagatctctaaacgaccacggcccgaagtgtcagtttcaaatgcttgtttcagctctgccctccccaca

SEQ ID NO: 810492 - DNA, 120 bp, Artificial Sequence
  ENSG00000176515_3 (sequence is synthesized)
tcaaatcccacctctctcacgctaaagcatcataatatatttgtgctgagagttgccttagaaatcattcagtattcagttcacgggggaagaaacagaaagcccctagaggtgacctca

SEQ ID NO: 810493 - DNA, 120 bp, Artificial Sequence
  ENSG00000176515_4 (sequence is synthesized)
ttagcctacagttgccctgagaactggtggcagaagcagattggtgtccagcctcctgatgtacatgccagtgctctttcccccaagccatgtgtctcctggtcacgccctttgtccttg

SEQ ID NO: 810494 - DNA, 120 bp, Artificial Sequence
  ENSG00000176515_5 (sequence is synthesized)
ctgtcctctactattctcttctggaagactcacgatgagagagccgacttctccaagctgcactcctagctctctgggacccagcagggaccgctgccttccagccagcagtttgaagaa

SEQ ID NO: 810495 - DNA, 120 bp, Artificial Sequence
  ENSG00000176515_6 (sequence is synthesized)
ggacagctaccatcaaacacagacttacagcctccctgatgccctggatgccaggaaatgtctggaccagtcaagataagagcaaggcagagccaggaagaaatggggacaggagttcct

SEQ ID NO: 810496 - DNA, 120 bp, Artificial Sequence
  ENSG00000176515_7 (sequence is synthesized)
atttaaatatataaagaatcctttcctaggtagagaaaagtcatctagcaatgtgactgatcacctctccgtttatctgtttgatcaactggaatttctatacagaaggtttatacaaag

SEQ ID NO: 810497 - DNA, 120 bp, Artificial Sequence
  ENSG00000176515_8 (sequence is synthesized)
aagccacaaacaaccattgtcacaatgacccctacataattccttgtgtaaatgctctggaaatgcacccagaagtctggagaaggtccaatcaaactgggtggcaggaagaagcaagct

SEQ ID NO: 810498 - DNA, 120 bp, Artificial Sequence
  ENSG00000176515_9 (sequence is synthesized)
ctgttctcagatcttcaacagaatcacctggaccctggggttgccaccacgctaagccaaggaggcctctgaatgcacgggagtgcagggtctgaagggagttgttaaaaggtgtttctt

SEQ ID NO: 810499 - DNA, 120 bp, Artificial Sequence
  ENSG00000176515_10 (sequence is synthesized)
gatccaggaccatgtaaagacccaggagaaataggtatcccaaagagaacagcgtataagattcacaaaccaatgacaaacacgctgggttcgctgctggtctccacagttggttggttc

SEQ ID NO: 810500 - DNA, 120 bp, Artificial Sequence
  ENSG00000176515_11 (sequence is synthesized)
tgtagggctcagctgcctctttctctctacttctggtttcagaaaacacgagagagaagccgagtgctcatggagtttcctcaaagactcagcaaaaactaggctttgtgttctgagatc

SEQ ID NO: 810501 - DNA, 120 bp, Artificial Sequence
  ENSG00000176515_12 (sequence is synthesized)
aggaagtaacagtgagagtccaaaattttcttccctgacaatgtctcctactcaagcagggcctggaagtcaccccctagaatcaaagccttgacatatgcaagctcatagtttattgct

SEQ ID NO: 810502 - DNA, 120 bp, Artificial Sequence
  ENSG00000176515_13 (sequence is synthesized)
tcttctcccatctgcccgttgacagataaatcccagagggaataaaaacacattgccctcagcagattattcttcactgaagaataccagtcttttaacactccgctacagaaatagctt

SEQ ID NO: 810503 - DNA, 120 bp, Artificial Sequence
  ENSG00000176515_14 (sequence is synthesized)
atttcacagacccagaaatgttttctttctctaagccaataacatatgcttgggtttatgccaactctaccagaggcgcacagatacaatgaggcatgaagttcagaataatagaaagta

SEQ ID NO: 810504 - DNA, 120 bp, Artificial Sequence
  ENSG00000176515_15 (sequence is synthesized)
gagagttggaaagcacaggagaacccatctagaccaacctgttttgttgaaaaaggagctccctgacccagagaggttaagggtttgctgtgagacggtgcccctggttaaaggcagcat

SEQ ID NO: 810505 - DNA, 120 bp, Artificial Sequence
  ENSG00000176515_16 (sequence is synthesized)
gagatgctgtcctctgatccccagcttcctagggctcttgcctctaggtcacactgccttgaggccaggagctgatattgattgaacagatgtgaaaacagaagaaaaaaaaattgtggt

SEQ ID NO: 810506 - DNA, 120 bp, Artificial Sequence
  ENSG00000176515_17 (sequence is synthesized)
gactgccctctgacaattttccactttctttggaccaattttctttgccattatctggaaaaaaaaaaaatgtccagaagagcattttaaattcaggaagtggttctggaactaggagaa

SEQ ID NO: 810507 - DNA, 120 bp, Artificial Sequence
  ENSG00000176515_18 (sequence is synthesized)
gacacaccttgatgacagtaatattgtctaagtgagaaggaacaagctcttgaatgtttctagaaaaaccaaatatgataggagaccataaaattatacttcgtcatatggatttccagt

SEQ ID NO: 810508 - DNA, 120 bp, Artificial Sequence
  ENSG00000176515_19 (sequence is synthesized)
ttgagaaaacttagtggctaaacaaaggtgccgcttgagagatgcagacagaaatcagcctctgctttaagaacaagttgctacgctgaagaatgagaagaggaatggggcccagaggct

SEQ ID NO: 810509 - DNA, 120 bp, Artificial Sequence
  ENSG00000176515_20 (sequence is synthesized)
gaaggtctggaccaatctcccttcccagataagcgcctggaccctcgttcctcagaagccacgtgtaattaccagctctttttggctacagagcacatgcccaggaggcttggagaagca

SEQ ID NO: 810510 - DNA, 120 bp, Artificial Sequence
  ENSG00000176515_21 (sequence is synthesized)
ggaatttaaaacatgctagtttcagagccaagattggtgacaacaccatcagttactgtttgggcttcgggaagccgtgggctgcagcactgggtctggtgtcctgggctgtgtgggacc

SEQ ID NO: 810511 - DNA, 120 bp, Artificial Sequence
  ENSG00000176515_22 (sequence is synthesized)
tcagcaaggttgtttcctgaaatgaaagctcctcttctgggggatgacacaccaggaccacctgcagatgatgtttatgaatcccccagcaggggtggattgatcttacaatgggactgt

SEQ ID NO: 810512 - DNA, 120 bp, Artificial Sequence
  ENSG00000176515_23 (sequence is synthesized)
gtaatataaacatttcattattctacaaaagaatacacacaataccacctaagggtctctaagaatagggttggagagtgacaatgagaaaatgccactcaaaaagaaatagagccgcat

SEQ ID NO: 810513 - DNA, 120 bp, Artificial Sequence
  ENSG00000176515_24 (sequence is synthesized)
tccttctacacaacattaatattaactttacatacaggggaaaaaaatggcattttaccttaagagttatttgtaaactctctccacaccatgagataaaatcagtgcagagctcagagc

SEQ ID NO: 810514 - DNA, 120 bp, Artificial Sequence
  ENSG00000176515_25 (sequence is synthesized)
tctgaatttcctcatttgggggctaatagactttaatgggggctcttcttggcatgcaaatgaacgtgtgtgtctctgagtgcatgtgtctgtgtgtgtacacacgtccctttgaagttt

SEQ ID NO: 810515 - DNA, 120 bp, Artificial Sequence
  ENSG00000176515_26 (sequence is synthesized)
atttacttggtagcactaattgtaaaagggcacacccaggggaatttaatgaggcgacatgctagaatatagacattagaaagggaattaatattttcctcataatagcaagtaggtgaa

SEQ ID NO: 810516 - DNA, 120 bp, Artificial Sequence
  ENSG00000176515_27 (sequence is synthesized)
gtcaagtatgaggacagaaggaaagaaaaaggaaggcagggaaagagggaaggagaggagaggaacaggttttgatgatcgtagataagaaccaataaacactgttgcttcacactcccg

SEQ ID NO: 810517 - DNA, 120 bp, Artificial Sequence
  ENSG00000281160_0 (sequence is synthesized)
ccgagaagcttccgcccaaccctttccaggtgccgctcccctgcgcattccagagcagtactctccaaggtgggaaacctaggagtttggagtctcctccgggatggagaagctgccgct

SEQ ID NO: 810518 - DNA, 120 bp, Artificial Sequence
  ENSG00000281160_1 (sequence is synthesized)
agcttagttcgctttggggaccggaggggctagaaaggaaactgggggcgggggtggggggtggacactgggcaggactgagcatcagcaaggcgtgattctgaaagggagggggcgtcg

SEQ ID NO: 810519 - DNA, 120 bp, Artificial Sequence
  ENSG00000281160_2 (sequence is synthesized)
gccccctaccccggagcgtccgaggcgctggtcttcatacctgtgtcggctctttcgaaggagagaggaggagtcggggtcttcactttcttctcagccgcattaaaagccctcgcagtt

SEQ ID NO: 810520 - DNA, 120 bp, Artificial Sequence
  ENSG00000281160_3 (sequence is synthesized)
ctccaggtttccgagggccagtgttctgggtcagtgaaagggctctggccacagctggctcttggtgtcctgggcctctcttgacgcagctgtaaaatgcggatgacaccatctggtttt

SEQ ID NO: 810521 - DNA, 120 bp, Artificial Sequence
  ENSG00000281160_4 (sequence is synthesized)
gctcagaggaatccggtttgggaaagggatgtgttttcttcccgggccaagttaccaccacccgcggcgcccactgttccccgttgtcgacaagcggcgccagcgagggtcctggggaac

SEQ ID NO: 810522 - DNA, 120 bp, Artificial Sequence
  ENSG00000281160_5 (sequence is synthesized)
cccaggacagtaccttccagaactcagctgcgcagcctggaggtgaggacctcacccctagtcagtcacccgtccggtggagggaagggaggcaccgaggctgccgtgcgcctttccctg

SEQ ID NO: 810523 - DNA, 120 bp, Artificial Sequence
  ENSG00000281160_6 (sequence is synthesized)
cacgcggttactctcccggctccggagcgggccgacctggagcccctcagtgcgctctggtcgtctacaccctgaaaccctttgagttcgagtccgcttgctggtgcttgagttcgccgc

SEQ ID NO: 810524 - DNA, 120 bp, Artificial Sequence
  ENSG00000281160_7 (sequence is synthesized)
gtccctgcaaaggcactgccaaccccatttcacagaccgcaaaccgaggcgcgaggaagagcagcgccttgccaaggctccacaacacgcccctcgccctctccgtgcaccgaggccgcc

SEQ ID NO: 810525 - DNA, 120 bp, Artificial Sequence
  ENSG00000281160_8 (sequence is synthesized)
cagcctgggacctggagatcaccaggccttgaaccttgggacctcaactcctctccctttctttcccccacccgtcttagatgcaaggagaaagatttagaagcgcttattttaaaatcg

SEQ ID NO: 810526 - DNA, 120 bp, Artificial Sequence
  ENSG00000281160_9 (sequence is synthesized)
gaatccgtattccgctctggaattccctctggaatggagggactgtggcaacgccagtgtgagggtggagtgggcgaggcggggtgggggggttgggggggcggcccagagacgcctccg

SEQ ID NO: 810527 - DNA, 120 bp, Artificial Sequence
  ENSG00000281160_10 (sequence is synthesized)
gttgctgctccactttctaatcctgagaggcagctgcgtttctgcaacctatgggcaacatgtttgaaagagctgaagctgattaaatgctttccagtggtttcgccacgagcctgctaa

SEQ ID NO: 810528 - DNA, 120 bp, Artificial Sequence
  ENSG00000281162_0 (sequence is synthesized)
accttttcatccagtgaggacacagggagaagatggtcattagcgaccaggaagagggtccccccaccagaaccccatgctggcacctgatctcgacttccggcctccagaaatctttga

SEQ ID NO: 810529 - DNA, 120 bp, Artificial Sequence
  ENSG00000281162_1 (sequence is synthesized)
gaagcagataggcttgaatgagcatggaatgtatctatttaaaaagcagctggaagtctgtcaagtgcattctggaaatggattcaggctaacagagtgttctgaatagagacgcctaaa

SEQ ID NO: 810530 - DNA, 120 bp, Artificial Sequence
  ENSG00000281162_2 (sequence is synthesized)
acaagagccaaagacatagcaatggagaacgtgggtggtacagccctccaccctggcgagcagcacattagaatcacgtaggagcttaaaaagtactgactggcctggtctttttcggtg

SEQ ID NO: 810531 - DNA, 120 bp, Artificial Sequence
  ENSG00000281162_3 (sequence is synthesized)
gagttgagaaccatctgagtagcgcttgtcacacttctggccacatcagaatcgtctgagggacttgttcactgcaggttgctgggtcccatctctagcctctgatccagtagcctgggg

SEQ ID NO: 810532 - DNA, 120 bp, Artificial Sequence
  ENSG00000281162_4 (sequence is synthesized)
tggggcacaggatgtcctgctgctggggtctgggcagcgctatgagaactgctgacgttggagctcgatcaggtggtccctcactccctgacccagggcatttgctgcttcctgtctctg

SEQ ID NO: 810533 - DNA, 120 bp, Artificial Sequence
  ENSG00000281162_5 (sequence is synthesized)
ccattcttttctcaacctggggcacttgcttttctcgctatgctgccctgccctttgctgaggcctgggctatccctggcagggtgcagaaaaaaaatttttaagttacttttctcagcc

SEQ ID NO: 810534 - DNA, 120 bp, Artificial Sequence
  ENSG00000281162_6 (sequence is synthesized)
agttgagattaatctacaggaggaggagaagaatcatccacaccactcttcgccacccggctgggagcaattccagaaggcagggtctgcttgggcagttgagaggccttgggtcatgcc

SEQ ID NO: 810535 - DNA, 120 bp, Artificial Sequence
  ENSG00000281162_7 (sequence is synthesized)
gcttattgaaaccatcagcaggaggagtttggataaagctgaagttccacttaggcgctcggtgatccatctgggaagacagtggccacagcccaacaggaggccggggaacctggaccc

SEQ ID NO: 810536 - DNA, 120 bp, Artificial Sequence
  ENSG00000281162_8 (sequence is synthesized)
tagcaaccctttttcatatagatggaatcagaataaatttcatcctagttctatttccaaaatattattggtgcccctagttgtactgcctgagtgttgtcagatcaaggcttacaaact

SEQ ID NO: 810537 - DNA, 120 bp, Artificial Sequence
  ENSG00000281162_9 (sequence is synthesized)
cacgggcgatgctgcagaatgagtgacaacagataatgccaattgcccagattgaatccagcaagaaatgacattggaatggctctaccttgtggagggaactgtccagtgcagaggacc

SEQ ID NO: 810538 - DNA, 120 bp, Artificial Sequence
  ENSG00000281162_10 (sequence is synthesized)
tgcctgagtattgcttacaatacatctttctggttataatgaagccatttatttgtttacatctttattattgccactttcctccactggcttggaaatccttagagcctagaacaatgc

SEQ ID NO: 810539 - DNA, 120 bp, Artificial Sequence
  ENSG00000281162_11 (sequence is synthesized)
tgggcttggagcaggtgcttgaaagcatattaccaaaatgaatgaataaatgaatgaatgaaagaataggcgaagatgctggtgcagacctcggtcttttgtgagcttggtgagtgtgaa

SEQ ID NO: 810540 - DNA, 120 bp, Artificial Sequence
  ENSG00000281162_12 (sequence is synthesized)
ccagagtctgagatccccggtttccctgattagacactgaggatcagacgttggaagcaccactgtcctgtaaggccccttctcacccagctcggcagcctttgctacacccctgtcttt

SEQ ID NO: 810541 - DNA, 120 bp, Artificial Sequence
  ENSG00000281162_13 (sequence is synthesized)
tgcttcacaagggattctacttgacaggcaattggaccacccaaatggcaaactaaaagcatagaagcggacaccagaggctcctggacctgagatgtggccctggaagtgaccagatgt

SEQ ID NO: 810542 - DNA, 120 bp, Artificial Sequence
  ENSG00000281162_14 (sequence is synthesized)
agagatgggggcccagggctaggaatgccgccatccggggaggccctagagcagagcagagcagctgtgggctggtgccaagctcactcctgcttctctctgcacgtctccctcattctt

SEQ ID NO: 810543 - DNA, 120 bp, Artificial Sequence
  ENSG00000281162_15 (sequence is synthesized)
ttctctctgaactgtgacccttttggcccctctgagtaccaggtgggacaaggtgacccctcagcacttgagtttacaccttagatgtgtaggtcctcacagaggccaacttatctcctt

SEQ ID NO: 810544 - DNA, 120 bp, Artificial Sequence
  ENSG00000281162_16 (sequence is synthesized)
ctgggaccaaattccaaattcctaaagaaaaaacaaaccaaaaacggatatgataaacctatctcagtggtcagcccctggggcgcaaacattcccctgagtcagggaagggtgactgta

SEQ ID NO: 810545 - DNA, 120 bp, Artificial Sequence
  ENSG00000281162_17 (sequence is synthesized)
acacaggtatcattatgatttaggtgtggcaagactagcaggtcaggggtgcctgccattgaaaagactgtcatacagttcccaggtggaaggggtgtgccaggaggggcagccagaagg

SEQ ID NO: 810546 - DNA, 120 bp, Artificial Sequence
  ENSG00000281162_18 (sequence is synthesized)
cagatggagggaagctgcctttatggtgtttctgctgggaggcacaggtgcggtggaggaagcaggcttaggattggttcgtgtgaatgtcttcagtgggctctggttatctggtacctg

SEQ ID NO: 810547 - DNA, 120 bp, Artificial Sequence
  ENSG00000281162_19 (sequence is synthesized)
gcccggggtgatgagggtagatagaggcccagaaggtgagagcctaatacccagagcggtcgggggggtgggtaggctcagggctggttggtttgggaagcatgtttgtgggcccgttgg

SEQ ID NO: 810548 - DNA, 120 bp, Artificial Sequence
  ENSG00000281162_20 (sequence is synthesized)
ttaccgtctcaaggaatgggctaggcctgggtgtggctgtccttctaggatcagcaaggcagcaaatatcaaagcaccagaatacacaaagtaaaagactgcattaatacagggtagttt

SEQ ID NO: 810549 - DNA, 120 bp, Artificial Sequence
  ENSG00000281162_21 (sequence is synthesized)
acaaagaaatgggaaattgttggttctgagctgggtggggattgaaacggtgttccctgcagatccatttaaagtctctctgtaaatacgcgttggtgtgtaactgttccttgtctctaa

SEQ ID NO: 810550 - DNA, 120 bp, Artificial Sequence
  ENSG00000281162_22 (sequence is synthesized)
cctcagccagcccctcccatgccaggtgaggggtcttcccacctcccttttcctctctgggtgtccctccattatgatctggggaccaaggctggctgtagcagtgtgcctccatggcct

SEQ ID NO: 810551 - DNA, 120 bp, Artificial Sequence
  ENSG00000281162_23 (sequence is synthesized)
agggcggttggcaaatgcaatttcttcggcagtgctggataaagtgggatgatgcagtgaccacacagaatgtcatttctgatgaaagctggcatgccagcccgtgacaggacacagagg

SEQ ID NO: 810552 - DNA, 120 bp, Artificial Sequence
  ENSG00000281162_24 (sequence is synthesized)
agcgtggattccccttcatggttgacttcagccaaggccatcatccccgctgccaaagcctgccctgattgcctgccctgggggagagaagtgttttgaagatgacaaatcaaagtcagg

SEQ ID NO: 810553 - DNA, 120 bp, Artificial Sequence
  ENSG00000281162_25 (sequence is synthesized)
tcctgcatggagtttgcgtgcctgacagcctggctagcacaggaggacatgcaggtggaatttgtgcaagcctgttattttctgtaacacaatacacactgagaaggcaatgggtacctt

SEQ ID NO: 810554 - DNA, 120 bp, Artificial Sequence
  ENSG00000281162_26 (sequence is synthesized)
ggaccctgcaggccaattcaagcaccatcactacttttcagaagtgtggggcatagatgtcaactgagcctagcaagatgtcctatgttaccaagagactattagaaagcagagcaggtc

SEQ ID NO: 810555 - DNA, 120 bp, Artificial Sequence
  ENSG00000281162_27 (sequence is synthesized)
ggtctcaagattcaatgaaacaattgcctggaagctggaagataatatggaagctagggatataatagagtatgttgctgggaacggtggctcctgcctgtaatcgcagcactttgggag

SEQ ID NO: 810556 - DNA, 120 bp, Artificial Sequence
  ENSG00000281162_28 (sequence is synthesized)
aggtaggggggatcacttgagcccaggagttggaggccagcctgggcaacacagcaagaccccatttctataaataattaaaaaaaaaattagctgggtgttgtggtgcatgcctgtatt

SEQ ID NO: 810557 - DNA, 120 bp, Artificial Sequence
  ENSG00000281162_29 (sequence is synthesized)
cttaactactccagaggctgaggtgggaggatggcttgagtccagaagttcaaggttacagtgaactacgattgagccacactgcattccagctgggtaacagagggagactctgtctct

SEQ ID NO: 810558 - DNA, 120 bp, Artificial Sequence
  ENSG00000254308_0 (sequence is synthesized)
gcaccctgagcagtggctgcagtgttgacatttatctcatatcccgctgtcagcaaaagccagtgagcccttcccagtatctcctgatctacctctcaaaagtcaagtaaaactagggct

SEQ ID NO: 810559 - DNA, 120 bp, Artificial Sequence
  ENSG00000254308_1 (sequence is synthesized)
cagctgcttctctaaatccaaagatgccttggccagtgcaggcaatttgctcatctctggggtccagccagaggacaagactatctgttctatctattactgtcagacctgggatattga

SEQ ID NO: 810560 - DNA, 120 bp, Artificial Sequence
  ENSG00000254389_0 (sequence is synthesized)
ctgagagtcagggcggacctggactcggcgcgcctagctcctcggctccctttgcggggactccaggagtctgcccgctcgcgccgtttcgtcctgtcaccccggcaacgggaccctcta

SEQ ID NO: 810561 - DNA, 120 bp, Artificial Sequence
  ENSG00000254389_1 (sequence is synthesized)
agaggcttgttccaaaaatgttcacaatggggtttttaaaaacggttttgttagggacaagtgcttgtgtgagtcctccgacaatgcctgctttcttctctctgcccgcggagcggaggc

SEQ ID NO: 810562 - DNA, 120 bp, Artificial Sequence
  ENSG00000254389_2 (sequence is synthesized)
tccaggcctggccccagtccgaggcgcctctgtcggtgtcgtcctgcttccaaaaccggcctccagaacccgcctccttccagaacctccgtccagaacccgcctccctccagaacctcc

SEQ ID NO: 810563 - DNA, 120 bp, Artificial Sequence
  ENSG00000254389_3 (sequence is synthesized)
gtacagaacccacatccttctagcacctgcctctggaacccacgtgctttcagaactacctgtttgtagaacttgtttccagaacgaacctgctttccgaatctctttacttccagagct

SEQ ID NO: 810564 - DNA, 120 bp, Artificial Sequence
  ENSG00000254389_4 (sequence is synthesized)
tgtttcctggactgacctattttcagaacctactttcaaaaccagcttgcctccaggaccacctgcttggagaactggcctgcagccccaggactggacgacctgagactgcacagctcc

SEQ ID NO: 810565 - DNA, 120 bp, Artificial Sequence
  ENSG00000254389_5 (sequence is synthesized)
ctgcggggctcacccggctgtgtgtgtccttccgggccttccatacttccctaggtgtctggtgactccggagcccgctcggatttcgtgtgggtctcgcctcagctcagaacacaccct

SEQ ID NO: 810566 - DNA, 120 bp, Artificial Sequence
  ENSG00000254389_6 (sequence is synthesized)
ttgaagagcaggaaggccagggcacaggcggtaaccacggctcctggtcatcaagttcctctgaagcccaggtcttgtccacgttcactgccccaccacaggcccagcggagccttggag

SEQ ID NO: 810567 - DNA, 120 bp, Artificial Sequence
  ENSG00000254389_7 (sequence is synthesized)
gcagcaggcccctcccagcaacagccttctcataaggcccctgccagccacgcgaaacctcctggctagggcctgtcttccactcctggccttttgagacagggcctcactctgttcccc

SEQ ID NO: 810568 - DNA, 68 bp, Artificial Sequence
  ENSG00000254389_8 (sequence is synthesized)
cactcctggccttttgagacagggcctcactctgttccccaggcctgtgatcctcccacctcagcctc

SEQ ID NO: 810569 - DNA, 84 bp, Artificial Sequence
  ENSG00000254389_9 (sequence is synthesized)
ttgcccagtcatctgcctcaacctcccaaaagtgctggattacagggatgagccaccatacccggcttttttttttctttctcc

SEQ ID NO: 810570 - DNA, 120 bp, Artificial Sequence
  ENSG00000254389_10 (sequence is synthesized)
gggatgagccaccatacccggcttttttttttctttctcctggccttttggggcccttgaagtgtctgctccctgggagcccttcagcttgtcgtccacttggtgggttcccacccgtcc

SEQ ID NO: 810571 - DNA, 120 bp, Artificial Sequence
  ENSG00000254389_11 (sequence is synthesized)
ttctcacttctgcctgaatcacacaggctacatgagaccttcacccacccccttcgccagcagctctgtggttcaagtttcctcaaggttaggggctcctggccatcttacctgtgggcc

SEQ ID NO: 810572 - DNA, 120 bp, Artificial Sequence
  ENSG00000254389_12 (sequence is synthesized)
tgagcatgggccgatgcttccaaagttcacactgggtgcacttgtgtggggacttccatgtgagtcatctccttgcaggctgccaaggtcctgtacagcagagacccaaaccctcttagc

SEQ ID NO: 810573 - DNA, 120 bp, Artificial Sequence
  ENSG00000254389_13 (sequence is synthesized)
agtcttcagagtcagctatgtgtacaggaggcattaccatatcagtgactgtcagcaagcatgtgtgactgaaatggtatccagttcttacgtatttgttttgcaggcttcttggttcag

SEQ ID NO: 810574 - DNA, 120 bp, Artificial Sequence
  ENSG00000254389_14 (sequence is synthesized)
cagacagaggccattgggaagttaagagaggctctcaaactttgagggtcataagacttcccctccctgcagggtgctgtttcctgaaggaaaatattcaattactattttctttattta

SEQ ID NO: 810575 - DNA, 120 bp, Artificial Sequence
  ENSG00000229976_0 (sequence is synthesized)
gatataataaaagtgctggaaagatcagcagacttgatccattccttcaccatgtctttctgctcccaggagaaggtcaagctctgtaagtttccatctaatggcttcttttgtcttcat

SEQ ID NO: 810576 - DNA, 120 bp, Artificial Sequence
  ENSG00000229976_1 (sequence is synthesized)
tccagcaaaggagaggactgagtggcccagatggaaagcagaaatgcagacagaggcctgtggaagaagaatcttaaaataactaagcaactccaagaaaacaagtgaggatttattgga

SEQ ID NO: 810577 - DNA, 120 bp, Artificial Sequence
  ENSG00000229976_2 (sequence is synthesized)
aacaactgccttgaaagaagaaaaaaacactccaacttgttcaaagtactttattttgatttcacctttgacccagaacttatctagagaaaatttgagaagataatacagaaagctcat

SEQ ID NO: 810578 - DNA, 120 bp, Artificial Sequence
  ENSG00000229976_3 (sequence is synthesized)
atacttcaagctatgggatgaattgtgttcaacaaagaaggaaagaacctttcctggctgaagtcagaggctgaggtcagaggaagacgtgactatagaagaatgatcataggattgcaa

SEQ ID NO: 810579 - DNA, 120 bp, Artificial Sequence
  ENSG00000229976_4 (sequence is synthesized)
tattgctggtcttgaagacagaggaaggatgtgggttacatctagaaactggaaaaggtgaggaccacacgtggaaaagggaggctgagaatgtaagacatcagcagagtgtggatctga

SEQ ID NO: 810580 - DNA, 120 bp, Artificial Sequence
  ENSG00000229976_5 (sequence is synthesized)
tagctgtgttgggactaatggaagatagatggtttgagaggcacccacacccttggagcccaaaaccatgccatgcacatgtaaccaaccagctacatgtgaagatcacataaaggtgtt

SEQ ID NO: 810581 - DNA, 120 bp, Artificial Sequence
  ENSG00000229976_6 (sequence is synthesized)
aagatgggagtgcatgagcttttagatgatttcagtcccctgcctttgacaccaagtggaactgagatgatctttccaccgagccctagtcaaactgcagattcatgagcaaaataaaca

SEQ ID NO: 810582 - DNA, 120 bp, Artificial Sequence
  ENSG00000229976_7 (sequence is synthesized)
ccatcattactgaagcaacatggcatgtggggtgatatgttggggaagccatagataatcagagaaagctccttttctttgtgagcaatattatttgcataggagagagacaaagctgca

SEQ ID NO: 810583 - DNA, 120 bp, Artificial Sequence
  ENSG00000229976_8 (sequence is synthesized)
tggactggaaacttccatgaccaaaaaagatgtcattttctaagggcttgagtgggaggtggccctgacagcatctgcatgagccagagatgcactcacactttcattattgcttgaggg

SEQ ID NO: 810584 - DNA, 120 bp, Artificial Sequence
  ENSG00000229976_9 (sequence is synthesized)
tgccaagaactgtagcagtaagagcagaagcagaaatgaagaacacgaaggatgctatggagtgagagaaaagtccatgcttgcaagaatccaaagacaccctgtgaggacgccccaaaa

SEQ ID NO: 810585 - DNA, 120 bp, Artificial Sequence
  ENSG00000229976_10 (sequence is synthesized)
tactcgaggaagtgtgtaagtagagctggacctttcattctcccagctggggtagaactggagccatgtgtgcagggcctgcttcttcttcagggctgccgtgtcctggaaagccaagct

SEQ ID NO: 810586 - DNA, 120 bp, Artificial Sequence
  ENSG00000229976_11 (sequence is synthesized)
tgcacatgggttatagcactccactttcccaaagccctcatatacatcatctgtttcagtgctcgcattaacacctgtgaagtagatattattcccaggtctcacagcccataaatggaa

SEQ ID NO: 810587 - DNA, 120 bp, Artificial Sequence
  ENSG00000229976_12 (sequence is synthesized)
actctgccgggaaataagtcctgcttttctctctgtaccagagctgccccagcaaattaaagcttattctaaatgtaggtacctagagcatttcttaaattaaacccagagtgaattctg

SEQ ID NO: 810588 - DNA, 120 bp, Artificial Sequence
  ENSG00000229976_13 (sequence is synthesized)
ggcacaggaaactctgggtggtttggctccagctcttgaaaacaagttccttgtttgccctcctgagttgatggtctggtggagaatttgtctgaaggaatttgttccaggaaaggtcca

SEQ ID NO: 810589 - DNA, 120 bp, Artificial Sequence
  ENSG00000229976_14 (sequence is synthesized)
gctgcatttgacaggaaagggagaaaagagagaacgaggcataaatctctggccttctgcctcttgcttgggaatctgtcctttccagcctgcacccacacccttggagcccaaaaccat

SEQ ID NO: 810590 - DNA, 120 bp, Artificial Sequence
  ENSG00000229976_15 (sequence is synthesized)
acatctgagtcccagggcaagcggactgcaagcaaacactgccaataaaaatggcaagaagtatttcattaataaattataatagagactcaaaacctgctactgccaggcaaagcaggt

SEQ ID NO: 810591 - DNA, 120 bp, Artificial Sequence
  ENSG00000229976_16 (sequence is synthesized)
tggtgcctccacataaactgaacatatggccggcaaagagcacccctattccatcatccaagttctccttccttagctgaagtgaaaacatttgaaattgatgatacaaagtgctgggga

SEQ ID NO: 810592 - DNA, 120 bp, Artificial Sequence
  ENSG00000229976_17 (sequence is synthesized)
gggtggagagaaatggcccctgtctaagctatatggagagtgaatagcaaggcagtttgccaatatctatcacttgttaaatccacatacactttgctccaggaattagaatttcaggaa

SEQ ID NO: 810593 - DNA, 120 bp, Artificial Sequence
  ENSG00000229976_18 (sequence is synthesized)
tttatcttaaaactgttgtaacaacacatatatgaagaggtttattgtagccttgcttacagtgactaagtatcagaaacaacctagataactgtcagtgggaactggttgaataatttg

SEQ ID NO: 810594 - DNA, 120 bp, Artificial Sequence
  ENSG00000229976_19 (sequence is synthesized)
ttttatcaacatgtaggaaaatatccaatctctatagagaatgaggcaaacttttacaaactttgtaagatgtatttctaagtaaaaataaacataagaacaaacaaatgaaaataacaa

SEQ ID NO: 810595 - DNA, 120 bp, Artificial Sequence
  ENSG00000286170_0 (sequence is synthesized)
cagacaggggcccaactccacagaatagtgaattcaaaccctactaaaaagggatgaagtgtggtgttaggaaggtgccaggggaagagactgttcatgctaacctgtcttgggatccag

SEQ ID NO: 810596 - DNA, 120 bp, Artificial Sequence
  ENSG00000286170_1 (sequence is synthesized)
ccagggccaactggctggttgcttgctgctggagagggcaagtggggagcaccaagacctagagctcaaaccatccgttggcataggctaggagccggcagggaaataataagggcaggc

SEQ ID NO: 810597 - DNA, 120 bp, Artificial Sequence
  ENSG00000286170_2 (sequence is synthesized)
ttatacaggggaggttctgtccagcaggccaattctggtaactgaaggccagaggcttcagatgcaattgatgatagaaatttaagatgaagaatgggggtgtctcgataagtaaggatc

SEQ ID NO: 810598 - DNA, 120 bp, Artificial Sequence
  ENSG00000286170_3 (sequence is synthesized)
acccaacagggaggaatctggagtgaatgttatccaaatttaaagaagtggatcaacctccgggaagattaccaacaggtagtaacacttttgggctaagatttgtgggcagggctccag

SEQ ID NO: 810599 - DNA, 120 bp, Artificial Sequence
  ENSG00000286170_4 (sequence is synthesized)
tccttgggagaaggtctaacaaaagcaaagcaggatgccagccttggaggggcagatgcactaatcattttacctaagtggccactcataacagcagtcaaggccgaagttcaactgtgg

SEQ ID NO: 810600 - DNA, 120 bp, Artificial Sequence
  ENSG00000286170_5 (sequence is synthesized)
agatgccggggaccaccatgaactgatgatggaagagaaaatgagagaccacttctcagatcctgaacaccatgtatgccctacaaactatcctgcagtctgaattgactgcaaggagac

SEQ ID NO: 810601 - DNA, 120 bp, Artificial Sequence
  ENSG00000286170_6 (sequence is synthesized)
ggctgagcctgcagataaactaagagatccccttggggagagaaagggaaagaggctggtggccagcatggccctggcacatggtagccatgtcttctgcctcaactcctgttcccaaat

SEQ ID NO: 810602 - DNA, 120 bp, Artificial Sequence
  ENSG00000286170_7 (sequence is synthesized)
ttccagaaccgtggagctggccatcgttcctaaaggcagagacagcaggtcataatggtaacagcacatgttctggaattaggctggctttgactcctaactagggttgccacatttagc

SEQ ID NO: 810603 - DNA, 120 bp, Artificial Sequence
  ENSG00000286170_8 (sequence is synthesized)
aaataaaagtacaggacacccagttaaatgtaaatttcagataaacaatgaataatttttttttctctaactatgtccccaaaattacatgggacacacttatgctaaaaaaattatttt

SEQ ID NO: 810604 - DNA, 120 bp, Artificial Sequence
  ENSG00000286170_9 (sequence is synthesized)
ttatttgaaacatactaacatattattcattgcttgtataaaactaaaatttaattgagtatcctatattttttttctagtaagtatatgctgctaacttgtttactttctaacttggaa

SEQ ID NO: 810605 - DNA, 120 bp, Artificial Sequence
  ENSG00000286170_10 (sequence is synthesized)
tgctgctaacttgtttactttctaacttggaaattgggaaggttatttgatacctctatttcctcatctgtagaatggaactgatctagcttacagtgttgttgtgacgacggattgagt

SEQ ID NO: 810606 - DNA, 120 bp, Artificial Sequence
  ENSG00000286170_11 (sequence is synthesized)
taatacatgcagactcctcagaattatgtctggcacggataaaagaacagctaagataaacccaaagccgattgtcagaagaaaaaaagaaaaccattgagaatttaagaaagagggaaa

SEQ ID NO: 810607 - DNA, 120 bp, Artificial Sequence
  ENSG00000286832_0 (sequence is synthesized)
gtcacccaggctgaagtgcagtggcataatcacagctgactgcagctgcaacctcaacctccccggcctcaagtgatcctcctgcctcgacttctcaggtagctgggactacaggcacac

SEQ ID NO: 810608 - DNA, 120 bp, Artificial Sequence
  ENSG00000286832_1 (sequence is synthesized)
acacaccaccacacctagctaatttttggattttttgtaaagatggggtcttcctatgttgccccagcaggtcttcaagtcctggtgtcaagctatcctcccgcctcagcctctcaaagt

SEQ ID NO: 810609 - DNA, 120 bp, Artificial Sequence
  ENSG00000286832_2 (sequence is synthesized)
ttttggcttgttaaacataactgaccttagtcctccagttttatatgagaaggatacttttgaagtcaaatgctagtatgatgactgaagtgaggaaaagatattggagctgaagagatt

SEQ ID NO: 810610 - DNA, 120 bp, Artificial Sequence
  ENSG00000286832_3 (sequence is synthesized)
tacatgagtagaaccgttcctaatattactttaaacagaagagtaaacattgaatgatggggcagtgaagtacacccgttgcagtctgttctaactggatagtcacaaaaacaacagagg

SEQ ID NO: 810611 - DNA, 120 bp, Artificial Sequence
  ENSG00000286832_4 (sequence is synthesized)
aaaggacactcagtttggtatttggagaagaaaagccagtacctgatagttttagctcccattaacaggtacatataatattaccaagtacaaagcagcatcgtctaatgaaatgagact

SEQ ID NO: 810612 - DNA, 61 bp, Artificial Sequence
  ENSG00000267077_0 (sequence is synthesized)
agaccagctcccctcccagctaggtgactgaggatgacctggcacagtcgtgctgactgaa

SEQ ID NO: 810613 - DNA, 120 bp, Artificial Sequence
  ENSG00000267077_1 (sequence is synthesized)
aggtgactgaggatgacctggcacagtcgtgctgactgaaggcttggagaggccaggtggccacctgagtggggcgtctccccaggacttcctgaaccgtggcctccagctcctctgtgg

SEQ ID NO: 810614 - DNA, 120 bp, Artificial Sequence
  ENSG00000267077_2 (sequence is synthesized)
acacagccatcttggcgtgcaccgtgccacctgccccggtcccccagaggctgcatcaggatcctgggctcagctcagcggggaccacatccaggcttcccacagcccagccactgcccg

SEQ ID NO: 810615 - DNA, 120 bp, Artificial Sequence
  ENSG00000267077_3 (sequence is synthesized)
ctcctggcccagcgccagcttccccaccccctcccactccacttctccctcggccccaggcccagcttctctccttgcccagccctgtggtccttaccctgacaaccttctccccagcca

SEQ ID NO: 810616 - DNA, 120 bp, Artificial Sequence
  ENSG00000267077_4 (sequence is synthesized)
ctgtcatctcccctctctctccccctggcagcccagcccccaggcccccacctacctcctagaagcctccaattcccccaaccaggcaggtcctggggagcacaggctgcttcctgcttc

SEQ ID NO: 810617 - DNA, 120 bp, Artificial Sequence
  ENSG00000267077_5 (sequence is synthesized)
cggctccacaccacctgaggccttggcaaccagccccgccctccccagggccagcagaggccgcccagcccaggggagagggcccaggcccagcaggtgcgctccctggctccccactgc

SEQ ID NO: 810618 - DNA, 120 bp, Artificial Sequence
  ENSG00000267074_0 (sequence is synthesized)
aattctcttggatttatgtctagaagcggaattgctgggtatgaacaccatttcaaatactgctgaaatattgtatccactgcgcctggccaggtcaggggtggatctttaaccaggcct

SEQ ID NO: 810619 - DNA, 64 bp, Artificial Sequence
  ENSG00000267074_1 (sequence is synthesized)
tgcgcctggccaggtcaggggtggatctttaaccaggcctgaggcatggcgccaagaggcagaa

SEQ ID NO: 810620 - DNA, 120 bp, Artificial Sequence
  ENSG00000267074_2 (sequence is synthesized)
tttaaaaaaaatactagaaattaaagcttctacgtaggaatcagactctttactcatcataaggaaatccttgaattatactgtctcggttgcagtaatcaaaaattcaaaggccatact

SEQ ID NO: 810621 - DNA, 120 bp, Artificial Sequence
  ENSG00000267074_3 (sequence is synthesized)
cagactcagaaaacagaaacaggaaaacaatggcttaatttagcacaccgaatattcttgatatccttatcattaactgtaacttagttagcgtgatatttttgatccttaagtttttaa

SEQ ID NO: 810622 - DNA, 120 bp, Artificial Sequence
  ENSG00000267074_4 (sequence is synthesized)
catcgtataaagaattttccatccaaagtaacatgaggcagagctacctgaatttcagtggtgataagacaaaaatattttggcccacagctttcgcaggaacactctgaaggaaagtta

SEQ ID NO: 810623 - DNA, 120 bp, Artificial Sequence
  ENSG00000267074_5 (sequence is synthesized)
actctgtgaagtttaatttctatcttccttggcctacatttttttctaaggtagtgattttcagtgacctgaaacccaagctgcgcctgcccttttcaatgactaaatggttacaaacca

SEQ ID NO: 810624 - DNA, 120 bp, Artificial Sequence
  ENSG00000267074_6 (sequence is synthesized)
aaaaaggttgaacactgactgacaggggagagctagcaactctacttcctgtgttacttctcaaagtggggtctgggaacaccctggggtacatggatccacaggatacggactggcctc

SEQ ID NO: 810625 - DNA, 120 bp, Artificial Sequence
  ENSG00000267075_0 (sequence is synthesized)
agaacacggtgggtgctgggcttcctggtcatcttgtggaagtggggttgggccaggggacacgggatggggagatgctgccacctgggcttggttagcccattcgtgggcaccaagggc

SEQ ID NO: 810626 - DNA, 65 bp, Artificial Sequence
  ENSG00000267075_1 (sequence is synthesized)
ccacctgggcttggttagcccattcgtgggcaccaagggcagcaggagcctcagagccggagggc

SEQ ID NO: 810627 - DNA, 120 bp, Artificial Sequence
  ENSG00000267075_2 (sequence is synthesized)
atgccctctgctgatggggatgaaaggcatttgacttgggctgtgggggtcagctgcggactcctgtgggaccctcagcagagacgtcctaaaggctcccaacaagctggcgacacaagg

SEQ ID NO: 810628 - DNA, 120 bp, Artificial Sequence
  ENSG00000267075_3 (sequence is synthesized)
atggtgccttggctgaaagccgagatcacctggccacggtggctgtccccagatctggctgcatgaggccccacgggcagctgttcacctacccggcagggagtgcctctcactggccag

SEQ ID NO: 810629 - DNA, 72 bp, Artificial Sequence
  ENSG00000267075_4 (sequence is synthesized)
cagctgcaccagtgcccagaatgcatcttcctcaggcagataaaggagaaacaaggtggctcgccatggaag

SEQ ID NO: 810630 - DNA, 69 bp, Artificial Sequence
  ENSG00000267075_5 (sequence is synthesized)
gagggcgaggcttcctctgaagaggcttcctcaggatgcaaattcatttcatgacaagagccaagtcca

SEQ ID NO: 810631 - DNA, 120 bp, Artificial Sequence
  ENSG00000267075_6 (sequence is synthesized)
tcaggcacttcagcaccttgtccaaattgtctcctgagagcaccgtcctgcatgtgacactgccaagctcccaggctttggggcagccccaggaggagggtgtcatttcttgttctgaga

SEQ ID NO: 810632 - DNA, 120 bp, Artificial Sequence
  ENSG00000267075_7 (sequence is synthesized)
tttggggcagccccaggaggagggtgtcatttcttgttctgagaagtgcccaggtgacaggcccaggtgacaccaggagtccaggccccaagtcctttgtgtctcagcttgaccccttga

SEQ ID NO: 810633 - DNA, 84 bp, Artificial Sequence
  ENSG00000267075_8 (sequence is synthesized)
cagacacccactcctgtgaatatggaaatatggcccaggaacctcactgccgggaatactcaccgggttatactctgaatatgc

SEQ ID NO: 810634 - DNA, 120 bp, Artificial Sequence
  ENSG00000267075_9 (sequence is synthesized)
cactgccgggaatactcaccgggttatactctgaatatgccacaaggatgtagaatagttcccgctgcctaggaaacagagaaagggggctagggtttggtttgtgcagatgctgttagt

SEQ ID NO: 810635 - DNA, 120 bp, Artificial Sequence
  ENSG00000267075_10 (sequence is synthesized)
tagtttcactttgtctacaaatcctaaaaacaaatcccatttcaggttcagatgattcaccagataagcagtgaactttcagggcctgagattattgaagaaatgtttcagtaaaatcca

SEQ ID NO: 810636 - DNA, 120 bp, Artificial Sequence
  ENSG00000267075_11 (sequence is synthesized)
acatgcaaatagcccagttgtacagggagttgaccgatccttttcactctgaatgattttttttttttttcagtttgcacacacgccagttcagtctttgggtgtacagttcctccacgg

SEQ ID NO: 810637 - DNA, 120 bp, Artificial Sequence
  ENSG00000267075_12 (sequence is synthesized)
gttcctccacggttccaaaccagtgtgcagagtctcccggccaccactccagcccctcctggagtgactcctgatctttcaaatctccagggtttcccctatgcacccagcctctccccg

SEQ ID NO: 810638 - DNA, 120 bp, Artificial Sequence
  ENSG00000267075_13 (sequence is synthesized)
catctaggatccacccacattcctgcgggcatcactggctcattcccttttctcactgggtcttctgtttgaaaggaggaccagactgtctctccccattcccgtgttgaaggccatccc

SEQ ID NO: 810639 - DNA, 120 bp, Artificial Sequence
  ENSG00000267075_14 (sequence is synthesized)
cgaaggcttcgtgtgtgactgatgaggaatcaagcagtgaacgtggcatgcaggtttcatgtggatgtcagttttcaaatcagtgggttcaatatctgtgacaccttggggacgtgtggt

SEQ ID NO: 810640 - DNA, 120 bp, Artificial Sequence
  ENSG00000267075_15 (sequence is synthesized)
acaccttggggacgtgtggttcaagtccattgagctttgtgagccactgcccaactggctgccaacgtggctgtgccatgtcatattcccagcagacctggatgagagtttccaggaccc

SEQ ID NO: 810641 - DNA, 120 bp, Artificial Sequence
  ENSG00000267075_16 (sequence is synthesized)
tgctgtcagtgttgcctggggaggctcatgggctctccatcctgccaccctcccgtgggtcctaccatgggtccccgtgggtcagggagagcacctttcaccattatgcatgattttgtt

SEQ ID NO: 810642 - DNA, 88 bp, Artificial Sequence
  ENSG00000267075_17 (sequence is synthesized)
cccacatgttccagtggttcatggtgccggctgctccctgggctaggagagctcttggcagctctgtcatccctcctgggtgatcctg

SEQ ID NO: 810643 - DNA, 120 bp, Artificial Sequence
  ENSG00000267075_18 (sequence is synthesized)
ccctcctgggtgatcctggcttctgctctgggaaagtccccatccctctcattcaccccatctcctctgggaccctgtggctctcgtaggcttacttcactccatatcgatccctgaaga

SEQ ID NO: 810644 - DNA, 120 bp, Artificial Sequence
  ENSG00000267075_19 (sequence is synthesized)
cgtaggcttacttcactccatatcgatccctgaagaagacatggttctggagagtcctgctcacgtccagtttgatctggtggatgtgttcagaagacctcttgcccttctccttcatga

SEQ ID NO: 810645 - DNA, 120 bp, Artificial Sequence
  ENSG00000267075_20 (sequence is synthesized)
gaacagatggaagactccctgccccaaatggcagtcagcccacagtcagcgctttgggaaggaaggaaagaaggaaggtttccttgtgcagaaagctgctttttggcttgttactgaagc

SEQ ID NO: 810646 - DNA, 120 bp, Artificial Sequence
  ENSG00000267075_21 (sequence is synthesized)
cagggagggtcaccagagccgagttcatctgtggtgactatgtcaccatctgtgcccaggaagtgcatctgaccatcccccccacccccccaggctgggcttgacgttcactccagctgg

SEQ ID NO: 810647 - DNA, 120 bp, Artificial Sequence
  ENSG00000267075_22 (sequence is synthesized)
aggcctgggcccctgacacagcctgtcctgtttgttgtgctctggctgagcatacctagtattttttggggtgttttgacttgatttcctgaatgttcaggaggactgacaacaccaggc

SEQ ID NO: 810648 - DNA, 120 bp, Artificial Sequence
  ENSG00000267075_23 (sequence is synthesized)
cccggatgttcatgggaatgcccttatagatgcgatctatgagctgtgggcagaaaacaatctggtgtcacaggccatggggtgaccccagtgaggatcagagcccagggattctggaaa

SEQ ID NO: 810649 - DNA, 120 bp, Artificial Sequence
  ENSG00000267075_24 (sequence is synthesized)
ccagggcatccctagccttgagctccaggtggtcccagccctagattcagattccctcccagcaaggtgacgcttgcacgaataggcaggcaatctgacgaccaggcctgcagtcttctg

SEQ ID NO: 810650 - DNA, 120 bp, Artificial Sequence
  ENSG00000267075_25 (sequence is synthesized)
ggcctgcagtcttctgtgcaaggacagtgtgccacccgccctctgagaggctgacggtgccaggccacagccatgggtgcctctcttctgtctctgcagagagtacttccggggcctctc

SEQ ID NO: 810651 - DNA, 120 bp, Artificial Sequence
  ENSG00000267075_26 (sequence is synthesized)
cctccacacattacctttttgctgtttttatatgactcgcatttgcccagcatttccagccacttgctctttctttttttctcctgccgaatttgctgccaaatgaggaatgttggagtt

SEQ ID NO: 810652 - DNA, 120 bp, Artificial Sequence
  ENSG00000267075_27 (sequence is synthesized)
gagctgccaggcttcccagagccgcccgtggatgctgggtcttgggctctggagccctggtgggacccagctggaaggagccagggaagggcagaccctaagggctgagagcctttgagc

SEQ ID NO: 810653 - DNA, 120 bp, Artificial Sequence
  ENSG00000267075_28 (sequence is synthesized)
ggagccagggaagggcagaccctaagggctgagagcctttgagcaaatgagcgccagtgggctggctttgggaccccaggatgtgccatccttaggccacagacacaccagtcttaggtc

SEQ ID NO: 810654 - DNA, 120 bp, Artificial Sequence
  ENSG00000267075_29 (sequence is synthesized)
tgacacaagcgggcagccacccccaagccaggactgtggttctcactttggaattttatcaaactgccaaagttacagcaactggggtcaggtctctgctgcccctcccagtgacagcgt

SEQ ID NO: 810655 - DNA, 64 bp, Artificial Sequence
  ENSG00000267075_30 (sequence is synthesized)
gcatcaggctcttacctttgcctcccgtgcagtcacaggaggcagctccgtctcactgtaaggc

SEQ ID NO: 810656 - DNA, 120 bp, Artificial Sequence
  ENSG00000267075_31 (sequence is synthesized)
cgtctcactgtaaggcaactcaggcagagctgaggacctgcacagggcctggagccacccaagcctgggagccgacccccagaaaggactggcactgtccctatccagctcagggctcag

SEQ ID NO: 810657 - DNA, 79 bp, Artificial Sequence
  ENSG00000267075_32 (sequence is synthesized)
agtgcagggacagcctggctggggttactggggccctggcatggggggtggtcaggctgcacaatggggctgcgcgtcc

SEQ ID NO: 810658 - DNA, 87 bp, Artificial Sequence
  ENSG00000267075_33 (sequence is synthesized)
gagtgcagggacagcctggctggggttactggggccctggcatggggggtggtcaggctgcacaatggggctgcgcgtcctggactc

SEQ ID NO: 810659 - DNA, 67 bp, Artificial Sequence
  ENSG00000267075_34 (sequence is synthesized)
tctgcaccaggggcccatcccacttgacagccccaaggctcttgcaggttctgacctcccagcatcc

SEQ ID NO: 810660 - DNA, 74 bp, Artificial Sequence
  ENSG00000267075_35 (sequence is synthesized)
cccaaggcctgagccacacaccctgcatttcagaagtggcacggctcatcagctccctcccaccctacctcccc

SEQ ID NO: 810661 - DNA, 120 bp, Artificial Sequence
  ENSG00000267072_0 (sequence is synthesized)
ggggataatagcaaggatggcttccagaggccctgacaggaggagttgctggtggactggagaaagggacagagggagaagagccccaatttccaggcctggtgatgagaagcccatgaa

SEQ ID NO: 810662 - DNA, 120 bp, Artificial Sequence
  ENSG00000267072_1 (sequence is synthesized)
ggctcagcctccttgacctgtcctctggagggcgcagggcctcagggcagggctgatgtgtttcagggctcccatgtgacccggtggcccggcgtctacctgctccagtggcaaatgcac

SEQ ID NO: 810663 - DNA, 120 bp, Artificial Sequence
  ENSG00000267072_2 (sequence is synthesized)
cgatgtcctgacggctctgcacagccccgggcccaagtgcaaacttctctactactgtgaggtgctcgcctctgaggacttcagtcatttcaccctctccctggtttggtaactgaagcc

SEQ ID NO: 810664 - DNA, 120 bp, Artificial Sequence
  ENSG00000267072_3 (sequence is synthesized)
ttctgaaatgaaccagtgtcaggctccagtgaggactccatccccaattcaggaagcacagaggtggagcataatccccccaatttgtttatgtgcggctgacttctctcaagatggtgt

SEQ ID NO: 810665 - DNA, 120 bp, Artificial Sequence
  ENSG00000267072_4 (sequence is synthesized)
agtagcaagtcgtcgtcgcgggaggccctgcggggacgggcggccgtgagctcagggggctgtcctcgtgagctcggaggacaggggggaccccccgaaccaggctggcccagggagctg

SEQ ID NO: 810666 - DNA, 120 bp, Artificial Sequence
  ENSG00000267072_5 (sequence is synthesized)
cactcaccccgagtcgaggccgccggacgcttcccagaggaagccgaatagtgcaagccggaggagaagccagcgacccgtggaggtcgccatattggaccggggcctcgggtcatgtgg

SEQ ID NO: 810667 - DNA, 120 bp, Artificial Sequence
  ENSG00000267072_6 (sequence is synthesized)
gctcgcctcacgtgactcaagtcccagggtggccgctttcagctcggactgaattacctgcgctcttttcggctggcgggctggcgggcggtgctggtgatgttaactttttatctccag

SEQ ID NO: 810668 - DNA, 120 bp, Artificial Sequence
  ENSG00000267072_7 (sequence is synthesized)
ggcccttggttcccccaagaaaacagcaacttgcagatagcaagtcaaacttgtcagcagaatccagggatgttcctcgaggcctgacaagttaagagcaatcatgggaaggcattcaga

SEQ ID NO: 810669 - DNA, 120 bp, Artificial Sequence
  ENSG00000267072_8 (sequence is synthesized)
ggaccgcagcagaggatcaggtcaagggaaacctacctcctaaaggaaagatcgagaagaaccatgcgccccaccacccacctgggctgctcagctgggcacagaagcagccaaggatat

SEQ ID NO: 810670 - DNA, 120 bp, Artificial Sequence
  ENSG00000267072_9 (sequence is synthesized)
tttcattcggatgctcacatatgactgagttgccacatgaggatgatccgtggcgattttccaccttgaggcaaagcaggacaatgcgtgtaaagaggtttgcagccccgggaccgggtt

SEQ ID NO: 810671 - DNA, 120 bp, Artificial Sequence
  ENSG00000267072_10 (sequence is synthesized)
ttcagctggtttttctaccccaaagtccaatgcgtgcaggctgtcatcagcaccacagacagcaccagaacccatcataatgtcccagaaggttttattgctaaattagtgtcagagctc

SEQ ID NO: 810672 - DNA, 120 bp, Artificial Sequence
  ENSG00000267072_11 (sequence is synthesized)
ttccggaggagcccccacttaatgggacgtcatcacttgaggcagcaggtaacgtttacttggcacttagtatgttacgggcaccatttccagtattctagaaacacaatactcacagca

SEQ ID NO: 810673 - DNA, 89 bp, Artificial Sequence
  ENSG00000267072_12 (sequence is synthesized)
gcaccatttccagtattctagaaacacaatactcacagcagtggaggtaacattgaggtaggggctgggttttgttttttttttgactc

SEQ ID NO: 810674 - DNA, 90 bp, Artificial Sequence
  ENSG00000267072_13 (sequence is synthesized)
atcctccctcctcaagtgtcactactgcacccagtgagggttggtggggaggtgtctcgttatgttgcccaggctggtctcgaacttctg

SEQ ID NO: 810675 - DNA, 120 bp, Artificial Sequence
  ENSG00000267072_14 (sequence is synthesized)
gcctcccaaagtgctgggattataggggcgggccactgtgcccttccaaggtaggggttattattatcgcaattttactgatgagaaaactgagtcccagagaagttggtgactgctcaa

SEQ ID NO: 810676 - DNA, 120 bp, Artificial Sequence
  ENSG00000267072_15 (sequence is synthesized)
agtcccagagaagttggtgactgctcaaggacacagacagctaggacttgaattcaggcagcctggccacagaaccacaccatcaaccgctatgctatactgtgttttgtaaaatgacat

SEQ ID NO: 810677 - DNA, 120 bp, Artificial Sequence
  ENSG00000267072_16 (sequence is synthesized)
gatggccatgtgatgcaatgtaatgatacagcagagttttgtgctcaggatgtaaaaatgagtatgtgctgcctttcagggttatctgttgagttctggctcatgacctgaactattttt

SEQ ID NO: 810678 - DNA, 120 bp, Artificial Sequence
  ENSG00000267072_17 (sequence is synthesized)
tccaagacccttccttctcccactgggaaagatactatatttggtacctgaacaaatagcctttaagatatcagtttatgggtctttttagaatttgtggctgggtgcagtggctcatgc

SEQ ID NO: 810679 - DNA, 120 bp, Artificial Sequence
  ENSG00000267072_18 (sequence is synthesized)
aatcccagcactttgggaggacaaggcaagaggatcacttgaggccgggagttcgagaccagccaagtccatgtagtgagatcccatctctacaaaaaatttaaaagttagcttggcatg

SEQ ID NO: 810680 - DNA, 83 bp, Artificial Sequence
  ENSG00000267072_19 (sequence is synthesized)
tgagatcccatctctacaaaaaatttaaaagttagcttggcatggtggcatacacctgttgtcccagctactcaggaggtgag

SEQ ID NO: 810681 - DNA, 120 bp, Artificial Sequence
  ENSG00000267073_0 (sequence is synthesized)
gttcccctcccccatccccggtctgcagattctgcctaaggagggtgcagagtggacactcccaggtgtccaagccggcgagctcgggtcccgcagaaccggcggccctggagacgcccc

SEQ ID NO: 810682 - DNA, 120 bp, Artificial Sequence
  ENSG00000267073_1 (sequence is synthesized)
ccctagcccggcgcctccgcaaaccaacccaccgcgggccgccgagccccgctccgggatccgccggctgcctccatcccagaagagtgcgcagagaattaaatctagatatttacatgt

SEQ ID NO: 810683 - DNA, 120 bp, Artificial Sequence
  ENSG00000267073_2 (sequence is synthesized)
agaggtccacgaggcgagacagacccaaagagagaggcaaggacgtgggcgttggtcggtcttgcggggaggaggtgccgtgctctccccacttcctgacccagcagaaagcgcccgggc

SEQ ID NO: 810684 - DNA, 120 bp, Artificial Sequence
  ENSG00000267070_0 (sequence is synthesized)
tgggatcgtcgggtcaggccttgggccaacgtaggcactctcgcagttcctccgccttcaggaaggtctttttggcaggggccctacgggtgcgcgcttcggtcctggaggccttatcca

SEQ ID NO: 810685 - DNA, 120 bp, Artificial Sequence
  ENSG00000267070_1 (sequence is synthesized)
agcctcctctccatcagcgccacccgtctggggtccgaaaggagggagctttccctctgtcccccagcctttggactgtcaccaaacaagccattcgttcaccaaatacttattaagcgc

SEQ ID NO: 810686 - DNA, 120 bp, Artificial Sequence
  ENSG00000267070_2 (sequence is synthesized)
ggagagagaactaagaacagagagcgtgttctgagatgtctgctgtgattgcagaaagaggcttctccccaggaccaggattccacgaaggcagcccttttctagatggagaaaatagaa

SEQ ID NO: 810687 - DNA, 120 bp, Artificial Sequence
  ENSG00000267070_3 (sequence is synthesized)
cctgaaggcagccgtttccctaaactgctctcgctcatgtctctcagagaaaggaaatgaagcagtgaaagcatcctcccaaaagggacttttaaatccttctacctgggctgaactaca

SEQ ID NO: 810688 - DNA, 120 bp, Artificial Sequence
  ENSG00000267078_0 (sequence is synthesized)
tttagaacccttaacccataaggaccacctgtaaagctgctctgtggggggtggggaagatgtcctcagcgagacgccgagataggagggctggttgtctgggccacagcagtggcgtcg

SEQ ID NO: 810689 - DNA, 120 bp, Artificial Sequence
  ENSG00000267078_1 (sequence is synthesized)
atttttagggacctgatctcagggacaagaaattgtctcagaacccccgggaggaggttcagatgagggtcaggtcgtggctcaagagagctggacccaggcctgctgtgcaggaaggtg

SEQ ID NO: 810690 - DNA, 120 bp, Artificial Sequence
  ENSG00000267078_2 (sequence is synthesized)
ggaaagaagacaaagggcccattgtttccgcctctcaggacactgggcctcgagtctgctctcccgtttcatgggcatgaccctgggaaggatgcccagcaggaggagtggcccagactg

SEQ ID NO: 810691 - DNA, 120 bp, Artificial Sequence
  ENSG00000267078_3 (sequence is synthesized)
gccccaactcttgtttccagcacagtgtgctcagtgggacagcggacccagcccagtctgtgacccggagccgctggcggctgggctgggcagggagagtgcagcccaaagccgagaagc

SEQ ID NO: 810692 - DNA, 120 bp, Artificial Sequence
  ENSG00000267078_4 (sequence is synthesized)
cagacctgctcaccccattcagaagagctgcctctcccacccccagcccactgcccccagagggctactgggaacccggagggtcacctgggctttccaggggtagacaaaaagtagaat

SEQ ID NO: 810693 - DNA, 120 bp, Artificial Sequence
  ENSG00000267078_5 (sequence is synthesized)
ttcccagtgctgttatgtgaataattggggatgattgaattcttagggctgttcttactgcccttcacccacctcctcttaccccatgatgggccctgggagcaaaaaggagataaccac

SEQ ID NO: 810694 - DNA, 120 bp, Artificial Sequence
  ENSG00000267078_6 (sequence is synthesized)
tgcccctctgccacgccccacaccaccacggcctggctgctcacctgtcccctttatctaggccctcagggacaggcacgcccagaatggccgatctcagcatcacatagtcgcggatgt

SEQ ID NO: 810695 - DNA, 120 bp, Artificial Sequence
  ENSG00000267078_7 (sequence is synthesized)
ctgaggggatgaagatatactgcaggtcctgtcagaatagagacaatgagcccagaggggaaccaggacatgtttagctcctcagtgtggacagccctccacccaaccttgccccctgag

SEQ ID NO: 810696 - DNA, 120 bp, Artificial Sequence
  ENSG00000267078_8 (sequence is synthesized)
ccgactggagaatttcccttaaatacctttcattcccacccagaggtgctgtactggtttcagtgtaggtccacaaatcctctaatgctccttcaggaggtggcacccaattgccatccc

SEQ ID NO: 810697 - DNA, 120 bp, Artificial Sequence
  ENSG00000267078_9 (sequence is synthesized)
ctggagtatgggctggacttagcgactcatgcacaggatttttctgataaagaggaaagtgatggtgtgtggcttagagactaggtcataaaaggcactgtggcttcctttacgttctca

SEQ ID NO: 810698 - DNA, 120 bp, Artificial Sequence
  ENSG00000267078_10 (sequence is synthesized)
gatcactcactctggatgaagttagctgccatgtcgtgaggacactcaaatagcctacagagggcccaagtggcaagggcccgtgagacgccatcttgatgtcagctccagtcaagcttt

SEQ ID NO: 810699 - DNA, 120 bp, Artificial Sequence
  ENSG00000267078_11 (sequence is synthesized)
tgggtctctcagatgatgcagcccatcatctgcacctgggccaaaacctcccactaagctccccacaaattcctgacccattgaaaccacaagatagtcaatatttgttgtttaaagcca

SEQ ID NO: 810700 - DNA, 120 bp, Artificial Sequence
  ENSG00000267079_0 (sequence is synthesized)
cctgtgctgggagagggtcactgggctgagattggtaggtggctctgggagctgagggcctaaacctatgaccacaaggaactgaattcatcccaaagccagagaggtggaagacgactc

SEQ ID NO: 810701 - DNA, 120 bp, Artificial Sequence
  ENSG00000267079_1 (sequence is synthesized)
gccacatcctggtaaaggttctcggaaggacccaatgagactgggctcactgggataatccaggatcatctcccatctcaaggttcttcatcgcatacttgcaaagccccttttgccatg

SEQ ID NO: 810702 - DNA, 120 bp, Artificial Sequence
  ENSG00000267079_2 (sequence is synthesized)
tcaggtaacttgttcacaggtttgaagattagaatgtgggcatgtttggggggcataattaggcctagcacaatgcccatgtacccatctccttgcttaaacattaaacactttgccaat

SEQ ID NO: 810703 - DNA, 120 bp, Artificial Sequence
  ENSG00000263766_0 (sequence is synthesized)
gttcgagcgctggggctgcggttgggaaactactggaggatgtggtgcaccagaataagagaataaaccaagaaacaggaagacgtgatccaggcaacaggatattccagtatagtgttg

SEQ ID NO: 810704 - DNA, 120 bp, Artificial Sequence
  ENSG00000263766_1 (sequence is synthesized)
attctggagtgtgagcaggaaccagttaactacattcattgtccaacccccactggtttgaaagaagactccaaattcttggcatatgaatcagctgttcggtagctccaccttatccct

SEQ ID NO: 810705 - DNA, 120 bp, Artificial Sequence
  ENSG00000263766_2 (sequence is synthesized)
gcagcgaagcagcagaaccgccaatggcggcacctcaggattcacactgtgggtggtgaggccttccgctgaaggaggtactggtggatgctctcagcatctcgctttagccaggcagca

SEQ ID NO: 810706 - DNA, 120 bp, Artificial Sequence
  ENSG00000263766_3 (sequence is synthesized)
atcttttaatcagcaaaatccatcatattacttaagtcacagatgctcaccaaggagaagaggtcattctgtaatccaagtcgatccacagggggcagagaaaggtcacgaatgcctggt

SEQ ID NO: 810707 - DNA, 120 bp, Artificial Sequence
  ENSG00000263766_4 (sequence is synthesized)
aataaactttccagcatggcagagctgtactgggtccgataaaacccaactgttcctaagtttaactgcaaagatatccagtaagtactattaaacagctccattaattttttaaatcaa

SEQ ID NO: 810708 - DNA, 120 bp, Artificial Sequence
  ENSG00000263766_5 (sequence is synthesized)
cagaagcccagtagtgaaagctacagctgccatatacttgcagtggaatcacaggagcaatcacaggtctttgtaagtggcagtaacaactcacttgactttccttcacctgacactgtc

SEQ ID NO: 810709 - DNA, 120 bp, Artificial Sequence
  ENSG00000263766_6 (sequence is synthesized)
acctatcacaacactggccatcaaactggtagaacaaccagtcctctgatttggtttcctagggaaggcagttgttcggctcaatgttttgttaacatcaaggctcttattcttgcattt

SEQ ID NO: 810710 - DNA, 120 bp, Artificial Sequence
  ENSG00000263766_7 (sequence is synthesized)
tcaatcattttgcttgcaccagggttggtacaagaaggcacggtccttcttgggtgggtattttgcattgtcacaaatactcttatttagagaaaaccaactctgaaaccctaaaactag

SEQ ID NO: 810711 - DNA, 120 bp, Artificial Sequence
  ENSG00000263766_8 (sequence is synthesized)
tatctagtaaaggaagagattcagttctatcaagcaatatatttttcagtcaagagtgacgctgtaagtatagattcagcagtataaacatattaccaaaagcttggatttttatttatg

SEQ ID NO: 810712 - DNA, 120 bp, Artificial Sequence
  ENSG00000263765_0 (sequence is synthesized)
gctgacaaatgaatctctctggcccctggactgtgccctgaaacacagcttaaaacagcagaatgaacagtaatcccagagatcctgagatgagaaaagggtgtttgacttattcaaaga

SEQ ID NO: 810713 - DNA, 120 bp, Artificial Sequence
  ENSG00000263765_1 (sequence is synthesized)
agaccaaggaagcccaaagaccagagaagagtgcaggaaaggggcggcggtctgagatgcagtcagagcagtggcaagcccccagagtctgtggcaaagacttcaggtttcatcctgaag

SEQ ID NO: 810714 - DNA, 120 bp, Artificial Sequence
  ENSG00000263765_2 (sequence is synthesized)
aaatatcttaggcttacaaagaactactctgacatctaaatggaaaatggactgatgaagcaaaagaagccacaaggaagccagttcagaggctattgaaatgctccagttcctttggcc

SEQ ID NO: 810715 - DNA, 120 bp, Artificial Sequence
  ENSG00000263765_3 (sequence is synthesized)
acgctgtaatcactagtgagctcttctggcagttataagtcacatgtcatgtgacagattttcctgtatgattttcattaaaatgctttggaatcctgggacagaaagaaattatgtaaa

SEQ ID NO: 810716 - DNA, 120 bp, Artificial Sequence
  ENSG00000263765_4 (sequence is synthesized)
taggaacagcggtttattgaaaggaaagcaaatgtccagaagcaaaaacaaacaaacaaaaaacaaacaaacaaacaaaaacagaaaaaacttccccaaaagtaaagaatcacagcttta

SEQ ID NO: 810717 - DNA, 120 bp, Artificial Sequence
  ENSG00000263765_5 (sequence is synthesized)
agttcagaggctattgaaatgctccagccctatattaggtattgagggttcagggatgaactaagctgatctggttcctgctctctaggctgtagaagatggcaagtgctgtggacttca

SEQ ID NO: 810718 - DNA, 120 bp, Artificial Sequence
  ENSG00000263765_6 (sequence is synthesized)
aagaaaagatttctgaagtgtcatgttatgacaattgtgcatccaagatacattggttgtttgcttaaccatcgttttcgcatgtgccatctgtcaaagtctggaagaaacctaagatgt

SEQ ID NO: 810719 - DNA, 120 bp, Artificial Sequence
  ENSG00000263765_7 (sequence is synthesized)
atttgaagattcctcctgttcagaagcaagaaacaaacaaaatcaataagtactcattaattaagaaaacagagcattattatgaaatcatacacatggaaaacttatcaacaataaaaa

SEQ ID NO: 810720 - DNA, 120 bp, Artificial Sequence
  ENSG00000263765_8 (sequence is synthesized)
taacgacaaacaccattacattctcctttataggagacaaacagtataaaccccaaggaagagtgatttctctatgatctagtaagttctaaaaattaaagtccaactaactttaaggta

SEQ ID NO: 810721 - DNA, 120 bp, Artificial Sequence
  ENSG00000263765_9 (sequence is synthesized)
aaagaactactctgacatctaaatggaaaatggactgatgaagcaaaagaagccacaaggaagccagttcagaggctattgaaatgctccaggaggaaataaattttttctgggttagtt

SEQ ID NO: 810722 - DNA, 120 bp, Artificial Sequence
  ENSG00000263765_10 (sequence is synthesized)
gcctaggaggcaggagcctgggaataagtccagctccacatgttggcctgtgtgtgttgtccagtgagggaactgagagtccagcaccaatgaatgtgacacacagaggcccaagtcttg

SEQ ID NO: 810723 - DNA, 120 bp, Artificial Sequence
  ENSG00000263765_11 (sequence is synthesized)
gaagaggaagcagaaatcaaaactgctccagagcacatctggaaaaaacaagcaaagctcatcttcctttattttgtgttttgtaacactgagcaatttgattaaaacaaatcagcagga

SEQ ID NO: 810724 - DNA, 120 bp, Artificial Sequence
  ENSG00000263765_12 (sequence is synthesized)
catgaacccatgacatcaacatagtcaggttgagtatgaagaacactgtgctgtggtgacagggagcctggttttttcctggttttggcattagctctatgtgtgacctcaaccaagtca

SEQ ID NO: 810725 - DNA, 120 bp, Artificial Sequence
  ENSG00000263765_13 (sequence is synthesized)
ctcaagctgttacagtctctctatgtggatgaaatgaaggggttgaaatagctactcactgtagctctgaatggctataattctatgaaactagaaaagaataaaatgtgtttatagtca

SEQ ID NO: 810726 - DNA, 120 bp, Artificial Sequence
  ENSG00000259044_0 (sequence is synthesized)
tactgggtcaccactgaacatggtccataatatttctcctcaaactcaaatgaaaattcaacttgttttatttaccagctcataaagttcctgaagatggataattttttctcatgagct

SEQ ID NO: 810727 - DNA, 120 bp, Artificial Sequence
  ENSG00000259044_1 (sequence is synthesized)
tccaggagctggtgtcagcacaccactgtttgtctgatgagtgagtaacacttcctggagaaggtgaaacctcaagtgagtcttaacagaaagccaaaaagaagcgataggaaggaagcg

SEQ ID NO: 810728 - DNA, 120 bp, Artificial Sequence
  ENSG00000259044_2 (sequence is synthesized)
tcaaggcacttttcttaagtttgagaaaagttcactctatattttgggcttatataattttctccaggcccccaaattagcccatgattgcttcagtattcatgttcacttgatgctcgt

SEQ ID NO: 810729 - DNA, 120 bp, Artificial Sequence
  ENSG00000259044_3 (sequence is synthesized)
aagaacctaccaaggccacggtgtataacataatccccttaatattccttacatgtttttaaaaagaagggcaatgaatcatttttcagggatgcttaaccaactgagagaacagactgg

SEQ ID NO: 810730 - DNA, 120 bp, Artificial Sequence
  ENSG00000259041_0 (sequence is synthesized)
ttcaccttccaccgtgattgtgaggcctccacagccacatggaactgacctgttctgaatggtgctgaagccccatgtgacagagtccatgcccatcaggaggctgaccttcaggacaag

SEQ ID NO: 810731 - DNA, 120 bp, Artificial Sequence
  ENSG00000259041_1 (sequence is synthesized)
gtcaatggcagcctgattctttcacgctgaaaaccggatcactgcatcttatagcaatcgacattcccagcacatgaccattcagtcaacaacttttaactgagcatctactaggtacca

SEQ ID NO: 810732 - DNA, 120 bp, Artificial Sequence
  ENSG00000259041_2 (sequence is synthesized)
ggcctctgtgctaggcgctggggggcacaacaggtagcatcctctttctcaacacagtctaatggccaaaaaagcactccgcaatatagaaggcagaagaggccggggacggtggctcac

SEQ ID NO: 810733 - DNA, 120 bp, Artificial Sequence
  ENSG00000259048_0 (sequence is synthesized)
tttgcggcagtacagcctagaaattaccttacttaatgtattctccagattatccagagttctccaaagaaacagatccggtcggtgactaaacaagtactcgctgctatattatccagg

SEQ ID NO: 810734 - DNA, 120 bp, Artificial Sequence
  ENSG00000259048_1 (sequence is synthesized)
ccatttgcttgatcatttcctctggttaaaagcaagtatttgttctttcaagtatttgttttgttcgggctccaaaagttaaagaggaaactatcaccccctaagaggaagccaatatca

SEQ ID NO: 810735 - DNA, 120 bp, Artificial Sequence
  ENSG00000259048_2 (sequence is synthesized)
ctgaatattttaagcccattgctgagatctaatgcttggaaaaaaataattcctttcagaatattgctgctcattgacaatacacttggttgcccaagagttctgatagacatatacaaa

SEQ ID NO: 810736 - DNA, 120 bp, Artificial Sequence
  ENSG00000259048_3 (sequence is synthesized)
gaaattgatcttgttttcatgcctgctaacacaagatctgtctgcagtccatggatcaagcataatttcaacttcaagccttattatttaagaaatacattttgtaagaccatagctgac

SEQ ID NO: 810737 - DNA, 120 bp, Artificial Sequence
  ENSG00000259048_4 (sequence is synthesized)
atagattgtaattcttctggtggatctgggaaaagtcagttaaaatcttctgaaaaggattcacaattctagatgccaaagggaacatttatgattcacaggaagaggtcaaaatataaa

SEQ ID NO: 810738 - DNA, 120 bp, Artificial Sequence
  ENSG00000259048_5 (sequence is synthesized)
gtagcacacacgggctaacagggttgtagagagacagtagatgttgttgctgaaagaggccttggccgagtttcaacatgagaagtggtgttgttgttgtttatatcctatcaaatgccg

SEQ ID NO: 810739 - DNA, 120 bp, Artificial Sequence
  ENSG00000259048_6 (sequence is synthesized)
acatctgttcatggaccgtgtccttgccagagctatactgtgaggatatttaaaataaagatatgtaaacatggcaccttgaagtcactatattttatcttcactcaaatacaacctctt

SEQ ID NO: 810740 - DNA, 120 bp, Artificial Sequence
  ENSG00000259049_0 (sequence is synthesized)
tttggagttggaagtgagagaatcgtgtttaaaggaaagggtaggtcatccacagaacagctttcagtcattacaaaaaaaaaatacttcttgcttttatattaccatcttcccccatta

SEQ ID NO: 810741 - DNA, 120 bp, Artificial Sequence
  ENSG00000259049_1 (sequence is synthesized)
ggcctacctgcatactgtgcttcatcaaatctaagatcacctcacaactataccattattttaggcaccactaaaagacagtgtattgctaacaaaactatgataaaccattgataatat

SEQ ID NO: 810742 - DNA, 120 bp, Artificial Sequence
  ENSG00000259049_2 (sequence is synthesized)
atccagatttcagagatgttacagtgcatcttagttgatgaaacaaaaatatacaaaacatgagacacagtaaaaatgataagtaccacctcattataccttttcacaagcaaatagtgg

SEQ ID NO: 810743 - DNA, 86 bp, Artificial Sequence
  ENSG00000259049_3 (sequence is synthesized)
ggatcacttgagctcaggagtttgagaccggcttgggcaatatagtaagaccccacagaaaaatgtaaagccaggtgtgatggcac

SEQ ID NO: 810744 - DNA, 120 bp, Artificial Sequence
  ENSG00000259049_4 (sequence is synthesized)
gggaggctgaggcaggagggatggcttgaacccaggaactggaggatgcagtgagctatgatcacaccactggactccagcctgggtgatggagtgggacagtgtctctttaaaaaatgt

SEQ ID NO: 810745 - DNA, 120 bp, Artificial Sequence
  ENSG00000259049_5 (sequence is synthesized)
gggccaggtgcagtggctcgcacctgtcatccaagcactttgggaggctgaggtttgctaattcactgtttacagaggaccttagatgtcccactataattgctcttaggtatttttaac

SEQ ID NO: 810746 - DNA, 120 bp, Artificial Sequence
  ENSG00000259049_6 (sequence is synthesized)
aaatgaatagtcataattcacagaaaagacaagtggtactttttatctacatagactatactatataaactttcagtaaaacatttaaattgttttacttttaatcttgtcaagtaattt

SEQ ID NO: 810747 - DNA, 120 bp, Artificial Sequence
  ENSG00000259049_7 (sequence is synthesized)
agatcaccattgtcctcaatgacacaatttttgtatggtgtaccttacctgtaattctatttcctatgggaggatttaagagatatcttaggaacactatttaaagggatttactgaagt

SEQ ID NO: 810748 - DNA, 120 bp, Artificial Sequence
  ENSG00000259049_8 (sequence is synthesized)
gccaaccttgtgaatgattttacctcaaattgttcagtggtaagaaaggtaataaagcatttagttgtgcctttaagtaggctaattttttttgttttgttttgagatggagtctctctc

SEQ ID NO: 810749 - DNA, 120 bp, Artificial Sequence
  ENSG00000259049_9 (sequence is synthesized)
tacctgataaaactactctttgtcaaggttgtaggacttctgaaaagacagaactagctttgttgcgtttcacgaaggacagatcagttcgtctgtataggctataagcaggtaagtagt

SEQ ID NO: 810750 - DNA, 120 bp, Artificial Sequence
  ENSG00000259049_10 (sequence is synthesized)
gcactctattggtgaaggatttctgttgttttggaaagccaactatagctggctgcatggagggaaatccaaaatccagatgacgtggtgtgagtcaatgggatgagaaacactggtatt

SEQ ID NO: 810751 - DNA, 120 bp, Artificial Sequence
  ENSG00000257912_0 (sequence is synthesized)
aggctcttcactgaaaagaatgccaaatgcctctggaagtaataaagagactgaactaatctaaaattgtttgaaacactcaagtcatttggaaccaatatatgttgtcgttatcccatt

SEQ ID NO: 810752 - DNA, 120 bp, Artificial Sequence
  ENSG00000257912_1 (sequence is synthesized)
ccagtctatcctcattcctgtccatcctcaattaccaaattatttggctgtaaagccagcaaagaaaaggaacagagcctacatcagagcttttacatgaaggaaatactgaaattggat

SEQ ID NO: 810753 - DNA, 120 bp, Artificial Sequence
  ENSG00000257912_2 (sequence is synthesized)
acgacacatcaaaaatatttaaatatgaaactacagagactctggctgagttgcagcctctccagttcacatgctctctaacagaactcagtcttgatgagtgtttgcagaaaattgtct

SEQ ID NO: 810754 - DNA, 120 bp, Artificial Sequence
  ENSG00000257912_3 (sequence is synthesized)
atttggaaagcatttgagattgcctgccaactccacagaactcttttcattaatcagtaaataaagttttatttaattttttcacaaagagaactttgtggtcatgaacgcctgctgtct

SEQ ID NO: 810755 - DNA, 120 bp, Artificial Sequence
  ENSG00000257912_4 (sequence is synthesized)
gctccattaaaaataaagaagtcttctaaagagactctctcaaacatattcaaatacaggacttgggaagatatttcattctaatttaggagtacataattaatgtatttctttgcagct

SEQ ID NO: 810756 - DNA, 120 bp, Artificial Sequence
  ENSG00000257912_5 (sequence is synthesized)
agcgtttaatgtcattgcttttatggcttatgatgtagtttgtttctttttatttaacagaaaggtcaatgtgactaataattagaactatgactgagagaagaagactgtaattagact

SEQ ID NO: 810757 - DNA, 120 bp, Artificial Sequence
  ENSG00000257913_0 (sequence is synthesized)
ggagccctgccagctgggccacccgaggggcgttgcggggctccgggcggggtcgacccggggggctccgtcgggccccaccagccttgcgcctttttcgctcggtctccttggcctccc

SEQ ID NO: 810758 - DNA, 120 bp, Artificial Sequence
  ENSG00000257913_1 (sequence is synthesized)
gctcctgcgacgccgctttccttttctcttgctcccgagctcggacctcggccaggggccccgcccgccagttggtcgcctcctgcagcaccctggaggcccagggccggcggggcggcg

SEQ ID NO: 810759 - DNA, 120 bp, Artificial Sequence
  ENSG00000257913_2 (sequence is synthesized)
gctgtggggatcccgggcgcggcccacacctgggacaatgagcaggaacccagagacagggtcttgctgtgttgctgagctggtcttgaactcctggcctcccgcctcagtctcccaaag

SEQ ID NO: 810760 - DNA, 120 bp, Artificial Sequence
  ENSG00000257913_3 (sequence is synthesized)
tgtgacttcactggacgcagtataaagatcttcagatgtcctcctgccggggattgcagggatcacagaaagaccatcgaggtccaggagctacctgcaagcggagatccctctggacgc

SEQ ID NO: 810761 - DNA, 120 bp, Artificial Sequence
  ENSG00000257913_4 (sequence is synthesized)
cccgtgcctcacccagcaaagccggctcacaaccctgcgctctcaaacctctaaaagggcttgaggtgccaataggaaaggaggcccgagattgccacggcatacgtgggccccaaggag

SEQ ID NO: 810762 - DNA, 120 bp, Artificial Sequence
  ENSG00000257913_5 (sequence is synthesized)
ggagccaggagtcactgcctgcttgggctaagggtaccgcgtacggaaaggcggcggggacgcggcccagttccaggagatgcgcccaacgaagaagcggaggaacagggtcacgggata

SEQ ID NO: 810763 - DNA, 120 bp, Artificial Sequence
  ENSG00000257913_6 (sequence is synthesized)
gggcagacacccggctgctttttgtttgctagacaccagcgccagcccctgcccggccctcccggtctcctaagggttgggggggtgtcttaggctccacagcgcccccgaccgccctcc

SEQ ID NO: 810764 - DNA, 120 bp, Artificial Sequence
  ENSG00000257913_7 (sequence is synthesized)
gcttggtttcctcgctttaggaaactctcttggggcaggccccgccccacatccggtgcggcgacgccacttccgcccacgtcatggcagtcgccagactggggcggaaggcaaggaacc

SEQ ID NO: 810765 - DNA, 120 bp, Artificial Sequence
  ENSG00000257913_8 (sequence is synthesized)
cacccttccggcggtggcgggcctcggtaaccgccctcccccgggtcctcgcggaccgcacggatccggctgacggcgagggtcatgggacggagccgcttgtatttaaaatgttctttt

SEQ ID NO: 810766 - DNA, 120 bp, Artificial Sequence
  ENSG00000257913_9 (sequence is synthesized)
tttatttgtcgtttaaaaacaaacttggaagaagcaaaatccaaaacttgccctttgcctctcgcaacataaatatgtacagttcagaatgatcgctgatacaaaacatgccaaggacag

SEQ ID NO: 810767 - DNA, 120 bp, Artificial Sequence
  ENSG00000257913_10 (sequence is synthesized)
gggcgctgagggtggagggagagagggcgctttaaaaaagggaaccatttcatccgttgttacgaaggaccaaccttgctgtacaggatacacacaacacaaaataaagtcttcacggga

SEQ ID NO: 810768 - DNA, 90 bp, Artificial Sequence
  ENSG00000257913_11 (sequence is synthesized)
gttttctttttcctctttttaacttctaccccagagcctaatccagtacataaagtgtaaaggctaaattagaaaatctatataaaaatg

SEQ ID NO: 810769 - DNA, 120 bp, Artificial Sequence
  ENSG00000257913_12 (sequence is synthesized)
taaagtgtaaaggctaaattagaaaatctatataaaaatgctttgtaaaccataatacatttacaagtaagtagaatatgacatgtcattttaaatttaatggaattagactccttattt

SEQ ID NO: 810770 - DNA, 120 bp, Artificial Sequence
  ENSG00000257913_13 (sequence is synthesized)
ttgtttaagattatcctgattagtcagaattggctcccttgcctgggagaccaactgcgaatcattttagtactttggtcggttttctttttgaaaacctgaaagaaacaacctctctgt

SEQ ID NO: 810771 - DNA, 120 bp, Artificial Sequence
  ENSG00000257913_14 (sequence is synthesized)
gagcagagaaacggtgtggcaaagaattactctgggcatgtaatccaaagcaaagtgaacctgcagtcctttcgtaactacagtagcagatgataaaaaccaagatggaaagagttactc

SEQ ID NO: 810772 - DNA, 120 bp, Artificial Sequence
  ENSG00000257913_15 (sequence is synthesized)
tgcctgaaagaagacacatggttaaaaactgtggagagggaagtgtatgggaggggttacagagcgctagaaaaagactcctgagagtgagggtgggtgcaaacatgtagcaggcaaccc

SEQ ID NO: 810773 - DNA, 120 bp, Artificial Sequence
  ENSG00000257913_16 (sequence is synthesized)
aaacccctgcttagagtcgcagagcgggccatgacctaaaattgtccagggacacatcggcctctaacactgcaagatttcctctttcaagcaaacctcaattctcggtcttattaaggg

SEQ ID NO: 810774 - DNA, 120 bp, Artificial Sequence
  ENSG00000257910_0 (sequence is synthesized)
agaacccagaatgtgattcgcaggacctgtcgcataatttcacaaccaagcattcttgcattcttctttgtacctgaatcgtagaaagttctggaaaaagctaggagcctcctcatgacc

SEQ ID NO: 810775 - DNA, 120 bp, Artificial Sequence
  ENSG00000257910_1 (sequence is synthesized)
tctcctgccagaagcaatgatcccggagaactgatacttgcggagtggggagttcaaaaaagtcagtgaccaaaaccccctcatgccataaatgctattgcctcctctggtccagagttt

SEQ ID NO: 810776 - DNA, 120 bp, Artificial Sequence
  ENSG00000257910_2 (sequence is synthesized)
tgccagttgcaacctgcccccgacgttgtgacaatcaaaaagtctctggacattgccaaatgccctcttggggagagggcagggagcacatatccgcatgacaacgtacagaaccgactt

SEQ ID NO: 810777 - DNA, 120 bp, Artificial Sequence
  ENSG00000257910_3 (sequence is synthesized)
ataatattattattgttttattttatatgctggggccaatccaggataaactcattatagctgccttgttctctgtccaccaagtactgtccaaaaacacatagtggtgattgacatctc

SEQ ID NO: 810778 - DNA, 120 bp, Artificial Sequence
  ENSG00000286839_0 (sequence is synthesized)
atggagacttcatgcaagtttctgcccagggtcactatctagtgaaactgaaaggtttccacatggaagcacctgaccgccaccgcccagttcagtctttcagcaacagtttcctagtag

SEQ ID NO: 810779 - DNA, 120 bp, Artificial Sequence
  ENSG00000286839_1 (sequence is synthesized)
ctcctggtaattgagggaaactgaccaggaccgctctttggcattctctgaagaccaagaagcaaacagggatagatgccctgcctggaaggggaaaagactcttttctatcctttctgg

SEQ ID NO: 810780 - DNA, 120 bp, Artificial Sequence
  ENSG00000286839_2 (sequence is synthesized)
ttatactcccagaactctacgtgtgacacagttggatgtggcagctcatccagggcgaattcacacacgtttcagagaccatcaagcttcagataatcaagcaacaaggtttccagccag

SEQ ID NO: 810781 - DNA, 120 bp, Artificial Sequence
  ENSG00000286839_3 (sequence is synthesized)
ctccaggtgaaggcaccaccccaccgccatcaagaagcaccctgtctccactagacagagtgggctgagagttccgggatctccaacagttgtataaagaccaaatgatatcttcttcca

SEQ ID NO: 810782 - DNA, 120 bp, Artificial Sequence
  ENSG00000286839_4 (sequence is synthesized)
aaaagaatgagaagctgatagctactaatggaacagaagactcaagaagaaagttggaagtggaagacactaattaaaggaggatccagtttcacttgcacttagatgtagaaagccaca

SEQ ID NO: 810783 - DNA, 120 bp, Artificial Sequence
  ENSG00000286839_5 (sequence is synthesized)
aaataatgtggctttcacataaacaggaacaaagctggacaatcaataaaatcatgatttgccttgagctcagcagcgagctaaggtagcaaggcaaacaagtgcactaaatttcagatg

SEQ ID NO: 810784 - DNA, 120 bp, Artificial Sequence
  ENSG00000286839_6 (sequence is synthesized)
acaggccactctgagaagagatcaggtgcatgaatggctttacctttggcaaggcacagcatgaaaacgcaaccaccttatgggagggtaaaaagaaaacatcaaattttaacaaatcct

SEQ ID NO: 810785 - DNA, 120 bp, Artificial Sequence
  ENSG00000286839_7 (sequence is synthesized)
taaaggccacgggtgggtgaaagcaatggtttagactcctggttcatcccaacactagaaagtcagcactgcctcacacgctctttgtaccccactctcagtagtccacagacacacaaa

SEQ ID NO: 810786 - DNA, 120 bp, Artificial Sequence
  ENSG00000286839_8 (sequence is synthesized)
gagaccattcttgaaatgggaaccaagggctttgggtccctgggtgagggaccaaaataagtcctcttgcctccagagctcaggcaagaattccttgcctctggtcatagatagaatcca

SEQ ID NO: 810787 - DNA, 120 bp, Artificial Sequence
  ENSG00000286839_9 (sequence is synthesized)
gtatcactgggagggtgtggagaacccttccttcctccctcattcccaggcaaagataaactctgaagagatttctcaaaaacctccgtatttccacgataaaccttgcacagagtaaca

SEQ ID NO: 810788 - DNA, 120 bp, Artificial Sequence
  ENSG00000286839_10 (sequence is synthesized)
agtgttagcaacctaccactggggttggggtggggataaacagggcaattcacatgtccgtgatctccagtaaaagcacaatgctactgagggaagagtagagcaatagctagctgacac

SEQ ID NO: 810789 - DNA, 120 bp, Artificial Sequence
  ENSG00000286839_11 (sequence is synthesized)
tagggaagggacaggaaaccccctggggtccagccttctgtactgacagaaaacagaggttagctaccactggaggaggaggatgaaactctctcctgccccaagtgcttcatagatagt

SEQ ID NO: 810790 - DNA, 120 bp, Artificial Sequence
  ENSG00000286839_12 (sequence is synthesized)
agggtttggctaccacatgggcacaggaatgttgaaaaaaaaaaaaaacacttctgagacccaggtacccaggatctagccaagtgaggctggaccaagacaactaagagtccccatcca

SEQ ID NO: 810791 - DNA, 120 bp, Artificial Sequence
  ENSG00000286839_13 (sequence is synthesized)
ctcccatctttagccttccaccaaataaccaacaatagcagtatacagtataagaaagataagagcatagcgagaccctttagtggttcaagcagtcagggcttcttaaatctgagaaaa

SEQ ID NO: 810792 - DNA, 120 bp, Artificial Sequence
  ENSG00000286839_14 (sequence is synthesized)
catggagaaaaatactctagcaccttaggatttacaatcagtacattgtagcagtagtctaccattagaggggttttgatatggtttggccgtgtctccaccgaaatctcatcttgaatt

SEQ ID NO: 810793 - DNA, 78 bp, Artificial Sequence
  ENSG00000286839_15 (sequence is synthesized)
tgggagtgacccagtgagagataattgagtcatgggggcagtttctgccacactgttctcatgatagtgaataagtct

SEQ ID NO: 810794 - DNA, 120 bp, Artificial Sequence
  ENSG00000286839_16 (sequence is synthesized)
tttataaggggaaacctctttcacttggttctcattctgtcttgtctgctgctgtgtaagaggtacctttcaccttctgccatgattgtgagacctcctcagccacgtggaactgtgagt

SEQ ID NO: 810795 - DNA, 120 bp, Artificial Sequence
  ENSG00000257918_0 (sequence is synthesized)
gtactcaggggaaggattgctaacaggggaagagggaggtggcacttccacagatgtggcagattttgctggagaaaacgatggcactggtgaaggggttggtgcggcagcctctgtcaa

SEQ ID NO: 810796 - DNA, 120 bp, Artificial Sequence
  ENSG00000257918_1 (sequence is synthesized)
gatgatctcttctcggacttctgctgtggatagagatagggacaacaatccctggtgggacagcttacattgggtgatgagtttccggtgctcatcgcgagagtcttccatggtgtaaag

SEQ ID NO: 810797 - DNA, 120 bp, Artificial Sequence
  ENSG00000257918_2 (sequence is synthesized)
ggtttgcttggtgatgctgttcaggtccacgttcctccagtcttccagcatttggaacgtgatgtctgcactgtggatcactgttcgagatgcctataatccaatccaatcaactcgtta

SEQ ID NO: 810798 - DNA, 120 bp, Artificial Sequence
  ENSG00000257918_3 (sequence is synthesized)
ttccgggaaattcaatttcaggaaagcaccagaagactctgtaactcagaagacgcagacactgttttctcctatggttctttccacacatctctttttctctacaagaaactgcgaggg

SEQ ID NO: 810799 - DNA, 120 bp, Artificial Sequence
  ENSG00000257918_4 (sequence is synthesized)
tgggctaggccagaccaaaccctgctgtttccagtccctttggtcttgaccccatggaacaatgggatgaagcccagagatctgtcagctttctgatgtaagcctgtgggatgggagctc

SEQ ID NO: 810800 - DNA, 120 bp, Artificial Sequence
  ENSG00000257918_5 (sequence is synthesized)
tgtgctgaattatccttgtgtctccagtacctgagaagctgcaggctgggatttagaagtgttcttgctacccctgggcctaacttaatcccagaaatttcaaagtgtgtatttttcata

SEQ ID NO: 810801 - DNA, 120 bp, Artificial Sequence
  ENSG00000225913_0 (sequence is synthesized)
ctcatctataagcaaggacacctctggaagacgcaaggcctggatgtcacagccagccttatcaataaacaatcttctgccttgacagacggaagaggaagggccaattcaatgaatact

SEQ ID NO: 810802 - DNA, 120 bp, Artificial Sequence
  ENSG00000225913_1 (sequence is synthesized)
cagatcaagtgtctgtctggaaagctggcagtcttccagaaatacaattagggcccattccagtggaacagaagtgctactttgggggtggactgaaacaagttgctgggcttccattgg

SEQ ID NO: 810803 - DNA, 120 bp, Artificial Sequence
  ENSG00000225913_2 (sequence is synthesized)
tgtcgttgtgaggaggggccgtgcctccacaggcccatacctgtaacctgacgatactgttgtgagcgggaatggaggaagtgcatggaagcccctcagcacgatgcatagtgaacagac

SEQ ID NO: 810804 - DNA, 120 bp, Artificial Sequence
  ENSG00000225913_3 (sequence is synthesized)
aagctgtgaaccttgggagttatcaccatgtgtgatgatgctggtgaagaaagcctgcactgaggaggctgtcagcctgggtttgaatcccctcatttggaatataatcttggcaaagtc

SEQ ID NO: 810805 - DNA, 120 bp, Artificial Sequence
  ENSG00000225916_0 (sequence is synthesized)
aggaggcctctatcagagcaaagaatttggagctgcttccaatctgaaacttccttagcgttgtaaaaagcacccttcattcgaaatcgctcagtgcctggactcagagaaagtgggaga

SEQ ID NO: 810806 - DNA, 120 bp, Artificial Sequence
  ENSG00000225916_1 (sequence is synthesized)
gttaccaaggctcggcccccaaggcacagtgagaagaaactgaggcaatgccaagaacaccccgacctcatgagcttcaaagaagctgctgctgcagttcccggttctgaggcacctcca

SEQ ID NO: 810807 - DNA, 120 bp, Artificial Sequence
  ENSG00000225916_2 (sequence is synthesized)
ccttcacaaaggctcctgtgagacttctaccccctatgggtctggtagcaccaagggatttctcatgctatgaccacagacatcatcaagagggtagagagaccaagtggccagtgaatt

SEQ ID NO: 810808 - DNA, 120 bp, Artificial Sequence
  ENSG00000225916_3 (sequence is synthesized)
ggcacacatgaagattctttgtgatctgtaaagaaagtgtaaaatctgcaacaaactgtggaataatctgacataggaagaggtggatggtacagaagaacaataaaataatagccagcc

SEQ ID NO: 810809 - DNA, 120 bp, Artificial Sequence
  ENSG00000225914_0 (sequence is synthesized)
gggagaagcatggtttcctgaggtcgcaccatcactcacttcttcccttggctgggagtgggggttcctttggctctgtgtcgctcccaggggggctgtcgccccatccagcttttcttt

SEQ ID NO: 810810 - DNA, 120 bp, Artificial Sequence
  ENSG00000225914_1 (sequence is synthesized)
gttctctgtgggtcgagttgttttcctgatgagtcccaatgcaagtacctggatatttcagttgaagatgctgtattcacttgcctcttttgttcctctctgtgagtgctgtggaccata

SEQ ID NO: 810811 - DNA, 120 bp, Artificial Sequence
  ENSG00000225914_2 (sequence is synthesized)
gctgtttctaatcagccatcttggcctggcaatctacagattttataacctgacagcgtgctggaacttctctgctggactcctggactcccacaatggttgtggggctagacaagaagg

SEQ ID NO: 810812 - DNA, 120 bp, Artificial Sequence
  ENSG00000225914_3 (sequence is synthesized)
gagttaacaattcagtctctgtggcttcctcctgtcctctccctgaaactgagatccagccaatctgcacatttattctgagagtggccccactttaatgactacacccagctgtctaca

SEQ ID NO: 810813 - DNA, 120 bp, Artificial Sequence
  ENSG00000225914_4 (sequence is synthesized)
caccaggaggggagggaactgtatcctgaggcaccaacccgattacccacccaacagccacagggacttccagtgactggggcatcatcctcaatgccaccaacccctctccttcctgtg

SEQ ID NO: 810814 - DNA, 120 bp, Artificial Sequence
  ENSG00000225914_5 (sequence is synthesized)
gcttttctaactggaactggaactcagaaagtacattaatcaccaatttgggaagctataggaaagtatgttttctaatatacagtgagagaatgtgactgataaaaccaattttcttga

SEQ ID NO: 810815 - DNA, 120 bp, Artificial Sequence
  ENSG00000225914_6 (sequence is synthesized)
gactttctccctggaaagtgaatatatgtattcatagggccttcacaagcacagactaacaagcaaagagctacattcactgggaaggaagactcaaaagtaagtgaaaaataatagtta

SEQ ID NO: 810816 - DNA, 120 bp, Artificial Sequence
  ENSG00000225914_7 (sequence is synthesized)
atgatccaatcctgctaggaagaacctcaccctacttagctgctgctgggtatcaaatagatgctgctcaaaaggtggctaaagagcctaagtggagatctgcttgtattcttcattgat

SEQ ID NO: 810817 - DNA, 120 bp, Artificial Sequence
  ENSG00000225914_8 (sequence is synthesized)
gaagtctaaatatgaagctagaactgaagacattccatcagattgactgttacagggtagggagctgcagcacaagcacagagaagccagcagcttcatcacatcacaccagctctgcag

SEQ ID NO: 810818 - DNA, 120 bp, Artificial Sequence
  ENSG00000225914_9 (sequence is synthesized)
cgccaaggcagacacaccagctctgcggcaccgaggcagacacaccagctctgcggtgccgaggcagagcctgcgccctctgatgctctgtgtcgtgttttttcccacttcgccatgctg

SEQ ID NO: 810819 - DNA, 120 bp, Artificial Sequence
  ENSG00000225914_10 (sequence is synthesized)
cattttccttagggctctgacatctccttctgacactgattttttttttttgacactgaatttttaaataattatttttcaaggtgcaacattttgacgtcaaaattcagctagtgagat

SEQ ID NO: 810820 - DNA, 120 bp, Artificial Sequence
  ENSG00000225914_11 (sequence is synthesized)
ttccaaagtccctttcttctaatttcttatttccaagtattttttttaattgcagcttaatttatgataagaagcagctgcatttcttgaccccaaagtactagagtgaattaataattt

SEQ ID NO: 810821 - DNA, 120 bp, Artificial Sequence
  ENSG00000225914_12 (sequence is synthesized)
aacgtggtgcaaccactgattcaagtgcttttaatgtctcatttaatcctaaagcctgtgctggcctctgagatgtagttactgctgttattctcattaaaaagatgaaagaactaaggt

SEQ ID NO: 810822 - DNA, 120 bp, Artificial Sequence
  ENSG00000225914_13 (sequence is synthesized)
tgaggtgctcaagtaactttccaaaggtgactcagctaggagtggaggagctcctgggagtggaggagctcctcaaaagtgaggagttcctttttggatacaggtggcttggccccagac

SEQ ID NO: 810823 - DNA, 120 bp, Artificial Sequence
  ENSG00000225914_14 (sequence is synthesized)
ttacactcttagatgttgttctcgacctttggacccagactagctcactgggacattagactatacagtaaagggagaagggaatcctacctgactgcttcattgtcagcaggatgaata

SEQ ID NO: 810824 - DNA, 120 bp, Artificial Sequence
  ENSG00000225914_15 (sequence is synthesized)
ggaaggaggcgactgcaccagacagattgtagcctggaaaatccaccatcctccctggaacaaagacaaggaaacgctgtgcctaagtgaggctgtgacacacccggcacactccatggc

SEQ ID NO: 810825 - DNA, 120 bp, Artificial Sequence
  ENSG00000225914_16 (sequence is synthesized)
ttccattggttatgcagtcttagcagagaatccacatcaacccctgcacagtcagtgaaatgggcttggctccatttctctgcaattactgatcacatccaaccctttacctaacgtgtt

SEQ ID NO: 810826 - DNA, 120 bp, Artificial Sequence
  ENSG00000225914_17 (sequence is synthesized)
atattgtgagacaatgtagcaaatgtaagaagccttgcttgctcatttcggcttgctagcatactttcacaaagcccctgctgtgatgacctgcagttctccagaaagatgcttcaaaga

SEQ ID NO: 810827 - DNA, 120 bp, Artificial Sequence
  ENSG00000225914_18 (sequence is synthesized)
caaaacaagattgagcacacggcctcccatctctcttgcctgagtcactctactccttaaaagataagcaataatagtccttgccttttcctacacataagataacgtctgattgaagga

SEQ ID NO: 810828 - DNA, 120 bp, Artificial Sequence
  ENSG00000225914_19 (sequence is synthesized)
tacctctgtaacctataaccagatctgctcatacacccaaacgttgatgtagttcggcttcaatgtagcttctgagctaatttgatgtagtggttaatatgtaacctcctgacatcgaaa

SEQ ID NO: 810829 - DNA, 120 bp, Artificial Sequence
  ENSG00000225914_20 (sequence is synthesized)
ggaggccgcctcctgcttgccggcctggcggtcctactcaacaccgcaagatttcaaaagggaaattcctccagggctgagtcacagggaagaaagcgatttcctccgcctcttccaaag

SEQ ID NO: 810830 - DNA, 75 bp, Artificial Sequence
  ENSG00000225914_21 (sequence is synthesized)
aagcagcaaagattgctgcctgttctttcttctagaagcttcgacccagtggggcacctgtcagatgccagccag

SEQ ID NO: 810831 - DNA, 120 bp, Artificial Sequence
  ENSG00000225914_22 (sequence is synthesized)
aagcttcgacccagtggggcacctgtcagatgccagccagagctctcctgtatcaggtgtctgtcggtccaagctagaaggttgtggggctagacaagaaggaaaaaaatcactgtcctc

SEQ ID NO: 810832 - DNA, 120 bp, Artificial Sequence
  ENSG00000225914_23 (sequence is synthesized)
taagtcttcataaatataaagatagatcaatgtaaatgtaaaaatcatttgttaaactccagagattatataaacaaaaggtgaacctaatgtaaaactgtggactttagttgaaaataa

SEQ ID NO: 810833 - DNA, 120 bp, Artificial Sequence
  ENSG00000225914_24 (sequence is synthesized)
tgtgtcactattctttcatgggttgtaacaaatgtgccacactaatgtaagatgttaataatagcagaaataggggggagagaggagggatctaggagctctctggattttccattttat

SEQ ID NO: 810834 - DNA, 120 bp, Artificial Sequence
  ENSG00000225914_25 (sequence is synthesized)
tttgttataaatctaaaactgttcttaaaaataatgtctgttaattttttttttaaaaaggaaagaagcactgatacatgctatgacatggaagaactctaaaaatattaggctaaggga

SEQ ID NO: 810835 - DNA, 120 bp, Artificial Sequence
  ENSG00000225914_26 (sequence is synthesized)
aagaagccacatacacatacacatacacagatagtttatggttccatttatataaaatattcagaatagaaaagttcatagggacagaaagtagattacctggggagtagggggtgaaaa

SEQ ID NO: 810836 - DNA, 120 bp, Artificial Sequence
  ENSG00000225914_27 (sequence is synthesized)
atgggtagtaactgcttaatgggtatgaagtttcgtttagggcgatgaaaatattctggaactagaaagtgatgatgatggtcacacagcaatgtcacatatacaataccacagaactgt

SEQ ID NO: 810837 - DNA, 120 bp, Artificial Sequence
  ENSG00000225914_28 (sequence is synthesized)
acactttaaaatggttaaagggttttattttatgttatgtattttaccacaattgaaaaaaatgtttattaaaattaatgtgtaaacatttgtggaagaataatgtgtagtttctaacat

SEQ ID NO: 810838 - DNA, 120 bp, Artificial Sequence
  ENSG00000225914_29 (sequence is synthesized)
ttatgtgtttaaatttatgagtttaaaaatagaaaaaaaaatgatggcccagaagagcaagttcagagtgctgttcatgagtgatccgcatgggaccgcgatgcctctgacgtctgccat

SEQ ID NO: 810839 - DNA, 120 bp, Artificial Sequence
  ENSG00000225914_30 (sequence is synthesized)
cctggagagcagcagagcgtcactagcaggtcctcgtcttctcacttcataacattctttccaaaagtcttgttgacattcttctgtcttccacatatagtttatcttcttgaactcatt

SEQ ID NO: 810840 - DNA, 80 bp, Artificial Sequence
  ENSG00000225914_31 (sequence is synthesized)
cttctgtcttccacatatagtttatcttcttgaactcattataactttaaaatatttttactgtgttacatgtactgctt

SEQ ID NO: 810841 - DNA, 120 bp, Artificial Sequence
  ENSG00000225914_32 (sequence is synthesized)
aaacttgcatttacttttgactgattattgaagtgtctggttatggagaacaaagaaattggagaaatgtgaagcttaagcttctgctgtgctgcagcgaagaagtctgggaagtttagg

SEQ ID NO: 810842 - DNA, 120 bp, Artificial Sequence
  ENSG00000225914_33 (sequence is synthesized)
aagatatcctcttgattaaatggggctaaatgtcagcagaattgaagaaaagtaaaggaacttaccaatacttgatcgagacagtgctaaaataaaacacatcaaaagaagaatgagttc

SEQ ID NO: 810843 - DNA, 120 bp, Artificial Sequence
  ENSG00000225914_34 (sequence is synthesized)
tgtttgtcccagggagaacttagatgccatagacactatattgcagaaaggttgtggaaaagaggatagaaatgagtcacaacttatttcctggtatcaattgcaatgcaatgtggtgag

SEQ ID NO: 810844 - DNA, 120 bp, Artificial Sequence
  ENSG00000225914_35 (sequence is synthesized)
cagctggatatctacatatggattccaatacttttgtggtaaggtgggactacaagatctatgcaacctgtctttcaattttggttgtggggctagacaagaaggaaaaaaatcactgtc

SEQ ID NO: 810845 - DNA, 120 bp, Artificial Sequence
  ENSG00000225914_36 (sequence is synthesized)
agaggtaaaagaatggggagagaaatgggagggagagaaggaagctgagggagatttgaggagagaaggcgcttgagggggaaccaggaggggagaaggcttgtgagggggaaatgtgag

SEQ ID NO: 810846 - DNA, 120 bp, Artificial Sequence
  ENSG00000225914_37 (sequence is synthesized)
agagtcattttagcagtgtttggggagggagttataccttttattcctcaggattttataacctgacagcgtgctggaacttctctgctggactcctggactcccacaatgatgtatctc

SEQ ID NO: 810847 - DNA, 120 bp, Artificial Sequence
  ENSG00000225914_38 (sequence is synthesized)
cttggtgaaatttcacgtcacacactaagtggcaaagacagtattcgaagccaggaagaatcaagccagagcctagtcctaatttcactgaccctaaagggaggcttacatatttcatca

SEQ ID NO: 810848 - DNA, 120 bp, Artificial Sequence
  ENSG00000225914_39 (sequence is synthesized)
cctgcatcttttgctggtggctgtgatcttcggaagcaagtggataaacgggagcatgtgaaatgcgaatctccacgaggcgttatttgtagctaaatattctattcaatggagtcaatt

SEQ ID NO: 810849 - DNA, 120 bp, Artificial Sequence
  ENSG00000225914_40 (sequence is synthesized)
actgacccttagcagagcttcaataccgtgctgggaggtccactgctctcttcagagccatcaggcagggacgtttaagtctgctataagcccccgactggggttgctgccttttttaca

SEQ ID NO: 810850 - DNA, 120 bp, Artificial Sequence
  ENSG00000225914_41 (sequence is synthesized)
cacagcagccttgctgagctgcagtgagctctgcccagtttgaacttcccagcagctttgtttatactgtggccataaaaccatctactcaagcctcagcaatggtggacgtctcttcca

SEQ ID NO: 810851 - DNA, 120 bp, Artificial Sequence
  ENSG00000225914_42 (sequence is synthesized)
tactgtggccataaaaccatctactcaagcctcagcaatggtggacgtctcttccaccaccaagctcaatcatcccaggtgaatctcagattgctgctgtgctggcagcaagaatttcaa

SEQ ID NO: 810852 - DNA, 90 bp, Artificial Sequence
  ENSG00000225914_43 (sequence is synthesized)
cctgggctccatgggcgtgggaccagccaagccagaccacttggctccctggcttcagcccctctttccaggggagtgaacggttctgtc

SEQ ID NO: 810853 - DNA, 88 bp, Artificial Sequence
  ENSG00000225914_44 (sequence is synthesized)
aacggttctgtctcgctggtgttccaggcgccactggggtatggaaaaaagaaaaaaagctcctacagctagttcagtgtctgcccaa

SEQ ID NO: 810854 - DNA, 120 bp, Artificial Sequence
  ENSG00000225914_45 (sequence is synthesized)
tgggtttcgaagactgtgggacaagtgcagtatctgtgctggagttcctcaggctcagaccctcatggcttcccttgggtagaggggaaaattccccgaccccttgcacttcccaggtga

SEQ ID NO: 810855 - DNA, 120 bp, Artificial Sequence
  ENSG00000225914_46 (sequence is synthesized)
gatctcgctgggagctgcagactggtgctgttcctattcggccatcttgaatcttgcctgttcatttttaattttttctttcagtgtattttcctctcagttcaggctggaaaatttcaa

SEQ ID NO: 810856 - DNA, 120 bp, Artificial Sequence
  ENSG00000225914_47 (sequence is synthesized)
ttgctctatctttgagttcactgattgtttcttttgtcatattcattctgttattgaatccatccagtgagttttcattttggttattttattttccagctataaaatttccatttgctt

SEQ ID NO: 810857 - DNA, 120 bp, Artificial Sequence
  ENSG00000225914_48 (sequence is synthesized)
ttattttccagctataaaatttccatttgcttctttctttctttttttttttagaaatgttcatctttttattttaagttccggggtacatatacaggatgtgcaggtttgttacatagg

SEQ ID NO: 810858 - DNA, 84 bp, Artificial Sequence
  ENSG00000225914_49 (sequence is synthesized)
accttgtttgagagctatgtcagcaatatatatgcacaatgtgcaggttagttacatgtctatacatgtgccatgttggtgtgc

SEQ ID NO: 810859 - DNA, 120 bp, Artificial Sequence
  ENSG00000225914_50 (sequence is synthesized)
actcaacaccgcaagatttcaaaagggaaattcctccagggctgagtcacagggaagaaagcgatttcctccgcctcttccaaagcggttgtggggctagacaagaaggaaaaaaatcac

SEQ ID NO: 810860 - DNA, 120 bp, Artificial Sequence
  ENSG00000225914_51 (sequence is synthesized)
ttactgggaggtagaagtaaataatggggacagaagttggaccaggaacgagatgagctctgggtgtttgttcagcacaatgaagagagagtggtggtttgtagaaagtccagagaagaa

SEQ ID NO: 810861 - DNA, 120 bp, Artificial Sequence
  ENSG00000225914_52 (sequence is synthesized)
tttctgcatggtgacatgtgaagaaggaagggtcatggctctcacttcctgcccagagactctgtcaggagcctccctgtccccctagaaggtttccaggacagcaaggctggagacgtg

SEQ ID NO: 810862 - DNA, 120 bp, Artificial Sequence
  ENSG00000225914_53 (sequence is synthesized)
tcttttcacaacgaggtcgattagtcccacatctattctcttactggaatcaccttctgtgggattttccatccttattctagccttcagagtgctggcacatctgtgaccttctgctta

SEQ ID NO: 810863 - DNA, 120 bp, Artificial Sequence
  ENSG00000225914_54 (sequence is synthesized)
gatcatcatgaaaattgtcctgattcttttccagttacccctgtaacttctttaacgagttgtgatagagatgttgcccaggaagctaatgttctattagcataataagcagcgaagtgt

SEQ ID NO: 810864 - DNA, 120 bp, Artificial Sequence
  ENSG00000225914_55 (sequence is synthesized)
agccaaacaggaagacaagtgtttcacggacataagaaatttaaagtggaagcactttctagagcacacaaaacagcctccctaacacatgagaagtcaccagcaacacagaaatcacca

SEQ ID NO: 810865 - DNA, 120 bp, Artificial Sequence
  ENSG00000225914_56 (sequence is synthesized)
acaagtaggtcaccacatttttaaagatcataggaaattgttcacgccaacaaatctcagtgaacctcagctctcagccttgaaaacaaggatggctgtactactcacttttttcttctt

SEQ ID NO: 810866 - DNA, 87 bp, Artificial Sequence
  ENSG00000229021_0 (sequence is synthesized)
caggactccaaggctctaaggatggaagagtcataattggaaagagcctgggtacctgaatcactgtatggaggaaaatcacttgct

SEQ ID NO: 810867 - DNA, 120 bp, Artificial Sequence
  ENSG00000229021_1 (sequence is synthesized)
ctgggtacctgaatcactgtatggaggaaaatcacttgctgagcaggaacatcctcattggactagctataaatttggttggtaacattgaagagacacttctcacctgcctgaaatgcc

SEQ ID NO: 810868 - DNA, 120 bp, Artificial Sequence
  ENSG00000229021_2 (sequence is synthesized)
cttcattatcttttcaggttgcaagggctctggaacagcccttgcagtactcacataaaggagcctgagctgagtccacaccctggaagcccagaactgagggaacagatggaagaaaga

SEQ ID NO: 810869 - DNA, 120 bp, Artificial Sequence
  ENSG00000229021_3 (sequence is synthesized)
aagtcagcaggtttaggggatgagaataaccacaaaggacaagccattgctgctccttaaaagaaaaggaatcatactgctaagaattcagacttcagcagacatggggagcattgggag

SEQ ID NO: 810870 - DNA, 120 bp, Artificial Sequence
  ENSG00000229021_4 (sequence is synthesized)
gagcccgaatcactgatggaattgaacagtgcgtggagacggttcagcaggacaaggtgctcaaaattcatccctgtgtgacctcaagtaagccacataactttgtgatcctgcagtttc

SEQ ID NO: 810871 - DNA, 120 bp, Artificial Sequence
  ENSG00000229021_5 (sequence is synthesized)
atcatatttaacaggaaaaaacttgacagattttcattctgccacagaatgtcaggtctcccagacaccagaaaatacattgacttaaaaagcctttgatacatctcaaagcagtatccc

SEQ ID NO: 810872 - DNA, 120 bp, Artificial Sequence
  ENSG00000229021_6 (sequence is synthesized)
tacgcagtatagttggaagatggtgggcgctgtagagagggatgctttcaaatgggattgatccagtcctccttccttcacttccacatgaatgctgggcagcccagggtcacacccact

SEQ ID NO: 810873 - DNA, 120 bp, Artificial Sequence
  ENSG00000229021_7 (sequence is synthesized)
gcaccctcaactcgggcaagtccaacagccaaactgaggagacctgggctacagaacagtctctcaagttccaggctcacaaaacctaggtgggaatgaatgccgagaaagtgaggaggt

SEQ ID NO: 810874 - DNA, 120 bp, Artificial Sequence
  ENSG00000229021_8 (sequence is synthesized)
ggttcaggggatctctctcccctactcattcctctcacgtcaaactcaccttctactgcacagcaacactgaggatcaccaaataccaactactaacaccaagaccatgaccttgatgtt

SEQ ID NO: 810875 - DNA, 120 bp, Artificial Sequence
  ENSG00000229021_9 (sequence is synthesized)
gccatgttctgttagtggaaagcaaccacacatcagttgtgttagtccaactcagaaaaatacttatcaagcaatattccataagaactgctcatggccctgttcttttcaatatatggg

SEQ ID NO: 810876 - DNA, 120 bp, Artificial Sequence
  ENSG00000229021_10 (sequence is synthesized)
aaaactaaaggaaaacaacaaaatagtatcaggtttgcaagacttcccaagatcgatggtcacacgtgttttcaggagctccctatgtaaatgattttgatcacttgataccttgaaaag

SEQ ID NO: 810877 - DNA, 120 bp, Artificial Sequence
  ENSG00000229021_11 (sequence is synthesized)
agctcttatgggcccagaatgacatccataagtgacaagtatgaaatgtagtgttcagtcacattaaaaaacaaatcatcccacatagaggaagagctttggatgtaggaatgtcaaact

SEQ ID NO: 810878 - DNA, 120 bp, Artificial Sequence
  ENSG00000229021_12 (sequence is synthesized)
ggtcttaaatgtaatgaaaagccaagatggtgccccagtaagaaaaaagaaatcaacataacaatgggatgccccaagaagaatactgagacaggaaagaaaacatttttaaaaaattaa

SEQ ID NO: 810879 - DNA, 120 bp, Artificial Sequence
  ENSG00000229021_13 (sequence is synthesized)
ttattcattcactttctggtggatacagaaaaaactgcagaagacccacaggatatcatggcagtctaaaagtttgatatcttacaccgtggaaaagccttaaattctattttaacgtga

SEQ ID NO: 810880 - DNA, 120 bp, Artificial Sequence
  ENSG00000229021_14 (sequence is synthesized)
gagaaggtggagtgactgacttcatgactaccatttagaaaatataacctgttgggaaactatttctgccttgatgattttgtacacacaagaaatgaacaatgaggaagatgcttagat

SEQ ID NO: 810881 - DNA, 120 bp, Artificial Sequence
  ENSG00000229021_15 (sequence is synthesized)
gtattgggaaagagatgggtctgtggcattgtcacaagggtacaagggtacacatatactgagagtgaatgctgaagggaaggcccccatcggtggtgacctctcgtgtgaccagggcgc

SEQ ID NO: 810882 - DNA, 66 bp, Artificial Sequence
  ENSG00000229021_16 (sequence is synthesized)
gttacctggcatgctggctgccacctccctcactcttgtcagagtctgagctacaggcagtgcctt

SEQ ID NO: 810883 - DNA, 120 bp, Artificial Sequence
  ENSG00000229021_17 (sequence is synthesized)
ggcagtgccttcagctctgagctcaggcgtctcaaaccttgtttttgcgattaaggactctcaagtgctgtggggagtgatcacgtttttctcaacatccctggctccacctcttctgcc

SEQ ID NO: 810884 - DNA, 120 bp, Artificial Sequence
  ENSG00000229021_18 (sequence is synthesized)
acaaacatcagcatggtggtgtctgccagcccttcatccagtgtgagaagacagagatgaacactggagaaatcaacaagaaattgcgcccccagccggcagagaacaaacagcagttca

SEQ ID NO: 810885 - DNA, 120 bp, Artificial Sequence
  ENSG00000229021_19 (sequence is synthesized)
gaaacataaagagaaatttcttgtaactcaagtggcctaattcctggccaaccagcagaagaaataccagtatgaagaattcaaagacctcataaaatctatgctgagggatgagctgca

SEQ ID NO: 810886 - DNA, 88 bp, Artificial Sequence
  ENSG00000229021_20 (sequence is synthesized)
gaggagctcaggcaatataaagtcctagttcactctcaggcacgagagctggcctggttaaggaagagattacaagcatctccaggcc

SEQ ID NO: 810887 - DNA, 120 bp, Artificial Sequence
  ENSG00000229021_21 (sequence is synthesized)
tccaggccctcctcactccggatgagcctgacaactcccaggggcaggatatctgagagcagctggctgagggctgcaggctgacagagaacctcatccacaaactcagcccaggtggtc

SEQ ID NO: 810888 - DNA, 120 bp, Artificial Sequence
  ENSG00000229021_22 (sequence is synthesized)
gaacctcatccacaaactcagcccaggtggtctttggaacaggaggcagcatctctccagttttaaaggacaagaaggaggctgtgacaggagggcgcttgttagagtgaaaagagctct

SEQ ID NO: 810889 - DNA, 120 bp, Artificial Sequence
  ENSG00000229021_23 (sequence is synthesized)
ggactaagcatggaggttcccaggctctatcttcagcaacgtccttcgtaactgtcgaaaatgatgaagatgtggatgacgatgtttacgttgaggaggctgagaaagtgcgggaatcac

SEQ ID NO: 810890 - DNA, 120 bp, Artificial Sequence
  ENSG00000229021_24 (sequence is synthesized)
gtgcccccagatatataagaagaatcttcatgtgtgcagagctatctaagcatggaggctgtagtggttaacaagacagatgaagtctctgttcagatgctgctcgaccagctcaactta

SEQ ID NO: 810891 - DNA, 120 bp, Artificial Sequence
  ENSG00000229021_25 (sequence is synthesized)
ggtgaataaacaatatttatagagcaagtggaggaagatgatccaacatagaagaaagaagagagatgatcagggaagcaggaggaggcttctctggtgtcatcaaagctcatgaagaga

SEQ ID NO: 810892 - DNA, 120 bp, Artificial Sequence
  ENSG00000229021_26 (sequence is synthesized)
gacttccaagatacagggagtggtcaacaaggtgaaagacttcagcgaggcagagtatggtggaggctgagatgtgtccacctgattggcaatcatatccttggatacctttgccagagc

SEQ ID NO: 810893 - DNA, 120 bp, Artificial Sequence
  ENSG00000229021_27 (sequence is synthesized)
agttttagtgtggtggtaggaagaaacacagatggcagtggactgaggaagagagatgaagagtagagatggggttatggattactcatttgatcaaattgaatatgaagaaaaggagaa

SEQ ID NO: 810894 - DNA, 120 bp, Artificial Sequence
  ENSG00000229021_28 (sequence is synthesized)
agtggcagccagaggggatctaggattaagggtatatttaaaaatatacagttttacaagctgtggagaaggagttatcagaatgagaagtcaaagattccaggttgaaagaatgtgaac

SEQ ID NO: 810895 - DNA, 120 bp, Artificial Sequence
  ENSG00000229021_29 (sequence is synthesized)
aatgaaacaagaccccagaggagccgtgggtgactggaattacttcagagaggtggagaaggagaagagtgggagggaggctgtagatagcttgtaggtttgggctgtacagggttatcc

SEQ ID NO: 810896 - DNA, 120 bp, Artificial Sequence
  ENSG00000229021_30 (sequence is synthesized)
tttcccatggcctttttgatgctatgaggcaggaagtaaggcatctgtgagcataggcattgggtagggggcacagagggcataggcattgggtaggggacttgaggaggtcctgtggtc

SEQ ID NO: 810897 - DNA, 120 bp, Artificial Sequence
  ENSG00000229021_31 (sequence is synthesized)
tcagaggaaatggaaagaggagctgaaccagaatggctgagtggtgtgaaagtttagggacctatcattttgtggtgacttcaatccacatggttgtgtgattgtgtggctgtatggctt

SEQ ID NO: 810898 - DNA, 120 bp, Artificial Sequence
  ENSG00000229021_32 (sequence is synthesized)
cttccaggtgtgcttcgaagtttagtcatcagatccaagagaacgggctgtggaatgaatttagggttaggtgtgtgtgtatgggtgtaaacaaaggataaaggggtgaaggagttgagg

SEQ ID NO: 810899 - DNA, 120 bp, Artificial Sequence
  ENSG00000229021_33 (sequence is synthesized)
gcatgggtgagaaaggaattcacttgattggcactgcatgctggacaaagaaggaaggagcaaggacacagaaggtggatggtgggaaggctccacaaaatcaaggagcaaggtaagtgg

SEQ ID NO: 810900 - DNA, 120 bp, Artificial Sequence
  ENSG00000286309_0 (sequence is synthesized)
agataaaaaagaaacacagagattgagagagatggaaagagacagagacagaaataaggaggcggagacagagagacacagaagaaacacagagacagagacagggagaaagacagacac

SEQ ID NO: 810901 - DNA, 120 bp, Artificial Sequence
  ENSG00000286309_1 (sequence is synthesized)
agacagaaaaacagagataaaagaaaaacacagagagagaaatagagaaagagatagaggcagaaagataaagagagataaaaaagagatagagaggcagagatggacacagacagagaa

SEQ ID NO: 810902 - DNA, 120 bp, Artificial Sequence
  ENSG00000286309_2 (sequence is synthesized)
gaaggacagatgacaaagagagatggaaaaaagagacagacacaaagaccgaaatagacacagagacagagacacagagaaaaacagaaagacagagacagagacaaagagacacagaga

SEQ ID NO: 810903 - DNA, 120 bp, Artificial Sequence
  ENSG00000286309_3 (sequence is synthesized)
acagagacagagaaaggcagaaacagcaaggcagagactgaaagacagagatggagagacagaaagaaatggagagagagaggtttttctgccttccgccaacagagagaagtggacagg

SEQ ID NO: 810904 - DNA, 120 bp, Artificial Sequence
  ENSG00000286309_4 (sequence is synthesized)
ctgcagctttagaagggaggcccaagcagggatgggtgtgtgacctacttcccaacactgaactgcagaagaaaatctgctaggaagcttctggaagagcttatccccaagaataaagag

SEQ ID NO: 810905 - DNA, 120 bp, Artificial Sequence
  ENSG00000286308_0 (sequence is synthesized)
aaacagaaaatcagaaacttaaacgtgttgggccttggagaccatggttctggaaggaaaggtacaaggagctgacatgaacctgatttttaacctgaagcagacagagttgggaccagc

SEQ ID NO: 810906 - DNA, 120 bp, Artificial Sequence
  ENSG00000286308_1 (sequence is synthesized)
tggcctgcagtcctgtgagcaagaaatcgatgtgcatactcatgagtaaaccataaacatttgctgttataacccaggaagctttgggagttgatttttatgtggtgttatggcaacaat

SEQ ID NO: 810907 - DNA, 120 bp, Artificial Sequence
  ENSG00000286308_2 (sequence is synthesized)
tgttgatgaatgtgggtatacagtattggaagttctcatgtgtctttgatggccagcctctcagtgcttacagagctcctcagcctcaccagatatttcccacttgaataatgaagttgt

SEQ ID NO: 810908 - DNA, 120 bp, Artificial Sequence
  ENSG00000286308_3 (sequence is synthesized)
atggttgggaatagacattttggctatttgggtcaataggtttaggacctttggaggattcaagactggtagaaaaccacagcatggtctaagatgcaggtgttcatgcctgcagaagcc

SEQ ID NO: 810909 - DNA, 120 bp, Artificial Sequence
  ENSG00000286308_4 (sequence is synthesized)
cttggacctatgtaactggaaggaactggtggacaagctcttactgcttctccaggttctcacaagaaagcaggcatggattccttttgcacagctcctccaggctttctgggccctgtc

SEQ ID NO: 810910 - DNA, 120 bp, Artificial Sequence
  ENSG00000286308_5 (sequence is synthesized)
attccttcttctatcttctgggttgagcaacatgcaatctccccttgtgcagaagcccaaatagctactgaaaatgtgtcctctctgactttccccatttcttgaactctgagagacttt

SEQ ID NO: 810911 - DNA, 120 bp, Artificial Sequence
  ENSG00000286308_6 (sequence is synthesized)
ttctagtatcagttctgaggagcattgctgttttccttcctatcatctggaagacctagactttaaaactcaaaacctgagaaaaacttccttttttttctctcttttgtctggatcatc

SEQ ID NO: 810912 - DNA, 120 bp, Artificial Sequence
  ENSG00000286308_7 (sequence is synthesized)
actaccttgaaatactaaattagcaaagtcctaactagaaactgaattggctaaagagtcaaggagcaacaggtaattccaagaaaaacaacagcaaacttacatcagttaacatttcaa

SEQ ID NO: 810913 - DNA, 120 bp, Artificial Sequence
  ENSG00000229025_0 (sequence is synthesized)
agcaagtcacatcttacatggatggcagttggcaataaaagagcttgtgcagggcaactccacttttaaaacaagcagatctcataagacccattcactatcatgagaacagcatgagaa

SEQ ID NO: 810914 - DNA, 75 bp, Artificial Sequence
  ENSG00000229025_1 (sequence is synthesized)
gagctagagtgaaaaacagagttgatcccatgcttcatttcacagctgcctagctacagtgagtgatatatgttt

SEQ ID NO: 810915 - DNA, 120 bp, Artificial Sequence
  ENSG00000229025_2 (sequence is synthesized)
catttcacagctgcctagctacagtgagtgatatatgtttctaacacaatggatggtggcttaggaagaggatccaataaaatctatgttggagccaagaataaaatccaaggaaaatgc

SEQ ID NO: 810916 - DNA, 120 bp, Artificial Sequence
  ENSG00000286305_0 (sequence is synthesized)
ctctacaaggagccaccatgtgcaagatcagagccaaatacctcttcatgccaattttctctgaaccagaccatctgatcgacgatgccttccagggaagacagaagggtggggtggagc

SEQ ID NO: 810917 - DNA, 120 bp, Artificial Sequence
  ENSG00000286305_1 (sequence is synthesized)
tctcgctgcatgtgcatgattcggctgcagcgccacatgggtgctgttgctcttatgggccctggatctgatgcagaatgggactggttacccactgaacttggctgctgctgtccagaa

SEQ ID NO: 810918 - DNA, 120 bp, Artificial Sequence
  ENSG00000286305_2 (sequence is synthesized)
tctgagagcaacacacacaacgccagtgtcagcgcaaaaccgacagacgccagggctcggagcgctgcaggacccatgggccaaaggagcgctggttcctgccggcgtgtgaatccctac

SEQ ID NO: 810919 - DNA, 120 bp, Artificial Sequence
  ENSG00000286305_3 (sequence is synthesized)
aagaccgcttccccaaggactgcgtgggagaaggccctggttctaggcgcagatcaaatcactcggataaatgaacgcttattacatcctggcaaaagagagactgtactcagatcagac

SEQ ID NO: 810920 - DNA, 120 bp, Artificial Sequence
  ENSG00000286305_4 (sequence is synthesized)
tttgcttcctgccctacggtgctgcccactgaggagagattggccacggctatgagtgagctgcagggcaggggtggctgcggtggtctgtctggatgtggggcaccccctggaatgagc

SEQ ID NO: 810921 - DNA, 120 bp, Artificial Sequence
  ENSG00000286305_5 (sequence is synthesized)
ccttcccggcctggcctaccggccccacccgagacgtaccgctcttgtagcgttcccgctgttctattttcagggtcaggtacagggtccggatgggaaagtagaccgcttggggataca

SEQ ID NO: 810922 - DNA, 120 bp, Artificial Sequence
  ENSG00000286305_6 (sequence is synthesized)
cgcgtccaacctgctcagagacaagatgttataaacagtgctgctctctgctgagctctggataaagataatttgtactgaaaataaccaatgtcaagtcagaaacaggtgtctgatctg

SEQ ID NO: 810923 - DNA, 120 bp, Artificial Sequence
  ENSG00000286305_7 (sequence is synthesized)
cctttggaccaaggaagcaaatactgcagcactgatctgacgcacaaggccaggttcaacagcaggcaaaatatttaattcactttaaaagagccaagacacatcaacacatgcatttca

SEQ ID NO: 810924 - DNA, 120 bp, Artificial Sequence
  ENSG00000286305_8 (sequence is synthesized)
tcaactccacccaggaactgtgagtgacagggaaaccacgctttccttccaggcagtaaatctgaggaaggcaaaatacatgtgtccccagatctcactgaagcaaataaaaaaacaaac

SEQ ID NO: 810925 - DNA, 120 bp, Artificial Sequence
  ENSG00000286305_9 (sequence is synthesized)
aaataccagctaatctgtcaggcacaattcactgtggattgtgaactaattccattatcaaataactttattctgcctaactgcagctgggaggagatggagggatgtccgtttcagtta

SEQ ID NO: 810926 - DNA, 120 bp, Artificial Sequence
  ENSG00000286305_10 (sequence is synthesized)
agaaactcccatttgattgaactggagttctgtggctgacaggacagtaccatgtcacttgaatctttcagaatgtgcccatgaaaggaagaaaggaataacatctaagccgtcacaggc

SEQ ID NO: 810927 - DNA, 120 bp, Artificial Sequence
  ENSG00000286305_11 (sequence is synthesized)
agaggcggctgctcttgaacctgagatgctccagaagtgatgagaccaagtaggtcggacctgcatcctgaggataagtgctacacagaatgctgggactcaaaaacacagctgcctcct

SEQ ID NO: 810928 - DNA, 120 bp, Artificial Sequence
  ENSG00000286305_12 (sequence is synthesized)
caaggaaaaccagggcatcgctcagggcccacatagcacaggtgctgcgtgcaggaaggagccagaggaatgggtgggcagaacgcgcgggcccagctccttcctgaacaccttcacgga

SEQ ID NO: 810929 - DNA, 120 bp, Artificial Sequence
  ENSG00000286305_13 (sequence is synthesized)
ctcctgcggtgcttcgtgattttacaaaagcaaccacaaaggcgctgtgtcccaaacctcactgtagccacgcttccgccgtttctggtccttcctctatgcctgggtcttttcacggga

SEQ ID NO: 810930 - DNA, 120 bp, Artificial Sequence
  ENSG00000286305_14 (sequence is synthesized)
gagggacatcctggaatcattctcaagagatggttatgagagcctttccatagggccctgggctgtccgcttccccggcctggccccactgcccttgagaaccatgggttccttatgatg

SEQ ID NO: 810931 - DNA, 120 bp, Artificial Sequence
  ENSG00000286305_15 (sequence is synthesized)
cagctcaactgtcgaaagggcgacagccacaattgggcatgttttagtttaagggcagctccgaagagctcccagcatatgacaaaaaatcagaggaaaactaccaatcagattcagggc

SEQ ID NO: 810932 - DNA, 120 bp, Artificial Sequence
  ENSG00000286305_16 (sequence is synthesized)
tcactgtcattctcagggtacccactggcaattgtatgttttactacaagtttattttacttacattatatatgggaaaatgtttaagaaattagaattttaacactgaactgctttatt

SEQ ID NO: 810933 - DNA, 120 bp, Artificial Sequence
  ENSG00000286305_17 (sequence is synthesized)
actgaactgctttattagctatttcatttcaactctgatatattctttaataacttttaattatgctttatattaaataatatctacatgattatatcttcccatctctttaacttgttt

SEQ ID NO: 810934 - DNA, 120 bp, Artificial Sequence
  ENSG00000286305_18 (sequence is synthesized)
tcaaatttactttctgggagaaaaaagaacgcaaaatgaagacacaatgttttgtgcacgtgaacaaggccaccctgctcttcccacctggctaatgaggttcaagagcagctttccctc

SEQ ID NO: 810935 - DNA, 120 bp, Artificial Sequence
  ENSG00000286305_19 (sequence is synthesized)
cgagccaaccaggcaggtgagcagctgtgggatccaggccagccactggatgggtggcacaccaatgcagtacttgtcgacggcatctgccaaagtgtttttgtcatcatcaaaactcaa

SEQ ID NO: 810936 - DNA, 120 bp, Artificial Sequence
  ENSG00000286305_20 (sequence is synthesized)
aagccacagcacctgagacagaaggagaaattctagagtagaatgacaattctgaagccctcaagcaagagactttttccccaacattacaacactgtatagagcggctttactggccat

SEQ ID NO: 810937 - DNA, 120 bp, Artificial Sequence
  ENSG00000286305_21 (sequence is synthesized)
gtaaaaaaagtatctataagcaggccaacattattgctaaacttaatgtaaatcttacagtatataaaacctaaaatttaaaaatagattttctctttagtttttttgtgttttgttttt

SEQ ID NO: 810938 - DNA, 120 bp, Artificial Sequence
  ENSG00000286305_22 (sequence is synthesized)
caaagtgctgggtttacaagcgtgagccaccactcccggccttttgatttagttttaatgacaattactcgctgatctaatccactgactagcactgaccagtgaccgactgcaagacag

SEQ ID NO: 810939 - DNA, 120 bp, Artificial Sequence
  ENSG00000286306_0 (sequence is synthesized)
agcaaggaggacagtgatgtggagtgagtgaggggaaaagcataaggggataggatcaggctctgaaaagcacttggatttttactctgagtgggaagtgaagtcattgggaggtgttca

SEQ ID NO: 810940 - DNA, 120 bp, Artificial Sequence
  ENSG00000286306_1 (sequence is synthesized)
gccgaggagtgatggagctgcagtgctgagaatagaccgttgactggtgaagggagaagagaatgatgttttgcactgggaagtgatacatggcatgcagtcaccaaatgaggtcacatt

SEQ ID NO: 810941 - DNA, 120 bp, Artificial Sequence
  ENSG00000286306_2 (sequence is synthesized)
aagagccaactgttaaattttcagcaattttgttatctggtagacattagtaacttgaaattgatcacagtgtgagtatttgcattgtggaaattgacaaatgccacaaatcatgtttgt

SEQ ID NO: 810942 - DNA, 120 bp, Artificial Sequence
  ENSG00000286306_3 (sequence is synthesized)
ttatttttcttctggagaacccattgttaaacatttaccagcacaccactggtttgaaggccttgtatctgaaaagacatgtgtctagcatggctggcctataaggaagtgtggactgga

SEQ ID NO: 810943 - DNA, 120 bp, Artificial Sequence
  ENSG00000286301_0 (sequence is synthesized)
ggtggccccgggctcagggaaccagcgctgcttctctccgaggctcgcggcctgagaaaccttccgctccgaatgcgggctggcctctccgggaagccttgaaactcaactcctgggtgg

SEQ ID NO: 810944 - DNA, 120 bp, Artificial Sequence
  ENSG00000286301_1 (sequence is synthesized)
gccaggaaggttgtccgagttgggcagcgccggccggggcccccctcagagccgagctgctcgcctccctcgagacccagcgcagcctggaggagagaccgggtcctctcaggtggggca

SEQ ID NO: 810945 - DNA, 120 bp, Artificial Sequence
  ENSG00000286301_2 (sequence is synthesized)
cttggtgactagagaccccatgagcccccaccctccagcctggggcgggatagcccaatcggatgctggggggtccgtttggaaaccactctctgctttgaggacacgcgcggagcttcc

SEQ ID NO: 810946 - DNA, 120 bp, Artificial Sequence
  ENSG00000286301_3 (sequence is synthesized)
ctgggagcaggaggctctgaaggaagaggggcagacgcgaagcctctggccagccgcgcctccggtccaggcctccctgtgtccacatcaggtctcccggcttttcacaacagtgacctt

SEQ ID NO: 810947 - DNA, 120 bp, Artificial Sequence
  ENSG00000286301_4 (sequence is synthesized)
gacagcgcccagagtccgcggcttccatccagtcccctcttcccctgcgaggccgagagggtgcagagctggtggcttcaggaggtggctgtgagcgcgggtctggggccaagagcagag

SEQ ID NO: 810948 - DNA, 120 bp, Artificial Sequence
  ENSG00000286301_5 (sequence is synthesized)
gacaggagaagactgccaagccaccaccggtcctgcgacatattcaccagctgccggcggcgaggtcagaccccagattcgggtttgcccagcaggcgctcggcttccatgctcgctctc

SEQ ID NO: 810949 - DNA, 120 bp, Artificial Sequence
  ENSG00000286301_6 (sequence is synthesized)
cacctccctgcctctcttaaggaggacctggcccattaggaagcccggggcgttctgtggactgggtggtcaaaaatggtgtgtggaggagggagtcaattgagattagacgtgaaaaac

SEQ ID NO: 810950 - DNA, 120 bp, Artificial Sequence
  ENSG00000286301_7 (sequence is synthesized)
ggggaacctggggaccgcaggttggggcccaggagaggaccgaagcttccatccaagactaagtgaggaacactgcggcaagaggaaggaagattgagtcgcagttgacttgtggatttt

SEQ ID NO: 810951 - DNA, 120 bp, Artificial Sequence
  ENSG00000286301_8 (sequence is synthesized)
atcggttttagtccctgtgtgaccgccagaagtctgcagctttatccttgatgagttctgaaggcccctgaggagagctgagcccaagagactttttaattccacggaggtacttcgcct

SEQ ID NO: 810952 - DNA, 120 bp, Artificial Sequence
  ENSG00000286301_9 (sequence is synthesized)
gaggcaggtctcttctgtgcccagggaaggaaggctgggagtgagggtatctgaaaatattcacatgagaaaaggtcaagtccatttttgctatcctgtactgaacacagatcaattaac

SEQ ID NO: 810953 - DNA, 120 bp, Artificial Sequence
  ENSG00000286301_10 (sequence is synthesized)
tggtcccaggattgatagcaacaggcctataactggtctcctggttcctatccagcccttcccccataaaggcagaatcctgtcttcttggaacagtgaatccccagcagaggacctcag

SEQ ID NO: 810954 - DNA, 120 bp, Artificial Sequence
  ENSG00000286301_11 (sequence is synthesized)
cctgggctgcctggaacctgctaccctgcccaggagctgtcaacacctggagcgcagtgcaggaagaatgcaggggcgcttggtggggaggattccatggagaatatcacactacattta

SEQ ID NO: 810955 - DNA, 120 bp, Artificial Sequence
  ENSG00000286301_12 (sequence is synthesized)
gtctccgtcgtgcctccgcggcatcctctggtctgtgacagttcctgagattttcctaatttttgatgcccttcacaatattgggaagtactgaccagatatattgtaaaatgtccctca

SEQ ID NO: 810956 - DNA, 120 bp, Artificial Sequence
  ENSG00000286301_13 (sequence is synthesized)
caaacaccttatcaaggttatagaatatcaatttcatgtaccactgttgatgttgaagttgatcacctggtatattagcttcctgtagctgccacaacaaatgccctcaaagttggcaac

SEQ ID NO: 810957 - DNA, 120 bp, Artificial Sequence
  ENSG00000286301_14 (sequence is synthesized)
ttacaacaacagaaaattattctttcacagttctggaggcccaaactgcaaaatcaatatgcagggcctcactccctctgaaagctctaagagcaaatccattccttgagtcctccagct

SEQ ID NO: 810958 - DNA, 120 bp, Artificial Sequence
  ENSG00000286301_15 (sequence is synthesized)
ctggcagctgcagggcattggtcagcgttctttggcttgtagccccattgctctagtctctgcctcattcttcacatcaccttctcctcttctgactctctcttctgtgtacctgttaga

SEQ ID NO: 810959 - DNA, 120 bp, Artificial Sequence
  ENSG00000286301_16 (sequence is synthesized)
aagacacttgtcattggatctagagcccacctgggtcatctaggaggatctcctcatttcagtatcctccgcttaattacatctgcaaagaccctttttttccaaacaacttgacattca

SEQ ID NO: 810960 - DNA, 120 bp, Artificial Sequence
  ENSG00000286301_17 (sequence is synthesized)
cagctgctgggcactaagacagaaacatatctttatggggtccaccattcaacccactacatctggctaagctaatatttccagaatggcaatccatcagtgcaccctaggttacaatcc

SEQ ID NO: 810961 - DNA, 120 bp, Artificial Sequence
  ENSG00000286301_18 (sequence is synthesized)
tcattctcattcccaaataaactcaacatatttggacatttctaatgtcatgttttttaggttgaataatctagtgtcagaaatgatcctgaagaaagattatctttggaagagacttat

SEQ ID NO: 810962 - DNA, 120 bp, Artificial Sequence
  ENSG00000286301_19 (sequence is synthesized)
actgagtttgttgcttgatttttcctctgcttctgaatatcttttgagagcaaaatttactttctaaaatggtaaggatgagtcaactccttaaaagctgtttgggctgttgtcaccatt

SEQ ID NO: 810963 - DNA, 120 bp, Artificial Sequence
  ENSG00000286301_20 (sequence is synthesized)
ctatgtgagccttcagtctccccaaagagaaattttttgttgtcaggataaagtggtacatgaataaacaagatttccattaggcagcgtgccagtctcaagaaaattctggagaaaatg

SEQ ID NO: 810964 - DNA, 120 bp, Artificial Sequence
  ENSG00000286301_21 (sequence is synthesized)
gtgacaggatagacaattagatcacaggctgcctgcacatcaagtaaaaacaaaaatcctatgctaggcacacactattaaaaaacaaatcgctccaacccctaccatttcctcacagag

SEQ ID NO: 810965 - DNA, 120 bp, Artificial Sequence
  ENSG00000286301_22 (sequence is synthesized)
attatagaatttttcttttgctgttgagaaattaataagaggcagaacaggatgccaaaactccaaagcatccaatataggccctcttctgggactcctgtcagctatatgttcaaaaat

SEQ ID NO: 810966 - DNA, 120 bp, Artificial Sequence
  ENSG00000286301_23 (sequence is synthesized)
atcccagcaccttgggaggccgaggtggaaagattgcttaagctcatgagtttgaaaccatcctgggcaacatagcaagagttcatctctattttaaaaaattaaggccggtcgtggtgc

SEQ ID NO: 810967 - DNA, 90 bp, Artificial Sequence
  ENSG00000286301_24 (sequence is synthesized)
tgtaatcccagcattttgggaggcccaggcaagcggatcgcctgaatttgggagttggaggccaaataaaaatacaaattcagccagatg

SEQ ID NO: 810968 - DNA, 78 bp, Artificial Sequence
  ENSG00000286301_25 (sequence is synthesized)
gaccaacatggagaaaccccgtgtctaataaaaatacaaattcagccagatgtggttgctacagcttgaactcgggag

SEQ ID NO: 810969 - DNA, 120 bp, Artificial Sequence
  ENSG00000286300_0 (sequence is synthesized)
tttggggacccaagaacatcaagaaggggaacagacatcacgagaaatcaatgggaaaggtgtataaaaatctagcattatgtctatataatactggggcagttaacgatgctatggtaa

SEQ ID NO: 810970 - DNA, 120 bp, Artificial Sequence
  ENSG00000286300_1 (sequence is synthesized)
ggagtattatgtggaacaagaaatttaaaaggtgagtgaagtgaattacacatataaagataatggttgaaagccacacactggggaagaaagtaagaggaaagaggaaaaagcagcatg

SEQ ID NO: 810971 - DNA, 120 bp, Artificial Sequence
  ENSG00000286300_2 (sequence is synthesized)
gttgaaaaagatgttattaagactcaataggaaaagttgtaatttctcacctatatatttccaactacagcacaaacatcctcatacgccttcttggtgacacagcagccagttaaatat

SEQ ID NO: 810972 - DNA, 120 bp, Artificial Sequence
  ENSG00000286300_3 (sequence is synthesized)
ttttgtctaaccatttcttataataatgtgtaggggaacagaacttttcttccctacatagcagccaaatgttctttcaaatgtattaaacagatcataaaactcctttaatcaaaagtt

SEQ ID NO: 810973 - DNA, 120 bp, Artificial Sequence
  ENSG00000286300_4 (sequence is synthesized)
tccaaaaatatctcatcacatttaaagtacaatctaactaagccctagtcatggtccacaagtccccagatgagctacgctcttcctgctttacaccttcatctccatttagaagcccta

SEQ ID NO: 810974 - DNA, 120 bp, Artificial Sequence
  ENSG00000286300_5 (sequence is synthesized)
gctcactaccttcaaccaggctggccttcctgcttttccttaaaaatgccatgctcatcatctggaacaatcttccaggctaactggagaaggggtggctctctccttttcaaatttcag

SEQ ID NO: 810975 - DNA, 120 bp, Artificial Sequence
  ENSG00000286300_6 (sequence is synthesized)
gccaatagtacctgctgagacattcattccctgaccactagtatctaaaatgaccccattctcccatttcatcaccttctctcaagtcagaaattattttgtttatttggttatttttgg

SEQ ID NO: 810976 - DNA, 120 bp, Artificial Sequence
  ENSG00000286300_7 (sequence is synthesized)
tggcactccccaaatagaatgtaagtgctgccatgaaggactgtgtttgtttaatttcctgccaaatcttcagcatccagcacagttactagcacattgcaggtgttcatctgtggaatg

SEQ ID NO: 810977 - DNA, 120 bp, Artificial Sequence
  ENSG00000286300_8 (sequence is synthesized)
taattggatacatttcagaggaaaagaaaaccttattgaagaatgatccatgttttcacaatgctgtcctccattgtatctaaatataatgctgtgccaccataatgccaaattaagcaa

SEQ ID NO: 810978 - DNA, 120 bp, Artificial Sequence
  ENSG00000286300_9 (sequence is synthesized)
cacaacaatattgaatgaatattgaatgaataattcaacacatgtcttggggccttgcaaaggagcataatcaggccatttgaaagatacatgactaagaaaggatgtgcttatttctct

SEQ ID NO: 810979 - DNA, 120 bp, Artificial Sequence
  ENSG00000286300_10 (sequence is synthesized)
ctgtcatgctgggagcaatttacagtatccttaggaagcactgcagtaaggtaaagtaaatgtatatatgagtttccttcagtcgctcatgcattcaactagcatttcataagcatgaag

SEQ ID NO: 810980 - DNA, 120 bp, Artificial Sequence
  ENSG00000286300_11 (sequence is synthesized)
ctgagaactagtgatataaaaataaaatgtcaaaatctccactttcaaagacttaaaatagaatgagagaaacaaatagaaaaataattttattaccatatgatcaatattacaatgaag

SEQ ID NO: 810981 - DNA, 120 bp, Artificial Sequence
  ENSG00000286300_12 (sequence is synthesized)
atatgaaaatactgaaagacagcaggaaagggaatgatcaactgagttggaaatggggagggcatatttgagaaaacttcattgaggaggggacaaatgatcagcaatggtcagagtttt

SEQ ID NO: 810982 - DNA, 120 bp, Artificial Sequence
  ENSG00000286300_13 (sequence is synthesized)
gcatgagtgtgaaaggcaaacaaggaaaagcaaaacaccagggaggacagcccatagaaagccattaagccctgaaatggcattacccactagagaattataataattttatatggcgta

SEQ ID NO: 810983 - DNA, 120 bp, Artificial Sequence
  ENSG00000286300_14 (sequence is synthesized)
agtagttgaacatgtgtgggaagagaccacaggcttaccaaaatgtaacaaggagagcatagacaagagaactatagactatctatttacaaatataagggcaaaaataccatataaaac

SEQ ID NO: 810984 - DNA, 120 bp, Artificial Sequence
  ENSG00000286300_15 (sequence is synthesized)
ataattaaacagaattcaaccgtatattagaagaataatatatcataaccaaatactgggtttttttttttaggaatgcaaggttggtttgatctcaagatatttactgatctaattttt

SEQ ID NO: 810985 - DNA, 120 bp, Artificial Sequence
  ENSG00000286303_0 (sequence is synthesized)
agagctagacctttcttcctattcatctaacagtgattggatatggggagctgtctataggaagcgggggtgatcttgggtgagaatgctctcttctgctgagaacaactgccagaggac

SEQ ID NO: 810986 - DNA, 120 bp, Artificial Sequence
  ENSG00000286303_1 (sequence is synthesized)
ttctaagagatgccatagcagaaaatttatgcctttccctgcagtccttgtcaagtgttaaatcccatggccttatatcctgagaggatggctctaaatcaataaactctcctttatcta

SEQ ID NO: 810987 - DNA, 120 bp, Artificial Sequence
  ENSG00000286302_0 (sequence is synthesized)
aataatgactccaatatggaagatgagaacaaatggaagggcagagttcccatttactgaaataagtaagatcaatttggagagagaatgaaatcaagagttcatttttatatatggtaa

SEQ ID NO: 810988 - DNA, 120 bp, Artificial Sequence
  ENSG00000286302_1 (sequence is synthesized)
ttttgagatgtctattagaaacacagctggagatgttaagacaggtatcagtctccagttcaggaaaggagtccaaggtggagatacaaatttgagagtcagcttatagatgttatccat

SEQ ID NO: 810989 - DNA, 120 bp, Artificial Sequence
  ENSG00000286302_2 (sequence is synthesized)
tagaaagttcgtatggatacaaaaaagaagatatctgaggcctgagaccttgagcacctcagcatttaaaagccctggaggtgaggaggaacttgcaaaggaggctgagaagcagcagtc

SEQ ID NO: 810990 - DNA, 120 bp, Artificial Sequence
  ENSG00000286302_3 (sequence is synthesized)
aatgagcaagtgggacaaacagcagcactcacccctacaggcaccttccaggagtgtttggccagtgcccctaccagcttccctgtgagtttcagcagcacctgcaagaagagcttccca

SEQ ID NO: 810991 - DNA, 120 bp, Artificial Sequence
  ENSG00000286302_4 (sequence is synthesized)
cagaattctgctggtgcctcagccagcatcccagctagagcagcaccagataagttccactggcaccccagcaggcttcccagtgagttcaacggctcctcaagtggcttcccagtacat

SEQ ID NO: 810992 - DNA, 120 bp, Artificial Sequence
  ENSG00000286302_5 (sequence is synthesized)
cagccccagactgtggggccatcgagtgagctactgccataccctacccagtaaggtctgaatctcagccttcgcgatggggttagggtttctttaaaaatttgtgtcttctttgggtac

SEQ ID NO: 810993 - DNA, 120 bp, Artificial Sequence
  ENSG00000286302_6 (sequence is synthesized)
tctgcctcagcactaggaatagcagctgcttcctgtatctgctattactgcatgctttaaaaaaaaaatttttttacaatctctcattttattattataatttttctaaatttctttttt

SEQ ID NO: 810994 - DNA, 120 bp, Artificial Sequence
  ENSG00000286302_7 (sequence is synthesized)
ttattattataatttttctaaatttcttttttgtttttttttttgaaacagaatctcatggtcacccaggctgtagtgcagtggcgcactctttggctcactgcaacctccgcctccccg

SEQ ID NO: 810995 - DNA, 120 bp, Artificial Sequence
  ENSG00000286302_8 (sequence is synthesized)
attacaggcgtgaaccaccacacctgacctatgatagattttaaacaaagtgactgatcattcctactatataaagtttatcttacagcagtgtgtatacatacatatctaaggctgtgt

SEQ ID NO: 810996 - DNA, 120 bp, Artificial Sequence
  ENSG00000286302_9 (sequence is synthesized)
atacatacatatctaaggctgtgtatatgtatatgtatgtgtatgtaatccaaaatgaaacaagctccatataccaaagcatgcagctactgacataaagaaaatgtcaaattcctgcaa

SEQ ID NO: 810997 - DNA, 120 bp, Artificial Sequence
  ENSG00000227519_0 (sequence is synthesized)
tccaggtccagcacacaaactcacagtaatgaattcatgaataactcattgattacagttcaggaaacggcctcagagaggtgaggagacgcccacagtcgcgtggcatggtgcacctgt

SEQ ID NO: 810998 - DNA, 120 bp, Artificial Sequence
  ENSG00000227519_1 (sequence is synthesized)
gccactctggacattagttttctcccctaagtggctctatctctcccggcctgagtttggaagggagacaccattctggtacgacttttcttaggcctgtgctgccatctatggggctcg

SEQ ID NO: 810999 - DNA, 120 bp, Artificial Sequence
  ENSG00000227519_2 (sequence is synthesized)
aaggtgctcgccatgctccagaccggccacctggcagtcaggtgagcttgcaagtgtgaagagcagcgggatgcgggggagggagcaagcccagtaacaaataaagcaaatatcatcggc

SEQ ID NO: 811000 - DNA, 120 bp, Artificial Sequence
  ENSG00000227518_0 (sequence is synthesized)
tttcttttctttttctttcctctcactcagcgtcctgtgattccaaagaaatgagtctctgctgtttttgggcagcagatatcctagaatggactctgacctaagcatcaaaattaatca

SEQ ID NO: 811001 - DNA, 120 bp, Artificial Sequence
  ENSG00000227518_1 (sequence is synthesized)
tcataacgttatcattttatggccccttcttcctatatctggtagcttttaaatgatgaccatgtagataatctttattgtccctctttcagcagacggtattttcttatgctacagtat

SEQ ID NO: 811002 - DNA, 120 bp, Artificial Sequence
  ENSG00000227518_2 (sequence is synthesized)
gactgctaataatacctacacatgttagaaccattctgactcctcaagaatctcatttaactcttattatcagtgaatttatcatcatcccctattttacataaggaaatggggttagaa

SEQ ID NO: 811003 - DNA, 120 bp, Artificial Sequence
  ENSG00000227518_3 (sequence is synthesized)
agaccaaataacattttttcaacatcaaaacactagcttgagatcaagcccagacttggatctgtcgtctgaattccaagctttttgttatttattgatatgttttgttgttttcatgca

SEQ ID NO: 811004 - DNA, 120 bp, Artificial Sequence
  ENSG00000227518_4 (sequence is synthesized)
ataatgcaaatattagcccaaacattttgttagtagtaccaactgtaagtcaccttatcttcatactttgtctttatgtaaacctaaattagatctgtttttgatactgagggaaaaaca

SEQ ID NO: 811005 - DNA, 120 bp, Artificial Sequence
  ENSG00000227518_5 (sequence is synthesized)
agggaatctaacactaaccagcccgtagtgtgtggtcaacactttcgttactttagtatacatcaccccaattgtttgtcttcaccacacactttggagttaggtagtagtatctatttt

SEQ ID NO: 811006 - DNA, 120 bp, Artificial Sequence
  ENSG00000227518_6 (sequence is synthesized)
tacaaataagaaaacccaggcacaaaggggttgattagcaattatcttttgaaaagcctgtagttgctcatctgaagaagtgacggaccacctcttatttagtggacagacagtaactag

SEQ ID NO: 811007 - DNA, 120 bp, Artificial Sequence
  ENSG00000227518_7 (sequence is synthesized)
ttgagaagacaggggattttgttggcggaaaaaaaattttatcaaaagtcgtcttctatcagggagttttatgagaaaccctagctcctcagttccacagtgggtaactgtaattcattc

SEQ ID NO: 811008 - DNA, 120 bp, Artificial Sequence
  ENSG00000227518_8 (sequence is synthesized)
taggtctgcgatatttcctgcctatccattttgttaactcttcaatgcattccacaaatacctaagtattctttaataatggtgggtttttttttttttttgcatctatgaagttttttc

SEQ ID NO: 811009 - DNA, 120 bp, Artificial Sequence
  ENSG00000227518_9 (sequence is synthesized)
aaattctttttaagtgacaaaacttgtacatgtgtatcgctcaatatttctagtcgacagcactgctttcgagaatgtaaaccgtgcactcccaggaaaatgcagacacagcacgcctct

SEQ ID NO: 811010 - DNA, 120 bp, Artificial Sequence
  ENSG00000227518_10 (sequence is synthesized)
ttgggaccgcggtttatactttcgaagtgctcggagcccttcctccagaccgttctcccacaccccgctccagggtctctcccggagttacaagcctcgctgtaggccccgggaacccaa

SEQ ID NO: 811011 - DNA, 120 bp, Artificial Sequence
  ENSG00000227518_11 (sequence is synthesized)
agcggtgtcagagaagtggggtcccctacgagggaccaggagctccgggcgggcagcagctgcggaagagccgcgcgaggcttcccagaacccggcaggggcgggaagacgcaggagtgg

SEQ ID NO: 811012 - DNA, 120 bp, Artificial Sequence
  ENSG00000227518_12 (sequence is synthesized)
cacaagccttggcttccctgctagggccgggcaaggccgggtgcagggcgcggctccagggaggaagctccggggcgagcccaagacgcctccccgagcgcggctccaggaccccgtcga

SEQ ID NO: 811013 - DNA, 120 bp, Artificial Sequence
  ENSG00000227518_13 (sequence is synthesized)
cccggagcgctgtcctgtcgggccgagtcgcgggcctgggcacggaactcacgctcactccgagctcccgacgtgcacacggctcccatccgttgtcttccgagcgtcaggccgccccta

SEQ ID NO: 811014 - DNA, 120 bp, Artificial Sequence
  ENSG00000227518_14 (sequence is synthesized)
cccgtgctttctgctctgcagaccctcttcctagacctccgtcctttgtcccatcgctgccttcccctcaagctcagggccaagctgtccgccaacctcggctcctccgggcagccctcg

SEQ ID NO: 811015 - DNA, 120 bp, Artificial Sequence
  ENSG00000227518_15 (sequence is synthesized)
cccggggtgcgccccggggcaggacccccagcccacgcccagggcccgcccctgccctccagccctacgccttgacccgctttcctgcgtctctcagcctacctgaccttgtctttacct

SEQ ID NO: 811016 - DNA, 120 bp, Artificial Sequence
  ENSG00000227518_16 (sequence is synthesized)
ctgtgggcagctcccttgtgatctgcttagttcccacccccctttaagaattcaatagagaagccagacgcaaaactacagatatcgtatgagtccagttttgtgaagtgcctagaatag

SEQ ID NO: 811017 - DNA, 120 bp, Artificial Sequence
  ENSG00000227518_17 (sequence is synthesized)
tcaaaattcacagagacagaagcagtggtcgccaggaatggggaagcaaggcggagttgggcagctcgtgttcaatgggtagagtttcaggctggggtgatggaagggtgctggaaatga

SEQ ID NO: 811018 - DNA, 120 bp, Artificial Sequence
  ENSG00000227518_18 (sequence is synthesized)
gtggtagtgatggcggcacaacggtgtgaatctacttaatcccactgaactgtatgctgaaaaatggtttagacggtgaattttaggttatgtatgttttaccacaatttttaaaaagct

SEQ ID NO: 811019 - DNA, 120 bp, Artificial Sequence
  ENSG00000227518_19 (sequence is synthesized)
agtgaaaagctggtaaaaagaaagaaaagaggcttttttaaaaagttaaatatataaaaagagcatcatcagtccaaagtccagcagttgtccctcctggaatccgttggcttgcctccg

SEQ ID NO: 811020 - DNA, 120 bp, Artificial Sequence
  ENSG00000227518_20 (sequence is synthesized)
gcatttttggcccttgccttttagggttgccagattaaaagacaggatgcccagctagtttgaattttagataaacaacgaataatttcgtagcataaatatgtcccaagcttagtttgg

SEQ ID NO: 811021 - DNA, 120 bp, Artificial Sequence
  ENSG00000227518_21 (sequence is synthesized)
gacatacttatgctaaaaaacattattggttgtttatctgagattcagaattaagcattttatattttatttgctgcctctggccaccctactctcttcctaacactctctccctctccc

SEQ ID NO: 811022 - DNA, 120 bp, Artificial Sequence
  ENSG00000227518_22 (sequence is synthesized)
agttttgtccgccttccctgcctcctcttctgggggagttagatcgagttgtaacaagaacatgccactgtctcgctggctgcagcgtgtggtccccttaccagagtgaggatgcgaaga

SEQ ID NO: 811023 - DNA, 120 bp, Artificial Sequence
  ENSG00000227518_23 (sequence is synthesized)
gaaggtggctgtctgcaaaccaggaagagagccctcaccaggaacctgtccagctgccaccttgaacttggacttccaagcctccagaactgtgagggataaatgtatgattttaaagtc

SEQ ID NO: 811024 - DNA, 120 bp, Artificial Sequence
  ENSG00000227517_0 (sequence is synthesized)
cattgtaagtctttggatctcacaggcaatcaaggtccctgggcactttaacaaaaaataactaatactattaaaagcgtcactttaagttcacaagaattttcttacacacagatattt

SEQ ID NO: 811025 - DNA, 120 bp, Artificial Sequence
  ENSG00000227517_1 (sequence is synthesized)
agaagcaagcgtccttagagtggggtcgtcatatttgagaaatgtgctacagggatctagcacactgcattgcctcacagctaaattcccactggattgttggtctgaatcaccgattga

SEQ ID NO: 811026 - DNA, 120 bp, Artificial Sequence
  ENSG00000227517_2 (sequence is synthesized)
aaaatcaaatgtcttcagggacccggcaggatcccgaaggacgccgctctaagccagagggagcggtgtgtgttgtggctgaagtggaaaatacaagcccagtttaagggcattcaaaca

SEQ ID NO: 811027 - DNA, 120 bp, Artificial Sequence
  ENSG00000227517_3 (sequence is synthesized)
attcctaagtcaagtctttgctgttaccatcaataactgctaactcagaggatgcaaccttagtaattcatttccttaatggccagtttcacaaagaggctgcaggaagctgcttccagc

SEQ ID NO: 811028 - DNA, 120 bp, Artificial Sequence
  ENSG00000227517_4 (sequence is synthesized)
agtctgagtcctgaggaggagacgataacagtgggagaagcacctggtaacagcggcacttcatccaggaagaaaacaggatctaaaatataaacaacatccttacaacacaaaatatga

SEQ ID NO: 811029 - DNA, 120 bp, Artificial Sequence
  ENSG00000227517_5 (sequence is synthesized)
aataacttcaataaaagtgctgtatcccctggcagatgatgagtatcttcaagatggtgcccaaaggagagagagaataaacttgaacattctgactttgaagtgcttgaacatgaaaga

SEQ ID NO: 811030 - DNA, 120 bp, Artificial Sequence
  ENSG00000227517_6 (sequence is synthesized)
agaacagacatggcatttatactgaggaccatggacagagaacatggtgggtcctcacatgggccccaaatcaagtctcaagaacgaagcctgaaatgttggaatttcggtgacagctgt

SEQ ID NO: 811031 - DNA, 120 bp, Artificial Sequence
  ENSG00000227517_7 (sequence is synthesized)
ttctcactgggcaactttatgatccagggtaacagcagagagggacttacttaaaaataaggatccttctgtgcctagcagagaaggccaactagtatccagagaaaacactgggaaaaa

SEQ ID NO: 811032 - DNA, 120 bp, Artificial Sequence
  ENSG00000227517_8 (sequence is synthesized)
ctttgaagaacatgaccaggctagcccaggagaaagatggagcacatatggagcagagctgccccagccaacctgctcttgagaccccagcttagagcatccaactcccagctaacaccc

SEQ ID NO: 811033 - DNA, 120 bp, Artificial Sequence
  ENSG00000227517_9 (sequence is synthesized)
agaagcatgagtgactccatttaaggtcaataaaaccatctagccgagtccagtgagataagccagcccttggttgatcacagatgcatgagctaaataaatgcttattgttgtatgcca

SEQ ID NO: 811034 - DNA, 120 bp, Artificial Sequence
  ENSG00000227517_10 (sequence is synthesized)
aagggtagggaaaatacagctttactgctttctggtgggttggcaagattctggcctggaagaattgctgtggacattttctgaaaatacagtctgctctctggccacacaattcaaacc

SEQ ID NO: 811035 - DNA, 120 bp, Artificial Sequence
  ENSG00000227517_11 (sequence is synthesized)
ttgtgtagatcaggaatctgggaatggcttgactggatcctccagcccagggattcatacaaggctgcaatcaaggtatcagccaaggctgcggtcatctcaaggcgtaactggggcaag

SEQ ID NO: 811036 - DNA, 120 bp, Artificial Sequence
  ENSG00000227517_12 (sequence is synthesized)
atctgctttcaagcttactcacaatgctgtttgcagaattcagttcctgctgggctattggactaagagctacagtttcttagtacttagcctctccagagggcagctcacaatagagta

SEQ ID NO: 811037 - DNA, 120 bp, Artificial Sequence
  ENSG00000227517_13 (sequence is synthesized)
gctgactttatcaaagtgagaaagtgagaaagagcaagagagtgccagcaggatagaagtcacagccttttataacctactttcagaagtaatagcccatcacttttgttacttagaagg

SEQ ID NO: 811038 - DNA, 120 bp, Artificial Sequence
  ENSG00000227517_14 (sequence is synthesized)
aagtcattaggtctaggccacccatggtgaggggttacacaagaacatacctaccagaaggcaaggatcactgggggctattttagaagtagtctactccaaagtggttcaccagaaacg

SEQ ID NO: 811039 - DNA, 120 bp, Artificial Sequence
  ENSG00000227517_15 (sequence is synthesized)
agttgctctttctcaacaaagaattagaggtaaagttgttgagagagagtttaacatgacataaaagaagaattggttatgaatcatggcattcggatctataaggaagtagaatgattt

SEQ ID NO: 811040 - DNA, 120 bp, Artificial Sequence
  ENSG00000227517_16 (sequence is synthesized)
atcatcctcagattgacctttttgattcactttcttcaatgggctttctggaaagaagttacctggcaccttacctgactctctctcaattgaagtgttggttaaggtagaatggcctca

SEQ ID NO: 811041 - DNA, 120 bp, Artificial Sequence
  ENSG00000227517_17 (sequence is synthesized)
ccaatctttcagtgtctcatccttatttgaacattcgatcgtacagtagatttgcagtcttatagtgtgtcaatgacagcaccactttttccaaatcttatccagtgattcagtaataaa

SEQ ID NO: 811042 - DNA, 120 bp, Artificial Sequence
  ENSG00000227517_18 (sequence is synthesized)
ggcatttcttgtgattctggagcctcagctaagctttgaaacacacgttctgtggcagggcaagttttttcatggtcttcagtggccaaagaacaacagtgattgtgataagttcctaga

SEQ ID NO: 811043 - DNA, 120 bp, Artificial Sequence
  ENSG00000227517_19 (sequence is synthesized)
tggaatgataatctgttgcaggtattcaataaagaagaatccaaacatattagtttttaagtttttgtttaaatttaattaatgaattaataaattaattagttttccagatggcatctc

SEQ ID NO: 811044 - DNA, 90 bp, Artificial Sequence
  ENSG00000227517_20 (sequence is synthesized)
aatgaattaataaattaattagttttccagatggcatctcactctattgcccagtctggagtgcagtggtgcagttatagccatttctcc

SEQ ID NO: 811045 - DNA, 120 bp, Artificial Sequence
  ENSG00000227517_21 (sequence is synthesized)
aagcagttctccctcctcagactcccaaagtactaggatcacagatgtgagccaccacacccagcacctagcctcttagtggggagagggaacacctttttttttcaatcctctggaaac

SEQ ID NO: 811046 - DNA, 120 bp, Artificial Sequence
  ENSG00000227517_22 (sequence is synthesized)
cagaaacttgttactgtggattttaaaggaatttcaaaggtcttctacatttttgtgggagacaaactcaaccaaaacgctttctcctcatgagggtactaagacaactcaagggtaaaa

SEQ ID NO: 811047 - DNA, 120 bp, Artificial Sequence
  ENSG00000227517_23 (sequence is synthesized)
cgacagagcgagactccatctcagaaagaaacaaacaaacaaacaaaaataatagtttttttttaatagtgctggacaagtgttacctacatgtaaaagaatatagttagatccctatct

SEQ ID NO: 811048 - DNA, 120 bp, Artificial Sequence
  ENSG00000227517_24 (sequence is synthesized)
tgttacctacatgtaaaagaatatagttagatccctatcttatatacaaaaattaaccaaaaatagataaaaatctaaatgtaagagctaaaactatacaactcttagtagaaaacagaa

SEQ ID NO: 811049 - DNA, 120 bp, Artificial Sequence
  ENSG00000227517_25 (sequence is synthesized)
gagtacatctttgtgatagtggattaggctgtagtttattagacataaccaaaaacaacaaaaggaagaatagataaatttgacttcatcaaaattaaaaacttctgtgttacaaaggat

SEQ ID NO: 811050 - DNA, 120 bp, Artificial Sequence
  ENSG00000227517_26 (sequence is synthesized)
accatcagtgaaaaggcaaccccacagatggggagaagagatttgcaagtcatgtatatgataagggatttgtatccaaagcatataaagaacgcttacaactcaggaaaaaaataaaaa

SEQ ID NO: 811051 - DNA, 120 bp, Artificial Sequence
  ENSG00000227517_27 (sequence is synthesized)
tgaaaaggcacagaacccaatttgaattcaggcaaaggattagaacagacatttctctaaagatgacatacaaatggtcaatacacacatacaaggattctcaacatctgttagtcatca

SEQ ID NO: 811052 - DNA, 120 bp, Artificial Sequence
  ENSG00000227517_28 (sequence is synthesized)
gagaaatgaaaatgagaaccacaatgagttaacacttcacacctgctaggatgggaataataaaaatgacagataataagaagcgtcagtgagttaatggagaaattggaggctcagact

SEQ ID NO: 811053 - DNA, 120 bp, Artificial Sequence
  ENSG00000227517_29 (sequence is synthesized)
ttgatggtgggaatgtaaaatggcacagctgctttgacaaacagtttgggattttgtcaaaaagttaaacatgggctgggcgccatggctcacacctgtgatcccagcactttaggaggg

SEQ ID NO: 811054 - DNA, 74 bp, Artificial Sequence
  ENSG00000227517_30 (sequence is synthesized)
cgccatggctcacacctgtgatcccagcactttaggagggaaaggcaggcagatcacttgaggttagcagcctg

SEQ ID NO: 811055 - DNA, 120 bp, Artificial Sequence
  ENSG00000227516_0 (sequence is synthesized)
cagccaacttctgttttttatattttagccttctaaaatagcctcactatctatggtcacagcagatagaatagtccataataatctaatctactccagagcaattcaagagggaaatac

SEQ ID NO: 811056 - DNA, 120 bp, Artificial Sequence
  ENSG00000227516_1 (sequence is synthesized)
aggcatgagaattgcttaaacctgggaggtggaagttgcagtgaaccaagactgcaccactgcacaccaatctgggcaacagaggaagattatctcaaaaaaaaaaaaaatagaaaagaa

SEQ ID NO: 811057 - DNA, 120 bp, Artificial Sequence
  ENSG00000227510_0 (sequence is synthesized)
gaaaatcttggcatagatatggaataaatattaatgtctccaaaatcttctcaaaatttatactatggcacaaacaagttaaatgtaggtctcttcctcaccatctatcttaggtctctt

SEQ ID NO: 811058 - DNA, 120 bp, Artificial Sequence
  ENSG00000227510_1 (sequence is synthesized)
tctcatattttcctccaatctctactgctgggaaggcgagggacatggaggggagagatcacctcaagtaggcacaggcttgaaagtccaagatcaaggtaccagcatctggtgaggact

SEQ ID NO: 811059 - DNA, 120 bp, Artificial Sequence
  ENSG00000227510_2 (sequence is synthesized)
cttccatcaagccctttgattacagcatgaatgcataagtgagagtggagctttcatgaactgaatgcctccccaaaggccccaccttccaacactgttgcagtgggattaggtttctaa

SEQ ID NO: 811060 - DNA, 120 bp, Artificial Sequence
  ENSG00000227510_3 (sequence is synthesized)
catatgaattttgggagacacattcagaccatagcagcaaagctgtagactaattgaagaattagtctgtaggcaaataagtacaataagatgttctgagagaaggttgtgtatgacact

SEQ ID NO: 811061 - DNA, 120 bp, Artificial Sequence
  ENSG00000227510_4 (sequence is synthesized)
gcaatgtaggaaatgtgttgaatttgtgcttgttgagtaaaaaagtaaattgtatttgctaaatattttgtcttcattatcaactgatctgtataaacaataaaagtattctattatctt

SEQ ID NO: 811062 - DNA, 120 bp, Artificial Sequence
  ENSG00000227510_5 (sequence is synthesized)
cacctcaagtaggcacaggattcaaagatgagtgaagcatagcatctttcctgcataaacatttaaaaaaggagaaagtgagagagaggagtcttccatccacttctaaatagaacaaaa

SEQ ID NO: 811063 - DNA, 120 bp, Artificial Sequence
  ENSG00000227510_6 (sequence is synthesized)
tgatatctcagtgcccttaactttgaaactgaaacagagcttctagatcatctcaagattttgcagctttggagaaagcaagctgtaggactcatggcatagtgagcagcatttttgcca

SEQ ID NO: 811064 - DNA, 120 bp, Artificial Sequence
  ENSG00000227510_7 (sequence is synthesized)
gatgggaggaggcaagtctaggagggcctgcctgtgagctcagaattatgatgaatcaatgtgataaagtgacctcatggctgaattaggttatcacccttctcggaataggtgacataa

SEQ ID NO: 811065 - DNA, 120 bp, Artificial Sequence
  ENSG00000227510_8 (sequence is synthesized)
atcaagatctgaaagaagagatggaaccagccacacaaagaccttgaatcaagtcattccaggcagagggagcagctagtgcaaggcactaaaacaggaataaactggctgtgtccaaga

SEQ ID NO: 811066 - DNA, 120 bp, Artificial Sequence
  ENSG00000227510_9 (sequence is synthesized)
aacagcaagaaggtggagcacagtgggtgagagagaagcatgaacaagatgagacagactggtaggcaggcagcagggttgtatagggcttaccaaccagattaagaaattgggatttta

SEQ ID NO: 811067 - DNA, 120 bp, Artificial Sequence
  ENSG00000227510_10 (sequence is synthesized)
ttcaggtgcaatgggaatgccttagagtgttttaaatagaataatgatattaatttgaattattttattttaaaaataactctgcttctttggtgggtggattataggaaagcaagcaag

SEQ ID NO: 811068 - DNA, 120 bp, Artificial Sequence
  ENSG00000227510_11 (sequence is synthesized)
gaaacacagaaccagttgggaggtcttttaatggttcaccctataggtaataacagcctgaacaatgatgtttatgggaaacgtggagtatatatataggctgtggatatgcgtttgagg

SEQ ID NO: 811069 - DNA, 120 bp, Artificial Sequence
  ENSG00000227510_12 (sequence is synthesized)
gggagaaggtgggccagagtcattgatgggatttgaatagtgaaggggttaataagccaatgaaatgtggattgctcaacttaatataagcacataagtactgtgtgaggaaaaacaaac

SEQ ID NO: 811070 - DNA, 120 bp, Artificial Sequence
  ENSG00000227510_13 (sequence is synthesized)
aatgaacacagaagacttctgtgaccaaatgtgggtcctccgctgcaccccacacaccaagcaagtgatcaattctgcagtggacaccagcattcggtatcctccacttcaatcctgaca

SEQ ID NO: 811071 - DNA, 120 bp, Artificial Sequence
  ENSG00000227510_14 (sequence is synthesized)
ccatctacctggagatagcatcagataccgcaggttgggggctcagtcccacaagactgccctcgactttggatgccaatcacaagccccaggtttttatatctgtgcttctgactggct

SEQ ID NO: 811072 - DNA, 120 bp, Artificial Sequence
  ENSG00000227510_15 (sequence is synthesized)
gtaaatagaagttcccaaaattcccttctcctgttcgattagtttgctagagtggctcacagaacttgttacaggtagttagacaggcatgagtggggcaggagagggtcctccctcacc

SEQ ID NO: 811073 - DNA, 120 bp, Artificial Sequence
  ENSG00000227510_16 (sequence is synthesized)
atcacattgcctctctaaaagtgataagttgccagccggtgccagggaaaggccacttcctgatgatctacacctgttgcactaaagtgttaattgaatgcagatgccagtggggagcaa

SEQ ID NO: 811074 - DNA, 120 bp, Artificial Sequence
  ENSG00000227510_17 (sequence is synthesized)
gttaattgaatgcagatgccagtggggagcaaatttctgggcatgcacattaagagacaaaatggctgagtatgatcttccaggcacactccaccagaaaagggaagaaaagcctcagat

SEQ ID NO: 811075 - DNA, 120 bp, Artificial Sequence
  ENSG00000227510_18 (sequence is synthesized)
gggcatgtgtacaacttcctaaacacactgcatgtggtcattttccaagcataaggagggtactgtgcatgcaggcagcccaccctaaggtagaatcatgggaaaggggccagcctataa

SEQ ID NO: 811076 - DNA, 120 bp, Artificial Sequence
  ENSG00000227510_19 (sequence is synthesized)
agtcctaggatccaggttaaagaccacacttgttcttcaagtcacatgcttgggtctcttccaagcacactttcttttctgttctaaagctttttaaaataagcttccactgctgctctg

SEQ ID NO: 811077 - DNA, 120 bp, Artificial Sequence
  ENSG00000227512_0 (sequence is synthesized)
ctcaagttgaagggcatcggccacagcagaacagttccccacggctgatgggcactcacaggcaggcaggagggagcggttccgcacgacttcccggccccctcagtgcccattttacat

SEQ ID NO: 811078 - DNA, 120 bp, Artificial Sequence
  ENSG00000227512_1 (sequence is synthesized)
ctgaggctggcagaccagaagggccacgggattttgagccccagcctgaggccgggaagagggagctggggcaaacagagagcccaaaggcgggtccgattttgaagagtcaatttcctt

SEQ ID NO: 811079 - DNA, 120 bp, Artificial Sequence
  ENSG00000227512_2 (sequence is synthesized)
tgaagaggcatcacccacccggaggtggcatcacctgcccaggaagtatcacctgtgcctagaggaggcatcacccgcctagaggaggtatcaccacccagaggaggcatcacccaccta

SEQ ID NO: 811080 - DNA, 120 bp, Artificial Sequence
  ENSG00000227512_3 (sequence is synthesized)
ggcatcacccacccaggaggtggcatcacccgtgcccagaggaggcatcacgcacccagaggaggcatcacccgcccaggaggtggcatcacctgtgcccagaggaggcattgccgccag

SEQ ID NO: 811081 - DNA, 120 bp, Artificial Sequence
  ENSG00000227512_4 (sequence is synthesized)
cccaggaggcatcacgcacccagaggaggcatcacccgcccaggaggtggcatcacctgtgccagaggaggcatcactaccagcccaagaggcatcaccacccacctaggaggcatcacc

SEQ ID NO: 811082 - DNA, 120 bp, Artificial Sequence
  ENSG00000227512_5 (sequence is synthesized)
cccgagaggaggcatcacctgtgcccaggaggcatcacccgcccagaggaggcgccccaagttggcagggtggtgggggctgggcctctcagtaaatggtccagagcttcccctggcaga

SEQ ID NO: 811083 - DNA, 120 bp, Artificial Sequence
  ENSG00000227512_6 (sequence is synthesized)
tcaactgtttcttggggacttaaagaagaattggggtactgggactcccacttagtgaccccggagcctgaggtggcccacggaggagtgcccaagccctcagcagccagaccagctcca

SEQ ID NO: 811084 - DNA, 120 bp, Artificial Sequence
  ENSG00000227365_0 (sequence is synthesized)
tgaaagcgcgggcggagggtgcgcttgtgttcttgagacccaggttccattacaaaccacccagcatcgccaccggcgccccccgtttcaataaggaagccactttgtcaaaacattcta

SEQ ID NO: 811085 - DNA, 120 bp, Artificial Sequence
  ENSG00000227365_1 (sequence is synthesized)
atttggtccagagagaccctgattcacagccttgtcctgttccaagcaatgttgggatgagctgaagaagatgcctccgttctcagacccaaaaggcacaaagacggcacctttgggaga

SEQ ID NO: 811086 - DNA, 120 bp, Artificial Sequence
  ENSG00000227365_2 (sequence is synthesized)
gccaggcactaccagtgtcttgagtgctgaatattgtgcattcgaaagcaatgagagctctagggtggacctttcactggcactcaaagagaaccaaggaagcagagaaggatgataaat

SEQ ID NO: 811087 - DNA, 120 bp, Artificial Sequence
  ENSG00000244661_0 (sequence is synthesized)
atgggctcttggaccctctgtgtgtccctttatatcctggtagcgacacacacagatgctggtgttatccagtcacccaggcacaaagtgacagagatgggacaatcagtaactctgaga

SEQ ID NO: 811088 - DNA, 120 bp, Artificial Sequence
  ENSG00000244661_1 (sequence is synthesized)
ctcaggagtgtccaaggattgattctcagcacagatgcctgatgtatcattctccactctgaggatccagcccatggaacccagggacttgggcctatatttctgtgccagcagctttgc

SEQ ID NO: 811089 - DNA, 120 bp, Artificial Sequence
  ENSG00000254246_0 (sequence is synthesized)
gagcagaaagcttatttcagggaatcaaaggggcagcaagaaaaaaatgcgaaagacaattaagaaagagaaatacaccctcagcttccaaacctgcctggatacctacgttgagagtgt

SEQ ID NO: 811090 - DNA, 120 bp, Artificial Sequence
  ENSG00000254246_1 (sequence is synthesized)
actaagagggctacgtcagaccaccaagatcctgggcatacctggaagaaacttcaggtttttcagggtcttcagaataacgtgtttacaaagataaataaatttcccctttgctattga

SEQ ID NO: 811091 - DNA, 120 bp, Artificial Sequence
  ENSG00000254242_0 (sequence is synthesized)
ggggagacaccagagcaccaacttctctcacttaaaccttatgacaaccttaagaagtaggcagcatgatccccttcttggaaatgcagaaagagagaatgggggagattgagaggcttg

SEQ ID NO: 811092 - DNA, 120 bp, Artificial Sequence
  ENSG00000254242_1 (sequence is synthesized)
cagaatgtgacatcattagggagaacagtggttgaggtccagcagctcctgcagatgggtggtggtggaaggaggagagaatgggccacaggcaggccaagggcaagcttagcagcactc

SEQ ID NO: 811093 - DNA, 120 bp, Artificial Sequence
  ENSG00000254242_2 (sequence is synthesized)
aacatcctccatgaactcaacagaagtcaagaatgcaggcagctcatgatgaagacctgcagcggcccaggtttaccaagctcattcacaattgcagttggagaattcgtctttggtcat

SEQ ID NO: 811094 - DNA, 120 bp, Artificial Sequence
  ENSG00000254242_3 (sequence is synthesized)
ctttggtcattttctactttggaaatacgagacaggatctccctctgttgtgcaggctggtctcaaactcctgccttcaagcgatcttcctgcctggcctcccaaagtgttggaattaca

SEQ ID NO: 811095 - DNA, 120 bp, Artificial Sequence
  ENSG00000254242_4 (sequence is synthesized)
tgatacacccttagtacttccaactaagtaccagtcatcattttccttcatttcatgggtatggggacaaagaaaatggcatattcagttcccaaactgtcatttctgccagtcctacct

SEQ ID NO: 811096 - DNA, 120 bp, Artificial Sequence
  ENSG00000254242_5 (sequence is synthesized)
aaaaaattggtccatagccaaaaagatggtcttacttcattttgactacgtttactatgcttaagacaaggtgttagttatttcagtacccaaaataaagcttttcagaatttgttcata

SEQ ID NO: 811097 - DNA, 120 bp, Artificial Sequence
  ENSG00000254242_6 (sequence is synthesized)
aatggaaggatccctgagtgactgtgtggagcagagccctcctaccagcctggactagccaacataagattaagatattttttacataaagcatactgcatgggtgtcctactggtgatg

SEQ ID NO: 811098 - DNA, 120 bp, Artificial Sequence
  ENSG00000254242_7 (sequence is synthesized)
gaaaaagaaatgaaagcatctctcaaaagggtcaaaccaaggccaggttttatttggtgtttgagaaaacctggattatttgggtcaggagaaaattttggacttcctgctaatcacagg

SEQ ID NO: 811099 - DNA, 120 bp, Artificial Sequence
  ENSG00000254242_8 (sequence is synthesized)
aaggaaggcaacacctttcataactactagaatgactacacttgcctcactaaattgtagttgttgaaccacaaacttgattcctacttctgtaaaaataaatcagaattaaaatgatta

SEQ ID NO: 811100 - DNA, 120 bp, Artificial Sequence
  ENSG00000254242_9 (sequence is synthesized)
agatatggaattgagcctccatgaggtttcagcaggcatccataacctacagggttatgacagtcatattttctgaatcccaaatcaggacatgggaccatggaaatagagaagaccatc

SEQ ID NO: 811101 - DNA, 120 bp, Artificial Sequence
  ENSG00000254242_10 (sequence is synthesized)
aagcagaacgtttgacttcagttctgtcgtgaagattctgggttttcaatccttctaactacagtactagatgacaaagatgatttattgcacattaagcactcatgagtgctctattaa

SEQ ID NO: 811102 - DNA, 120 bp, Artificial Sequence
  ENSG00000254242_11 (sequence is synthesized)
tgcacattaagcactcatgagtgctctattaacctcattccttggaatgattgttttaaaacaactttccatttttgctattaaaatacctactacttgggagactgaggcaggagaatc

SEQ ID NO: 811103 - DNA, 120 bp, Artificial Sequence
  ENSG00000254242_12 (sequence is synthesized)
gagactctgtctcaaaaaaaaaaaaagtaatgcatattaattgaagaaaatatagacatggaaaggaaagaaaatcatccatccataatttcacaacccagagataacaaccactaacag

SEQ ID NO: 811104 - DNA, 120 bp, Artificial Sequence
  ENSG00000254242_13 (sequence is synthesized)
atccataatttcacaacccagagataacaaccactaacagcttaataaatagcatttcaacttttttgtgtgtatatttatatattttccacaaaataatattaaactatgtacattgct

SEQ ID NO: 811105 - DNA, 120 bp, Artificial Sequence
  ENSG00000254242_14 (sequence is synthesized)
aagagcagcagctgtgagaagagatgtgtgcaggggttacaaatgatttctcattaactccagacgctcttgttcctggtcaccacagccccatctgagaggcagatgtgacagcgctgg

SEQ ID NO: 811106 - DNA, 120 bp, Artificial Sequence
  ENSG00000254242_15 (sequence is synthesized)
cagtgacaatgacagaggaagagatgggagggagaaacggttagcttatttgttttaaaagaagctgctcaaatgttttgagttcttccatgcctcgtgagtcacaaacccacagaatgg

SEQ ID NO: 811107 - DNA, 120 bp, Artificial Sequence
  ENSG00000254242_16 (sequence is synthesized)
gcagggcttggcttgaaattgaggacggcctgcctctgccatttcctgagcgggtgatcttaggcaagtcacttggactctctaatgctcattttctcactaataaaatgatgatgataa

SEQ ID NO: 811108 - DNA, 120 bp, Artificial Sequence
  ENSG00000254242_17 (sequence is synthesized)
tctactttggaaatacggtaaataatgtaacaatgtttttaagaacaagcttcatcccttccaggtcctttttatagcaaacatttgcatctaaaggaaatatacttgtgtgtgtacaca

SEQ ID NO: 811109 - DNA, 120 bp, Artificial Sequence
  ENSG00000254240_0 (sequence is synthesized)
agtgtcagtattcaggcctcaggggtccctgatggcttctctggctccaagtctggaaacacagcctccatgaccatctctgggttccaggctgaggatgaggctgattattactgcaac

SEQ ID NO: 811110 - DNA, 120 bp, Artificial Sequence
  ENSG00000254249_0 (sequence is synthesized)
tgttaaaagcatgcgaagctccccagctgaaccttgtattctctgactattgagcaacttcgattccactggcagtctaagttcaaccaacctcagaggagccttgggccacagagaaga

SEQ ID NO: 811111 - DNA, 120 bp, Artificial Sequence
  ENSG00000254249_1 (sequence is synthesized)
ctgctttatctgaactcagcagcaagagataacataaatggaagtaatttggaagcagaaagcaaaatgcaagtgtaaggaatatttataataaaactcaaaaatgtatcaaaacataaa

SEQ ID NO: 811112 - DNA, 120 bp, Artificial Sequence
  ENSG00000254248_0 (sequence is synthesized)
gaggagatcttgagaaacagtggtaatttcgctgtaattgtatgtgtgccactccccggccctgaagggcatgagcaagaaagactgaaagttgtgaaatgtaccagggaagacactgcg

SEQ ID NO: 811113 - DNA, 120 bp, Artificial Sequence
  ENSG00000254248_1 (sequence is synthesized)
gttctgtggtgacggtgaaaatgaacgtctcaaaagctgggtgatggctcagctggacccagcatgttagcaacccgtgtttgaacagaaggaaatgaaaaataaagtagaaggacaagg

SEQ ID NO: 811114 - DNA, 120 bp, Artificial Sequence
  ENSG00000254248_2 (sequence is synthesized)
acagaaggaaatgaaaaataaagtagaaggacaagggaaggaaattgggatctcttttcatggaggcacagaatgaaatgaggtctcaccatattgcccaggctggagtgcagtggctat

SEQ ID NO: 811115 - DNA, 120 bp, Artificial Sequence
  ENSG00000254248_3 (sequence is synthesized)
gctccctgcagcctcaaactcctgggatcaagcaatcctccccactgagcctccggagtagctgggactacagagttaaagaagacttgaaagaaggggatgtgagtggcaggaaaatcc

SEQ ID NO: 811116 - DNA, 120 bp, Artificial Sequence
  ENSG00000254248_4 (sequence is synthesized)
ccagtgaccggccctgaaccttctgccagcgcagctcacctcctccccaaatgcctcccaataggatctcagccctaaacaagcacagggcgtggggtggtacagatgatgatgtagctg

SEQ ID NO: 811117 - DNA, 120 bp, Artificial Sequence
  ENSG00000254248_5 (sequence is synthesized)
cttctgagatgcccctgggcgctgctggagctgagccctgggactggaatgacttttgcccgctgccctcaaaattcccacaggccacaccgctaccacctcttgggtaaagtaggaggg

SEQ ID NO: 811118 - DNA, 120 bp, Artificial Sequence
  ENSG00000242628_0 (sequence is synthesized)
gaattccctgttaaatccatcaagtgaacccagctcctttttggggcagagacagcatttggaggatgtgagagcttccgtcactatttgtgaattcacacatcaaaagtgatgccttgc

SEQ ID NO: 811119 - DNA, 120 bp, Artificial Sequence
  ENSG00000242628_1 (sequence is synthesized)
agctagccagcagcagcctcctcacctcgacgacgagctgaagaactgtgcagagcgtgtgaagaatctcaccacctcaagacatttttcgaagttactgaaatgattaaatgaatcaga

SEQ ID NO: 811120 - DNA, 120 bp, Artificial Sequence
  ENSG00000242628_2 (sequence is synthesized)
tgcttcagaccactccaaactgcaggtcatgagccattagtgggtcattatatcattttggttttaaaatgctggtcaggcccagcattaaaaaataaataaatagaaattaccatgcat

SEQ ID NO: 811121 - DNA, 120 bp, Artificial Sequence
  ENSG00000242628_3 (sequence is synthesized)
ttgcaggggcagggtggtgagtccacgcaggctgcctaaggtgcagactgtccacgtgagggaaggctcggagctggttccccacccagagcctccctggaggcgcacggcttaaccaca

SEQ ID NO: 811122 - DNA, 120 bp, Artificial Sequence
  ENSG00000242628_4 (sequence is synthesized)
caggcctgacctccgcgaggccttcacactgcacgtgcgcctggatccactccagtcggtccgagttttccttctcccgaactccctcattcacttgagagcacagctcctctgcccgct

SEQ ID NO: 811123 - DNA, 120 bp, Artificial Sequence
  ENSG00000242628_5 (sequence is synthesized)
cgagggccagctttagggaggaatggtctgcatggctctccggggtgttctccagaatctggaaaagagtgggcagtgtcacatgggggagctgcgtctctcacctgcccacctggacct

SEQ ID NO: 811124 - DNA, 120 bp, Artificial Sequence
  ENSG00000242628_6 (sequence is synthesized)
tcgcaggaccgctcctccaaccccatgttatggactgcttccatgccctggaaacgcggcggtgaacaagacgacactttccgcccttgagaaactcgtactcccacaagttcttgggga

SEQ ID NO: 811125 - DNA, 120 bp, Artificial Sequence
  ENSG00000242628_7 (sequence is synthesized)
cacagggacaggtaacgctgctgtgacaaggtgacagtgctaaacggatcaagtgctctgaactgtgtgggtctctggttgctctccgactggctcccggtaataggcgggagcctcccg

SEQ ID NO: 811126 - DNA, 120 bp, Artificial Sequence
  ENSG00000242628_8 (sequence is synthesized)
actccttccgaaatttaagccatgtaagggtgcgccctcctgtataaactggctgcagctgtggtaagtgtgaacttgctgaatagcaatggttcataacaattttggggtcactgatcc

SEQ ID NO: 811127 - DNA, 120 bp, Artificial Sequence
  ENSG00000242628_9 (sequence is synthesized)
ttttgaaaaaaatctgatgaaagcaatgactcccatgccacaggaaaaatacaataaaatcacattgtcagcatgtggaagaaatgcattctgttcattctgaagcgatttcaaacgacg

SEQ ID NO: 811128 - DNA, 120 bp, Artificial Sequence
  ENSG00000242628_10 (sequence is synthesized)
catgctgcaactgtgaacgcgcagaggccagaatacaaacgtgtgtggtccctccagaaattaggagccatcaccagatgccccgtctggactctctcactctagtcagatgagtgcaca

SEQ ID NO: 811129 - DNA, 120 bp, Artificial Sequence
  ENSG00000242628_11 (sequence is synthesized)
gtccttcatttacaattctaaaatgcagaacagcctgagagcctaaagtttttattcagtacccatttggtggcaaaatctgacctaaacagaagagatatatttacttactcttacagt

SEQ ID NO: 811130 - DNA, 120 bp, Artificial Sequence
  ENSG00000242628_12 (sequence is synthesized)
gattgttcttatgttccactgtaggaatattagtgtgtctggttgtaagtgctaccctaaggctcagttgaggagtcatatattatatggtatttgagctacattccgaattctgaaaca

SEQ ID NO: 811131 - DNA, 120 bp, Artificial Sequence
  ENSG00000242628_13 (sequence is synthesized)
catctggccccaagtatttcaatgaaggggctgtgaacctgcattatggttcagtttagtgcaggcgtctatcacatgaggtctatgttgaggtcacacagctaacagaccaaaagtcaa

SEQ ID NO: 811132 - DNA, 120 bp, Artificial Sequence
  ENSG00000242628_14 (sequence is synthesized)
ggaatcatcaatagaagtaacaagcttatcatattcctgctgcttttctttgtaagttactgtaatcaatggttaatcgtgggataatcttttgtaaagtctgccttttccttagaaggc

SEQ ID NO: 811133 - DNA, 120 bp, Artificial Sequence
  ENSG00000242628_15 (sequence is synthesized)
ttatgggctcaagagggccctattgcttatcaaaaagaaagctggaaggaattttagaaggaatgttgaagccgaatacagcgagggacacaaatgaactctatttatgatgtgccaagt

SEQ ID NO: 811134 - DNA, 120 bp, Artificial Sequence
  ENSG00000242628_16 (sequence is synthesized)
ggagcctcctgggacatctaggaaaggtgttcagggtggatggaggcagatctcagaggaaagactggagtctaaggttactctggtctttctctgggttcaagatgggctccacaactg

SEQ ID NO: 811135 - DNA, 120 bp, Artificial Sequence
  ENSG00000242628_17 (sequence is synthesized)
gagacctagaggggcctttccctgcctggacaagtatacttatgactttgagatgctggggagtttcttgaaaggtgggtgacaggttacccaagtgatactggattcctctctgatttg

SEQ ID NO: 811136 - DNA, 120 bp, Artificial Sequence
  ENSG00000242628_18 (sequence is synthesized)
cccacttcaaggattcagcgtgtttctgtgcacacacacacacaggcatctggtccccgggacagtgggatcacttgtgcggtgtcacactgtgtgcagggtgaggtggcatgctcaggg

SEQ ID NO: 811137 - DNA, 120 bp, Artificial Sequence
  ENSG00000242628_19 (sequence is synthesized)
ctccctgaggatctggcctctgtggacctcagcgcatcctgctcctaactcagaccccactgcccggcctgcacactcacacttctgatgagcagtgggtagcgggtgatcctctgcatg

SEQ ID NO: 811138 - DNA, 120 bp, Artificial Sequence
  ENSG00000242628_20 (sequence is synthesized)
ggtttcagcaggaagctggagaggggcattcctttacaccgcgggtcagatgccagcttctgcaaaacaacagtgaggctcgtgaggaaatcacagctccgatcacaggaagcactggtc

SEQ ID NO: 811139 - DNA, 120 bp, Artificial Sequence
  ENSG00000242628_21 (sequence is synthesized)
tttgatcgccttttagatttcacatttcttttatttatttatgtttctccctgtcttactgttttagaattttttttaggtgagtgttctattttttatttttattttaaaatttgtgta

SEQ ID NO: 811140 - DNA, 120 bp, Artificial Sequence
  ENSG00000242628_22 (sequence is synthesized)
atgatacctattaggttcacagtaggaatatctcagctcatgtgccaagcccagcggatgctcctcagctctttcccatgacctgtgctgggactgtcccctgccctctcttctcggagc

SEQ ID NO: 811141 - DNA, 120 bp, Artificial Sequence
  ENSG00000242628_23 (sequence is synthesized)
tgattcacacttgaccctcaagactcaggccctgcttccccttgtccaggctctcccctgggacaccttccctcctttccatgaccctccctggccacctttagcatacaccacatgtgc

SEQ ID NO: 811142 - DNA, 120 bp, Artificial Sequence
  ENSG00000242628_24 (sequence is synthesized)
accaggtgatacagggagaggcatcgtgttgcagtgtctctattccacacccgatttgtgaacgccaggcccagggcccacatcctacttgcctctacccctagctctggtacactgcct

SEQ ID NO: 811143 - DNA, 120 bp, Artificial Sequence
  ENSG00000242628_25 (sequence is synthesized)
gaagacagcagctgctgctctaggatggcagcttttaatgactgaaaagtacactcactgtaatccacctcatcatttccccactactggatatttaaattgccccccttttgttttggc

SEQ ID NO: 811144 - DNA, 120 bp, Artificial Sequence
  ENSG00000242628_26 (sequence is synthesized)
cgtatctatataggttgctgtcacaagcatcttcgtgcttcttatttccatattttctgagtctttttaaaaagtaacattttagaacacagcttattgctagattttgctttttaaggt

SEQ ID NO: 811145 - DNA, 120 bp, Artificial Sequence
  ENSG00000242628_27 (sequence is synthesized)
aacctatagcaggcctttcatgaggcagtatttttatttattttgactactgttacaattgtgatgactttgaaatcctatttacatcattattttaaaacatgcacatatactaacaat

SEQ ID NO: 811146 - DNA, 120 bp, Artificial Sequence
  ENSG00000242628_28 (sequence is synthesized)
tctcagtttatctcattattctgatgaatgtttaattctatggtcttggtttccatgtttcttccagttcatttcgaggcaactccctgcctcctacccttatcacaaatcgaagggctc

SEQ ID NO: 811147 - DNA, 120 bp, Artificial Sequence
  ENSG00000242628_29 (sequence is synthesized)
tgtcctcactgccttatattgaatcatttttgcatccctgagatcatcgtaaggaaaaatacgataatcatttattgaatgctaatagtaatgtgttggtctctgagttaaagtccttta

SEQ ID NO: 811148 - DNA, 120 bp, Artificial Sequence
  ENSG00000242628_30 (sequence is synthesized)
aaagtactgtgtgataatctccttttatagatgaggggactgaaggcacccacatgttaaataacttgcctctggtcacacaattagacagtgacggggccgagattctgaagcctgtct

SEQ ID NO: 811149 - DNA, 120 bp, Artificial Sequence
  ENSG00000242628_31 (sequence is synthesized)
tgttctaagcatagtatgctatagcctcctgagataatcctatttggttatgataggctcttcttttcatgtaatgcttaattttatgaattgttactttaattaagagtttaacagctg

SEQ ID NO: 811150 - DNA, 120 bp, Artificial Sequence
  ENSG00000242628_32 (sequence is synthesized)
tatttgtaaatgatagtgggttttaacttaaacaggccttggaatcatggctacttttgctttatagaatgaattaggtgacctttttactttttcctatgatctgtaacagtttgtata

SEQ ID NO: 811151 - DNA, 120 bp, Artificial Sequence
  ENSG00000242628_33 (sequence is synthesized)
aaaatgtttgagaaacagtctctagatttcttaaaggaaagttctaaggttataaaacctgaaattcccagatcccagcaattcccagaagaccactgcctcatctcactagaacaaata

SEQ ID NO: 811152 - DNA, 120 bp, Artificial Sequence
  ENSG00000242628_34 (sequence is synthesized)
actcctggtacactgcagatatccagccacaaatgacaggaaagtcacaagcaaccttgcatcagggtgagaggtactgcattcactatggatcaattcacaggcacatcacagctgaac

SEQ ID NO: 811153 - DNA, 120 bp, Artificial Sequence
  ENSG00000242628_35 (sequence is synthesized)
tagatgtcaaactatgaagtgacataattccagagtcacttaacaagtagctgagggcttgcctatacacagtgatgtggcgaaatacctcaggaaacccttcttagaaaaaaaagcaaa

SEQ ID NO: 811154 - DNA, 79 bp, Artificial Sequence
  ENSG00000242628_36 (sequence is synthesized)
cgaaatacctcaggaaacccttcttagaaaaaaaagcaaaagcagccgggcatggtggctcacacctttggggaggtca

SEQ ID NO: 811155 - DNA, 120 bp, Artificial Sequence
  ENSG00000242628_37 (sequence is synthesized)
gaattccctgttaaatccatcaagtgaacccagctcctttttgggagctgctccattaagctggcagctgcagaacctgatgtaagcctgcatgtgggacagctcagcggccaggatgtc

SEQ ID NO: 811156 - DNA, 120 bp, Artificial Sequence
  ENSG00000242628_38 (sequence is synthesized)
cccaatcatctgcaccggcatcttctcgcccccggtcttcttccgcacccgcaaagccctgccaagaacacactctcattttgtgtttctaagtgaatgacttaggtaattaaaggatga

SEQ ID NO: 811157 - DNA, 120 bp, Artificial Sequence
  ENSG00000242622_0 (sequence is synthesized)
gctggtgaaactgcacggctgggcgccgccgccgctttgtgattggctggaaaactccgctgggagcgtacctccttcggtgattggtgaagagaagggggcttccgaggacagtctggc

SEQ ID NO: 811158 - DNA, 120 bp, Artificial Sequence
  ENSG00000242622_1 (sequence is synthesized)
cagtcaggacttcccctccctctccaagagtcatctctttctgttaagatgctgtctccagaaagcacatgttaaaggacctatatttgatcagattacctggctcttgctttgaaacac

SEQ ID NO: 811159 - DNA, 120 bp, Artificial Sequence
  ENSG00000242622_2 (sequence is synthesized)
tgatgaaggacttgggacagaacaaagtgagtggaggacacttcaatctaaagtgatcttaaaggaggagtagtaggatttgaagatgaagaaagaagaggggaggttaaaaaatggagg

SEQ ID NO: 811160 - DNA, 76 bp, Artificial Sequence
  ENSG00000242622_3 (sequence is synthesized)
tgaagatgaagaaagaagaggggaggttaaaaaatggaggcaacagctgggtatggagtgcaatggtgcgatctcg

SEQ ID NO: 811161 - DNA, 72 bp, Artificial Sequence
  ENSG00000242622_4 (sequence is synthesized)
taagatttggaagcaacctaagtgtccaacagacgccataaaaaagaaagagatccagtcatttgcaacagc

SEQ ID NO: 811162 - DNA, 120 bp, Artificial Sequence
  ENSG00000242622_5 (sequence is synthesized)
ccgccataaaaaagaaagagatccagtcatttgcaacagcatgaatggaactggaggtcattaagttaagtaaaataagccaggcacagaagacaagcagcacattttctcacttacttg

SEQ ID NO: 811163 - DNA, 120 bp, Artificial Sequence
  ENSG00000242622_6 (sequence is synthesized)
taggacataaaagtcaaaatgattgggctcatggatatagaaagtggaaggatggttaccagaggctgggggggggagtcggggggaggtagagatggataatgggtacaaaaaatagtt

SEQ ID NO: 811164 - DNA, 120 bp, Artificial Sequence
  ENSG00000242622_7 (sequence is synthesized)
caaaaaatagttagaatgaataagacctattgatagcacaatagggtgactatttaaataattatatattttaaaataaagtgtgtaattgagttgtttgtaactcaaaggataaatgct

SEQ ID NO: 811165 - DNA, 120 bp, Artificial Sequence
  ENSG00000242622_8 (sequence is synthesized)
cccgacggttcgcctgcggccgcctccaacaacggtggaaaccgcacacagggaccgcgggccctcggtgcagcaaatcggaaagtgctgcggtcggcggccctgggctctgagcgctca

SEQ ID NO: 811166 - DNA, 120 bp, Artificial Sequence
  ENSG00000242622_9 (sequence is synthesized)
agcgagcagaggggtggaggggctctccccacccacaggaggctctcggcggggcgcagccaattctgcgcgcccaaggctcccctctgccgtggatcgcgtgtgccgagtgttggcctc

SEQ ID NO: 811167 - DNA, 120 bp, Artificial Sequence
  ENSG00000242622_10 (sequence is synthesized)
ttccccgaaagggccagacggaccaagggggccttcccagccggctgcaagctctcagacgctaaaatgggaacaaagcttccagaaaggcagcgcctttgggcggccgcgccccgccca

SEQ ID NO: 811168 - DNA, 120 bp, Artificial Sequence
  ENSG00000242622_11 (sequence is synthesized)
gccgcgggggccattgatacagaggcttgctgcgcttggtgtgcgcggcccggccgggcctctggaaacgcccatgagaaatgagctcatgctggatgcgcgcgctccttgggcgcaact

SEQ ID NO: 811169 - DNA, 120 bp, Artificial Sequence
  ENSG00000242622_12 (sequence is synthesized)
aaagcaggtgagtggaggacacttcaatctaaagtgatcttaaaggaggagtagtaggatttgaagatgaagaaagaagaggggaggtaaattactttccatcacttcaatttcaaccca

SEQ ID NO: 811170 - DNA, 120 bp, Artificial Sequence
  ENSG00000242622_13 (sequence is synthesized)
tcagataaaacctctctttagtaaacctgcatgtgggtggagctgtaacagcaattaaggacagtgtgactctgttcttctgactttgggaaaaccagtttggctggaacaaaaagctga

SEQ ID NO: 811171 - DNA, 120 bp, Artificial Sequence
  ENSG00000242622_14 (sequence is synthesized)
tagagaagactaatggaagataaggttgaaaaggtaggtttgagggagctttgttacaggaaaaaaaaaaaaaaaaaactgggctttgtcctgtagacagtggagaggtactttagcaga

SEQ ID NO: 811172 - DNA, 120 bp, Artificial Sequence
  ENSG00000242622_15 (sequence is synthesized)
tgtaagacattaccattataggaaagcctctgaagtaacatacactgtggtttttcctgttgctgaaaatatgcccagagtaacaagatgtggcatagttggttatgtgtcttataacca

SEQ ID NO: 811173 - DNA, 120 bp, Artificial Sequence
  ENSG00000242622_16 (sequence is synthesized)
gcccagcgcaaaacgggccccgaaagcagggtctcactttgtcctccaggctggagtgctgcggcctcaacctcccaggttcaagggatcctgctgcctcagccccccaagtagctagga

SEQ ID NO: 811174 - DNA, 73 bp, Artificial Sequence
  ENSG00000242622_17 (sequence is synthesized)
ttttgtataaataatctgcgtgccatggcttctcaaaacgctaggattactggcgtgagtcaccatgcctggc

SEQ ID NO: 811175 - DNA, 82 bp, Artificial Sequence
  ENSG00000242622_18 (sequence is synthesized)
agtttggctggaacaaaaagctgatagagaagactaatggaagataaggttgaaaaggaaacgggtcatgatccagacccca

SEQ ID NO: 811176 - DNA, 120 bp, Artificial Sequence
  ENSG00000242622_19 (sequence is synthesized)
aggcataagccaccgcacctggcctggttgcccattctttatggtcgtttcttgatgatatgctaaccaaggagtggattaatcatgcctcccctttttggaccacatagggtctaaact

SEQ ID NO: 811177 - DNA, 79 bp, Artificial Sequence
  ENSG00000242622_20 (sequence is synthesized)
accatctgggaatgcagcccaatagatttcaccctcattttgcccggctcctgtttaagatggagttgctctggttcac

SEQ ID NO: 811178 - DNA, 120 bp, Artificial Sequence
  ENSG00000242622_21 (sequence is synthesized)
ttgcccggctcctgtttaagatggagttgctctggttcacatgcctctaacaaatccttttagtttttcatgcttgtcacatgtttacttctaagggtataatcatgtggtttactatat

SEQ ID NO: 811179 - DNA, 120 bp, Artificial Sequence
  ENSG00000242622_22 (sequence is synthesized)
tattaccgattagattattttgaactacttcaattttatttattttacctcatttccattcacattttttgaaaagagcttttttatacaagagtgtaaatattttcacattgaataaat

SEQ ID NO: 811180 - DNA, 120 bp, Artificial Sequence
  ENSG00000254791_0 (sequence is synthesized)
tgggtggagatcagctgggagtgaaggggggacgggcttgggttttgaaggtgaaggtctctggagaactggggacacgtggatctggagtaagaggcacctactgaaaccggaaggtgg

SEQ ID NO: 811181 - DNA, 120 bp, Artificial Sequence
  ENSG00000254791_1 (sequence is synthesized)
gttttatgtgaggtgtggacgggaggctattggactagaaggcattagttggtctgttaggacaaagtatacaagcagcaaacgcggtagatttatgtgtggtaggtgaaggctgtgaat

SEQ ID NO: 811182 - DNA, 120 bp, Artificial Sequence
  ENSG00000254791_2 (sequence is synthesized)
cttttatgagtagttgagcaagaacagttgtctgattctgcggtgtcggagagtggagggtctcaggtagtgtcttggtcaggctggagtgcagtggcgagatcatagctcgttccagcc

SEQ ID NO: 811183 - DNA, 120 bp, Artificial Sequence
  ENSG00000251542_0 (sequence is synthesized)
gcaacaagcctctatccagagctcagaaactgaaaaaaatatattacatttttcttatacaggcataccttggatatattggaagggagaggctaaaaatctctcatgaaagcaccagta

SEQ ID NO: 811184 - DNA, 120 bp, Artificial Sequence
  ENSG00000251542_1 (sequence is synthesized)
tctgagtgctgaccacggtaggcttctgcgcttacagaggagctgcatcacagatgagagaaatacaaccaagacttcaactacaattgagcagaaagcctcccataaacatgaagacaa

SEQ ID NO: 811185 - DNA, 120 bp, Artificial Sequence
  ENSG00000251542_2 (sequence is synthesized)
ttcgtaaccagagtttaagttttataaaggtgtctaaaaatatcttattttgaatcatgcaaaagtgatccagtctggaagcattgtaaaaataatgcttccttcccaggctgggtagtt

SEQ ID NO: 811186 - DNA, 120 bp, Artificial Sequence
  ENSG00000251542_3 (sequence is synthesized)
gcctattttatcctctttattctggagaagaaaacaaatcaagaaatcgaaacacttgaccttggaaaggatctcatcctttgttacagactggctgactctgaatatatcaggaatgta

SEQ ID NO: 811187 - DNA, 120 bp, Artificial Sequence
  ENSG00000251542_4 (sequence is synthesized)
cttcctagaccccaggactcaaatataaccagagtgacagatagggcaggtctgagagaagtagcaaacgtacttcatcttagggtcagaaagaaacatgctggtataattctaacttag

SEQ ID NO: 811188 - DNA, 120 bp, Artificial Sequence
  ENSG00000251542_5 (sequence is synthesized)
aaaataaccaggtaaggggtcttgtaaacttcatacaatgctgctgcctctgagttattaaaaaaattactaacaggcttctgatcaactaaaggaataaaattaggtgttcaaaggaga

SEQ ID NO: 811189 - DNA, 120 bp, Artificial Sequence
  ENSG00000266844_0 (sequence is synthesized)
ctgatggcttcgctgtcttctgtaaaaattgctatgagagaacttttcactcactgttttgcagtttctccctcagtccctggttctttcttctcacataatcccaatttcaatttatag

SEQ ID NO: 811190 - DNA, 120 bp, Artificial Sequence
  ENSG00000266844_1 (sequence is synthesized)
gctcatcatcagccctctgcagagatttcatttcctccgtgccagtagccatcgaccctctgatgaggatgccccctccaacaggcaccgccaggcagccctgcctggagacccagaggc

SEQ ID NO: 811191 - DNA, 120 bp, Artificial Sequence
  ENSG00000266844_2 (sequence is synthesized)
accgagtcacatttgctctgcacacctggctctcgcttgatgtgggcctgtgtgctacagcccggaacacaaaagaagacacccatgcaaataccattaaaagtttattgttttatttca

SEQ ID NO: 811192 - DNA, 120 bp, Artificial Sequence
  ENSG00000266844_3 (sequence is synthesized)
agcccccagaaagcaagatagaaaagaaatatgctctttaccgtggccgatcagcaacgaaccaacactgtcctcatctaattctacgtcttccacactgcccagtaacacaaataacca

SEQ ID NO: 811193 - DNA, 120 bp, Artificial Sequence
  ENSG00000266844_4 (sequence is synthesized)
gagcgcagacgccaagaatccttccaagtaacgcagctaacagaccaaggagccaaagctcagccagcccgaaggagccaggattagagcctgcatggatgcaacagtcacgcttctctc

SEQ ID NO: 811194 - DNA, 120 bp, Artificial Sequence
  ENSG00000266844_5 (sequence is synthesized)
tattacgtgtcttgcaacttggagtcacatgatctcagcatctgatccaccctgggctcagaacctcccagaacctcccagaatcgaggctcacggcagaggttctgcactcaccaagga

SEQ ID NO: 811195 - DNA, 120 bp, Artificial Sequence
  ENSG00000266844_6 (sequence is synthesized)
tgtgctcatgtggatccccgctgctgggcagagcacaccacacatccagactcaacaaaatacatggagtcaaaggtcaggtgactgaatcaatgagtatgttacacaccaagaaagacc

SEQ ID NO: 811196 - DNA, 120 bp, Artificial Sequence
  ENSG00000266844_7 (sequence is synthesized)
cctcctctctgcaccccggggagcagccccagaagcctggtctcctccaggatgaaaatgcaaacgcaggtgcctgggggctcccagagcctttggcttcacggttccctcccggccctg

SEQ ID NO: 811197 - DNA, 120 bp, Artificial Sequence
  ENSG00000266844_8 (sequence is synthesized)
cctggagcttcatgtgcctccccttttgcttaatgagagccgctgtctaagagttaagggttttctgggtgacgtttaacaataataaaggtgactgcttatctaaggaatccgagccgc

SEQ ID NO: 811198 - DNA, 120 bp, Artificial Sequence
  ENSG00000266844_9 (sequence is synthesized)
agagtgcttctgctgaaaaatttggaggtttgtgtctggagttttgttctttgtaactctctcatcatcgaggctatatattaatagacatggtattaagcccacacgaaacattcagaa

SEQ ID NO: 811199 - DNA, 120 bp, Artificial Sequence
  ENSG00000266844_10 (sequence is synthesized)
gctgactactcctcatctccgtcctcggggagggtgatgccagcgtgggactctttggaaggcctatcaatcacagctcaggagccaaagctcagccagcccgaaggagccaggattaga

SEQ ID NO: 811200 - DNA, 120 bp, Artificial Sequence
  ENSG00000266844_11 (sequence is synthesized)
ctgacaggtgcagggccctgcccctcgagggccagcctctccctcgggagcgtgggtttttcctgtttgatcctggcttaacttgaacatctctggcattggagctgccctctggagtag

SEQ ID NO: 811201 - DNA, 120 bp, Artificial Sequence
  ENSG00000266844_12 (sequence is synthesized)
cccagaagttggcactcacctcaccttttgctgcatttccaagagatcagcctttggacttcctggaaagtggtagaaccactgtcctatgaaacaaagtgcttctgtgctgaaatggag

SEQ ID NO: 811202 - DNA, 120 bp, Artificial Sequence
  ENSG00000266844_13 (sequence is synthesized)
taagttccctgcagcctctggcaaggtaacctaccgagcacctcctggagtaggtgttcctatcatcctctctttatagctcaggagccaaagctcagccagcccgaaggagccaggatt

SEQ ID NO: 811203 - DNA, 120 bp, Artificial Sequence
  ENSG00000266844_14 (sequence is synthesized)
taccattaaaagtttattgttttatttcaatattcaggaacagtgtacactttccgttcagccatcgtcacagcacgtgctgtgtgggtgcggccacgtatggatcgcagagccgacctc

SEQ ID NO: 811204 - DNA, 120 bp, Artificial Sequence
  ENSG00000266844_15 (sequence is synthesized)
tgatgccagcgtgggactctttggaaggcctatcaatcacaggtgcacgcctgtgcctactcgctaccacgcgtcttctgggaggaagtgaatgagccggttatcttctcagggagggtt

SEQ ID NO: 811205 - DNA, 120 bp, Artificial Sequence
  ENSG00000266844_16 (sequence is synthesized)
agtgctggccactgtgcactgccgctgccagcacgcccggtcacagccagtgtctatgggcgactggcgcggctgcgaggctgtctagaggactcctacccttctgctctgagtgcgcaa

SEQ ID NO: 811206 - DNA, 120 bp, Artificial Sequence
  ENSG00000266844_17 (sequence is synthesized)
tacatttaacgtgagacagctcactttgatgttatctcagccagttttttagtagttctgggtagagatggacaacaactggccatctaccttgagatgctccttttatttttgagttag

SEQ ID NO: 811207 - DNA, 120 bp, Artificial Sequence
  ENSG00000266844_18 (sequence is synthesized)
tggctcactgcagcctcgacctcctggattcagtgatcctcctacctcagcctgccgagtagctgggactaccggtgcacaccccatacccagctaattttcattattttgttagagaca

SEQ ID NO: 811208 - DNA, 120 bp, Artificial Sequence
  ENSG00000266844_19 (sequence is synthesized)
atcatcagccctctgcagagatttcatttcctccgtgccaggtacttcacgcaccaagctcagaggctgccctatcaatttcatacgcgttccctgcccctacagacgggcaggccagct

SEQ ID NO: 811209 - DNA, 120 bp, Artificial Sequence
  ENSG00000266846_0 (sequence is synthesized)
agtaaagttacaattttgcagagagcatgagaaaacaagcatcctggttctggtaaaaacaaaacaagacatcatcctggaaaaatgacattccagaactggaacacatagctaagcatc

SEQ ID NO: 811210 - DNA, 120 bp, Artificial Sequence
  ENSG00000266846_1 (sequence is synthesized)
cattggatagctgcagcactgatcgcccaggcctcgtgtggctgagatgaaatccacaattcctccaacacaagcaagagctccatctctgcctgaagtgagcagttcagcactgctccc

SEQ ID NO: 811211 - DNA, 120 bp, Artificial Sequence
  ENSG00000266846_2 (sequence is synthesized)
atgggtaacgagatggcacagtccagcacagtgtgctaattcactggacttctaccagtaaaaagtttccaaaactctctggagaataatctcttcagattctaaggaggagctagcagg

SEQ ID NO: 811212 - DNA, 120 bp, Artificial Sequence
  ENSG00000266846_3 (sequence is synthesized)
atggtgggtgatgggatggtaggagaaaatataaactatagaaaagtggcttaaatgtaagcagtgagtatctggtagagagcatgggtcaaacaggatgctgggacacagcacataagg

SEQ ID NO: 811213 - DNA, 120 bp, Artificial Sequence
  ENSG00000266846_4 (sequence is synthesized)
ggggcagggggcgcggggtgcctcctcggcctcggctctccccgccccggggcgccccgagaccgccgcctgcctccgcgggcagctttgttcttctttcctccaactacctgtctgagc

SEQ ID NO: 811214 - DNA, 120 bp, Artificial Sequence
  ENSG00000266846_5 (sequence is synthesized)
cgcgggccccagaggccccaaagagaggcccggagggtctccccagcagcatccgaggggcgctctcggggagctaggggccagagtccgcggtccctccgtgcctgcctccctcccctc

SEQ ID NO: 811215 - DNA, 120 bp, Artificial Sequence
  ENSG00000266846_6 (sequence is synthesized)
gtgcctcggtcttttgttgcctctactcctcggcacggcgcagcctgggctctcttccccctcccgcttgggagtttgcagtgtggacgctcggcaagcacaggtatttccatgtagctg

SEQ ID NO: 811216 - DNA, 120 bp, Artificial Sequence
  ENSG00000266846_7 (sequence is synthesized)
tgggaggcactgccaataaatatatctgaagggtagcataaagcttggtgaagaaattcagaaaaaggacaatggaaaaatagactgaaggtgacaaagagctaagaccatgagtcactc

SEQ ID NO: 811217 - DNA, 120 bp, Artificial Sequence
  ENSG00000266846_8 (sequence is synthesized)
attttcagacacaatctgttggaagcaccgcggcgtgccatcctgttcccctttgtaacctgcaacaggaactgctccccagtggggcaactgccttttgcggccctccctgcatggaat

SEQ ID NO: 811218 - DNA, 120 bp, Artificial Sequence
  ENSG00000266846_9 (sequence is synthesized)
tgactaaatagcagcattcagactattcgtgaggagtgcgcaaaagggaagacactgatccttggggtttctgtgaaatcttcttcaatatagacaaacggaggaaaaggcctcgtgtgg

SEQ ID NO: 811219 - DNA, 120 bp, Artificial Sequence
  ENSG00000266846_10 (sequence is synthesized)
aacatttctctgagattttcctgcctgcagctgttgcattctgcagagatggtttctgccaccaaaagactcatgatctattaggggatgcagacttgtgcaagggcagattctacacaa

SEQ ID NO: 811220 - DNA, 120 bp, Artificial Sequence
  ENSG00000266846_11 (sequence is synthesized)
agcagaccaagaaagggctacatcagagagacagaggatgtgctattggatcatacaacaggaggacattttctgcatacaaggtagaagcctttagtatactataataaaacgtgctca

SEQ ID NO: 811221 - DNA, 120 bp, Artificial Sequence
  ENSG00000266846_12 (sequence is synthesized)
agacggacattttgtattatatatagtataaataagaaacatcagtttggggaaaacatggtgagcagaggtagaaaactcggacatgaagatgacttttggggcaccaccagcagatgc

SEQ ID NO: 811222 - DNA, 120 bp, Artificial Sequence
  ENSG00000266846_13 (sequence is synthesized)
ctgtggctgaagcagaagatagatgcattctcaaagtttcagcctgctcacagattggccactgcacatttcgtgtatctatttaatattgcctggaaatctccaaaggttttaccgaac

SEQ ID NO: 811223 - DNA, 120 bp, Artificial Sequence
  ENSG00000266846_14 (sequence is synthesized)
accacttgtttactttgtaccttgtttactttgcccaagtgacaagtgagaaacaggattaaccacttgagctcccccaaaaatcgcgtgccatgccaacaggaaggagctggtctgaag

SEQ ID NO: 811224 - DNA, 120 bp, Artificial Sequence
  ENSG00000266846_15 (sequence is synthesized)
aggcttcctcccccatctacgtcacttgcaacacactcctggagtggggttctcatctaatttgagcaaggagactctcagcccttgctacactaactaaaacaggagtgtcacgcatgg

SEQ ID NO: 811225 - DNA, 120 bp, Artificial Sequence
  ENSG00000266846_16 (sequence is synthesized)
tccctggtctccaactgcagtccaggttgtggatagttaatgacagccataaatggtcgagcacatatgccttagtctaaagatactttcagacatgaacaacatcactgcagccagggg

SEQ ID NO: 811226 - DNA, 120 bp, Artificial Sequence
  ENSG00000266846_17 (sequence is synthesized)
aagactccaggaggatgtgggacttgtgcctggcactgaggggaaataatattcaaaacagcagaaaaagttttcttttgtctttaaattcgtcaatttaaaaaactgtctataaaaaaa

SEQ ID NO: 811227 - DNA, 120 bp, Artificial Sequence
  ENSG00000266840_0 (sequence is synthesized)
ttagaagtaagagccattacaatgttggttttacaagccactgggctttatagcaacatcagagtcctggtgggtcaggagaaaaggagacagcactcgtcagtagcagacaagagcaac

SEQ ID NO: 811228 - DNA, 120 bp, Artificial Sequence
  ENSG00000266840_1 (sequence is synthesized)
ttagcattccatataatcttggagagagctggtctaagtgcctcagatctatagccagttgccttggaatctctgctgagtacttcatcaagcacctgctgtttgaagagggaataagcc

SEQ ID NO: 811229 - DNA, 120 bp, Artificial Sequence
  ENSG00000266840_2 (sequence is synthesized)
ataaaattctcgctcttcagggtagaatgtggactgagaaacgtgcaacgcttcaaagagaacattttcccaacgtccagttcgaatatggacaaggaggataatgataaaggaaaatcc

SEQ ID NO: 811230 - DNA, 120 bp, Artificial Sequence
  ENSG00000266840_3 (sequence is synthesized)
tcctggagggccgagggcagaaccaagtggaatagaggattggcacgttcttcccaaagagcagaatgagggcccagccacatatccttgttaattctggataaagaccctgaagatatc

SEQ ID NO: 811231 - DNA, 120 bp, Artificial Sequence
  ENSG00000257261_0 (sequence is synthesized)
gcagaggggacgatgaggtgcggaggcgttggcagttgacttttgctgatggagcctctctgaagggcaaattcaaagtacagctgggtgctgcagcactggagtgcgaacttgtggctg

SEQ ID NO: 811232 - DNA, 120 bp, Artificial Sequence
  ENSG00000257261_1 (sequence is synthesized)
tggttatgaaggagcctcgtcagctatgcctttagcccctggtgaagcagtgccagtcacactttgccagtcaaacggagaggcagcagtagtaagaccagaccaaatcaaaccaaacca

SEQ ID NO: 811233 - DNA, 120 bp, Artificial Sequence
  ENSG00000257261_2 (sequence is synthesized)
cattctgtcacccaggctggagtgcagatgcagtggcatgatgatagtgcactacaacttggaactcctgggctcaagccatcttccctccactgcctccaagtagctggggactacagg

SEQ ID NO: 811234 - DNA, 120 bp, Artificial Sequence
  ENSG00000257261_3 (sequence is synthesized)
cacttttgttttcaagcaaatactaaaacaggtggaacctgccaccagtaatatgacccactgagtagagaaggtgactcagtcttggcagctcaagtcaggcttgggagaggtgactgt

SEQ ID NO: 811235 - DNA, 120 bp, Artificial Sequence
  ENSG00000257261_4 (sequence is synthesized)
gggaatccaaatgaacggcttatttccaaagaatgtgcaaaattccagtgtcaaaaatgtgaacaattcagtgcaactggacacacctgacacacctctgcagtcttcctcacacaaagc

SEQ ID NO: 811236 - DNA, 120 bp, Artificial Sequence
  ENSG00000257261_5 (sequence is synthesized)
cacctgctctaagtcagcttcaggagaatcttgttttctagcacccacaggagcagttcctacaactcaagggagagttcagatggaaggagtgtttgctccaaggcttgatatgcagct

SEQ ID NO: 811237 - DNA, 120 bp, Artificial Sequence
  ENSG00000257261_6 (sequence is synthesized)
cagctgttgcaactcttttggccactttgtgtaactgccctgccaagccctgcttcctggctgtccaaagaaagaagtgtttcctacaggagatcacaacaaaaggatgaaatctggggt

SEQ ID NO: 811238 - DNA, 120 bp, Artificial Sequence
  ENSG00000257261_7 (sequence is synthesized)
gcaggggaagggtagcttctgaagctggaaaataaagaagtaaggaagggagactgtggaatttaccagggagggaaactaatatttcctttcatataagttggtactattctggctttt

SEQ ID NO: 811239 - DNA, 120 bp, Artificial Sequence
  ENSG00000257261_8 (sequence is synthesized)
taccatgatcatatattatattcaaaataaagctcttgtttttgaaacaaaaaaatataaacaaaggaaggaaggatgttcatttatttagataatagatacctagtgaacccctagtag

SEQ ID NO: 811240 - DNA, 120 bp, Artificial Sequence
  ENSG00000257261_9 (sequence is synthesized)
accttgtactgggtcctggggacactggtgaccaggttccattcctgatctcctggagcaggggacacgaaaagacattaagcaaataattacacatctttttacatcagtacaaatgtt

SEQ ID NO: 811241 - DNA, 120 bp, Artificial Sequence
  ENSG00000257261_10 (sequence is synthesized)
gggactttgcaagagttccaccctgaaagcttctgttttcactgaaagagaggaggcaaggtcatttgttcataaaagcaatggaattgagtaggggacttgaaagaaatgatgaggcta

SEQ ID NO: 811242 - DNA, 120 bp, Artificial Sequence
  ENSG00000257261_11 (sequence is synthesized)
ggaaaagcagctataggaaagggggcaccagtcagactaagaatatgtaaccagagcacagctgtgcatactttgcttgaatgtctccaagttcaaatccaagaacttgatattttaggt

SEQ ID NO: 811243 - DNA, 120 bp, Artificial Sequence
  ENSG00000257261_12 (sequence is synthesized)
ttgtcatttgcagaagtatcttcaactcatcataaatttactagtaatagctaactcatgtctatagaactgttaagtgacaagataatatttagattaaaagctatagttgcattctta

SEQ ID NO: 811244 - DNA, 120 bp, Artificial Sequence
  ENSG00000257261_13 (sequence is synthesized)
ttagagacttaatcagattttaacatgctcctcacaggggccatttagccctattctgctgggctttggcaagcactgaatgattgccctcctagggcagaggtactgcagccctggtta

SEQ ID NO: 811245 - DNA, 120 bp, Artificial Sequence
  ENSG00000257261_14 (sequence is synthesized)
agcattgaaaagatgatattaccaataagttgactctaattgtaaacaacatatttaaacaattacatcttaattaaattcttataaattataagtgcctcagaactttctttcttaatc

SEQ ID NO: 811246 - DNA, 120 bp, Artificial Sequence
  ENSG00000257261_15 (sequence is synthesized)
tcaaatgcatgtttcttaaaatcattcactattttatgagaatatatttgctgaatattagaaaaaagagttaaaaataaaaggcatttctaaaattttttcttgtatgaaatatgcttt

SEQ ID NO: 811247 - DNA, 120 bp, Artificial Sequence
  ENSG00000257261_16 (sequence is synthesized)
cttttatttataaatcattggttttatcttctatatagtgaatttctaaagggatttaatgtttgatattgaattgtatactaaaataaggttgttttagacataaaagagtaacagcaa

SEQ ID NO: 811248 - DNA, 120 bp, Artificial Sequence
  ENSG00000257261_17 (sequence is synthesized)
caataacaaagaagttgtgacaaagaggattgttgtactgagatttgatggataactttgattcatttgttttatgtgtatcttgcctacatctgtccattcatctcaccatttctatca

SEQ ID NO: 811249 - DNA, 120 bp, Artificial Sequence
  ENSG00000257261_18 (sequence is synthesized)
actatctacctggtgcagtttgatatgttataagctgtgagaagtgagacaaggaaagaactttttgctgaattttttagaacatctgtgatgtgttgtacatattaggcaaataataaa

SEQ ID NO: 811250 - DNA, 120 bp, Artificial Sequence
  ENSG00000257261_19 (sequence is synthesized)
tacttactgaattaaattaaatttaaccaggatcaagttcagatggcttacggttgagatacatgttgctatggcagcaggaagaaaatgatggaaaagaagaaaacaaaaagcaagaaa

SEQ ID NO: 811251 - DNA, 120 bp, Artificial Sequence
  ENSG00000257261_20 (sequence is synthesized)
aagtgagaaatcaaaggacaacattttcaaggatgaagagtgctacatctattcattatacattgtagatatagataataacaatagtaataatgtggtcaaattttaataaataaaaaa

SEQ ID NO: 811252 - DNA, 120 bp, Artificial Sequence
  ENSG00000257261_21 (sequence is synthesized)
actttcagcctccagaatggtgagaaataaatttctgttggttaagtcacccagtctgtattttgttatggcagcccaaggtgacaaatattgtttctccttgatggctgtgcatttgga

SEQ ID NO: 811253 - DNA, 120 bp, Artificial Sequence
  ENSG00000257261_22 (sequence is synthesized)
gggagcctctgtgagccctgactttcctctaggagcaggttgggtaggaaagtaacatcgaccagctgagtgtagttcatacagatgtggaccagacagggcgtgaaaggtggaaggaga

SEQ ID NO: 811254 - DNA, 120 bp, Artificial Sequence
  ENSG00000257261_23 (sequence is synthesized)
ggactggtcccaaaggccaaacaccaagactgaaaggcaagcttaggagaaatcgacactgttaggaggaattgacaaagtaaatcttatgacaaatttcaaaattaaaaaatttaaaaa

SEQ ID NO: 811255 - DNA, 120 bp, Artificial Sequence
  ENSG00000257261_24 (sequence is synthesized)
cagattaaacccccagacccacaagaaaatccctgaagcttcggtgagcgtgggatttggcgtgcagttggttccgtatggttccccattaagacttggaagtcggcttaccaagatttc

SEQ ID NO: 811256 - DNA, 120 bp, Artificial Sequence
  ENSG00000257261_25 (sequence is synthesized)
ctcttacccttcggctgtgttgagtagatattacacagacaccccgcccatgactctgctcttgcaggaaaacatttatttcaaaaatactgcaacggtttcatctctcatgtcctttta

SEQ ID NO: 811257 - DNA, 120 bp, Artificial Sequence
  ENSG00000257261_26 (sequence is synthesized)
ggttctttctagtaattgtgaacttttcctctcaagtcattccatcaaagtcttggaagcaaatgaaaaaaacatactaccctgaaatagagttcacatctttctttaccaacttgcctt

SEQ ID NO: 811258 - DNA, 120 bp, Artificial Sequence
  ENSG00000257261_27 (sequence is synthesized)
tcaggtttcctcacagcctctcctgggggtctttttccctctctggtaccttgaggcataggacagaagggagctgctgaagtttctggatgtcgcttatttttcacatttgttttaact

SEQ ID NO: 811259 - DNA, 120 bp, Artificial Sequence
  ENSG00000257261_28 (sequence is synthesized)
tcttttggccagaactgtgtattgttttcgcatagatttctgcaattagaattattgtaattagaaagaataataatcttcatataaggcttagggtacgcactactttaaggtctttgt

SEQ ID NO: 811260 - DNA, 120 bp, Artificial Sequence
  ENSG00000257261_29 (sequence is synthesized)
aaatgtgtgcatattcatttctctcatcaactctgaggtaggggctattcttaccccattattgaccttttacaaatgaggaaactgatgcttggagaagttagataactcgcccaaggc

SEQ ID NO: 811261 - DNA, 120 bp, Artificial Sequence
  ENSG00000257261_30 (sequence is synthesized)
cattccttctctaagaggaggaactggaatttgaccccaaactgtcaggtaaatccaatgctttgttcactatgcaatagaaattctttattaataaatttaattgtgttgaaatattaa

SEQ ID NO: 811262 - DNA, 120 bp, Artificial Sequence
  ENSG00000257261_31 (sequence is synthesized)
gtcaagagttccggtaggaacatggagcctgagctggtaaatttgaatatctgatcttccaggctcggagcaatgaatagtggttatagggaaaggaatcgcaggaggtcatgtgagcac

SEQ ID NO: 811263 - DNA, 120 bp, Artificial Sequence
  ENSG00000257261_32 (sequence is synthesized)
acagcataaaggcagctgcccacaagccaggaagagaagcatcatcagaaaccgaccatactggcttcctgatctcagactttcagcctccagaatgagatgggggtgtgaaaggaaatg

SEQ ID NO: 811264 - DNA, 120 bp, Artificial Sequence
  ENSG00000257261_33 (sequence is synthesized)
aggaaatgaaatcttgggaccctaaactcattaagccaaagggaaaagctgggccgagaactggatgatgcaacctgcttccacctttttgcttcctaaataagatggctacaagatgaa

SEQ ID NO: 811265 - DNA, 120 bp, Artificial Sequence
  ENSG00000257261_34 (sequence is synthesized)
atttatagcttatccttacaggtgcagtcatctccctgcccaccagacacaaaggcatatctgattgttctcctgccccattttgtctatgttatcttatgtaaaatacagataccctgc

SEQ ID NO: 811266 - DNA, 120 bp, Artificial Sequence
  ENSG00000257261_35 (sequence is synthesized)
atttttcctctgccccatttgtctatatcaccttatataaaaaaatgcagagtcactgagccggacaaaggcatgaacgactatttttccctacccccgctcttacatgaaaattgtgta

SEQ ID NO: 811267 - DNA, 120 bp, Artificial Sequence
  ENSG00000257261_36 (sequence is synthesized)
cttctgaatatcctgccctttcccctttaaatttggagccctcagaatcatcttcagagaaaggcatagacctgtctcccgggcatacatccttaactgtggcaaataaacctcctaaaa

SEQ ID NO: 811268 - DNA, 120 bp, Artificial Sequence
  ENSG00000257262_0 (sequence is synthesized)
cggagccggcgactggacgcgagcaaggggcgaatggagagcgtctcccctgcgccaatgctgttgttccgggtgctgaaaagccgggaacttcccggaaagcagcggcacttttctccc

SEQ ID NO: 811269 - DNA, 120 bp, Artificial Sequence
  ENSG00000257262_1 (sequence is synthesized)
cccagtttgggaggttggttcgtggtggcaccatggtggagaaaaaacattcattcctggtttttcccaactgtggatatgatcataagggagatcatctctagcggcggggactcttgc

SEQ ID NO: 811270 - DNA, 120 bp, Artificial Sequence
  ENSG00000257262_2 (sequence is synthesized)
ctccagccctctgggacttgcctctggatcaccatttgttcaggaaagagcccagcagccagaatgatgtattttgggctcggattgccttctatgtggagtgaggagacagatgggctt

SEQ ID NO: 811271 - DNA, 120 bp, Artificial Sequence
  ENSG00000257264_0 (sequence is synthesized)
acgcccagccaggatcacagacgtttaaattacactccttctgctgtgccttacagcagtagaaggggtgaaatttaaacgtctgtgatcctggggttgttgaagatgccacccatctac

SEQ ID NO: 811272 - DNA, 120 bp, Artificial Sequence
  ENSG00000257264_1 (sequence is synthesized)
atattctttcagatgcacaatatttcactgtgtgaatgaaacagcagcccttcttacgtgtgcttttggaatttgaagattttgtaagataagatgaatgcattggaacaagtgatcctc

SEQ ID NO: 811273 - DNA, 120 bp, Artificial Sequence
  ENSG00000257264_2 (sequence is synthesized)
agaggacagaagccggcagctgctgcgttttcatcctgtttctgctcttggagctgagggggagaggtggctagcagccacccagtgatcaaacttgcagcctgcctctcttgcttcctt

SEQ ID NO: 811274 - DNA, 120 bp, Artificial Sequence
  ENSG00000257264_3 (sequence is synthesized)
ttcacagactggagtgtgcctgggtatggagaaagaacattttgcttcttgcctctcagagtttcaagaacgcctcacctgagtggcatgcattcacggaatgagtaattattacagtgg

SEQ ID NO: 811275 - DNA, 120 bp, Artificial Sequence
  ENSG00000257264_4 (sequence is synthesized)
agaactcctcactgtgaattaattacacagatgatattcaagacttagactgggctagtgcaggggttagcaaactatggcccactgttcttgttttataaataaagtgttatgagcaca

SEQ ID NO: 811276 - DNA, 120 bp, Artificial Sequence
  ENSG00000257265_0 (sequence is synthesized)
agggaaatacaaaccctcaaactctttcacctcatatccattaatttatggtcacagccccatcaactaagcccaaccaggaatccagcggaaatactgcattagagttgacagagtctt

SEQ ID NO: 811277 - DNA, 120 bp, Artificial Sequence
  ENSG00000257265_1 (sequence is synthesized)
ctactttataaactgtgatgaccagcccaaggtcaggctactatgcaatggaactatgcaaacttgaagaagtactggaaacaagaaaattcagcaagcaaatggcagctggaagaatta

SEQ ID NO: 811278 - DNA, 120 bp, Artificial Sequence
  ENSG00000257265_2 (sequence is synthesized)
atcaaccctgcaacacttactctgctttgatgagaagagagtatcaacaggatgaacaaaccataaggagcccctttaaaaagggaccacccaaagagaggctgaattaaagtctacgta

SEQ ID NO: 811279 - DNA, 120 bp, Artificial Sequence
  ENSG00000257265_3 (sequence is synthesized)
atacaaaccatcacttgtgggaaatgaaaagtacttgagcaatgactaatgtttctaatatcagacacatttgatctccctcccttccccaaaaataaaattgtctcatttcaggtgatt

SEQ ID NO: 811280 - DNA, 60 bp, Artificial Sequence
  ENSG00000257268_0 (sequence is synthesized)
tcaagtggattgttgataaatacattctcaagattctctcagactttctgaatcaaaatc

SEQ ID NO: 811281 - DNA, 120 bp, Artificial Sequence
  ENSG00000257268_1 (sequence is synthesized)
tacattctcaagattctctcagactttctgaatcaaaatctccagccatgtctctgtgactggcccccagtaaaaaccctggacaccaaggcatggaaacagtaattcgtttgatctgga

SEQ ID NO: 811282 - DNA, 79 bp, Artificial Sequence
  ENSG00000257268_2 (sequence is synthesized)
gtggctgccagcaacattaggggcaacatactcccttgcgtaccatattatctttctgaaaccaaaaacatggtaagtt

SEQ ID NO: 811283 - DNA, 120 bp, Artificial Sequence
  ENSG00000257268_3 (sequence is synthesized)
ctcctgggttcaagcaattctcctgccctagcctcccgagtagcagagactacaggcacccaccgggtgtgtgccaccatgccgggctaaatttgttatatttttagtagaaatacaaaa

SEQ ID NO: 811284 - DNA, 120 bp, Artificial Sequence
  ENSG00000228862_0 (sequence is synthesized)
aacagagttgcagtcatgagggaaggtgagccaaggtgtggggctgcctctgtgtctcctccaaacaccacgcagccagagattcagcctccacccctcctcacacgggagatagaggtt

SEQ ID NO: 811285 - DNA, 120 bp, Artificial Sequence
  ENSG00000228862_1 (sequence is synthesized)
gagttcaggggctattggcttcagacaagggatgcccagcgccaaggaaggagtggcttaaaaagaaagaagaaaaaaaaagcattcaagactaataaaggactatgcgcagtagctcat

SEQ ID NO: 811286 - DNA, 84 bp, Artificial Sequence
  ENSG00000228862_2 (sequence is synthesized)
cagcctgggcaacatggcaaaaccccatccttacaaaaaatacgaaaattagttgcacgtgatggggaggaggactgattgagc

SEQ ID NO: 811287 - DNA, 120 bp, Artificial Sequence
  ENSG00000228862_3 (sequence is synthesized)
ggaggtccaggtgggagacgccgcgccccgcaccgagcaaacgtattggcaaccaaatcatgtcagcgttggctttgcggagaatccagacttgcttaaaaagaaagaagaaaaaaaaag

SEQ ID NO: 811288 - DNA, 120 bp, Artificial Sequence
  ENSG00000228862_4 (sequence is synthesized)
gaaagaaagaaaagaaagaaagaaaaacgactaagtgggaaggcaagaagaattaggaatgctggacactactgcacttgccatgttttcaagaatgtcaccgtgcagaccagtgattcc

SEQ ID NO: 811289 - DNA, 120 bp, Artificial Sequence
  ENSG00000228862_5 (sequence is synthesized)
ccgtgcagaccagtgattccgcctcgcaggatgacatatggccctcggaccaggcgacacagtggagatgcgcatgccagcctcgtgaaatcatggaggttcaaggggcaaagtgttcac

SEQ ID NO: 811290 - DNA, 120 bp, Artificial Sequence
  ENSG00000228862_6 (sequence is synthesized)
atgcctaatgagtgttgatcaggtggtaagacacccacaataggaagggtattgattattccacgtgctgagcttttctttagattcagcagacacagatgaaaataaggaacataaagg

SEQ ID NO: 811291 - DNA, 120 bp, Artificial Sequence
  ENSG00000228862_7 (sequence is synthesized)
aagcattcttcagaatctcttgataccttgactgtttgtgtcacacacagtgttccccaaatcccagcttcatcataaagacttcctgggctgaggaaggagctgagggcttcccttttt

SEQ ID NO: 811292 - DNA, 120 bp, Artificial Sequence
  ENSG00000228862_8 (sequence is synthesized)
ccaattcatatgttaaacttctaaaccccagtaccagaaaatgtgacagtatttggagatgaggtctctacagtgcagtcaagttaaaattaggtgaccagggtgggccctagtgcagta

SEQ ID NO: 811293 - DNA, 120 bp, Artificial Sequence
  ENSG00000228862_9 (sequence is synthesized)
tgactggtgtccttataagaaggggatatttggacatagagacccacacaaagggaagatgatttaacaagacagagacaaaatggccatctccataaggagagaggccttagagggaac

SEQ ID NO: 811294 - DNA, 120 bp, Artificial Sequence
  ENSG00000228862_10 (sequence is synthesized)
caatcctccaacaccttgatcttggacttgcagcctccagaactgtgaaacaatacatttctgctgtttaactcccccagtctgttgtactttgtcatggctgccctagccaagcaatac

SEQ ID NO: 811295 - DNA, 120 bp, Artificial Sequence
  ENSG00000228862_11 (sequence is synthesized)
tacactgtataataatccctgctcttcaaccttcaaatgcatataacctgtacaaatacctcgctcatcttgtattgggtgatcttgtgaaataaactcatgaccattttagataataaa

SEQ ID NO: 811296 - DNA, 120 bp, Artificial Sequence
  ENSG00000228862_12 (sequence is synthesized)
ttttttataggatagatcctagggataaataattttttggctacagcctctaacagaatcatctatgattacagtcgttaataattgcttttatactaccaactgcaaagaggatgttga

SEQ ID NO: 811297 - DNA, 120 bp, Artificial Sequence
  ENSG00000228862_13 (sequence is synthesized)
gtatcaatgctttaacagaaatcaccacctgcatgaggaaaaggtatgacatgaagcatggataactcacacctgggcagctcccaacacagcacacacacacaggcaaagaggcagcac

SEQ ID NO: 811298 - DNA, 120 bp, Artificial Sequence
  ENSG00000228862_14 (sequence is synthesized)
agggctggctggtcatttaccacgttccgtaaatgtgaattctgtgcggcagcagcatctcctggggactgtaatgtggccattttaatgcaaaattaattgtcaaatataagactgcag

SEQ ID NO: 811299 - DNA, 120 bp, Artificial Sequence
  ENSG00000228862_15 (sequence is synthesized)
cggccttctcccgagtgattacctcaccctccagcaagtcatcttcactcttgtcatcgatgctccctaccttgttagcaatattcaaatgatcacaaatgacttcaggatctcacacac

SEQ ID NO: 811300 - DNA, 120 bp, Artificial Sequence
  ENSG00000228862_16 (sequence is synthesized)
aaaacgcaacacctcctggtcagctcacacccattctagaatttgttcttactcacttatttctacaacaggaagggaatcatttctggaatgtgtgttatttctgcattgtcattgtca

SEQ ID NO: 811301 - DNA, 120 bp, Artificial Sequence
  ENSG00000228862_17 (sequence is synthesized)
tcatcataatcatcataagatgacacttgtgtacatttgccacttgcttcaattttagactgaattctgggcataagtcacattaaaaaatgtgtctctaatattatagcaataaagtcc

SEQ ID NO: 811302 - DNA, 120 bp, Artificial Sequence
  ENSG00000228862_18 (sequence is synthesized)
atatttttgttataatagccagaactgaacagaacatcattagatttctctccgttttgtttcctttctttttaaccaacacatatatgttgcttggtggataaggcattcttgtagtgc

SEQ ID NO: 811303 - DNA, 120 bp, Artificial Sequence
  ENSG00000228862_19 (sequence is synthesized)
tttataagtattagcccatttaatcattataaccatcccatagaacaggtattcatttgattaagaaaactgaggtatgaaaagtttaagtaacttgctcaaaatcacatgctagttagc

SEQ ID NO: 811304 - DNA, 120 bp, Artificial Sequence
  ENSG00000228862_20 (sequence is synthesized)
tgcagaatcgattgaaattttactttaaaattcccttattgataagttcatgctctttctagtttcctgaggtttcccatggtgctgcagtgcatatcccaggtacccagcaagcagcct

SEQ ID NO: 811305 - DNA, 120 bp, Artificial Sequence
  ENSG00000228862_21 (sequence is synthesized)
ggagaggagcagggagtcaggtccagggggactgagaaggtcagaagcaccaacacaggcagaagaaagaagggctgaaagccttctttctgaagtgtggtatgcaggtggcctgcagaa

SEQ ID NO: 811306 - DNA, 120 bp, Artificial Sequence
  ENSG00000228862_22 (sequence is synthesized)
agaacacattctcacagcatccacgagcagaaagaacagaccatggagccaatcaaggacaatttatcttgagaacagaaaaggttaaagtaagtcaataagggccagcttgctgggcag

SEQ ID NO: 811307 - DNA, 120 bp, Artificial Sequence
  ENSG00000228862_23 (sequence is synthesized)
ggtttcaatgtggaaaagttgcttattgagccacaaccaaggatcctaacagtcattatttctcaatgatttggatgatatgtatgaaagaatattatattacattatcaaatagcacat

SEQ ID NO: 811308 - DNA, 120 bp, Artificial Sequence
  ENSG00000228862_24 (sequence is synthesized)
taatatgatttgatatgtttacctggcaaatttgctatagttacttagcatttgagaattttcatttatattgaattgattcaaatgcatacagagtgaatatttgctgtttcttcctgg

SEQ ID NO: 811309 - DNA, 120 bp, Artificial Sequence
  ENSG00000228862_25 (sequence is synthesized)
agagtgaatatttgctgtttcttcctggatggcattatatagctaaaataagagaaagactatttttatttttatatatttttactttttttagagacagtctcactctgtcactcaggc

SEQ ID NO: 811310 - DNA, 120 bp, Artificial Sequence
  ENSG00000228862_26 (sequence is synthesized)
aggcgtgagccactgtgcctggccaagaaagactattttttaagataataaactaagagatgtatagaaagcaagtagttgaaaataaaattagataagaactgatgaaaacgagagtta

SEQ ID NO: 811311 - DNA, 120 bp, Artificial Sequence
  ENSG00000228862_27 (sequence is synthesized)
gttagtagaaattatggaacatcttagatttggtcaaacaaaaataaaaacaggcaggaatttccttcctaaaatgaactaaattttgaaaatgtagaagcaaaacaaattttagatttt

SEQ ID NO: 811312 - DNA, 120 bp, Artificial Sequence
  ENSG00000228862_28 (sequence is synthesized)
gaaaacagagatccttaaaacaggaatgtttctggaataaatgtcattatctctaaatatcttttaaaagtccttgttgcatggaagcatatcgtgttcctggatgagaacacttgctat

SEQ ID NO: 811313 - DNA, 120 bp, Artificial Sequence
  ENSG00000228862_29 (sequence is synthesized)
tggcggcactagcatagaaatacagaatctatgacacaataaaaacttgagaaacaggttcaaatatgcattaaaaagtggcctgaaattaaagcatttaaatgtactgaggaaaggatt

SEQ ID NO: 811314 - DNA, 120 bp, Artificial Sequence
  ENSG00000228862_30 (sequence is synthesized)
aactgcttaataaatgatattaaaacaaaacgtgagctcatcaagttgccaaaaatatatttttcaaataaaaatttccactattggtaatagagttcaggaaacagaacattctcgtgg

SEQ ID NO: 811315 - DNA, 120 bp, Artificial Sequence
  ENSG00000228862_31 (sequence is synthesized)
tctgattggagtataaatcggcacatttctggagggaaattacacagatataaaatcttcaacaatgtctatattttatgagccagtaattccgtttctaagaatgttttctaaagaaat

SEQ ID NO: 811316 - DNA, 120 bp, Artificial Sequence
  ENSG00000228862_32 (sequence is synthesized)
ctttgtattttattttatttttaatttttagagacggggtctcactctgtcacccaaactggagtacagtggcacgatcatagctcactacagtctggaactcctgggctcaagtgaaag

SEQ ID NO: 811317 - DNA, 120 bp, Artificial Sequence
  ENSG00000228862_33 (sequence is synthesized)
agttgttgatgtgtccaaagatttatctctgaagataataactgagtgttgatggttttgcctaaattatttataaatctaaatagtcaataggaaggtatgattaaataaattatagaa

SEQ ID NO: 811318 - DNA, 120 bp, Artificial Sequence
  ENSG00000228862_34 (sequence is synthesized)
cacgctcacaatgaaatactgtgcagccatcaaaattatgtggcatgacagtgagctaacatctgtccagtgcttggcatgtgccaagcagatttctaagaacttgacgtgcagcaacgt

SEQ ID NO: 811319 - DNA, 120 bp, Artificial Sequence
  ENSG00000228862_35 (sequence is synthesized)
gtttcagcctcccaacacatctgtatgaggcagggcgatgattacttgcatgttatagctgaggaagccactgagagggtgcaactccttgctagtaagtggtagagcccgtatttgaac

SEQ ID NO: 811320 - DNA, 120 bp, Artificial Sequence
  ENSG00000228862_36 (sequence is synthesized)
actcctaatcattacaactatgtaacaatattggaagattttatgcaacataagtggggaagaaggcagtgtcctcagtgtgaccccattttggtaaaagaaggcatgtatacataatca

SEQ ID NO: 811321 - DNA, 120 bp, Artificial Sequence
  ENSG00000228862_37 (sequence is synthesized)
tagaaggaaaccagaaagaaatccagaaagatgctgagtattttctgtgggtggtgggattctcagtcttttgagcagatgctgttggtaccctggcccaccctcgtgtcaccacctcaa

SEQ ID NO: 811322 - DNA, 120 bp, Artificial Sequence
  ENSG00000228862_38 (sequence is synthesized)
gttaccttattacagggtaggagtttcctggtctttctgcccaagggcagaaagtgaaagtctggccagtgtacagggcagaccagactgctgaggagctgatgtcccaggagtacccct

SEQ ID NO: 811323 - DNA, 120 bp, Artificial Sequence
  ENSG00000228862_39 (sequence is synthesized)
cacagatgacagaaggtaccctttgcggctgtgtccttcccactgtctcagagggtccccaggagaaggagcaccagggacccatagcagtaacgtttatagcagtgccaacaccttcgt

SEQ ID NO: 811324 - DNA, 120 bp, Artificial Sequence
  ENSG00000228862_40 (sequence is synthesized)
gccggaggtccaggtgggagacgccgcgccccgcaccgaggtatgagagctgcagcagcgacaaccaggcggcctgaagtgcagacgcaaaacggatcccggggctaggacacgggggtt

SEQ ID NO: 811325 - DNA, 120 bp, Artificial Sequence
  ENSG00000228862_41 (sequence is synthesized)
gacggcaccggcctgcgctccagccctccctccctcacacacgcggaatctcaaaacatgcggacatgccagcccctcccgcacacctcgggctgcaccacctgctcccggcgcctcccc

SEQ ID NO: 811326 - DNA, 120 bp, Artificial Sequence
  ENSG00000228862_42 (sequence is synthesized)
gcccccggctcgcccgcgccggttctcacgcgcggccagcgcccttccccgccgctcccgcccctttcacttccgcacagcttaggagtcggggccagcgcctccgctcccaccttccca

SEQ ID NO: 811327 - DNA, 120 bp, Artificial Sequence
  ENSG00000228863_0 (sequence is synthesized)
cttctgcttaagcatgcaggtgagaagggaagatacatgtaatctgcatgtctgccaccattccttgttaccctttttcatatcccatgagcacagcactccagcggacctacccaaaat

SEQ ID NO: 811328 - DNA, 120 bp, Artificial Sequence
  ENSG00000228863_1 (sequence is synthesized)
atgtgggagttcagtgaaactcaaacagcatgcttctggtcagcctatacagtctctgtcctggtgaggagcatgatcaccaacaggcaagatcttctggccttgaagtttcgcttgagt

SEQ ID NO: 811329 - DNA, 120 bp, Artificial Sequence
  ENSG00000228863_2 (sequence is synthesized)
taaaagagctcatctcaggactttctgaattttcagcccatatgacatggaagaagagttagaaggggaatctgactgcttggatcagggactgtctggctggtggaacttgaatgtata

SEQ ID NO: 811330 - DNA, 120 bp, Artificial Sequence
  ENSG00000228863_3 (sequence is synthesized)
aggtgctgttgtcctctttctggaccttagagatgtacagtgcgccactctgaggatcaagtctgaccctgcctttaaatttggattcaaagtacttagattttctggaatcccattcta

SEQ ID NO: 811331 - DNA, 84 bp, Artificial Sequence
  ENSG00000228863_4 (sequence is synthesized)
ttggattcaaagtacttagattttctggaatcccattctacaatcttctggtcgaaagtataaaacctgacatcgagaacgggc

SEQ ID NO: 811332 - DNA, 120 bp, Artificial Sequence
  ENSG00000228863_5 (sequence is synthesized)
cagtgaaactcaaatgaaacgactaggagttgaagacttgcccacacagtcaatggaaaagaggagagagaattcagctccctatgcgaggcttgtggggcaggaaggcttcttatgaga

SEQ ID NO: 811333 - DNA, 71 bp, Artificial Sequence
  ENSG00000228863_6 (sequence is synthesized)
tgaccatcccccagagcatgcctcttgcagttgagagaagaggaagacatctgtctcctgcccatccctgg

SEQ ID NO: 811334 - DNA, 63 bp, Artificial Sequence
  ENSG00000228863_7 (sequence is synthesized)
gaggaggattagtataagaggaaagcatgcctcttgcagttgagagaagaggaagaacattcc

SEQ ID NO: 811335 - DNA, 120 bp, Artificial Sequence
  ENSG00000228863_8 (sequence is synthesized)
ggaacaccactcttggattatttagccccgctcttctacaagaattgcataccccaacccctggagcccctccccatatccatgtttctgccctataatctgatcctttcaccaaaaatg

SEQ ID NO: 811336 - DNA, 120 bp, Artificial Sequence
  ENSG00000228863_9 (sequence is synthesized)
tttagatcaggtacacacacctgaactaaattgggactatcagtttctctctctttaaattgccctgagaattgaaactcagaggagcaaaagtctaagttttgagagataacatgtgta

SEQ ID NO: 811337 - DNA, 120 bp, Artificial Sequence
  ENSG00000228863_10 (sequence is synthesized)
aaatggcaggaatccaaatccataggcacagtccacagattcctgaagctaggggttctggcccgaacctggttttcaatcttctccccttaagcccttcctagctcttttaaactcttt

SEQ ID NO: 811338 - DNA, 120 bp, Artificial Sequence
  ENSG00000228863_11 (sequence is synthesized)
gaattgctttaaatagccctagtttcttaaactaaattctccttttttggtaaaggtacattgaattagtttctgttatttgctatcaaaagaatcttacctaatatgggcacagagatg

SEQ ID NO: 811339 - DNA, 61 bp, Artificial Sequence
  ENSG00000228863_12 (sequence is synthesized)
ttcaaagtacttagattttctggaatcccattctacaatcttctggtcgaaagtataaaac

SEQ ID NO: 811340 - DNA, 120 bp, Artificial Sequence
  ENSG00000228863_13 (sequence is synthesized)
caatgatgtatcaataaaacctcttgctgctggagatctgcttacctggtggccagggtggcaagacaagtgaagcctgactatgcctgcagcatccactgtggaaactactacatcttt

SEQ ID NO: 811341 - DNA, 120 bp, Artificial Sequence
  ENSG00000228863_14 (sequence is synthesized)
agcgtggtcattgaggacaagtcgacaagagatcccgagtacatctacagtcagccttacggtaagcttgtgcactcggaagaagctagggtgacaatggggcaaactaaaactaaaagt

SEQ ID NO: 811342 - DNA, 120 bp, Artificial Sequence
  ENSG00000228863_15 (sequence is synthesized)
agaagctagggtgacaatggggcaaactaaaactaaaagtaaatatgcctcttatcttagcttcattaaaattcttttaaaaagagggggagttagagtatccaccaaaaatctaatcaa

SEQ ID NO: 811343 - DNA, 120 bp, Artificial Sequence
  ENSG00000228863_16 (sequence is synthesized)
ggagttagagtatccaccaaaaatctaatcaagctatttcaaacaacagaacaattttgcccatggtttccagaacaaggaaatttagatctagaagattggaaaagaattggtaaggaa

SEQ ID NO: 811344 - DNA, 120 bp, Artificial Sequence
  ENSG00000228863_17 (sequence is synthesized)
ggtagtacttggccaaacccataacagtgctgcttggttcccaatgtggatgatgaagaagaaggagaagaacaagatgatgatgatgatgaagaagaggaaggattataagatattgat

SEQ ID NO: 811345 - DNA, 120 bp, Artificial Sequence
  ENSG00000228863_18 (sequence is synthesized)
gaagaaggggatgaggatgaaggcgaagaagaggaagatgatgatgacgttgaggaaggagaggaggatgaaggagaagatgactaacagaacactgatgttctgaacaatttttttttt

SEQ ID NO: 811346 - DNA, 120 bp, Artificial Sequence
  ENSG00000228863_19 (sequence is synthesized)
aattttctccagtccctgggagcaagttgcagtcttttttcttttttcccctcttgtgctcagtcgcgctgttcttgaggtctcttttctctacaccatggttttcaacttatttggggg

SEQ ID NO: 811347 - DNA, 120 bp, Artificial Sequence
  ENSG00000228863_20 (sequence is synthesized)
gaaatgccttgagcataatacaatgggaaaatattctctacccctttctcttcagaattcattcttatctcttcctgtctgaacaaaaactgtatggaatcaacaccaccaagttctgtg

SEQ ID NO: 811348 - DNA, 120 bp, Artificial Sequence
  ENSG00000228863_21 (sequence is synthesized)
ggagaaaagaaaaaccttctccctttgctctgctggaagctggagagtgccagacccctgtgtagcagtgcatagaattctagcttcttttctcctttctctgtatattgggttcagaga

SEQ ID NO: 811349 - DNA, 120 bp, Artificial Sequence
  ENSG00000228863_22 (sequence is synthesized)
atacatctaactgttttttgaacagtctgaacttggtatgttgggagctaacatcaaagaactattttcccccattcacatgaggactgtgtcaaatctgcctcctatcacttaaggagg

SEQ ID NO: 811350 - DNA, 120 bp, Artificial Sequence
  ENSG00000228863_23 (sequence is synthesized)
ttttgggaaaatcattcactttcgtttctatcacttccagtaacttaacagtacggctcagatgtaaaactccccttttacttgttcctgtcacttcagcccaagcttgtctcatgatct

SEQ ID NO: 811351 - DNA, 120 bp, Artificial Sequence
  ENSG00000228863_24 (sequence is synthesized)
aaaaatctgtaatagggaagagggtgtggtctgatctttccccttctattttacctcatctagttccagattctcaaatcatatagggccaggaggagaggaccaaattatgtcttagtt

SEQ ID NO: 811352 - DNA, 120 bp, Artificial Sequence
  ENSG00000228863_25 (sequence is synthesized)
acctggctgctggtggttgtctctgttttttgtagagcacaggtgtaacggctttcagggtgggggtggggaactctccactgagtagtgtgctgatgtgggagatctctggcttggcct

SEQ ID NO: 811353 - DNA, 120 bp, Artificial Sequence
  ENSG00000228863_26 (sequence is synthesized)
cttcatttgcatgttttgacattttaaaaaatgttttcactttccttatctactttgactctaataacatcctgaaaggtaagtagaattattctcataatatgatgaagaacccaaggc

SEQ ID NO: 811354 - DNA, 120 bp, Artificial Sequence
  ENSG00000287027_0 (sequence is synthesized)
gctatcagcagacatatgcagagtgtagacgaagtcttagcaagaggatcgggggtcctacagagagaaaggcttgaggagcttcatagaagtctctttaaactaagctttgaaagacga

SEQ ID NO: 811355 - DNA, 120 bp, Artificial Sequence
  ENSG00000287027_1 (sequence is synthesized)
cttggggattcaccgggccagatgggatgggagggagggaacgggcaatcgagctgctgggcggaggtgagcagatggaccggatgcaaagcatatgacacaccagggaaacttggagaa

SEQ ID NO: 811356 - DNA, 120 bp, Artificial Sequence
  ENSG00000287027_2 (sequence is synthesized)
ggaccatatggcaagaaattgagggaagtcttcaaacacagtacagtgaaaaattaaagccttcagtccaacagccatcaggaactgaatcctgccaacaaccacatgagtaagagaatc

SEQ ID NO: 811357 - DNA, 120 bp, Artificial Sequence
  ENSG00000287027_3 (sequence is synthesized)
tgtgatccccaggaatcatgatataataaatgtctgttgttttaagttgttaccttttgaggtaatgttatgcaacaatagacaacaaatacactaaattcacttattagttctaattat

SEQ ID NO: 811358 - DNA, 120 bp, Artificial Sequence
  ENSG00000287027_4 (sequence is synthesized)
tatttcatcgaccctaagattttctacctatacaattatgttgtctacaaataaaaaccagttttactgtttacttcccatccgtattccttttcatttgcttgttttgttttattgcac

SEQ ID NO: 811359 - DNA, 120 bp, Artificial Sequence
  ENSG00000287027_5 (sequence is synthesized)
tgactaggaacaggaatacaatgttgaataaaagtaatgatattgcctatcctttccttgttctccttaggaagaatgtgttcaatttttcagcaaagagtataatgttagctgtagttc

SEQ ID NO: 811360 - DNA, 120 bp, Artificial Sequence
  ENSG00000245534_0 (sequence is synthesized)
gacggctgctcccctcctttcctcccgccacaagcgctcgctgtggttctggcagcgaagtgcgagactgggctcgccaggcggaagtggttggagactgcgtgttttcctagaaagtcc

SEQ ID NO: 811361 - DNA, 120 bp, Artificial Sequence
  ENSG00000245534_1 (sequence is synthesized)
tcgaccttcgtcggggagaggaggggagtgataaattggaaggcggacaagcgacaagtgcggtactggaaagacccaaacatacttggttgtgacctcaggactcaataaaataaacag

SEQ ID NO: 811362 - DNA, 120 bp, Artificial Sequence
  ENSG00000245534_2 (sequence is synthesized)
ctggaaataagcagactagtgtaagagtgaattgaaaagaaaacccaaggtcacatctcccaagaagcagtaatgttccagcaataagaaaaggacagttttttgtcttttgcatggtga

SEQ ID NO: 811363 - DNA, 120 bp, Artificial Sequence
  ENSG00000245534_3 (sequence is synthesized)
atcagaacattttgcctactcactgtgaagacaataaggatgaagacctttatgacaatccacttccacttaatgaataatgaggaaactggggcacagagaaattaagtgacttgtcca

SEQ ID NO: 811364 - DNA, 120 bp, Artificial Sequence
  ENSG00000245534_4 (sequence is synthesized)
ggaggacagggccaataaccggtggaaccataagaaaaaaatccagtaacagctttgaaaaaggaagataacaatgacctgtgtgtacagcgtccaagggaaccattagcagtggagctc

SEQ ID NO: 811365 - DNA, 120 bp, Artificial Sequence
  ENSG00000245534_5 (sequence is synthesized)
cccaggctcctgggacgaccaagcacatggtccaaccaaccatcttctgacaaggtaggggtgggcagtggaaggcaaaaagaatggctgcacttgtgtttctgaaggtcagaccaagaa

SEQ ID NO: 811366 - DNA, 120 bp, Artificial Sequence
  ENSG00000245534_6 (sequence is synthesized)
tgcaaatggtcacaacaatcaagactatatccatagatgtcccagaaataatatctgactatacagagcagcattaccaagccaccaagaagtctgcctagtaatgacaatgataacaac

SEQ ID NO: 811367 - DNA, 120 bp, Artificial Sequence
  ENSG00000245534_7 (sequence is synthesized)
agctaacacttatcaacagagcagaggaacagagccacagataactgaaaaccactttggcactgaggaggtatgcagacaagatctggaagggaatctagaaaaatggcaactttggaa

SEQ ID NO: 811368 - DNA, 120 bp, Artificial Sequence
  ENSG00000245534_8 (sequence is synthesized)
taatagataccttttgttttcttatcgcttttatttttgtcatgataaatattaagagtaaaaagaaaattcacattgtttgtgccatggtactcagtcaacttaggttttactcaatag

SEQ ID NO: 811369 - DNA, 120 bp, Artificial Sequence
  ENSG00000245534_9 (sequence is synthesized)
catgttgttaattaatcttccaaattgttggggtatttcatatgaagtagcccctacccccaccttgtcctttccccagactccattcctagataatcacttctgtcaattcctagataa

SEQ ID NO: 811370 - DNA, 120 bp, Artificial Sequence
  ENSG00000245534_10 (sequence is synthesized)
tttagcagtggctataaatgaccagtgggccaaggattttgagatcgtgagagacttctccgggaatgttgtcattcatttcactccagtgtggctcttttcctccatctgcgctcactt

SEQ ID NO: 811371 - DNA, 120 bp, Artificial Sequence
  ENSG00000245534_11 (sequence is synthesized)
ttctaggagaactatggccactatggagaatatgaaaacattgctgaaggaggtgaaagccatttcagaagaagagttatatattagcttttggcagtgacagcgttatgggcacggaca

SEQ ID NO: 811372 - DNA, 120 bp, Artificial Sequence
  ENSG00000245534_12 (sequence is synthesized)
ttcagcctttccagttgactgctttgaaggggcaatgttcacgtggaagtatacctcctagtacgtttgctaaaataaaatcagcttcattacctaataacataaatgactttgggagaa

SEQ ID NO: 811373 - DNA, 120 bp, Artificial Sequence
  ENSG00000245534_13 (sequence is synthesized)
aggattacccttatttggaagtctcagttttgaggatttggggaaagcaggcacgcaagcagacacaccttattctctacagcatcatttatacctcaactaagtcagctgaacaaatgc

SEQ ID NO: 811374 - DNA, 120 bp, Artificial Sequence
  ENSG00000245534_14 (sequence is synthesized)
ctgctgaaaagttctgggagtggcatagctaagaaccagaaaggcgatctttcttttggattaagtcaacagagtcatacccacaaggagaactatcaaatatcagatgcgagaggtgaa

SEQ ID NO: 811375 - DNA, 120 bp, Artificial Sequence
  ENSG00000245532_0 (sequence is synthesized)
ggagttagcgacagggagggatgcgcgcctgggtgtagttgtgggggaggaagtggctagctcagggcttcaggggacagacagggagagatgactgagttagatgagacgagggggcgg

SEQ ID NO: 811376 - DNA, 120 bp, Artificial Sequence
  ENSG00000245532_1 (sequence is synthesized)
gctgggggtgcgagaaggaagcttggcaaggagactaggtctagggggaccacagtggggcaggctgcatggaaaatatccgcagggtcccccaggcagaacagccacgctccaggccag

SEQ ID NO: 811377 - DNA, 120 bp, Artificial Sequence
  ENSG00000245532_2 (sequence is synthesized)
gctgtccctactgcctggtggagggggaacttgacctctgggagggcgccgctcttgcatagctgagcgagcccgggtgcgctggtctgtgtggaaggaggaaggcagggagaggtagaa

SEQ ID NO: 811378 - DNA, 120 bp, Artificial Sequence
  ENSG00000245532_3 (sequence is synthesized)
ggggtggaggagtcaggaggaataggccgcagcagccctggaaatgatcaggaaggcaggcagtgggtgcagggctgcaggagggccgggagggctaatcttcaacttgtccatgccagc

SEQ ID NO: 811379 - DNA, 120 bp, Artificial Sequence
  ENSG00000245532_4 (sequence is synthesized)
agcccctttttttccagaccaagggctgtgaacccgcctggggatgaggcctggtcttgtggaactgaacttagctcgacggggctgaccgctctggcccagggtggtatgtaattttcg

SEQ ID NO: 811380 - DNA, 120 bp, Artificial Sequence
  ENSG00000245532_5 (sequence is synthesized)
ctcggcctgggacggggcccaggccgggcccagcctggtggagcgtccaggtctgggtgcgaagccaggcccctgggcggaggtgaggggtggtctgaggagtgatgtggagttaaggcg

SEQ ID NO: 811381 - DNA, 120 bp, Artificial Sequence
  ENSG00000245532_6 (sequence is synthesized)
ccatcctcaccggtgactggtgcggcacctagcatgtttgacaggcggggactgcgaggcacgctgctcgggtgttggggacaacattgaccaacgctttattttccaggtggcagtgct

SEQ ID NO: 811382 - DNA, 120 bp, Artificial Sequence
  ENSG00000245532_7 (sequence is synthesized)
ccttttggacttttctctaggtttggcgctaaactcttcttgtgagctcactccaccccttcttcctccctttaacttatccattcacttaaaacattacctggtcatctggtaagcccg

SEQ ID NO: 811383 - DNA, 120 bp, Artificial Sequence
  ENSG00000245532_8 (sequence is synthesized)
ggacagtaagccgagtggctgttggagtcggtattgttggtaatggtggaggaagagaggccttcccgctgaggctggggtggggcggatcggtgttgcttgcctgcagagagggtgggg

SEQ ID NO: 811384 - DNA, 120 bp, Artificial Sequence
  ENSG00000245532_9 (sequence is synthesized)
agtgaatgtgcacccttgggtgggcctgcagccatccagctgaaagttacaaaaatgcttcatggaccgtggtttgttactatagtgttcctcatggcgagcagatggaaccgggagaca

SEQ ID NO: 811385 - DNA, 120 bp, Artificial Sequence
  ENSG00000245532_10 (sequence is synthesized)
tggagtccctggccagtgtgagtcctagcattgcaggaggggagaccctggaggagagagcccgcctcaattgatgcctgcagattgaatttccagaggcttaggaggaggaagttctcc

SEQ ID NO: 811386 - DNA, 120 bp, Artificial Sequence
  ENSG00000245532_11 (sequence is synthesized)
aatgttctgtttccaggccttgctcaggaagccctgtattcaggaggctaccatttaaagtttgcagatgagcttatggggggcaatcttaaaaagtccacagcagatgcatccggctcg

SEQ ID NO: 811387 - DNA, 120 bp, Artificial Sequence
  ENSG00000245532_12 (sequence is synthesized)
aggggccatcagctttgaataaatgcttgttccagagcccatgaatgccagcaggcacccctcctttcctggggtaaaggttttcagatgctgcatcttctaaattgagcctccggtcat

SEQ ID NO: 811388 - DNA, 120 bp, Artificial Sequence
  ENSG00000245532_13 (sequence is synthesized)
actagttttgtgcttggaaccttgcttcaagaagatccctaagctgtagaacattttaacgttgatgccacaacgcagattgatgccttgtagatggagcttgcagatggagccccgtga

SEQ ID NO: 811389 - DNA, 120 bp, Artificial Sequence
  ENSG00000245532_14 (sequence is synthesized)
cctctcacctacccacctgtttgcctgccttcttgtgcgtttctcggagaagttcttagcctgatgaaataacttggggcgttgaagagctgtttaattttaaatgccttagactgggga

SEQ ID NO: 811390 - DNA, 120 bp, Artificial Sequence
  ENSG00000245532_15 (sequence is synthesized)
tatattagaggaagcagattgtcaaattaagggtgtcattgtgttgtgctaaacgctgggagggtacaagttggtcattcctaaatctgtgtgtgagaaatggcaggtctagtttgggca

SEQ ID NO: 811391 - DNA, 120 bp, Artificial Sequence
  ENSG00000245532_16 (sequence is synthesized)
ttgtgattgcattgcagattactaggagaagggaatggtgggtacaccggtagtgctcttttgttcttgcttcgtttttttaaacttgaactttacttcgttagatttcataatactttc

SEQ ID NO: 811392 - DNA, 120 bp, Artificial Sequence
  ENSG00000245532_17 (sequence is synthesized)
ttggcattctagtaagaggaccctgaggtgggagttgtgggggacggggagaaggggacagcttggcaccggtcccgtgggcgttgcagtgtgggggatgggggtatgcagcttggcact

SEQ ID NO: 811393 - DNA, 120 bp, Artificial Sequence
  ENSG00000245532_18 (sequence is synthesized)
ggtactgggagggatgagggtgaagaaggggagagggttggttagagatacagtgtgggtggtgggggtggtaggaaatgcaggttgaagggaattctctggggctttggggaatttagt

SEQ ID NO: 811394 - DNA, 120 bp, Artificial Sequence
  ENSG00000245532_19 (sequence is synthesized)
gcgtgggtgagccaagaaaatactaattaataatagtaagttgttagtgttggttaagttgttgcttggaagtgagaagttgcttagaaactttccaaagtgcttagaactttaagtgca

SEQ ID NO: 811395 - DNA, 120 bp, Artificial Sequence
  ENSG00000245532_20 (sequence is synthesized)
aacagacaaactaacaaacaaaaattgttttgctttgctacaaggtggggaagactgaagaagtgttaactgaaaacaggtgacacagagtcaccagttttccgagaaccaaagggaggg

SEQ ID NO: 811396 - DNA, 120 bp, Artificial Sequence
  ENSG00000245532_21 (sequence is synthesized)
gtgtgtgatgccatctcacaggcaggggaaatgtctttaccagcttcctcctggtggccaagacagcctgtttcagagggttgttttgtttggggtgtgggtgttatcaagtgaattagt

SEQ ID NO: 811397 - DNA, 120 bp, Artificial Sequence
  ENSG00000245532_22 (sequence is synthesized)
cacttgaaagatgggcgtcagacttgcatacgcagcagatcagcatccttcgctgccccttagcaacttaggtggttgatttgaaactgtgaaggtgtgattttttcaggagctggaagt

SEQ ID NO: 811398 - DNA, 120 bp, Artificial Sequence
  ENSG00000245532_23 (sequence is synthesized)
cttagaaaagccttgtaaatgcctatattgtgggcttttaacgtatttaagggaccacttaagacgagattagatgggctcttctggatttgttcctcatttgtcacaggtgtcttgtga

SEQ ID NO: 811399 - DNA, 120 bp, Artificial Sequence
  ENSG00000245532_24 (sequence is synthesized)
ttgaaaatcatgagcgaagtgaaattgcattgaatttcaagggaatttagtatgtaaatcgtgccttagaaacacatctgttgtcttttctgtgtttggtcgatattaataatggcaaaa

SEQ ID NO: 811400 - DNA, 120 bp, Artificial Sequence
  ENSG00000245532_25 (sequence is synthesized)
tttttgcctatctagtatcttcaaattgtagtctttgtaacaaccaaataaccttttgtggtcactgtaaaattaatatttggtagacagaatccatgtacctttgctaaggttagaatg

SEQ ID NO: 811401 - DNA, 120 bp, Artificial Sequence
  ENSG00000245532_26 (sequence is synthesized)
aataatttattgtatttttaatttgaatgtttgtgctttttaaatgagccaagactagaggggaaactatcacctaaaatcagtttggaaaacaagacctaaaaagggaaggggatgggg

SEQ ID NO: 811402 - DNA, 120 bp, Artificial Sequence
  ENSG00000245532_27 (sequence is synthesized)
attgtggggagagagtgggcgaggtgcctttactacatgtgtgatctgaaaaccctgcttggttctgagctgcgtctattgaattggtaaagtaataccaatggctttttatcatttcct

SEQ ID NO: 811403 - DNA, 120 bp, Artificial Sequence
  ENSG00000245532_28 (sequence is synthesized)
tcttccctttaagtttcacttgaaattttaaaaatcatggttatttttatcgttgggatctttctgtcttctgggttccattttttaaatgtttaaaaatatgttgacatggtagttcag

SEQ ID NO: 811404 - DNA, 120 bp, Artificial Sequence
  ENSG00000245532_29 (sequence is synthesized)
ttcttaaccaatgacttggggatgatgcaaacaattactgtcgttgggatttagagtgtattagtcacgcatgtatggggaagtagtctcgggtatgctgttgtgaaattgaaactgtaa

SEQ ID NO: 811405 - DNA, 120 bp, Artificial Sequence
  ENSG00000245532_30 (sequence is synthesized)
aagtagatggttgaaagtactggtatgttgctctgtatggtaagaactaattctgttacgtcatgtacataattactaatcacttttcttcccctttacagcacaaataaagtttgagtt

SEQ ID NO: 811406 - DNA, 120 bp, Artificial Sequence
  ENSG00000245532_31 (sequence is synthesized)
ctaaactcattagaattgttgtattgctatgttacatttctcgacccctatcacattgccttcataacgactttggatgtatcttcatattgtagatttaggtctagatttgctagctcc

SEQ ID NO: 811407 - DNA, 120 bp, Artificial Sequence
  ENSG00000245532_32 (sequence is synthesized)
aagtaattaaggccatgtaggagagcatggtaaccacagatagaactggtattatcccaagtggtctgcagactgctgagtggggatgggatctgctctctgttgagagttggtaatcat

SEQ ID NO: 811408 - DNA, 120 bp, Artificial Sequence
  ENSG00000245532_33 (sequence is synthesized)
tggtttgaaatgtgatgaaaccactcaagccaatgaaggtgggtgtgtaggtggggagtactttgccataatattttaaaacattacctggttagagttctaagtggtacttatttttgt

SEQ ID NO: 811409 - DNA, 120 bp, Artificial Sequence
  ENSG00000245532_34 (sequence is synthesized)
ttggttaggggaaagcctgaataaaaacagaaatggacacataatatgcatattccatagtctttgggaggctggaatgtgcctgggatttgggtctaagtgtatgcgtaattcttacct

SEQ ID NO: 811410 - DNA, 120 bp, Artificial Sequence
  ENSG00000245532_35 (sequence is synthesized)
cactaaagaatttgccttgtttttttccttttggtgagtgactaaaacgtctgggcttccctgtgtgcgtgctacagtaagcaagcagaggctgtgcaaaggtgtgagcaggatcacgtg

SEQ ID NO: 811411 - DNA, 120 bp, Artificial Sequence
  ENSG00000245532_36 (sequence is synthesized)
gaatctggaggatacatcttggcttgcaaactgcctctgtctcctgggtgggactgttctgtccttgcactgctgttctgtgttacctcttggggtgtaaggttttgcttacaggagaca

SEQ ID NO: 811412 - DNA, 120 bp, Artificial Sequence
  ENSG00000245532_37 (sequence is synthesized)
aactttgggcgtagaatggaagccactgccagcctctgtgctgagaaggaaggtgcttgtttcaaagggagcagcaagggaggcttgttctactcacctgggcctgtttgcctgagaagg

SEQ ID NO: 811413 - DNA, 120 bp, Artificial Sequence
  ENSG00000245532_38 (sequence is synthesized)
ggagataagggctgaactgggactagccagggggaccaacacaaatggtgggggatcatgacctgaaggattctttccttcccatgagctgcagggctggttgccgtccttgcaactgtg

SEQ ID NO: 811414 - DNA, 120 bp, Artificial Sequence
  ENSG00000245532_39 (sequence is synthesized)
tcttatttgcctgtgccgttatatcttggtgacccctccacgtgtacactactgacaaacgggtggagtgctggggagaagtcactgtgccgcccacctagtaaaccttctgtctgtgct

SEQ ID NO: 811415 - DNA, 120 bp, Artificial Sequence
  ENSG00000245532_40 (sequence is synthesized)
catggcatctccaagatggggcactgctgtgtgcagaatccagggtcctctttctgcttgcaactcctttccctggatgccccagaaacaatccaggcctcctttcctatcttacccctt

SEQ ID NO: 811416 - DNA, 120 bp, Artificial Sequence
  ENSG00000245532_41 (sequence is synthesized)
tgctttgctttttaccccagcacctctataaccgccttctcttcttttcagaactccttgtttctcgtcctgttttttatgattacaaaactcttgcttccaccctggaagataactgct

SEQ ID NO: 811417 - DNA, 120 bp, Artificial Sequence
  ENSG00000245532_42 (sequence is synthesized)
atagatgcctgtatgtaaatggtgctgtctccagcaactggcatgctgaagaagaattgattcacggggtataaatgttggggattggaagtggggatgaaatggcacttgttgatacag

SEQ ID NO: 811418 - DNA, 120 bp, Artificial Sequence
  ENSG00000245532_43 (sequence is synthesized)
gagcagagaggtgaggccgactgctgaagacagctcgccaccctccttgcctccactccaatccaggggctggggccacattctttgccttcatttatcctcagatcaggtgagatcgac

SEQ ID NO: 811419 - DNA, 120 bp, Artificial Sequence
  ENSG00000245532_44 (sequence is synthesized)
aggaggtgttgatggcagtgccagcaattattgctaatccgtttgcatccttatgcatagatctgaattcagactttgtgaatttccagaggtgtgggtaatataatagaattcagtgag

SEQ ID NO: 811420 - DNA, 120 bp, Artificial Sequence
  ENSG00000245532_45 (sequence is synthesized)
tgggcatggctgatcttgtgcaaattaaaagttatggggcataagaatagcaaaagttgaacttcttttaaaaaggaaagtaccctgagagccagtattggttgaggctcttcagtatgc

SEQ ID NO: 811421 - DNA, 120 bp, Artificial Sequence
  ENSG00000245532_46 (sequence is synthesized)
ccaggttggcagcactgagaaccgcaggaacggcctgttgttacaaaaaggagattgactcagctgcccttggtgcatctgactgactatgactgctgagagattccaaggacccttaat

SEQ ID NO: 811422 - DNA, 120 bp, Artificial Sequence
  ENSG00000245532_47 (sequence is synthesized)
gccagggctaacctctccatgtgcagtgagacctctggaggaagtgtcatcctctggctttgtgtggtactcattatggtgcagtgcgggcatgaaatgaagacacccaaataggcttac

SEQ ID NO: 811423 - DNA, 120 bp, Artificial Sequence
  ENSG00000245532_48 (sequence is synthesized)
agatacgatatgttttaaatgttcgtatttaacaaaaacatactgacactgtttggaaatggcaacaggaagatagcaaaatgaatactaacattacgaaaagatgaacaggtacatgtt

SEQ ID NO: 811424 - DNA, 120 bp, Artificial Sequence
  ENSG00000245532_49 (sequence is synthesized)
ccaaggcaggtggctgtgaacttcctctgagtgaaggcatcccctccagcacctttcagcctgctagttaggacgacccgccgccaccctccaggacctccagccctgcactgcctttcc

SEQ ID NO: 811425 - DNA, 120 bp, Artificial Sequence
  ENSG00000245532_50 (sequence is synthesized)
tctcttttaaataattcttcattgagttctaatatgtaaaaaaaaaaagtttactgtaaagtttgcaaataaggaaattttttttaaaagtcctcagtaatcttaccagtaacaattgtt

SEQ ID NO: 811426 - DNA, 120 bp, Artificial Sequence
  ENSG00000245532_51 (sequence is synthesized)
atgggcacatttgcttttggaagatttcttttgtatgcatgggataagtacatttttaaacaaaaatgggattatgccataaattctattttgtgactttaatatatagtgaacaccttt

SEQ ID NO: 811427 - DNA, 120 bp, Artificial Sequence
  ENSG00000245532_52 (sequence is synthesized)
tttaatgatgacaggatgttcccttgcatggctgtatcaatttaaacaatcttgtttcaatgggcatacagggtattttctagtttttttttcctcttagaaaataatacttgcgatgac

SEQ ID NO: 811428 - DNA, 120 bp, Artificial Sequence
  ENSG00000245532_53 (sequence is synthesized)
tttccttgtagctcagactttttcacgtctgttgttatctctttgggaatgctgaatacatacatttcgagaaggaaatgactgttaaactcttaagacttcaggttcatattgctaaac

SEQ ID NO: 811429 - DNA, 120 bp, Artificial Sequence
  ENSG00000245532_54 (sequence is synthesized)
tgcccagcagggagggattttttcaattagtgttctcactggtgaggcaaacctgatgccttcccctcttcctcagaaccggctttatcacattgaaaacctttgctcctccgacggatc

SEQ ID NO: 811430 - DNA, 120 bp, Artificial Sequence
  ENSG00000245532_55 (sequence is synthesized)
gacggatcgagtctgctttccctctggatgtgagcattgctttgtctgctggtgactgaacatctctaccttgtgtcaattggccatttgtggtgtgtgtgtgtgtgcgtgtgtgtgtgt

SEQ ID NO: 811431 - DNA, 120 bp, Artificial Sequence
  ENSG00000245532_56 (sequence is synthesized)
gtatgattttctaattcctagtcatttttctattgattgttttgcaaaagccatttacatcttaaggatattgataatcttttgttatatttgatgcaaatatttttttccagtttatag

SEQ ID NO: 811432 - DNA, 120 bp, Artificial Sequence
  ENSG00000245532_57 (sequence is synthesized)
gttgccttttaattttgtgtttcaggtagataaaagttaaacgattttcttaggttagtttatcactgtggtttctgaacttgttatgtgtagatcttttccaccccaagagtacataaa

SEQ ID NO: 811433 - DNA, 120 bp, Artificial Sequence
  ENSG00000245532_58 (sequence is synthesized)
tattaatccatactttcttatggaacttgtatggtttcgttttttacatttaaaccttcttccccgtggtgtgtgttgtggaatctgtgtttgtgtgaggaggggcatggtgctctcaga

SEQ ID NO: 811434 - DNA, 120 bp, Artificial Sequence
  ENSG00000245532_59 (sequence is synthesized)
acccacctcctgtggccagagagccctgtcctgtgagggtggttgtcacagtggcagggttcaattcagaagaccttgagggcaggctgatgtttcctgaatgggcccctggttgttgct

SEQ ID NO: 811435 - DNA, 120 bp, Artificial Sequence
  ENSG00000245532_60 (sequence is synthesized)
tgtccctgactctccatttccccatctgagtggatttggacctaatagggcactggagctggttcgaatcctgactggactacttggcaactttatgtctgggagcaagttacttaacct

SEQ ID NO: 811436 - DNA, 120 bp, Artificial Sequence
  ENSG00000245532_61 (sequence is synthesized)
ccccaagcctgtgtctgtgaaatgcgggtaaatgaatgtagatgtttggcagcagctactccttgttgagctctcacagtgaactctcctgcctctgccctccttccccgcctcccctgg

SEQ ID NO: 811437 - DNA, 120 bp, Artificial Sequence
  ENSG00000245532_62 (sequence is synthesized)
tgcctagcgtcaggtctagccacttcctcctgggcccctctcccttttctgtggctggctgcctgcccgcctggcgctggacctttcatgtaacgggaatcagcatgtatattctggtct

SEQ ID NO: 811438 - DNA, 120 bp, Artificial Sequence
  ENSG00000245532_63 (sequence is synthesized)
ggtctgtttctacacttaattttgtttccagtagtatttccctgtaccggcagagttcacaaacacatttgaagaggctttttctcaggattcttaaccttcccaaaggaagtcccatgg

SEQ ID NO: 811439 - DNA, 120 bp, Artificial Sequence
  ENSG00000245532_64 (sequence is synthesized)
atgggtttctagaagtctataaatgctctgaaattgtatttttctgtggaaagcataactttcatctgcttgttcgtgctcaaaaaagatcatgaatgaatgattgcatgattttatgcc

SEQ ID NO: 811440 - DNA, 120 bp, Artificial Sequence
  ENSG00000245532_65 (sequence is synthesized)
attgtgcttatactaaaggatatgtagcccatctcttgagctgttaaactgttttgactactttaaatcgtgcagctgtgagcatctctgtaaatttagtgtacacatgtatcccctgga

SEQ ID NO: 811441 - DNA, 120 bp, Artificial Sequence
  ENSG00000245532_66 (sequence is synthesized)
gtggcattgcctcggcagtgagcacttatggttttataactctcttcacagactcaaatgactccagaaagctacacttcctgttgtgagtatatgatatccatttccctacatagccac

SEQ ID NO: 811442 - DNA, 120 bp, Artificial Sequence
  ENSG00000245532_67 (sequence is synthesized)
taacatcaggtttttacaattttatttatttcttgctactttaagaaatttttgtggtgaaatacatataatagaagttgactatctgaatcatttttaagtatacattcagtagtgtta

SEQ ID NO: 811443 - DNA, 120 bp, Artificial Sequence
  ENSG00000245532_68 (sequence is synthesized)
agtatgtcgccattgttgtacaaccaatctccagaactttttcatcttgcaaaacaaactctgtacccattaaataacattaaacattccattccctccagcctcagcaaccccattcta

SEQ ID NO: 811444 - DNA, 120 bp, Artificial Sequence
  ENSG00000245532_69 (sequence is synthesized)
ctttctgtttctgtgagtttgactattccaagcacttcatatcagttaaatcatgaagtatttgtctgtctgtgactggcttatttctctgagcacagtgtcctcgagatgcgtctatgt

SEQ ID NO: 811445 - DNA, 120 bp, Artificial Sequence
  ENSG00000245532_70 (sequence is synthesized)
tgtagcatatgtcagaatttccttcctttttaaaagatccaaataatattcttattttatatcttttttttatccattcatccattagtggacacttgggttgcttttggctattgtaaa

SEQ ID NO: 811446 - DNA, 120 bp, Artificial Sequence
  ENSG00000245532_71 (sequence is synthesized)
taatggtgctatgtacaaatatctatattattgtatttacaagtataatgctgtaatgtacacacatctttttgagatcctaccttcagttcttttgagtatatagccagaagtggtatt

SEQ ID NO: 811447 - DNA, 120 bp, Artificial Sequence
  ENSG00000245532_72 (sequence is synthesized)
actaaatcttacgatatttctatttttaatttattgaggaaccactgtagtttttcatagcaactgcaccattttacgttctcaccaagagtgcacaagggttccgaggttcccacatcc

SEQ ID NO: 811448 - DNA, 120 bp, Artificial Sequence
  ENSG00000245532_73 (sequence is synthesized)
aagggttccgaggttcccacatcctccccaacacttgttattttctgctttttttagattgcagccatcatagtgggtgtgaggtgacatttcattgtggttttgatttgcatttcccta

SEQ ID NO: 811449 - DNA, 120 bp, Artificial Sequence
  ENSG00000245532_74 (sequence is synthesized)
ttcatatgcttactggtcatttgtatgttgtctttggaaaaatgtctattcaagtcctttgactattttaaaaattgggttattagagttatcgttgttgttgacttgtaggagtttctt

SEQ ID NO: 811450 - DNA, 120 bp, Artificial Sequence
  ENSG00000245532_75 (sequence is synthesized)
tctatattctggatattaatcccctatcagatatatgatttgcaaatatcttctcttattccataaggttactttttcactttgttgattgtgttctttgatgtatagaagtttttagtt

SEQ ID NO: 811451 - DNA, 120 bp, Artificial Sequence
  ENSG00000245532_76 (sequence is synthesized)
gtgcttttggtgtcatatccaagaaatccttgccaaatccaacgttataaggtacttttaaggtattttagttgtcttagtctatatttctgtactcacctttctttatccactcatcag

SEQ ID NO: 811452 - DNA, 120 bp, Artificial Sequence
  ENSG00000245532_77 (sequence is synthesized)
tctatatttctgtactcacctttctttatccactcatcagttgatgggcatgtaggttggttccatatctttgcaattctgaattgtgctatgatcaggtgtctttttagtataatgatt

SEQ ID NO: 811453 - DNA, 120 bp, Artificial Sequence
  ENSG00000245532_78 (sequence is synthesized)
gtagtgggattgctggatcgaatggtttttataattttctattttaccacagtttctctctgcatttttcctctttgaccactaaccatgtgaaattctcatattgacctttataatgat

SEQ ID NO: 811454 - DNA, 120 bp, Artificial Sequence
  ENSG00000245532_79 (sequence is synthesized)
tctcatattgacctttataatgatcatgaactcttagtatcattgggaaggccacatttgccacttatgattgtaaaccttatcctccatttttcctgttattgttggtgcaaaaagcac

SEQ ID NO: 811455 - DNA, 120 bp, Artificial Sequence
  ENSG00000245532_80 (sequence is synthesized)
ctattataccaggactttaaaaatcagtctgataagtctttgataagtctaataataataactgataagtccattgaatttgcttctgattactttttctttagtagctaaacatgtatg

SEQ ID NO: 811456 - DNA, 120 bp, Artificial Sequence
  ENSG00000245532_81 (sequence is synthesized)
tactcctatgattacaatgaacactcctctccatttaaattaattatttacattgatgaaatagcaaaatgttaatgactaaatactgtcttggttttttcgttccaggtcagtcaatat

SEQ ID NO: 811457 - DNA, 120 bp, Artificial Sequence
  ENSG00000245532_82 (sequence is synthesized)
gtgtgtgtgtgtatttttttttttttaatttcaatggcttttggggtacaaatggcttttggtcatatagatgaattctacagtagtgaagtctgagattttactgcaccggtcacctga

SEQ ID NO: 811458 - DNA, 120 bp, Artificial Sequence
  ENSG00000245532_83 (sequence is synthesized)
agtgaagtctgagattttactgcaccggtcacctgagtagtgtacattgtacccaatatgtggttttttataccttgcccccctcttaccctccccactttgagtctctagtgtccatta

SEQ ID NO: 811459 - DNA, 120 bp, Artificial Sequence
  ENSG00000245532_84 (sequence is synthesized)
ccccactttgagtctctagtgtccattatgtcactctgtatacctttttgtacccataagttagctctcacttataagtgagaacacacagtatttggttttccattcctgagttgcttc

SEQ ID NO: 811460 - DNA, 120 bp, Artificial Sequence
  ENSG00000245532_85 (sequence is synthesized)
caaaattgctgcaaaaaaaaaaaaaaccacaaacattattttgttcttttttattgctaagtcatattccatggtgtagagataccacattttatttatccactcactggttgatgggtt

SEQ ID NO: 811461 - DNA, 120 bp, Artificial Sequence
  ENSG00000245532_86 (sequence is synthesized)
gataccacattttatttatccactcactggttgatgggttggttccacatctttgcaattgtgacttgtactgccatcaagtgtctttctggtataatgacttcttttcctttgggtaga

SEQ ID NO: 811462 - DNA, 120 bp, Artificial Sequence
  ENSG00000245532_87 (sequence is synthesized)
ttttctctctggatctatttctggaaattttaggctccagtttttgttgttgttgttaataaaatgcaatggaatgtaatgatcatcacttttcattatgctttaaaatctggtaaatgg

SEQ ID NO: 811463 - DNA, 120 bp, Artificial Sequence
  ENSG00000245532_88 (sequence is synthesized)
aggctagaacactcctgtaaggcaagaatattctctctgttggaactcaaatacacagaactgggtaaatctcaatcttaatctttgattcaggacacaacatggctctcttttacttgc

SEQ ID NO: 811464 - DNA, 120 bp, Artificial Sequence
  ENSG00000245532_89 (sequence is synthesized)
tttctttaattgttttttaataatgtggtaagcatttctgaatctcctatccaatacaaaaactaggacaatacagacagtaactcctatggttacaatgaacactcctctccacttaaa

SEQ ID NO: 811465 - DNA, 120 bp, Artificial Sequence
  ENSG00000245532_90 (sequence is synthesized)
ttaattatttacactgatgaaattgaaatagcaaaattttaatgactaaatactgtctttgattttttgttccaggtctgtcaatattaacttcttataattttctttttttttctttat

SEQ ID NO: 811466 - DNA, 120 bp, Artificial Sequence
  ENSG00000245532_91 (sequence is synthesized)
gtgtgtgtgtgtgtatatatatatatttaatttcaatggcttttggggtacaaatggcttttggtcatatatatgagttctacagtagtgaagtctgagattttactacaccttccactt

SEQ ID NO: 811467 - DNA, 120 bp, Artificial Sequence
  ENSG00000245532_92 (sequence is synthesized)
acttatgtggtcccacaccacccgcctcccctgccgcctcctgccaccccctaggccaaggtaataatcatcctgaatcctgggtttatctctcacttgctttcttttcatataattttg

SEQ ID NO: 811468 - DNA, 120 bp, Artificial Sequence
  ENSG00000245532_93 (sequence is synthesized)
caaaagaatctgatctaaatgtgtttttcagagtatatatttatattttagctgttcttagagaaaatttattattttgcatgtaatcttatggaacattctcatttaataccatggtaa

SEQ ID NO: 811469 - DNA, 120 bp, Artificial Sequence
  ENSG00000245532_94 (sequence is synthesized)
actatacctcagttagtttatcagttctcccatccatggtgactaggttgcctctcagcctctcaacaacactgtttctcagtgtccttgtagaagtgatatgtgggtgttttctcctta

SEQ ID NO: 811470 - DNA, 120 bp, Artificial Sequence
  ENSG00000245532_95 (sequence is synthesized)
cacagagttgaaaggtgacgacaacaacgttggcactaccaatcccccaccctccagaggggtaaccagtgttaccagtttgctgtgtttcctgctacacctcgccttattcacttccat

SEQ ID NO: 811471 - DNA, 120 bp, Artificial Sequence
  ENSG00000245532_96 (sequence is synthesized)
ttgtatctgaaaaacgtgttgcatggtttcttttctatagaagtggtaaaatgctattgtgtcctgtacattattgattactttttttcatttaacagtagggagatgcctgggagtaca

SEQ ID NO: 811472 - DNA, 120 bp, Artificial Sequence
  ENSG00000245532_97 (sequence is synthesized)
cagagaactgccctcattgttttcaacttctgcactgtatgtctgtgagtttagccattctgctgttaatggaaatttacagtattctaatcttttgatattacaaacagttctgtgcga

SEQ ID NO: 811473 - DNA, 120 bp, Artificial Sequence
  ENSG00000245532_98 (sequence is synthesized)
tcatcgtcatacacaaccccttgtgcacaatgcatgagtgtttctcagggtaggtaccaagaagtgaaattcctgggtcatagggcgtgagtccgacatttttctccattctgccctgtt

SEQ ID NO: 811474 - DNA, 120 bp, Artificial Sequence
  ENSG00000245532_99 (sequence is synthesized)
gccctccagagtgggtgtccagctttgcatacctaagtatgagagtatctgttgttcatatcctctacgacgctccatatatgaaacttaagtttctgctagttgccatctttgatctat

SEQ ID NO: 811475 - DNA, 120 bp, Artificial Sequence
  ENSG00000245532_100 (sequence is synthesized)
catgtatgcagtgacctactaagactgtaattggtacagtagattcttgtcatctgtgtgtgaatttagcattcatgggcttaatgctgacaaggcccccagggtccaagacatataatc

SEQ ID NO: 811476 - DNA, 120 bp, Artificial Sequence
  ENSG00000245532_101 (sequence is synthesized)
atgtataattttgtcaaggtataattttttaaattgcttttgtcatgtgtctgctggtgatgcccaacccagtgctctgcacccaggtcacactgtggctttgtcctctgcttatgcctg

SEQ ID NO: 811477 - DNA, 120 bp, Artificial Sequence
  ENSG00000245532_102 (sequence is synthesized)
cattgcagcaactgtcctgaagagaccaaaattatgcagatttaggtaagtccatggctaatgttattatattatgtgctattgtaatggatggggctgtggagtgtatgaatttataaa

SEQ ID NO: 811478 - DNA, 120 bp, Artificial Sequence
  ENSG00000245532_103 (sequence is synthesized)
tcactggtcttgtaattaaaattcaaacactatagaaaaaggccatgtagaagataaaagttcctctataatcccggacccctaagataactactaatgacaacttcatttatattcctt

SEQ ID NO: 811479 - DNA, 120 bp, Artificial Sequence
  ENSG00000245532_104 (sequence is synthesized)
cagacattttctggctgtggatgtactaaaatgtatcctattattctctgccctaaaatggaatcatacaaggtgtactgttatttttatggctctataacatgtcatattgtacgtgtt

SEQ ID NO: 811480 - DNA, 120 bp, Artificial Sequence
  ENSG00000245532_105 (sequence is synthesized)
ggtatggtcattttaaccatttttctagtgatggctttgaggttatttgcagtttcctagccatctcaaagtgtgctgcggggatctcttttgcatccctctgggtgcagagctgaggca

SEQ ID NO: 811481 - DNA, 120 bp, Artificial Sequence
  ENSG00000245532_106 (sequence is synthesized)
cccagaggcagtgtccagaggaggcagcatctgtaggtgtcttcacctgctctggctcttggcacatctggttggtgacactgttttgtgagatgggttgaaagcacgtgctgccaaaat

SEQ ID NO: 811482 - DNA, 120 bp, Artificial Sequence
  ENSG00000245532_107 (sequence is synthesized)
agaataatgttggtcctctcctcatgtgccgtggaactggggtaaaactgcgtagtggctgcagctgcctgtccataccggaatcgagtataacacggtgcctggcttagcacaaaacag

SEQ ID NO: 811483 - DNA, 120 bp, Artificial Sequence
  ENSG00000245532_108 (sequence is synthesized)
tagtgggtcctgcaggccccagagtctaattcctggtattctttcccctacacagattaaataaaccaaaaacaaactattctaggaaagcgtctgtgacatttgtaaaaagtggtattt

SEQ ID NO: 811484 - DNA, 120 bp, Artificial Sequence
  ENSG00000245532_109 (sequence is synthesized)
aatgatcttttattcacttgtctgtttagtttgttgaaatcttaagtggcatcctggtctgggaaggagtgctgtctgcgcctgccctccgctgggcacagcgtggctgcttcaggggct

SEQ ID NO: 811485 - DNA, 120 bp, Artificial Sequence
  ENSG00000245532_110 (sequence is synthesized)
aagcacacactttctgtcttctaaagggccgccacatgccaggagctcaggtgtgagcccggctctggctcttacctcatagggtcactcataggggcacagggagcagaacattgtaca

SEQ ID NO: 811486 - DNA, 120 bp, Artificial Sequence
  ENSG00000245532_111 (sequence is synthesized)
cagcgaggcaccacccggcttggcatctgcctcggtggacttactacctctagaaggaaatacctgagttcctctggcctcagctcctagagtgactggtgtgctgtccctgttactctt

SEQ ID NO: 811487 - DNA, 120 bp, Artificial Sequence
  ENSG00000245532_112 (sequence is synthesized)
ctgtcaaggtgacaactgtgtgacccatcatctgtgtgtcaaagcaaggccctgcctgggcctctgctcctgtgctgaccccaaaggcaaatgctttgctagtttccttccagttaattt

SEQ ID NO: 811488 - DNA, 120 bp, Artificial Sequence
  ENSG00000245532_113 (sequence is synthesized)
cacctatgaatagatgtgtgaaaactgttcaaagccatacctgcacatgtttgaacttcaaaccctgtgggtgattcagtggcatctttctctaacccccagcctcccttcccacagagg

SEQ ID NO: 811489 - DNA, 120 bp, Artificial Sequence
  ENSG00000245532_114 (sequence is synthesized)
ccaccgtcatggccagttgctgcagtttctttccagagaacctgtgtatgtgtaaagctgtacaggcgtgggtacaccacacagcctgtcttgcactgtggactgttgagttactagtac

SEQ ID NO: 811490 - DNA, 120 bp, Artificial Sequence
  ENSG00000245532_115 (sequence is synthesized)
atctaggtaagcaccgcatatctgtattcatgtctgccttggtcttttcaacatctgtgtggtagccgtgtttgaattacccattccctttttggggaaccattaagttgtttcagcaat

SEQ ID NO: 811491 - DNA, 120 bp, Artificial Sequence
  ENSG00000245532_116 (sequence is synthesized)
ttttactgtagataaggctataccgcatatctgtgtacatgggtttttatgtacatgggcaagtatatctgtgagagaaaagtttcctcaggaggaattctgggcacagcatgtgtaaat

SEQ ID NO: 811492 - DNA, 120 bp, Artificial Sequence
  ENSG00000245532_117 (sequence is synthesized)
ttctaaatatgatggacacccccagcttccacctcaaggaggttggtcccattgacatttccccacaccttcacccaggctgtgcccttaaacttggttatttgtcaatgtgagaagtgg

SEQ ID NO: 811493 - DNA, 120 bp, Artificial Sequence
  ENSG00000245532_118 (sequence is synthesized)
aaaatagtatttaattgtagtttggatttgtatttctattgggttgtatacttactgattaataataagagctctttacatattaaggaaattaacccttttcaaatacattcctatttc

SEQ ID NO: 811494 - DNA, 120 bp, Artificial Sequence
  ENSG00000245532_119 (sequence is synthesized)
ttttatggttcctggattttgtgagtagtttgaaaaggctaatccagctgaagattttgttgttgttgttaaaccccatgttttctcctaactctttttatttttattttggaggactct

SEQ ID NO: 811495 - DNA, 120 bp, Artificial Sequence
  ENSG00000245532_120 (sequence is synthesized)
atctagacttaattttagcataacaagtgacagggttagttagcctgttgtccttacaccattttctggctaatacagctattaactattgatctgtctattcacgtgccagttcctaat

SEQ ID NO: 811496 - DNA, 120 bp, Artificial Sequence
  ENSG00000245532_121 (sequence is synthesized)
ggttttacatagtgtaatctgcacttcaaaatagcgaagggaagccctacctcattattctacttttccagaattctcctggctattccaggctgcatgtttaccttaaccttccctgtg

SEQ ID NO: 811497 - DNA, 120 bp, Artificial Sequence
  ENSG00000245532_122 (sequence is synthesized)
atgtcttcatgccgttgtcttcttatgcaagaataaggtacgtctttccatccactcacgtctatttaatttgactttgcattacacagaaagctggtcttggtctgtctacctcggcat

SEQ ID NO: 811498 - DNA, 120 bp, Artificial Sequence
  ENSG00000245532_123 (sequence is synthesized)
ctagttgtcctcactgccccctagccgaccccaccccatctgactgactaccccatcacagagtacttttatttacgttttgctctgcctaatggttacttgatactgtcacgccgacag

SEQ ID NO: 811499 - DNA, 120 bp, Artificial Sequence
  ENSG00000245532_124 (sequence is synthesized)
tgtccagttcagtggtctttgcagttgaaatgctcccgtacacactgtcttgttaaaaatgccagtaagttcatacaaacccagcttgcacccaaggtcacattcagagagcgtagggct

SEQ ID NO: 811500 - DNA, 120 bp, Artificial Sequence
  ENSG00000245532_125 (sequence is synthesized)
gggatgggttgttttccaagcttctgccactgtgtggctagctcttcccactgggaagttctgtgtacccggaatgtcggagtggagtcctgttctagtgtccagcacctgaccctgtgc

SEQ ID NO: 811501 - DNA, 120 bp, Artificial Sequence
  ENSG00000245532_126 (sequence is synthesized)
ccaacccctcaacagcctattcctgctgtccacagcctgctggaactttttacaaaatatgttgccatgctggaccctgggcactggacataagccccctggcagcctttttcatgtcac

SEQ ID NO: 811502 - DNA, 120 bp, Artificial Sequence
  ENSG00000245532_127 (sequence is synthesized)
ccaaaggggtaattgtcctactggtggtctgtaagatgagttagggtgacttgctaatagacattgtaaatcttaatatttatgtatgtattttattattaccggttttccatttatgat

SEQ ID NO: 811503 - DNA, 120 bp, Artificial Sequence
  ENSG00000245532_128 (sequence is synthesized)
ggtaatattgtttcttctaagaatatttatttttccttctaaatattgagataaaattcatgcttttgaaatgttctattcagtggcttttagtatatttgctatgttgtgcaaccatcg

SEQ ID NO: 811504 - DNA, 120 bp, Artificial Sequence
  ENSG00000245532_129 (sequence is synthesized)
acactatccatttctagaactttttcgtcatcccaaacagacgctctgtattcataaaaaaataacttcctacctgtctctccccctagtctttggtaacctttgttatactggtaaact

SEQ ID NO: 811505 - DNA, 120 bp, Artificial Sequence
  ENSG00000245532_130 (sequence is synthesized)
ttgttgtgctctctgtctgtgtgaatttgcctattctaggggcctcatataagtgtaatcatacagtatttgtctttttgggtctgtctgatttcacttagcgggttttcagggttcatt

SEQ ID NO: 811506 - DNA, 120 bp, Artificial Sequence
  ENSG00000245532_131 (sequence is synthesized)
catgttgcagcatataacagtactgcgttcctttttctggctgaataatattccactgtatggatagaccccattttgtttattcacacatcatttggacatttggattatttctggttt

SEQ ID NO: 811507 - DNA, 120 bp, Artificial Sequence
  ENSG00000245532_132 (sequence is synthesized)
ttggctattatgaacaatggtgctatgaacagttgcgtacaagtttttgtgtgaacatatgttttcaattctctcattatatacctaggagtagaattactgggtcatatggtaactgta

SEQ ID NO: 811508 - DNA, 120 bp, Artificial Sequence
  ENSG00000245532_133 (sequence is synthesized)
tatttttgaggaactgccaaactattttcccacgtccatgcaccatttcacattcccaccagtaagtaagagggttccaatttctgcgcattcttgccaacactagttattatctgactt

SEQ ID NO: 811509 - DNA, 120 bp, Artificial Sequence
  ENSG00000245532_134 (sequence is synthesized)
tctggttataatcattctaatgagtgtgaagtagcctctggtgtcatttggatttgcatttctctgatgagtgatgctatcaagcacctttgctggtgctgttggccatatgtgtatgtt

SEQ ID NO: 811510 - DNA, 120 bp, Artificial Sequence
  ENSG00000245532_135 (sequence is synthesized)
ccctggagaagtgtctgtgctgagccttggcccactttttaattaggcgtttgtctttttattactgagttgtaagagttctttatatattctggattctagacccttatcagatacatg

SEQ ID NO: 811511 - DNA, 120 bp, Artificial Sequence
  ENSG00000245532_136 (sequence is synthesized)
atattttctcccattctgtgggttgtgttttcactttatcgataatgtccttagacatataataaatttgtattttaaaagtgacttgatttggctgtgcaaggtggctcacgcttgtaa

SEQ ID NO: 811512 - DNA, 76 bp, Artificial Sequence
  ENSG00000245532_137 (sequence is synthesized)
atgaggaggctaggagttcgaggtcagcctggccagcatagcgaaaacttgtctctactaaaaatacaaaaattag

SEQ ID NO: 811513 - DNA, 73 bp, Artificial Sequence
  ENSG00000245532_138 (sequence is synthesized)
gcgaaaagtctgtaataccagcttctcaggaggctgaggcacgaggatcacttgaacccaggaggaggaggtt

SEQ ID NO: 811514 - DNA, 120 bp, Artificial Sequence
  ENSG00000245532_139 (sequence is synthesized)
gactttgtttaaaaaaaaaaaaaagtgacttgatttaagggaaaaaatgactggctatattcagtcagatatggcaaaaagtctcaaggtgttaatgtgaatgattaaggtcttgggggg

SEQ ID NO: 811515 - DNA, 120 bp, Artificial Sequence
  ENSG00000245532_140 (sequence is synthesized)
ggtgtcccctatcagactacaggtgtttagaggcacagaaaaaggtgcagttgggttcttaatgtgaaatgatgagaagcacaactccagtgtgtctctttgtgtagaatgtcagcagac

SEQ ID NO: 811516 - DNA, 120 bp, Artificial Sequence
  ENSG00000245532_141 (sequence is synthesized)
tagaatgtcagcagacaccccctgctagatgtgctggatcatgggaaagcatttccatttgttactagattgttcagaagttttaatttatgatgggtgtggtggctcatgcctgtagtc

SEQ ID NO: 811517 - DNA, 120 bp, Artificial Sequence
  ENSG00000245532_142 (sequence is synthesized)
tcaagatcagcctgggcaacatagtgataccctatctcttaaaaaagaagaagtttttaaatttgaaataataataggtactggatttatgcaaatgtcttttctgcgtcttttgagatg

SEQ ID NO: 811518 - DNA, 120 bp, Artificial Sequence
  ENSG00000245532_143 (sequence is synthesized)
atgcaaatgtcttttctgcgtcttttgagatgagtatcaggtttttttttttccttttatcatctgatgatgaacttaatgtttccatttgtattaatggaatactaagtccctctgtga

SEQ ID NO: 811519 - DNA, 120 bp, Artificial Sequence
  ENSG00000245532_144 (sequence is synthesized)
tttctgaaccaagctattcctaggcctgagttttattttgttgacacagaaataaattagaaggccaagcgtggtggcatgtgcctgtagtcctagttgctgaggtaagaggattgcttg

SEQ ID NO: 811520 - DNA, 72 bp, Artificial Sequence
  ENSG00000245532_145 (sequence is synthesized)
cgccactgcactccagccttggcgacagactaagacgctgtctctaaggcaatgacagtccctggcaaatgc

SEQ ID NO: 811521 - DNA, 120 bp, Artificial Sequence
  ENSG00000245532_146 (sequence is synthesized)
aaataaactaaggcaatgacagtccctggcaaatgctgggagggaggcagcagtggtcagggaaggtaaccctgaagcaggacttgtaaagcaaataagattgggaggccaaggtgggtg

SEQ ID NO: 811522 - DNA, 120 bp, Artificial Sequence
  ENSG00000245532_147 (sequence is synthesized)
aaaaccaagaagaaaaggaatgaattagaacttcttctgcttggacttaagggcatcatcaggcaggttttgggtaggatagcaggggaggcagagacatagtcggggtcagtggtcatg

SEQ ID NO: 811523 - DNA, 120 bp, Artificial Sequence
  ENSG00000245532_148 (sequence is synthesized)
agtgtggctttgagcccaaaaacttggtttctgttccctactttgccactcagtagtgcatgactttggccaaatttcttaaattcatgaagcaagtttccgggtgaatgaaatggggat

SEQ ID NO: 811524 - DNA, 120 bp, Artificial Sequence
  ENSG00000245532_149 (sequence is synthesized)
aaaaatagtgttcaaacctatccgttggtttgtgtgaaactgaaatgaatagtatcgtgcaggtacttgtgagcaaggggagctgctgtttcctgtccctttatgatgggaaatatctag

SEQ ID NO: 811525 - DNA, 120 bp, Artificial Sequence
  ENSG00000245532_150 (sequence is synthesized)
acaagttcccaaccctctgcactgcaggctgcatggcacggagggtcttgtaacaccagctggggctggccttcttttaggagcttcagtggttctgaaaacttttatttgtttgtttgt

SEQ ID NO: 811526 - DNA, 86 bp, Artificial Sequence
  ENSG00000245532_151 (sequence is synthesized)
gagcttcagtggttctgaaaacttttatttgtttgtttgttttagtagatgtggggtctttctgtgttgcccggacccgctcaacc

SEQ ID NO: 811527 - DNA, 120 bp, Artificial Sequence
  ENSG00000245532_152 (sequence is synthesized)
agccttgaaaactttttcaggttcttccagggttactgggctattaaatatttctatttcattataagtcagtttttcaaagttatattatcttaattaccttttttatatgtattagtg

SEQ ID NO: 811528 - DNA, 120 bp, Artificial Sequence
  ENSG00000245532_153 (sequence is synthesized)
tagagtagcattttatattttgatatcctccttatgcatagtttttcactttttattcctagtttttcgtttttaataagactttcaagaaatttattttattggccttttgaaaaaagc

SEQ ID NO: 811529 - DNA, 120 bp, Artificial Sequence
  ENSG00000245532_154 (sequence is synthesized)
agctttagataaagtaagcagttctgctttcattttataatttatttctacttttgtttcattaatcttttcctccggcatgccttggattttgttgtgttactctttttctagaggctc

SEQ ID NO: 811530 - DNA, 120 bp, Artificial Sequence
  ENSG00000245532_155 (sequence is synthesized)
gcattgtgtgtctggttcacttatgatcacgcttgcctacttttaagaatggaagaggggaggtggagggtggctgcacagtcgagggtgtgaggcagtcttgctctagccccaccatgc

SEQ ID NO: 811531 - DNA, 120 bp, Artificial Sequence
  ENSG00000245532_156 (sequence is synthesized)
cctcagcccgctgtggccacgctggttcctcaattgctggggcgtgcagtgtctgtaagggaggctactgatgccatccgaggaagatgtaaggtttcgtgtgggcagcgagagcctagc

SEQ ID NO: 811532 - DNA, 120 bp, Artificial Sequence
  ENSG00000245532_157 (sequence is synthesized)
aggcatgtggggtgcccagcaaagggtaacagtggacagttgttgcctcattccacagagttttgattttttttttttttttaatggtcactccatcaacatcccccatggccagagcct

SEQ ID NO: 811533 - DNA, 120 bp, Artificial Sequence
  ENSG00000245532_158 (sequence is synthesized)
gagctggtccccagagacacaggcattcagctgacagcctcgccttcacgctgctgctgttctcatgggggacaggcctcaggtggcaatgcacaaatcattagttaagggcagttgtga

SEQ ID NO: 811534 - DNA, 120 bp, Artificial Sequence
  ENSG00000245532_159 (sequence is synthesized)
cagttaccaaggagtgtagtcccccgccccccgcccagtgaaaacagccctaaccaggggtggggacctttgggctctgacccgaagggtaggagaagctggaaggacagcattcctgtc

SEQ ID NO: 811535 - DNA, 120 bp, Artificial Sequence
  ENSG00000245532_160 (sequence is synthesized)
tgcgaaggcaggagcaaagctgccaggctatgaaggaaatggctggagcctgaagtcatgcaagctggggctggcagggacagggccaacttccaggcctgggggccaccatgaggattc

SEQ ID NO: 811536 - DNA, 120 bp, Artificial Sequence
  ENSG00000245532_161 (sequence is synthesized)
gaggattcaggacgtgacccccagggcacatgaaggccttccatctgtatttaagaaaagactttatcagacgagtatggtggctcacgcctgaatcttagcactttgggaggctgaggc

SEQ ID NO: 811537 - DNA, 120 bp, Artificial Sequence
  ENSG00000245532_162 (sequence is synthesized)
cttatttcctatatgtttgtggtttcagtcctgatgtataatttgaccctagttagaatggttatctgaggaagtggcctgtacgatttctgcttttttaaatgtgtggctccctttctt

SEQ ID NO: 811538 - DNA, 120 bp, Artificial Sequence
  ENSG00000245532_163 (sequence is synthesized)
cattgattaacgtatgattatttttataaatgttccatggcagtgggaagggattctctgtcacattccacatctggatcagttcctccccattttgttggtcaaatccgatctgccata

SEQ ID NO: 811539 - DNA, 120 bp, Artificial Sequence
  ENSG00000245532_164 (sequence is synthesized)
tcctgtgtaatgacaagtgagttgcattctcaccgtcactcctggggtctctccgcttcccctgagctggctcagcagtctgctccatgtgttttgatgcagggtgacccattggtattc

SEQ ID NO: 811540 - DNA, 120 bp, Artificial Sequence
  ENSG00000245532_165 (sequence is synthesized)
ccgacactaacgcccccgtctgtggactgcttgctgcttgggcttcactgtgtctggtgttgacagtgcagacctaaaggtgtgcacacatgtgcacacacactccgctgtcttcttgtt

SEQ ID NO: 811541 - DNA, 120 bp, Artificial Sequence
  ENSG00000245532_166 (sequence is synthesized)
tgcactggacttaaatatctatgagggttattttcaactgctgaatttggaatgatttttatatcttttctgctttctgcccatgtacatgtgtttattttacactgttgtgattggtag

SEQ ID NO: 811542 - DNA, 120 bp, Artificial Sequence
  ENSG00000245532_167 (sequence is synthesized)
ttactatgtggggacacaattacttgggctgaaataatccacctgttgtggttggggtcctctggggcattccagggtgagaggttgtcactgccacctgggccatgtgggccggcacca

SEQ ID NO: 811543 - DNA, 120 bp, Artificial Sequence
  ENSG00000245532_168 (sequence is synthesized)
gcattttgtggttacgaattctacagtcacaaatatctttgggcaaatccccttctatacctcaaggcagcttttggtttgcaaccccactggccagagggaagggccagtcacttggct

SEQ ID NO: 811544 - DNA, 120 bp, Artificial Sequence
  ENSG00000245532_169 (sequence is synthesized)
ctctcactgccctgcgccccagatggttctagggctgctgttttcccttggccctgccaacaccactgtttttacttctgctcattggctgagtgcagtggttcctggaagccagtggca

SEQ ID NO: 811545 - DNA, 120 bp, Artificial Sequence
  ENSG00000245532_170 (sequence is synthesized)
cgtttccccgcgtagctcgcttatcccacagcacacacccaagggttctgttgctaacacgctgaattaattctttgctcatcttacagagtgtgttttgactgcccccatttctgaggc

SEQ ID NO: 811546 - DNA, 120 bp, Artificial Sequence
  ENSG00000245532_171 (sequence is synthesized)
cttgtaaggccagagctttgttgcttcatcggcaggttgggacttagatggccgtgaatgtttcctctctgctgctgcagtaagtaagtgcccgcaccatagtgtgtttggaggctgaag

SEQ ID NO: 811547 - DNA, 120 bp, Artificial Sequence
  ENSG00000245532_172 (sequence is synthesized)
ttgaagcgaggctgtgaggggagatggacgtgtgaggagggatgatggggcttgagcaaagtgggggagggggcaaaggcagttggcccaacacattccccacccctttgagaggtctga

SEQ ID NO: 811548 - DNA, 77 bp, Artificial Sequence
  ENSG00000245532_173 (sequence is synthesized)
agttggcccaacacattccccacccctttgagaggtctgaggcctgcagacctggctcggagcccacctggtagtcc

SEQ ID NO: 811549 - DNA, 120 bp, Artificial Sequence
  ENSG00000245532_174 (sequence is synthesized)
agaaatggggggctgattctgctcagattcatcaggatgagtagaaggcacccagctctcaccctggcctgacatgtgtgtccctgagcaggttacagtcctctctgagcctctgcttcc

SEQ ID NO: 811550 - DNA, 120 bp, Artificial Sequence
  ENSG00000245532_175 (sequence is synthesized)
catctggaccctgctgggcagggcttctgagctccttagcactagcaggaggggctccaggggccctccctccatggcagccaggacaggactctcaaatgaggacagcagagctcgtgg

SEQ ID NO: 811551 - DNA, 120 bp, Artificial Sequence
  ENSG00000245532_176 (sequence is synthesized)
ggggctcccacggacccgccgtgggcccaggggaggcagagcctgagccaacagcagtggtgctgtggaccgtggatcctgagggtggcctggggcaagtaccggctgagggtccaggtg

SEQ ID NO: 811552 - DNA, 120 bp, Artificial Sequence
  ENSG00000245532_177 (sequence is synthesized)
ggctttgtgtacctttgggtcctggggccctggtgacttggactccaggttagagtcaagtgacaggagaaaggctggtggggccctgtgcttccgacttcatttcgagtgatggcagtt

SEQ ID NO: 811553 - DNA, 120 bp, Artificial Sequence
  ENSG00000245532_178 (sequence is synthesized)
cccaggaaggaatccacagctgacggtggctgacagatcagagaatggaaggcgaggcaggcgggcgtctgcgtgacctcaggtgcttggggcccagcagacccagagaaccatttccac

SEQ ID NO: 811554 - DNA, 120 bp, Artificial Sequence
  ENSG00000245532_179 (sequence is synthesized)
taggccagggtgccggaagtgtccacaggtcttagattccctgttcagatgaaaagatttgtgcctttaatgataaaagtgatctgcatagagtcaaaaattcaagccatgggtataaaa

SEQ ID NO: 811555 - DNA, 120 bp, Artificial Sequence
  ENSG00000245532_180 (sequence is synthesized)
tgcaagtaaaatccctgccctcacctatcccaccctactacacagagatgtcctctcgagtttcctagactcactctggaaatttctgtatacacacagaagcttgtgcctctgctcgtg

SEQ ID NO: 811556 - DNA, 120 bp, Artificial Sequence
  ENSG00000245532_181 (sequence is synthesized)
aaggcagagggagggagagctgaagggccagcaccttctcacctgtgggccccctcagtgctcggtcccagagcatgcaggactgtgcctcgtgttcagtttgctggtctgacttcatgc

SEQ ID NO: 811557 - DNA, 120 bp, Artificial Sequence
  ENSG00000245532_182 (sequence is synthesized)
tccttgggcaggatatgcatgtgccatgctaggagacatgtggatgtgaagctgggggacaatgtcccctggctatgcctttacaagggaagtaaggaaggtaggaggtgagcctgggag

SEQ ID NO: 811558 - DNA, 120 bp, Artificial Sequence
  ENSG00000245532_183 (sequence is synthesized)
ggagggagggaggcgcggagccgccgcaggtgtttcttttactgagtgcagcccatggccgcactcaggttttgcttttcaccttcccatctgtgaaagagtgagcaggaaaaagcaaaa

SEQ ID NO: 811559 - DNA, 120 bp, Artificial Sequence
  ENSG00000231304_0 (sequence is synthesized)
ggggcggagcctgcggtcgggtctcggcgacccgccgggactttctaatcagagtcgtggggattttacgggtggagttactccgaaacctttaaggccgagtgtgatagatatttgcaa

SEQ ID NO: 811560 - DNA, 120 bp, Artificial Sequence
  ENSG00000231304_1 (sequence is synthesized)
gctgaatgccttaaagaacttcaattgggatgccagatgaaagtgtaactagaatttctatggcttaaataacgagagctggagtgcagtagcatgatcatggctcactgctgcctcgac

SEQ ID NO: 811561 - DNA, 76 bp, Artificial Sequence
  ENSG00000231304_2 (sequence is synthesized)
ctcccgggctcgatggggtctctctgttgcccaggcttgtctggaacacctgggctcaaataatcctcctgccttg

SEQ ID NO: 811562 - DNA, 120 bp, Artificial Sequence
  ENSG00000231304_3 (sequence is synthesized)
attcaactttgtatcacctgagcttaactaacacctggcacagagaagaaacatattaaggatttgctgagagaataagatagtataacttggtcttatatctaaggtttgattttctag

SEQ ID NO: 811563 - DNA, 120 bp, Artificial Sequence
  ENSG00000231304_4 (sequence is synthesized)
gaacctatagtgaattttaggcttgcttttcagtttttgtagcagggatgtagcacaggtttgggactcagcacacctagtctgaaagctgatttctgtcacagcatgcatgagggacag

SEQ ID NO: 811564 - DNA, 120 bp, Artificial Sequence
  ENSG00000231304_5 (sequence is synthesized)
tctcttcagtttatttataccttagtgctgtgattctcgagcttatagacactgtgaggacagaattttagctctttaaacaaaggggggcaaatatacagtgacctctatctatgtagg

SEQ ID NO: 811565 - DNA, 120 bp, Artificial Sequence
  ENSG00000231304_6 (sequence is synthesized)
tatttaactgaaaggaattccagggccaagtgtgtctactattaaaagaaacgtacttttcttacaatgtagtccctgaatgcaaatcatggttttatctggtgggcaactgaagaaaca

SEQ ID NO: 811566 - DNA, 120 bp, Artificial Sequence
  ENSG00000231304_7 (sequence is synthesized)
gcaatctgaactgatatgggaggcagacctcactgtaacaggattagtgagaaacagtgtttgtggctcttaattgctcatttttttttttttaatgggggatgttagggattttctaag

SEQ ID NO: 811567 - DNA, 120 bp, Artificial Sequence
  ENSG00000231304_8 (sequence is synthesized)
ggcaggtttatccatatgcagagttgatgttaggatgtaataccacaaagatgtaattaactcctctgtttgtggtctccatgttaattcactctcataagagggtatgcagtgtggtca

SEQ ID NO: 811568 - DNA, 120 bp, Artificial Sequence
  ENSG00000231304_9 (sequence is synthesized)
gtcactattctaccaccatttttaagaaaaaatttaaaactattttttatcttccaaattaaatattttgctatttgataagttaacaatgcaacagaaaatcaatataacttttatctt

SEQ ID NO: 811569 - DNA, 120 bp, Artificial Sequence
  ENSG00000231304_10 (sequence is synthesized)
agaagccataaaagtctatctaggaaaatttcagatgtgtgaacatggctttagagaaggaactcaactacagactataagaaatgtaaaaccaagccaggttcctgttgtggtccttta

SEQ ID NO: 811570 - DNA, 120 bp, Artificial Sequence
  ENSG00000231304_11 (sequence is synthesized)
tatgacctggtgacctaagctagagaatcacagcactaaggtataagtaaaccaaatagcatgcattggctttagttcagaaggggatttttgtgcagaaaataaattgaaagtagggcc

SEQ ID NO: 811571 - DNA, 120 bp, Artificial Sequence
  ENSG00000231304_12 (sequence is synthesized)
tctggccagcataaacagataagaaaaaagtatgattccctacgtctcaaaaatgactccttcacacatcccaccaatcaaagatccatttggaataacaggtcttctaaaagctgccat

SEQ ID NO: 811572 - DNA, 120 bp, Artificial Sequence
  ENSG00000231304_13 (sequence is synthesized)
agaagttaagcctcctaccacctatacttctgtgtgaattgatttagtctggaggcattttgattgcttttctcctaacacctaacttagaaggtgaaatagaggtcttgtttggaggga

SEQ ID NO: 811573 - DNA, 120 bp, Artificial Sequence
  ENSG00000231304_14 (sequence is synthesized)
attgaagaaggaaaaggaaagggcaatttcagatcaagggatatgttggaatggtggaaaagtaggatcattaggacagctgggaacagtcttttagttcttggaagccaggaaaaagat

SEQ ID NO: 811574 - DNA, 120 bp, Artificial Sequence
  ENSG00000231304_15 (sequence is synthesized)
gtagagagaagggcagaagtggtcaaggctccatgaaaaggaggatgtagcagtcaaattggatgtcgaccatgcaacaatgacgtcaggaaccctgcttggtataccatctgtacctgt

SEQ ID NO: 811575 - DNA, 120 bp, Artificial Sequence
  ENSG00000231304_16 (sequence is synthesized)
tgggattacagcctcctctacatacctccaccttctaactccaagaagtcaaaatgaagtctcaccatattgatcagactggtcttgaagtcctggcttcaaatgatcttccctcctcag

SEQ ID NO: 811576 - DNA, 120 bp, Artificial Sequence
  ENSG00000231304_17 (sequence is synthesized)
cctcccaaactgctgggattatagatcttgcagacaacagatcatggaacttcttggcctccataatctcatgagccaatttctgtaagtctctctgtctctctggagaaccttggctaa

SEQ ID NO: 811577 - DNA, 120 bp, Artificial Sequence
  ENSG00000231304_18 (sequence is synthesized)
tatacacacacaccatgattgatagtggatgcccaataaatgcattccaaaatatatggatgcccaataaatatgtgtaagtatgaatactcaataaataaacaaaaatgaaagaacgga

SEQ ID NO: 811578 - DNA, 120 bp, Artificial Sequence
  ENSG00000231304_19 (sequence is synthesized)
cttactggtaggagtttttgttggcttagaaccctccgtctctttttcatctgtgtatttcagtgctcttttagctagaggcctggtgactggtctatctgaattgctcgtgggattctg

SEQ ID NO: 811579 - DNA, 120 bp, Artificial Sequence
  ENSG00000231304_20 (sequence is synthesized)
aatgtacttgcaagtgggcaaatagaggtcatcggaatcatctcctgaaccacttgattcacagaggctcacttcagactcgttgttttcttctctattagagtcattgctcactttttg

SEQ ID NO: 811580 - DNA, 120 bp, Artificial Sequence
  ENSG00000231304_21 (sequence is synthesized)
tcggaaaggagtaagatgaacaccctcttccaaattaaaatttaaacgttcctggctgaatcagctttggtgataagttaacttggtccttgctccattgacaagcattgtgttgtacat

SEQ ID NO: 811581 - DNA, 120 bp, Artificial Sequence
  ENSG00000231304_22 (sequence is synthesized)
tacttctgcaacagctatcttcctcctcctcacatttcaaggctcttcgaagctctccagccacggctagccccgcgcactgggccctccaggaccgtaccaccgtccgccgtcgcctgg

SEQ ID NO: 811582 - DNA, 120 bp, Artificial Sequence
  ENSG00000231304_23 (sequence is synthesized)
aactaccgccgccacattcgaaattttccgcctcgctcctccattggttggctgggaggcggtcacgtggcgcaggatgcacccaacaccaccgtcgcaggcagagtcccgccccgccag

SEQ ID NO: 811583 - DNA, 120 bp, Artificial Sequence
  ENSG00000231304_24 (sequence is synthesized)
gcgacgtcacgtgacgcacattcgctcaagtccacatccgggcatccacctggccctggggcggagcctgcggtcgggtctcggcgacccgccgggactttctaatcagagtcgtgggga

SEQ ID NO: 811584 - DNA, 120 bp, Artificial Sequence
  ENSG00000231304_25 (sequence is synthesized)
acctggccctggggcggagcctgcggtcgggtctcggcgacccgccgggactttctaatcagagtcgtggggattttacgggtggagttactccgaaacctttaaggccgagtgtgatag

SEQ ID NO: 811585 - DNA, 120 bp, Artificial Sequence
  ENSG00000231304_26 (sequence is synthesized)
gtagttcaaagcttcctgtttcttcagtctgacagcttcaaatgtcccgggttgtgctcaaagcctccctcttgtgagaagaatctctttggttgcctgttaaagcggtcagccagcttg

SEQ ID NO: 811586 - DNA, 120 bp, Artificial Sequence
  ENSG00000231304_27 (sequence is synthesized)
caacacggaagcagcttttagaggaattaaaaccaaaacaaggagcaaattctggattaaaaagatatttgcaaccattcttccaatcaattttagaaaatttccaccacctcaaaaaga

SEQ ID NO: 811587 - DNA, 120 bp, Artificial Sequence
  ENSG00000231304_28 (sequence is synthesized)
ttttcatgtgccaagtttggaagtgcaaaaagacctttaggtgcgggccctctgtcttggacttctcaacctccagaacaatggtgtcagaagcaggatcccaagcagagcttctagtga

SEQ ID NO: 811588 - DNA, 120 bp, Artificial Sequence
  ENSG00000231304_29 (sequence is synthesized)
cctccaggagcgctgagtgaacactcgaggtaccagcactcgaggacccacttgtgtccatggatctctcagagcggctccggatggtaaaaagcaatttgaaggggtgttctatacttt

SEQ ID NO: 811589 - DNA, 120 bp, Artificial Sequence
  ENSG00000231304_30 (sequence is synthesized)
ggcagaggaaacccattccctctcaaggagaagcagtggacacagtctccgaagttgagagccatttgagaatcagttgagaagtttgagaaccaggtatgtggggctttggtatcagga

SEQ ID NO: 811590 - DNA, 120 bp, Artificial Sequence
  ENSG00000231304_31 (sequence is synthesized)
catctggtcctggactttttttggttgggggtcctgaaaccaatccttcgtggatacccagggacaattctatctggctggattctgggaagtgaacttatggaatcaaaggttatgcaa

SEQ ID NO: 811591 - DNA, 90 bp, Artificial Sequence
  ENSG00000231304_32 (sequence is synthesized)
gattctgggaagtgaacttatggaatcaaaggttatgcaaacatttttgagacttagactggctctccttgctcctcaagcttgtacttg

SEQ ID NO: 811592 - DNA, 120 bp, Artificial Sequence
  ENSG00000231304_33 (sequence is synthesized)
caaatactagtgcaaattaagaagaagagaaaaaagaaggtccacgagctaccaatgacatctaggactgcttctgtctcatagcacatactcctcccacaaggactacaaatgacaaga

SEQ ID NO: 811593 - DNA, 120 bp, Artificial Sequence
  ENSG00000231304_34 (sequence is synthesized)
gaaaatttgtataattggaattctggacatttctcaaatgctcattgactcaaatactttctgctgtatttggaattttcaaaccaaaacatgatagcaaccagaccagaaaaatgtaat

SEQ ID NO: 811594 - DNA, 120 bp, Artificial Sequence
  ENSG00000231304_35 (sequence is synthesized)
tgaccagaaatgtcctacaatatttacaatatactcatttttctgcatgttcaattttaaaagttgggtattctgtactggaatctaatgggatttgactaataatcctcacaaaaatga

SEQ ID NO: 811595 - DNA, 120 bp, Artificial Sequence
  ENSG00000231304_36 (sequence is synthesized)
tgccaggatgttcttcagcttttgatagactttaaaatacacaggcagcataatcttgagcaagaaaagagctgactttctgtacaggagaaataaagaatagtgtagcacttgacaacc

SEQ ID NO: 811596 - DNA, 85 bp, Artificial Sequence
  ENSG00000231304_37 (sequence is synthesized)
attcttcatgccatgtgacctctactggggggatggaggagggatggcattggtgattcaagactgtctttcctacatccaggct

SEQ ID NO: 811597 - DNA, 120 bp, Artificial Sequence
  ENSG00000231304_38 (sequence is synthesized)
ggattctgggaagtgaacttatggaatcaaaggttatgcaaacatagactcttgttacttcctgtggaacccgtggattggaaggttatctaggctgctgcagaactcttccaccctgtg

SEQ ID NO: 811598 - DNA, 120 bp, Artificial Sequence
  ENSG00000231304_39 (sequence is synthesized)
cacagagaagtacataaagtggttaaagactacacctgcaggtttgttgcatgagtaaattcctgattctgaggcttggagttacaatgatcccattactcaggcagtgagaatattacc

SEQ ID NO: 811599 - DNA, 120 bp, Artificial Sequence
  ENSG00000231304_40 (sequence is synthesized)
caacacgtagatcttcaaggcaatgaagatggacaaggaacatatgccagtgcacatctattataagccatttatcccagactgtgatgcaagtgtgcttaagtctgaaatgcaagtgac

SEQ ID NO: 811600 - DNA, 120 bp, Artificial Sequence
  ENSG00000231304_41 (sequence is synthesized)
tcgtacttacaggcaaaatacattccagctgaggaaaaaaggatttttgttgctgatttaatggagtgacagcctttcagaagtctttaaattcaccattttcactgatgtcaccctgtt

SEQ ID NO: 811601 - DNA, 120 bp, Artificial Sequence
  ENSG00000231304_42 (sequence is synthesized)
accagaaaggagtcctaattctgaccccaagagaaggtccttaaatctcgtgcaagaaagatttcaggattcaaagaattagctggactatgtctccaggtggatgactctatggaaact

SEQ ID NO: 811602 - DNA, 120 bp, Artificial Sequence
  ENSG00000231304_43 (sequence is synthesized)
acctggcctattttaagtttatctgtagattcctttgggcttctatattgacaagcacatcatttgcaaataatgacagtcttgcttcttcctttccaagtattcaagttgtgtatttct

SEQ ID NO: 811603 - DNA, 120 bp, Artificial Sequence
  ENSG00000231304_44 (sequence is synthesized)
ttttcttttcttattgtacaggctagtaccttccataaaatgttggatgaaaatagctatagtggtggcttgccgattttgtcgtttttttgacaaggtcacattctgtgatccaggcta

SEQ ID NO: 811604 - DNA, 120 bp, Artificial Sequence
  ENSG00000231304_45 (sequence is synthesized)
gagtgcagtggtgccattatagctcactgaacctcctgggctcaagcagtcctttcgcctcagccgtctgagtagcttggactacaattggactacaagaacataccactgctgctgttt

SEQ ID NO: 811605 - DNA, 120 bp, Artificial Sequence
  ENSG00000231304_46 (sequence is synthesized)
tttattttttatttttttgtatagatgagatctcactaaattgtccaggctgatctggaactcctgagctcaagtaatcctccccccttggcctccaaaagcgctagaattataggcatg

SEQ ID NO: 811606 - DNA, 120 bp, Artificial Sequence
  ENSG00000231304_47 (sequence is synthesized)
agccaccataaccatcgttgtttattattttaatggaaaatttttagttttcaacactgcatgtattatctttttgtagattgtcgttaaacaagtgtctatttatttgctcacattgag

SEQ ID NO: 811607 - DNA, 120 bp, Artificial Sequence
  ENSG00000255680_0 (sequence is synthesized)
ctgggatccgacacagcctgcaccagctccgagagtctttccacattctgctgtctcagggcaaagccctctcaatttctcaccaggcttggagtcccattctgcccttccgcggatctg

SEQ ID NO: 811608 - DNA, 120 bp, Artificial Sequence
  ENSG00000255680_1 (sequence is synthesized)
tgctaggcaagggtggggccgccacccggattctcccctctggccagtcaagcactgagtaagcccagggctccccacctgcgtcctgagcctggtcccctgggaatcaccacaagtgag

SEQ ID NO: 811609 - DNA, 120 bp, Artificial Sequence
  ENSG00000255680_2 (sequence is synthesized)
tgggctgtagagacccacagactggggttcttcctagctgtatgacatcagcaaaataacctctcagagcctaggtttctgcatttacaatatggagacttatataaaagtgatctgcct

SEQ ID NO: 811610 - DNA, 120 bp, Artificial Sequence
  ENSG00000255686_0 (sequence is synthesized)
aacaatagaattcagacctgtcttggcagtagtgcaatgcagtaattctcaaattttttattggcataaataattcagacattggtttctcactaaacattgcactaaacacaagaaaca

SEQ ID NO: 811611 - DNA, 120 bp, Artificial Sequence
  ENSG00000255686_1 (sequence is synthesized)
acaggcttgctggctcagaggcacacaaactgtccaacagcccaagttagaaatactttttttagaagtgtagaaaactttataaatgattctgtacaaatatacacagtggaccctcca

SEQ ID NO: 811612 - DNA, 120 bp, Artificial Sequence
  ENSG00000255686_2 (sequence is synthesized)
agagagacagagacggagacagacagagatagaaacggaaaggaaaagaaagaagtggccccccaaaagaaaacatgaaaccaccttcttacatcaactcactctgcaacagtcgacaca

SEQ ID NO: 811613 - DNA, 120 bp, Artificial Sequence
  ENSG00000255686_3 (sequence is synthesized)
aacaaacatggagaaaagaatatggaccatcggtccgcgttgtgaactgggaattgcaaggaaggtagaaaaggcccttcactatctgggagactttccttcctggggaatacagaaggg

SEQ ID NO: 811614 - DNA, 120 bp, Artificial Sequence
  ENSG00000255689_0 (sequence is synthesized)
ctagaatgcagttgttagcagcagcgaatctgcatgggtctgcagcaacctcaagtctcctcagaagaaagaatttgaccaaggggcataaggcagaaggagagacccgggcaagcttca

SEQ ID NO: 811615 - DNA, 120 bp, Artificial Sequence
  ENSG00000255689_1 (sequence is synthesized)
ttattaaaaagcttcagagcaggaatgaaagaaaagtacacttggaagagagccaaacaggtgacttgagagatcaagtaaaacctcattaacgtaactgcaacaatgaagacattacct

SEQ ID NO: 811616 - DNA, 120 bp, Artificial Sequence
  ENSG00000255689_2 (sequence is synthesized)
aaacctcattaacgtaactgcaacaatgaagacattacctagacgtgctggcttcctctttgccttcctccatgatgtaagtttcctgaggactccccagccatgcttcctgtacagcct

SEQ ID NO: 811617 - DNA, 120 bp, Artificial Sequence
  ENSG00000256139_0 (sequence is synthesized)
ccgagcaccgtggagcaccggctgccagctgagaccccagaggggtaactaacggcctgaggaaggcatttcttcggggaacatggcgtgcccgtcgtggctacgttctgccaagccctg

SEQ ID NO: 811618 - DNA, 120 bp, Artificial Sequence
  ENSG00000256139_1 (sequence is synthesized)
tgacgttggaggggagccgcctgcatcccccgctcagccagtgtttctagactccgagacatctggaactcggaagtgaggccagggctccaggaagactccctgatgacgcactggccc

SEQ ID NO: 811619 - DNA, 120 bp, Artificial Sequence
  ENSG00000256139_2 (sequence is synthesized)
gcagcccaggctcagcttgggagctattggaaaacaggcatctggaaccacagtctgcagacccctgtgtgtactcactgtcagtgcggtgggaacaaaaaggcagcaacggctgggtca

SEQ ID NO: 811620 - DNA, 120 bp, Artificial Sequence
  ENSG00000256139_3 (sequence is synthesized)
aggaacaagagcattcaacactgaggagcctgcctctgcaaaggcaggacccacatgctggatgtggagctggatggttccacgtggcaaggtttgggaggcttctgagaacctggccta

SEQ ID NO: 811621 - DNA, 120 bp, Artificial Sequence
  ENSG00000256139_4 (sequence is synthesized)
atgattcctgtttcctcccttttcagtcatcatccgtttgcagcctctctttggtagcccatgcccctggagggtccttgttttcaggcaagaagatatctcagctcatcatgtacattt

SEQ ID NO: 811622 - DNA, 120 bp, Artificial Sequence
  ENSG00000256139_5 (sequence is synthesized)
ctgccccagccctagaatcagacatttctccaaggagtcctggttcctttcagtgggaaatgttcttagagacattataatctggacactaacgatgtctgtggaatttttacaagatcg

SEQ ID NO: 811623 - DNA, 120 bp, Artificial Sequence
  ENSG00000256139_6 (sequence is synthesized)
ccttggcttctctgtgcatgatgaactggagggacaagaccaggccagagagacaggtcaagagactttcgcagtggcccaagtgagatataacagtggcttgaacttgatcttaggtaa

SEQ ID NO: 811624 - DNA, 120 bp, Artificial Sequence
  ENSG00000255539_0 (sequence is synthesized)
tgtgtgcaacagaaggcaatctgaacataagaacaaattaagacagcctagaaattgcacagatgaagaatctacaaacaaggacattaaagaatattaaagcagcacagagaagttatt

SEQ ID NO: 811625 - DNA, 120 bp, Artificial Sequence
  ENSG00000255539_1 (sequence is synthesized)
attcaagaagcttcaaaaaacaaaagttacaccaacacttgtgaagctggcctaatacacagcatgtgcacaaaccaagacttatgtggctgatggcaccttttcatccagagctttgtg

SEQ ID NO: 811626 - DNA, 120 bp, Artificial Sequence
  ENSG00000255539_2 (sequence is synthesized)
gtgttcaaataaggacttcagtgctttcagcacttccacttcgctggacacgcctgctggagactgcgcttgtctcttcaccacggtcatcctaagagaccgctcatgcctggagacaag

SEQ ID NO: 811627 - DNA, 120 bp, Artificial Sequence
  ENSG00000286785_0 (sequence is synthesized)
ggaggtccctgcctcagtccaggcaaggctgtggcctagacgaggtggcgggctcgtgtggatgtggagagagtgcaacaaagaatcagaatggccacatgaagtaatcctaagtgacac

SEQ ID NO: 811628 - DNA, 120 bp, Artificial Sequence
  ENSG00000286785_1 (sequence is synthesized)
tagcctgatgtagatcccattcaatgcagtccctgccttccaggtggcctttagtgagccagtggctcggatttatgtggtcagattctgagccggcagacacaaggacaagccagcgag

SEQ ID NO: 811629 - DNA, 120 bp, Artificial Sequence
  ENSG00000286785_2 (sequence is synthesized)
aggtgtggcaggactggagattctgtgtaggtctgtatgtgatgggctttatgaaatgcatctatttaatgtactccaagccaattctaaatgaagcatgatgcagccaaatatgaaagg

SEQ ID NO: 811630 - DNA, 120 bp, Artificial Sequence
  ENSG00000286785_3 (sequence is synthesized)
agctcattattgatacattttatggaccgaattgtgttctctggaaaaggtagttgaagtcccttaatatgtgaccttatttggaggaataggatcttaaagaagtaatcaagttaaaat

SEQ ID NO: 811631 - DNA, 120 bp, Artificial Sequence
  ENSG00000286785_4 (sequence is synthesized)
cacgtcattcaagtgggctctaatccaatataactgatgtctttattagaaggttaaatttgaacagagacagatgtgcatagagagaaggttgtgtgaagagacacaggaaggagacgg

SEQ ID NO: 811632 - DNA, 120 bp, Artificial Sequence
  ENSG00000286785_5 (sequence is synthesized)
ccatctatttggaacagagcttcccttatagacctcagaaggaaccaactctgataccttggttttgggcttccagactccagaactgtgagacaataaattcctgttatttaaggctca

SEQ ID NO: 811633 - DNA, 120 bp, Artificial Sequence
  ENSG00000286785_6 (sequence is synthesized)
attcatcagtacggaaaacatcttggcagtttaaccactattgtaatactcatgtattgatacgtgtttcagaatttttctgctctcttcctcagtatgtatgtacagcaaaagcttcag

SEQ ID NO: 811634 - DNA, 120 bp, Artificial Sequence
  ENSG00000286785_7 (sequence is synthesized)
agagaaactccaggccatgcaaactcatgaactaaactctgggagaggtgctggtgatgacctggaagggaaagatgagtgtttggcacaggacgggaccgaccgaaagtggttgtgtgg

SEQ ID NO: 811635 - DNA, 120 bp, Artificial Sequence
  ENSG00000286785_8 (sequence is synthesized)
gagggtttgatggggtggctgctggttgttgttgggagaggaggggcaggtgggttctctcctctggcaaggccacgggtgtggtctggcttggagcaggatccagagccattgaactct

SEQ ID NO: 811636 - DNA, 120 bp, Artificial Sequence
  ENSG00000286785_9 (sequence is synthesized)
gaggaactatgaagctcctgctgcaggtaggaaagaaagagaaggtgagaagataggaggaagcttcccaatgccctagacaggttgcaggtgagggcacagacccctgtgcagatgtgc

SEQ ID NO: 811637 - DNA, 120 bp, Artificial Sequence
  ENSG00000286785_10 (sequence is synthesized)
tggagctgcagtgcagtgggatgcccgggaacatggggggctcctgacttagtgctgagatgcctggaagtcaaaggcacgtggagatggcgagctgcacgatgagaagtgtgatctcct

SEQ ID NO: 811638 - DNA, 120 bp, Artificial Sequence
  ENSG00000286785_11 (sequence is synthesized)
ccttccaaactgcagagagacctggattaccctgtccctgatccttactggctgtggaatccagaaaaattctcctaacctgcagtctcagttttctcatctcaaaaatggggttaatat

SEQ ID NO: 811639 - DNA, 120 bp, Artificial Sequence
  ENSG00000286785_12 (sequence is synthesized)
tagtgtatgtatcacattatgttgtgaagattaaatgaaataatgaacatctggagcatagtaaatgctcaataaatgtaggctgaataaaaaagagatccccagaccagcattatacaa

SEQ ID NO: 811640 - DNA, 120 bp, Artificial Sequence
  ENSG00000286785_13 (sequence is synthesized)
aggccactccaagttccacctcttccacgaagccctccttgattgctgggccctggttgaactccttattagtaacacccaggttagtcctacttaattcttacctgcagccaaagtgga

SEQ ID NO: 811641 - DNA, 120 bp, Artificial Sequence
  ENSG00000286785_14 (sequence is synthesized)
cttagcatctccttgcatgcctggtaaagtcaagggttttcagccagggcctgtgtataaagcagaagcagcacagagtctggtttgaagcttagtgcttgggttcagacagttgtgggt

SEQ ID NO: 811642 - DNA, 120 bp, Artificial Sequence
  ENSG00000286785_15 (sequence is synthesized)
tacaatcccttctacacatgttctctgtggaaaccatttggttctctgtgcttggaactcgcctgcaacgggacaaagccatctcacctagactgttgttatgaagattgaattaggtga

SEQ ID NO: 811643 - DNA, 120 bp, Artificial Sequence
  ENSG00000286785_16 (sequence is synthesized)
ttctgagaggcatttatgcgtcctccctgagtaacaatccatgaaaagtgggcgtcattgctgaagctcaaggaagaaatatgaaatttgattatatccttattcacggcattgggtcac

SEQ ID NO: 811644 - DNA, 120 bp, Artificial Sequence
  ENSG00000286785_17 (sequence is synthesized)
caactcagcactttttatgaaagtagcatctgacctggcaaaggctgtgtcatcttattacctcagaaagacaaatttacggggtcagacgatggatggcttgtagatttctcaatgggc

SEQ ID NO: 811645 - DNA, 120 bp, Artificial Sequence
  ENSG00000286785_18 (sequence is synthesized)
tggaaggaaggagagaaaaagagagacaggagagagtacacatttaattctgcttcccctagggtgatatttccttcctccccttccagggttctcaaaaaggcattctaggaagtcctg

SEQ ID NO: 811646 - DNA, 120 bp, Artificial Sequence
  ENSG00000286785_19 (sequence is synthesized)
taaaatacatgctcataaaaatctcataatttccacaaattgttgagaatttaaaactcggttgggagtttgctgtttcagcctgagacaccggggtcacgtttcagtgcctgcagtctt

SEQ ID NO: 811647 - DNA, 120 bp, Artificial Sequence
  ENSG00000286785_20 (sequence is synthesized)
gagacagtaccaggcatctgggatgaagctgaggaaagaagatgtgggggccctgctggcctgctccttctctcgaaagacgcttaccggctgctggtgtgtcacagggctttaggattt

SEQ ID NO: 811648 - DNA, 120 bp, Artificial Sequence
  ENSG00000286785_21 (sequence is synthesized)
tacaacattagaggtgctggaatcatggaagaggcatctggactctgtaatgtccttccccctggaaaatctgctccagaagtgggggattgggagctgtcaacatatgagccatctttt

SEQ ID NO: 811649 - DNA, 120 bp, Artificial Sequence
  ENSG00000286785_22 (sequence is synthesized)
gctccgttcaagatggtaggggcattctcaacatgcccctcactctgattctgcctcacttttattttagaattttccactgccttttctggaatgtgctttttcaaccctcaaaatctg

SEQ ID NO: 811650 - DNA, 120 bp, Artificial Sequence
  ENSG00000286785_23 (sequence is synthesized)
tagagaagaaataagcagaaaccgaaatggctttctggtgttctccatgctctcagcttactggaaaatcgagccgcaggctcgaggctggactttaaggcagagcactgcaattatagt

SEQ ID NO: 811651 - DNA, 120 bp, Artificial Sequence
  ENSG00000286785_24 (sequence is synthesized)
gctatggccttggcttcctttctcatcacccaggtacagtcctgcagtcctcagaggatgccagtcccacacagggggatccttctccataggaaaaccgaggaacaatgcaggttcgag

SEQ ID NO: 811652 - DNA, 120 bp, Artificial Sequence
  ENSG00000286785_25 (sequence is synthesized)
gtgcacagtggctaagcacactcagtcctcaagatctttcctctcaaatgctaatgctaccttcagatgggctgctgcctgctaccatttcaacattgagtcctttaagatgccatcaga

SEQ ID NO: 811653 - DNA, 120 bp, Artificial Sequence
  ENSG00000286785_26 (sequence is synthesized)
gagaggggaagcaagaggccaagaaaaatgaaaggccctgcatgtttttcttcgggaaggctgtgcagtctgctctgaggagacagatcaacctagcccttctccaggacgaactccgaa

SEQ ID NO: 811654 - DNA, 120 bp, Artificial Sequence
  ENSG00000286785_27 (sequence is synthesized)
gaggggaagcaagaggccaagaaaaatgaaaggagttaagagtaaaccatactccgggcaaccatcaccccaaaagggagacaaccagaccttctgtgcctcccaatgaaagtccacatt

SEQ ID NO: 811655 - DNA, 120 bp, Artificial Sequence
  ENSG00000286785_28 (sequence is synthesized)
caacaccacctacgaaggattcttaccaaagacaccaaaactgaactcaggcaaccctccagatataactaccaatttgcagaaaataaaagggatagaagaacacaaagatgcaatcag

SEQ ID NO: 811656 - DNA, 120 bp, Artificial Sequence
  ENSG00000286785_29 (sequence is synthesized)
caaaattcagacaggacaagcaatatttttttcaagaagaagaagaaaattgagggagtctggaagagatgtagagtaaactggtagagtgagacacttaagggatgcatgagttcagaa

SEQ ID NO: 811657 - DNA, 120 bp, Artificial Sequence
  ENSG00000286785_30 (sequence is synthesized)
caaagtgtagacctcgttgggatcccagttcaggcaagcaaatcttaaaatgttcatgagactgttggaggaaggcaaacacagatagcataggtgttgacattaaagaaatcttaattt

SEQ ID NO: 811658 - DNA, 120 bp, Artificial Sequence
  ENSG00000286785_31 (sequence is synthesized)
ctgcttctggagaggcctcaggaagcctttactcatggcagaaggcaaagccggagtggatgtgtcacatggcgagagaagacgcaacagatgggagaggtttcagactctttaataagc

SEQ ID NO: 811659 - DNA, 120 bp, Artificial Sequence
  ENSG00000286785_32 (sequence is synthesized)
agctctcccgcagcagcaagtcacgcatgagggaactgctccatgacccagacacctcccaccagtccctgcctccaacactggggatcacatttcaacaggagatgtggaggccacaaa

SEQ ID NO: 811660 - DNA, 120 bp, Artificial Sequence
  ENSG00000286785_33 (sequence is synthesized)
tgacaaacacatcgcagcagcgagtggaaacatgtctgagacgctgcagcatagcccggctggttctgttcttagcagtatttgctaagttccatccattagaatgtttttaaacaatgg

SEQ ID NO: 811661 - DNA, 120 bp, Artificial Sequence
  ENSG00000286785_34 (sequence is synthesized)
gacgcatgtcatcttgatttgacaggataatcctgagtttatagaatttcatcacagtgtgtgaaactggtttttaacttcactatactggccctcagcggtggagtcaactgggcactg

SEQ ID NO: 811662 - DNA, 120 bp, Artificial Sequence
  ENSG00000286785_35 (sequence is synthesized)
aatagaaaaatctccctcctccgtgttgtccccagcccaccacatttcgccctaagctctgccctgcaccaacaccagccttcttctggagtttggcagctgtggcaactgctggctgtc

SEQ ID NO: 811663 - DNA, 120 bp, Artificial Sequence
  ENSG00000286785_36 (sequence is synthesized)
tctcaaccacttcacaatatgtatcaatgtattctacaaatcattgtatttgccaagcattctactactacacagttctgattcaactgacgtgtatcttagaggtcaatatattttctt

SEQ ID NO: 811664 - DNA, 120 bp, Artificial Sequence
  ENSG00000286785_37 (sequence is synthesized)
tttcccttagcttggctaggactccataggaaacagctatttgagtgatgatatataggagaaggatagtactgtatttaactgtctgttaatatcagagaagatgaatatttttcacct

SEQ ID NO: 811665 - DNA, 120 bp, Artificial Sequence
  ENSG00000286785_38 (sequence is synthesized)
ccctgtacatagctatgcataagcttggtattcatttatgaacaatgtagcattttcaaaggcacaactgatttacttacattaagtcaatataaataaattatgttagtagattgcgaa

SEQ ID NO: 811666 - DNA, 120 bp, Artificial Sequence
  ENSG00000286785_39 (sequence is synthesized)
tgtgtctactttagagagcagatggtcgatctggtgctaatttgcccaatacggtagctacgcggcaatgaaattccaaaactggcacaaggcgggcctggttccagggatcactggatc

SEQ ID NO: 811667 - DNA, 120 bp, Artificial Sequence
  ENSG00000286785_40 (sequence is synthesized)
taaaagaaaaaaatccaatgaatgatgcatcccactggcattccaaagagcaagtaaacaaaagaaattatgggtttgggctcagaaaccccaacccttgagatttcagaaaacaaaacg

SEQ ID NO: 811668 - DNA, 120 bp, Artificial Sequence
  ENSG00000286785_41 (sequence is synthesized)
actcattggcaagaggcactgtaacgactcaggttcaaatcccacctctgttatttaccaattgcataactttcagcttcagtgtgacctgaccctgagctttccaatccaaaaatagaa

SEQ ID NO: 811669 - DNA, 120 bp, Artificial Sequence
  ENSG00000286785_42 (sequence is synthesized)
cattgattctgtatctacagaagtcatgtaactgtggctgcctcttttcaatggaaacagagcgaaatacaacctggtcagctaaatcgtgctgaccttaaaaacactgcatcctcttag

SEQ ID NO: 811670 - DNA, 120 bp, Artificial Sequence
  ENSG00000286785_43 (sequence is synthesized)
gcaaccactttggcttataaaccacatgtacaatattcctgctacttcaaacatgacttttttaatgagccaaaaaaaaaaaaatctaagtttgtaaataaaccgaattcattgccataa

SEQ ID NO: 811671 - DNA, 120 bp, Artificial Sequence
  ENSG00000255537_0 (sequence is synthesized)
agcacaatggctggcactctgaggaagccggactcatcccgtgcaggccgcatacacactccactgcccttccggccaaacaagcccggacacgggagagggatgagagtcggggatgcc

SEQ ID NO: 811672 - DNA, 120 bp, Artificial Sequence
  ENSG00000255537_1 (sequence is synthesized)
tagcggcgaggagagaagggataggcaaaagggaagaagagcgggctgtgatacctcctcgacgccgtcaaacactgctccccgcattccagagcccggggcccacccgacggcagcgcg

SEQ ID NO: 811673 - DNA, 120 bp, Artificial Sequence
  ENSG00000255537_2 (sequence is synthesized)
ccccgccaccgcgcagccgccccggtcccttctcccgcccgtctgtagtaaaacaatcgctctcccggcgtctgcggccgctgccagcggttctgacactgcaggaatgcgcggtctggg

SEQ ID NO: 811674 - DNA, 120 bp, Artificial Sequence
  ENSG00000255537_3 (sequence is synthesized)
gaaggctccgcactctggggaggggcacgagcggggtcggggaaactccaagatgaaagcgtgcaataactaccaatatggatacctcgcaaagcctgacactagtttctggataaaatg

SEQ ID NO: 811675 - DNA, 120 bp, Artificial Sequence
  ENSG00000255537_4 (sequence is synthesized)
caggcgatggctgctggcggatgccggcagacacactcaaagacccttttggactttccgagtttcccattctcctctactggaggctgaggcgggcaggcccagcgacgtctcccagct

SEQ ID NO: 811676 - DNA, 120 bp, Artificial Sequence
  ENSG00000255537_5 (sequence is synthesized)
ccaactgggttcggacctcaagccaaaaatgaggaggccggcaggagagcttttctcgcccaaagatgctgggtgggagctggatccagctgaaaaatctgagtgagaaggtttcaggcc

SEQ ID NO: 811677 - DNA, 120 bp, Artificial Sequence
  ENSG00000255537_6 (sequence is synthesized)
caggaggacttgagataatacaggaaaattcaagaggctgaaatgagaagggtccctggagtcttgtgaaaaattattaatttatcttgtctactgtgcataggcctgtgcttatagaag

SEQ ID NO: 811678 - DNA, 120 bp, Artificial Sequence
  ENSG00000255537_7 (sequence is synthesized)
ttgtcaataaaaaatctaataattcacgaatacacacaactaagagcacaagaactgtaattatcgaaggaaggcactggaaaaagcatgtcggcttggagaaccccaagtacttttgtc

SEQ ID NO: 811679 - DNA, 120 bp, Artificial Sequence
  ENSG00000255537_8 (sequence is synthesized)
tgatggcaaagtacctctgggctgaactgaggacttcaactggaaggggcagggagcgtctcttttgctcgtttatgcattcattccacagacatttcaaccatgagaaggatggaaaca

SEQ ID NO: 811680 - DNA, 120 bp, Artificial Sequence
  ENSG00000255537_9 (sequence is synthesized)
ggaataatgtcccaatgagatgagaagaagcgttggcctatttgcctttgtgggagcaatagacagaggatgtcttcctgtaagaaatcataaggccaggcacggtggctcacacctata

SEQ ID NO: 811681 - DNA, 120 bp, Artificial Sequence
  ENSG00000255537_10 (sequence is synthesized)
gggcccatcctggtagcccatcctggtagccccagctacactggaggatgaggtgggaggatcgcttgagcccaagaggttgaagctgcactccagcctgggcgacagcaagaccttgtc

SEQ ID NO: 811682 - DNA, 120 bp, Artificial Sequence
  ENSG00000255537_11 (sequence is synthesized)
tcaaaagtaaataaataaataaataaatcacaaagagtagctggttaaaagatccctagatctcctttcttgggatcatgcccagttttgtgaccttgggttagttaacttccctgtggc

SEQ ID NO: 811683 - DNA, 76 bp, Artificial Sequence
  ENSG00000255537_12 (sequence is synthesized)
cccagttttgtgaccttgggttagttaacttccctgtggctcatttcctcatctgtaaaatgaagaaaataatagt

SEQ ID NO: 811684 - DNA, 120 bp, Artificial Sequence
  ENSG00000255537_13 (sequence is synthesized)
ccaaaaatacaaaaaatcagctgtgcgtggtggcgggcgcctgtagtcccaattactcgggaggctgagaatggcgtgcacccaggaggcggagcttggagtgagccgagattgcgccac

SEQ ID NO: 811685 - DNA, 120 bp, Artificial Sequence
  ENSG00000255537_14 (sequence is synthesized)
actccgactcaaaaaaaaaaaaaagaaagaaaataatagtgccccactctattgtggcctgttgtgggattaaaggagtgaatatgagtaaagtacttccaggtttattagaaggcacta

SEQ ID NO: 811686 - DNA, 120 bp, Artificial Sequence
  ENSG00000255537_15 (sequence is synthesized)
tatgtatgtatgtgtgtatatatatacacacacacatatatatgtcatatatatgtctcatatagatgtcccatatatacgtctcatatagatgtcccatatatatgtctcatatagatg

SEQ ID NO: 811687 - DNA, 120 bp, Artificial Sequence
  ENSG00000255537_16 (sequence is synthesized)
tcccatatatgtctcatatagatgtcccacatatatgtctcatatagatgtcccacatatatgtctcatatagatgtcccacatgtatgtctcatatagatgtcccacatgtatgtctca

SEQ ID NO: 811688 - DNA, 120 bp, Artificial Sequence
  ENSG00000255537_17 (sequence is synthesized)
tatagatgtcccacatgtatgtctcatatagatgtcccacatgtatgtctcatatagatgtcccacatgtatgtctcatatagatgtcccacatgtatgtctcatatagatgtcccacat

SEQ ID NO: 811689 - DNA, 87 bp, Artificial Sequence
  ENSG00000255537_18 (sequence is synthesized)
tagatgtcccacatgtatgtctcatatagatgtcccacatgtatgtctcatatagatgtcccatatatatgtctcatatagatgtcc

SEQ ID NO: 811690 - DNA, 120 bp, Artificial Sequence
  ENSG00000255537_19 (sequence is synthesized)
atatatgtatatatatatatgtcttggctaatttgaggccatcttttgtctagatcttcagagcatgggacaaacagatttgagagaagcttgtgaagtactgaaagtgataaagaactt

SEQ ID NO: 811691 - DNA, 120 bp, Artificial Sequence
  ENSG00000255537_20 (sequence is synthesized)
ggtcttcagctggtgaccttgttagttatcctctctgtacctcagttttctcatctgtaaaatggagatgccaatatctgctgttggatgccaatatctactacaaggttgttgttatgc

SEQ ID NO: 811692 - DNA, 120 bp, Artificial Sequence
  ENSG00000255537_21 (sequence is synthesized)
atattaagtaatataatgcatgcaaaatgcttagcacagtgcctggcatataataagaaaccaattagtggattctgtggttatttttgtgaggctatgaagaaactgaaagctgaggac

SEQ ID NO: 811693 - DNA, 120 bp, Artificial Sequence
  ENSG00000255537_22 (sequence is synthesized)
aagtagcctaggctaggtacctaggatgagaaatccctgaacatgagcccagttattcttccagcaaacacttattttattgtagtaagatatatataacataaaaattactattttaac

SEQ ID NO: 811694 - DNA, 120 bp, Artificial Sequence
  ENSG00000255537_23 (sequence is synthesized)
catttttaagtgtacaattcactggtattaaacacattcacattgctgtgtaaccaccaccactattcatctacagaaattttgttatccaaacagaaactctgtatccattaaacacta

SEQ ID NO: 811695 - DNA, 120 bp, Artificial Sequence
  ENSG00000255537_24 (sequence is synthesized)
actccccagtactcccttccccagcccctggtaaccactattctaattttgtctctaagaatttgactattctaagtacctcatgtaagtgtaattatacaatatttgttttttgtatct

SEQ ID NO: 811696 - DNA, 120 bp, Artificial Sequence
  ENSG00000255537_25 (sequence is synthesized)
gacttatttcacttagcacaatgttttcaaggttaatctatgttgcaacaatgtcagaatttcttttctttttaaggtaaataatattccatggtatgtatatactacattttgtttatc

SEQ ID NO: 811697 - DNA, 120 bp, Artificial Sequence
  ENSG00000255537_26 (sequence is synthesized)
tattcatctgcccatggacatttggattgtttccaccttttggctattgtgaataatgctactaatctgtcatgggattagagtgagaaagaaagaataaaaaaataatgctgctgtcaa

SEQ ID NO: 811698 - DNA, 120 bp, Artificial Sequence
  ENSG00000253567_0 (sequence is synthesized)
ttttcttcttctgtaaattggaaagcagtgggaaaattacaaagtatctttttaaaactcaggtggtttgcatagctatttgtctgtttgagtttgttgttcctgtgatttaaaagattg

SEQ ID NO: 811699 - DNA, 120 bp, Artificial Sequence
  ENSG00000253567_1 (sequence is synthesized)
ctatgagctgcaaatggaaagcaggatgtttctatattcaactgtggaaggatctccaggatatactgttacattaagaaagaagggtggatgagacggaaaagtttgcctgatgtaatg

SEQ ID NO: 811700 - DNA, 120 bp, Artificial Sequence
  ENSG00000253567_2 (sequence is synthesized)
gatctaggcgatgagtatccatggctaccaacacgagacagacaaccagaaatgatcctgagcttcagctattgctccctaactgagaatgagatgcaagagaagtctcactaggaaagg

SEQ ID NO: 811701 - DNA, 120 bp, Artificial Sequence
  ENSG00000253567_3 (sequence is synthesized)
gaaaagtttgcctgatgtaatggatctaggcgatgagtatccatggctaccaacacgagacagacaaccagaaatgatgtgcgttgtgacggaagtacatatccctgttcagtatatacg

SEQ ID NO: 811702 - DNA, 120 bp, Artificial Sequence
  ENSG00000253567_4 (sequence is synthesized)
gcaagagaagtctcactaggaaaggagtcagagctacgggaattttcaagagaactttaaaaattcttcacttaaaactctctttttaaaagaaatcctcgtggagcataccaactactg

SEQ ID NO: 811703 - DNA, 120 bp, Artificial Sequence
  ENSG00000253567_5 (sequence is synthesized)
aaatcagaaagacttttatcattgcaattgtaacaatattaattatgcatagtttattactgtattaagtgtaggtggaatctatttcaagaaaacacaataaagcctaaaccaaaataa

SEQ ID NO: 811704 - DNA, 120 bp, Artificial Sequence
  ENSG00000288012_0 (sequence is synthesized)
ggaggccggagctcccaccagggcccagggcccgtcggcccgcaccagggtgtggtgggcgctggagcagcgcgccgacagcgctgacctcgtcccaagcaccaggagcttcctcactct

SEQ ID NO: 811705 - DNA, 120 bp, Artificial Sequence
  ENSG00000288012_1 (sequence is synthesized)
tctcccctacatggtcaccggagcttccccacgcgaaagacctcatgcacgcgctcaggaagaccggaacggcgaatgctgagaaggtaacgggagccgacctgacttggaagaggaagc

SEQ ID NO: 811706 - DNA, 120 bp, Artificial Sequence
  ENSG00000288012_2 (sequence is synthesized)
ctccacgagcctccccgactccttcggattagcctttgtggttgcacccgccgcggccacctgcaacgaatttagctcggcttaggccccgcagctcaggttccgcggccacgtcacgtg

SEQ ID NO: 811707 - DNA, 120 bp, Artificial Sequence
  ENSG00000288012_3 (sequence is synthesized)
acgcgagggcggggacgcgctcgggagcgagcgtgggagcctggaagcctcggtgggtcccgaggctgcagcgaggccgggaccgtgccctctgctggcgggacctggcgttttccggca

SEQ ID NO: 811708 - DNA, 120 bp, Artificial Sequence
  ENSG00000288012_4 (sequence is synthesized)
ccccgccccaaatcccggactcggtgttaagggaggtgcattgtcctgaaatgcttacaacagctgtcttcaataactcgtgcatagaatgcgcccagtaaatatgtgttgactgcacaa

SEQ ID NO: 811709 - DNA, 120 bp, Artificial Sequence
  ENSG00000253563_0 (sequence is synthesized)
actttcttgtagctttcctccaggggactcaagatgtcagacactgagaacggagtcgtgtgctttggactcatcgacatgattcggcggcggctggaggaggaaggaagaggaggaaaa

SEQ ID NO: 811710 - DNA, 120 bp, Artificial Sequence
  ENSG00000253563_1 (sequence is synthesized)
aaaagggagagggggaaggcgaagcctcgctgctttttttttctccctttgccaaatattctggtgttaccttaacgccgatcttgttggatgtacacgtaacggagtggaccgagtcct

SEQ ID NO: 811711 - DNA, 120 bp, Artificial Sequence
  ENSG00000253563_2 (sequence is synthesized)
ccttaattggcttgagtggaggctcgggggctgcctcgcgtttgttttagcccggcgccaggttttaggcagccaccagaggcggggcgtaagcgctaaagcaacaagacaatagaagcc

SEQ ID NO: 811712 - DNA, 120 bp, Artificial Sequence
  ENSG00000253563_3 (sequence is synthesized)
tacatcttgcccgagataattagcttacatgctgatgacaagggtaaagaaagctcaggacaccctccgccctcccacctgcgcccgcgtttttgtgcggtccccacggcagagctgggg

SEQ ID NO: 811713 - DNA, 120 bp, Artificial Sequence
  ENSG00000253563_4 (sequence is synthesized)
aggccaccctacgtttgcgcagggagacgcgctcgccgctggtgttgcgaaagaccagagcgaagcccggctccttgcccttccttcccaggggcttctctggggggcgctctcaggccc

SEQ ID NO: 811714 - DNA, 120 bp, Artificial Sequence
  ENSG00000253563_5 (sequence is synthesized)
cgacgaactgagcattgatcactgtggtggctaagcaaggaggggaggcgacgccgggcttaagcgaaccacagaggagaactggcaacgctgaatacagaccttgtctgcaggcgcgac

SEQ ID NO: 811715 - DNA, 120 bp, Artificial Sequence
  ENSG00000253563_6 (sequence is synthesized)
ctggccgggcctgagtcccgaatggggtctaattgcgaaggcggggtgggtttcccagtcacccagcttctttctctcactcgccattatttcatagttgtttgtaagtttaaggaacac

SEQ ID NO: 811716 - DNA, 120 bp, Artificial Sequence
  ENSG00000253563_7 (sequence is synthesized)
agcacatcaaaatgctttgaaagctttgaatgtttttcagctcagtgccagcactggagattgcggtagttattatcatgactatccccaccccctcttaggtcccaagacctgagtaaa

SEQ ID NO: 811717 - DNA, 120 bp, Artificial Sequence
  ENSG00000253563_8 (sequence is synthesized)
aggaagagttgggtgaatcttccacagcccctaggtcctgtcttctcggccttcgtcccttggcagcttttcaacctctcagcaggccacaggcgcacgtggctggcagctccccggcct

SEQ ID NO: 811718 - DNA, 120 bp, Artificial Sequence
  ENSG00000253563_9 (sequence is synthesized)
ccggctctgacagtccgggggcaaccaggcctgcagttctcgaggaaacccccagccccccacgtctcgttctggaccaggaaccccctccccaacaaccgcgcagcaagtggcgactct

SEQ ID NO: 811719 - DNA, 120 bp, Artificial Sequence
  ENSG00000253563_10 (sequence is synthesized)
gggagctgaactggagtggagctcgaagtggctggggcgggcaaagactcccgcttcactctgggacacaactgggacggcgcttcaacctctgcctgcaggcgtgcttctcgcgcgcac

SEQ ID NO: 811720 - DNA, 120 bp, Artificial Sequence
  ENSG00000253563_11 (sequence is synthesized)
cagcaagctctctatccacctcgcctgggcctttgcagcgccctgccgcccaggctccagcgcctctactaccctagccccttctcaacacgcggctctgccttcttccccagtaccact

SEQ ID NO: 811721 - DNA, 120 bp, Artificial Sequence
  ENSG00000253563_12 (sequence is synthesized)
gcactgccgaaaataagcccggagactaacgcaccttgtagggaagagaaggacatctgtatctccaagcttatccaagcaaaggcctccagagtccctcccatggcccgaaacacctcc

SEQ ID NO: 811722 - DNA, 120 bp, Artificial Sequence
  ENSG00000253563_13 (sequence is synthesized)
ctctgaccgaagagcgtcctttctttccgccgcctcctggactcatcctaaatagggcagacccgggctaaaccagtgatttttttttccatgaatacgaagaaccccgattgcactttg

SEQ ID NO: 811723 - DNA, 120 bp, Artificial Sequence
  ENSG00000253562_0 (sequence is synthesized)
gcatatgtgagatgacaaacattttaaagcaaaagaaagaacaagttatttttactctattttttaaaaattattagcagcaaaatgggattaaatgaaaacgatgagttttcaaatttt

SEQ ID NO: 811724 - DNA, 120 bp, Artificial Sequence
  ENSG00000253562_1 (sequence is synthesized)
tgttaaaaaaaaggtttgtcaactaaaactagaaaaccatcaactcccagattcacaatagtgtgaataacatttagaataaaactgaaaacaagtgactacatcattgaagtccttgtc

SEQ ID NO: 811725 - DNA, 120 bp, Artificial Sequence
  ENSG00000253562_2 (sequence is synthesized)
caagaggttaagatgcaggaaagagctgaagaaggagaaagtggacagtgaaactaagaggtgatgtactttatgctcttcaaccctgtggcaccaaacttcgcaagcagaaaagaacta

SEQ ID NO: 811726 - DNA, 120 bp, Artificial Sequence
  ENSG00000253562_3 (sequence is synthesized)
agactcacctgtcagctctggtcaccaaaggggcttagaaatgaactgctacaaggcttttaggaacattcacctctatcctctccagtagcaagtacaatgacaacagccagatgcaat

SEQ ID NO: 811727 - DNA, 70 bp, Artificial Sequence
  ENSG00000286789_0 (sequence is synthesized)
tattgtattttactttttatttttaaaattttttcatctccataggttcttggggaacaggtggtaggta

SEQ ID NO: 811728 - DNA, 120 bp, Artificial Sequence
  ENSG00000286789_1 (sequence is synthesized)
ttttcatctccataggttcttggggaacaggtggtaggtatttggctacataagtaagttctttagaggtgattaaaaaaaaaaacttgctcatgcatgtttatagcagcacattcacaa

SEQ ID NO: 811729 - DNA, 120 bp, Artificial Sequence
  ENSG00000286789_2 (sequence is synthesized)
ataaagaaactatagtatatacatacgatagactactactcagccataaaaaataatgagttaatggcattcacagcaacctggatggtattggagactattcttctaagtgaagtaact

SEQ ID NO: 811730 - DNA, 86 bp, Artificial Sequence
  ENSG00000286789_3 (sequence is synthesized)
atgttcttactcatgagtatagactttggggacacacaatggactttgggaactcacgggaaagggtgggaagggggtgagggata

SEQ ID NO: 811731 - DNA, 89 bp, Artificial Sequence
  ENSG00000286789_4 (sequence is synthesized)
gtaaattgagttcagtgtatactgctcaggagatgcgtgtacctcaaatttcacaaatcaccactaaagattggttgatatttatgatc

SEQ ID NO: 811732 - DNA, 120 bp, Artificial Sequence
  ENSG00000203993_0 (sequence is synthesized)
ggaacgcgcgcccgcggggtaggagacctggagctggagaacccgcccgccagagtcgtagtagtggatggggagtagccgtcccattttcaacacatgtctcattctaaattgacgttt

SEQ ID NO: 811733 - DNA, 120 bp, Artificial Sequence
  ENSG00000203993_1 (sequence is synthesized)
tggtgggctggccgaagaaggagaaagacccgcggctccgacctctgacctctaaccccggacgcactttgatttcgccggcttgcgcggaaggctgactccctgggccgcggcctggcg

SEQ ID NO: 811734 - DNA, 120 bp, Artificial Sequence
  ENSG00000203993_2 (sequence is synthesized)
cgggagccgcctgtggggtgtccccggcgcgggagggtgctctggttcaggcccgctgcccaggtatgcacaagtcaaggccttttctgcagaccaagtagccttccctggagagcgccc

SEQ ID NO: 811735 - DNA, 120 bp, Artificial Sequence
  ENSG00000203993_3 (sequence is synthesized)
ccagcaccacggaaactacctacatgccccgcggtggtcagcccgccttatcccagccccgagacccaaaacaagaagcatggactgaatttgaggtttctggatggtcgtgtgaaccga

SEQ ID NO: 811736 - DNA, 120 bp, Artificial Sequence
  ENSG00000203993_4 (sequence is synthesized)
ggggacgggtactggactgacaagaaatgagccttgaaggtcaatctgggtgacacccgagtctcctggtgagtcggactccggagaattatctcaagtccagcatagacagcgcacata

SEQ ID NO: 811737 - DNA, 120 bp, Artificial Sequence
  ENSG00000203993_5 (sequence is synthesized)
gacagaaaaggaaacggacaatcccaagtgccaagggaaccttcccaggtttctttagggcagctaaactgctctgtcaaagcctaagtccatttatgacaggccgagcaccctgagccc

SEQ ID NO: 811738 - DNA, 120 bp, Artificial Sequence
  ENSG00000203993_6 (sequence is synthesized)
tcgcaggagacacgagcgccttcatggccctcctgccccgcacccacctctccgccacccctgctgtctgtcccttccctgaaacctttatttcgagtgtctttgtggcttccctcttta

SEQ ID NO: 811739 - DNA, 120 bp, Artificial Sequence
  ENSG00000203993_7 (sequence is synthesized)
ccatccttgagttgaaatatcacctcttaagggaagccttccctctcctccctagttaaaatgatactgcccccccatacctgtcttcgttgacttacttggctccatcacagtgtgtgt

SEQ ID NO: 811740 - DNA, 120 bp, Artificial Sequence
  ENSG00000203993_8 (sequence is synthesized)
catgtgactctcccacatcctgatttggaatattgtctccctactagaatgtaagtccatggtgcctagaacaatacctggtgtacaggagacaaaatatttgttgactgggccgggtgc

SEQ ID NO: 811741 - DNA, 88 bp, Artificial Sequence
  ENSG00000203993_9 (sequence is synthesized)
aaaaattgttgactgaataaagggagttagaatgtgaagaaaaatccttcaccaagcaaacatccaccctaagtgaaggtgtgggaag

SEQ ID NO: 811742 - DNA, 120 bp, Artificial Sequence
  ENSG00000203993_10 (sequence is synthesized)
tcaccaagcaaacatccaccctaagtgaaggtgtgggaagcagctgcaggcagctttttcactccatttttccatcagctgctacccttgtgtgcccctcagcacttatgtcaagatgct

SEQ ID NO: 811743 - DNA, 120 bp, Artificial Sequence
  ENSG00000203993_11 (sequence is synthesized)
gctctcagcacgtgacatgctaacactgcagacttcaggtcagtcctgagaggcaggcactgttcttacccacattttataagtgactgaactgaagcaagggagtggtgagaggcagtg

SEQ ID NO: 811744 - DNA, 120 bp, Artificial Sequence
  ENSG00000203993_12 (sequence is synthesized)
atgggattcagcccaggaggccttcctttcaaccatatactgcactgcttccaggaggcgcttcacagatgaccccacctgtggtacactttctgctgttctccaatattcatgctgcct

SEQ ID NO: 811745 - DNA, 120 bp, Artificial Sequence
  ENSG00000203993_13 (sequence is synthesized)
gtcccacaattagtaaaattttagccaagtacaggactgcctggctaaagaccacatttccaacaggaaggggacaggtcagagacaaaaagtgacaatccatttcccagtctgtccctc

SEQ ID NO: 811746 - DNA, 120 bp, Artificial Sequence
  ENSG00000203993_14 (sequence is synthesized)
aaaagtcccaccattaggctgggcagtggtgaaagctgtcaacagccatctgggagccagggatgggaaccactatgtaggaatgacaactctgccacaaggccaggatctgccccctct

SEQ ID NO: 811747 - DNA, 120 bp, Artificial Sequence
  ENSG00000203993_15 (sequence is synthesized)
ggactgttcaagaaataaactgtcatgctatgagggtggggggctgtaccctacagtcccacgagttttttgtggggttttgtttttttattttttgaggcagtcttgctctgtcaccca

SEQ ID NO: 811748 - DNA, 74 bp, Artificial Sequence
  ENSG00000203993_16 (sequence is synthesized)
tgtttttttattttttgaggcagtcttgctctgtcacccaggccggagtacagtggcacaatctcagatcactg

SEQ ID NO: 811749 - DNA, 120 bp, Artificial Sequence
  ENSG00000203993_17 (sequence is synthesized)
gctccggctggagggggtgtccctaacggcgggaatacctggactggctggggtgtcccactggggagggtttcccggtggggaggtgtctggcgggggagcggctccggctaagcatgg

SEQ ID NO: 811750 - DNA, 120 bp, Artificial Sequence
  ENSG00000203993_18 (sequence is synthesized)
gtgttctgctaggaggatgtgtctggctgggggcggtgtcccaatcgggagggttgccctgatgggggaggttctacagttgtggagatgccaacctggggggcgctccggttggggggt

SEQ ID NO: 811751 - DNA, 120 bp, Artificial Sequence
  ENSG00000203993_19 (sequence is synthesized)
tggtcctgtgcattttatagataaggtaactgacaaacctagccacagtcaccccttcgccctaaaggagaactggaatttgaacccagagccttcttcaccaccatctccgttgtttct

SEQ ID NO: 811752 - DNA, 120 bp, Artificial Sequence
  ENSG00000203993_20 (sequence is synthesized)
ggaagcaccctccaggcaggccagccagcatcacggggcctcccctggggctggaacgtctgcaggatgcccctttgagaaatgctgttccacagaaccctgcctttcaggccttggaga

SEQ ID NO: 811753 - DNA, 120 bp, Artificial Sequence
  ENSG00000203993_21 (sequence is synthesized)
cgtgggcaggggagaagcagcgtccctcagagccaggcctggcagtggtgctagcaggggccaaggcccagggagcagggtctcctgtcggagggacctgggcaagcccctccacgcgcc

SEQ ID NO: 811754 - DNA, 120 bp, Artificial Sequence
  ENSG00000203993_22 (sequence is synthesized)
agcgggtttctcagcaggggaggtccacaccacaccgcttgggaacctgggtgcctaaacgcaacaggagccaaggcacaaatttaaccaaacaccaaggttgcgtgaggccccatttca

SEQ ID NO: 811755 - DNA, 120 bp, Artificial Sequence
  ENSG00000203993_23 (sequence is synthesized)
tgagccgggctccaaggacgtgtccttaggcggctctggaaggcccagcgccagcccccgtcctctgttaaagggagccagccccgcggctccgcccaggcatggtagcctgagcgcgcc

SEQ ID NO: 811756 - DNA, 120 bp, Artificial Sequence
  ENSG00000203993_24 (sequence is synthesized)
cccagggtagtagggggcacctgaggagcagggtctgccctggcatgagcagagcccaggatggggtcagggtcaggccctgccagaggctggagggtgcccaaggcgaggccggtgagg

SEQ ID NO: 811757 - DNA, 120 bp, Artificial Sequence
  ENSG00000203999_0 (sequence is synthesized)
agaggtggttgggtcctgagagctctgcccttatgaatggattagtatcattattgcaggagtggcttcatgatggagagagtggatttgtcatgaaagtgagttcggccattccttgct

SEQ ID NO: 811758 - DNA, 120 bp, Artificial Sequence
  ENSG00000203999_1 (sequence is synthesized)
gtctcacgtgccacctcttgccatgggatgccctcgccatgggatgacagcaagaaggcccttgcttgagtgagcccctccatcttcggctctccggcctccaggactgttagaaataca

SEQ ID NO: 811759 - DNA, 120 bp, Artificial Sequence
  ENSG00000203999_2 (sequence is synthesized)
tctctgttctttgtaaattacccaggctgtagtactctgttatagcaacacaaaacagactaagacactactatgtagatgaagaaacaggcccaagaggtgaggagtgttgtccaggtc

SEQ ID NO: 811760 - DNA, 120 bp, Artificial Sequence
  ENSG00000203999_3 (sequence is synthesized)
agaacgatggccagatgtttgggcacactgggccctacccacctggaaagaggctggcctggggttgaatgagaaccagaagtgactcaggctaggacccctctgcaccctccctcaggc

SEQ ID NO: 811761 - DNA, 120 bp, Artificial Sequence
  ENSG00000203999_4 (sequence is synthesized)
cgtgggtaattacctgcccaggttaatagcgcccacttcccgccacctttcatcaaggctcctggagctgccaggcagtaattaaccctcacagcacccttctgaagtcagcactggagg

SEQ ID NO: 811762 - DNA, 120 bp, Artificial Sequence
  ENSG00000203999_5 (sequence is synthesized)
cagacgtgtgatgaaacacgtttattacaggaagcaccagttagcccagatgcttctcatctttggagttgagctgcaggctggagacctggaaggccctcgcagcgcctgctcccatcc

SEQ ID NO: 811763 - DNA, 120 bp, Artificial Sequence
  ENSG00000203999_6 (sequence is synthesized)
tctcacctcacgaaagcgcaggaatgtgggtttggagccaatgaaaagtactggaatctggctctgctctgtgaccctggacaagtcactgcccctctctgggcttcagtttcctccttg

SEQ ID NO: 811764 - DNA, 120 bp, Artificial Sequence
  ENSG00000203999_7 (sequence is synthesized)
agaactcgggtattaatgacccggagccacatgacggagcatgacacagcacttttgggcacaaggcagggcccagaggggtgcgtgggggccgcagcccagcccccaagccccgccagc

SEQ ID NO: 811765 - DNA, 120 bp, Artificial Sequence
  ENSG00000203999_8 (sequence is synthesized)
ggctttactggggtgtaacaaacacacgataaactgcgcatattccagtgttcatgtggatgagtttggacatatgcacacacttccgaaaccaccagcacaatcaagacagcagacata

SEQ ID NO: 811766 - DNA, 120 bp, Artificial Sequence
  ENSG00000203999_9 (sequence is synthesized)
tccatcgcccccaagggtgtccttgtgtctttttgtcattcatccctcccggccgccccatccacactcccatcgcctgccgactgtggctgatctgctttctgcggctgtggattagtt

SEQ ID NO: 811767 - DNA, 120 bp, Artificial Sequence
  ENSG00000203999_10 (sequence is synthesized)
atgattatacctaccccttgggtttgttgacctgaatctacccctcagtcattgcctttccttcttgctgcagccacactggccccttgacagttccttgaacacaacaagccctttccc

SEQ ID NO: 811768 - DNA, 120 bp, Artificial Sequence
  ENSG00000203999_11 (sequence is synthesized)
acctcagggcctttgcatgtgcagtgccagatgcctggaatgtccttccttccaatctccccatggccggctcattctcatctttcttggctcaaatgttacctccccaacctagacagc

SEQ ID NO: 811769 - DNA, 120 bp, Artificial Sequence
  ENSG00000203999_12 (sequence is synthesized)
accgctgccacctcttcaccccgtcttactcttcttcaagcacttctggaggtatcttgctatttatcttgtttatatctttttcagctccatgagggcaggggattttgtctgtttcat

SEQ ID NO: 811770 - DNA, 120 bp, Artificial Sequence
  ENSG00000203999_13 (sequence is synthesized)
tcacaatgtgttcccagagctcagcacagtgtcaggcacacactaggtaacagcacctcgacttcctactgaagaaccccctcttcccttttctcagtccatgaggctgggggtgcccag

SEQ ID NO: 811771 - DNA, 120 bp, Artificial Sequence
  ENSG00000203999_14 (sequence is synthesized)
aggcctctgtctccaggggtggacatgtgaccgggtcttgctctagtgattggtccagggatgggcacatgactgagcctgcccaatgaaacttgatcttgggacttcagggttggccat

SEQ ID NO: 811772 - DNA, 120 bp, Artificial Sequence
  ENSG00000203999_15 (sequence is synthesized)
gagctggacaggctttgaactcctggatcccactgtacctgaaattaggcaccttcaactttctagttatgtgagccactgtctttcccatttttggctgaaaacagttgggactggctt

SEQ ID NO: 811773 - DNA, 120 bp, Artificial Sequence
  ENSG00000203999_16 (sequence is synthesized)
tctgtcccttgcatacagaaggtgctgactgacccctgccccatggaagaagatactccaggcagaggaaatagtgtgtatagacacccctaagcgaatgccaagcggggcactcatgta

SEQ ID NO: 811774 - DNA, 120 bp, Artificial Sequence
  ENSG00000203999_17 (sequence is synthesized)
ccaagaagaaggaggaggaggcacctgggagctgagcttaagagttagtcgggtggtcaaggtgggagaagggggtatctttagcagagggaacaaccattgcaaaagcttggaggggtg

SEQ ID NO: 811775 - DNA, 120 bp, Artificial Sequence
  ENSG00000203999_18 (sequence is synthesized)
actagttagtgaagatcaactgtgtgctgagctcgtgttgggtggcaagggacacagacgaaaagggcacggtggaacccagctacttctcacctgctccagcgcagtgcaggcttgtct

SEQ ID NO: 811776 - DNA, 120 bp, Artificial Sequence
  ENSG00000203999_19 (sequence is synthesized)
gcttttggagccgagcctggacacctccgtgtccttcccccggcagagtgctgccagcacgctgtctcagactctccagcatctcctggttgatgtgcatcatggggaccacacaagatt

SEQ ID NO: 811777 - DNA, 120 bp, Artificial Sequence
  ENSG00000203999_20 (sequence is synthesized)
attttataggctgcacaggcaaagcataaaatcacctcgggtcacatagcgagagttattctctctgcaaattctttacagtctttcctttatatccagaagagtctctgtgtggtgcta

SEQ ID NO: 811778 - DNA, 120 bp, Artificial Sequence
  ENSG00000203999_21 (sequence is synthesized)
acttgcctcgaagaccaaataattgctagtctccctttgtgaaaaggagagcaggtgtcaggctcattcatgtctcaggcacacaattgtatctagctagacttttcaaaatgtcctata

SEQ ID NO: 811779 - DNA, 120 bp, Artificial Sequence
  ENSG00000203999_22 (sequence is synthesized)
gagctgcagcacatatgaatgaggtgtccagctggtcccaaacctgtaatcggcaccccagtgagcagactggacatccccacccccacagctgccctttctcccctccactcatgttcc

SEQ ID NO: 811780 - DNA, 120 bp, Artificial Sequence
  ENSG00000203999_23 (sequence is synthesized)
ctctagggccaccacgatcccgacttgtatcaccacagatgagtttcacatgtttttgaattttacatcttatctgttttctgttcctatacaagtttgccttttttgaattccatataa

SEQ ID NO: 811781 - DNA, 120 bp, Artificial Sequence
  ENSG00000203999_24 (sequence is synthesized)
gtgggattctacaatgtgttatctcaatttgagtctgttttttttttcctgctcagcatgatgtttttgagatgcatatatgcggttttgtgtatctgtagatggttcttttttattgca

SEQ ID NO: 811782 - DNA, 120 bp, Artificial Sequence
  ENSG00000203999_25 (sequence is synthesized)
gaataatgttccagggtatggatgtaccaaagcttgttcatccattcaccagctgagggatatttggactgtttccagttttcagccattataaataaagccactagaaacatttgcaaa

SEQ ID NO: 811783 - DNA, 120 bp, Artificial Sequence
  ENSG00000203999_26 (sequence is synthesized)
tcaggcacacactagggttggccatgatttgtgaaggagatgccattttccattggatggacagtgagcaagtgaacgcttagagaagaagaggacaaaacaagggaaaagcctgcctga

SEQ ID NO: 811784 - DNA, 120 bp, Artificial Sequence
  ENSG00000203999_27 (sequence is synthesized)
aaacaattgcttcctctacctcttcccctgctagccccaagttcagctaactggctgtgtgaccctggggattgcttttcacctctctggtcccttattctcccttgtggacaaaggatg

SEQ ID NO: 811785 - DNA, 120 bp, Artificial Sequence
  ENSG00000203999_28 (sequence is synthesized)
gcctgggcatgagtttcttcaaggactcgggtagcagtgaaatccctgggaccctagcctcagtacctccccaggcaatggggtagagagcaagaaggcaggtgagcaaggaccagcctc

SEQ ID NO: 811786 - DNA, 120 bp, Artificial Sequence
  ENSG00000203999_29 (sequence is synthesized)
cgccacgcagacaccctctttccggcttctctgtcctcctactttgccctgggtttgtggacttactctgggcagatctccacgaccaaccaccccctcccttggcatgtctgtcagcac

SEQ ID NO: 811787 - DNA, 120 bp, Artificial Sequence
  ENSG00000203999_30 (sequence is synthesized)
ccttgggggaaagaatttggaaaggggagggagaaaaagaaagcagggtgcgaggggctggttcccacacctgtgtaaataatttgtcatcttaaaatgctcaagtatgctcacctttaa

SEQ ID NO: 811788 - DNA, 120 bp, Artificial Sequence
  ENSG00000203999_31 (sequence is synthesized)
acacactagtgctggaacgttcctgggatctagggagctgactccagtcctggaagctgtcccagaattctggaatgttggaattcaaacggcctcctgcccattttccggaggaggaac

SEQ ID NO: 811789 - DNA, 120 bp, Artificial Sequence
  ENSG00000203999_32 (sequence is synthesized)
ataagacccagagaggggaaggggttggcctgaggtcatacaatgtgcagagacgagctagagtttgctgggagaaggtgcgggtgtgtggacaagtcagcatctatctcccattttcag

SEQ ID NO: 811790 - DNA, 120 bp, Artificial Sequence
  ENSG00000203999_33 (sequence is synthesized)
atgacacagcacttttgggcacaaggcagggcccagaggggtgcgtgggggccgcagcccagcccccaagccccgccagcggccgacaagggaggtgccatgtggactgtttcacagctg

SEQ ID NO: 811791 - DNA, 120 bp, Artificial Sequence
  ENSG00000203999_34 (sequence is synthesized)
gagaaactgaggcacagaggggctgagtcacctgcctaacgcactgagcagtctggctccaggacctgtgctctgaaccagcacctggcacatagctggcaccgacatggtctccgtgca

SEQ ID NO: 811792 - DNA, 120 bp, Artificial Sequence
  ENSG00000203999_35 (sequence is synthesized)
ctgccatggatgagagcaatgctggctgcggtgtcgggcggagctgggttccaatgctgacttcacctttctcaggctgcacagcctggagcacgtggctgcaccctaccgtgcgtcagt

SEQ ID NO: 811793 - DNA, 120 bp, Artificial Sequence
  ENSG00000203999_36 (sequence is synthesized)
actgcagtgagggctgtgagtgtggggtgtctcaactgcacctggacacgcagaaggcactctgtgaacactgactttcattggcccaggcctctgaatccatgacagttcaatctctga

SEQ ID NO: 811794 - DNA, 120 bp, Artificial Sequence
  ENSG00000203999_37 (sequence is synthesized)
ttcactttatcagaaaccgctgagctgttttccaaggtgtctgtaccatttttcatccctaccagcaatgtatgaaagtgtcagttgcttcgtattctcaccagcacttggtggtgttag

SEQ ID NO: 811795 - DNA, 120 bp, Artificial Sequence
  ENSG00000203999_38 (sequence is synthesized)
ttttttgtgtgtgtacatgtgttttacttttagtcattcaaataggtgataatagtatctcattgtggtgttagtttgcatttccctaatgactaatgatgttgaacatctttgtatgtg

SEQ ID NO: 811796 - DNA, 120 bp, Artificial Sequence
  ENSG00000203999_39 (sequence is synthesized)
tttctttgccatccgtatattttctttggtgtagtatctgttcaaactttatgtcagttaaaaaaaaagacccaattgttttcttcttaatagatttggagagttctttatatatattct

SEQ ID NO: 811797 - DNA, 120 bp, Artificial Sequence
  ENSG00000203999_40 (sequence is synthesized)
ggatactagtcaagcctttgtgaaatatgtgatttgcaaatattttctcctgttctgtggcttgtctttttattctttcaataggtagactttaataacatcgttttgttttctttttaa

SEQ ID NO: 811798 - DNA, 120 bp, Artificial Sequence
  ENSG00000272345_0 (sequence is synthesized)
cttaaagtgaaaaaagacacccccacctttaccctacttgatatccaggtccttttcctccaagaatatttctagctgcttctggttttgctagtttatttcaaaaattacaattgtttg

SEQ ID NO: 811799 - DNA, 120 bp, Artificial Sequence
  ENSG00000272345_1 (sequence is synthesized)
agtcaaatctatacttgatattcattgttgggtttctttaggtcattctgctgttctctcagtttcccaggtgttttgtgtgtcttccttgtgctattaattttcctgtggccttgttgg

SEQ ID NO: 811800 - DNA, 120 bp, Artificial Sequence
  ENSG00000272345_2 (sequence is synthesized)
tcagatccacagaggtaaatgcaagtgtttttccttgcttcagaacatgtgctgtaatcactatatcttctcctaattttgcaggtgacatgtaccttgaaagaaaatgaatatagttaa

SEQ ID NO: 811801 - DNA, 120 bp, Artificial Sequence
  ENSG00000272345_3 (sequence is synthesized)
gttcctatgtaacttattttactcctaaaaatagttttaacggtagtattggtaagctttctgtactatcaaatgtgaatggctggtcctaaccaggttctattttacccattccttacc

SEQ ID NO: 811802 - DNA, 120 bp, Artificial Sequence
  ENSG00000272345_4 (sequence is synthesized)
cacacaagtttcttttcccaaatatgtgagaagaggttttcttgcctccccttttttccctttacatttcccacttcacatttatttggggctggtgaaagatttcctccagctttcatt

SEQ ID NO: 811803 - DNA, 120 bp, Artificial Sequence
  ENSG00000272345_5 (sequence is synthesized)
taatctccttaacttcttagatgaaatatcacttggtgtctgtatattgtcctatccatatttacaatttatttgactctaaaatgacaatataacaactataaggaattgatatgatgt

SEQ ID NO: 811804 - DNA, 120 bp, Artificial Sequence
  ENSG00000272345_6 (sequence is synthesized)
ccttacaatcttgatgatggactgtctatatttttaagagatgtacatcctagtcacttgtaatcataagttgtctttaactcagctggctccagctaattaaaaaaaaaattggggaga

SEQ ID NO: 811805 - DNA, 120 bp, Artificial Sequence
  ENSG00000257124_0 (sequence is synthesized)
gaaaatgttaaaaacatacttttaaaagaaatattttgctaatacaaacaagtggaaaaatagtcaacaggctttacagtaggtactataggaggtagggagagagatcaatcaaccaat

SEQ ID NO: 811806 - DNA, 120 bp, Artificial Sequence
  ENSG00000257124_1 (sequence is synthesized)
taatagacagatgaagggtatagcctgctgaacctgttatttgagagactatttagcctaattaccagcatgtcaaagaaaagatgacactcacaactttgtccaaatctgaggcaagac

SEQ ID NO: 811807 - DNA, 120 bp, Artificial Sequence
  ENSG00000257124_2 (sequence is synthesized)
acgttgcagaacaatgtctcaggtattcaggcatgcaatactttccacagatgtcagaaatggcaacttgctgcagggagacacaaggtcattccatgcaccattatcaggattgtggtg

SEQ ID NO: 811808 - DNA, 120 bp, Artificial Sequence
  ENSG00000257124_3 (sequence is synthesized)
cacagactgtgagcagactacttaatgcatctctgattcagccagccattcttcttgtcttccaaatgctttgtattaagtcattgttgagctctataaagtcctttgaaaacacaaaaa

SEQ ID NO: 811809 - DNA, 120 bp, Artificial Sequence
  ENSG00000287020_0 (sequence is synthesized)
acacttctcaaaggtatcttgctcatagctgattgcttaacctggatccattatttccctcatgttttgttccagaaggttttgttttatagttttatgtctgcagaatggatgtcagga

SEQ ID NO: 811810 - DNA, 120 bp, Artificial Sequence
  ENSG00000287020_1 (sequence is synthesized)
gagggtggggattgctgaaaagcaaatggatttaattattacaaatgtcaattaaattgagacagagaaaatgtgaggtgaagtctggagctgactagtcggaattcatttttaaacaat

SEQ ID NO: 811811 - DNA, 120 bp, Artificial Sequence
  ENSG00000287020_2 (sequence is synthesized)
attgaaaatatatgttataaacagaatgatgttgattgcagaataatcttgttcaataatgtctctagctatgactcacacatagcccaggaagggagaatgagagagaagaaagaaacc

SEQ ID NO: 811812 - DNA, 120 bp, Artificial Sequence
  ENSG00000287020_3 (sequence is synthesized)
cccctcaaagccctgggctcaagcaagcctcctgcttcaactttccaaggagctgggactacagatgtgtgctacctcacctggatagtttttattttttatttttgcagagacgaggtc

SEQ ID NO: 811813 - DNA, 120 bp, Artificial Sequence
  ENSG00000287020_4 (sequence is synthesized)
tgaactcctgacctcaagcgatcctcctgtctcagccttccaaagaactgagattacaggaatgagctaccatgccaggccttcagatttccattattcttttgttaaaattttttttcc

SEQ ID NO: 811814 - DNA, 120 bp, Artificial Sequence
  ENSG00000287020_5 (sequence is synthesized)
ttcttttgttaaaattttttttccacaaatgtctcagaagatatggtgactaaagataccttcattatccaaaaggaaatcagtcaaacaaataaaaatcatagttgaatcaggacccta

SEQ ID NO: 811815 - DNA, 120 bp, Artificial Sequence
  ENSG00000278981_0 (sequence is synthesized)
tctgggagggtgaaaaaatactgatcttgagtgaaaatgggctcaaattcatctatcccttcaatatccacccagaccactaaggaggcagttgcatcacctttgtctttggcttggact

SEQ ID NO: 811816 - DNA, 120 bp, Artificial Sequence
  ENSG00000278981_1 (sequence is synthesized)
gtgaggcagtatttattgccattttcatagtcaaggatttgcttagcatgaatatcccctgtcaaagggtcaatgaggaagagatcatgatcataagacattccatgagtgagaaaacag

SEQ ID NO: 811817 - DNA, 120 bp, Artificial Sequence
  ENSG00000278981_2 (sequence is synthesized)
ggtgatacaatagaataggtcaattctccatacggaccagcatcaaaatccagagcatttatagagcatatggtagaggaaataggcagattttctggaacaatacagctgaagcttgag

SEQ ID NO: 811818 - DNA, 120 bp, Artificial Sequence
  ENSG00000278981_3 (sequence is synthesized)
aacataaactgaggtgcatggtcgttatcatccaggacactgacaaacacaactgcaaaagaaaaatgtttcttttctgcatctgaagcttggacagttaaggtgaattttgtcattttt

SEQ ID NO: 811819 - DNA, 120 bp, Artificial Sequence
  ENSG00000278981_4 (sequence is synthesized)
tcataatccagaggtttaatcaaataaagaactccagtgttttcttctaagtaaaaatgtcccttctcatttccagagatgatgttgtagatgatttctgcatgtgaccctgtgtcacgg

SEQ ID NO: 811820 - DNA, 120 bp, Artificial Sequence
  ENSG00000278981_5 (sequence is synthesized)
tcatttgctgagaccacagtgatgtgactccctagaggggtgctttccttgacatgggtgtgatagctcaggctgctgaagtttgggggattgtcattgacatcaagtacttgtattgat

SEQ ID NO: 811821 - DNA, 120 bp, Artificial Sequence
  ENSG00000278981_6 (sequence is synthesized)
atggctagcacttgcttctctgtccagactgtgaagcaacacaagataaccgacttgcttataaggatattctgaatgaaagaacttagtttccacatgaaaattgttctgtgaattacc

SEQ ID NO: 811822 - DNA, 120 bp, Artificial Sequence
  ENSG00000278981_7 (sequence is synthesized)
actgatgatggaatattcaacatatgtgttttcacgggtccagtcatggtcgatgtttgaaaatgtaacaagcgtgcttccaaccagagcatcctcacttaggctaagattataggattt

SEQ ID NO: 811823 - DNA, 120 bp, Artificial Sequence
  ENSG00000278981_8 (sequence is synthesized)
gactgtgaattcaggggcataattgttcatatcttctattcctatctccactaaagtaagagctctcaggtcaggatttccaccatcactggcttccacaagaaattgagttgttgatat

SEQ ID NO: 811824 - DNA, 120 bp, Artificial Sequence
  ENSG00000278981_9 (sequence is synthesized)
tgtatccagaagtaatacgggactgatagtaaatattgtgcctgaaaaataagacatagtatttcaacactgtgaggtgcagttttgatgatccatttaatcggcagttgactatccaat

SEQ ID NO: 811825 - DNA, 120 bp, Artificial Sequence
  ENSG00000278981_10 (sequence is synthesized)
gtctactaatatgtgtttaattctttgttagatctgttaagtcacaatgaacaatgactccaaatagaaatacaaattattgtatttatatgtttataacatgtaagatacagaaataat

SEQ ID NO: 811826 - DNA, 120 bp, Artificial Sequence
  ENSG00000278981_11 (sequence is synthesized)
attcatgacattcactctgtgaaatatgtgtgctgcttgaggttgctgttgccacaaattcctctgaattttgtttttgtatagtaagttgttccactattcttaaaaaatatttttgtt

SEQ ID NO: 811827 - DNA, 120 bp, Artificial Sequence
  ENSG00000278981_12 (sequence is synthesized)
tgtaaaatttataccccattctactacccacaaacacatgtataaagatattctggcataaagatacttattctggaaatacttgttgatattcaagccaaatgaaagcagtaaaaatga

SEQ ID NO: 811828 - DNA, 120 bp, Artificial Sequence
  ENSG00000248709_0 (sequence is synthesized)
catagtatacaatttatttctccatgggcaacaagacatgccagcaactgcacggctacttctccatttagccatttttcctccttttcaggacagagaataaagggtccctgtattcat

SEQ ID NO: 811829 - DNA, 120 bp, Artificial Sequence
  ENSG00000248709_1 (sequence is synthesized)
gccttcctggaaatctcagtgcaaggccctatcaggaggtttcctggagcagctaagggaacagctagaccacccaggaagaaatgacagaagcctacctgacttccaatctgcttgctt

SEQ ID NO: 811830 - DNA, 120 bp, Artificial Sequence
  ENSG00000248709_2 (sequence is synthesized)
catggtgtaatgggggcctagacagaagcaccccaaggacacttacaacaactgttctgccagctctagtccattggagaagatgtgccaacataccttctcaccatccctagagcccaa

SEQ ID NO: 811831 - DNA, 120 bp, Artificial Sequence
  ENSG00000248709_3 (sequence is synthesized)
ccttgctatggaaaggtcaaacccttaccattggccctgccaaggatccccagacagagaagcacaatggaggccataaattatggcttcttatcatggcctccacataacttaaactct

SEQ ID NO: 811832 - DNA, 120 bp, Artificial Sequence
  ENSG00000248709_4 (sequence is synthesized)
ggatggtgaatgaaatctggggccaagtcttaaagggtcagggtagccaatgagcataactcaatatttgtgtttctaagagaaaaccacagaacctccatatccatggcaaactggcca

SEQ ID NO: 811833 - DNA, 120 bp, Artificial Sequence
  ENSG00000248709_5 (sequence is synthesized)
agtagtgttttgtgtacaccattcactatttgtctacttgggttaaaaatgttttatattagttagcaatgtttaaacattgggagaattaaagggaaatgaaaacgtacttcccacaaa

SEQ ID NO: 811834 - DNA, 120 bp, Artificial Sequence
  ENSG00000248709_6 (sequence is synthesized)
tacttgcacataaatattcacagcagcattgtttataattgcccaaaactagaaacaacccaaatatccatcaactgatgaatgataaacaagttgtggtatattcatccaataaaacaa

SEQ ID NO: 811835 - DNA, 120 bp, Artificial Sequence
  ENSG00000248709_7 (sequence is synthesized)
tattcagcaataaaaataaacaaatcaggcacttaatataattgaatatcaaggtcattatgttgagtgaaagaggccagaaaataaaagtatacactatttgattccatttatataata

SEQ ID NO: 811836 - DNA, 120 bp, Artificial Sequence
  ENSG00000248709_8 (sequence is synthesized)
ttctagaaaatgaaaaccagtctatacttacagaaaacaaggtggtagcttacagagatggggtagagggagggagagatgacagagaggcataaaaaaactttccggacaatgaaaatg

SEQ ID NO: 811837 - DNA, 120 bp, Artificial Sequence
  ENSG00000248709_9 (sequence is synthesized)
ttctgtattttaattgtggtgatggtttcatggatgtacaagttcatcaaatctcatcaagttaaatatatgcatttattttatattaagtgtacctcaataaagcagaaaaatttaaaa

SEQ ID NO: 811838 - DNA, 120 bp, Artificial Sequence
  ENSG00000248709_10 (sequence is synthesized)
gggtaaacagtctatttactttaaccaagcagtctgttcattaatcctctatgactgaatccccatagtatacaatttatttctccatgggcaacaagacatgccagcaactgcacggct

SEQ ID NO: 811839 - DNA, 77 bp, Artificial Sequence
  ENSG00000248709_11 (sequence is synthesized)
ttctccatgggcaacaagacatgccagcaactgcacggctacttctccatttagccaggtcttgctcgcacctctgt

SEQ ID NO: 811840 - DNA, 120 bp, Artificial Sequence
  ENSG00000248709_12 (sequence is synthesized)
tagtatacaatttatttctccatgggcaacaagacatgccagcaactgcacggctacttctccatttagccactggagatgatctccacaccacaccgctgctgccagagggagcatgga

SEQ ID NO: 811841 - DNA, 120 bp, Artificial Sequence
  ENSG00000248708_0 (sequence is synthesized)
agtgcaataaagaaagatgttaaaacagagtcgagataggggaataatgtttaattggctctccagagtccactaattttcagaattggaaacctagtgtttgatttgttctttttagtc

SEQ ID NO: 811842 - DNA, 120 bp, Artificial Sequence
  ENSG00000248708_1 (sequence is synthesized)
agcgagaagaaaaaatatccttcataaattctgaatgacaaatttgcccatccttttttgcatgtggttccagcatcccagggaatctaaagtgtcatttcctctctggaagaaaggaag

SEQ ID NO: 811843 - DNA, 120 bp, Artificial Sequence
  ENSG00000248708_2 (sequence is synthesized)
cacaaaacatgctaggacaaaattggagaaactgattattttacccaggctttgactggaatggcatgattcctttaaaaaattcaagcttgacttatacagccaattaagccctgttgg

SEQ ID NO: 811844 - DNA, 120 bp, Artificial Sequence
  ENSG00000248708_3 (sequence is synthesized)
aacagacatttgataatgaattgttacttcttactcatgtttatatataaactcttgactgtcaatgctataaaagacaattcaaaaggaagaaatgcagttatattgaaacaccattca

SEQ ID NO: 811845 - DNA, 120 bp, Artificial Sequence
  ENSG00000248708_4 (sequence is synthesized)
aaacatcacaacaagaaatgcagtctactataaactgagtaaatagaaagatatacagtagtactgaggctactaccaggagaaggcaatattggtactgaacaaaaaagagtttcttca

SEQ ID NO: 811846 - DNA, 120 bp, Artificial Sequence
  ENSG00000248708_5 (sequence is synthesized)
cactgaagtacagcacagttgagaagcatgaaataaagacgttttctagactccaattctatcatttccatgagaagtcctggaagccgtctcccacagataccaagagaccactgtata

SEQ ID NO: 811847 - DNA, 120 bp, Artificial Sequence
  ENSG00000248708_6 (sequence is synthesized)
tccagaagtgtgactactgtgtaatatgaagttataactttaatttcttcaggaaccaccatactgctttccacagcaggtttaaacagtatccattcagaacaatgacaagaaagcttt

SEQ ID NO: 811848 - DNA, 120 bp, Artificial Sequence
  ENSG00000248703_0 (sequence is synthesized)
gttcatcaacataacccagttagggtcgcactcatcacggggcccccattgcctctggcgcaccccacgactgacatctgcggggccttcgcgctaggcttcgagtttcagcttccgcac

SEQ ID NO: 811849 - DNA, 120 bp, Artificial Sequence
  ENSG00000248703_1 (sequence is synthesized)
caggcctgcctttctgcaggggccagggtgggggtcgtgtgctgattgggccctctgaaccgccaccgctgcagaggggctgttccttctgtcacatcccttgtgcccgaatccaccctg

SEQ ID NO: 811850 - DNA, 120 bp, Artificial Sequence
  ENSG00000248703_2 (sequence is synthesized)
tgtcttctcttttctcagcaggacattttaaaagcccagaccccctccttacagagcaaatgtccaggcttcggaggtcactgtcacatcccaagaacccccttcaccaggtgccactct

SEQ ID NO: 811851 - DNA, 120 bp, Artificial Sequence
  ENSG00000248703_3 (sequence is synthesized)
tgagactggactgaagccccctggagagttccacttgcctttgtcctgctgcctgaggtgaggacatggacggccgggtacaagacggggcaggcaacctcgcagtggtggtaaccctgt

SEQ ID NO: 811852 - DNA, 120 bp, Artificial Sequence
  ENSG00000248703_4 (sequence is synthesized)
gcatgaaccctgggcctggcacgtggacctcctgtgaccgtccccacaggcccgtgaggctgagcttggcactgcccaagaccacacagtccatgcgcggtggagctggggtccaggctg

SEQ ID NO: 811853 - DNA, 120 bp, Artificial Sequence
  ENSG00000248703_5 (sequence is synthesized)
cagtgaggcctagcagagcagggtcggctgcgggcttgagtcctggggtgcccctgggctgacgggccctgcctgacctgctcctccagtgccccagccctgccccacccacgtcccctc

SEQ ID NO: 811854 - DNA, 120 bp, Artificial Sequence
  ENSG00000248703_6 (sequence is synthesized)
ctctcactgccccctggcccactccgctgcggtctcagtgccttcccaggctgggcatcatctgatgggaggaaaatgagggccccagactctgtgtcatcctggcaggacccctcccct

SEQ ID NO: 811855 - DNA, 120 bp, Artificial Sequence
  ENSG00000248703_7 (sequence is synthesized)
cccatggctttgagcccatgagatggccttggacaaagcggcaatgggcccttcctgagacacagtgcggccatctactggaaaactgcccagtgtgactctgatgactgtgatgtgaat

SEQ ID NO: 811856 - DNA, 120 bp, Artificial Sequence
  ENSG00000248703_8 (sequence is synthesized)
cctacagcaaagttgagcagtgcgcaacctgggctactgcacctggcagccccggctcctcctcgtctgcctcttcctgctccttcattctcccccagagctctaattgtcactgagatt

SEQ ID NO: 811857 - DNA, 120 bp, Artificial Sequence
  ENSG00000248703_9 (sequence is synthesized)
ttatgtttcatttaacaaatgactgtctccccgcttgaacagaacctccatggggggagggaagagtgtctgttgtataaatagttgtatttcagtgcataaaacagtgcctgcctcaaa

SEQ ID NO: 811858 - DNA, 120 bp, Artificial Sequence
  ENSG00000248701_0 (sequence is synthesized)
aaaatcataactaaagcaagctttgttcactggggtaaaatctcttgccttttgcatgtgtttccatgcagaggcatcccatttgaacaacactctttgtctttttctgcttcacttcct

SEQ ID NO: 811859 - DNA, 120 bp, Artificial Sequence
  ENSG00000248701_1 (sequence is synthesized)
cattcccttgggaggagaaggatctaactgattgattcctgggcttaaacatgtgactccagtatatgccctgcacacagttcttctggtgagttactagtgcccttgctgagtatttgt

SEQ ID NO: 811860 - DNA, 120 bp, Artificial Sequence
  ENSG00000248701_2 (sequence is synthesized)
ttattcctactaaagccttaaagatcaggacttttaccaaatactcttgaagccctcttatttgcctcatgcccctgcctttttcccttaaactagaattaacgtagtgaaaaataaaat

SEQ ID NO: 811861 - DNA, 120 bp, Artificial Sequence
  ENSG00000248701_3 (sequence is synthesized)
aatatccgaaatttatgtgacatgttttcccaagaagctcacagatcttttccagctacatcctgctgagaggggaaaaggatgaaaacatcatctccactttgcatttgtgaaaacaga

SEQ ID NO: 811862 - DNA, 120 bp, Artificial Sequence
  ENSG00000240578_0 (sequence is synthesized)
atggggagctgggtcctctgctatgtgaccctgtgtctcctgggagcaggatgctgacatctatcagatgccattccagctcactggggctggatgggatgtgactctggagtggaaacg

SEQ ID NO: 811863 - DNA, 120 bp, Artificial Sequence
  ENSG00000240578_1 (sequence is synthesized)
cagagaggagatctaactgaaggctacgtgtctgccaagaggagaaggggctatttcttctcagggtgaagttggcccacaccagccaaacagctttgtacttctgtcctgggagcgcac

SEQ ID NO: 811864 - DNA, 120 bp, Artificial Sequence
  ENSG00000247708_0 (sequence is synthesized)
gggcatcggtttctcccagcaaagcttggagggtttagctgcgcggagagctcagcgagctcttctgtgtctgtttggggcgtgtgggctccgggagcgtgaggaccgggaagctaggag

SEQ ID NO: 811865 - DNA, 120 bp, Artificial Sequence
  ENSG00000247708_1 (sequence is synthesized)
gctccttcccttctggcggctccctcactgagaccgggcggtttggttgcgggggaagtggagacgagccacccttgacctttgactgcaagaactcaccttgagcaggatagaggcacg

SEQ ID NO: 811866 - DNA, 120 bp, Artificial Sequence
  ENSG00000247708_2 (sequence is synthesized)
tggacggtgaccctcgggatgcaataaatgctgagacagatcaggtgtgcaaggcacagagctagaggccagaggcctttcttctccaaccttcagtcacctctttttaaagtgaagcca

SEQ ID NO: 811867 - DNA, 120 bp, Artificial Sequence
  ENSG00000247708_3 (sequence is synthesized)
gcatcctcctcggggtttactgtgaaaattaagtgagctgacgcgtgctgtgttttgatgttgcttggctcctacaaacattgagtgggccagacactgttctgaaaaatacgcagtcga

SEQ ID NO: 811868 - DNA, 120 bp, Artificial Sequence
  ENSG00000247708_4 (sequence is synthesized)
cttttgaacagcacaggcttgaactgcatgcggccactaatactcggacttccttctgcctctgccatccctaagacagcaagacccacccctcctgctcctcagcctactcgatgtgat

SEQ ID NO: 811869 - DNA, 120 bp, Artificial Sequence
  ENSG00000247708_5 (sequence is synthesized)
gatgatgcagagattcagagagtctaagcaacttttctaaatcatctagctggaattcagtaactgagccaggatctaccccaggtctgtctgactccaaagcctgtgtcttccagcaca

SEQ ID NO: 811870 - DNA, 120 bp, Artificial Sequence
  ENSG00000247708_6 (sequence is synthesized)
tgggcacgttactgcgttccccagcctctcttgcagcaaggtgaccaagtgaacactttctggctaatgagatgtacatagaagtcttgtgtaatacttctgggaagctttctgaaagag

SEQ ID NO: 811871 - DNA, 120 bp, Artificial Sequence
  ENSG00000247708_7 (sequence is synthesized)
agcgaatacactcttctcccattttcctcaaaaaccttctagcaggaatgtggatatgatgtctggagctctagcaaccatatcagaccacaaggatgaatgtacaccccaggaatggaa

SEQ ID NO: 811872 - DNA, 120 bp, Artificial Sequence
  ENSG00000247708_8 (sequence is synthesized)
gagaggaaagccagaaaaagactcggtccctgatggctgaagagctaccatacctgcccctagatcttctatttctgatcatcttctatgcaagggggcttaccttggagaatggcacca

SEQ ID NO: 811873 - DNA, 120 bp, Artificial Sequence
  ENSG00000247708_9 (sequence is synthesized)
ccgtctcatcagttactcaagccatgaacctgctgccatatttgagtctttcccctccctcggagcctacatccgactgctcagtggtgtctcgtgtcgtccttattttgtcacttgaca

SEQ ID NO: 811874 - DNA, 120 bp, Artificial Sequence
  ENSG00000247708_10 (sequence is synthesized)
agcattggctgagtccctgctgtgtgccctgcactgcactggacattcagagtacaacacagtccctataatcaggctcttgcaatcccgagggatcaagatgcaaagatcgttgagtcc

SEQ ID NO: 811875 - DNA, 120 bp, Artificial Sequence
  ENSG00000247708_11 (sequence is synthesized)
atcagccctacaccctgcatctcctgctatgggagcagagtgggaaggacaccaaggcttacagaggctgtgcgcaatcacgtggcgtcagcagcagagccccgtgcccaggcacctgga

SEQ ID NO: 811876 - DNA, 120 bp, Artificial Sequence
  ENSG00000247708_12 (sequence is synthesized)
atttctgatcatcttctatgcaaggcctggaatgtaatcatggatagccatggatgatcagctttcatcatgtgggcatggaacaagatggaaggaagctggggccctgagtgacctgtg

SEQ ID NO: 811877 - DNA, 120 bp, Artificial Sequence
  ENSG00000247708_13 (sequence is synthesized)
gagcagaggcctttgcccaccctgggctgcctgatttcccctggactatcatgagacagaagaaaaagcttctatcttatttgaaccactgtgttttgggaaccttggactagagcagcc

SEQ ID NO: 811878 - DNA, 120 bp, Artificial Sequence
  ENSG00000247708_14 (sequence is synthesized)
tagccttcatacactaacaaggtacattactgacttctcctgttagctctgtcgtgcttacatcatgatgcccatttttcaggtaaagaaatagtggctcaaacaaggtgagtggccaaa

SEQ ID NO: 811879 - DNA, 120 bp, Artificial Sequence
  ENSG00000247708_15 (sequence is synthesized)
gataacatagctcatatgtagcaaagcagggactttgatctgggtctcagcactttgtccaccatggtgtccactggttgactcaggtgattcacctgggtaacaaggcttcctgaaggc

SEQ ID NO: 811880 - DNA, 120 bp, Artificial Sequence
  ENSG00000247708_16 (sequence is synthesized)
ctggtaaatgtcattgccagttcattgaccgggagcccccatgtgtttctaccaagaccccgctcctctcttcgcatacagtaatctgttgtatacactttgtacctcacccacaagcgt

SEQ ID NO: 811881 - DNA, 120 bp, Artificial Sequence
  ENSG00000247708_17 (sequence is synthesized)
gtgaaaagccttagctgttctggtgccaggactaatgggagctgcttacagtctatgaggacaatcagacttggccgcctgccttctttccatataatttttaataagccagtaatatct

SEQ ID NO: 811882 - DNA, 120 bp, Artificial Sequence
  ENSG00000247708_18 (sequence is synthesized)
ctccaagcactacagacctctggcttggaccaggaaacctggaactgtttaagagaacattaatttcctttgagctaggattacaggccatctaaaacttcttaatgaatggccacactg

SEQ ID NO: 811883 - DNA, 120 bp, Artificial Sequence
  ENSG00000247708_19 (sequence is synthesized)
cctttttgaagcatttgtgtatttgccaacacagactcgaaggttgcattagatattgggagttgtcttttctggaagttagggtcttctagaagctgacgggcgatggaggcctgatgc

SEQ ID NO: 811884 - DNA, 120 bp, Artificial Sequence
  ENSG00000247708_20 (sequence is synthesized)
tctgccatttctttggtgagacctctggactgcttcgttcatagtcctctttcccacatatgctcccctgatgtcttactcttttattttatgggtttttggtaactgaaacattttaag

SEQ ID NO: 811885 - DNA, 120 bp, Artificial Sequence
  ENSG00000247708_21 (sequence is synthesized)
actcaattccgccactttgttgaagataaaatcaagttcaaaccctgctttattttatttttcttttttttggacggaactagtgaggaaactgtgtgtgcaaaccccagaaaacccact

SEQ ID NO: 811886 - DNA, 120 bp, Artificial Sequence
  ENSG00000247708_22 (sequence is synthesized)
tgagacctgatgctaattggctggatgatgttcaataggacacggctccactgagcctcaatttcctgatgagggttaaactgatgattcttaaccaggtctgacattctgtaaattaag

SEQ ID NO: 811887 - DNA, 120 bp, Artificial Sequence
  ENSG00000247708_23 (sequence is synthesized)
catacttgcttctgatttcacagtttccatgggatcagaggattgaaatgtcaaggaacctcccttgatgtccccctaagactctgaattgaactgtgatgaggacccttttgagaatct

SEQ ID NO: 811888 - DNA, 120 bp, Artificial Sequence
  ENSG00000247708_24 (sequence is synthesized)
ttcagtgatccccttctctaggaaggaagggtgaagtatgctttgtaagagagattgtctatttgtcttttatctcctgatttcaaacacagtggttccgctaagctgcatcttttttgt

SEQ ID NO: 811889 - DNA, 120 bp, Artificial Sequence
  ENSG00000247708_25 (sequence is synthesized)
tctttctgctgtgaaaataattttgtcggaaaatgtaaccagtgcaattatactgaaatttcatatgaaatgttaataaaatggatgtgtgaccaataaaatacttgatgccaaattaaa

SEQ ID NO: 811890 - DNA, 120 bp, Artificial Sequence
  ENSG00000247708_26 (sequence is synthesized)
cagccacccccgtgggctgtttcagctccagcattctctgggccaagattaaacgttaatttgtaatggggtctgctgaaggtatcttcggttgcagcctcgaggcagattactccggaa

SEQ ID NO: 811891 - DNA, 120 bp, Artificial Sequence
  ENSG00000247708_27 (sequence is synthesized)
tctcagtggaatgaatcagaggcctgcttttggcagtaagcatctgaagcttaaccagggaaagatgacaatttatgctgcgtcgaagaggacgatagctttcttgttttactgccagaa

SEQ ID NO: 811892 - DNA, 120 bp, Artificial Sequence
  ENSG00000247708_28 (sequence is synthesized)
gaacaccatggggtagggatctgaagatggaaaaccaacgctgtgtcggctggaaaacttttgtttttatttatgagactgatttgtatatgttaaggccaattggtagaaattggccca

SEQ ID NO: 811893 - DNA, 120 bp, Artificial Sequence
  ENSG00000247708_29 (sequence is synthesized)
tttgcaaattggcagacagagaaaaatcttgatttaggactaaaagcaacgaagctaagacaataaaaagagaatcatgttcattaagttaaaaaagcagactcctattcaagctttttt

SEQ ID NO: 811894 - DNA, 120 bp, Artificial Sequence
  ENSG00000247708_30 (sequence is synthesized)
ttaacttctctaattgcaaatgagtttgagatagtttacagagacgcaatataataggataaaaataaatagattaagaaatcaggacaaagggaaaataaagaaaggataatagaataa

SEQ ID NO: 811895 - DNA, 120 bp, Artificial Sequence
  ENSG00000247708_31 (sequence is synthesized)
agccagagaaagataataaacagaactatatatgatactcttgggaacattaaaaataatatttaaaaaacttttaaattgaggtataacgtgcatataagtaagaaagtcttaagtgtt

SEQ ID NO: 811896 - DNA, 120 bp, Artificial Sequence
  ENSG00000247708_32 (sequence is synthesized)
tagctagctcaatgaagcttgtggcccaaaattacctgagacaggtctcaaccaacttagaaagtttattttgccaaggttaacagcctcaggaggtcctgacgacatgtgtccatgatg

SEQ ID NO: 811897 - DNA, 120 bp, Artificial Sequence
  ENSG00000247708_33 (sequence is synthesized)
aatacatcaatcaatacatgtaagatttacattggtttgatctggaaggagggtacaatttcaactgggatggggggcacttcctggtcataggtagatttaaaatgtttctacctggca

SEQ ID NO: 811898 - DNA, 120 bp, Artificial Sequence
  ENSG00000247708_34 (sequence is synthesized)
ttcctggtcataggtagatttaaaatgtttctacctggcaattggttgaaagagttactatcaatagaaaggaatgtgtgggttatactaaggggttgcgaaggccaaggctttatcatg

SEQ ID NO: 811899 - DNA, 120 bp, Artificial Sequence
  ENSG00000247708_35 (sequence is synthesized)
cagctgaagcctccaagtagcaggcttcagagagaagagtttgtaaatgtttcttgtcagacctaaggtctgtgttgatgataatgctggagggtagatgaggcaggtccgatcctctct

SEQ ID NO: 811900 - DNA, 120 bp, Artificial Sequence
  ENSG00000247708_36 (sequence is synthesized)
tccatcgtgtcctgaactcgtttttcaggttgactctggaatggccttggccaagaggaggggtccccattcacatggttgatgggaggccttagaattttagttttggtttacaggttt

SEQ ID NO: 811901 - DNA, 120 bp, Artificial Sequence
  ENSG00000247708_37 (sequence is synthesized)
tacatgtgtggccaacaggtgaccaccaccaataaagatatagaacccttgtagattctattaggcttccccttctcatcagcacctcagaagaggtggccactactccaacttttctca

SEQ ID NO: 811902 - DNA, 120 bp, Artificial Sequence
  ENSG00000247708_38 (sequence is synthesized)
ccatatattagttctgcctgctcttaagccttcatgtaaattggattacatggtaaatactcctttgtatctatctcccttcactattacatctgtgagtttcactcacgttattgtagg

SEQ ID NO: 811903 - DNA, 120 bp, Artificial Sequence
  ENSG00000247708_39 (sequence is synthesized)
cagctgtaccctcctctccctcactgctgcatagtactctttatatctcatgtgaaggacttatccattctactggtgagggaaatgtgggccatttctactttttggctttatacatga

SEQ ID NO: 811904 - DNA, 120 bp, Artificial Sequence
  ENSG00000247708_40 (sequence is synthesized)
aggtgctgtgaacattcttaggcatgtggtatggtttggatctacgtccccacccaaatctcatgttcaattgtaatgcccagtgttggagatggggcctggtggaaggtgattagatca

SEQ ID NO: 811905 - DNA, 120 bp, Artificial Sequence
  ENSG00000247708_41 (sequence is synthesized)
tgggggtagagttctcatgaatggtttggcaccatcccccacttggtactgtatagtgagtgagttctcactgggatctggttgtaaaagtgtgtggcacctccccccacctaatccccc

SEQ ID NO: 811906 - DNA, 75 bp, Artificial Sequence
  ENSG00000247708_42 (sequence is synthesized)
gttgtaaaagtgtgtggcacctccccccacctaatcccccacttttctcctgctctggtaatgtaaagtgctgtc

SEQ ID NO: 811907 - DNA, 120 bp, Artificial Sequence
  ENSG00000247708_43 (sequence is synthesized)
gacagctttccgtggaaaagagtagatctttcatggatggttgaagttgacaggcaggcatcctgtctttcagggctggggctgggaatggcgtttctgacttcgccattgatgggctag

SEQ ID NO: 811908 - DNA, 120 bp, Artificial Sequence
  ENSG00000247708_44 (sequence is synthesized)
aggagtcccatccctgccaactgtttcatacacattgcagcatttcatcctcacacccaccctgtcatgtgggtattaccatcccatcttataggagggaaagtaggtacatgaaggcac

SEQ ID NO: 811909 - DNA, 120 bp, Artificial Sequence
  ENSG00000247708_45 (sequence is synthesized)
tcagctttgaaggatgaagctggaagacaccaccaactcttctgcctctgtggtgatctttgcagttttttgagcaaggataactgcatgatcttcggcaagacctttaacatctctgta

SEQ ID NO: 811910 - DNA, 120 bp, Artificial Sequence
  ENSG00000247708_46 (sequence is synthesized)
ctttggtgtccgtgtctgtaaaggagactgttggagaccagaatatgccaccccaaaacatgaaggactgttgagccaaagacaactaagaagtggatgcaggaaggctctctgccctcc

SEQ ID NO: 811911 - DNA, 120 bp, Artificial Sequence
  ENSG00000247708_47 (sequence is synthesized)
ctctatttgcctaaaagcaggacatagatttacaaagacaagaggtattccacctccactctgcagggagaacaaagggtaaccatggaagacaatgttagagccctattgtctggagat

SEQ ID NO: 811912 - DNA, 120 bp, Artificial Sequence
  ENSG00000247708_48 (sequence is synthesized)
ggcaccaggtccagcttcgttaatccaccttgatctgcctgttattgccttcccacaagtggctacccctagagactcaaagtcctttttccctttgtcttgtcactgtctaaaaatgtg

SEQ ID NO: 811913 - DNA, 86 bp, Artificial Sequence
  ENSG00000247708_49 (sequence is synthesized)
ctgctgctgttgttgttgaagatgctatataagctataagcaggaatccaaagccaccttgagaactactcgttccctggttgtct

SEQ ID NO: 811914 - DNA, 120 bp, Artificial Sequence
  ENSG00000247708_50 (sequence is synthesized)
aagatgctgccctctgagcaatggcctgtgtccagctcctctcttcctgatcttctcagggccaagtctaccccgagttaaactctactctccttaagggcaagaatcccagcacaaagc

SEQ ID NO: 811915 - DNA, 120 bp, Artificial Sequence
  ENSG00000247708_51 (sequence is synthesized)
atgagcaccaggcacacactaagcaacaaggaaatatttggagaattgaattgaatgctttaatttcagttggatcaacaaccttgtccaaggtcacacagggaggcaataacagagccc

SEQ ID NO: 811916 - DNA, 120 bp, Artificial Sequence
  ENSG00000247708_52 (sequence is synthesized)
atgactggaacccatgactggaactcatgattgttgactttggatatgaaccttaagtagcaccttcagtgtcaattctgagattactgtcacatccaagcatggacatggagagttctg

SEQ ID NO: 811917 - DNA, 120 bp, Artificial Sequence
  ENSG00000247708_53 (sequence is synthesized)
ttattcctgggagggggcagaggggccgtggctttgtactttgcattttcaatgcacctttgtcccctttctttggtcatgaaaagcatgacccagcaccttgtatgtgttggaggctgg

SEQ ID NO: 811918 - DNA, 120 bp, Artificial Sequence
  ENSG00000247708_54 (sequence is synthesized)
gcaagaccaagggcacctggagggtggaggtctgagatttatgggatacttgatcattttcaagattttttttcatttgctgtggactgaatgcttgtttcctctcaaaatatgtatata

SEQ ID NO: 811919 - DNA, 120 bp, Artificial Sequence
  ENSG00000247708_55 (sequence is synthesized)
gaagccctaatcccccatggggtggtatttggagatggggcccatgggagctggttaaggttagatgatgtcatggagatggaacccccatgatagattttgctcttgcaaaaggagaaa

SEQ ID NO: 811920 - DNA, 120 bp, Artificial Sequence
  ENSG00000247708_56 (sequence is synthesized)
aagacaggataggtttctctccactgaatgaggatgcaacaagaagatagtctgcaaaccagaagagcactctcagcagacaccaaatctgctagtaccctgatcttggacttcccagtg

SEQ ID NO: 811921 - DNA, 120 bp, Artificial Sequence
  ENSG00000247708_57 (sequence is synthesized)
tccagagctgtgagaaatgttcattgtctaagccacccagtctatggtattttgttatagcgtccaaatagactaagacacatgatgtaagtgtttcctaaagtagcattgcactggggg

SEQ ID NO: 811922 - DNA, 120 bp, Artificial Sequence
  ENSG00000247708_58 (sequence is synthesized)
caaccagtgtaacatggttggtgatatgtgaatgaaccttttaaaatgttaatacttttgcatttattttaatatgtgttaaaaatatttctggtgtattatatcagaaatagttttcac

SEQ ID NO: 811923 - DNA, 120 bp, Artificial Sequence
  ENSG00000247708_59 (sequence is synthesized)
aactgaggcctgggacctgatgtgagttgttcaggtggccaagggaggaactgaacacagatttgtgtgactccaaaacccaagtatttgggctgtttttttctccttttggtttgtcac

SEQ ID NO: 811924 - DNA, 120 bp, Artificial Sequence
  ENSG00000247708_60 (sequence is synthesized)
ttataacttgcctgtcccacatgtggccatgactctgactttcagttcacctgtgtccctgtgcccaaacctttgctttgtcagcctcccccattagactatgaggtgcttgaggacagg

SEQ ID NO: 811925 - DNA, 120 bp, Artificial Sequence
  ENSG00000247708_61 (sequence is synthesized)
ggaaggtgtcacctgtctccacattccattgaaaaaactggataacactgaaagaggttgtgtgctgcaaagagcactgggctgggagtctgaaccctgccggcaggtgaggctccttct

SEQ ID NO: 811926 - DNA, 120 bp, Artificial Sequence
  ENSG00000247708_62 (sequence is synthesized)
catgccagcctacaagacatgtctctaaccaagtcgaaagagtgcagtattcgttcattcactcattcattcattcaacaaatgtttattaataggtattgtttaccaagcactgtgtgt

SEQ ID NO: 811927 - DNA, 120 bp, Artificial Sequence
  ENSG00000247708_63 (sequence is synthesized)
taaggagaagatggtatgaaacaagcagacccaggcctcagggaagagaggctgttacattcagagacaattaccatacactacaatgaatgctttgatgaagggaggcaaaaaaacaaa

SEQ ID NO: 811928 - DNA, 120 bp, Artificial Sequence
  ENSG00000247708_64 (sequence is synthesized)
aacaaaaacaacaacaacaaaaaccccacaacgatgtggatccctccctgtgggggtgaggagaaaggaaaacagcttcagggatctccaagcccttgtgccggccactcttctttcttc

SEQ ID NO: 811929 - DNA, 120 bp, Artificial Sequence
  ENSG00000247708_65 (sequence is synthesized)
tcttccttcctcctctgtctttcctttcatccttcctcctcccttctctttggacatcactaataaaagagaaacagatgtcagagacgtagacatggggagggctttaatatctagcct

SEQ ID NO: 811930 - DNA, 120 bp, Artificial Sequence
  ENSG00000247708_66 (sequence is synthesized)
tacggaacaaaatccttgggacccaatagaacttagtgttgcagagctttctcctgagttcagctaaaaccaggctcttgtcacacgaccagggaagattaggctcccggacacatagaa

SEQ ID NO: 811931 - DNA, 120 bp, Artificial Sequence
  ENSG00000247708_67 (sequence is synthesized)
gggtgaggaaaacagaatttattgggcgaaaaggaaaaagaaagaaaaactctcagcgaagtgatagggggtcttgccaacaacctctctcctcacaaattgaatcctaggttaccacag

SEQ ID NO: 811932 - DNA, 120 bp, Artificial Sequence
  ENSG00000247708_68 (sequence is synthesized)
aggccaggttcctctcccctgcaaacttcgtgaacttcccctggctctacccctttcccccagtaagaaggtgggcctcatttagagaaaatcgtttgggaaagggcaggcttcatcagg

SEQ ID NO: 811933 - DNA, 120 bp, Artificial Sequence
  ENSG00000247708_69 (sequence is synthesized)
gtggggtttcacctgggacacttggctgccccctgtctctaacattagatgtctctaacatctattcccctccctatctttgctggacacctgactctctcctagagcaacccagcaaac

SEQ ID NO: 811934 - DNA, 120 bp, Artificial Sequence
  ENSG00000247708_70 (sequence is synthesized)
atctgtctgttgtgtacttaaatacccccacagattgggaactgtctcctttatgggaaagctctttatatttgggacaccccagtttgttcattcagcacattttcttttcaacttttt

SEQ ID NO: 811935 - DNA, 86 bp, Artificial Sequence
  ENSG00000247708_71 (sequence is synthesized)
cccagtttgttcattcagcacattttcttttcaacttttttagagacaaggtctcactctgtcacccagactggaatgcagtagcg

SEQ ID NO: 811936 - DNA, 120 bp, Artificial Sequence
  ENSG00000247708_72 (sequence is synthesized)
gctacaggcgtgtgccgccactcccagctagttttttaatttttaaaaattttttgcagaggtggcgtcttgctatgttgaccaagtttgtctcaaattcctggcttcaagccatcctcc

SEQ ID NO: 811937 - DNA, 120 bp, Artificial Sequence
  ENSG00000247708_73 (sequence is synthesized)
cacctctgcctcccaaaacactgggatttcagccgtgagccaccaacgcacctggcctcattctccaactctttacaaagcttcaaagacatcccagacgctgggaatacagagaccaat

SEQ ID NO: 811938 - DNA, 120 bp, Artificial Sequence
  ENSG00000247708_74 (sequence is synthesized)
cagatacaaaccctgccctccagctgttcgcagcattctcgctcctttgcggccacctcttctgccctgcttttccaccttgtcccttcttctgtcaagtggcttttggcttggtcacca

SEQ ID NO: 811939 - DNA, 120 bp, Artificial Sequence
  ENSG00000247708_75 (sequence is synthesized)
ctttgctggtgtttctctccagaagtgagtcccagacttcaggtgtggtctgactcacgtcctatcgggtctctccctctgaaaaccgtgcttgtattaaagcagcttgggagctcatta

SEQ ID NO: 811940 - DNA, 120 bp, Artificial Sequence
  ENSG00000247708_76 (sequence is synthesized)
atgttcttggcagccaggtcctacccctgacagtgcaggagctgcctgtccacttaggggacccctgtctttttcacacgtgagtctgttaagcctcacctccctcatcgcctccatgtg

SEQ ID NO: 811941 - DNA, 120 bp, Artificial Sequence
  ENSG00000247708_77 (sequence is synthesized)
tgcggcagttttcaacaaatgttcagagtacaacacctgcccttgttaaacgtaatcttgttacactagtccccttgttttaacttctcaaacattttgagtcttgctcctgttaaccaa

SEQ ID NO: 811942 - DNA, 120 bp, Artificial Sequence
  ENSG00000247708_78 (sequence is synthesized)
gaagacctagaaagctccacatctcctcttaaaatgtgtgtgtgtgtgtgtgtgcgtgtattcgtacgcacacccctgggtacagctctgaggaggccacctataggtttctgaacaatc

SEQ ID NO: 811943 - DNA, 120 bp, Artificial Sequence
  ENSG00000247708_79 (sequence is synthesized)
ttccatgaatacagctcattcatacacacatttatttattctgcaacatttattcaacattccctaacaaaactttcattcttgagcactttttgcccaagcattacagggataatagaa

SEQ ID NO: 811944 - DNA, 120 bp, Artificial Sequence
  ENSG00000247708_80 (sequence is synthesized)
gcaaacgaatccatactaaggagtgaattattgatagtgctcacctgcatttttttaagcagaaagtagtatttattttggcctaatttccacctgtcagaaaatcaaaacagtgatgaa

SEQ ID NO: 811945 - DNA, 120 bp, Artificial Sequence
  ENSG00000247708_81 (sequence is synthesized)
ttgcatattgctatactacattttattatcagcatcaaaattcaagtgtgctctgcttaaaattcagaagacaaactttctcatttagaaaagttcattctgttagtgactgatcagaat

SEQ ID NO: 811946 - DNA, 120 bp, Artificial Sequence
  ENSG00000247708_82 (sequence is synthesized)
gctgaggtggcctcagatggagatgagaaactcattgggaatttaagcaaagttgattcttgctatgtcttagcaaagagactggtggtattttgtcactgccctgaagatttgtggaac

SEQ ID NO: 811947 - DNA, 63 bp, Artificial Sequence
  ENSG00000247708_83 (sequence is synthesized)
actggtggtattttgtcactgccctgaagatttgtggaactttggacttgagagagatgattt

SEQ ID NO: 811948 - DNA, 120 bp, Artificial Sequence
  ENSG00000247708_84 (sequence is synthesized)
aggcccaagaggaaaaagtggttttgtgggctggacccaggatccccatgctttgtgcagcttaagggcttggtagcctgcaccccagcctctccagccatggctgaaagggaccaacat

SEQ ID NO: 811949 - DNA, 77 bp, Artificial Sequence
  ENSG00000247708_85 (sequence is synthesized)
caccccagcctctccagccatggctgaaagggaccaacatatagctcaggctgtggcttcagagggtcgggtgcaca

SEQ ID NO: 811950 - DNA, 120 bp, Artificial Sequence
  ENSG00000247708_86 (sequence is synthesized)
cagaagatgtatggaaatttctgaatgcccaggcaaaagttttctgcaggatggcagccctcatggagaacctctgctatggcagtgcagaagggaaatgtggagttggcgtccccacac

SEQ ID NO: 811951 - DNA, 120 bp, Artificial Sequence
  ENSG00000247708_87 (sequence is synthesized)
agagtccctattggggcactgcctagtggagctgtgagaatagggccactgttctccagctcccagaatgattgatccaccaacagcttgcaccaggcacctggaaaagccacagacact

SEQ ID NO: 811952 - DNA, 120 bp, Artificial Sequence
  ENSG00000247708_88 (sequence is synthesized)
gccacagacactcaatgccagcgaagagaaagcagctgcaaagccacaggggcagagctgcctaagactgtgggaacccacctcttgcattggtgtgacctggatgtgagacctggagtc

SEQ ID NO: 811953 - DNA, 75 bp, Artificial Sequence
  ENSG00000247708_89 (sequence is synthesized)
tggatgtgagacctggagtcaaaggacatcattttagagctttaaaatttgactgtccgctggatttccgatttg

SEQ ID NO: 811954 - DNA, 85 bp, Artificial Sequence
  ENSG00000247708_90 (sequence is synthesized)
acagaatgatgtggtttggctatgtccccattcaaatctcaacttgtatctcccaaaattcccacgtgttgtgtgagggacctaa

SEQ ID NO: 811955 - DNA, 120 bp, Artificial Sequence
  ENSG00000247708_91 (sequence is synthesized)
gtttggctatgtccccattcaaatctcaacttgtatctcccaaaattcccacgtgttgtgtgagggacctaagaggacgtgattgaatcatggagccggtctttcccatgctattctcat

SEQ ID NO: 811956 - DNA, 120 bp, Artificial Sequence
  ENSG00000247708_92 (sequence is synthesized)
tgtgtctgctctttgttgcttttgtagatggttgtgttataagcctgaatgcagaagttgttccccagactactggatttgctgccttttaaaacaggtttattgaactataattgacat

SEQ ID NO: 811957 - DNA, 120 bp, Artificial Sequence
  ENSG00000247708_93 (sequence is synthesized)
acaatgaactgcatataggtaaagtgtacaatttgataagtacactttttgagcaaatccaccctttgttctggaagaagacactctatagtctcaggctgtttctttaccaacatcaac

SEQ ID NO: 811958 - DNA, 120 bp, Artificial Sequence
  ENSG00000247708_94 (sequence is synthesized)
aagctagtcttaaacagaggaacctcagtgcctcactttcaagacaatcaagattatttcccaacattccactagtagagggtcagaaacagagttaaaagttctcagactagaggtaga

SEQ ID NO: 811959 - DNA, 120 bp, Artificial Sequence
  ENSG00000247708_95 (sequence is synthesized)
attgaaaccccagctgagaagtatcaaggtgccctccttccccaaagctacatattcttgtgtcaggatcttaccaggaaatggaaggcacatttacacagggcagcccaagagactgtt

SEQ ID NO: 811960 - DNA, 120 bp, Artificial Sequence
  ENSG00000247708_96 (sequence is synthesized)
tcaaaggaaaccagcaagatgtgacaaagcaccccaagactagcgacactgggagaccttctcacttgacttaaaaggctggggcaggagagttacaggacccagtattagctgtagcca

SEQ ID NO: 811961 - DNA, 120 bp, Artificial Sequence
  ENSG00000247708_97 (sequence is synthesized)
aagcctgggcagggccacctaacatgagctgcacccttctgtagagcagcacagaccttgtgcatctgaggcccagcaggatggggccttgctcatccttcccttgcagttcttgctaat

SEQ ID NO: 811962 - DNA, 120 bp, Artificial Sequence
  ENSG00000247708_98 (sequence is synthesized)
gcttcctgttgcctgaacccagctggaagccagagggcaagggaaatcaattgagacagataatggaggtaatcccctgggcacagggcagcatggcagaggtaaggagtctgtctagag

SEQ ID NO: 811963 - DNA, 120 bp, Artificial Sequence
  ENSG00000247708_99 (sequence is synthesized)
ccacaaaggaagaggactgagtccagaggtgaaagcagtcacgtatccccaaagacacctgctacacatttgggctttgatttatcaatgagaaggcttgagggacagtgggaaaaatga

SEQ ID NO: 811964 - DNA, 120 bp, Artificial Sequence
  ENSG00000247708_100 (sequence is synthesized)
tgaggagtcattaggtccttgtggaaatggtgcccttgaaggatgagcctgtaatcactaggtacacgtgggtggatgaatgctggtgaaacaggtggagggaatgaaaggacagaggca

SEQ ID NO: 811965 - DNA, 120 bp, Artificial Sequence
  ENSG00000247708_101 (sequence is synthesized)
gcacgagaacactgtaagcagagcagaagtccatgcaaaagccagagatgtgagacagcacgggtacatatagggacccgcaggtggtctggagtggctttgctgtgggttgtgatgaga

SEQ ID NO: 811966 - DNA, 120 bp, Artificial Sequence
  ENSG00000247708_102 (sequence is synthesized)
tatccactgtgttggagctctggaacaaaaaggaggtcatctaagctggttgcttctgtttttttcttttcttttttttccggatgcatttcaattaggtgaggggtaccaggcagaaac

SEQ ID NO: 811967 - DNA, 120 bp, Artificial Sequence
  ENSG00000247708_103 (sequence is synthesized)
ccctcctgaatataaaccctctgtcttattgtaccagttaaagatgaacgatggctcacttcctattgggtactaagttcattatttgggtgacaggatcaatagaagcccaaacctcag

SEQ ID NO: 811968 - DNA, 120 bp, Artificial Sequence
  ENSG00000247708_104 (sequence is synthesized)
catcatgcaatatacccatgtgacaaacctgtatcccctaaatctaaaataataataaaaaaagatgtaccatagctcttaattgctcttcaaatcacccacaccattagagaaagctat

SEQ ID NO: 811969 - DNA, 120 bp, Artificial Sequence
  ENSG00000247708_105 (sequence is synthesized)
ttccaccccaatctgaattaaagaattctacaatctcctacagtccgaaagagagacttcagctaaagagaaagctggtgctcctcttgctagctgagtgaattctgatcctctttttca

SEQ ID NO: 811970 - DNA, 120 bp, Artificial Sequence
  ENSG00000247708_106 (sequence is synthesized)
tttttattttcttgcttgaactctgctttgttaaatcaaacaccagcccaaaactgagcccatggatcaccatattggcagccttatcctagaatctcagggctggaaagaactccgagt

SEQ ID NO: 811971 - DNA, 120 bp, Artificial Sequence
  ENSG00000247708_107 (sequence is synthesized)
gcttttgaactcttatatttggaggctgagattcagaaggcctggggtggggcttgagaatataaattctttaaaaaaatttttttcttttccttagataaatcttagaaaccaaaggga

SEQ ID NO: 811972 - DNA, 120 bp, Artificial Sequence
  ENSG00000247708_108 (sequence is synthesized)
attgaattcttaagaggacttgaaaatgattctaatatagtcgggttaggggaaatctggtcttgagctttttcttgggagatgtggtgagtccaaggcaagccaggcttcaattctgaa

SEQ ID NO: 811973 - DNA, 120 bp, Artificial Sequence
  ENSG00000247708_109 (sequence is synthesized)
tctacactcttcccacacatctatgtggcctctgtgccgagtctgagttttatgttttacaaagaaaactaggagaaaaactgttattcttctgattaacagaaaagttgtccaactggc

SEQ ID NO: 811974 - DNA, 120 bp, Artificial Sequence
  ENSG00000247708_110 (sequence is synthesized)
tacacttgaattatatcccctgattattaaactcaggcttctttagttttcatttattttatttcattgcatggagatgttttaaaagaggaaggcaaggggtgtgggggaaggattctg

SEQ ID NO: 811975 - DNA, 120 bp, Artificial Sequence
  ENSG00000247708_111 (sequence is synthesized)
ggatagcgaccattctcaccacatgcagaaggccaatactgcttccagaaggagacacaaggaatccttcactgagtgaaagttttttttcttccagagaatatcagtattcctacttta

SEQ ID NO: 811976 - DNA, 120 bp, Artificial Sequence
  ENSG00000247708_112 (sequence is synthesized)
taacaagccaggagctttttctgcttcctgatttaaaaattgattcctgactgcatagttctcacacaatagcttccttcttgcaggggcagtgtgattgcctggaatataaattcttag

SEQ ID NO: 811977 - DNA, 120 bp, Artificial Sequence
  ENSG00000247708_113 (sequence is synthesized)
tgggttgaccagggatcacgagcagttattatgttctctgctgctcttaacatgttgtgattctcaataaataatccagagccaaagcatggtgttttgttttgctttgtctcagtgagt

SEQ ID NO: 811978 - DNA, 120 bp, Artificial Sequence
  ENSG00000247708_114 (sequence is synthesized)
tttccaaactgtatttactatctcaaagtgagagcatcgcagttttctgagccaactgcagcaattttccagatctggagagtatttttgaagattatttctttggagattttctctctt

SEQ ID NO: 811979 - DNA, 120 bp, Artificial Sequence
  ENSG00000247708_115 (sequence is synthesized)
atttggtttgtttcctctttgataatttttattattcatatgttgaattttttgagcagagctttaattttcttatcttttctcctccttttttccatttttttctttgccacttttctc

SEQ ID NO: 811980 - DNA, 120 bp, Artificial Sequence
  ENSG00000247708_116 (sequence is synthesized)
ccccttctgggatattttctcaaattttttcttctaaacttttatcttttctgtgattataattttaaattccaaaatacctttttttggagaggggagtggagggaagtgttctctgac

SEQ ID NO: 811981 - DNA, 120 bp, Artificial Sequence
  ENSG00000247708_117 (sequence is synthesized)
tgttccttttatatagtagcctgttcttatttcatggatgtaatatctttcctctttcttttatagtctgttttccccaagttacttttttcccttgtttgtttatttgtgtctctgtat

SEQ ID NO: 811982 - DNA, 120 bp, Artificial Sequence
  ENSG00000247708_118 (sequence is synthesized)
ttcatctcggagcattccttaggtgtttggtgatttcctccttctccctctctctgctccctgcattgttataattatctctgagctgacctcccaacttaggtctttctcattttctag

SEQ ID NO: 811983 - DNA, 120 bp, Artificial Sequence
  ENSG00000247708_119 (sequence is synthesized)
taaacttggcataatcctgtgaaacccatcttttttaagcccccaattcaacatgtgattctgttggtgaaaagccttccatggctccatatttcccacttcatcagaacttaactttgc

SEQ ID NO: 811984 - DNA, 120 bp, Artificial Sequence
  ENSG00000247708_120 (sequence is synthesized)
catttttgacattttcagtctctgaccccactcaggctaggcaccatacctcttgcctcagaatgtggatactcttgtgtgttcagagttggagattaggaaataatactattaaaagta

SEQ ID NO: 811985 - DNA, 120 bp, Artificial Sequence
  ENSG00000247708_121 (sequence is synthesized)
acttccatttaatggatagtaaatatattttctcttcctatgattttcttaataccattttcttttctctagcttactttattgaaagaatacagtatctaatacatatgacatgcaaaa

SEQ ID NO: 811986 - DNA, 120 bp, Artificial Sequence
  ENSG00000247708_122 (sequence is synthesized)
agcagaggagatttctaagccaagtgttgaagaagtcactggcttccttctgaccacttaaggcaaaacataagaagatggaaatggcttgaagatggaattatcgagcaaaaggaacta

SEQ ID NO: 811987 - DNA, 79 bp, Artificial Sequence
  ENSG00000247708_123 (sequence is synthesized)
caaaaatggtgaccatttgatatggaggtcagtataggtgtgaaccatggacttaatcaaccagcggtttcccagcagg

SEQ ID NO: 811988 - DNA, 120 bp, Artificial Sequence
  ENSG00000247708_124 (sequence is synthesized)
gtgaaccatggacttaatcaaccagcggtttcccagcaggacaactgtcagtttgaactaaataggaaggggatggtaaagaatgaaggaaagttgttggactttttggattttacagga

SEQ ID NO: 811989 - DNA, 120 bp, Artificial Sequence
  ENSG00000247708_125 (sequence is synthesized)
caggactatagagctattcagttgtgaatgtgtgctcttgttaaagacaaggggaagaatgaacccaagggcaatgcagaggtcagtaggttaccttcttagtttcaaaaggagggacca

SEQ ID NO: 811990 - DNA, 120 bp, Artificial Sequence
  ENSG00000247708_126 (sequence is synthesized)
ttgccttgctttcaacagaaatgagctccacccaaagctgttggggataccacctcctggcagagccctggagctgcaagtcctgtccagcagagctttttggagaagaccacctcccaa

SEQ ID NO: 811991 - DNA, 120 bp, Artificial Sequence
  ENSG00000247708_127 (sequence is synthesized)
gtgggtctgcaagactgtacctctgccccagtgtgtccagtggccctagaggggagagcatcaagccacagaggattatcttcagcctgaagacctggtgaaagttgtcttgtgaggttt

SEQ ID NO: 811992 - DNA, 120 bp, Artificial Sequence
  ENSG00000247708_128 (sequence is synthesized)
gggactcccttgggatctgttaacccttctttcttttctatttctccgtgtcagaatgggaatgtctatctatgtctgtctcaccactgtattttgaaaacatgtttggtttcacatgtt

SEQ ID NO: 811993 - DNA, 120 bp, Artificial Sequence
  ENSG00000247708_129 (sequence is synthesized)
tgcagctgtgaattttgcctcagaatgaattgtactctgagtctcaccttatctgatttagatgatacttagataagagtttggagttgatgatgctagaatgagttaaaactttgaggg

SEQ ID NO: 811994 - DNA, 120 bp, Artificial Sequence
  ENSG00000247708_130 (sequence is synthesized)
gtgttacctccaaaatttctatattgaaatcttaatcccaatatgatagtatttggaaatcaggcctttgggaagtgattaggtcatgagggtagagccctgataaatgagattgatgct

SEQ ID NO: 811995 - DNA, 80 bp, Artificial Sequence
  ENSG00000247708_131 (sequence is synthesized)
aggtcatgagggtagagccctgataaatgagattgatgcttttataagaagaggccatttcatatggaaccaaaatagat

SEQ ID NO: 811996 - DNA, 120 bp, Artificial Sequence
  ENSG00000247708_132 (sequence is synthesized)
gctacagtatccaaagcagcatggtattggtaccaaaacagacatataggccaatggaacagaacagaggcctcaaaaggaacatcacacatctacaaccatctgttctttgacaagtct

SEQ ID NO: 811997 - DNA, 86 bp, Artificial Sequence
  ENSG00000247708_133 (sequence is synthesized)
aacatcacacatctacaaccatctgttctttgacaagtctgacaaaaacaagcaatggagaaaggacctcctatttaatacatggt

SEQ ID NO: 811998 - DNA, 120 bp, Artificial Sequence
  ENSG00000247708_134 (sequence is synthesized)
taaaaaccctagaagaaaacctaggcaatcatagggatgggcaaagacttcgtgaggaaaacgccaaaagcaattgcaacaaaagccagaattgataaatgggatctaattaatctaaag

SEQ ID NO: 811999 - DNA, 120 bp, Artificial Sequence
  ENSG00000247708_135 (sequence is synthesized)
gcaaagacttcgtgaggaaaacgccaaaagcaattgcaacaaaagccagaattgataaatgggatctaattaatctaaagagcttttgcacaacaaaagaaactagcatcagagtgaaca

SEQ ID NO: 812000 - DNA, 120 bp, Artificial Sequence
  ENSG00000247708_136 (sequence is synthesized)
atttatgagccagcaaacacatgaaaagaagttcaacatcactgatagttagagaactgcaaactaaaacgacagtgagataccatctcatgccagttggaatggcaattattaaaaagt

SEQ ID NO: 812001 - DNA, 62 bp, Artificial Sequence
  ENSG00000247708_137 (sequence is synthesized)
catgttctcacttataagtagttggggagtggggggcattaggacaaatagctaatgtatgt

SEQ ID NO: 812002 - DNA, 120 bp, Artificial Sequence
  ENSG00000247708_138 (sequence is synthesized)
accagggccagttggggagtggggggcattaggacaaatagctaatgtatgtggggcttaaaacctagatgatgagtcgatagatgcaacaaaacaccatggcacacatatacctatgta

SEQ ID NO: 812003 - DNA, 120 bp, Artificial Sequence
  ENSG00000247708_139 (sequence is synthesized)
atgcctccgcattcctttcccagaaggcttccagtgttccaagtttctcatttccatccaatcattttcccctgtatgtatgtgtgtttatatagctatatctacatctatataatacat

SEQ ID NO: 812004 - DNA, 120 bp, Artificial Sequence
  ENSG00000247708_140 (sequence is synthesized)
atatgtatgtgtgtacataagtgcatgtatgtaagtgtatatattggtgataataatcacataactacatgcgcaattttgccgctttttccttttcttcacttcttatcaaacacattc

SEQ ID NO: 812005 - DNA, 120 bp, Artificial Sequence
  ENSG00000247708_141 (sequence is synthesized)
tcatgtcattaaaatacctttgtaaacaccaacttccatgacagctgcacattctgttgtttgtgatatcgttgattttcccctctctgtttctgagggctccttcataaaccacctgtg

SEQ ID NO: 812006 - DNA, 120 bp, Artificial Sequence
  ENSG00000247708_142 (sequence is synthesized)
ggttcccatcgtgttcctgcgttccctcctccctggctccacgctccttcaacatctctcccttcaagcagatgagtcacttcttccatagcttacaaattggtctgggcactttgttcc

SEQ ID NO: 812007 - DNA, 120 bp, Artificial Sequence
  ENSG00000247708_143 (sequence is synthesized)
tggagaatcacagaatttcacgtccacagattctttcatcttgaggaactcaaaggcctttttaaagatggagacagctccccggagacttaccttgcctgggaccctcgtctttattca

SEQ ID NO: 812008 - DNA, 120 bp, Artificial Sequence
  ENSG00000247708_144 (sequence is synthesized)
tccctagtgcttccatcaagtgagcaggtgtataacatagacagccccatttatggatggaaacaccaaggcccagagtgactgtttgcttttcccgagaagtggactgttgctttccag

SEQ ID NO: 812009 - DNA, 120 bp, Artificial Sequence
  ENSG00000247708_145 (sequence is synthesized)
ttggctgatgcccgcgtctgctaggctttcattaaggatcacaccaccgtctttgcttttcctttcagtctaaacaaagcctaaaataaagtgcctccgaacactgcattctttctaacg

SEQ ID NO: 812010 - DNA, 120 bp, Artificial Sequence
  ENSG00000247708_146 (sequence is synthesized)
atttcaagagggcagcccaaacaacctctagagaggcagctccctggttcgttgcaatgtgagctctcccactgcctccgatgtctgcttccctgtctccccatttctcatccccactcc

SEQ ID NO: 812011 - DNA, 120 bp, Artificial Sequence
  ENSG00000247708_147 (sequence is synthesized)
tgctgtcgtccagctgtctcctctccctggagtcgtttctcctttttccctgactaaattcttaacctctgagactcctctcccaggtcgcttcctctggaggccttttatcctctccga

SEQ ID NO: 812012 - DNA, 120 bp, Artificial Sequence
  ENSG00000247708_148 (sequence is synthesized)
gttggagttcagggcctctcccttggttggctctgcccgtactcaatcctcctgtctgtgctcacatctccaccagggtcggcaaagactgtgaaaacaggaggagaaatgtcctgctcg

SEQ ID NO: 812013 - DNA, 120 bp, Artificial Sequence
  ENSG00000247708_149 (sequence is synthesized)
tgtctatactcccgttgcctagcacggtgcctgggggatgctaagcacacgagtgtgtccgaatgaagcccctcagtcacagctatctaccatgtggatttttgtgacataaaatgaaaa

SEQ ID NO: 812014 - DNA, 120 bp, Artificial Sequence
  ENSG00000247708_150 (sequence is synthesized)
aagagacgaggggagataggaactttaggagaggagaaggcaagattaaatcaaattgcgacaattatccatacacaagacatcgggctgactccaccttctggacccccgtgccagtta

SEQ ID NO: 812015 - DNA, 120 bp, Artificial Sequence
  ENSG00000247708_151 (sequence is synthesized)
ccgtcctcattttaaaagggtacttggagccagacgcagtggctcacacctgcagtcccagcactttggaaggctgaggaggtcagatcaattgagcccagagttcaagaccagtctggg

SEQ ID NO: 812016 - DNA, 120 bp, Artificial Sequence
  ENSG00000247708_152 (sequence is synthesized)
gaccagtctgggcaacatagcaagacctcagctctacaaaaaataaaaataaaataattagccaagcatggtggtgtgcacctgtagtctcaactacttgtgaggctgaggtgggaggat

SEQ ID NO: 812017 - DNA, 85 bp, Artificial Sequence
  ENSG00000247708_153 (sequence is synthesized)
ctccagccttggcaagcagaagagaatttgacatgcagtttatctatccatgtcatatgcattgatcccagtgaagcagtcctcc

SEQ ID NO: 812018 - DNA, 120 bp, Artificial Sequence
  ENSG00000247708_154 (sequence is synthesized)
atccatgtcatatgcattgatcccagtgaagcagtcctcctccattctccagcctggccgcctctgggcacccttttccaggtggtgccactgggacaccatgaccatgtgaagctgtgc

SEQ ID NO: 812019 - DNA, 120 bp, Artificial Sequence
  ENSG00000247708_155 (sequence is synthesized)
gcagacagccagaggcctccccctggagcaccagactccattgcctcttgctctcgggctttcctcactcaggtgttcaccaagtattgcagagagcttccgaagatgacctcaatgatt

SEQ ID NO: 812020 - DNA, 120 bp, Artificial Sequence
  ENSG00000247708_156 (sequence is synthesized)
tcctcctcctggtagtcacaccgttgtgtaagcccctgcccttgactgtgggctggacctagtgaatcatttctaaccatagaatatggcaaaaatgatgggatgtcacttctgtggtta

SEQ ID NO: 812021 - DNA, 120 bp, Artificial Sequence
  ENSG00000247708_157 (sequence is synthesized)
ggttcgaaaaaggccatggtttctgtcttgctagcagattctttctattgacttcttggcttgcatcctttgatgaaaccagcaggaggcccatgtggcaagaaactgaaggtgactttc

SEQ ID NO: 812022 - DNA, 120 bp, Artificial Sequence
  ENSG00000247708_158 (sequence is synthesized)
agccaaaaatcagtgaggaaccggagcccccattcagcagccacatgaaactgaacgctgccaacagccactgagtgagtggacccttcccccttagagtcttcccatgacatcacagcc

SEQ ID NO: 812023 - DNA, 120 bp, Artificial Sequence
  ENSG00000247708_159 (sequence is synthesized)
cctggactgacacagcttgatggcatcagccagagaccgtgaagcagagcacccagataagctgtgcttggacttctgacccacagaaaccacgagataataactgttgtttcaagccac

SEQ ID NO: 812024 - DNA, 120 bp, Artificial Sequence
  ENSG00000240571_0 (sequence is synthesized)
catttgtaacatctgtaaaggaaggcaatatgctgcattaaaaaaccaaacccccagagatattttgtgtgaaaatctcaacacattcttttaggagaggtttatacctggtttatttgg

SEQ ID NO: 812025 - DNA, 120 bp, Artificial Sequence
  ENSG00000240571_1 (sequence is synthesized)
tgtctgaacaaagtgctgagaagtaaaagtttttccgtcgggatacttcggatgtggaggtaatctggaatcaagctctggacaacccattcgtctcatctgtgtgctgacagactcaat

SEQ ID NO: 812026 - DNA, 120 bp, Artificial Sequence
  ENSG00000240571_2 (sequence is synthesized)
agacagctataatttgatcagtccacaatgaaactgctacacacagcactaaaaacacagcaagtgaacagaatcaccccgaaaaagacaaatcacatgtaattcaaaggaggctccaag

SEQ ID NO: 812027 - DNA, 120 bp, Artificial Sequence
  ENSG00000240571_3 (sequence is synthesized)
tcaatcaagagaggcggaacgcctagccacatcccccttggctgaacccaggacagatcagcaggcgcggaactcccacaacccgcgtagattccaagacaggaagcacaaacacgaccc

SEQ ID NO: 812028 - DNA, 120 bp, Artificial Sequence
  ENSG00000240573_0 (sequence is synthesized)
gttgtacatgtagttcatcattgaccaagacattgtggcacatgactgtttacgtagagttcactactatttgcagtttcaagcatctactgtgtgtcttggaacatattcccccatgga

SEQ ID NO: 812029 - DNA, 120 bp, Artificial Sequence
  ENSG00000240573_1 (sequence is synthesized)
taaagagtgaccgtcatatatgttatatgctaagcaatcttctaaacctcttacaaatattaactgattgtttataacaaatctgtgcagcagttctattatttccattttacagaagta

SEQ ID NO: 812030 - DNA, 120 bp, Artificial Sequence
  ENSG00000240573_2 (sequence is synthesized)
gtgtctccaaatggcagactaaactcacaatggggcatgacttgttatcacctgctggaatgtttcaagtggcctgatttgacaaggcagagaatggaacagtgatattgtttggctctg

SEQ ID NO: 812031 - DNA, 83 bp, Artificial Sequence
  ENSG00000240573_3 (sequence is synthesized)
cgagaggaacccaaagggaggtaattgaatcatgagggcaggtcttgcccctgctgttctcataacagtgaataagtctcacg

SEQ ID NO: 812032 - DNA, 120 bp, Artificial Sequence
  ENSG00000257048_0 (sequence is synthesized)
tcctgttttcctcactctctcaaggtgagtgaggtctatgggggtaagcccccccgcctccccgtagacctcctggaatgcctggaacagctcagcaacctgggcacaggtggcttgaga

SEQ ID NO: 812033 - DNA, 120 bp, Artificial Sequence
  ENSG00000257048_1 (sequence is synthesized)
caacctagccattcgggcctgctgccagagtgaacgccacagggaggcctgccgggtctggggagcatgagctggtcaggcccccagtagaccccttgcaggctgatctccatctccatg

SEQ ID NO: 812034 - DNA, 120 bp, Artificial Sequence
  ENSG00000257048_2 (sequence is synthesized)
tgcggcaccgagaaagggaagctgtttcaagagataggaattgtcagaaaaagccggagaaggtggtgttaaaggaaaacattgagaatggggagtgaagacgagggtttttcgtagcag

SEQ ID NO: 812035 - DNA, 120 bp, Artificial Sequence
  ENSG00000257048_3 (sequence is synthesized)
aagatggatcttcgaaagccaggaggcagaggagagcaacgctgtcggtgagataaagctggagatttctgctacgtgcagcacatactgctaatcctctctcatctccaggaagttttc

SEQ ID NO: 812036 - DNA, 120 bp, Artificial Sequence
  ENSG00000277047_0 (sequence is synthesized)
gagaagaaatatgggcggcagaggagatacaggggatgtgcatcactatggaaggattggtggagagatgttaggattttgttggattggccctggggaaggactaacttctggtcctta

SEQ ID NO: 812037 - DNA, 83 bp, Artificial Sequence
  ENSG00000277047_1 (sequence is synthesized)
gttggattggccctggggaaggactaacttctggtccttaactatctattccccctggaggaaggctccttgttgttgtaata

SEQ ID NO: 812038 - DNA, 120 bp, Artificial Sequence
  ENSG00000277047_2 (sequence is synthesized)
atccaggaccgagcaagaccaacactcttcctcctcctctgcctactcaatgtgaagacaatgaggatgaacacctttatgatgctccacttccacttattgaatagtgctacacatgaa

SEQ ID NO: 812039 - DNA, 120 bp, Artificial Sequence
  ENSG00000277047_3 (sequence is synthesized)
acttgtaaccagttactacaggcgaaagcaaatccatgtcttcaggctggtgtcatcagggagagaagctttggtttccacataaggatataagatcattgatgtaaaacaagacatgta

SEQ ID NO: 812040 - DNA, 120 bp, Artificial Sequence
  ENSG00000277047_4 (sequence is synthesized)
gagagaatggattggagagatattgttgaccatgttttcccctgtatctcaccttcccctctccaagacttccttgtcagttacccatattgatatcagtttatccacatccatgctttc

SEQ ID NO: 812041 - DNA, 120 bp, Artificial Sequence
  ENSG00000277047_5 (sequence is synthesized)
aagtttaaacaaagaaactaggcaaaggcagctatgtattcgctaggattagggaggagaagataatgaaccactggatagtgagaagaaagagaggtggagaaagtgagagaccccagt

SEQ ID NO: 812042 - DNA, 120 bp, Artificial Sequence
  ENSG00000277047_6 (sequence is synthesized)
aacagaggacagggacacattgctaaggatagggacacattcactgtaatatagaaggccatgcttatatgtaaaatatgcagtaattgtatatatatgtacaaaagtgatgacacacat

SEQ ID NO: 812043 - DNA, 120 bp, Artificial Sequence
  ENSG00000277047_7 (sequence is synthesized)
atgcacataaacaaaacacaattactgtctatgtttctttatttgtgacctaatgttttatgttgtttgtaactgaaaaaaaaattcccttctgaataaaatgtcaattttgcgattgca

SEQ ID NO: 812044 - DNA, 73 bp, Artificial Sequence
  ENSG00000277047_8 (sequence is synthesized)
agtttcgggggagggggacgggagagagggagagagggaaagaaggacatggaaacttacagtgaaattttcg

SEQ ID NO: 812045 - DNA, 120 bp, Artificial Sequence
  ENSG00000277047_9 (sequence is synthesized)
gagggggagggaggagcggaagaaagggaggcttcttttgctgcctcatcggcctttctgttccctcttgagattttatctgttcctatttgatgtccctgacggtgtataactcccgct

SEQ ID NO: 812046 - DNA, 120 bp, Artificial Sequence
  ENSG00000277047_10 (sequence is synthesized)
ggaagaaaaggtcggttatccacttgaaaaaggcttctagggtgtagttccgtgggcggaaccaggaaatatcttgtgtgaggacgtgaagtaagagagtgaagtggcaggatagacaaa

SEQ ID NO: 812047 - DNA, 120 bp, Artificial Sequence
  ENSG00000277047_11 (sequence is synthesized)
acgccagatggaagaatgtgatatgcacatttggagtctgtgtaaatgttgacttgtttgcctttggaaagggttagggctttggtgagagctatgatttctgccttttgagaggaggtt

SEQ ID NO: 812048 - DNA, 120 bp, Artificial Sequence
  ENSG00000277047_12 (sequence is synthesized)
gaatcaaaaagagatttatcttaaggcagaagaatgtgaagaattgagcaaatagaaatggagattatgcgaactcagttgtgaagctagagatgaacaatacttcaaaagaagatcttt

SEQ ID NO: 812049 - DNA, 63 bp, Artificial Sequence
  ENSG00000277047_13 (sequence is synthesized)
caaataagggaataaaagctggccacccccagccagcagtggcaacccacccagggtcccctt

SEQ ID NO: 812050 - DNA, 90 bp, Artificial Sequence
  ENSG00000277047_14 (sequence is synthesized)
tcactctttgggtccgcactacctttataagctgtaacactcactgcgagggtctgcagcttcatttgggggaacaaacaacttcagggt

SEQ ID NO: 812051 - DNA, 84 bp, Artificial Sequence
  ENSG00000277047_15 (sequence is synthesized)
tcatacccgccagaaggaagaaactctggccacatctgaacatctgaaggaacaaattccggacacaccatctttaagagctgt

SEQ ID NO: 812052 - DNA, 89 bp, Artificial Sequence
  ENSG00000277047_16 (sequence is synthesized)
gccagaaggaagaaactctggccacatctgaacatctgaaggaacaaatttcactgtgaaggtctgcagcttcattcttgaagtcagca

SEQ ID NO: 812053 - DNA, 120 bp, Artificial Sequence
  ENSG00000277047_17 (sequence is synthesized)
tcctggaacatatattcctctttacattctcagcaccaggctgaatcaactttatacttgactcaaagagcagacctgtgctctaggcctgaataatatgattcttttcagaaatgagtc

SEQ ID NO: 812054 - DNA, 120 bp, Artificial Sequence
  ENSG00000277047_18 (sequence is synthesized)
ccttgagatgattgctacagttcttaaataagaagcattcttttcttttgaactccaaactgtaagaatgatgtaagcagtacttacacaatataaagagatcttgctcaataatgaaag

SEQ ID NO: 812055 - DNA, 120 bp, Artificial Sequence
  ENSG00000277047_19 (sequence is synthesized)
aaatagaagagagagtaagtgaaaagctgaagtggaagagagagaaagagaaagagatggagagacttgatggtaccgagcccttagaactctctctgaaatctaaccctattttctcag

SEQ ID NO: 812056 - DNA, 120 bp, Artificial Sequence
  ENSG00000277047_20 (sequence is synthesized)
ggttacataggccaatacatttcttttttgtacttgagtttgtttgaattagatatctgtcacccacaagtgagagagtgatcaaaattttctagtggaaactaagatcaattgtaagca

SEQ ID NO: 812057 - DNA, 120 bp, Artificial Sequence
  ENSG00000277047_21 (sequence is synthesized)
tattattggtaaattcgggaaaatttgaatgtagactgtatttgataaaattttatataaatgttcatgtcctatggtataataataatagtgaggctatataaaacaatagctttgaga

SEQ ID NO: 812058 - DNA, 120 bp, Artificial Sequence
  ENSG00000277047_22 (sequence is synthesized)
atagctttgagaaatacattctaaaatatttagaggttcagcatcataaaatcttcaacttttaaaaggattatcaaaataaagtatatatttttatatagagacaaaacgaacatttaa

SEQ ID NO: 812059 - DNA, 120 bp, Artificial Sequence
  ENSG00000277047_23 (sequence is synthesized)
catgatttttaaatggaaggagaactagagggatttcagaattgtttcctcttgagaacagaaagagaaatagacattggaaggagagactacaaagacagatcagaggggcatctcaga

SEQ ID NO: 812060 - DNA, 85 bp, Artificial Sequence
  ENSG00000277047_24 (sequence is synthesized)
gtaacgcctaaggttcttgcctagccacaccaaagaattggtgtagcagctgaccatggcaagtgatagagacacggactgagag

SEQ ID NO: 812061 - DNA, 120 bp, Artificial Sequence
  ENSG00000277047_25 (sequence is synthesized)
aagtacaaagcttccacagcatggaaggggtcccgaatgggtagccactgttggttttgggtgattgccttgtcaatttttcaaggcaggagatacgtgaggcgggaagcttgttacagg

SEQ ID NO: 812062 - DNA, 120 bp, Artificial Sequence
  ENSG00000277047_26 (sequence is synthesized)
gttttgtatatatatatatgcttttcaggacatgatttttgtgagttttggttttgttctctttctttgtttcatgtttcgttatttatatgccttaattaaagaacctggctagcctca

SEQ ID NO: 812063 - DNA, 120 bp, Artificial Sequence
  ENSG00000277047_27 (sequence is synthesized)
gggaaggaggaaggaagcctaatgttcgggaggaaaggagatcctgcatattataaggactgtaaatggtggtattttggctgaatgttagttttctgcttttttagagttaaagtggcc

SEQ ID NO: 812064 - DNA, 88 bp, Artificial Sequence
  ENSG00000277047_28 (sequence is synthesized)
gaggctcggaggaaatatttggaaagtgtggctgcaggtgatctaggatgtcagtgcaagaatgagtagaaagggaagaagatacagg

SEQ ID NO: 812065 - DNA, 120 bp, Artificial Sequence
  ENSG00000277047_29 (sequence is synthesized)
aagagagtgaagtggcaggatagacaaaagtagggcatctagggggatatgggaatgtttgttagtgattgtgatttctgctataagggtaacgattaggcagaaggctaaaatgaggga

SEQ ID NO: 812066 - DNA, 78 bp, Artificial Sequence
  ENSG00000277047_30 (sequence is synthesized)
agtgatggggctccctttggcagtaagaaatcccctctcacgccagatggaagaatgtgatatgcacatttggagtct

SEQ ID NO: 812067 - DNA, 120 bp, Artificial Sequence
  ENSG00000277047_31 (sequence is synthesized)
gggagtcagtgggcccagaagaggagccatctataaatagctggtcatcagggttgatgagaggctcggaggaaatatttggaaagtgtggctgcagctttcttggggaagaaaacacat

SEQ ID NO: 812068 - DNA, 90 bp, Artificial Sequence
  ENSG00000277047_32 (sequence is synthesized)
cacaaatcctggtgtacattcatccaggaccgagcaagaccaacactcttcctcctcctctgcctactcaatgtgaagacaatgaggatg

SEQ ID NO: 812069 - DNA, 120 bp, Artificial Sequence
  ENSG00000277182_0 (sequence is synthesized)
acctggcgctggggctccggtccgcagtggctccggcaggagggagagaacgaggagggaggcttggaaacgccgggagtagcggtgaggccgacgccggggaagcgaatcgatactgcg

SEQ ID NO: 812070 - DNA, 120 bp, Artificial Sequence
  ENSG00000277182_1 (sequence is synthesized)
ttactggacgcccgtgggcctcatgaggatggtcgattccctcattcgttattcacgatttattagggatggcggccgcgtctgtccctccagagagctcgattatccatccggccagca

SEQ ID NO: 812071 - DNA, 120 bp, Artificial Sequence
  ENSG00000277182_2 (sequence is synthesized)
gcgccattaagcgcactgacggtgggaggctcgagttagaaattaggataggaatcttcgcccagttttggagcgcctgcctcctcttccctcgttgctcgcagccaaggcagccgcgaa

SEQ ID NO: 812072 - DNA, 120 bp, Artificial Sequence
  ENSG00000277182_3 (sequence is synthesized)
gctgggggcctcgggtgaatgctttcgccctctggccggcgaccaggagacctgcgcacactggccgccgagtgaccccagctcgagcctgcagccacaccagcgggacgggggcgggga

SEQ ID NO: 812073 - DNA, 120 bp, Artificial Sequence
  ENSG00000277182_4 (sequence is synthesized)
ggaagaggaagggcggagagacttccttccagagggagtggtccgagaaccggcgggagaagggccaagggaagatccggtcacctgctccggagcctgcaggcggagaggcgagtagtt

SEQ ID NO: 812074 - DNA, 120 bp, Artificial Sequence
  ENSG00000277182_5 (sequence is synthesized)
caccggccccggaggaaaggggaccctcccactgttcccaggcaaatgtgtcgccggcatcctgcactctgccggggaagacgcgcatccactcgctctgcagggaggggaacgcgggaa

SEQ ID NO: 812075 - DNA, 120 bp, Artificial Sequence
  ENSG00000277182_6 (sequence is synthesized)
ggactcccagtcagccgcccctctctggctacaagaccccgaacaagagaaacctgtaacaggggctctgcggagatctggatcccacccaccaaccacatgggcacctggggggctgcc

SEQ ID NO: 812076 - DNA, 120 bp, Artificial Sequence
  ENSG00000277182_7 (sequence is synthesized)
cctcggggcattatcagccagtgggaagggggttgacgttcctctgcggcccatgaatcctggagggctgcccgaggggccaccggggtccatccacttattcttcggttgttaagcgcc

SEQ ID NO: 812077 - DNA, 120 bp, Artificial Sequence
  ENSG00000277182_8 (sequence is synthesized)
cattttcatcttttgcgtcctggatgactagtctccacattcctggcctttctggtttctcaggagaaccttctgacccaactcttcccacatcgaaagagtttcctagtcttttgttct

SEQ ID NO: 812078 - DNA, 120 bp, Artificial Sequence
  ENSG00000277182_9 (sequence is synthesized)
actactagccgacatagaaagcacctgtcatgtgccagtgtcaaatactgcgctaggaactgggaactcaaggcacaggagcctggcttttgcgcagggcgctcacaggccggtgggtgc

SEQ ID NO: 812079 - DNA, 120 bp, Artificial Sequence
  ENSG00000277182_10 (sequence is synthesized)
aaaccctgaaggacacacagcctgtccctttagcgcccatcgcttctggtgtgagctcccgctaagggtgggtgagtactggggtgggcttccagaagaggcctcctttgagccgaatct

SEQ ID NO: 812080 - DNA, 120 bp, Artificial Sequence
  ENSG00000277182_11 (sequence is synthesized)
gcagagaccaagtgtctatgagaactgctcaagagtgctttgcacattctcctccacaaaggtcgaggctcccactgcgcccaggaatgcgcctcgtcagacattaggcgccccttgatt

SEQ ID NO: 812081 - DNA, 120 bp, Artificial Sequence
  ENSG00000277182_12 (sequence is synthesized)
ttgtgtttgcatctcacgcggtcctctagctgacaagtgcatcagaagagtcacagtggctgtcacaagccagagactcgcagaggacaggaacgcgggaaatctaggcaattacctcca

SEQ ID NO: 812082 - DNA, 120 bp, Artificial Sequence
  ENSG00000277182_13 (sequence is synthesized)
gcatataccaagagctattgcgaggatcagatccctttaaaaatggtgacgagacaggagagggcggctcctctagagctttccggaacgtctttacctctgtgtcctttatacctttta

SEQ ID NO: 812083 - DNA, 120 bp, Artificial Sequence
  ENSG00000277182_14 (sequence is synthesized)
tctcccccaaacaaggtccttagtcagtttctccttctatttccccatcttcctcccccacctccctgtgtagttctagggggaaaaaatgtgttgttttcctttttttctgatgcttct

SEQ ID NO: 812084 - DNA, 120 bp, Artificial Sequence
  ENSG00000277182_15 (sequence is synthesized)
aatattaaatgcgtctattttcccactctccattgtcttgaggtcttcccctacccaccctgcctagttctgtcacgtcccttctttccctgtatcacaacaatgttctccctttctcac

SEQ ID NO: 812085 - DNA, 120 bp, Artificial Sequence
  ENSG00000277182_16 (sequence is synthesized)
ctttgtttctcttcatacttgtttctctctctgtgtctctctcattctcttcccttccaaatgtagtatttggagactgtaatatcgattgaggcagacaatagaaaactgtcgaacctc

SEQ ID NO: 812086 - DNA, 120 bp, Artificial Sequence
  ENSG00000277186_0 (sequence is synthesized)
ggtgccccagccccgggaggccctcctcaagcccttgcctgctctgggacccctggctgcgggctgaccctgaaggggcatcttgaggccaggactggacctggcaaggccccggccgag

SEQ ID NO: 812087 - DNA, 120 bp, Artificial Sequence
  ENSG00000277186_1 (sequence is synthesized)
gtcacggctcgagtgtgactgtgaacttggacatctgaccccaaagctcactcctgggacaaacccaagagaatcggaaacagacgtcacacaaattgttgtccacagatgttcaaagca

SEQ ID NO: 812088 - DNA, 120 bp, Artificial Sequence
  ENSG00000277186_2 (sequence is synthesized)
gggaacaggattccaccaggaaaagaatgaggcccgcacggctgcagggggtgagcctggagaatggcgatgggggacagaagccagacacacagccccgactgtgagcttccgtttcta

SEQ ID NO: 812089 - DNA, 120 bp, Artificial Sequence
  ENSG00000277186_3 (sequence is synthesized)
tgcaggcccagaacaggcgggtccggaggcgggaggaggcccgggttgccagggcggcggtgggagagatgctcacggggagggagttctcttccaggtggagagcgtttggaaccagac

SEQ ID NO: 812090 - DNA, 120 bp, Artificial Sequence
  ENSG00000277186_4 (sequence is synthesized)
gggagtgagggtcactcaacatcgcaaatggactaaatgctaccgaattgtacgctttaaaacggttcattttatgtgatgtgaatttcagctcaataaagaaaaaagatttaaaatgtg

SEQ ID NO: 812091 - DNA, 120 bp, Artificial Sequence
  ENSG00000272356_0 (sequence is synthesized)
tttctgtattccgggttcttgccttggtgtaccagaagaatccgatcacccgtgggctaggagaatgagtgcaacgttttattgagtggaagtagctctcatctgatggtggaatcagca

SEQ ID NO: 812092 - DNA, 120 bp, Artificial Sequence
  ENSG00000272356_1 (sequence is synthesized)
gggagatggttttcccctggagttgggcttctaggtggccccgtctcttctctgactgccctggccaaactccaccttgtcctgccggtcaatggcctgccagcatgccagtgcctctcg

SEQ ID NO: 812093 - DNA, 120 bp, Artificial Sequence
  ENSG00000272356_2 (sequence is synthesized)
gtgtgctgttctgctggcgtgctcctcttgacgaccagctgcttgggtcttccaccgaagtgttcctcacaatgtccagccgctcgtgtgtctgcccactagggtctcgggtttttatag

SEQ ID NO: 812094 - DNA, 120 bp, Artificial Sequence
  ENSG00000272356_3 (sequence is synthesized)
gcccaggattggggcatggcaggccaaggtggtcttggaaaatggtaacatttgggcatgaaagcaggagtgcctatcctcacctagatctgtgggggtggagccctagccagggaccca

SEQ ID NO: 812095 - DNA, 120 bp, Artificial Sequence
  ENSG00000272356_4 (sequence is synthesized)
cctttctctacccagcacttcccctcccgctttccgtatcattttacgggaccacactcttcccttcccagcactcccatatcaatagcacataaaacctttagttctactgaaaatttg

SEQ ID NO: 812096 - DNA, 120 bp, Artificial Sequence
  ENSG00000272356_5 (sequence is synthesized)
gagtgaaatctctccatagttagagcacatgtactatttggtaagcttacccttggtaattcatgataccagctgaagacatcaataccaataagtgagaagattcttgccaagggtgga

SEQ ID NO: 812097 - DNA, 120 bp, Artificial Sequence
  ENSG00000272356_6 (sequence is synthesized)
aggatttgcttggtaatatagtaagtagcattcagtctcagagttgggtcctgcaggacttccactgggcgccttacaagctggataagtggtactccgggggtcccataaatgatgacg

SEQ ID NO: 812098 - DNA, 120 bp, Artificial Sequence
  ENSG00000272356_7 (sequence is synthesized)
tatggcactcgctccccaacctgaggctcagagcgccggtcataagtcagcattttcctattcgaattcaaagaaaaaaaccacacccaaatactgttatggaagccatctttctcacaa

SEQ ID NO: 812099 - DNA, 120 bp, Artificial Sequence
  ENSG00000272356_8 (sequence is synthesized)
attaagtcagaattaaacaataataaaacaatgaaaaaactacaaaagacaatttcaaaacagaattactatttctttgagaataatatatatacattttgcttagttgacaccaagtgt

SEQ ID NO: 812100 - DNA, 120 bp, Artificial Sequence
  ENSG00000272356_9 (sequence is synthesized)
agatatcctacaagagtttaaaaattactctgtaaatcactgttacctggaaaataatgagttggcagatatcaactagcttaagatgtattttaggtgggagtggtggctcatgcctgt

SEQ ID NO: 812101 - DNA, 82 bp, Artificial Sequence
  ENSG00000272356_10 (sequence is synthesized)
gagacccccatctccacaaaaaaattagccaccataatggtgcacacctgttatcccagctacttgggaggctgatgtggga

SEQ ID NO: 812102 - DNA, 73 bp, Artificial Sequence
  ENSG00000272356_11 (sequence is synthesized)
tttccagtctgggcgacagagtgagaccctgcctccaggggcaggaaaaagatgtattttatcccctaagaat

SEQ ID NO: 812103 - DNA, 120 bp, Artificial Sequence
  ENSG00000272356_12 (sequence is synthesized)
tccaggggcaggaaaaagatgtattttatcccctaagaatgagaactaactatcattaaatctatcatgaaagataagagaaaatttacctggttaaactatctgattccagaatgatac

SEQ ID NO: 812104 - DNA, 120 bp, Artificial Sequence
  ENSG00000272356_13 (sequence is synthesized)
catctaaatgctttggtagaacaatattaaggactacctagtgattttgatgtgggaaaaacaaatgaatcaaggactgtgtcacaatttctttgcataagtttctgaaggaaagcccaa

SEQ ID NO: 812105 - DNA, 120 bp, Artificial Sequence
  ENSG00000272356_14 (sequence is synthesized)
aagaggatttcctcttcacatcttacgaagtatgagggaatattcactaactttcagtgaggcttcatgtgcgcaggtaaagaaacaattttgtgtctgtgtctatggactgtcttttca

SEQ ID NO: 812106 - DNA, 120 bp, Artificial Sequence
  ENSG00000272356_15 (sequence is synthesized)
tttgggtcttctagacctgtgcagaatctcaggactatcctggcaaggtactgagggtatcattaccttgtaagttcaagggctggcacacaagctcctggtttataagaaaaacttcct

SEQ ID NO: 812107 - DNA, 120 bp, Artificial Sequence
  ENSG00000272356_16 (sequence is synthesized)
ctgtattccttggcaaagataaagtcttgtatgctggcctttccttccagaagcttcatacattgtcgctgaacatactgtttaattagacttatatctctcgtttcaaatagcagcttt

SEQ ID NO: 812108 - DNA, 120 bp, Artificial Sequence
  ENSG00000272356_17 (sequence is synthesized)
ctaacctacctaaataatctgttacttacaatgatgggataataaaattattaaaaattgaaagttatttgagactttagagagcttgctatttctaaaaatagaatatcatgtagttta

SEQ ID NO: 812109 - DNA, 120 bp, Artificial Sequence
  ENSG00000272356_18 (sequence is synthesized)
aggaaaaccatgtggaatgacatgcaaattaacatttgtcatgtgataagcaacataaaacacgttaagttttttttttttaatagtcaaagcctctaggtacaagaaaccagacacgat

SEQ ID NO: 812110 - DNA, 120 bp, Artificial Sequence
  ENSG00000272356_19 (sequence is synthesized)
ttcatgtattgtttttttatttaccagtatagaaagggtcctgattcagtcacaggaaacacagagaagtttaaagatcaccaggcagtcaaatcaaaatcagcctttttgactttttat

SEQ ID NO: 812111 - DNA, 120 bp, Artificial Sequence
  ENSG00000272356_20 (sequence is synthesized)
ttataaaaatgttgataaataactatgacagaattttctgtgttggaaatttctactaggaaataaccagcatgcagtggatttatgtaagattaattttttttttttttttgagacgga

SEQ ID NO: 812112 - DNA, 120 bp, Artificial Sequence
  ENSG00000272356_21 (sequence is synthesized)
ataggcgtgagccaccgtgcccggccaagtagattaagttagttctaggtgaaagctctgtgtcttattctgaatactggaaccaatggatatttatacaataagcttattaatttagct

SEQ ID NO: 812113 - DNA, 120 bp, Artificial Sequence
  ENSG00000272356_22 (sequence is synthesized)
tgagtacaattctgcctacagagaaagaaggtactggattatatctcttccagaaatagtgctgaaaaaaatcccaaattcacataatattatatatatgacataatatattgataatat

SEQ ID NO: 812114 - DNA, 120 bp, Artificial Sequence
  ENSG00000272356_23 (sequence is synthesized)
tcaatccactatgcttttaatgctctcatcaaacagtatatagaatgctattcccatttataccatttatttttgttttgctatagaaggagtctaggcccgaataaagaaaaagccaaa

SEQ ID NO: 812115 - DNA, 120 bp, Artificial Sequence
  ENSG00000272356_24 (sequence is synthesized)
aaatatcagggttattatggttgagaaatttgagtaatttatagctaattgtttggaaatcttcctaatttgtatttgataatccaaataaatgaaagttcagttaatctggaatggatt

SEQ ID NO: 812116 - DNA, 120 bp, Artificial Sequence
  ENSG00000272356_25 (sequence is synthesized)
atgtttctctctttttattttgatggagtctcactctcttgcccaggctgagtgcagtgttgtgatcttggctgtctgcagcctcctcctcccgggttcaagtgattctcacacctcagt

SEQ ID NO: 812117 - DNA, 120 bp, Artificial Sequence
  ENSG00000272356_26 (sequence is synthesized)
ttacaggcgtgagccaccacaccgggtctgtttgtcttgtttatcctgctctgctttcaggagttgttacactatgacatatatgatctccaggcaataggcaggaaactctcatgtatt

SEQ ID NO: 812118 - DNA, 120 bp, Artificial Sequence
  ENSG00000272356_27 (sequence is synthesized)
tccaggcaataggcaggaaactctcatgtattgctttttagtaatttttgataaaacgtaaggtatgggaggaagtcagaaacttaaggactaaaatcaaataaattgtttttattagaa

SEQ ID NO: 812119 - DNA, 86 bp, Artificial Sequence
  ENSG00000272356_28 (sequence is synthesized)
aacttaaggactaaaatcaaataaattgtttttattagaaataaaattctagctactcaggaggctgaggcagaaagattgggatt

SEQ ID NO: 812120 - DNA, 120 bp, Artificial Sequence
  ENSG00000272356_29 (sequence is synthesized)
gtctcaaacaaacaaaaacaaaataagacactacaaataaaattctcaaaattcatgtagttactcctatagttatattaattatataggctatagttccttcacctagatgcatgttta

SEQ ID NO: 812121 - DNA, 120 bp, Artificial Sequence
  ENSG00000272356_30 (sequence is synthesized)
agggtagttacattttcaccagacactttagccacttatttcttacagatgaagacaagatagataaaccttaccttagaaacagcagggcaggaatctcttctgactgtttctattcct

SEQ ID NO: 812122 - DNA, 120 bp, Artificial Sequence
  ENSG00000272356_31 (sequence is synthesized)
tttgcatcaaatactgggtccttctgatccagtgtttcatacatgtaacccacatacctcttttttgtttgtaaaacacagggcaaatatacctgtggtaaaattaataaaatgcctctt

SEQ ID NO: 812123 - DNA, 120 bp, Artificial Sequence
  ENSG00000268912_0 (sequence is synthesized)
ttatggtgaagaccaccttttcagatgtgacatggctcacagtaagagcacttttcagttcatgcacagcaaaattcataagtgagaggactcaagggccaggcatttgtgaaggctttc

SEQ ID NO: 812124 - DNA, 120 bp, Artificial Sequence
  ENSG00000268912_1 (sequence is synthesized)
cagggtaactacccccttccagcactggagtaccagaataatgagaagctcaaaagagaatgtggaaaggccttcctttctccatcaccagagtactcatggcacagggaagccatgaag

SEQ ID NO: 812125 - DNA, 120 bp, Artificial Sequence
  ENSG00000268912_2 (sequence is synthesized)
aagagctgagtgagaagatgctgccacacagctctaacatcagataacaccgggcaggccatgatagggagaagcccttcaagagcagtggctatgggaagacatgaagacttttgccct

SEQ ID NO: 812126 - DNA, 120 bp, Artificial Sequence
  ENSG00000268912_3 (sequence is synthesized)
cttcaaccacctaagaacccacactgaagagagatctttaaatacttggtatgaagaaagaccctcaagaagaaatcgattcttatctataaccaaaaaattcacagtagagaaaacccc

SEQ ID NO: 812127 - DNA, 120 bp, Artificial Sequence
  ENSG00000268912_4 (sequence is synthesized)
tgcatctaaggaatgtgggatggtcttcagtcacctctcctatgtgagaaagctatataaagtacctatgggaaaaaggcattacaaatgcagtgaaaatgggaaagccttcagctatag

SEQ ID NO: 812128 - DNA, 120 bp, Artificial Sequence
  ENSG00000268912_5 (sequence is synthesized)
acacccccttttaagaaaaatcaccagagaattcacaagagagttatgggcaacaaatgtgggaaagccacagctcccagaatcttaggcggcactgtattactgctattgcagaagcca

SEQ ID NO: 812129 - DNA, 120 bp, Artificial Sequence
  ENSG00000268912_6 (sequence is synthesized)
tctgtattagttacctattgctgtgtaacaaattactcaaaacctagtggcttaaaacaatagtcactatttcacagtctctataggtcaggaactttggtgcagctagctgactcctct

SEQ ID NO: 812130 - DNA, 120 bp, Artificial Sequence
  ENSG00000268912_7 (sequence is synthesized)
ttagggtttctcacaaggctaacatcaagatgtcagctgggggtgtatcatctgaaggcttgactagggaaggctctgcttccaagcaaactcatgtaattggcagcattcagttttttg

SEQ ID NO: 812131 - DNA, 120 bp, Artificial Sequence
  ENSG00000268912_8 (sequence is synthesized)
tgggctgctggactgaggacccgtctgttggtctgagacctcctccagttctctgccacatgggcctctccaaaatggcagcttgtcaatcaaagcttgcaagctgatcatgcagtggag

SEQ ID NO: 812132 - DNA, 120 bp, Artificial Sequence
  ENSG00000268912_9 (sequence is synthesized)
aataccaacaagtcagtcatttgtaacctaataacagaagtgagatcccatcatctttgctaaatttagttagaagcaagtcacttggtccagcccacagtcaaggggagagcattacac

SEQ ID NO: 812133 - DNA, 120 bp, Artificial Sequence
  ENSG00000268912_10 (sequence is synthesized)
gtgctaagggaaagcagactatactcccttttccattctctagagagaattacataggctttgagtaccttcattttctttcccactgatggctttagattttggtatgacaattcttgc

SEQ ID NO: 812134 - DNA, 85 bp, Artificial Sequence
  ENSG00000268912_11 (sequence is synthesized)
tcccactgatggctttagattttggtatgacaattcttgctaagatctgagctggtgtcttctggagctttccagaaaaggtttc

SEQ ID NO: 812135 - DNA, 73 bp, Artificial Sequence
  ENSG00000268912_12 (sequence is synthesized)
aaaatagaagaaaaggtttctcttcatggacattgtttgcatctacatgtgacacttaggaatgatctgttta

SEQ ID NO: 812136 - DNA, 120 bp, Artificial Sequence
  ENSG00000268912_13 (sequence is synthesized)
tgtttgcatctacatgtgacacttaggaatgatctgtttagtctcaatcactcactcctggatctgcctgtctctctctgagataacaaaggccttaatgtttagccacctgcatcagag

SEQ ID NO: 812137 - DNA, 120 bp, Artificial Sequence
  ENSG00000268912_14 (sequence is synthesized)
ttggtgaggtggtttgaaacaattcatcctaatataaaaagaacagcttttgtaagggggcactgagtgtctcaaacagccgcatgggcaggaagagtgctcagtccagttttggttgaa

SEQ ID NO: 812138 - DNA, 120 bp, Artificial Sequence
  ENSG00000268912_15 (sequence is synthesized)
tttgtcttgttgccctaaggcctcctatgaaagactgacaggcttggactgaatcttgtgatctggacaccaagggtcacctgtgggcccagagctagctctgaagaatggggtagtttc

SEQ ID NO: 812139 - DNA, 120 bp, Artificial Sequence
  ENSG00000268912_16 (sequence is synthesized)
tttgagaacctccacagcaaaagtttggtcctctgttcccaatgcatgtcccactttaccagctacatcccccagtacctgcccatggctcatgactcatgaaatataaaactcagtagg

SEQ ID NO: 812140 - DNA, 120 bp, Artificial Sequence
  ENSG00000268912_17 (sequence is synthesized)
caggcataactggttcagacctgccagggctatgtgggaactatcattggtacaaaaactctaagtgtggagaagactgtggtagacaagaggggacatgtctgttctaaacgcacatca

SEQ ID NO: 812141 - DNA, 120 bp, Artificial Sequence
  ENSG00000268912_18 (sequence is synthesized)
gaaacttccaatgactatggccaagtgagataagggtgtacagaacttctcaggacatgcagacctatgtgtcactcataactgaaattcaaataaatattttgtggatttcctgtggac

SEQ ID NO: 812142 - DNA, 120 bp, Artificial Sequence
  ENSG00000237073_0 (sequence is synthesized)
ccaccagagttgtaaacatacatgtgtgtacgtgcacacagaggcacacaccgtatggtgtgtgatttcagagcaagtgtttggaaccagacctggatataaatcctgctttcaccaact

SEQ ID NO: 812143 - DNA, 120 bp, Artificial Sequence
  ENSG00000237073_1 (sequence is synthesized)
caaaggccctccaaagggattctcctttccatcttctccccactgtctcactatgtgaccttgtccagctgaaaagcagatggagcaaaacgctgccgcgctgcctcctgaatgcctgct

SEQ ID NO: 812144 - DNA, 120 bp, Artificial Sequence
  ENSG00000237073_2 (sequence is synthesized)
cagtgtcagatccacgccaagcacctcacctacatcgctgcatttaataacagccacctatgagatgggcgctagtggcactcccactgctatcaggacacagaatccattcacatgaaa

SEQ ID NO: 812145 - DNA, 120 bp, Artificial Sequence
  ENSG00000237070_0 (sequence is synthesized)
aggacacagttaaacaacagatccactttattccatccccttggaataacatatttaaatttcttattggtttaattcgtttttctcacatcccgagttttcaaggtaaagccaagtaat

SEQ ID NO: 812146 - DNA, 120 bp, Artificial Sequence
  ENSG00000237070_1 (sequence is synthesized)
gtggaaactacctatttctactgtgtactaacatgcatttaactacagttgacctttgaacaacagggggtggaaactgtgtaggtctacttatgcatggattttcttccgcctctccta

SEQ ID NO: 812147 - DNA, 120 bp, Artificial Sequence
  ENSG00000237070_2 (sequence is synthesized)
cctgagacagaagacctttgccttctcttgctccttctgctcagcctgctcaacctgacggtgatgaaaactgaagcccttgatgatgatccacttccgcttaatgaatagcactgtaga

SEQ ID NO: 812148 - DNA, 120 bp, Artificial Sequence
  ENSG00000237070_3 (sequence is synthesized)
agtctcgcatatatgatcatttaaaatttcgctgaagtcatgtctgaattctgcacactgccttatggatgtgggagaggtgactaaactgagtcaacgcagtcaaccacccaggacttg

SEQ ID NO: 812149 - DNA, 120 bp, Artificial Sequence
  ENSG00000237070_4 (sequence is synthesized)
caattccagggggttgcatccacctaaccctccggggttctggcttcggatagtgtttgatcaatggaagcaacaaaagaagattggaggacatgaagacaggttactggatgatattcg

SEQ ID NO: 812150 - DNA, 120 bp, Artificial Sequence
  ENSG00000237070_5 (sequence is synthesized)
acatgagctgcaatcctccatctgaggtcccaacttttccagaaggcttctgtcctgttgcgctcattggattctgcattatgggattctcttgaagtgtgtgaagaataatgagctaaa

SEQ ID NO: 812151 - DNA, 120 bp, Artificial Sequence
  ENSG00000237070_6 (sequence is synthesized)
taaagaggaaaaacaaaagaaaacaaaaactgcagggacttttataactatcattgattgccagcttaagcctgctggactcttcacaaaactatatatgcttcaagcttaatatttaat

SEQ ID NO: 812152 - DNA, 120 bp, Artificial Sequence
  ENSG00000237070_7 (sequence is synthesized)
tttgtaattggaacatttataatcatattatgcatttaataaggatgctctaattcagatttactattatcaggaaattaaatttggagttacagtaatgcatgcatatatatgtgtggg

SEQ ID NO: 812153 - DNA, 120 bp, Artificial Sequence
  ENSG00000237070_8 (sequence is synthesized)
tgtgagtgtgcatatacctatatatgtatatacatatataaagtaaacgccttcttttaacgtgtgttttaagtatagcttccatgtcctagttaattcagcaccctcccttttatcctt

SEQ ID NO: 812154 - DNA, 120 bp, Artificial Sequence
  ENSG00000237070_9 (sequence is synthesized)
tccttgccattgtcctctctactagactacaataaaaacaaaaaactatgaaagtaagcagcttataatcataattttaatcaatgtagcctatgcaagctttaagaaacatacgtctaa

SEQ ID NO: 812155 - DNA, 120 bp, Artificial Sequence
  ENSG00000237070_10 (sequence is synthesized)
catcttagaaagaaagcttatgaacacaaacagcagaatacttaaatacatttgaaacattcacattgaattgattctacaaaattttgaagagcaacagcttttgaatttagagctata

SEQ ID NO: 812156 - DNA, 120 bp, Artificial Sequence
  ENSG00000237070_11 (sequence is synthesized)
atcagtaccctaaagtttttaccactgagttactacctagtaaaaatatgttatatttgcaataaaagtacacattgtaaggacataagaattgtcatcaaggtacacaaacattttaga

SEQ ID NO: 812157 - DNA, 120 bp, Artificial Sequence
  ENSG00000237070_12 (sequence is synthesized)
tttaaaaataaaataacaatattatcatacaagttaatgatccagtttattaatttctaattctattgataaaacaagggattatttttgaaagggtttttctatctttcatacaaaccc

SEQ ID NO: 812158 - DNA, 120 bp, Artificial Sequence
  ENSG00000237070_13 (sequence is synthesized)
agggtttttctatctttcatacaaaccctttccaaaaatgtatagatacagtacggattctacctgatcattcttgtgcatatggtgatgtaagaaaccaaaaaaatgtaaattattttc

SEQ ID NO: 812159 - DNA, 120 bp, Artificial Sequence
  ENSG00000237070_14 (sequence is synthesized)
ataacactgtgaaaaccaatatttaaaaatacagtgcacaattagtagtgagtaacatatataaatttagaaatattatatttctgtacacaaagtaacattataaatgaaagcttcagg

SEQ ID NO: 812160 - DNA, 120 bp, Artificial Sequence
  ENSG00000237070_15 (sequence is synthesized)
ggaaattatatatcaaaaatttcaaatatagaggaaaattaaaaacccactcatgacccatgaaaattaataacccattcgatcatacacttaccatgtaactttctgttaatttggtaa

SEQ ID NO: 812161 - DNA, 120 bp, Artificial Sequence
  ENSG00000237070_16 (sequence is synthesized)
taaataatgtcaagagattttaaatgaaaatacttattctgaaacataaaaacaacatctgagatgagcacaaatggatcaatagatacattattgattattttgtatcataaaatacta

SEQ ID NO: 812162 - DNA, 120 bp, Artificial Sequence
  ENSG00000237070_17 (sequence is synthesized)
tctagtacaacattctttaaaaaattcaatatttttataatgtaagtaaaacgggaagaactgttagagaaatgggcatcagatttagattaattctgcctctaacgcaaattgtaggct

SEQ ID NO: 812163 - DNA, 120 bp, Artificial Sequence
  ENSG00000237070_18 (sequence is synthesized)
gagccctatatgttcttgaccattctaagttttactacattaaaacacataaaatattctgcgaggttttctccaatgggattttgaatctcactgatgactgtgatttaggagtaatgt

SEQ ID NO: 812164 - DNA, 120 bp, Artificial Sequence
  ENSG00000237070_19 (sequence is synthesized)
agagagttttgcaactaactttactttacaccgttactccttttctacttgggggttcagttcaacacgctagtaaaagaaatagtcatgagagcatcctaaggaaagtaggcaaaatgt

SEQ ID NO: 812165 - DNA, 120 bp, Artificial Sequence
  ENSG00000237070_20 (sequence is synthesized)
tagtgcctcattatatttacaatctttacaaaacatgtatgtcagtaaaccatattaacatctaaagcacatgatatgtagaaacaaattgtgactacaaaatgtgtcttgtttcttaaa

SEQ ID NO: 812166 - DNA, 120 bp, Artificial Sequence
  ENSG00000237070_21 (sequence is synthesized)
tatgctaaataggaaataaatcacatctacttcaatttttaatctgtggactttggccttagtttgtgttttattttatttttttgcttttgattttaaccactgaaatcatttaccaat

SEQ ID NO: 812167 - DNA, 120 bp, Artificial Sequence
  ENSG00000237070_22 (sequence is synthesized)
actataagccaggaaatacaatgtaactggccagttgagaattaagccttctctttttattattacaatcaaggggggaaatgcttatatatcttcctgcacaaaatgtttcatttatca

SEQ ID NO: 812168 - DNA, 120 bp, Artificial Sequence
  ENSG00000237070_23 (sequence is synthesized)
aaaaaaaaagtgagaaaaataaagaaaatttgggtgagataaataatccacaactattaattcaacagatattatttaagaaattcctacctgtaatttattttctaatatttctgcatc

SEQ ID NO: 812169 - DNA, 120 bp, Artificial Sequence
  ENSG00000237070_24 (sequence is synthesized)
cttagtatttatcgctcaaagatatttgcagccctcatagcagtgcttggaaaagagatttgctctgaaaatttagaaataaattcctgaggtgaatacagttcaaaactaaaatatatt

SEQ ID NO: 812170 - DNA, 120 bp, Artificial Sequence
  ENSG00000237070_25 (sequence is synthesized)
gctgtattatattggtttttctcatttgaaattaaaatctaaaaaaccttcatattaggttgtgtgtgtcaagctgccattataaaaacactaaatgaataaaatttcgcaagcaaggca

SEQ ID NO: 812171 - DNA, 120 bp, Artificial Sequence
  ENSG00000237070_26 (sequence is synthesized)
gcattatcaggctaagtacatgtagtgggcttatatatggtgatgttttacataattcagctattaattcatctatagatttacatttcttaagtgcaaaaaaaaatgtaattatttcat

SEQ ID NO: 812172 - DNA, 120 bp, Artificial Sequence
  ENSG00000237070_27 (sequence is synthesized)
tacatatggaattcacctcccaaatttctcagaatctaagagaaaggattgacattttctgatatttcatttttgcttaaaattaagttcttaggatgtttagattttattataaatatt

SEQ ID NO: 812173 - DNA, 120 bp, Artificial Sequence
  ENSG00000237070_28 (sequence is synthesized)
acaacttaaattccagagttataatgaacggtctatgttttgaaacacagagggagaatggggtaatgactgaagtactgttttttcagtttattagtaaagatcagcttataagatgtc

SEQ ID NO: 812174 - DNA, 120 bp, Artificial Sequence
  ENSG00000237070_29 (sequence is synthesized)
attgtaaaggtttctattgataattaccataaacaaagattaaaactttaaatactaagttctggatttctaagcccggtgaaagtttgtgcaataccatgccttgcatttatgattttt

SEQ ID NO: 812175 - DNA, 120 bp, Artificial Sequence
  ENSG00000237070_30 (sequence is synthesized)
cttttaaaatgaactataaatgaagaaatttacacagaattggaaactattcctacttttatttgcattcttccttccattcattgctaatgttcaacaataaagcattttaattctaaa

SEQ ID NO: 812176 - DNA, 120 bp, Artificial Sequence
  ENSG00000277459_0 (sequence is synthesized)
gcccgactgagacagaaactcgcctcaaacgccaaaactaaagttaggagaagcgcccgcccgcgccgccgcggccccgcctcctctcggctcttccttcctctgcgcgcccgcccgcac

SEQ ID NO: 812177 - DNA, 120 bp, Artificial Sequence
  ENSG00000277459_1 (sequence is synthesized)
cgcggcccggccggcagcgcagggaaacttttcgctgcaagttgctacattcctgcacactcccggcccgcggcgcctctcccggccgcacgtgacccgctcgccctggcccggtccgcc

SEQ ID NO: 812178 - DNA, 120 bp, Artificial Sequence
  ENSG00000277459_2 (sequence is synthesized)
aagcgtgccccgtattctgccccgcgaaccgcaaacgatgggtccaatccgggtccgaactgtggtgtctgcggagaacgcgggcgcccttggctgcaggaagttcttccgctccgctcg

SEQ ID NO: 812179 - DNA, 120 bp, Artificial Sequence
  ENSG00000277459_3 (sequence is synthesized)
gccccttttccccgcccgtgctcgggaaaggcgcttccagttcgcctggacctgcgaaagggccaaggccgaaagaagtggagagaggatgtgcgaacccacctcctcctcctcgcgtta

SEQ ID NO: 812180 - DNA, 120 bp, Artificial Sequence
  ENSG00000277459_4 (sequence is synthesized)
ccccggcttgaccgagcggagcgcctgtgcgagcttaaagccgcgaggatagattggagttaaaatagataccgtgagccggcattgatgttaataaagatccattgttttcagcattaa

SEQ ID NO: 812181 - DNA, 120 bp, Artificial Sequence
  ENSG00000237076_0 (sequence is synthesized)
aggcgtgagccaccgcacccggcctatgtaaaagccttttatagtttagagcgcactttcagacctattatcttatttgattcccgtggcaacttaataaggtagaaagagagtaagcat

SEQ ID NO: 812182 - DNA, 120 bp, Artificial Sequence
  ENSG00000237076_1 (sequence is synthesized)
ataaggtagaaagagagtaagcatcatcatctacattttacagttacagggatcacctgtgtatttgctggtggctgtctaataaaagatgtgggtgtggaggaaatagatttttaatca

SEQ ID NO: 812183 - DNA, 120 bp, Artificial Sequence
  ENSG00000237076_2 (sequence is synthesized)
ccggctgttgtattctcaacattttagaattcaactttaaatgaaatcttcaaaaaagcaagtccaagaaaaacctcatagtaatatttgtgtctcattcactaccatcaccaaatgata

SEQ ID NO: 812184 - DNA, 120 bp, Artificial Sequence
  ENSG00000237076_3 (sequence is synthesized)
ttgattgcagtacctgaagaaatcattaggcaccatatgacactgatgtctatttagagtgttttttattctgtattggaaaataaagcacattacctaaatgattcaaatggcaagaaa

SEQ ID NO: 812185 - DNA, 120 bp, Artificial Sequence
  ENSG00000237076_4 (sequence is synthesized)
aaaatttatccctaaaagccatctgtgaattagcatatgggcttctggaacccaacatcttgattctatatgtgagtcaggaggaaaaaaaacaacaaaaaaagaatgaaaggaagaaaa

SEQ ID NO: 812186 - DNA, 120 bp, Artificial Sequence
  ENSG00000237074_0 (sequence is synthesized)
tctgttgaaagagggaagtgtggtgcctgaagcactgaaaagcatgcgggagaaggtgataacaaggctcaggggaaaaccgaggcaagaagagaagtcctgttgcatagaaagagagag

SEQ ID NO: 812187 - DNA, 120 bp, Artificial Sequence
  ENSG00000237074_1 (sequence is synthesized)
ctcagaaactggaattagatgccctgggttcacatcttggctctgcgtcttaaaagattacaagactgaataagatagacatgacctccttcctcctggacctgacaattgttccttcaa

SEQ ID NO: 812188 - DNA, 120 bp, Artificial Sequence
  ENSG00000237074_2 (sequence is synthesized)
atcacttccacacatgcattgcctggggactggggactggggtctggatcccatggccagaccaaaccccaaaggaagctattggagaatacacaccttcgaaatgcggagaaatataag

SEQ ID NO: 812189 - DNA, 120 bp, Artificial Sequence
  ENSG00000237074_3 (sequence is synthesized)
aaaaggaagacaagagttcaagaagccaggcatccaacaataataactaaagaggcaaggtaattctcaggatgatgtaacagaaagtccagactggtgaatgacaatgaagaactacaa

SEQ ID NO: 812190 - DNA, 120 bp, Artificial Sequence
  ENSG00000237074_4 (sequence is synthesized)
ttgaccatgtttcaaggaagtatatggttctgtgcaaagttagcaaaaggtacattaaaaaaatgagaaaacaacaaaatcaggcaattaccaactaaaagtataaagaatttggtacaa

SEQ ID NO: 812191 - DNA, 120 bp, Artificial Sequence
  ENSG00000237074_5 (sequence is synthesized)
aaaaggaaattaataatacactacatgctaacttgttaacaatttttacatagtaccaatacaataaatacaatgttaatttcaaactgcaattaattatgctggaaggatgtgggagtg

SEQ ID NO: 812192 - DNA, 120 bp, Artificial Sequence
  ENSG00000237074_6 (sequence is synthesized)
ttaagagagttaaattaaaatcttcataacaggaagtcaacagataatacctactgaatatttctactttttggagggatgttgggttggggaactactgtttcatttccttaaagtact

SEQ ID NO: 812193 - DNA, 120 bp, Artificial Sequence
  ENSG00000237074_7 (sequence is synthesized)
atttggctttttaaattgcctgtacacatgcatatgcatacatagtctaaagttaaatttttaaaaccacatataaaagccatgtgggaaaagaattattgtgaatgcttagtaaaagaa

SEQ ID NO: 812194 - DNA, 120 bp, Artificial Sequence
  ENSG00000237074_8 (sequence is synthesized)
tgtatgcacagcacataatacaatgttgatacatcatagagtattaataaagtccccaagatttgcctgcttgggatagtcttattaacaaaagttaatcttgttaataaaacagtcaac

SEQ ID NO: 812195 - DNA, 120 bp, Artificial Sequence
  ENSG00000237074_9 (sequence is synthesized)
ttcttgtgattagcaatcaaggacagtttctcagctaatcagtacaggaagaagagcctatggtaacagacaataaaggaacagcttgcagacggcctatcgtgagactttgccttgtga

SEQ ID NO: 812196 - DNA, 120 bp, Artificial Sequence
  ENSG00000277450_0 (sequence is synthesized)
tcttgcatgtctcttgggatctctcctggagtatgaagacctccaaggactcactttccctcccttctgatgccagagcagaccaagctgtcacactccagtctcatgctgaagtctcca

SEQ ID NO: 812197 - DNA, 120 bp, Artificial Sequence
  ENSG00000277450_1 (sequence is synthesized)
gggagtgggttgggggtgttttccttgccattttcgaaaagaaaaaaattacctggtgattggtggaaagatacaactgtcaaaaatgcatgaatgaagcaatttaggttgggagaccaa

SEQ ID NO: 812198 - DNA, 120 bp, Artificial Sequence
  ENSG00000233799_0 (sequence is synthesized)
cgtgtctcaccttgaatctccacctagtgacaaccacgaacttgagtgtgtggtccttgcccaggatctcctcgttgcataaaatgtccagctgggggataaggaggtttgattagcagc

SEQ ID NO: 812199 - DNA, 120 bp, Artificial Sequence
  ENSG00000233799_1 (sequence is synthesized)
ccatcacaccctgtctaccacacctgccgtactgagcaacgggaagaggtggtttgcagccccatgagcagccctgacagctccggaatcgggcaccctggttccccaggtggcacaggt

SEQ ID NO: 812200 - DNA, 120 bp, Artificial Sequence
  ENSG00000274191_0 (sequence is synthesized)
ttaattccaggcctgctggaattaatctgatctgttttgctaaagtttttgcaaggcactgtcctggtcaaggcatgaaacacagtgattaaggaaacatagggattatagtgctgcctt

SEQ ID NO: 812201 - DNA, 120 bp, Artificial Sequence
  ENSG00000274191_1 (sequence is synthesized)
gtagccaggggtttgaagagcttgggggtggtttgtatcagcctgtcaccattatttataacaattaaattgattatttgctcctggtcttggtgagaccaactccactaagaacgtcct

SEQ ID NO: 812202 - DNA, 120 bp, Artificial Sequence
  ENSG00000274191_2 (sequence is synthesized)
gatgctatgttggaccctgattccaagatgctgtatacacacatcactggttcttgctctgggtggggatagtgtgtccagccacagcccttacaaaagggaggattgtgggagactgcg

SEQ ID NO: 812203 - DNA, 120 bp, Artificial Sequence
  ENSG00000274191_3 (sequence is synthesized)
cctagttctccagagcctttgctctgaaataccggttggccgggacacatattcttaatttaatgccattgctgtattgaatccttttcttgtaataaacgaggtttgtaagcattgtca

SEQ ID NO: 812204 - DNA, 120 bp, Artificial Sequence
  ENSG00000233791_0 (sequence is synthesized)
agtgctaggaacctgcgcccggctgagctgagcgaggcgagaggagaaagcgaggcccggggacgggactgagagctctgaaaggagggaggcggctcccgagtactccgcgcggggcag

SEQ ID NO: 812205 - DNA, 120 bp, Artificial Sequence
  ENSG00000233791_1 (sequence is synthesized)
gccccggcctcgcctcttcgcccatttttaaggctcgagttagaggccacctcctccgagaagccttcggtgacaccacctctcccagacggttcccctttctgattcccacagcatttt

SEQ ID NO: 812206 - DNA, 120 bp, Artificial Sequence
  ENSG00000233791_2 (sequence is synthesized)
ccaaccattcacggtcagaaccactcaccaggacgtgttgtcaccattttaccgctttgcctcgtctcttaactagacgaaatgggttccttttggctctttggaaagggaggctgtctt

SEQ ID NO: 812207 - DNA, 120 bp, Artificial Sequence
  ENSG00000233791_3 (sequence is synthesized)
ctatttatttccgtggtaatcccacctcccacaacaagttccattctacagcaatgtcttttctcttgctgagaaccattcaagtctaagttttctgtcctggttgctcatctcgcccac

SEQ ID NO: 812208 - DNA, 120 bp, Artificial Sequence
  ENSG00000233791_4 (sequence is synthesized)
ttgcacagcccacctgtgtggccgactcaggattgacccacctgctctcttcaggccatattcccacgcagaagtgggtcccactcctcaggcctctgtgctggccccgtctgtggggtt

SEQ ID NO: 812209 - DNA, 120 bp, Artificial Sequence
  ENSG00000233791_5 (sequence is synthesized)
agcaagcagccctgctctccatttccagctcagaagcaactggatcgttacctcattggtgacaacttgactgtgctgcccagagctgataagaaacatcacccggggaagaccagctgc

SEQ ID NO: 812210 - DNA, 120 bp, Artificial Sequence
  ENSG00000233791_6 (sequence is synthesized)
ctcttccttgcttcctaatcagggtggaaatactgctaaatatatcacaactctttgcaagcatcgttgggtaatgatcgggacatctttgtgggttccctatcattttctcacaaagtt

SEQ ID NO: 812211 - DNA, 120 bp, Artificial Sequence
  ENSG00000233791_7 (sequence is synthesized)
gagcctttcaaggtcagttctaggccagccagtctgggagtcattctttagaatcagaagagaatttaagaagaggagaagataagattgtctctaaaacctgctaatgagaactacagg

SEQ ID NO: 812212 - DNA, 120 bp, Artificial Sequence
  ENSG00000233791_8 (sequence is synthesized)
aaggtggggatgctagctacttttaatatttctggtttgaaccccttcctccaccccagaatgaactgagagtaggtacagaaatagataatgcaaagacggttagggttgagggtaagc

SEQ ID NO: 812213 - DNA, 120 bp, Artificial Sequence
  ENSG00000233791_9 (sequence is synthesized)
agaaaactacccatctagaccgaaggaaggcttgctaacatatcagtaagcaaacagctttctaatctgcaggtaacaagttttacatccctgaggacactttttgagataggactttgt

SEQ ID NO: 812214 - DNA, 82 bp, Artificial Sequence
  ENSG00000233791_10 (sequence is synthesized)
agcctggggctttttgagaccctattgaaggctgaggaagaatctggaagctaaagagtaacccattccaccacctgctctg

SEQ ID NO: 812215 - DNA, 120 bp, Artificial Sequence
  ENSG00000233791_11 (sequence is synthesized)
tctggaagctaaagagtaacccattccaccacctgctctgaagatagaagaagcaaaaaaagattaaattgtacaaaaagcacttaaattagacaacagaagaatttcctgatacaaagt

SEQ ID NO: 812216 - DNA, 120 bp, Artificial Sequence
  ENSG00000233791_12 (sequence is synthesized)
gggtgtctaagatgtgttaaacaagatgcctgctccagccaggactcagacactcctggatggagagcatcttcacagtttgggataaaagtgactatacagagtggtggagtgaaggct

SEQ ID NO: 812217 - DNA, 120 bp, Artificial Sequence
  ENSG00000233791_13 (sequence is synthesized)
gcaggcccctccccaaggtggcatctaaccccggaggtatcaggacctcagaggctacccacatgatttccagctgatgagcagaaatagctgtggcaggtgcaggcttcacttgctgcc

SEQ ID NO: 812218 - DNA, 120 bp, Artificial Sequence
  ENSG00000233791_14 (sequence is synthesized)
accaacatgggagctcaccaaacacccagtggccaaaagaaccagggtctctctaagccctgggctcaccgccaggcaagcttgggtgcttgggagggccgtcgttcttcacagtgcagc

SEQ ID NO: 812219 - DNA, 120 bp, Artificial Sequence
  ENSG00000233791_15 (sequence is synthesized)
ccctggatttcttctcaatttactcaactctctctcttgaatcccatctgtgcagcttagaagtcacaaattagaaccccccaaggcaaagctgaccatagatacaaatggttttgtctg

SEQ ID NO: 812220 - DNA, 120 bp, Artificial Sequence
  ENSG00000233791_16 (sequence is synthesized)
tatagtgtttaagcacttaaaaaattcattgtgaacatttaataattagaaagtgtcaaaatgaaaatatctatagtttctctctaaaaaccagaagatctgttaacactgatcccacac

SEQ ID NO: 812221 - DNA, 120 bp, Artificial Sequence
  ENSG00000233791_17 (sequence is synthesized)
ttctatttggcaatgactggcccctaagacagggggtatgtcctctagctcaccacagtctccacctttacctactgcatccctgctgagacaaagtggtacatgccatttattaaggat

SEQ ID NO: 812222 - DNA, 120 bp, Artificial Sequence
  ENSG00000233791_18 (sequence is synthesized)
gaatgctgttttttttaattatacttaatcctcatttgcattacctgccttcattctggaggtatttgagtttgcatctcctgataaagaataaatctcaaaattgtcatctctaacttc

SEQ ID NO: 812223 - DNA, 120 bp, Artificial Sequence
  ENSG00000233791_19 (sequence is synthesized)
cttccacactcagggaccgccaccatcacaggcactcggtagatgtctgctgaatgaggataacttctacccaacaccgtgaagcctggcccagggtctggcatacagatgccgtgtttg

SEQ ID NO: 812224 - DNA, 120 bp, Artificial Sequence
  ENSG00000274198_0 (sequence is synthesized)
tttgttttatagcaacagataagtgaaacagctgcctgacagcctctctgggtgggttaccagatattcccaagttgtgtctttaggtgccttcttagaatttcagatcttcctgtccag

SEQ ID NO: 812225 - DNA, 120 bp, Artificial Sequence
  ENSG00000274198_1 (sequence is synthesized)
cttttctgtactcttattatctcccattgcccaactgattccagccttcaatctctcttcttcaatccatcctgcattcatctgaaagaatgtctgcatattaaattttcttaaaacaca

SEQ ID NO: 812226 - DNA, 78 bp, Artificial Sequence
  ENSG00000270864_0 (sequence is synthesized)
ggctgtattaaaagcaaagctaatggtgggacaacagactacgctgcacctgtgaaaggcagattcaccatctcaaga

SEQ ID NO: 812227 - DNA, 120 bp, Artificial Sequence
  ENSG00000270864_1 (sequence is synthesized)
ctacgctgcacctgtgaaaggcagattcaccatctcaagagatgattcaaaaaacacgctgtatctgcaaatgatcagcctgaaaaccgaggacacggccgtgtattactgtaccacagg

SEQ ID NO: 812228 - DNA, 120 bp, Artificial Sequence
  ENSG00000270866_0 (sequence is synthesized)
tctccctctccccctctctctccctctccctctctttcgcttgaatttgtcctacatttcgtaatgttacgtgcctgccatccttatcctatgccagaggtacaacaccagtctcacccc

SEQ ID NO: 812229 - DNA, 120 bp, Artificial Sequence
  ENSG00000270866_1 (sequence is synthesized)
cattccggcgtggagttctctgagttcggtggcacttgggatattccacttcagtgccatgggaagaaaatggtaagcaaaaagcaaaaggaataatgcaaaaaaaaaaaaaaaattata

SEQ ID NO: 812230 - DNA, 120 bp, Artificial Sequence
  ENSG00000270866_2 (sequence is synthesized)
atgttgtggtatccaattgctcctgcttcagccttttatccaaagccttgagatggatctgcctcatccaggaagttttcctgcttcgttagagtatcttcgttttctttatcagacgct

SEQ ID NO: 812231 - DNA, 120 bp, Artificial Sequence
  ENSG00000270866_3 (sequence is synthesized)
ggctggcactccacgccagtgcacggctccatggaatgcctgctgttggacacttgcagagctctgccaccaagcaacctcctgcattggaaatcgggggactactccaggatcttatgc

SEQ ID NO: 812232 - DNA, 120 bp, Artificial Sequence
  ENSG00000270866_4 (sequence is synthesized)
aagctgcagaaaagtgaataatcaattaagtattgatttcttgtaagatttggtaaatttcaaaggcaagacaaagaggatggcttaaggaaacactgcagggacttggcgtaaattaga

SEQ ID NO: 812233 - DNA, 120 bp, Artificial Sequence
  ENSG00000270866_5 (sequence is synthesized)
caactaacggaagcgcagaataaaataacacctcaactgaagatttccttggaagaattagcactagctattggaagacaatggtggatttaatcaaaacagcaggcatgcaagaatttt

SEQ ID NO: 812234 - DNA, 120 bp, Artificial Sequence
  ENSG00000270866_6 (sequence is synthesized)
acccgtgaaccagaaaaaggagctaattataaccacctttttaatggagctaatttgactgaatggatgcaaatgtgctttatttatggatgaagaagcaagccttactgcatgatcttg

SEQ ID NO: 812235 - DNA, 120 bp, Artificial Sequence
  ENSG00000270866_7 (sequence is synthesized)
ggatcatcggatctgctaagctttgcagctcctgttaccttcagtacattttttatttccggagaaggtatttgtatgtaaacaacaactaaccatgcaaaagattcatcggaacaatat

SEQ ID NO: 812236 - DNA, 120 bp, Artificial Sequence
  ENSG00000270866_8 (sequence is synthesized)
actgtggtatatgagatataatcataattttgcagcctctcaggatttcctctaacttggaggttttgcaacctttgtgtgcaatgggttatggtaaacaataaatgaatgatgctaaag

SEQ ID NO: 812237 - DNA, 85 bp, Artificial Sequence
  ENSG00000260624_0 (sequence is synthesized)
atcacaatgacctggaacacgggaacacccacctttagagatgagacacaagcaggagaagagggattaaacctgctagttttgg

SEQ ID NO: 812238 - DNA, 120 bp, Artificial Sequence
  ENSG00000260624_1 (sequence is synthesized)
aaagaaaaacaaaaaacaacaacaaacagaaaaatgcaaaactgcagaacacgcagtggaggttggattcagaggacatggggatcagtgtgggctgtgctggtcaaggagggcttccag

SEQ ID NO: 812239 - DNA, 120 bp, Artificial Sequence
  ENSG00000260624_2 (sequence is synthesized)
tctaaaacgaacatggtgaacatagatcaactactgaacttcttttaacctctggcatcctatctgtgaattgtggggaggaaacagggtccacccgctgctgcacaagaggggtgtgtg

SEQ ID NO: 812240 - DNA, 120 bp, Artificial Sequence
  ENSG00000260624_3 (sequence is synthesized)
cagaccgtcaccttgtgtctgctgtagcaggagacccctggccatgcgggactgaacccatgattgcagctgatcttactctgtctcttctctgtgtgagtaaagtgttgttccatctag

SEQ ID NO: 812241 - DNA, 120 bp, Artificial Sequence
  ENSG00000260624_4 (sequence is synthesized)
cgaacatggtgaacatagatcaactactgaacttcttttaacctctggcatcctatctgtgaattactcagcgtgtactctttgttctgcttaagcttgtgcgtcatgtggcaggcacct

SEQ ID NO: 812242 - DNA, 120 bp, Artificial Sequence
  ENSG00000162913_0 (sequence is synthesized)
atgtacaccgcgtcgtcgtcggccgagacattgcgcacggtcaggcggcgctcggtgccctcctcctcgatgccgtacttggcgctcgcccacaaccgcgtctcctccttgaaccacgcg

SEQ ID NO: 812243 - DNA, 120 bp, Artificial Sequence
  ENSG00000162913_1 (sequence is synthesized)
gcctcagtggacggctggggcacctcacataggaacgtggccgactccttctcccgcacctccagatcttgcagccgctttttgaagggaaccgcgggctctgccaggagagaagactgc

SEQ ID NO: 812244 - DNA, 120 bp, Artificial Sequence
  ENSG00000162913_2 (sequence is synthesized)
tattttgaagcatacatgggaagctggttcctggacccccgcatataccaaaatctgtgcatactcaagttctacggtcagccctgtggaacccaagcataggacaagccggccctccct

SEQ ID NO: 812245 - DNA, 120 bp, Artificial Sequence
  ENSG00000162913_3 (sequence is synthesized)
tggttccagaaaatctgcgtataagtggactcagtggtgcaaacctatgttgttcaagggtcaactatatatgatgaattattgttacctacagtcactctaccatgctactaaacacta

SEQ ID NO: 812246 - DNA, 120 bp, Artificial Sequence
  ENSG00000162913_4 (sequence is synthesized)
gaactgattcattttctctgactgtgtgtctctacccattaaccagcccctcttcatctcccttcccgcttccctccccagcctctggtaaccatcattcagttctctacctccgtgaaa

SEQ ID NO: 812247 - DNA, 120 bp, Artificial Sequence
  ENSG00000162913_5 (sequence is synthesized)
tcaacatgagtaagaactggtgaaacccaaacatagtctcgaatttagctttttttttttttttaactgtaagaggctaaacattcttgaggaggacacaaaaaagtctgaagacaactg

SEQ ID NO: 812248 - DNA, 120 bp, Artificial Sequence
  ENSG00000162913_6 (sequence is synthesized)
tccagatgagaatcttgcacttgcacaagtagagaggagagttagtttttataccatcgcatccccaatcccagctttattgatgcataacaaataaaaattgtacatatttaaagtgta

SEQ ID NO: 812249 - DNA, 120 bp, Artificial Sequence
  ENSG00000162913_7 (sequence is synthesized)
ttccatccttgaccagcttgtagatgacacacattcagcaaacgcacatcccagcagcaccgagagaacacacagctgggttgcttacaaatacactacttcaaagtaaactttctctag

SEQ ID NO: 812250 - DNA, 120 bp, Artificial Sequence
  ENSG00000162913_8 (sequence is synthesized)
cccgcacccaggagctcaccgcgcactacgaccagcacagagctgtaggtctggcccacgaggttggacgccgtgcaggtgtagaggccgcggtccgactgcttgcagaagaggatcttg

SEQ ID NO: 812251 - DNA, 120 bp, Artificial Sequence
  ENSG00000162913_9 (sequence is synthesized)
agcacgaagttctcctgcgcgtcctcgtacaccacgtggcgccggccctcggtcaccagctggccgtccttcttccacaccgtctcgggcttgggctcgccggtcacgtagcagctgagg

SEQ ID NO: 812252 - DNA, 120 bp, Artificial Sequence
  ENSG00000162913_10 (sequence is synthesized)
cacgtagcagctgaggcgcgcgtgcttgccttcagtcaccgtgcaggtgcctgctgtcccagctactcaagagactgaagcaggaggatggcttgagcccaggaggtcaaagctgcagtg

SEQ ID NO: 812253 - DNA, 120 bp, Artificial Sequence
  ENSG00000162913_11 (sequence is synthesized)
ccctgatccagtgccaggcctctatgtgtcctcacagcgtacctcaggctcttccgggcaatggccaacatctctcatgtgtcctcaatcagaaggagggtgaggggtctctggagtaac

SEQ ID NO: 812254 - DNA, 120 bp, Artificial Sequence
  ENSG00000162913_12 (sequence is synthesized)
ggttatgccattctgcagccttatctcatgactgatcacttccaaaagctcacgttctaatcctgtcaccttgggggtgagcatttcaacgtgtgaatctccgggacacacattcagtcc

SEQ ID NO: 812255 - DNA, 120 bp, Artificial Sequence
  ENSG00000162913_13 (sequence is synthesized)
acagcaccagggagaaaggaaaggctggaaggagagcccactcccccaccaggagcttggccctgagctgccccagccatgcagaagtgtgtgtgcattgtgtgtgctcgaatacgtgcc

SEQ ID NO: 812256 - DNA, 120 bp, Artificial Sequence
  ENSG00000162913_14 (sequence is synthesized)
ccaccccctcccggacagggccgtggagggtgcagagaagatggctgtgcgggccagccccttgcagggcctcctggacctgggagaagcaatgcccccacagcctccaggagtggcctg

SEQ ID NO: 812257 - DNA, 120 bp, Artificial Sequence
  ENSG00000162913_15 (sequence is synthesized)
ccctcctgaccctcttcactgctgcctgctccgctgcatctccaaacaccactgccagccttcaggctggattttctgcctccttcacaggacccctgttgttccttatttccctgcaac

SEQ ID NO: 812258 - DNA, 120 bp, Artificial Sequence
  ENSG00000162913_16 (sequence is synthesized)
gtatttgttgaagacagtgggatattcacactacagagcttccggaggcactgtgcccagggtgtccttcacaccacgggaggccacaggatgcagtggctggccatggaccttgcctat

SEQ ID NO: 812259 - DNA, 120 bp, Artificial Sequence
  ENSG00000162913_17 (sequence is synthesized)
ccactgcaaagagaactttcatggagctgctgtctgttcaaaggggtacaggtggaggaggagcagacacaatttcctgaggaaagcaaatgtcactgtgtcccttgagttgccagcttc

SEQ ID NO: 812260 - DNA, 120 bp, Artificial Sequence
  ENSG00000162913_18 (sequence is synthesized)
cacagggatgtcccgccatgagccctcctcccaggggctttcacagctgggtgggctggcatcctgggtgcagtttaactgaagggggtgttctcacagccatctcccaaggcctggggg

SEQ ID NO: 812261 - DNA, 120 bp, Artificial Sequence
  ENSG00000162913_19 (sequence is synthesized)
atggtgggcccggaggcctcagacctgcacctgctgcccaggcgatggggtggctgggccccgggtgcccacaaactataggcaaaaaaaactgtaagtcagtcctgcagggtttcctga

SEQ ID NO: 812262 - DNA, 120 bp, Artificial Sequence
  ENSG00000162913_20 (sequence is synthesized)
acattttatgatccccaagtcgtatctgaacatgtcaagaatctctggtgccttggcttgggtgtaaagatgaagttctttcctcctctgtattccaggaggaaagagggttttcattcc

SEQ ID NO: 812263 - DNA, 120 bp, Artificial Sequence
  ENSG00000162913_21 (sequence is synthesized)
ttcataaggccttttcatgtcagtatcttattagatattcccaaacaagggtgttttctcatcttatagaagagaggcctgaggctcacagggtgaaaacaatttgcttaagcctgcaca

SEQ ID NO: 812264 - DNA, 120 bp, Artificial Sequence
  ENSG00000162913_22 (sequence is synthesized)
gcagctgtgctggcaacgtttctcccggtataaatgagaagcagcctttgtggccacagagatgtgactgctaagtgcatcgtcccaccctgaaggagattcttcctcaacaagaggaca

SEQ ID NO: 812265 - DNA, 120 bp, Artificial Sequence
  ENSG00000162913_23 (sequence is synthesized)
ttagtgcaaagactgatgaagtctgtagtttcgtgggttttttttttaagcataaggggttaaatattatgtaattaagtaataaggcagttgtgaggatgcaactgccaaaagtttgaa

SEQ ID NO: 812266 - DNA, 120 bp, Artificial Sequence
  ENSG00000162913_24 (sequence is synthesized)
aaaagctgcccagatggaaatctgcttgcatttgtgcaagcagataggtgagggatttttactgtactgccgtgtcccctacctgccccagctttattgagttataattgacaagcaaaa

SEQ ID NO: 812267 - DNA, 120 bp, Artificial Sequence
  ENSG00000162913_25 (sequence is synthesized)
attgtttatatttaaagtgtacaatgtgatgtggcctttttgttttgttttgagacataatcttatcacccaggctggagtgaagtggcgcagtttaaactgcgcaggctcatcatcctc

SEQ ID NO: 812268 - DNA, 120 bp, Artificial Sequence
  ENSG00000162913_26 (sequence is synthesized)
cttcctcagcctcctcagtagctagaaccacaggtgtgagccaccatgcctggctcattttttgattttctttttttaagagacaggggtctccctgtttcccaggctggtcttgaactc

SEQ ID NO: 812269 - DNA, 120 bp, Artificial Sequence
  ENSG00000162913_27 (sequence is synthesized)
ccgggctcaagtaatcatcccgcctcagcctcccaaagtgatggtgttacaggcatgagctactgtgcctggccagaaatggtaaattataattaaaggcttctgtaagtcatgctgtca

SEQ ID NO: 812270 - DNA, 120 bp, Artificial Sequence
  ENSG00000162913_28 (sequence is synthesized)
tgcttgccttcagtcaccgtgcaggtgcgcgtgccggtgctgggcggtgaggcgggggcgccctcggcgcgcatagcctcgcgccgccgctgcaggtgcgccaggagcgcggccgtggag

SEQ ID NO: 812271 - DNA, 120 bp, Artificial Sequence
  ENSG00000162913_29 (sequence is synthesized)
ggaggtcccgggccggctggccgtgtccgcggcgtccgagtccaccactagcgccgcggcggcgctggcagcgcccagcgggttctcggcgcggacctcgtaagtgccgccgtcgcgcgg

SEQ ID NO: 812272 - DNA, 120 bp, Artificial Sequence
  ENSG00000236671_0 (sequence is synthesized)
gggtatctggttgccttaaaaaggcttgtttcctactggacccaattttttgcctttattgggaaggaagattatgatcaaggcaaggttaaaactggctcagtaccactggctgataca

SEQ ID NO: 812273 - DNA, 120 bp, Artificial Sequence
  ENSG00000236671_1 (sequence is synthesized)
caagagagaagaataaaaggaactcgtcacagcctgagtgacacatgtttgaatgaggcacagaggcacagcactgctgtagtggtgactcaacttcatgaccagggtggtccagagttg

SEQ ID NO: 812274 - DNA, 120 bp, Artificial Sequence
  ENSG00000236671_2 (sequence is synthesized)
gtgactattatggcatggctacccagggccagagaggtgaggtttaatgagaaagaagatagatgaaaatgactcctcctcctgctttcactgctgcagcaactcaggcctgcagacaag

SEQ ID NO: 812275 - DNA, 88 bp, Artificial Sequence
  ENSG00000236671_3 (sequence is synthesized)
cctgctttcactgctgcagcaactcaggcctgcagacaagatccagctctattgcccaagctggagtgcagtggtgagataatgatgt

SEQ ID NO: 812276 - DNA, 80 bp, Artificial Sequence
  ENSG00000236671_4 (sequence is synthesized)
cctgagtagctgggaccacaggcaccctccaccatgtctggccaaaattttttgaaatttcaaattcctgggctcaagtg

SEQ ID NO: 812277 - DNA, 120 bp, Artificial Sequence
  ENSG00000236671_5 (sequence is synthesized)
caagtgtgagccaccacacccagccaaaatataaatacgcctttaatagtaacacctaattacctaacaccatcaaaaatggggtgctccatgaagaagcacataattcaaattattgaa

SEQ ID NO: 812278 - DNA, 120 bp, Artificial Sequence
  ENSG00000236671_6 (sequence is synthesized)
gtttatcccttctaatgaccacatagatttctcttgccccattaaaaaattagataatcagtatttctaggatagttgttttcttccaaccaattaaggcataatctatgtagcagaaca

SEQ ID NO: 812279 - DNA, 120 bp, Artificial Sequence
  ENSG00000236671_7 (sequence is synthesized)
ttcagaggatgatgcctggtcaacatttgaataaacaatcactgtgatgttacctctatttaagatgactccaataaaacttctatggtttgcattattagttgatcagactttaagcat

SEQ ID NO: 812280 - DNA, 120 bp, Artificial Sequence
  ENSG00000236671_8 (sequence is synthesized)
tatcttttgatagggtcaaggaacctgtcttaactccccatctctgaccaaaatatacttgttttctataagctataaagccagatagccaattttatgagaattgtccctatactatat

SEQ ID NO: 812281 - DNA, 120 bp, Artificial Sequence
  ENSG00000236671_9 (sequence is synthesized)
ccatgtgagcgatgagtgcctggcatgaagatgcataaaggaggcagtaatatacaacaactgaagcataacctctggagccagtcttcttcagacaaatcccaattccattactcactg

SEQ ID NO: 812282 - DNA, 120 bp, Artificial Sequence
  ENSG00000236671_10 (sequence is synthesized)
gccacctaaacaagctacttaattcatctgcctcagttttcttcaactgtttaatgggtatgatcaacaaaccaacttcagtgggttatcataaatattaataaatgagagaatgcatgt

SEQ ID NO: 812283 - DNA, 120 bp, Artificial Sequence
  ENSG00000236671_11 (sequence is synthesized)
tcttcaccccgcccctcccttgcttagtcgctcggctggcccggctcaccttcggggtgaaggctaccagcgagcgttatagcagacgactttaataaatgcaggcggcagcaggaactc

SEQ ID NO: 812284 - DNA, 120 bp, Artificial Sequence
  ENSG00000236671_12 (sequence is synthesized)
tgggaacttgggtgcccttgcctggcagtaagggttgaattatccggatctgaaatactttacagagccgaggggtgataggctctgcaaaagcactttttgcccctctcctttatgcca

SEQ ID NO: 812285 - DNA, 120 bp, Artificial Sequence
  ENSG00000236671_13 (sequence is synthesized)
atactcgctgactgtgcacacaagtcatattcagtattaaatacaaaccggtctgtaattcaatggctctagcaagacgcctctgagagggccaggtggcgggtgcaagttgctcattaa

SEQ ID NO: 812286 - DNA, 120 bp, Artificial Sequence
  ENSG00000236671_14 (sequence is synthesized)
ccctttagagtcgcagtttgcagatctgagttagatccccggctttgaggtccttcagttgccctcctcccccacctccccccgccactgcgagaaaaatgtgcaaagagaaggaaattt

SEQ ID NO: 812287 - DNA, 120 bp, Artificial Sequence
  ENSG00000236671_15 (sequence is synthesized)
gaggggcaatcgcggcggtagatgaacttgattaggcagacgcgtgagatcaaagtggccgggaccaaagcggacagggtccaacgtgccagcactgccaagagaaggccttttgtactc

SEQ ID NO: 812288 - DNA, 120 bp, Artificial Sequence
  ENSG00000236671_16 (sequence is synthesized)
aggttaaataagaacatcctgcaaggagtctgttcttttatgcagcctaaagatcaagtaataatcattgacactgatactgagcatgtcgattttgaagagactagcatttcctggtaa

SEQ ID NO: 812289 - DNA, 120 bp, Artificial Sequence
  ENSG00000236671_17 (sequence is synthesized)
tgaagtggagtatatatccatatatttctgttttctggatgagaagactaacctaactaagtaggaaccttgaagaatcatgttcttcctaggaattacaaatcccccgattccatgtct

SEQ ID NO: 812290 - DNA, 120 bp, Artificial Sequence
  ENSG00000236671_18 (sequence is synthesized)
aacataatttctactggcctctttgcttctcatgctttagtaccagtgcttctgaatttgaaagtcttcatgcaaattgcccagctgacagggcagccactgttgaggaaatgctgatca

SEQ ID NO: 812291 - DNA, 120 bp, Artificial Sequence
  ENSG00000236671_19 (sequence is synthesized)
ggtggccgccgagagccgccgctaccatcgcgacaaagacccgggtagctcccgctgcgcccagagccatcatctcagaaggactcaagagggagaaagaaagagaaaatgaccgtcact

SEQ ID NO: 812292 - DNA, 120 bp, Artificial Sequence
  ENSG00000236671_20 (sequence is synthesized)
ttgcaagcctgggtccccacgaaaccgtgccggttcggctgcagagtcagggtccgggagccccctgcggtcccagagtcctgactgcagggagcacagagctctgcgccgccaccgcca

SEQ ID NO: 812293 - DNA, 120 bp, Artificial Sequence
  ENSG00000236671_21 (sequence is synthesized)
ccgcggctgcctttataccgcgggcccggagcattccggccccttgggagggagacaacaaagccgggatgggatttcaaagcgctgggaggggctgggagggggtgtgtttgtgtacat

SEQ ID NO: 812294 - DNA, 120 bp, Artificial Sequence
  ENSG00000236671_22 (sequence is synthesized)
ctagaagatttgcactatcagcttggtattcagttctctagcttgaaatgatttcagtgcctaactgaaaatactcatattgtcaaaggcacactatggactttcaagtcacaggtgata

SEQ ID NO: 812295 - DNA, 120 bp, Artificial Sequence
  ENSG00000236671_23 (sequence is synthesized)
ttactacagtatctccaaccagtgttaagggaagcataataccaattcagtgaggcatatggctctaaaaccttctcatctaatatttaagtaaataacatctttctacctgttcaagtc

SEQ ID NO: 812296 - DNA, 120 bp, Artificial Sequence
  ENSG00000236671_24 (sequence is synthesized)
agaaattccaactgcaatacaaatagacaaatataaaaatagtactgggtcaatgtacttttaaggaaggggatttctcctgacccctgatggcaacggtaactgtttactgcactgtac

SEQ ID NO: 812297 - DNA, 120 bp, Artificial Sequence
  ENSG00000236671_25 (sequence is synthesized)
acagtctcagggagttcctcacatactgtactggtgtctgatatcaggaactcctctatgttcagcagagaggtggaaatcaatctgcattctcaattagggtttatagccacaccgtct

SEQ ID NO: 812298 - DNA, 120 bp, Artificial Sequence
  ENSG00000236671_26 (sequence is synthesized)
tgaaatgcagttagtcataagagtacatttttttctaattcttgtgacactatgtcagttttaaaatttatatttcaaataaatgcaaagtagagtacgttttcatattgtttacaccac

SEQ ID NO: 812299 - DNA, 120 bp, Artificial Sequence
  ENSG00000236671_27 (sequence is synthesized)
attcatgcaatgtatttaatgtatgaacttgtacaaagtgtcatcatcatcttcatgaatatatagatgtatgtatatgtgtatacatatgtatacagacagtgtgtgtgaaataaacta

SEQ ID NO: 812300 - DNA, 120 bp, Artificial Sequence
  ENSG00000236671_28 (sequence is synthesized)
tataaaatattcaaactgttaggactagaaataggtacttgcaactacagaatcacagaattgctactacaacaccatttacttcatatatatctcttcgatttccctttatatgtattt

SEQ ID NO: 812301 - DNA, 120 bp, Artificial Sequence
  ENSG00000236671_29 (sequence is synthesized)
aggtctgttgaaaacttgcctcgtaaatgatttgcatatacaagaactcggaaaaagcatcctgttttgttgagaggtgcaccaagtgactttttcatcattggtttcataacgaggttt

SEQ ID NO: 812302 - DNA, 120 bp, Artificial Sequence
  ENSG00000236671_30 (sequence is synthesized)
aagcaggtaagagaaatacattagaagtctatatcccatcctgagttgtcatcaggtggtggttcatcgttgtcctcagggaaactgtcaaaattacttgtgtctgtgggtgatgcaacc

SEQ ID NO: 812303 - DNA, 120 bp, Artificial Sequence
  ENSG00000236671_31 (sequence is synthesized)
tgtaaaaaatggacaggttttttttagtggattttttttagtggaattccaagctggaatttttaagtgcattctgtatttattccctattagtgactatttcattgagtatctactatg

SEQ ID NO: 812304 - DNA, 120 bp, Artificial Sequence
  ENSG00000236671_32 (sequence is synthesized)
tagcaggtattgagggtcacagtggtaagtacaagcagacatggttcttatccttggagagtttatacccttgtgagtaataaactgtatgattaaaacaaataatcactaaaatctttc

SEQ ID NO: 812305 - DNA, 120 bp, Artificial Sequence
  ENSG00000236671_33 (sequence is synthesized)
tatataataaactttggctagagctatggaaacaaagatgccatgaaagtataagagtgatcatgtagcgtgatgcctccagctttgttctttggctcaggattgacttggcgatgcagg

SEQ ID NO: 812306 - DNA, 120 bp, Artificial Sequence
  ENSG00000236676_0 (sequence is synthesized)
agaaaaggcaaaattttaatactttgttgaagcatattggaaatgtctcttctaaaggggagcccaggacatgtgactaaccagaatcctgaagttgttgtgcctgaatggagtaaacta

SEQ ID NO: 812307 - DNA, 120 bp, Artificial Sequence
  ENSG00000236676_1 (sequence is synthesized)
aatgtcagaagcaagtggttctgaggagtgcaaggggtggcctgcagtggctgctattggcatccttcttgttccccagcggctccacattctcagcctcagctccttcatctccctctg

SEQ ID NO: 812308 - DNA, 120 bp, Artificial Sequence
  ENSG00000236676_2 (sequence is synthesized)
agaagaattggcccgattatccccttctgtttggaaatgggtgaagattacagatatgttttacttcttcctgtgctttggactatatgatgtcaactaccttaagcaaaaccctctacc

SEQ ID NO: 812309 - DNA, 120 bp, Artificial Sequence
  ENSG00000236676_3 (sequence is synthesized)
ctggctaatatatagatttggattataccaaaattgcctaaaattggaaacaagacattaataataatctgtaatggtgtaacataatagaatacatgtttattttcattggctttagct

SEQ ID NO: 812310 - DNA, 120 bp, Artificial Sequence
  ENSG00000236676_4 (sequence is synthesized)
ggtattaaaaaaaggtaaattagtttggagatgtaaattttatatttattatatcctgacctttttgctcatcctctaccactttatattatgaatgagataattaaaaagagtccactt

SEQ ID NO: 812311 - DNA, 120 bp, Artificial Sequence
  ENSG00000236677_0 (sequence is synthesized)
gcaagttaaaggaaccggccaaaactgcagagggagaggctgaaggctgtcgcgcctgcctggtgtccttaagcaatccaagtcctcagtctcccgggtccgccccttccgccgcgggcg

SEQ ID NO: 812312 - DNA, 120 bp, Artificial Sequence
  ENSG00000236677_1 (sequence is synthesized)
ccaattccaactggaacatccaacatcggacactaatccagccaactgccataactacagctttgattagacaagagactgatttcaacaactttctcctgataagaagatcatggacta

SEQ ID NO: 812313 - DNA, 120 bp, Artificial Sequence
  ENSG00000236677_2 (sequence is synthesized)
tggaatggactggttctggtttacagaggctgtgtacttgcgtgccttgatgtcctgaaagaccttttgacagatagggcctaatggtaatacatttaaatgtcaagtcaccatcccaaa

SEQ ID NO: 812314 - DNA, 120 bp, Artificial Sequence
  ENSG00000236678_0 (sequence is synthesized)
ggtgtggatatgcaccctgaaaatatttggcataccagagcatagttggatgtgtatatacataattgtgaaaataaattgttttagattttaatatttttccttgtgtctaactttctt

SEQ ID NO: 812315 - DNA, 120 bp, Artificial Sequence
  ENSG00000236678_1 (sequence is synthesized)
taagcaccaacaatttttaaaaatataaaaatattataaatatttgtgtgaggcaagaggaatattgttgggtcttctagttacaaaccataggatcttagagataacaatgaacattcc

SEQ ID NO: 812316 - DNA, 120 bp, Artificial Sequence
  ENSG00000236678_2 (sequence is synthesized)
caaaagctcccatttaggaagtttttggttgatggcatgacccttgaagggatctgacttcctgagagagtgactcataaataattactcctttttatgatacaaatatttttgaagaac

SEQ ID NO: 812317 - DNA, 120 bp, Artificial Sequence
  ENSG00000236678_3 (sequence is synthesized)
agctaaagtcttcattaaaaaagcattatgctcctatgagatttccccatgcctaagattaatatcacagttgaggagacctgagtattttttgttaccttacaattgtacataaataat

SEQ ID NO: 812318 - DNA, 120 bp, Artificial Sequence
  ENSG00000236678_4 (sequence is synthesized)
ccataggttaaatgcatatcatgaaattcactttcctcccgattgccatttatgtcacttaattcaatgaaagtccacaaaaatacagtatgactcagaatattggagctgtggctaagc

SEQ ID NO: 812319 - DNA, 120 bp, Artificial Sequence
  ENSG00000236678_5 (sequence is synthesized)
aagaaaagttcattcaaaattgattttctttcaggaatccttgatattcttcattccaattgttcacctctactgtagggctcagtaaacacttaaggaagttgccgtgcactgcagcct

SEQ ID NO: 812320 - DNA, 120 bp, Artificial Sequence
  ENSG00000236678_6 (sequence is synthesized)
gccggagacatgaaggaatgtacgggaggataatcgcaacatcatcaacccaattctccaagtaatttgccatgggacaggcacaccccatgtgtttgggaagacaatgggaaggttctg

SEQ ID NO: 812321 - DNA, 120 bp, Artificial Sequence
  ENSG00000236678_7 (sequence is synthesized)
ttttctgctccaagactgattcaaccagttggatctggaaggggataaagggctgtgtggctgcttgattttcattgtctagtggcagccaaaattggaaaagagagaagtgcagacttt

SEQ ID NO: 812322 - DNA, 120 bp, Artificial Sequence
  ENSG00000236678_8 (sequence is synthesized)
aaagacaagcagcgacagctcatcagcagtctaacaacacgacagatgacaggcccagaggcacacccagggccgccagcccatcaccctgtgcaggatgtcaaagagcagctgcagcaa

SEQ ID NO: 812323 - DNA, 120 bp, Artificial Sequence
  ENSG00000236678_9 (sequence is synthesized)
agtctttgtgctttggaaacagtcctccatacaaagaccccttcctagaaaagagtggaaagaaaccaaggcacaggaagaaagcattgaggtcacagggcagctcaggtccgcctgtgg

SEQ ID NO: 812324 - DNA, 120 bp, Artificial Sequence
  ENSG00000236678_10 (sequence is synthesized)
agcctctggtttgtattagacacccaacatgcctttcagaaagaaatgacacaacaattaatgtgtcaaataataatgtgccactcggagaaagataattgtacccatcgtcaggtagtt

SEQ ID NO: 812325 - DNA, 120 bp, Artificial Sequence
  ENSG00000236678_11 (sequence is synthesized)
attaggtcgaacgaatgctcatcctttcaaaggcaacagcgtctattcattctggcatcctactgtaagtacagtattgtgttcataatcacacagactgaagccaggaacactgggttt

SEQ ID NO: 812326 - DNA, 120 bp, Artificial Sequence
  ENSG00000236678_12 (sequence is synthesized)
tatctgatttttctccatttggaattgtactccgatgattccctaaacagcaaactcagtcatgtgaaacacaaatgagtgtgatgaaagacagattgttatactgcaggagaggctttc

SEQ ID NO: 812327 - DNA, 120 bp, Artificial Sequence
  ENSG00000236678_13 (sequence is synthesized)
agaaaagagtggaaagaaaccaaggtggaatggatacaacagaaaggagaccatgctaatattcttgtgcaatgcttcctgggcagaaattatgtcataaaggatgttccattctgcaaa

SEQ ID NO: 812328 - DNA, 120 bp, Artificial Sequence
  ENSG00000236678_14 (sequence is synthesized)
taacttatccacagctatttcccctgggaaagccgaaggctcagcctcggcaaagaggcagatggtgccgcatatacaatgaaacctgtaattttttcttgccattggacatgttaacag

SEQ ID NO: 812329 - DNA, 120 bp, Artificial Sequence
  ENSG00000236678_15 (sequence is synthesized)
ggattcagtgatacatatcatatttaatttatcattcctctagctcactgaacaactcacttggtagtcagcagcagtatatgtcagggacaggtgcaagctgaaaagaaagcaacagaa

SEQ ID NO: 812330 - DNA, 120 bp, Artificial Sequence
  ENSG00000236678_16 (sequence is synthesized)
aaggacccaatgaaaaccaaaaggggagatgagtcttcagggtggcatggcattcactagcagcaaagtgtgcaatgtcaaacacattctaattctgattttttttaacagtaatttgcc

SEQ ID NO: 812331 - DNA, 120 bp, Artificial Sequence
  ENSG00000236678_17 (sequence is synthesized)
atttggacaagtcatttaacttcactgcaattctgtttccctcatttgaaaaatagaaatagaaaagcctgctgtatatttaggtccacatctgttggggaggtcaaagaagaaagaata

SEQ ID NO: 812332 - DNA, 120 bp, Artificial Sequence
  ENSG00000236678_18 (sequence is synthesized)
tgaaaagttgtttgtaaatataaagaaccatgtaaatataagacattgttttattaatgctccagatcaattaactttcagtgaatgataaaatgtgacatcttttcaacagagacagtt

SEQ ID NO: 812333 - DNA, 120 bp, Artificial Sequence
  ENSG00000236678_19 (sequence is synthesized)
ttacttaagaaaaactaggcaatggcttctgtccttacaaatgaaaaacttcataataaatgggggctctcaagaccacctggccaaaactgaactaaatactcacttcattcaaccaag

SEQ ID NO: 812334 - DNA, 120 bp, Artificial Sequence
  ENSG00000236678_20 (sequence is synthesized)
tatatgcatatgcttctgtttcatctacttgggcatgcttgtgatgagatatgaaaaattagccatctttagaaggaaagaaatattgtatttgggggtatttcttctgtacagacaatt

SEQ ID NO: 812335 - DNA, 120 bp, Artificial Sequence
  ENSG00000236678_21 (sequence is synthesized)
ggcctggttattgtctaaaggacagtaatgaaggaaggcattactgaagaagaatcaacgtgagcaaaaatgaaatgagaaagcatcctgatcttattttgtgtatgccattgatttgtt

SEQ ID NO: 812336 - DNA, 120 bp, Artificial Sequence
  ENSG00000236678_22 (sequence is synthesized)
ggagaaaatgtgtcatccaccttgctgaatcctccacattctgagtgtggctgcttgctactggaggattccatcttgggccagtggaaaccatcttcacattggatcttgtttcctact

SEQ ID NO: 812337 - DNA, 120 bp, Artificial Sequence
  ENSG00000236678_23 (sequence is synthesized)
gacgtgcaagtggtattgagagacgatcaaggatctggagtgctcattgttattggttttcaatacttctaggcatttttaagaaaacagagctaaatatacatgtgtgtacaagaaaaa

SEQ ID NO: 812338 - DNA, 120 bp, Artificial Sequence
  ENSG00000236678_24 (sequence is synthesized)
aagaggatttaaagtatatggaaggatatgtataagttatgtgcaaatactgcaccattttatatcagcgatttgagcatctgtggatttgatatctatgcgggtcctggaaccaagccc

SEQ ID NO: 812339 - DNA, 120 bp, Artificial Sequence
  ENSG00000236678_25 (sequence is synthesized)
ccatggatacggaaggacaattctatcactcagagattctgaattctggactttgagctcaatgccatgactgaggaagaccacggggttttctctcttagaggggaggaatccttgata

SEQ ID NO: 812340 - DNA, 120 bp, Artificial Sequence
  ENSG00000236678_26 (sequence is synthesized)
aagcatatgtaacaaaaactaccagacctgaatttgctcatgtgtaaatgatagtctttccttctggtgatttaatgcatgaggacatcaatcagtcacatcatggcctcagaagtcctt

SEQ ID NO: 812341 - DNA, 120 bp, Artificial Sequence
  ENSG00000236678_27 (sequence is synthesized)
gtacagtatgcagtaggccctttgtatccaaggattcaaccaactgtggatggaaaatattttttaaaaacccaataaaaacaatataacaataaaaactaatgtaaataaaacaatata

SEQ ID NO: 812342 - DNA, 120 bp, Artificial Sequence
  ENSG00000271119_0 (sequence is synthesized)
cggacggtggcgctgtggggatagggaggtcccgcgctccctgaccgatgtagggcgggccctattccggggaggtgttgggcaccaacatttttaaagccccgtgggtggttccctggg

SEQ ID NO: 812343 - DNA, 120 bp, Artificial Sequence
  ENSG00000271119_1 (sequence is synthesized)
atcgcccagaccgaaaggccccgaacgtccagatcgcagggaatggggtcggaggggcggcgctcgtccgcggaggcgggcgggagcggccacgggcctctggcctctagtgagcgggtg

SEQ ID NO: 812344 - DNA, 120 bp, Artificial Sequence
  ENSG00000271119_2 (sequence is synthesized)
tgaccctcggtctccggcctgtgaggtgagggagcgatcctcagccgtgtccctagcctctggcttccggctaatttttaaattttttgtagaggcgggatcttgctgtgttgcccgggc

SEQ ID NO: 812345 - DNA, 120 bp, Artificial Sequence
  ENSG00000271119_3 (sequence is synthesized)
tggtctcgaactcttggcctcaagcgatcctccctcctcggcctctccaagtgcggggattacgggcggagccaccgcgcacggccgtggtcagctttgaaagctgcgtagatccctttg

SEQ ID NO: 812346 - DNA, 120 bp, Artificial Sequence
  ENSG00000271119_4 (sequence is synthesized)
gctcatacgcctttctgctagcttaccctgattctgcttctggttcagatagtattttaatatttctagtgtgtctttttgtaagatatctgaaatctttttgtggaatgaagtggcatg

SEQ ID NO: 812347 - DNA, 120 bp, Artificial Sequence
  ENSG00000271119_5 (sequence is synthesized)
aaaaataaaccaataatcgttaccaggtactgagcccttcaatggaggtctaaaccctccactctctccctctgggattgccaagcctgtggtttcagttccatgctcccaggtgacacc

SEQ ID NO: 812348 - DNA, 120 bp, Artificial Sequence
  ENSG00000271119_6 (sequence is synthesized)
caggtgctcacaccactgccccagagagctcctccattcgcccctccacccatagcccctcgaaaccactgccctgctccccaacacggtagcactgtcttctccaagatgtcatgcggc

SEQ ID NO: 812349 - DNA, 120 bp, Artificial Sequence
  ENSG00000271119_7 (sequence is synthesized)
ggcatccctcggcctgtgcgcaccgaaactagcttccttcaccgggcatatggcctgggagacctggggcatttgggtgcatccttccactgctggttggtgccccctgtgtggaagcat

SEQ ID NO: 812350 - DNA, 120 bp, Artificial Sequence
  ENSG00000271119_8 (sequence is synthesized)
ccgcgttggttcccgcctcctcctgccgatggacattttgttttcttccagttattggcaatgaggaatgaggcctaaacacttgtgtgcaggtttgtgcatgcatgtttaagttttctc

SEQ ID NO: 812351 - DNA, 120 bp, Artificial Sequence
  ENSG00000271119_9 (sequence is synthesized)
ttgggggacgtttcaggagcggggttgctggatgacagggtaaagatgtgcttaacttcataagaaactcccggaccactttccagcatggcgggacccgtcccattcccactgcagctt

SEQ ID NO: 812352 - DNA, 120 bp, Artificial Sequence
  ENSG00000271119_10 (sequence is synthesized)
atgagggtcccagttcctcggcatcatcactagaacctgggtcggcctgtggtttttgtctgtttttagccattttaatagatttgcagaggtactgttgactggcatttctccagcatc

SEQ ID NO: 812353 - DNA, 120 bp, Artificial Sequence
  ENSG00000271119_11 (sequence is synthesized)
tctatgatgttgagcctctttctcgggcaatatgccctccttataccttctttgattctccattcaaatatctgccctctctttaatactggggtttttactttcttatggttaagtttt

SEQ ID NO: 812354 - DNA, 120 bp, Artificial Sequence
  ENSG00000271119_12 (sequence is synthesized)
ggtggttcttcacatatcctgcgtgccagtacgttgtgagacgtgtgattcacaaatacttttttctagaccatagtttgtgtttcattctctttagatttttatattgctttatagaat

SEQ ID NO: 812355 - DNA, 120 bp, Artificial Sequence
  ENSG00000270240_0 (sequence is synthesized)
tggagaggatcaagggaaataatgatcatggatgtgcttaggagacgtaaggtgagatacaccatcatggagctgtctctgctctccctgtcccttcagtgtgcatggtccataccactc

SEQ ID NO: 812356 - DNA, 120 bp, Artificial Sequence
  ENSG00000270240_1 (sequence is synthesized)
ttctacgctctgcagacaccatggctagtaagacaggcaaagacctgccatctggagcttgtttggatatagggtagggggacggggagaagggagataaacaataaacaagtaaattta

SEQ ID NO: 812357 - DNA, 120 bp, Artificial Sequence
  ENSG00000270240_2 (sequence is synthesized)
cctggacttgagctagtcactttattttctgagcttcagtttgctcactggacgagtaggaaagtcattcctgtctggcttaactagagggcctgtggtgaggcataaactggagaagaa

SEQ ID NO: 812358 - DNA, 120 bp, Artificial Sequence
  ENSG00000270240_3 (sequence is synthesized)
aatcaaaccatctggtgaactgtcaagctcaatttccctctttaaggaagaaaggaaagtgttttcctggatactagatatgctgagttgggacaggagctaaggatagaggtgaggaaa

SEQ ID NO: 812359 - DNA, 120 bp, Artificial Sequence
  ENSG00000270240_4 (sequence is synthesized)
gtgtgctggaatgcagttaactgatcacctgcaggcttgaactccagggttcaagcgatcctcctacttcagcctcctgagcagctaaggactacagcacattatgttcctgaaaaccag

SEQ ID NO: 812360 - DNA, 120 bp, Artificial Sequence
  ENSG00000224574_0 (sequence is synthesized)
acttcccctgcagcctccacatttcatctgactcagcgcatccgtgatcaaaagctcctcctgacagcccttctgcagaggcccaaactcgccatctaaaacgttaccgccagggccgca

SEQ ID NO: 812361 - DNA, 120 bp, Artificial Sequence
  ENSG00000224574_1 (sequence is synthesized)
atcaggagctgctcccagggcggtggtgctgttgatcataccacaggatcccctggcactcccggggcccaaagaacccagcccccagccttttcaacaatccaggaaaacaggagtgcc

SEQ ID NO: 812362 - DNA, 120 bp, Artificial Sequence
  ENSG00000224574_2 (sequence is synthesized)
agtggctccactctgactctgaagcactgactacaagcacctcttgggggtcacggctgtttcgcacacacaaatccaccagaggagagattgcaggtaagactgcggcacctcacacag

SEQ ID NO: 812363 - DNA, 120 bp, Artificial Sequence
  ENSG00000224574_3 (sequence is synthesized)
ctgggtggcaaccaagcggccaagtgaccactgagcccaggttcctgattacagggaaaggcacaaacaccattcaagaacctcagcatcacagcgaccaatcctgacacaaaaaagcaa

SEQ ID NO: 812364 - DNA, 120 bp, Artificial Sequence
  ENSG00000278475_0 (sequence is synthesized)
cagtgatgcccagcagaacatctcttccttcttagtcagatgtcccttgggagtagttgtgcaaggttaattctttgcctggtagaagactgtggtgcattttggattatattttgtctg

SEQ ID NO: 812365 - DNA, 120 bp, Artificial Sequence
  ENSG00000278475_1 (sequence is synthesized)
agatgtggtctgcgtgattgtagttctttgatatttgttgagactttcattatggtctagttttagttaaattttataaatattcttcatatgcttgaggataatatgtattctgtaatt

SEQ ID NO: 812366 - DNA, 120 bp, Artificial Sequence
  ENSG00000278475_2 (sequence is synthesized)
taaatatatattaaattagccttgataaccatcctggtcttctgtagctttattaagtaatttttttggtctgcctgaactaccaatacataaaagaaatgtattaatctcccactacaa

SEQ ID NO: 812367 - DNA, 120 bp, Artificial Sequence
  ENSG00000278472_0 (sequence is synthesized)
gtttttgttttttaacaaatccatgctgttttagaaaggtgttaaccagccccctccctgccctcatactagtccatgtgtcagatactaattaatctatgtcatgggatcactttataa

SEQ ID NO: 812368 - DNA, 120 bp, Artificial Sequence
  ENSG00000278472_1 (sequence is synthesized)
tgcttgaaccaaggtgaaattttgcatctatttctcagttctctaggggcctctttcatgactgtctgcttgcttactggtattttccttactcccgttttatcatggtctgtgaattta

SEQ ID NO: 812369 - DNA, 120 bp, Artificial Sequence
  ENSG00000278472_2 (sequence is synthesized)
accaacatgatgtttactcccgcttttgaattattaatgagaaaactgtgagatggtacttttatctttaatagttgatgctgaaaaagtgacaaatgcaataaaagcatctttctctaa

SEQ ID NO: 812370 - DNA, 120 bp, Artificial Sequence
  ENSG00000278473_0 (sequence is synthesized)
aatactatgcagactctgtgaagggccgattcacaatctccagagacaattctaagagcatgctctatctgcaaatggacagtctgaaagctaaggacacggccatgtattactgtacca

SEQ ID NO: 812371 - DNA, 120 bp, Artificial Sequence
  ENSG00000264112_0 (sequence is synthesized)
ctcatgcttccataatagttctgggataattctaaacacaagccatttttctaaggagagtccacattagagaggtctttgttttgtattcaagatgattaaaattatgaactgggaagt

SEQ ID NO: 812372 - DNA, 120 bp, Artificial Sequence
  ENSG00000264112_1 (sequence is synthesized)
tagtccctggggtgtcctggctggcctttggaaatcttcactacatctttctgggttggaattctcaccacagcctgaacgtggggctgtatctgagctgtctctgagtgctgtccattt

SEQ ID NO: 812373 - DNA, 120 bp, Artificial Sequence
  ENSG00000264112_2 (sequence is synthesized)
gatatatcgagtactgggtgtttaccagggctcttcaagccactgggagaaacagctaaagagtaacctactgatttgagatgtggatttgtgccccatccctttctccttgtttcccac

SEQ ID NO: 812374 - DNA, 120 bp, Artificial Sequence
  ENSG00000264112_3 (sequence is synthesized)
aggagttttatctcaaactcctaagccatttttaaggagatcactggaacaaactccaaacctaccctctaatagtcaagtttacctgaattttctcagttctctcgggagaagactaat

SEQ ID NO: 812375 - DNA, 120 bp, Artificial Sequence
  ENSG00000264112_4 (sequence is synthesized)
cacacattgtagtaccaacttggactcttcatgtgcttttcttaactgattagagttaacacctcagctaaagtgtatagaacatacatggggcttcatcaggcttcagaatcagtttca

SEQ ID NO: 812376 - DNA, 120 bp, Artificial Sequence
  ENSG00000264112_5 (sequence is synthesized)
ctagatgtgctatgtaggaggccacggaaaaattactgtagtagtaaaagttatcagttctgatgtaaacaatcattttgtcccatattataaataaattggcctgaaaatatcttttca

SEQ ID NO: 812377 - DNA, 120 bp, Artificial Sequence
  ENSG00000264112_6 (sequence is synthesized)
tatgtgaggaataagtatatgatgcctttctcctttaaagtatgaactgctaaaagacagggataacgtgtattctgtattccagcagccacagtgtgtttctggtctttgtaccaggtg

SEQ ID NO: 812378 - DNA, 120 bp, Artificial Sequence
  ENSG00000264112_7 (sequence is synthesized)
ctcaggaagtgttttcactggcttgggttgactacttgccatctgctctctgagcattcatttctgaatgaaaggggagaaagtgaaaggagaggtgggaagaaagaggaagctgcagaa

SEQ ID NO: 812379 - DNA, 120 bp, Artificial Sequence
  ENSG00000264112_8 (sequence is synthesized)
atacgaggaaacagctggaggagggaggtgaagttgaggaggtaaggtcagtaaaacaaaaagctagcagagggcagggtcaggcccttggggtagagggctaattaacttctgtcagct

SEQ ID NO: 812380 - DNA, 120 bp, Artificial Sequence
  ENSG00000264112_9 (sequence is synthesized)
agttgaatagagccttgtgtgctttgttagagaccaaaggtacttcaaaggaaaaaaatctagattcttccctgtgtaccttaataattgttcatcaggtcaaaatctatcctgtcctct

SEQ ID NO: 812381 - DNA, 120 bp, Artificial Sequence
  ENSG00000264112_10 (sequence is synthesized)
aggaattctggtcttccctcaggcctagcagagagctttctgccactactcaggcaaccaagggtgaagtgcttcaagtagtatttgtggacagcagcaggtaagcttgatgtgttattc

SEQ ID NO: 812382 - DNA, 120 bp, Artificial Sequence
  ENSG00000264112_11 (sequence is synthesized)
acagcttaaagagtagatgctgagtacagctgttgtccatgtgtagagcttttaataaccagcgcagcaggccccttcacctgcttttatgcctggaccagatgactgaatgtagaactt

SEQ ID NO: 812383 - DNA, 120 bp, Artificial Sequence
  ENSG00000264112_12 (sequence is synthesized)
ctgggattacaggtgtgagccaccagatcggccctttaggcactttctacttctcaaggtcaagaaacatcctttaaaaagttaattcccttttctggagcctaagccagatcttatcta

SEQ ID NO: 812384 - DNA, 120 bp, Artificial Sequence
  ENSG00000264112_13 (sequence is synthesized)
ttctggagcctaagccagatcttatctaggccttgtgttgccatctgttagcattgatttctggaatggagcagctttctcaaagtttggtcttgctagtcatgaggtcatgtcagtgtc

SEQ ID NO: 812385 - DNA, 120 bp, Artificial Sequence
  ENSG00000264112_14 (sequence is synthesized)
ttaggtcactgctgctcaccttccttacccagggagtatactgcataggtttctgaacacctgttttcattattcactgttcctctcactgccaagaatggagggaccctcagttgaaga

SEQ ID NO: 812386 - DNA, 120 bp, Artificial Sequence
  ENSG00000264112_15 (sequence is synthesized)
tcaaattgactctgaagaaaaactggagatgtttctcttggagtttggatagagtattcacttgataacatgtttttcccctgccttgctcttcacaagaacatctggccaggcattaac

SEQ ID NO: 812387 - DNA, 120 bp, Artificial Sequence
  ENSG00000264112_16 (sequence is synthesized)
aattagtaaatttttttgcatatgaacagtatttttctggtcatgtagatgggtgcacatgacactaaacagcattgtttagtgttatccctcttaactggtgggttgtatttggggtgg

SEQ ID NO: 812388 - DNA, 120 bp, Artificial Sequence
  ENSG00000264112_17 (sequence is synthesized)
tttattttttttaattttttattttttactacttttactgttagcacaatgctataattgagctaatctttgtagtttggtgcaggaccaccaagtttgtgtgacccattacctactttt

SEQ ID NO: 812389 - DNA, 120 bp, Artificial Sequence
  ENSG00000264112_18 (sequence is synthesized)
aagtttgtgtgacccattacctactttttccatgctcagccattaccctgtcctggggcatctgagggcagtaaggaacaggtgtccaaaggaggaatgttggtgcctatgagtatgttt

SEQ ID NO: 812390 - DNA, 120 bp, Artificial Sequence
  ENSG00000264112_19 (sequence is synthesized)
tccagttgtattgaatttcttacttggtgtatttttgacttgtcttagtttctttccttgtggtctatgctattttacttgcgatttgttggatattctccctgtcattaaagagttgta

SEQ ID NO: 812391 - DNA, 120 bp, Artificial Sequence
  ENSG00000264112_20 (sequence is synthesized)
aaatggaagttagtttctctatgcaaatgctttaatggatgaagctgataggtttagcattgatttttgctggtgtccttcaacaagcatgaaggtgataaatgtgtttccatggcttta

SEQ ID NO: 812392 - DNA, 120 bp, Artificial Sequence
  ENSG00000264112_21 (sequence is synthesized)
gactcatttttgaagtcttggattgtgtgaacattcttagaaacaataaaatgttttaattaaaagccctcgactaccagctgaattcagtgtctactaggaaaatgggtagatttgtta

SEQ ID NO: 812393 - DNA, 120 bp, Artificial Sequence
  ENSG00000264112_22 (sequence is synthesized)
cattgtccctttgctctctatgactttgttccagttgtcaaggaacttaaatgggtattcaggaaaaagaattcttgtttccctttcctcaccttgccagttaaataactcctggtgaca

SEQ ID NO: 812394 - DNA, 120 bp, Artificial Sequence
  ENSG00000264112_23 (sequence is synthesized)
cttcaggtggtagaattgaaacacaaacctgacttctgaccacatgggtcaaaggcaaaaggcaaatggcttcaaagcccttagtgtgcttatccagttcaggcagtgaggagataacct

SEQ ID NO: 812395 - DNA, 120 bp, Artificial Sequence
  ENSG00000264112_24 (sequence is synthesized)
ctgctttcctccctgaggagtttggagtatttaaggggggatggggggggtgtcactttgaaaatatgttgctttttctcctgattgtattgaggctgatatggaagggttatttctttc

SEQ ID NO: 812396 - DNA, 120 bp, Artificial Sequence
  ENSG00000264112_25 (sequence is synthesized)
tggccaatactttttggtatttctaaatattgcaatcttgatttttactattaaatttgttaattgtcagttctggcttttttgcataaagagttggtccattaacttgccaatttgaag

SEQ ID NO: 812397 - DNA, 120 bp, Artificial Sequence
  ENSG00000264112_26 (sequence is synthesized)
cttctaactagatattccctactgaaagttttggatttgtttttagtttgtggagcagtcttagctggggacaggtaattgacaacggcagagatactttcttttcctaggattctaagt

SEQ ID NO: 812398 - DNA, 120 bp, Artificial Sequence
  ENSG00000264112_27 (sequence is synthesized)
ctgtaatccacatcctcaatgtattcacaggactttaaaattctctccaaatgaggaaggaaatatcctgttgctttctaatgtttactaaaagttgtgtttagaacaacagattttaat

SEQ ID NO: 812399 - DNA, 120 bp, Artificial Sequence
  ENSG00000264112_28 (sequence is synthesized)
aggcatcttcctttgttatgtgtcattagccctttgcccgtttaccttagggctctttgaaggagaaatggatgggagaaaacctgtcacttggcgaaagtaaaagggataattaactgg

SEQ ID NO: 812400 - DNA, 120 bp, Artificial Sequence
  ENSG00000264112_29 (sequence is synthesized)
ctcagagcttatgtgcagagttccaagccccaaagttaatctagaaccactcgataacaccaataaaaatatttatttcacatctgttatatatctggaaaatgttctaagcatcttaca

SEQ ID NO: 812401 - DNA, 120 bp, Artificial Sequence
  ENSG00000264112_30 (sequence is synthesized)
catatttctcattaaatccacaggtgaccattgtgaggtagatattttgttctaattttccagatgaggaagctgagaccctaaaaggctgaccggttccctgatgtgttacctgcttct

SEQ ID NO: 812402 - DNA, 120 bp, Artificial Sequence
  ENSG00000264112_31 (sequence is synthesized)
gctactgatccaaactgcagaacttctcattcatccccaaggcctccaggcagtatccaatggggaatcagctctaaaaggaaccagaccaacgttttccagccccttcattctggtgac

SEQ ID NO: 812403 - DNA, 120 bp, Artificial Sequence
  ENSG00000264112_32 (sequence is synthesized)
tgaggggaggaaagaatgggagggggtattcttgtctagtggatggaaaggaaacacactgtcaaattactatatctccttggttttctattacagtagaattctccagccatattttta

SEQ ID NO: 812404 - DNA, 120 bp, Artificial Sequence
  ENSG00000264112_33 (sequence is synthesized)
ttgtctatgggggaagttggagatggtgaccttgattagaagtgtctggagggggataaatggaggggataagattcagttggttttggaaaatgttaaagtcttaaaataatgcgtcca

SEQ ID NO: 812405 - DNA, 120 bp, Artificial Sequence
  ENSG00000264112_34 (sequence is synthesized)
tctgaagaattttttctaaaaccagagtttataaaaatatcactgatacagcctgccccctcatttccctgccacaggagatgtcttggactagagacacttgtttaataatagcttgtc

SEQ ID NO: 812406 - DNA, 120 bp, Artificial Sequence
  ENSG00000264112_35 (sequence is synthesized)
tctgatattcccagtagcttccctctgtgtgaggaaaggatagaaatgttcaggacatcatcatacaggctcctcatctacaaagttccagtagcagtgacgcctacacggaagacttgg

SEQ ID NO: 812407 - DNA, 120 bp, Artificial Sequence
  ENSG00000264112_36 (sequence is synthesized)
aactgcaaacaggctggggtcacctcagtgacatctgacgctgtccaaccagaagttcgatttttgttctgggggtgaaggaggaaacagactgtactaaaggactaaaataatttgtct

SEQ ID NO: 812408 - DNA, 120 bp, Artificial Sequence
  ENSG00000264112_37 (sequence is synthesized)
caacttggagtgtgggaggaggagagaggaacctgaacagggcaagttggggatctgacttttgtttgggtagatgtaggcacattgtatttttggcttagatgctttattcatcatggc

SEQ ID NO: 812409 - DNA, 120 bp, Artificial Sequence
  ENSG00000264112_38 (sequence is synthesized)
tgaaggtaataccatttactcactcaccgaaaattgtttacaataatctagatgaatttgctgtctttggacatctgtcttttgactggaccccagtatatagtctgtggaagctcactt

SEQ ID NO: 812410 - DNA, 120 bp, Artificial Sequence
  ENSG00000264112_39 (sequence is synthesized)
aaggagagagctcctttttgtttggttagagaaattttctgtcctaaaagtagaaatagccccttctaggtaaggatggagcatttgatcatactggtttcattatattcctctaacagt

SEQ ID NO: 812411 - DNA, 120 bp, Artificial Sequence
  ENSG00000264112_40 (sequence is synthesized)
tggaaccgattgtttttgagtacttgtttcaaacttctgagtattttccttctggaaaatagctcagtgtttaaaatttacatgaacttaaaaggttaatttttttttaaagaatgtttg

SEQ ID NO: 812412 - DNA, 120 bp, Artificial Sequence
  ENSG00000264112_41 (sequence is synthesized)
aggagcaatcaattctgattttgtcttatggatagaaatagaattagccattttcctcaagaaaagtgattcttctgaatcttagcttttcagtaatgagaactggactgtttccacttg

SEQ ID NO: 812413 - DNA, 120 bp, Artificial Sequence
  ENSG00000264112_42 (sequence is synthesized)
acctctatttcctgttagtgggaaaccgcttcccagaggtgctgtgtgaaagattgctggggaaagggtttctagatcccagcataacaagttcaagagtccagcgatattgtcattaga

SEQ ID NO: 812414 - DNA, 120 bp, Artificial Sequence
  ENSG00000264112_43 (sequence is synthesized)
ataatggtcttcattaagtactagttttcataatcctgaagcttcattttcaccaatttgaaaggcagctagggaggagaagactatgcagggaaggaggaaaactctggagtgcatcac

SEQ ID NO: 812415 - DNA, 120 bp, Artificial Sequence
  ENSG00000264112_44 (sequence is synthesized)
agagaccttgagtgagttaaggcagggaagaagcagatttgctatccactgaatgaaaataagaagaattccattgtccaaggtcagagcaagaacacaaaggttttagtttacttagtt

SEQ ID NO: 812416 - DNA, 120 bp, Artificial Sequence
  ENSG00000264112_45 (sequence is synthesized)
aattccttaggtttggacattacaggagacatgggggtgaccatagcaatttagctgataaatgtatcagaaactctttcatcattttctgtcccctcctatcttaggctgaccggttcc

SEQ ID NO: 812417 - DNA, 120 bp, Artificial Sequence
  ENSG00000272100_0 (sequence is synthesized)
aaaggttctgaaggcccagagagctgcccacctcacaagcccctgggctccagaaccagccagttctcagtgaccatctgcacatcctggccactcagaggctcccgcagcctcaccttc

SEQ ID NO: 812418 - DNA, 120 bp, Artificial Sequence
  ENSG00000272100_1 (sequence is synthesized)
catccaggacctgtgaggaccacagagagggaaatggtaactaaggggacagagatggggagcaggcaggtccctacattcccaggaaagaagtgagaggagctaagatgtcctgtggca

SEQ ID NO: 812419 - DNA, 120 bp, Artificial Sequence
  ENSG00000272100_2 (sequence is synthesized)
tgaacacaggaatctccattcatgaaaaccctaccctcccagtatttggaggaggaggtggtggtggttttaggtgagtcttattaaaaaagtaataaataaatccagacaagcatccta

SEQ ID NO: 812420 - DNA, 120 bp, Artificial Sequence
  ENSG00000288187_0 (sequence is synthesized)
tgcagcagtacaatttcagcatatctctggctcagggagagtgcactagtcactggaggaagaggtaggtctgtgcgcacctctctgggcttgctgggagaggtagtctcataaacacta

SEQ ID NO: 812421 - DNA, 120 bp, Artificial Sequence
  ENSG00000288187_1 (sequence is synthesized)
ccagccctttcatcacatcgctgtaggactacaattccagcatgcacggggcgccggggcagtccgcctcactggaggaagagaaaggcgtgtgagcgccttgctgggctttctgggaga

SEQ ID NO: 812422 - DNA, 120 bp, Artificial Sequence
  ENSG00000288187_2 (sequence is synthesized)
tgttgtctctttatttctcccagccctttggtcacagggcttcaggactacaatcccagcatgcatcctgctcagggacaacgcgcgtcactgtaggaagaggtggacctgtgctgttct

SEQ ID NO: 812423 - DNA, 120 bp, Artificial Sequence
  ENSG00000288187_3 (sequence is synthesized)
cgctatgctttttgggatacgtattctcgtaaacactcccagccctttggtcactgggctgcatcactacaatcccagcatacatcgggatcagggagagtgcgctaatcagtggagaaa

SEQ ID NO: 812424 - DNA, 84 bp, Artificial Sequence
  ENSG00000288187_4 (sequence is synthesized)
gggctgcagcgctacaatcctagcatggaccgggcgcagggaatgtgcgcgtcactggaggaagaggcagggttgtgcacgcct

SEQ ID NO: 812425 - DNA, 120 bp, Artificial Sequence
  ENSG00000288187_5 (sequence is synthesized)
gtgcgcgtcactggaggaagaggcagggttgtgcacgcctctctgggcttggtgggagttgcagtctcataaacactcccagacctctcatcaccgggctgcaggactacaatcccagca

SEQ ID NO: 812426 - DNA, 120 bp, Artificial Sequence
  ENSG00000288187_6 (sequence is synthesized)
tgcacccggctcagggagagtgcgcattactggaggaaaagtctaggatgtggatgcctccttctgcttgctgggagatgtagtttcataaagactaccagaacttgtgtcacagggctg

SEQ ID NO: 812427 - DNA, 120 bp, Artificial Sequence
  ENSG00000288187_7 (sequence is synthesized)
caggactaccatcccattatgcactggggtcagggacacggcccgtcagtggagaaagaggcggggctgtgtgcgtctccctcggcttgctgggagatgtattcttataaacactcccag

SEQ ID NO: 812428 - DNA, 120 bp, Artificial Sequence
  ENSG00000288187_8 (sequence is synthesized)
ccctttggtcaaagggctacaggactacaatcccagcatgtgccagtctcgggggcgaggtacaggcctggaagaaggggccgagtggtacacgccctacctaatatgctgggagctgta

SEQ ID NO: 812429 - DNA, 120 bp, Artificial Sequence
  ENSG00000288187_9 (sequence is synthesized)
ttcccggtgtccaaagcactgctgagttcttatgctatgccgactctttgccaaggagaatgagtacataggtggacctagaggacaggtctgcgctgagcattgaggagggtattaccc

SEQ ID NO: 812430 - DNA, 120 bp, Artificial Sequence
  ENSG00000288187_10 (sequence is synthesized)
tacataggcaccttacctttgcccaaatcgggcgggttgtcctcaactgattggccctatccttctcaagttcctctttcagctgcacccagggttcttcccagagcattgcgccttctg

SEQ ID NO: 812431 - DNA, 120 bp, Artificial Sequence
  ENSG00000288187_11 (sequence is synthesized)
cagcccagggcgctgccttctttcctaaactgctgtggaaactgtcctgatgtctgagacactgtccattgtgccgcagccctcttttttctctagccaagcctcatgctcaacagcttt

SEQ ID NO: 812432 - DNA, 120 bp, Artificial Sequence
  ENSG00000288187_12 (sequence is synthesized)
tgagagaaatcttccacgtggcctgcttatgaacagcttcagaattctgtagggggtgacaaggtctgtggcttcctggaaatgtcactgtcaatggcgcctttttcacgaatgtgaaag

SEQ ID NO: 812433 - DNA, 120 bp, Artificial Sequence
  ENSG00000288187_13 (sequence is synthesized)
ttgaggcatcaggaaggttaattattgggttgcacaaaatctgctaagagcaaaggagaaaaccccatttccgaggcatgagtcttgtgagccattttcatcaacccatttaagtggaca

SEQ ID NO: 812434 - DNA, 120 bp, Artificial Sequence
  ENSG00000288187_14 (sequence is synthesized)
agctccaaaatgaaacctgaagctgctgactatttaggcattttacacttgaaatcatcggtctcatctcaagtcactcctgacttgccagtgtctcagaaacacaaatgggaccggatc

SEQ ID NO: 812435 - DNA, 120 bp, Artificial Sequence
  ENSG00000288187_15 (sequence is synthesized)
cctcaggagcagatagtgttccagctttgttggagcgacatttaagatgtggagcacttggggtcgtttgaaacccgctatcttcagtagggacttttacttctagagaacatgtgcatt

SEQ ID NO: 812436 - DNA, 120 bp, Artificial Sequence
  ENSG00000288187_16 (sequence is synthesized)
ttgattttatctgtcctcaaactgaacttttgctcattttaatagtaaaaacacattcctaggtggagacttaagatgctaatgagacatgcaatgtatgcacaaatatgtacagttagt

SEQ ID NO: 812437 - DNA, 120 bp, Artificial Sequence
  ENSG00000288187_17 (sequence is synthesized)
gcacatgtgcacccagaagaccactcaaaacatgcttacactaacacttctttccaccttcttatgaataatcgtgcaaaacccccagaaggagggtttctccagtaacaattaatggtg

SEQ ID NO: 812438 - DNA, 120 bp, Artificial Sequence
  ENSG00000288187_18 (sequence is synthesized)
tctcactcttatgagcagcctgccctggaatctctttctcagaatgtaccgtctattctgcacttaattttcaaagtagtcttttctttttttgtgtgcaataaattactctatgctgta

SEQ ID NO: 812439 - DNA, 120 bp, Artificial Sequence
  ENSG00000275741_0 (sequence is synthesized)
actcgagccgcggcggttgcggcgccgaccccccgcccgccgtcgcctcgtcgccgcccgcgccgggtccgcgcagcacgaagaagcgcttgtggccatgcttctgcttgcgcaggccag

SEQ ID NO: 812440 - DNA, 120 bp, Artificial Sequence
  ENSG00000275741_1 (sequence is synthesized)
tttgagttggactgtctgccacctgagcaagagaaatcccacctgccaagcctctcggcagacggtggtgcagcctccacagcctggtcttcagattgtaactccggcccctgctctgag

SEQ ID NO: 812441 - DNA, 120 bp, Artificial Sequence
  ENSG00000275741_2 (sequence is synthesized)
gcccaggtggagcttctgacacggtgcacagaagcagcctggcatagcgtgtgaggagtcccccccccacccaagcctcccaaagacgccgtctgctgtcactgagggccggggccacag

SEQ ID NO: 812442 - DNA, 120 bp, Artificial Sequence
  ENSG00000275741_3 (sequence is synthesized)
cctctgcatctcccgagctccaaaagttcctacggttcaacgttcattatgctcaactgacaatctgctgctaagcacaggactgaggctgcatagccagggactgttctggagggattt

SEQ ID NO: 812443 - DNA, 86 bp, Artificial Sequence
  ENSG00000275747_0 (sequence is synthesized)
ctgagctgggtttcacagttgttattttaaaaggagaggacccaagacaacctggggttccctgagactctcctgtgcagcctctg

SEQ ID NO: 812444 - DNA, 120 bp, Artificial Sequence
  ENSG00000275747_1 (sequence is synthesized)
agtcagatatgttatgcacaatctgtgacgagcagattcaccgtctccaaagaaaatgccaagaactcactgtatttgcaaatgaacagtctgagagcagagggcacagctgtgtgttac

SEQ ID NO: 812445 - DNA, 120 bp, Artificial Sequence
  ENSG00000287203_0 (sequence is synthesized)
gctaaaagcagaagttgtctgaagccagcttgtcattctctctttcgtgaagatcttaccaagctaaggagcagatgcttggggccccggggattggagcatgcggggccttactgtgtt

SEQ ID NO: 812446 - DNA, 120 bp, Artificial Sequence
  ENSG00000287203_1 (sequence is synthesized)
tggttgagaagaggaggaacaggatttcttcaagcagtgggagatctgcagcctctttatttagcccagccaccaagtaaagaagtccaggctacctttctggagaagccacatggagaa

SEQ ID NO: 812447 - DNA, 120 bp, Artificial Sequence
  ENSG00000287203_2 (sequence is synthesized)
gagaggtcctggaggttgggaggccacatggagaactgaggcatcccagctgacagccagcaccaactgccagccatgtgagcgtgccttattggaagtagaccctacagccccaatcaa

SEQ ID NO: 812448 - DNA, 120 bp, Artificial Sequence
  ENSG00000287203_3 (sequence is synthesized)
caacctcatgagtccctgagccagaaccatccagctaaaccactcccaatctgacccacagaaactctgagataatgtatgtttgttgttttaagccactaagttatggaaaacaataac

SEQ ID NO: 812449 - DNA, 120 bp, Artificial Sequence
  ENSG00000287203_4 (sequence is synthesized)
ttagcacagcaatcaatgacaaattcaatagttcctagaagcccagagaaagtaatggtccatgctgaacaacataggaatgcctgatttgcccctgaaagatagtagagaaagaaataa

SEQ ID NO: 812450 - DNA, 120 bp, Artificial Sequence
  ENSG00000287203_5 (sequence is synthesized)
agaagttgaaggaagtgagaaagctggaatggatacattatgtgaggccagaggatcatgctctatgagaggcctcagagcacacaccatcaaccaaggctatcaggggtaccatcacca

SEQ ID NO: 812451 - DNA, 120 bp, Artificial Sequence
  ENSG00000287203_6 (sequence is synthesized)
tgaagaggtccagtggtaattctcctctccaggccagagaggtggtcacagggctgggctggttagtatccacagggatgtctcctcattctcaagtaacagaggccaggtacattaggc

SEQ ID NO: 812452 - DNA, 120 bp, Artificial Sequence
  ENSG00000287202_0 (sequence is synthesized)
aggacacttgtgacagtctaatcatagggcaccacctaaggtggcagcataaacacagtctgtccccagactgtaaccagatgctcctacttgagaccaaacagcaaatgggttaggctc

SEQ ID NO: 812453 - DNA, 120 bp, Artificial Sequence
  ENSG00000287202_1 (sequence is synthesized)
caagccagaagagagctgggggtcccaccttctgtcctctccatggtaatcaaggtatgcctgccaaatctccacataatcagtggcctggatgaagccggcattcaaagctttctcgaa

SEQ ID NO: 812454 - DNA, 120 bp, Artificial Sequence
  ENSG00000287202_2 (sequence is synthesized)
ggttactggagttggagaaaagtcaggatttgttaccaattcaaatggaaactaatagaaagtcactacattctactgactataaaacactacatgactttaaagactaatagatgcaac

SEQ ID NO: 812455 - DNA, 120 bp, Artificial Sequence
  ENSG00000287202_3 (sequence is synthesized)
agaatgaaatgagctagacaggaatgttgaagacagaagttgctacagcactctacagactgtgttctagaaaaaacttcttccacaagacgccctgcaagaaaagttccagatcaagga

SEQ ID NO: 812456 - DNA, 120 bp, Artificial Sequence
  ENSG00000287202_4 (sequence is synthesized)
agtttggagaaaacactacaacttcttagaaaatacaatgaatattagcatgttaaaaagctctaagaagccacaaatataaccagttcatctctcactcagagccctttttgtcactac

SEQ ID NO: 812457 - DNA, 120 bp, Artificial Sequence
  ENSG00000287202_5 (sequence is synthesized)
actccataacccaaagaaaaccccagggaacactgatgtaatgactttgtcaccgctctctgtttttcacttgggacaaatagcttagaagttctcccacaaaaacatccgcaccagaaa

SEQ ID NO: 812458 - DNA, 120 bp, Artificial Sequence
  ENSG00000287202_6 (sequence is synthesized)
ttacttgatgatcaactccatgtctctccatggccaagaggtaccgactccataaggcaactgtccaggggcagtttctaatagcgcggttatgtacagataaaaccaaatcctttactt

SEQ ID NO: 812459 - DNA, 120 bp, Artificial Sequence
  ENSG00000287202_7 (sequence is synthesized)
tcagttgtcgatcctatgataaagaattccagagttaggaaattacactttattaagcattcaccatcaacaagacattgccagcacgaccaagtgatgaaagaaatgtccttataaaca

SEQ ID NO: 812460 - DNA, 120 bp, Artificial Sequence
  ENSG00000287202_8 (sequence is synthesized)
tctcttgtgacctggtttcctcaacaacaacaaaaaaatcactaaggggagtggaggagaaggagaggagcaacttacaggttaaaacagccttaaaagacgtcagccaaccctactgga

SEQ ID NO: 812461 - DNA, 120 bp, Artificial Sequence
  ENSG00000287202_9 (sequence is synthesized)
agaagggacaagtaggtgagactacagatcaaagtaaactaaagctataaatgttactaattgttgaagctgggtgaggggtacagaagtttcattttactgatctgtctacttttatat

SEQ ID NO: 812462 - DNA, 120 bp, Artificial Sequence
  ENSG00000287202_10 (sequence is synthesized)
gtttacatttttgccataataaaaagttaaaagaaaaatatcaagttgttataagtcctcaacacagacaatatgctcattttacttacagttagtgaccatttttaaataacttgaaac

SEQ ID NO: 812463 - DNA, 120 bp, Artificial Sequence
  ENSG00000287202_11 (sequence is synthesized)
actaaaactttctaaacgagttggcaaagaggagaaaaagcagatggaggaaaagcaagagtagggccgtatgcaacaaactcctggcactcttactgattttaagtagattctaaattg

SEQ ID NO: 812464 - DNA, 120 bp, Artificial Sequence
  ENSG00000287202_12 (sequence is synthesized)
gcaaaaataaaatgaaattagaacagtgatcttactaggtactgactgtaacggatccataagtctgggacaaggcagttctcgaccagggcgcgctcaaagatcaactgaatgcgagca

SEQ ID NO: 812465 - DNA, 120 bp, Artificial Sequence
  ENSG00000287202_13 (sequence is synthesized)
ggatcgccaattttcatctcaaaatcgatatatgcttgatattctgccagccttggtgcctctgcctgcaactggagtacaggaaaattgtattgaatttagttactggcaggaagcaca

SEQ ID NO: 812466 - DNA, 120 bp, Artificial Sequence
  ENSG00000287202_14 (sequence is synthesized)
acacatctgcaaataaaataaattttggcaaaactggctacagtaactatgaatcgccaaatcctcactctcagaaccactccactatggcctctacaacttcttgagcaaaacaagagt

SEQ ID NO: 812467 - DNA, 120 bp, Artificial Sequence
  ENSG00000287202_15 (sequence is synthesized)
cttctcatctggtccaaagtgccagttcatggcagtcgctacaaaggctccataaactcttttctaaatccattcctagaccacagggaattaagtagcccatcaatcaggaactgagtg

SEQ ID NO: 812468 - DNA, 120 bp, Artificial Sequence
  ENSG00000287202_16 (sequence is synthesized)
aaagagcaacacctttgccagtgaccactgtcaaccacccttccaaaccagaagtcatgttcttgggctactgagtagagttaatacaaccaaactggaaaattttggtgcctgatgcta

SEQ ID NO: 812469 - DNA, 120 bp, Artificial Sequence
  ENSG00000287202_17 (sequence is synthesized)
tttcaggtttcttattccaaatatcagttcctggaagaatgtagataaatgcagaagatgaaggcagctgtgctgaatgtttaatgatccaaagacatacaatcaaattctttttagaaa

SEQ ID NO: 812470 - DNA, 120 bp, Artificial Sequence
  ENSG00000287202_18 (sequence is synthesized)
aaaatcttattcgacatgttttctcttcaggcacattttgctgatggccatgacataattgaatgatcgaagttttgggaagcacaggtacatgcaaatcatttacacatgaaaaagaaa

SEQ ID NO: 812471 - DNA, 120 bp, Artificial Sequence
  ENSG00000287201_0 (sequence is synthesized)
gtacctccaggcatcaagtctgttctaggtgtggggatacctggtgaagacaagaatgttctcttcttcaaggtggagtagacagagaacaaccacgtgcatgccaacattctgagaaaa

SEQ ID NO: 812472 - DNA, 120 bp, Artificial Sequence
  ENSG00000287201_1 (sequence is synthesized)
caggcccttgttgttaagaagcatcagggagatcagatgcctgaaacaagtggccacaggagggatgaagagatacactgggacccatcacacagggaggaaagggccatgttgtagagc

SEQ ID NO: 812473 - DNA, 120 bp, Artificial Sequence
  ENSG00000287201_2 (sequence is synthesized)
catcttgctggccctgcaccccagggtgtaggagaagatctagatgtgcccagtgtacagaaactggaacctaccatctaaatttgactgcccctcagatgtctctggttctcagcttcc

SEQ ID NO: 812474 - DNA, 120 bp, Artificial Sequence
  ENSG00000287201_3 (sequence is synthesized)
tgacctgcaaatgtgcaagactacaccaatctgcagtctcttctggctctgatttctgaaaatcacgtattttcaaatcctaggaacattattcttctctcttagcatgctagatttcct

SEQ ID NO: 812475 - DNA, 120 bp, Artificial Sequence
  ENSG00000287201_4 (sequence is synthesized)
tttaaatgaaagaaattttaatttaaaaaaaagtaacacaaatagcatcaacatggaaatatatttgggaaagtatctgatattcaagatttccatgcaattaaaaagataggccatagt

SEQ ID NO: 812476 - DNA, 120 bp, Artificial Sequence
  ENSG00000287201_5 (sequence is synthesized)
gtcaggctcagattctaattccagccatttcggtgtccctattttgcatcctctgacctccaagagatattctgaaaagtctaccttgaatttactactcaaagacttcatcaatctaag

SEQ ID NO: 812477 - DNA, 120 bp, Artificial Sequence
  ENSG00000287201_6 (sequence is synthesized)
ggattttaaccctggaaagcttaactccaaagtctgtgctttctgccatgtctgactgcttctccaactaaaaaacatgttttattctactttttgtcacgtccaagtatggcgcatgct

SEQ ID NO: 812478 - DNA, 120 bp, Artificial Sequence
  ENSG00000287201_7 (sequence is synthesized)
aagcttactatagttgcttcatgttcctagtttctgagaacagaagtttgaagggaatacaagtggtaagccattggtgacttctccacttcaattatgagtttagacccaattgtttat

SEQ ID NO: 812479 - DNA, 120 bp, Artificial Sequence
  ENSG00000287201_8 (sequence is synthesized)
tcatcaaaacaaacctcagagctgccaaccacagatctggtcattgtgggttttgttttgttttattttttaataaggagagaaagacctaatttggcagaggagaccaagaagcccggg

SEQ ID NO: 812480 - DNA, 120 bp, Artificial Sequence
  ENSG00000287201_9 (sequence is synthesized)
ctatacatttgcataaagatgattactaaaactgaagaattgcttctcataaaaaaaactgatggagttaaaaaaaaatccaaatgaattaaaccagcagttcctaccctgtgatttgta

SEQ ID NO: 812481 - DNA, 120 bp, Artificial Sequence
  ENSG00000287201_10 (sequence is synthesized)
gaaaactgtttctgagagatgctggaaagtattctggagaaaacaattaatctgtttaccatttgtaaaatggtaaatttggaaaatactacattctaacgatatctttttcctggagat

SEQ ID NO: 812482 - DNA, 120 bp, Artificial Sequence
  ENSG00000287201_11 (sequence is synthesized)
actgaatgcacgtcaggctatcaaagactggaatgttttaaagaaacatgtttaactctatactccaacaattcccaacaaagataaagtaaataattaaataactaattacaatcagaa

SEQ ID NO: 812483 - DNA, 120 bp, Artificial Sequence
  ENSG00000287200_0 (sequence is synthesized)
gacacagagccaggtggggccaggagggagcacaagccatctgccctcttagacagaaaacagtgtggaggaggaggcctcaccctttggatggaacttgcagcggccgggacagagttg

SEQ ID NO: 812484 - DNA, 120 bp, Artificial Sequence
  ENSG00000287200_1 (sequence is synthesized)
cggtttggggcaaatcaagttgggttgggggctctggaagaaggtgaggagtctatggagcataaaagcaaggagcagcggctgaggctctgggtgcagggtgtggttcacgaggtcacc

SEQ ID NO: 812485 - DNA, 120 bp, Artificial Sequence
  ENSG00000287200_2 (sequence is synthesized)
aaggagccctgggactgaagcccctttccctagaaccccggctctacgtctcgaagttctggagggtgccgcccctccgcaccacgtcactgcaggctctagctgctcttccaggctttc

SEQ ID NO: 812486 - DNA, 120 bp, Artificial Sequence
  ENSG00000287200_3 (sequence is synthesized)
tgctccctctgctggccgttctcacacatgacacccgctcggagtcgaagcagaagagctggggaactgaaggaggagcccagttgaaggaggagcccctcactaaagcccacttaaaag

SEQ ID NO: 812487 - DNA, 120 bp, Artificial Sequence
  ENSG00000287200_4 (sequence is synthesized)
cccaggaggtggatatgtgagctctgagaaacggagaggcagaggttgctatgcccagcggtactgcctgacagggaagtgccctgcctctttagatttgcattgccatcgtgaccggat

SEQ ID NO: 812488 - DNA, 120 bp, Artificial Sequence
  ENSG00000287200_5 (sequence is synthesized)
ataagggaggggcagcatttcagtctctgatttttatgagaaagaggaggaagcatgacaaggaaaaagggcaccctctcccctttttttcaaccccacaggcagacctcccacatccta

SEQ ID NO: 812489 - DNA, 120 bp, Artificial Sequence
  ENSG00000287200_6 (sequence is synthesized)
gctctgcttccaagaaccacccccttgggtgtggaaggtcagtgggttaactgttcagtctgagggtcaagggggaaaagaaaaggtgaaggtagggggagatctgggactttgacccag

SEQ ID NO: 812490 - DNA, 120 bp, Artificial Sequence
  ENSG00000287200_7 (sequence is synthesized)
gctagttatccccagagggtcagagacccagctcagtcagaccagactaatgggcactgaaaaaaaggcaccccacacatgctcctgtcccagcctcgagccccttcttccagaggagct

SEQ ID NO: 812491 - DNA, 120 bp, Artificial Sequence
  ENSG00000287200_8 (sequence is synthesized)
ttatgtatttatgtatttatttatttttatttgggacggggcctcactatttgcccaggctggagtgcagaggctattcacaagtgtgatcatagcctcgaactcctgggtttaagcggt

SEQ ID NO: 812492 - DNA, 120 bp, Artificial Sequence
  ENSG00000287200_9 (sequence is synthesized)
cttccggccttagcctcctaagtagctgggaccaccggtgcccagcaagaagagctctcttagaacaccttactttcttctccccacccagttctatagaccagtgagtctcaaactttt

SEQ ID NO: 812493 - DNA, 74 bp, Artificial Sequence
  ENSG00000287200_10 (sequence is synthesized)
tccccacccagttctatagaccagtgagtctcaaactttttggtttcctctatactcttaaaagtcattaggtt

SEQ ID NO: 812494 - DNA, 74 bp, Artificial Sequence
  ENSG00000287200_11 (sequence is synthesized)
cattgagcttttgttcatatgatttacatctatcaattcaccacattagaaattaaaactgaaaaagactgtaa

SEQ ID NO: 812495 - DNA, 120 bp, Artificial Sequence
  ENSG00000287200_12 (sequence is synthesized)
aattcaccacattagaaattaaaactgaaaaagactgtaacacaagaccatacaagcacacattccattaacaatgatgtcagaaagatgatgtaatcacatgtcacacggcctctggaa

SEQ ID NO: 812496 - DNA, 120 bp, Artificial Sequence
  ENSG00000287200_13 (sequence is synthesized)
aactccacaatacaattttaagataatgagaattcaaaaggcaaataacatgttagtattattatgaaaatagctttgactttgtggacacccctgaaaagggacctcccagaagcctac

SEQ ID NO: 812497 - DNA, 120 bp, Artificial Sequence
  ENSG00000287200_14 (sequence is synthesized)
agagtacacttgaagaactgttgctctggaccatcaccctaacccttctttatgactcacatttgttgattttctttctcctttttattaagaaagtataagccaggcgcggtggctcac

SEQ ID NO: 812498 - DNA, 70 bp, Artificial Sequence
  ENSG00000287200_15 (sequence is synthesized)
aggcgcggtggctcacgcctataatctcatcacttcgggaggccaagtcgggttcgtttctactaagaat

SEQ ID NO: 812499 - DNA, 120 bp, Artificial Sequence
  ENSG00000287207_0 (sequence is synthesized)
gggagacgtagtcttgtaacgctctctcgccggacattcctaatggttagcgcccagcctgtgaagagtcgggggtcggggagggggtctcgctaagaaggaggtttgcagaccatggca

SEQ ID NO: 812500 - DNA, 120 bp, Artificial Sequence
  ENSG00000287207_1 (sequence is synthesized)
aagactggagctagagattcgctggccttgaagaagcaagctgtcatgttgcgaactgcctatggagaaaactaaatggcagggaactgcagacggcttctagaacttgagcgcagcctg

SEQ ID NO: 812501 - DNA, 120 bp, Artificial Sequence
  ENSG00000287207_2 (sequence is synthesized)
cagctgacaaccagtaagaagccagggccctcagtcacacaaccacaaggaaatgaattctgccaacaacctgagaggtggcctccagatgagaagacagcctgacttaaaccttgatag

SEQ ID NO: 812502 - DNA, 120 bp, Artificial Sequence
  ENSG00000287207_3 (sequence is synthesized)
cagttttgtgagaccctgagcaaagaaaacagataaactgtgcgtagactcctggtctacagaaactgtgagataataaatgtgtcttaagatactatgtttatggtaatttattataca

SEQ ID NO: 812503 - DNA, 120 bp, Artificial Sequence
  ENSG00000287207_4 (sequence is synthesized)
atagaaaactaatacactagacattgctggattatttcataaagtgattgtaccaatttgtactctagaaacggtatataagatactcttcacttgctaacagttagaaatgtctggctt

SEQ ID NO: 812504 - DNA, 120 bp, Artificial Sequence
  ENSG00000287207_5 (sequence is synthesized)
ataaaaacatgaaaaatagatatttacttagaattatgcattctgttgtatttcttttctgttgcataaatgcaattaaataaaatagcaggctgggaacagtggctcatgcctgtaatc

SEQ ID NO: 812505 - DNA, 71 bp, Artificial Sequence
  ENSG00000287207_6 (sequence is synthesized)
acttgaaacacacaaaaaaattagtcgggcatggtgagtcgcacctgtaatcccagctattcaggagactg

SEQ ID NO: 812506 - DNA, 120 bp, Artificial Sequence
  ENSG00000287207_7 (sequence is synthesized)
aggtgggaggatcacttgagaccaggagtctgagcacaccactgcacttcagcgtgggtggcagagcaagatattgtctcaaaaaaaaaaaaaaaaaagcaactagtagtaataaataga

SEQ ID NO: 812507 - DNA, 120 bp, Artificial Sequence
  ENSG00000287207_8 (sequence is synthesized)
gagactaattaagcaaataatatgtatgagaaaaatgcaacaatttcataaggtttctttctttcctctggtatagcaatttagctctattgcatatttgaattttgtaggctatatcat

SEQ ID NO: 812508 - DNA, 120 bp, Artificial Sequence
  ENSG00000287207_9 (sequence is synthesized)
ttagctctattgcatatttgaattttgtaggctatatcatcctatattcttgagataaataagtgtaagaattttttaaagaatgtatacaatagaactaatgagatagatattacctat

SEQ ID NO: 812509 - DNA, 120 bp, Artificial Sequence
  ENSG00000287206_0 (sequence is synthesized)
actccttccccaaattccgatctgcgaaggcatcagaggagaacggctgtgagaagcagtgggcgggaacccatccttggctaggtttacagtgctgttgaaggggctgatggcggctac

SEQ ID NO: 812510 - DNA, 120 bp, Artificial Sequence
  ENSG00000287206_1 (sequence is synthesized)
tgtttgtttttaccgtctctcgctctctctctctgataattccctccaagttggacacttaaaataaggtcctcgtaaactccttcagcttgagagtttccaggaaagggaatgttaatt

SEQ ID NO: 812511 - DNA, 120 bp, Artificial Sequence
  ENSG00000287206_2 (sequence is synthesized)
ttgttgacaaatttcagtatcccaaagccccaggtcttaattcattgtcaaactctcggtcctgagcctgcatactccccttgtgctcctaattagtcttgtcatgagctcctatgctgt

SEQ ID NO: 812512 - DNA, 120 bp, Artificial Sequence
  ENSG00000287206_3 (sequence is synthesized)
tgtcttaaacacagccctgtgtcctgggagccaaagggcgctttggggtgcgtagtgctgtatttgtgtatatttaaaaaaaatagtcatcgctcgtcttgctgtggccgccatcatttt

SEQ ID NO: 812513 - DNA, 120 bp, Artificial Sequence
  ENSG00000287206_4 (sequence is synthesized)
tccgtggaggtgttgccatagagatgttgtctgatccatctctattgatatcaccctttaaaggggcccctgaataggcactgagatacatgaaatggcagctacgaaacatcttaaaag

SEQ ID NO: 812514 - DNA, 120 bp, Artificial Sequence
  ENSG00000287206_5 (sequence is synthesized)
cttgcagagggcttaaagatgatccacatcagctcccacattacacagacagttgcgtttggagcatggatcagacctcacttattctggagttctcaaggactcccaacagcacctgct

SEQ ID NO: 812515 - DNA, 120 bp, Artificial Sequence
  ENSG00000287206_6 (sequence is synthesized)
cagaagccctggaaagtcagagcacaattaaggacattcgctctaagaagacactctcacggttatcgctggaacccagggtccctccaattggaaatgtgaagtcaaaggaggaaattg

SEQ ID NO: 812516 - DNA, 120 bp, Artificial Sequence
  ENSG00000287206_7 (sequence is synthesized)
ctcttaggctgagtcacaagactcgtgtccttttctcctgaggtagataagagacacacacacaggcagatacacacctcatgcctccaggagccgcagaggcagagaatgcaaaaaatg

SEQ ID NO: 812517 - DNA, 120 bp, Artificial Sequence
  ENSG00000287206_8 (sequence is synthesized)
tggtggtgccagccgcagcgaggtctggaaatgccttcttaattgagcctttctgggagctgcacaggctggctggaggagggacaggaatggagaggcgagtgaggtggaaggggccac

SEQ ID NO: 812518 - DNA, 120 bp, Artificial Sequence
  ENSG00000287206_9 (sequence is synthesized)
gaagggccatgtctgagatggggcccaggggtctttgatcctacttcgtttgtcatgagtttagagacccagaaaaaagagccttgagtttcttccaataaagcactgttacctgaaaaa

SEQ ID NO: 812519 - DNA, 120 bp, Artificial Sequence
  ENSG00000287205_0 (sequence is synthesized)
ggggtctgtcaccaaggtagtaagatggctttttcaaagtttcatcctctgggctcctggcttccataagacctacccaaaggccctgctgggctattgactgctcactatccctgcatg

SEQ ID NO: 812520 - DNA, 120 bp, Artificial Sequence
  ENSG00000287205_1 (sequence is synthesized)
tcaactctttacctgtgcacagttatgcaagtacagcccttctcagttccctggaaagacctgaatgcagccagggcctcaggtgtgagatcacagatccaggtcacgctgttatagcaa

SEQ ID NO: 812521 - DNA, 120 bp, Artificial Sequence
  ENSG00000287205_2 (sequence is synthesized)
agatagactgagccgcttatcaacaacagaatgttcttcttcacagttctggaggacagaagttgaagatcagaacgccagcatggatggagtctgaaagcaagctccagtgttatgagc

SEQ ID NO: 812522 - DNA, 120 bp, Artificial Sequence
  ENSG00000287205_3 (sequence is synthesized)
cgaagccaatcctcccacagcccagcttcagctgagaacacagccccagcctcattgcaggcagccagcaaagctgtgtccagattctagtccacctaagtcatgagataagtaagcatt

SEQ ID NO: 812523 - DNA, 120 bp, Artificial Sequence
  ENSG00000287205_4 (sequence is synthesized)
tgttgttcgaaggtgctaagtttggggataatgacgtcagagagaagcagatcactatcttcttcttccaggcctcagagtcctccttgcctctctacttctcttccccaggctccctct

SEQ ID NO: 812524 - DNA, 120 bp, Artificial Sequence
  ENSG00000287205_5 (sequence is synthesized)
agccccactggcctctttctcacatcctctgccaaagtcacttctgcctgcatgtctctgcaccaggagtggcatctccctgatacactgttcccagacttgtgcagggctagccctctg

SEQ ID NO: 812525 - DNA, 120 bp, Artificial Sequence
  ENSG00000287205_6 (sequence is synthesized)
ttgtcatcctagtcatggcataaatgtcacctcagtgaggcatttgggtccctcaaatgctatggctccccagccctccctcccaacatcctactttaattatagcatttactcttcttt

SEQ ID NO: 812526 - DNA, 120 bp, Artificial Sequence
  ENSG00000287204_0 (sequence is synthesized)
gccacacgcttgttttgttaaggagagtccacctatcaccaggagggacagaagtcagctcaggaagggagaccctgccaggggactcagccatgagactttgcaattataagctattcc

SEQ ID NO: 812527 - DNA, 120 bp, Artificial Sequence
  ENSG00000287204_1 (sequence is synthesized)
ttaagccacagaaagaaatgaagaaaggaagaggggaagacagaaagaaaacaattatcacttggtttagtgaccacgtgtgttgaggacaggaatagaaaaaagaaggtacatgtctaa

SEQ ID NO: 812528 - DNA, 120 bp, Artificial Sequence
  ENSG00000287204_2 (sequence is synthesized)
aagccatgaccttgagcaaggatgcgcttttcagccaggacacttaacaaagagggctgacagctgtcagcacttccagaagctggtctttcattgaagccattaaatttctgccaaatt

SEQ ID NO: 812529 - DNA, 120 bp, Artificial Sequence
  ENSG00000287204_3 (sequence is synthesized)
ccaggaagacctggaatatgacagtttattagagagtaccctggaaaaaatagccatgaaagtgaaaaaaaggaagcaagcttggacagaagaaaaaactggactgaaatacaatctcag

SEQ ID NO: 812530 - DNA, 120 bp, Artificial Sequence
  ENSG00000287209_0 (sequence is synthesized)
ctctcattttcatttcctccctcatttgattctttctccatttcccttccccactgtctgtttctctcctttctctttcctgcctaccccctgcacagtcacagttgtcagtggcacaca

SEQ ID NO: 812531 - DNA, 120 bp, Artificial Sequence
  ENSG00000287209_1 (sequence is synthesized)
cacattcgaccccttttcaggctgcgctgctagaatggagtgaatctgagacctcacaggagttgctatgtctcacaggatgacttctataactaatcaaagcataatccacctagcagt

SEQ ID NO: 812532 - DNA, 120 bp, Artificial Sequence
  ENSG00000287209_2 (sequence is synthesized)
aagacgagaaactcatcaaagtctcctgcaatcaaggtatccaatgaacatcctgcactgttagatgtggccctaaatcccaactgaagtacttattgggtttaactgctgctttacaca

SEQ ID NO: 812533 - DNA, 120 bp, Artificial Sequence
  ENSG00000287209_3 (sequence is synthesized)
tgtatgggcacggcctacactttctttcttttttttttcttcctccaaatgtgaatttgtgtttggatgcagaaatgcttccaccaacttcctggactgcaaagtcatggaatatttagt

SEQ ID NO: 812534 - DNA, 120 bp, Artificial Sequence
  ENSG00000287209_4 (sequence is synthesized)
agctgttcattgctccttgctttctgatgcacttagagcatctcataaacacccccaaaatagaccaggaatgtaaagtgtagtgagtggatttgggtggttaatctcaatctccagtgg

SEQ ID NO: 812535 - DNA, 120 bp, Artificial Sequence
  ENSG00000287209_5 (sequence is synthesized)
atgttaagcctctaaagagtcaaaagtgctgctgatgtattattgggtttgcagaagaacaatcaggatgcaagagagaaagaattactatcccaggaattacagccttcagttctcttc

SEQ ID NO: 812536 - DNA, 120 bp, Artificial Sequence
  ENSG00000287209_6 (sequence is synthesized)
aggctctggaaggaatgatgtttaatgactgaggcagaaatatcattgtctattagaaacttaaagtaaggaataagagtctaccaacttgaagcccagctggatttcttatagacagca

SEQ ID NO: 812537 - DNA, 120 bp, Artificial Sequence
  ENSG00000287209_7 (sequence is synthesized)
gcactggaaaactcggactttcaaatgaggaaaggattcactgaatgtaacttatctaagttattggccatgaacaactttagcagaaattgtcttatgaattactttgaacattctaca

SEQ ID NO: 812538 - DNA, 120 bp, Artificial Sequence
  ENSG00000287209_8 (sequence is synthesized)
gttaataatttttaaaaagtcttagagctgcaggagtgttgagatattgttccagcaaaatttcctacctaattaagaacccccacagttgggcctgctgtgtcttcttgaattccttca

SEQ ID NO: 812539 - DNA, 120 bp, Artificial Sequence
  ENSG00000287209_9 (sequence is synthesized)
gcgacacagagcgagcctcgtctttagcatgaatccaaagaaccagtgatggctcaattaaggatttagcaccagaagacatggttcaattctaagctctgccatttactacagggatga

SEQ ID NO: 812540 - DNA, 120 bp, Artificial Sequence
  ENSG00000287209_10 (sequence is synthesized)
agggatgaatcactatgttttagaaattttgttatatattttaaaaatctataaaatcaaataacactcaacatagactataaaaatatagctggttgtttttagtctaaaatatgacac

SEQ ID NO: 812541 - DNA, 120 bp, Artificial Sequence
  ENSG00000287209_11 (sequence is synthesized)
acaggatgacttctttttcattccgggaaaatggaaaagcaaaacaaaaacaaaacagaacagtaactcagggctcataaggatggatcttcagtgttattgaaataacagccggctaac

SEQ ID NO: 812542 - DNA, 120 bp, Artificial Sequence
  ENSG00000287209_12 (sequence is synthesized)
aggaattgttcagctcactagacagttgcaggtttaacataggggggtaattgaattagatcattgtcatatttggacaaggctcatgcttgtttacgttaagttattagaaacaactta

SEQ ID NO: 812543 - DNA, 120 bp, Artificial Sequence
  ENSG00000287209_13 (sequence is synthesized)
aatcacaaggactatcaagcatgaaagagataattgataaatatttttactgacaattatactagcataaaagattgtagaagaatatttttaaatgtccaaactattattacctgtttg

SEQ ID NO: 812544 - DNA, 120 bp, Artificial Sequence
  ENSG00000287209_14 (sequence is synthesized)
attcctaattgtcataataagatcctgtcttttaatcaacatgatgatgtttaacatgtttattgtctattttctaaagcttgaatcattatcagatgcagacaagtgtttggtgtgcat

SEQ ID NO: 812545 - DNA, 120 bp, Artificial Sequence
  ENSG00000287209_15 (sequence is synthesized)
agactagacttgtctttctatctagattttaagctccactaggaaaagaactatatttagtccatttcttgtgattctataatatgtgcactgagtaggcactcaatatatacttgctgg

SEQ ID NO: 812546 - DNA, 120 bp, Artificial Sequence
  ENSG00000287209_16 (sequence is synthesized)
tttctgtagaggcttcaaattgttatagccaagagcacagtctctgaagccagaatgcctgtgttcaaatctgggcttagccacttaccagctatatgaccttaggcaaattccttcacc

SEQ ID NO: 812547 - DNA, 120 bp, Artificial Sequence
  ENSG00000287209_17 (sequence is synthesized)
tctctgtgcctcaatttctttatcactgaatagttaattaaaaccctactttgttaactcattaagtgagctaatatttatatagtgcttaaaactgtgtctgacaagtgataagtacca

SEQ ID NO: 812548 - DNA, 120 bp, Artificial Sequence
  ENSG00000287209_18 (sequence is synthesized)
cacaggtatatgatatgaagagtatgttattattttgaatctgtgctgctgtcagtctactgtttacaaacactcgcccaagaagagaagattatcttttcatgtgtttattggccatct

SEQ ID NO: 812549 - DNA, 120 bp, Artificial Sequence
  ENSG00000287209_19 (sequence is synthesized)
gtatatcttctttgccaaagtatctgttcaagtcttttgcttatttttataccaaggtgtttatttccttattgcactttgagaattctttatatatttcggatgtaagtcttttatcat

SEQ ID NO: 812550 - DNA, 120 bp, Artificial Sequence
  ENSG00000287208_0 (sequence is synthesized)
aggaagtgtaaaaggatacgaaatatttcttgcatgatgtcctagcaagaattcttacacctagtttggaaaaaaaaaaaagaagaagaagaagataaaatcaactgtgggaataaagct

SEQ ID NO: 812551 - DNA, 120 bp, Artificial Sequence
  ENSG00000287208_1 (sequence is synthesized)
agtaactgctggccagaatcaaggaagtctttatggaggagccttgtgaagaaggtacttgcttctcctttgtcttccaccatgattgtaagtttcccgaggcctcccagccatgtggaa

SEQ ID NO: 812552 - DNA, 120 bp, Artificial Sequence
  ENSG00000287208_2 (sequence is synthesized)
ctaaaataaagaagacactagaagaaaaaaccttcaaaagagaaatatcttagagaactgctagagtggccaagactgggtccatggaagaaaagggtatataccaactatctcaggtag

SEQ ID NO: 812553 - DNA, 120 bp, Artificial Sequence
  ENSG00000288459_0 (sequence is synthesized)
gatgcaggctgagatgaaccccgggggaggggcaaggccaggcagaggcaggacggagcagtggttaggatcaccccatcctcccaaagcaaaggcatcctctgttctgggagctgagag

SEQ ID NO: 812554 - DNA, 120 bp, Artificial Sequence
  ENSG00000288459_1 (sequence is synthesized)
caccagggagcttcctcctgctgcctggcccgggcttggccaccgggctcgatttagccggaagtggccatgtgccagctcccagctgagggctctggtgaccctcctgtgaagagcctg

SEQ ID NO: 812555 - DNA, 120 bp, Artificial Sequence
  ENSG00000288459_2 (sequence is synthesized)
gcaatgagcctgctcctcctgctggtggaaaatgcaggtgtttctggatgagattcaggctggaatccgtagactgagcacagcagatgtccctcccccatgcgggtgggcctcgctcaa

SEQ ID NO: 812556 - DNA, 120 bp, Artificial Sequence
  ENSG00000288459_3 (sequence is synthesized)
tcagatgaaggcatgacgaggaaactggttgccttgcagccgggagggcggctgctttcctgctttcagatttgagctggaacatcagctccacccaggtgtcgagtctgctggtgtccg

SEQ ID NO: 812557 - DNA, 120 bp, Artificial Sequence
  ENSG00000288459_4 (sequence is synthesized)
gcctgatttgccaccatcagctctcccagggctccagcttactgactcggtgcaggtctgcggactcagcctccatcattgtatgagctaattcactgcaataaatctctctttccacgg

SEQ ID NO: 812558 - DNA, 120 bp, Artificial Sequence
  ENSG00000269736_0 (sequence is synthesized)
agcctgggcgacacagggagactctgtctcaaaaaaataaaaatcacttaaattatctgtaaatcataccaggttgcccttttccaacaaatcacaggcgatgtaacctgtcaacattgt

SEQ ID NO: 812559 - DNA, 120 bp, Artificial Sequence
  ENSG00000269736_1 (sequence is synthesized)
tactattattccagccaacatgcagtgaccagccatccgtatctgggcagtgaggttgagggagtccactctctgtccctgtcaggctgtgtgccttggactgtatggtggaactctcca

SEQ ID NO: 812560 - DNA, 120 bp, Artificial Sequence
  ENSG00000269736_2 (sequence is synthesized)
agcctcaccccccatccccacctccccactccccacctgtctgagctggaatgagaagggcagcttagcaaaaggccaaggtagatgagctcaccatctaccaagagcagtgtggggcct

SEQ ID NO: 812561 - DNA, 120 bp, Artificial Sequence
  ENSG00000269736_3 (sequence is synthesized)
ccaaactagagaatcaccccacatacaaacagcaggaccagaccttggtatctgtgttcccccaaccccaacaaataatggcaaaacctaagccagcactgcaatgaatgttggccattt

SEQ ID NO: 812562 - DNA, 120 bp, Artificial Sequence
  ENSG00000269736_4 (sequence is synthesized)
aggtaagtgtccccttattgtggggtttcatgtatgtttccacctcccccaccaggctgtgagcaccagaagggagagctgggcctgtcttggtcacccctgggtcctcagagcccagca

SEQ ID NO: 812563 - DNA, 120 bp, Artificial Sequence
  ENSG00000269736_5 (sequence is synthesized)
cgtagatgggctctccactgatgttcgtcgaatgaatacatgaaaatatcttgtatctctgtattcccaccacccagagcaaactgtagccctgatccaaatgaattgctgagccctcaa

SEQ ID NO: 812564 - DNA, 120 bp, Artificial Sequence
  ENSG00000265644_0 (sequence is synthesized)
ctccggctccagatcatccagtgtgacagagtcttaatccgtggttctgcccatcagcacattcaacggacttaggatttctcaccacgtgcccttattttggaaaactgttcatttcaa

SEQ ID NO: 812565 - DNA, 120 bp, Artificial Sequence
  ENSG00000265644_1 (sequence is synthesized)
gaccacaggcaaaggggatactaagaataatcgcagaattaacatcggcaaggagatagaagagtggcagtgtggattgcgacagcctgggaaatacattccaaagaagaatctcagaat

SEQ ID NO: 812566 - DNA, 120 bp, Artificial Sequence
  ENSG00000265644_2 (sequence is synthesized)
caacgtttgcctatggtgggcagttatcaaacaacgttggctcatggaagatggtgcatgtagatagatgcagatgacttaaaaataatctaattctgtgaagaaagcaggctgatattt

SEQ ID NO: 812567 - DNA, 120 bp, Artificial Sequence
  ENSG00000265644_3 (sequence is synthesized)
taaaaatgaagaaaaagaagttgtaatgggctaaataatgtgtccagagtcaagcagctctatgtaagaaaggggctgtcccactaaggagtcctacattccaaccctcatttgcagagt

SEQ ID NO: 812568 - DNA, 120 bp, Artificial Sequence
  ENSG00000265643_0 (sequence is synthesized)
ttcttatggtagtgaataactctcatgagacctgatggttttataaggggaaacccgtttcgcttggccctcattctctcgtctgctgccatgtaaaatgtgcctttcgctgtctgccat

SEQ ID NO: 812569 - DNA, 120 bp, Artificial Sequence
  ENSG00000265643_1 (sequence is synthesized)
catggctcactgcagcctcaaccttccaggctcaagcaattctcccacactaccctcctgaggagctggggtcacaggcaagcatgaggaaagcctgcatgcctgctaaggcactgttgt

SEQ ID NO: 812570 - DNA, 120 bp, Artificial Sequence
  ENSG00000265643_2 (sequence is synthesized)
ttgtaattaagcaagtctatcctgcaaacttactatcacaatctggagggaacactttcttgagttttgaatggcacctgcagttcactgagcagaatggagttacaaggactctagtgt

SEQ ID NO: 812571 - DNA, 120 bp, Artificial Sequence
  ENSG00000269883_0 (sequence is synthesized)
aaacaaccctcatggcgccgaaatcctttccatgccgacaagcccgccctgggcgcacgagtggatgcttggccagcctttcctgggatcgaccccgccgccgtgctcagccctcaccac

SEQ ID NO: 812572 - DNA, 120 bp, Artificial Sequence
  ENSG00000269883_1 (sequence is synthesized)
gtccccatcccaccccacgcctcacagccggggttcctggccagcttcggaagccaccgagaaataggattccgtgcgcccgagagaacttttccaggggctaaggaatcggccagccgg

SEQ ID NO: 812573 - DNA, 120 bp, Artificial Sequence
  ENSG00000269883_2 (sequence is synthesized)
aggcgcgagaaaagttctgggaaggcggttgcacctaggatgggtggatgccacggggcctccgtccaggctgtcccgtccgcacgggtcgactggtcaccttggaatcccctttgcagg

SEQ ID NO: 812574 - DNA, 120 bp, Artificial Sequence
  ENSG00000269883_3 (sequence is synthesized)
tttgcaggtcccagcgccccccgggaacccgcagcctccgcggagagcgtgggcctctccctaccgctggggcgcagcgcagtgcacgcctgagggtggtcgccgggggctgggcacgcc

SEQ ID NO: 812575 - DNA, 120 bp, Artificial Sequence
  ENSG00000269883_4 (sequence is synthesized)
cccaccccagagagccctcggcctggggctccggcgaagcaagtgccttcccggcgccggtcgccaggggggcgcgggagcagccagatgcgccgcagcgctgggaaggcggcgaaggac

SEQ ID NO: 812576 - DNA, 120 bp, Artificial Sequence
  ENSG00000269883_5 (sequence is synthesized)
ccgcagcgctgggaaggcggcgaaggacaggggctaggggagtgaggggcgctcggcaggcagcctcagccctggccctgcgcgggagaagggacagcagagaccgcccgtggggccccg

SEQ ID NO: 812577 - DNA, 120 bp, Artificial Sequence
  ENSG00000269883_6 (sequence is synthesized)
gggtgtagggagctgtccgttcagccctggcgcccgcctcgcccgcggcagagggcggcacagccggagccttggaaagaccggcagcgccggcagccgcgggcttctcggccactgcct

SEQ ID NO: 812578 - DNA, 120 bp, Artificial Sequence
  ENSG00000269883_7 (sequence is synthesized)
cccggacgcacgggaagccgccccccgcgccgccgccgccgcactgccgccgtcgcagaggggtgaggaaatcaactcaccgagctctggtcgccgacaagaggagccccggacgccggc

SEQ ID NO: 812579 - DNA, 120 bp, Artificial Sequence
  ENSG00000269883_8 (sequence is synthesized)
tctcgccctgcccgaggctgcaaagttgtggactcggcccggctggctcgcagcctgcgcttcgcttcgggaactgggcaagtagcggggatgtggggaggagggagcgggcagctgctg

SEQ ID NO: 812580 - DNA, 120 bp, Artificial Sequence
  ENSG00000269883_9 (sequence is synthesized)
gaagcggcggggatggcagctgggcaccccccagccccgccacccctccctccgctcctgggggcggtgctctggccgccagtctcagcatcgtggacttgccccctcctcccctctcga

SEQ ID NO: 812581 - DNA, 120 bp, Artificial Sequence
  ENSG00000269883_10 (sequence is synthesized)
ttccccttgagcgggctggggcgccctgcctggtttcagcgcccgttccagctgggagattgggattcagccctgatgtggattctccagccatcatcctgcccttccctctcggctagg

SEQ ID NO: 812582 - DNA, 120 bp, Artificial Sequence
  ENSG00000269883_11 (sequence is synthesized)
tcccacgaccttccctgctctccactcggactgaaggaaccctgggggcttgagaggtcagcttgccagggcaacacccatgaagatcagcgtcatctcctcggaagggctgtgtacaga

SEQ ID NO: 812583 - DNA, 120 bp, Artificial Sequence
  ENSG00000269883_12 (sequence is synthesized)
gggttgggagttgggactctggagcctgtctacctgggtttgaatattcaccattcactactgtgagatctcagattccagtttcttcgtctgtaaattccagtgtgatcttagattcca

SEQ ID NO: 812584 - DNA, 120 bp, Artificial Sequence
  ENSG00000269883_13 (sequence is synthesized)
gtttcctcatctgtgaaatagagatatgagggttaaatgacaatctatgtaaaacccttaaacagggcctgcccagggcaagcactgcttgattagatcataattagacactacttatcg

SEQ ID NO: 812585 - DNA, 120 bp, Artificial Sequence
  ENSG00000269883_14 (sequence is synthesized)
ggcccctactaggtagcaggcattgtgctaagcctttagcataagatgcttccttaatcctctcagcctgatctgtgaagctggctgagccccattctggagatgaggaggttgaagctc

SEQ ID NO: 812586 - DNA, 120 bp, Artificial Sequence
  ENSG00000269883_15 (sequence is synthesized)
agagaagctaagtctcatgtctaaggtcatacagccattaagtgacagagcctggacttgaacctggttctagcattaatgctcctgcactcagcctctacacagcccagcatcaccctg

SEQ ID NO: 812587 - DNA, 120 bp, Artificial Sequence
  ENSG00000269883_16 (sequence is synthesized)
ggacccacgggcagctctgatttgagagaaggaaagacaatgggagtttatccagacacagagcttgaacttggagcttcttctttgagcctcacccccaccttcttatttctatttcct

SEQ ID NO: 812588 - DNA, 120 bp, Artificial Sequence
  ENSG00000269883_17 (sequence is synthesized)
tccccttccagggctccgctattctaaggtgggtactgtgatgcgccaagagggtagtgacaccaatgtgtatcaaacagtggggggtggggggagcagagccttaaaaacatcaaacac

SEQ ID NO: 812589 - DNA, 120 bp, Artificial Sequence
  ENSG00000269883_18 (sequence is synthesized)
tgcaggaatattggtgccatcaccatcctcaatttcctgggtgtcgcagctcacctacctgccctgttcctctcctctcggtgatggcatacttaataaataaacatttattgctttctc

SEQ ID NO: 812590 - DNA, 120 bp, Artificial Sequence
  ENSG00000233835_0 (sequence is synthesized)
gctaaattcttaaggattctttgtttgttgaatagcatcaagtagcatctcaaggaacaccctttgggaaatgctgctgagagaagctaagaacttgcttcacgatcgtcaagcactgaa

SEQ ID NO: 812591 - DNA, 120 bp, Artificial Sequence
  ENSG00000233835_1 (sequence is synthesized)
tcttcacatgtaaaacaaaatgataatatatcctccatggacagccatagagagaagattcattacaaaatgcatttacggtaggaacagaagttgacaataaaagttaatattgtcaca

SEQ ID NO: 812592 - DNA, 120 bp, Artificial Sequence
  ENSG00000269887_0 (sequence is synthesized)
aaatccggcctgtagttgtatattcgtatagctatatgttggtaggatggacctacatggtttaatgaaagtggaaggaaaatctattttcagtcagatcctatagatatttcataagga

SEQ ID NO: 812593 - DNA, 120 bp, Artificial Sequence
  ENSG00000269887_1 (sequence is synthesized)
attagaacttagttacttaaaaattatattctagaggtttataaagcaaacatttattatattcatttacctttttaaaaaattttaagcaaagcccatactcctgttttggggatatct

SEQ ID NO: 812594 - DNA, 120 bp, Artificial Sequence
  ENSG00000269887_2 (sequence is synthesized)
agtatattgtgtgatgctgaggtttggtgtacagataaagcgatctgattttatactcttatgcagtggatctaccactactacaatgactgctacagggctgctaatgtttctgaatat

SEQ ID NO: 812595 - DNA, 120 bp, Artificial Sequence
  ENSG00000269887_3 (sequence is synthesized)
tgtctaagtacttctagaaataggaaagaagatcacagaatcataaattcttctatcttaaaggagccttcaggataattattattttacaaaaaaatgcagctaggctattgtatacat

SEQ ID NO: 812596 - DNA, 120 bp, Artificial Sequence
  ENSG00000269887_4 (sequence is synthesized)
caaacaggctgttttttctcatggtgaactgaatctgcttcagtggaactttccccattctgtctgaggtctccctttggacacaatgtagaataaatctattgctctcctgcattcaaa

SEQ ID NO: 812597 - DNA, 120 bp, Artificial Sequence
  ENSG00000269886_0 (sequence is synthesized)
tcactgtcacccatcgctgagctatccagatccttctggggtggcagcagggtggggcctgagcgatggaccatcttcttctccacccagcccctccggcgcaagagacaccggatcacc

SEQ ID NO: 812598 - DNA, 120 bp, Artificial Sequence
  ENSG00000269886_1 (sequence is synthesized)
tataaaggtgaaccagacagttatggactctgccatcaggaaatttttatattccattaggagaaataaacagactataaataagtagagaaataaatatgcatggtaataatgataata

SEQ ID NO: 812599 - DNA, 120 bp, Artificial Sequence
  ENSG00000269889_0 (sequence is synthesized)
gcaggcagggggtcggcagggccccaggcggaaggactcgctggacgcaccgtgctcctcatgttaccgcccgctattgcttctcgcaggaattgggccaccccaacacctggaatcccg

SEQ ID NO: 812600 - DNA, 120 bp, Artificial Sequence
  ENSG00000269889_1 (sequence is synthesized)
gaatcccagtatcaggaaaacccgactttcgcatcaaaagattcaactctaacccttcacaagtgcatttctcaaatacccagaagagctataacagcagttttattttccaaagccacg

SEQ ID NO: 812601 - DNA, 120 bp, Artificial Sequence
  ENSG00000269889_2 (sequence is synthesized)
gaattctggttaactggtggcggttccggggagttctagaattcgcccttgaaactggggaaaaatgagacttaagaggagaaagttgttgcaggaagggaggcagtgtctgcttctgaa

SEQ ID NO: 812602 - DNA, 120 bp, Artificial Sequence
  ENSG00000269889_3 (sequence is synthesized)
ttaaacttctaaaataaggagaaaaatgctggaatttaaatgagttttaagctgaaggacgtgcctgtctttttgcaggaaaagtgaagtttatcaggtcatatgaaattcaagtttgga

SEQ ID NO: 812603 - DNA, 120 bp, Artificial Sequence
  ENSG00000269889_4 (sequence is synthesized)
aaaatttgaaagtacattgcatgtcaataaacgcatcttggtgtctgattctgcatacatctgtagagaatttgaaaacaagcagtcaatttagaacttctgcttggtcttcggaagcaa

SEQ ID NO: 812604 - DNA, 120 bp, Artificial Sequence
  ENSG00000269889_5 (sequence is synthesized)
aaagaggaaattcaaaagtaattttacacgtccttccaccagaagctgaaaggatggctttttcgcggctgaataacgaaagccccctgcttcgccccggactctgagcagctcaacctg

SEQ ID NO: 812605 - DNA, 120 bp, Artificial Sequence
  ENSG00000269889_6 (sequence is synthesized)
cggaaaggatgtgtaataaaacgcctttccagggagacaaaaaaaaaaaaggccacccaaaggaagggcaactcgggagtgcctggtttctactgcggtacccgggcactttggaagaaa

SEQ ID NO: 812606 - DNA, 120 bp, Artificial Sequence
  ENSG00000269888_0 (sequence is synthesized)
cccaattttgttggcaacatccaaagcatcgtaatcaggagccagtcgaacatatgccttcttctctccatcaggtgggtgacgtgcggatcttcttctttttgtggctgtggacacctt

SEQ ID NO: 812607 - DNA, 60 bp, Artificial Sequence
  ENSG00000269888_1 (sequence is synthesized)
gctttaggaggggcaggagcttccttcttcgctttcggcgccatgttgtgaaaagggtcc

SEQ ID NO: 812608 - DNA, 120 bp, Artificial Sequence
  ENSG00000265393_0 (sequence is synthesized)
cccagggaaaaagggacatgtggccaacagccctgattctccaacctcgtctccaactgggcagggcgtgcttacctgtgggccagggcctggagctgggcagggcccccagggcagttc

SEQ ID NO: 812609 - DNA, 120 bp, Artificial Sequence
  ENSG00000265393_1 (sequence is synthesized)
agggctcagcggacgcggggacagcccctccacacccctgtggcttaccccaggttcggaggagcgcagcgatccgctctgtgtcctcgcgccggttgcagtaaatgataatggaatcga

SEQ ID NO: 812610 - DNA, 120 bp, Artificial Sequence
  ENSG00000265399_0 (sequence is synthesized)
aaatctatgctgcttgctgaggaatgagattccacatttgccaagattggggtttctcatggactattcctaaaacatctggcagacgagatgagtccacgttgtttctgactaaatgta

SEQ ID NO: 812611 - DNA, 120 bp, Artificial Sequence
  ENSG00000265399_1 (sequence is synthesized)
acagtaggctgtgcttggctctctttggtttggggctcaacttggatgaataatcatctaacagcagactggaatctgaaaagaaaaccaagatccaaatatgtatataacagagggaag

SEQ ID NO: 812612 - DNA, 120 bp, Artificial Sequence
  ENSG00000265399_2 (sequence is synthesized)
aaatatgtatataacagagggaaggccacgtggagacacagggagaagacagccatccatgagccgagaagagacctgagaagaaaccacccagctgacaccttgatcttggacttccag

SEQ ID NO: 812613 - DNA, 120 bp, Artificial Sequence
  ENSG00000265399_3 (sequence is synthesized)
gatacatctatgaacaaagaagacagaaaatcctaccagaattgactgaaaagttgagtgaggggcaggaaagaaaaagaggtggcaaaggtagcaacaactatgttctgctccggaaag

SEQ ID NO: 812614 - DNA, 120 bp, Artificial Sequence
  ENSG00000265399_4 (sequence is synthesized)
cataagccacagcccccaccacagtgcttggcaatgcggttgctgtttaatacctgctgactgagtggaaggaagacaaaacaattacctgactcaaagagaagcaaaagaatgctgcct

SEQ ID NO: 812615 - DNA, 120 bp, Artificial Sequence
  ENSG00000265399_5 (sequence is synthesized)
tcaagctgaggggaagactgaactgtccgtttctttctgctctaaagtgtcctctggagaggacgctggcggagctggtgctctcgtggtggcaggccaccaccctgtggaggtgtccat

SEQ ID NO: 812616 - DNA, 120 bp, Artificial Sequence
  ENSG00000265399_6 (sequence is synthesized)
gcattgcaagtgctcgcaagctccaggaacaaacgcatccgcgcagccgtctggggtttgtcccgtcgctgccagccctctcgctgagtccccgccctcgccgataagagcccacttagg

SEQ ID NO: 812617 - DNA, 120 bp, Artificial Sequence
  ENSG00000265399_7 (sequence is synthesized)
agtaccccaagtcattctttaccatcaaggaagtttgggaaacagatcacttttgtttcaatcacctgtggaactggagcagttatttttttccccagcgactttaccacgaagttaact

SEQ ID NO: 812618 - DNA, 120 bp, Artificial Sequence
  ENSG00000265399_8 (sequence is synthesized)
ttggaatacgttagtggttaatacacggaacgttcccgagatccctcaagaaagaagctacgaatacttagaagatactattccgcggcgtttacagcaacactgtccgttccagaagga

SEQ ID NO: 812619 - DNA, 120 bp, Artificial Sequence
  ENSG00000265399_9 (sequence is synthesized)
ttcaagtggcggcctgctttgaaggcgaagaccacagggcaacccaaacttcagaagggttctggccacgggagccacactggtcactgtcccctagtgctgggatgacggctcgagtgt

SEQ ID NO: 812620 - DNA, 120 bp, Artificial Sequence
  ENSG00000265399_10 (sequence is synthesized)
tagaggatcccactctctcctctggtaggtgaggtcagagagctgagggggccagaacaagtcttccttatcggattctgggcggaaaaagataaagtcggggaggactttctcttttta

SEQ ID NO: 812621 - DNA, 120 bp, Artificial Sequence
  ENSG00000265399_11 (sequence is synthesized)
ataagattcatcgttacgaattgttctaggcaagcagacctcaggagaaataggcccaagttttgattcctgttttcaccaagtcgcaagtcctaatcgtagcaagaggtgcggggaaga

SEQ ID NO: 812622 - DNA, 120 bp, Artificial Sequence
  ENSG00000265399_12 (sequence is synthesized)
gtcgccttccttcctgcatagtgggatccaagtcaggctgtccttgttagccagggtcaaaggggctctgccagggaaaaacgacggcaaatgtttttcaagaggaagtctccagccact

SEQ ID NO: 812623 - DNA, 120 bp, Artificial Sequence
  ENSG00000265399_13 (sequence is synthesized)
tgtgacctgggaaatccgtctgggccaaaaagatagtggaggcttggctgagggccccagggacacacgtttcctcccgtatggagggggcgggactcttaataaaattacactgcacac

SEQ ID NO: 812624 - DNA, 120 bp, Artificial Sequence
  ENSG00000230918_0 (sequence is synthesized)
aacaacaactgggaagccttctcagctacacttcggggcactggtccaaccccacgcaaaatccctcgtttcccttagcgtgcagaaccacgggcacggtgatgatggtgacaagcgcag

SEQ ID NO: 812625 - DNA, 120 bp, Artificial Sequence
  ENSG00000230918_1 (sequence is synthesized)
cagcacccagcagtcccagaagaaccttccacggtgtctgcaagccgagcagatcaagtccaattagagggaagcgtgtggccccagtttccgtaggagggtcggggctgctccagaggc

SEQ ID NO: 812626 - DNA, 120 bp, Artificial Sequence
  ENSG00000230918_2 (sequence is synthesized)
ataacttggccaagccattcagctaggaagttgtagatcctaaattaagagttcaaggtcttaatggctactctatgcggcctctcatagtcttttcaagggttttggagaagaataaaa

SEQ ID NO: 812627 - DNA, 120 bp, Artificial Sequence
  ENSG00000230918_3 (sequence is synthesized)
gatcaggtatggcttctccctcccccagctctctattgttccctaaaggattattcattcgttcattcattcctacatcctcccatttattccagtcatccacagatgtttgagtggtta

SEQ ID NO: 812628 - DNA, 120 bp, Artificial Sequence
  ENSG00000230918_4 (sequence is synthesized)
caatgtgccagcctcccttctaggtactggagataaagtgggacaagagaggtgaggtctggacccttggcactttcacgataaaatacacaggtaaacatttgcctttagggccccctg

SEQ ID NO: 812629 - DNA, 120 bp, Artificial Sequence
  ENSG00000230918_5 (sequence is synthesized)
agagttcaaggtcttaatggctactctatgcggcctctcatagtcttttcaagggttttggagaagaataaaagatcagatgagtcaatggtgttactggaccctgtgaactgatgctgt

SEQ ID NO: 812630 - DNA, 120 bp, Artificial Sequence
  ENSG00000230918_6 (sequence is synthesized)
gaagagaggccatttaacacggactacggggaatggtgccacagggggctcagtgctgcccttcactctcagcattttgctcactcagcattgatgacaggatgtcccaaaagtaacaaa

SEQ ID NO: 812631 - DNA, 120 bp, Artificial Sequence
  ENSG00000230918_7 (sequence is synthesized)
agatgggagccagtcctctcatagctgtttcttcaatcatcccatcaacagctcttcatttattgaactaccttccttttccaaagaggtaatgctgagatcagtcagaaaggctttctg

SEQ ID NO: 812632 - DNA, 120 bp, Artificial Sequence
  ENSG00000230918_8 (sequence is synthesized)
tgtatcaatgaagcgctcaatgcagttcacaaaacaggcctcagcccgactgtccaactttggcccaggcttgtccatgcacttctcccaacaaagttcagtcatctggtgcaccagctg

SEQ ID NO: 812633 - DNA, 120 bp, Artificial Sequence
  ENSG00000230918_9 (sequence is synthesized)
ctggaagcgctgcttttgagtctctacctcaatgaaaatgctgcaactgcgggtccactgcacccaaacccgccgcagaggaagagcaggaggaatccatcccaggacaaccatgcttgc

SEQ ID NO: 812634 - DNA, 120 bp, Artificial Sequence
  ENSG00000230918_10 (sequence is synthesized)
agagacgaactccgcaccaaccttcacgtgtctccacgacctagttaatcaatttaaaatgaggtcactagggtgggccccaatccaatatgactgataactttataaaaaggagagatt

SEQ ID NO: 812635 - DNA, 120 bp, Artificial Sequence
  ENSG00000230918_11 (sequence is synthesized)
tggatacagaaagagacagagtgaaaaccatgtgaagaaacataggaaaagatggcagctacaagccaaggagaagcttgcagtgtgtattcatctgttctcatgctgttaataaagaca

SEQ ID NO: 812636 - DNA, 120 bp, Artificial Sequence
  ENSG00000230910_0 (sequence is synthesized)
agccagggccgcggttcgcctgcacgtcacggctactcaaacccaagcacgtcccgaaagcggtattttctgcgtctgggaggtttttgcatcctcagttcccaccgctggggctggcgg

SEQ ID NO: 812637 - DNA, 120 bp, Artificial Sequence
  ENSG00000230910_1 (sequence is synthesized)
cgaccaactaagtcccactttatcattaatgatgacaataactaaggctgccaggaacagcacatctgctgagctttatcaacaccagattctctcattttgccttctggatctccatgc

SEQ ID NO: 812638 - DNA, 120 bp, Artificial Sequence
  ENSG00000230910_2 (sequence is synthesized)
ttttttataccaacaaacaagaggaagaatattctctacccacttccttgactgaagcctgctcttttatgaagacatggcatctcttccaaccgtgtcaaacagatgcaatttatatgt

SEQ ID NO: 812639 - DNA, 120 bp, Artificial Sequence
  ENSG00000230910_3 (sequence is synthesized)
tgattaaatgggtcagtggcagaatcagtatccttagtctcccctttggtttcaaatatgtactccttatttcagtttcatgctcacctttctgtagagaccaaggcatctgcctttgca

SEQ ID NO: 812640 - DNA, 120 bp, Artificial Sequence
  ENSG00000230910_4 (sequence is synthesized)
gctttacctcttcctccaggttatagtttccattcatggaatcttttagctgctggctggcagttttcctgtctacctgacttccattcctcttctcatgacttcagctcccatgcagat

SEQ ID NO: 812641 - DNA, 120 bp, Artificial Sequence
  ENSG00000230910_5 (sequence is synthesized)
gtcttatcctgacatactagcttctccattctatttctgtgtgtgtgtgtctgtgtgtttccctactagttcatccacatttccctatggtcttttttttttatgttttatttttgcata

SEQ ID NO: 812642 - DNA, 120 bp, Artificial Sequence
  ENSG00000230910_6 (sequence is synthesized)
ggaaggcgactctgaagggtgggaagtgaatgctggacttgatcgtctttctctttctttcagcgcagacctgtcgcagccagagagctgtcatttcagtaccgggattcagaattgatc

SEQ ID NO: 812643 - DNA, 120 bp, Artificial Sequence
  ENSG00000230910_7 (sequence is synthesized)
cagtccgcagcggagggggcacatcccagctaccgagctgctgagtgtctctggctggaacaatagtatttttttctctgcgaggctgcaattaacatcttatttgttctggctccatac

SEQ ID NO: 812644 - DNA, 120 bp, Artificial Sequence
  ENSG00000230910_8 (sequence is synthesized)
aggctttgtcaggatcgcggtgcggcgaccgacgttgggctcttgcattgctttgtgcttggcaatggaatcatggtttcggggtctaaacttttgtttcgttttgtagtcttaatgtat

SEQ ID NO: 812645 - DNA, 120 bp, Artificial Sequence
  ENSG00000230910_9 (sequence is synthesized)
ctgattctttttcaagtttccctagtaacaggtttggggacggggtgggaagaagcgagaaaaggggtgaagagaaaaaaccagattatatagaaaggaaaaagggaaaagggatgtttc

SEQ ID NO: 812646 - DNA, 120 bp, Artificial Sequence
  ENSG00000230910_10 (sequence is synthesized)
cccaccttttaatctaactatctatctgtctgtctatctatcatcatagatagtcattttgcctcctggacagttggctgacgaagtgtctgataaaccagcttcagatacatgctacaa

SEQ ID NO: 812647 - DNA, 120 bp, Artificial Sequence
  ENSG00000230910_11 (sequence is synthesized)
aaggtcattcgcctcctgattatgtttctacttgtaaacgcagttggtggtttgcaaaacaagtgctaaaatagtgcagtgatgtggtgggaggaaaccataatgggtaattcatataaa

SEQ ID NO: 812648 - DNA, 120 bp, Artificial Sequence
  ENSG00000230910_12 (sequence is synthesized)
gtgctggaatcttcgtaagggtgagtttctcgagcggcaggtgaagttgaataaagcaattttccatcatttgttcccctcactcttgcatttttttcctccgcttgtttctctcccctg

SEQ ID NO: 812649 - DNA, 120 bp, Artificial Sequence
  ENSG00000230910_13 (sequence is synthesized)
tgtttgaaatattaaaattggtcctttacttcttaatgcatattaatagagtgaccctcttcaaggctttcccgtcttaaacgaatgcctgggataaacactgtaaggggaaacagttaa

SEQ ID NO: 812650 - DNA, 120 bp, Artificial Sequence
  ENSG00000230910_14 (sequence is synthesized)
taattccccagcaggctttaactattttcccagtaacaaatcaccggcaagagagcagcctgggtggcattttggttttgtgtcattttggttctttacaatattttttattcatttaag

SEQ ID NO: 812651 - DNA, 120 bp, Artificial Sequence
  ENSG00000230910_15 (sequence is synthesized)
gaaatgttaaaaggaaataattagggtttatgtccagaacaaattttgaaacaccgtttaagcaacacattttcttttaaaaacaaagaacattgagcaacacaaaggagaaaaacattt

SEQ ID NO: 812652 - DNA, 120 bp, Artificial Sequence
  ENSG00000230910_16 (sequence is synthesized)
tatttatttcaacttccctagagatcgtaattatgattttcgcaaggcaatttggtcagttctgttactttatccagaggaaaaaaaagcatgacagatgtggaataaaaacggaggaaa

SEQ ID NO: 812653 - DNA, 120 bp, Artificial Sequence
  ENSG00000230910_17 (sequence is synthesized)
aaatgctttggatggtttatacataaaaaggaaagaatgtaatgtgaggttcagttatacctctattttgcatctagtgatttctcatattatcttgtaacactgattttgatgtttctt

SEQ ID NO: 812654 - DNA, 120 bp, Artificial Sequence
  ENSG00000230910_18 (sequence is synthesized)
agaaattcttaaagtcatgacacagtggcataagaataacagctgaaagggacaatttaaaagcctaaatcctaaatggaaaggttcacttactcccaggatcatttatattcaagtaga

SEQ ID NO: 812655 - DNA, 120 bp, Artificial Sequence
  ENSG00000230910_19 (sequence is synthesized)
agtcagggcagggtcagaaaagaaagccacccttaataaagcgcttcacccttcacattgtttctcataaccttcataaattgcaggctactgagctggcctgatgatgatccttctgag

SEQ ID NO: 812656 - DNA, 120 bp, Artificial Sequence
  ENSG00000230910_20 (sequence is synthesized)
atatatttatagcagatgatttgtggatgataactacgccaagcaagacactgtctccagtaaccccaggctcgtctgacttcctcaggggattataataaagaatcacaaaaagaaccc

SEQ ID NO: 812657 - DNA, 120 bp, Artificial Sequence
  ENSG00000230910_21 (sequence is synthesized)
tatatggacagtctggtctctggacactaacaacagcacaatccaaaggcaaagaaaggaggaaccaccttgtttcatgtctgcaagctgctccatatgaaagcattgctgacatgttga

SEQ ID NO: 812658 - DNA, 120 bp, Artificial Sequence
  ENSG00000230910_22 (sequence is synthesized)
cccaacagcaaaaagagagcagcagtttacacaccctcagctctctgtcctttcctttctattgatgttggtccacttttatgactgaatacatattaaaatcaccatttcaaattataa

SEQ ID NO: 812659 - DNA, 120 bp, Artificial Sequence
  ENSG00000230910_23 (sequence is synthesized)
atgcacgcattatttgtaagtacacatacacgtgtgtgtatatatatgtatatgatatgtatatgtgtatttcagttgatacacatatatttgcttgggaagtttcactacattgctttg

SEQ ID NO: 812660 - DNA, 120 bp, Artificial Sequence
  ENSG00000230910_24 (sequence is synthesized)
tatttctcttttataaggtaatgcatttaattccaaaactaccacattaattgtataaattgattattacataagtttccttgatgatttacagaagaactattgagaggtcagtgttag

SEQ ID NO: 812661 - DNA, 120 bp, Artificial Sequence
  ENSG00000230910_25 (sequence is synthesized)
cacatcaaaatatagtctggtatggcattttaaattgacccaggtatctaatattaaagcctttcaaatttatctctcctgctattattttattaagattactttggaatgatgaggtta

SEQ ID NO: 812662 - DNA, 120 bp, Artificial Sequence
  ENSG00000230910_26 (sequence is synthesized)
taagtgtgatttatttctgtttcatctttttgtctgtatgtgctaagtttagtccctccactttgagaataaccctataatccaggatcattgcttaaaattcagtatcatttgcagaat

SEQ ID NO: 812663 - DNA, 120 bp, Artificial Sequence
  ENSG00000230910_27 (sequence is synthesized)
tctcatactcaaataagaatgtttctagaatatgtttactcaattttagaaagtattttctctttccttctttctgtcatagtttttctgatattactgtattaccacattctaaactct

SEQ ID NO: 812664 - DNA, 120 bp, Artificial Sequence
  ENSG00000230910_28 (sequence is synthesized)
gtgacttgttattttcagtaaggctttaagaagcatggataggtttgtaggttatttcttgttaaatatgccttaattttttagtatttagtattagtatttagtttttagtatttagta

SEQ ID NO: 812665 - DNA, 120 bp, Artificial Sequence
  ENSG00000230910_29 (sequence is synthesized)
tttagtatctcccatatatatatatgcacacatatatatatacacatatatatgtacacacatacatatatacacacacatatatatacacacacatacacaaagctttggaatgttaat

SEQ ID NO: 812666 - DNA, 120 bp, Artificial Sequence
  ENSG00000230910_30 (sequence is synthesized)
aagattacattgttatgagaacttatccttaatattagcatatttactataaagttaaacaacttcttctcctctgtctcctgtttattatcattattttattattattaaaaaaggaag

SEQ ID NO: 812667 - DNA, 120 bp, Artificial Sequence
  ENSG00000230910_31 (sequence is synthesized)
tctctcagaaaccaagctgtatatcctctagtctctatgtaaaaaaacaaattggtcattttctacttggacatcccagaatagaaagtacattgaagtactaaaaaataaagggataga

SEQ ID NO: 812668 - DNA, 120 bp, Artificial Sequence
  ENSG00000230910_32 (sequence is synthesized)
cttggggttaagggagatgtcatagaacagctatcctgggttagttcaagtgtagtcctattccatgctaggcaaagtcaaggttacaaaaatcccagttgcatcaggtttccatttttt

SEQ ID NO: 812669 - DNA, 120 bp, Artificial Sequence
  ENSG00000230910_33 (sequence is synthesized)
atcattatttccctatacaacgatacaagttaaaaaaaagtcggtaaatacttttggccatcaattttcaagatttcattggtgatattaaggaaatgctgtaagtaggtaacacataat

SEQ ID NO: 812670 - DNA, 120 bp, Artificial Sequence
  ENSG00000230910_34 (sequence is synthesized)
gtcatatttgtgtgctgtagaagtatcttggaaaatatggactttaaaacctcaaaatatgggtttgcaatcgaacatacattcacccccaaatttgacctttttcagctagttattttc

SEQ ID NO: 812671 - DNA, 120 bp, Artificial Sequence
  ENSG00000230910_35 (sequence is synthesized)
tcatataaagttactatacttacaccattatctttaatccctgaaatttcaattatactagaaatcaagattcttcatttttactcacgaaactgacactaagtatatacctcattaagg

SEQ ID NO: 812672 - DNA, 120 bp, Artificial Sequence
  ENSG00000230910_36 (sequence is synthesized)
acaagaagctatgaattctctggacttcagttatctcacagaaaagagcttgattgaataatgtctaaggctcttcctgacatagtctaaataacagaaggtgtctcacaagaaatggaa

SEQ ID NO: 812673 - DNA, 120 bp, Artificial Sequence
  ENSG00000230910_37 (sequence is synthesized)
gcagtgagagaaaaatgcaattaaatcctagactagaaagaatcacaattttcccactcacaggttggaaatgcctctctattctatcacaattttgaaaacctccatagttttactagc

SEQ ID NO: 812674 - DNA, 120 bp, Artificial Sequence
  ENSG00000230910_38 (sequence is synthesized)
cagaatcaagcatttgtttgccagtaagccaggtgccatgttgtcatacagccctaaatagagaagtccatgtgagtttggccttctgaggcctgtcaaaagacacatgagtgagctcag

SEQ ID NO: 812675 - DNA, 120 bp, Artificial Sequence
  ENSG00000230910_39 (sequence is synthesized)
aagtggaagcttcctcattcaagtcttgagaggactgcagcccagccaacatcctggttgccactacatgacaggcttgagccagaatcaagcagctaagctgcttctggattcctgacc

SEQ ID NO: 812676 - DNA, 120 bp, Artificial Sequence
  ENSG00000230910_40 (sequence is synthesized)
tacagacactataaatcaggaatgtttggcttccaactgctaaatttggggataatttgttatgcaaatataggtaactaatgtatatcccatggattccacgcccattgttataataat

SEQ ID NO: 812677 - DNA, 120 bp, Artificial Sequence
  ENSG00000230910_41 (sequence is synthesized)
ttacttacaacagtcttcagctatttaacatttttctggctggatcaccacgtttactgtgatgaacaactgcccttcctgatccaggacccatgcagcagagcattactgaagaaattc

SEQ ID NO: 812678 - DNA, 120 bp, Artificial Sequence
  ENSG00000230910_42 (sequence is synthesized)
acaccctcaggcagttagatgtccctgtaaagttatagtcaccaggttctcatgatctcaccacacagactgttacttataagctccctctcttattacaccctatgaatattttgtaac

SEQ ID NO: 812679 - DNA, 120 bp, Artificial Sequence
  ENSG00000230910_43 (sequence is synthesized)
ttttctctgattattaaaaatgcttctcctcaactcttgaatgataagtgataaccttttttcattcattatttataaaacagatgtgattagatggaaaatatcttatattcattaaac

SEQ ID NO: 812680 - DNA, 120 bp, Artificial Sequence
  ENSG00000230910_44 (sequence is synthesized)
atttaaaatttaatgtttcaattctccaattacaaccttctgcttttataaactcacctcctaagtaaccacatggaatcaagtctttcacaaaattcaggtcttttttttattattagt

SEQ ID NO: 812681 - DNA, 120 bp, Artificial Sequence
  ENSG00000230910_45 (sequence is synthesized)
gattcccaccaatttctgctcttatcttcactttcctccttataccctgtggtaagcagcctctaacatggacccaaatgatccctacttcctgatatgtgtgtccttgtgtaattgtct

SEQ ID NO: 812682 - DNA, 120 bp, Artificial Sequence
  ENSG00000230910_46 (sequence is synthesized)
ctctcttgaatgtgggctagatttagaaatttgcttttatcaaacagaatatggtagtagcaatgggatgttaagatataaaatgactgtgttttccatcttgggagctcctttactctt

SEQ ID NO: 812683 - DNA, 120 bp, Artificial Sequence
  ENSG00000230910_47 (sequence is synthesized)
agaggctcggctcgcgcggcgcggccgctgcgacttcctggagttctgcctgccgggggcgcgggcggacctgtcgcagccagagagctgtcatttcagtaccgggattcagaattgatc

SEQ ID NO: 812684 - DNA, 120 bp, Artificial Sequence
  ENSG00000230910_48 (sequence is synthesized)
ggtgcgccccgccgcccgccagaggctcggctcgcgcggcgcggccgctgcgacttcctggagttctgcctgccgggggcgcgggcggcgcagacctgtcgcagccagagagctgtcatt

SEQ ID NO: 812685 - DNA, 77 bp, Artificial Sequence
  ENSG00000230912_0 (sequence is synthesized)
gtgaagacatggccagtctgcatagctagctctgtaggaaaaggtcacagaataaagtagaagtcaaattggatgat

SEQ ID NO: 812686 - DNA, 120 bp, Artificial Sequence
  ENSG00000230912_1 (sequence is synthesized)
tggccaacatgagcaagactctgtctcaaaaataaattaaaaaaataaataaataaatgagtaaagctatgcttatatttcctttccagattgataacagtgctcctcacttgtcaccag

SEQ ID NO: 812687 - DNA, 120 bp, Artificial Sequence
  ENSG00000230912_2 (sequence is synthesized)
tgtcacttgtcaacagtgcacctcatatgtcacgttacctgttctgttatggaaggtgacgtgaggtgtcctgaaaagggggcaggtccacgacatggcggagctgacaacaacaccccc

SEQ ID NO: 812688 - DNA, 120 bp, Artificial Sequence
  ENSG00000188511_0 (sequence is synthesized)
gaactgcgcaggaggctccaatgcctgatggtctgtccctgtctcccatcaccctcagatgggatcctctggttgaaggaaaacaagctcagggctgccactgattctacatgatgccaa

SEQ ID NO: 812689 - DNA, 120 bp, Artificial Sequence
  ENSG00000188511_1 (sequence is synthesized)
ccagcagccccgggcatgatggagacagagatggcagcctctaggcgctggtgacctcctccccctcccttcctgatgtagtgcgggaagatgggtccaggatgggatttccagccccgg

SEQ ID NO: 812690 - DNA, 120 bp, Artificial Sequence
  ENSG00000188511_2 (sequence is synthesized)
ccacacacagagacactctcctgacttttggtgcaagctcctctgcgaactgttgaaccagtgctgcatcacggggtgggtaggactcaagagtgacgccctctgccttcacccaacaca

SEQ ID NO: 812691 - DNA, 120 bp, Artificial Sequence
  ENSG00000188511_3 (sequence is synthesized)
tccttggagtatctccaggttgagaattcatgatccgcttggaatgggtttagatctcggaatgagctgtcatcccggcccagccaggtagctcaggaagctgcaagaccttcctccaag

SEQ ID NO: 812692 - DNA, 120 bp, Artificial Sequence
  ENSG00000188511_4 (sequence is synthesized)
gaacctgctgccaactcgcctggcacagacatcctgacatgacaccactgctcattccccactggcacaggaccggccatctcctccaagcctgagctgcctgtacagcatcccaagctc

SEQ ID NO: 812693 - DNA, 120 bp, Artificial Sequence
  ENSG00000188511_5 (sequence is synthesized)
tgggcgcacctggggcagccgtggcaggaacgccgtgggatctgctgagtcctacgaggctgcagtgggaccgagtgggaaccatggcccatgcagaactgcttctcccttgaagaagaa

SEQ ID NO: 812694 - DNA, 120 bp, Artificial Sequence
  ENSG00000188511_6 (sequence is synthesized)
tgtacagcctgcagaactgtgagtcaaccaaacttccttttaaaataaattacccagtctcagttaggtctttctagcagtgtgagaacggacacgtagagggtgtgagagccagaagac

SEQ ID NO: 812695 - DNA, 120 bp, Artificial Sequence
  ENSG00000188511_7 (sequence is synthesized)
cagaagactttaaggagagggacgagctggggcctggatgcccggggaggtggacctggaccaggacaggtgtcagcgggcagagatggggcagaggtgcggctgtctacccgcgaccgg

SEQ ID NO: 812696 - DNA, 120 bp, Artificial Sequence
  ENSG00000188511_8 (sequence is synthesized)
ggccatgccctctcgggctcggttgaggagctgctcttcctccagaatgcgctcggacggaacgttaggaaggccctggtgagtggccccgacctcctcccccaggactggcttctccgg

SEQ ID NO: 812697 - DNA, 120 bp, Artificial Sequence
  ENSG00000188511_9 (sequence is synthesized)
ccctctgccctttcgggcagaacagctcgtggctcttccaggacctggggctccatcttgcagaacagctcgtggctcttccaggacctggggctccatcttgcagaacagctcgtggct

SEQ ID NO: 812698 - DNA, 120 bp, Artificial Sequence
  ENSG00000188511_10 (sequence is synthesized)
cttccaggacctggggctccatcttgctgaggggtgctttcttgagactccttagggacgattctgattttccctggagctgtacaatggcggtttatctttcaaggtcccctgggcctg

SEQ ID NO: 812699 - DNA, 120 bp, Artificial Sequence
  ENSG00000188511_11 (sequence is synthesized)
ggctccgaggcagccactttccctggagcccgtgaaggaggtttggacgccagctgggctgcctgcctgtggcggggcaggaatgagagctggtgcggctggggcccctgggtgcctggt

SEQ ID NO: 812700 - DNA, 120 bp, Artificial Sequence
  ENSG00000188511_12 (sequence is synthesized)
acatgggcgcccaaggattctccccgcaggctcgcagactcacctgatcaccgggagatgtttgagaaggagcctgtgtcaaagtgtaggcatcagatgaaaatttaccttcttgttacc

SEQ ID NO: 812701 - DNA, 120 bp, Artificial Sequence
  ENSG00000188511_13 (sequence is synthesized)
tatgtaaatgggccgggctccacgaagtccttggctgagaacggtgccactgaccgactgagctcccgatcgttctgagagaggcttatgtgcacagtggacgtggaaggctttgatgat

SEQ ID NO: 812702 - DNA, 120 bp, Artificial Sequence
  ENSG00000188511_14 (sequence is synthesized)
gttggtgaaactctctctgacgctgtcagagatggattggggacaatcctgcggggaggtgctgaggagggcagctacgacaactggccccacaccaggaaaagctgggggccgctgagc

SEQ ID NO: 812703 - DNA, 120 bp, Artificial Sequence
  ENSG00000188511_15 (sequence is synthesized)
ccaggccaccaacgggagctgtggacccagcctgacccctggaccgaggtgctttcagggcacaagggggatgcgggagcctgtggctgctgttgcttctgctctcagttcataaacgca

SEQ ID NO: 812704 - DNA, 120 bp, Artificial Sequence
  ENSG00000188511_16 (sequence is synthesized)
cgctgtgcacatcccctgtgcttggcaaggggcctggatagaagggccagtgaggagatgcccatcctccaggcactgtgcctcctcccaaaggtcagcaccccgagcatcactgtgctc

SEQ ID NO: 812705 - DNA, 120 bp, Artificial Sequence
  ENSG00000188511_17 (sequence is synthesized)
tccccacaaaggtcagcagccccgagcatcactgtgccctcccctcaaaggaaaatctccatgatgccagcaggcgtgtccacagaggaaggggcgaagaaaatgtcgaatggacaggcg

SEQ ID NO: 812706 - DNA, 120 bp, Artificial Sequence
  ENSG00000188511_18 (sequence is synthesized)
acctgcatcctgcccagctcggaagaggaggacgtcctgagatttgccacagcctggaggcgattgcgctcgtgacaaaagccagacacagaaagacaaataccacgttctaatttgtgc

SEQ ID NO: 812707 - DNA, 120 bp, Artificial Sequence
  ENSG00000188511_19 (sequence is synthesized)
gccctcccctcaaaggtcagcggccccgagcatcactgtgccctccccacaaaggtcagcaccccgagcatcactgtgccctccccacaaaggtcagcaccccgagcatcactgtgccct

SEQ ID NO: 812708 - DNA, 120 bp, Artificial Sequence
  ENSG00000188511_20 (sequence is synthesized)
ccctcccaaaggtcagcacccggagcatcactgtgccctccccacaaaggtcagcaccccgagcatcactgtgccctccccacaaaggtcaccacagatgtccctgagctctgcagcacg

SEQ ID NO: 812709 - DNA, 120 bp, Artificial Sequence
  ENSG00000188511_21 (sequence is synthesized)
tgggtccaatacagatgtggcaggtttgtctgttggggagtggcctggctggcagctgtggggagaaggccaggacggggcacagcagaggcctcacctgcccagcgggggctctggggc

SEQ ID NO: 812710 - DNA, 120 bp, Artificial Sequence
  ENSG00000188511_22 (sequence is synthesized)
tggggtggctcctcagagattgcccaagtccagagcttgcatcctatgcagccgtcacggggcacagggcccctgggttactggcaggtccgtcagccatagccactgccccatccaggg

SEQ ID NO: 812711 - DNA, 120 bp, Artificial Sequence
  ENSG00000188511_23 (sequence is synthesized)
cctgctggatttgcagaggccagacttgggaactgactgggggaggaccaggcccctctgcacccctcaggatttatgtgggggccggcctctgccgtccacctggggcgtgacaatgca

SEQ ID NO: 812712 - DNA, 120 bp, Artificial Sequence
  ENSG00000188511_24 (sequence is synthesized)
tttgattcactgtctctctgtgtcactgtctctatgtctgtctttatctcactgtgtctaggtttctgtctctcccactgtctcccttgctcagctgggtgggaaagggacattctggaa

SEQ ID NO: 812713 - DNA, 120 bp, Artificial Sequence
  ENSG00000188511_25 (sequence is synthesized)
ggttccacatggtcttccctacaggtcaggacaactgggctattccagtgacgtattggggatctgggaaatgacctctgggagttccgtgagctccgtctggaaggtccccattcattt

SEQ ID NO: 812714 - DNA, 120 bp, Artificial Sequence
  ENSG00000188511_26 (sequence is synthesized)
cccgttccctgctctgctctatgggggcgcggcggggctgcagttccctgatgctggcgtctgctctgtccccagcccactgccctgaccgtttggacagacccttcctccccagcgccc

SEQ ID NO: 812715 - DNA, 120 bp, Artificial Sequence
  ENSG00000188511_27 (sequence is synthesized)
ttcccctctcctgtctggattctgcatctggaacctgccccaggggggaggctgcgtgggatgctgggtttgctgggcagctgcctgtggccccagcctccgtcttgactgccttagtgg

SEQ ID NO: 812716 - DNA, 120 bp, Artificial Sequence
  ENSG00000188511_28 (sequence is synthesized)
ggtgggtggagctgctgcccacctctcctgcccccggggcttgggtgctaccggctttcactcccacctctgtggggcaggccccggtacaccactcagtctgctgctcagccccacaac

SEQ ID NO: 812717 - DNA, 120 bp, Artificial Sequence
  ENSG00000188511_29 (sequence is synthesized)
ggccctgccttccttctgacagtcaggcccccttctgccatcaggggcccggctctgtgatggtgtctggccgccagccctgcccacaccgcccggccaccccagcttccagggaggctg

SEQ ID NO: 812718 - DNA, 120 bp, Artificial Sequence
  ENSG00000188511_30 (sequence is synthesized)
ctgctgcccactcttcccagtggccagtgcagggtctcctgggcccccgggagcaggtcagccggcagtgtccagccttacaccacgcctaccagcacggtcacttctcagggcctttgg

SEQ ID NO: 812719 - DNA, 120 bp, Artificial Sequence
  ENSG00000188511_31 (sequence is synthesized)
tccccggcgtgggctgagctgggctctcgctctcctgcgtcactggcattgcttatgtgctgtgcctgtctcccttgacggctctcagccctgcaggaccatggacgtcccttccctctc

SEQ ID NO: 812720 - DNA, 120 bp, Artificial Sequence
  ENSG00000188511_32 (sequence is synthesized)
cacgcggcagaggagagctggcaggaggaaaagcgggttcgagtcagcagcctttggagacggcagactgagagtgtcacagagaccatctcaagtctgcacgaattccaggctctttta

SEQ ID NO: 812721 - DNA, 120 bp, Artificial Sequence
  ENSG00000188511_33 (sequence is synthesized)
tgttaagggcagggggacggggagggggttgggatcaagaggtgacaggtgaccgcacacatgtgggtgccagcgagggtccgaggaggctggcgatgccttcgtccttggtcaggtcac

SEQ ID NO: 812722 - DNA, 120 bp, Artificial Sequence
  ENSG00000188511_34 (sequence is synthesized)
gagcacctgtgaatccacagcagaacagctgttcacagcttcccctttcatcccggagtgagtttcaaaacctgcatcacgactgcctctgtgtattttctccgtcctctagaagatcct

SEQ ID NO: 812723 - DNA, 120 bp, Artificial Sequence
  ENSG00000188511_35 (sequence is synthesized)
aggctccgtgcaggaatgggtgaaggccccttacacaaaaacaaagtcaggtcctgagttcttttgctgtttctttgctttctcctgcaaagtcactcgaaaggtgactggcggaggtga

SEQ ID NO: 812724 - DNA, 120 bp, Artificial Sequence
  ENSG00000188511_36 (sequence is synthesized)
ggctgcgctaattagcttgattgtggtgacccttccacaaagcacgtgtatgtcggcatattcactgggtcatgcacctcgaatacatatttttacttgtcaaatacatgataataaagg

SEQ ID NO: 812725 - DNA, 120 bp, Artificial Sequence
  ENSG00000188511_37 (sequence is synthesized)
cgtgtgcggtccctccccctcacgttctctcttcctctgctccgccatgatgagaagcgcctgcttccccttccccttccgccatgattgtgtttcctgagacctcccagccacgcttcc

SEQ ID NO: 812726 - DNA, 120 bp, Artificial Sequence
  ENSG00000188511_38 (sequence is synthesized)
tgacaagcttgggacagcagggtggccgtggtgaaggagaacgtgttgggtacatggatttgctgtgacctgacctcaagtgctcttgccacagaacccaggtgctccctgctggaaagc

SEQ ID NO: 812727 - DNA, 120 bp, Artificial Sequence
  ENSG00000188511_39 (sequence is synthesized)
gattgtgtttcctgagacctcccagccacgcttcctgtacagcctgcagaactgtgccacgggtcggagacagcacggaaggagagacaagccttacagagacaacgtccagcgccggac

SEQ ID NO: 812728 - DNA, 120 bp, Artificial Sequence
  ENSG00000188511_40 (sequence is synthesized)
aggacgtgggaggaaggagcgcagacgcggtgctggtgggagaaggagacggtactagcacggtggaaaacctgtggaagttacccagcgacgttgacatacgtgctctacgattccgcc

SEQ ID NO: 812729 - DNA, 120 bp, Artificial Sequence
  ENSG00000188511_41 (sequence is synthesized)
tgtcacggctctgctcttcctcacgacggaaaagggaaacggccgcaatacccgtctatggtaaaaaagatcgataacttggaaacggagaatgacggctggactggggtgaggtcaaga

SEQ ID NO: 812730 - DNA, 120 bp, Artificial Sequence
  ENSG00000188511_42 (sequence is synthesized)
tgacacagtgttgttgggatgacccagtccacgggagagagtggctgagagtggcttagtccatgggagagagtggccgagagcggcttcatctgcaggctcctgggagcactgggcagg

SEQ ID NO: 812731 - DNA, 120 bp, Artificial Sequence
  ENSG00000188511_43 (sequence is synthesized)
atgatccgcttggaatgggtttagatctcggaatgagctgtcatcccggcccagccaggtagctcaggaagcccagccatttaaagatgatgctagacagaactccagatattcttggag

SEQ ID NO: 812732 - DNA, 120 bp, Artificial Sequence
  ENSG00000188511_44 (sequence is synthesized)
tcagctgtaaaaggcaaacacaggctattggctcagctgtaaaaggagatcacggcatccgcttggatggggagttggtgccagctttcctgctacaagaaaattcaatcccaactgcta

SEQ ID NO: 812733 - DNA, 120 bp, Artificial Sequence
  ENSG00000188511_45 (sequence is synthesized)
cgagggcatgcctgccatgccaatcccgcagaggactttgctgcagcgagacagcccctttctccctccatgatagagtttagaagcctcctcctcttgctgccaccgtgggtatttagg

SEQ ID NO: 812734 - DNA, 120 bp, Artificial Sequence
  ENSG00000188511_46 (sequence is synthesized)
tgagcagctgtagttgccggggaggcctgagcacaacacttaacgctgctcctgcagtttcatgggccattaacaatttgctaatattgttttagcttgcaaattagtgcagctccgtgg

SEQ ID NO: 812735 - DNA, 120 bp, Artificial Sequence
  ENSG00000188511_47 (sequence is synthesized)
gtaaggaaaggctctgtggctgtcatcaatcagatggaaattctccatgcatgagatgaaaaacgatttctagcctttgaggctcagacggcaattactgtaaccaaaaaaaatgggtgg

SEQ ID NO: 812736 - DNA, 120 bp, Artificial Sequence
  ENSG00000188511_48 (sequence is synthesized)
tggggagccggggggaagagagctccttgcaaagtctgttagcaattctatgaactttatttcttgatgcacgagagtgaaactatgaggatttccagccaagggaacttgattttctta

SEQ ID NO: 812737 - DNA, 120 bp, Artificial Sequence
  ENSG00000188511_49 (sequence is synthesized)
gttactaataaagtgacaatctaaaggagccctctccaactgacctgctcccagaaggtggggagagaggatgtccgtgtggcaagaaggatgacaaagctgtgaggacctggtgactgt

SEQ ID NO: 812738 - DNA, 120 bp, Artificial Sequence
  ENSG00000188511_50 (sequence is synthesized)
ctttgctgagctcccaactggtgacgctcaccaggaggatgccacagatggctctgccaaaagtgcagacaaaccttggccttgtttgttggaaaccatgttgcttatcccccatccctc

SEQ ID NO: 812739 - DNA, 90 bp, Artificial Sequence
  ENSG00000188511_51 (sequence is synthesized)
cttgtttgttggaaaccatgttgcttatcccccatccctcccacctttaagcaccaacattttttccttttaaatattgatacgagagtt

SEQ ID NO: 812740 - DNA, 120 bp, Artificial Sequence
  ENSG00000188511_52 (sequence is synthesized)
gatctccagttctagaccagcctgggcagtatagtgagaaccccatctctacaaaaacatttcaaaaattagctgggtgtggtagtatgcactgtggtcccagctgcttgggaggctgag

SEQ ID NO: 812741 - DNA, 86 bp, Artificial Sequence
  ENSG00000263567_0 (sequence is synthesized)
aacccggtcaggtccccttccatgctgtggaagatttgttctttcactcttcacaataattcttgctgctgctcactctttgggtt

SEQ ID NO: 812742 - DNA, 80 bp, Artificial Sequence
  ENSG00000263567_1 (sequence is synthesized)
tgcgaaggtctgcagcttcactcctaaagtcagtgagaccactaacccaccagaaggaaggcaaaggtctgcggcttcac

SEQ ID NO: 812743 - DNA, 90 bp, Artificial Sequence
  ENSG00000263567_2 (sequence is synthesized)
atctgaaggaacaaactccggacacaccacttttaaaaactgtaacactcaccgtgagggtccttaacccaccggaaggaaccaattctg

SEQ ID NO: 812744 - DNA, 89 bp, Artificial Sequence
  ENSG00000263567_3 (sequence is synthesized)
gaccaatttttggcaaccatgaagggattatcgcctatcgccaagggttaaggtggcaggggtggaatcttggattcaccacacctgag

SEQ ID NO: 812745 - DNA, 120 bp, Artificial Sequence
  ENSG00000259994_0 (sequence is synthesized)
ctcttttttcgcttgcaatttattgaagataggggattgtcttagggagttcctacaacatagattatgctgatgatgtcagcacatatgattgttcaacattgttcacataagctgttc

SEQ ID NO: 812746 - DNA, 120 bp, Artificial Sequence
  ENSG00000259994_1 (sequence is synthesized)
aacattacttaatgacttgaaaatattttttattagttgtagaaaactcaacaattttcaaatattgctttggctacattcaccttcattcctctgggattccacttaacatttattagg

SEQ ID NO: 812747 - DNA, 120 bp, Artificial Sequence
  ENSG00000259994_2 (sequence is synthesized)
ttattaggtctttttgcttaattccctatgtctcttctatactttcctgtattttctactcttgtgtctcccttcactccaagaatttacttcttttttgtttgtttgtttgtttgtttt

SEQ ID NO: 812748 - DNA, 120 bp, Artificial Sequence
  ENSG00000259994_3 (sequence is synthesized)
ggattacaggcatgagccactgtgtttggccagaattctgacctatatagcagtttatcaacttttttcatctgtgtctaattttaaaaatccatttattgaattctcaatttcagtata

SEQ ID NO: 812749 - DNA, 120 bp, Artificial Sequence
  ENSG00000259994_4 (sequence is synthesized)
tatatttttttcaggttgacacagttattttaaagcctgtgtctgagaagttgatcatgtggttcccctgtgggtctgtttctgtttttcatgatgttgacttctctcctggtatacctg

SEQ ID NO: 812750 - DNA, 120 bp, Artificial Sequence
  ENSG00000259994_5 (sequence is synthesized)
gtggtggcagtggtggctttgtgtgttgatactggatgggagaaatagtaggaattacttcgagggaggatgatgttttctcttccttcagaaaggatttacttttgtttctgggggatg

SEQ ID NO: 812751 - DNA, 120 bp, Artificial Sequence
  ENSG00000259994_6 (sequence is synthesized)
ggtaggggtatttatgatcctggatcactttaatccagaaagggtttgagattttgaagttggattcaattccagattctagttcatcattaacttgcactgtggtggggaagatctcag

SEQ ID NO: 812752 - DNA, 120 bp, Artificial Sequence
  ENSG00000259994_7 (sequence is synthesized)
tccaaaacctggagtgctgaccagggtcccttttccttggtgggccctgaagtcctttttgtctcctatccctgcaagttttttgaaacctctgctcccctctgatctacttcatcagca

SEQ ID NO: 812753 - DNA, 120 bp, Artificial Sequence
  ENSG00000259994_8 (sequence is synthesized)
gatgtccctagcgggtagcaaccccaaatgctaggctcacttgcttaagtctacttcttcacaattttgtaatttttcactcctttgttagcagtcggatgctttcaagcagctgttttt

SEQ ID NO: 812754 - DNA, 120 bp, Artificial Sequence
  ENSG00000259994_9 (sequence is synthesized)
gtttttccaagcttctttctctctctttccttccttccttccttcctccttccttaccttttcctttccttttccccacccccgtctctctctctctctccccaagcagctgtttttgtt

SEQ ID NO: 812755 - DNA, 120 bp, Artificial Sequence
  ENSG00000259994_10 (sequence is synthesized)
tttccaagcttctttctctctttctctttctttatttctctgtctccctccgtcttgtcttttccttttcttttctgttgagatggagactcactctgtctgcacataccaccacaccca

SEQ ID NO: 812756 - DNA, 120 bp, Artificial Sequence
  ENSG00000259994_11 (sequence is synthesized)
gagccactgcgcccagcctgttttgccaagcttttctggttgttttccttcagtgagagagttgatggatattacctagtctgccattactggacatcattcttttttactccagcttct

SEQ ID NO: 812757 - DNA, 120 bp, Artificial Sequence
  ENSG00000259994_12 (sequence is synthesized)
gatccttatatatattttatcttataggaatgtgtactatttagtttgcttccttgtaagaagctttcaaatgtctcatttgctggtgcctgttcaattaagctttggataacagtacaa

SEQ ID NO: 812758 - DNA, 120 bp, Artificial Sequence
  ENSG00000259994_13 (sequence is synthesized)
aatttggccaacatgaatgcctagttcaccgctaatgaaagctgggcactgcaaatgttctgctatgctccagaaatcagaagttgccagcttttatatctagactgtgatttcctcata

SEQ ID NO: 812759 - DNA, 120 bp, Artificial Sequence
  ENSG00000259994_14 (sequence is synthesized)
gaggattttgtacatgccaattcaaagtttaaatttgtgccatgtgtgaataagtgcacaaaatgctcaaataagaatgagaaaaatatctccttttcccatccacattgagatacctga

SEQ ID NO: 812760 - DNA, 120 bp, Artificial Sequence
  ENSG00000259994_15 (sequence is synthesized)
aacaactatgaaatacagtttttcttccagttttccgaaatacttatctgggttgagaccaagaatggagcattttaggccaaaatgcttttttaaaattttatgatttatgagtttaga

SEQ ID NO: 812761 - DNA, 120 bp, Artificial Sequence
  ENSG00000259994_16 (sequence is synthesized)
aaaaatctcttttggactttaagcatatgttatttttaggatatcttattcatgaataaaacaaattttttacataggtgaaataatttaggtgtttgtatattatgagtcagttatttc

SEQ ID NO: 812762 - DNA, 120 bp, Artificial Sequence
  ENSG00000259994_17 (sequence is synthesized)
tataatatatgactagtttatatttgtagtttttcagttacattcagtagcccacatttgtttagtaacagaattaacaaaaattgctgttattattttgagttaattttcaactcgtat

SEQ ID NO: 812763 - DNA, 120 bp, Artificial Sequence
  ENSG00000259994_18 (sequence is synthesized)
aatttgctaaatacattctagcactattatattgtcagagaccttaattcaagtctttaaatatttaataaaattatgtgaaaaattgaaattatttgatgttttaattttgattgctct

SEQ ID NO: 812764 - DNA, 120 bp, Artificial Sequence
  ENSG00000259994_19 (sequence is synthesized)
ctctggacaaagacagtatttccatcttgatgcttcaggataaaaattgcgttaaacaatacttgaatttaaatgtggtttaaaatatttcttaattctaaagctctctgtagttcctat

SEQ ID NO: 812765 - DNA, 120 bp, Artificial Sequence
  ENSG00000259994_20 (sequence is synthesized)
tttctaagcaatattagctatattggatcttctagatgaagaaagatttgactatgattaaatatgtgcagtgccatcctggaatagattttattcatagattaataaaatatgtgcagc

SEQ ID NO: 812766 - DNA, 120 bp, Artificial Sequence
  ENSG00000259994_21 (sequence is synthesized)
atgatttaggagaaaatattttaggacattaaatttagttacataagctacagtcttttaaattctgtgcaactaaaatctgttttgctttaaaaagaaaaaatgttcaaatttcactgg

SEQ ID NO: 812767 - DNA, 120 bp, Artificial Sequence
  ENSG00000259994_22 (sequence is synthesized)
gaaatgtagagtatttgttttccaagacgatcaaaatcatacccaatcatacttttaggaaattttcaaaatactagatatagcctttcaacttaatgacgattgttattgtctaatttt

SEQ ID NO: 812768 - DNA, 120 bp, Artificial Sequence
  ENSG00000259994_23 (sequence is synthesized)
cttacctgcacttaccagtattcagaacactctgatttggttacatgtttcttatagtacctccttggttcaaatgtaattcttttctgatattgaataaactgtaatgtcaaggaccta

SEQ ID NO: 812769 - DNA, 120 bp, Artificial Sequence
  ENSG00000264932_0 (sequence is synthesized)
cgtcttaaaagcaaaacaaaacaagcaaacaaacaaaaaaaccacacacacaaatcaaaacaataaaaactttgctacacaaagcgtgcttccaaaagaggcatatgatatcactgggga

SEQ ID NO: 812770 - DNA, 120 bp, Artificial Sequence
  ENSG00000264932_1 (sequence is synthesized)
ccttgttagaaacttggaatctcagatcccacccccgacatactgaaccataatctgcattttaacaagatccccaggtgactgttagtgcattaaaatttgaggagaactgacctaata

SEQ ID NO: 812771 - DNA, 120 bp, Artificial Sequence
  ENSG00000264932_2 (sequence is synthesized)
ctaaaagacaagaaatagacccagaggctggtctgatggtaatgggttattcagaacttattaatattactgttattcaagttggtatgcaactctcccactgctaaatttggcttaaaa

SEQ ID NO: 812772 - DNA, 120 bp, Artificial Sequence
  ENSG00000264932_3 (sequence is synthesized)
aaaaagaaaagaaagaaacccaaagaaagtatccacaatacagtaaactgacaaattacttaaatccagaatatacaaagagttcctacacatcataaggaaaagaaccacaaatgtaac

SEQ ID NO: 812773 - DNA, 120 bp, Artificial Sequence
  ENSG00000277782_0 (sequence is synthesized)
aaactgatgatcaggtgcttgaagtgacttccgaagatcaggaagacagcatatggcagggacaggaacccacgcctacgccccagcctctttttaccgaaccttgttcttcaggaagtg

SEQ ID NO: 812774 - DNA, 120 bp, Artificial Sequence
  ENSG00000277782_1 (sequence is synthesized)
acgccagtcacgcagtcctgaaacaggtcctctaaggtgcccagcccaacacaggctgggcgtgctgagccaacagaatgtttgttcctctgtcccttcctagaaccccaagtcaccttt

SEQ ID NO: 812775 - DNA, 120 bp, Artificial Sequence
  ENSG00000277782_2 (sequence is synthesized)
ctccagccagttaaaaacgttacttttaactaggatgacgtttcaatttatcggccatatccaagcatttctgagaatgaactgtgagacatgctattaataaattaaccatgaacagca

SEQ ID NO: 812776 - DNA, 120 bp, Artificial Sequence
  ENSG00000264937_0 (sequence is synthesized)
ctgttagtgccttttattttctcagtgataggacatgcccttggaaacactcctcagaatacatatgagtgctactaacatatcacatcctgctgcctctaatttaaagtgtctgtgaaa

SEQ ID NO: 812777 - DNA, 120 bp, Artificial Sequence
  ENSG00000264937_1 (sequence is synthesized)
ctgttgtctgaaatgcccttagcaggttacaatttcacacactgactacagacaggcagcgtatgcagcagatgtacagctgggcaatgatgatggtaaataaaatttttataattcaaa

SEQ ID NO: 812778 - DNA, 120 bp, Artificial Sequence
  ENSG00000242428_0 (sequence is synthesized)
agctttgcttttccatgatcaagctgctagagattttggggtgagggagcgaaatgaaggctaaataaaagaaccggagataagataatcctgccatgttaaaagatatggtgtaataaa

SEQ ID NO: 812779 - DNA, 120 bp, Artificial Sequence
  ENSG00000242428_1 (sequence is synthesized)
gatgccaacctgattgatcaggagactggggtcctagagtgccggagttcaacagctctgctccttgttgggacacagtggctgtggcaacgctctggtctttgtggagagaggagcctg

SEQ ID NO: 812780 - DNA, 120 bp, Artificial Sequence
  ENSG00000242428_2 (sequence is synthesized)
gtgtcagcaaaggcagcagggggaaatctgaacaaagacagacggagaggatgctgtgcgacaatggaagcagagattggagtgatacacctacaaacaaaggaatccgaaagactgctg

SEQ ID NO: 812781 - DNA, 120 bp, Artificial Sequence
  ENSG00000242428_3 (sequence is synthesized)
gcaattgccagagactaggacagagggatggtacagattctccctcagtgcctccagaaggaaccaatcctgccgaaaccttgattttggactttcagcttccagaaacagtaaatatac

SEQ ID NO: 812782 - DNA, 120 bp, Artificial Sequence
  ENSG00000242428_4 (sequence is synthesized)
attgttttaagctatccagtttgtggtgacttgttatggcagccctcagaaaccaatacagtaatttccacatcatcagtcttgaagaaaaaggttataggaacaggagtcaacctcttg

SEQ ID NO: 812783 - DNA, 120 bp, Artificial Sequence
  ENSG00000242428_5 (sequence is synthesized)
gagtttcaatttcctcccctataaattgggaataataacatctgtccttccattgtactgagaaaatgatcataaaaatactaagaaactgatttataaatgcagggtattactctttcg

SEQ ID NO: 812784 - DNA, 120 bp, Artificial Sequence
  ENSG00000242428_6 (sequence is synthesized)
gatgtatgcttctaattgctttgtcagctctaatttattgcgttgttctctttccctttctttaagatcatctattttcaagtaacatttgccttccttggagaagttactgtttgggtg

SEQ ID NO: 812785 - DNA, 120 bp, Artificial Sequence
  ENSG00000242428_7 (sequence is synthesized)
tttgccataaattgacaacaaattcacccttcattttaggagatatcaagcactgtaaccttttgttaatacacagatgtaggacattgcttgttccagctaattgactattctgttgag

SEQ ID NO: 812786 - DNA, 120 bp, Artificial Sequence
  ENSG00000242428_8 (sequence is synthesized)
cctaacagtaccatcacaaacgatcactttctgaagcttaccataaagaagatatttggcactgaaagtacgtttttcacaaatcacaaatcagttaaggattcacaattatcaacacaa

SEQ ID NO: 812787 - DNA, 120 bp, Artificial Sequence
  ENSG00000242428_9 (sequence is synthesized)
actatgattataagatatttccaattatttatagtcttgaaaacttttttttaaagtttaaaataaattgcgcaccaatcaaaatttgacagtatccaacaagaggaaaatctgtcaaat

SEQ ID NO: 812788 - DNA, 120 bp, Artificial Sequence
  ENSG00000242428_10 (sequence is synthesized)
gttttaaaatatctccgacattcactctttagatctttctatccttcctcacctatgctctccagaatgtatcactataattgcagaagatttttattccttaggcaatatatacattct

SEQ ID NO: 812789 - DNA, 120 bp, Artificial Sequence
  ENSG00000242428_11 (sequence is synthesized)
ctttttcatttttacacgaaaatctcacacatatttaaatagaggacatttcacaggtacacaaagatacacacatggatattcatggtaacactaatagcaaaacagagggaaaacttg

SEQ ID NO: 812790 - DNA, 120 bp, Artificial Sequence
  ENSG00000242428_12 (sequence is synthesized)
gaggtccaccataaggatctagataaataggttatgttctagccatgcaatggtatatatagcgctattaaaaagagtgagacagatttagtagtatggaaatcgtctcaaggcaggtaa

SEQ ID NO: 812791 - DNA, 120 bp, Artificial Sequence
  ENSG00000242428_13 (sequence is synthesized)
cagagaaagccccactgtcactaccaaaccaaatgccaaaaagtgtgaatggtatgattccacttgtgggaaaaaggactgtaatatcatacacacgcacacatacacacacacacacac

SEQ ID NO: 812792 - DNA, 120 bp, Artificial Sequence
  ENSG00000242428_14 (sequence is synthesized)
ctgaggaattttgaaattgcctggtggactagaaatgaagcaaaacacagaaaaacctgagatgaaagatggagagtgcttaaggggaactagtactggcttccatgcccagctgcatca

SEQ ID NO: 812793 - DNA, 120 bp, Artificial Sequence
  ENSG00000242428_15 (sequence is synthesized)
ctgccccttgagcttcccgtgacatcccaaaaaacttgcgattgaagctcccgctgtgctttaattcactccagttgatgtggtgaacagaaatgagtccaaatgacactagtcccaccc

SEQ ID NO: 812794 - DNA, 120 bp, Artificial Sequence
  ENSG00000242428_16 (sequence is synthesized)
cacaactttcgcaactttactgctaaaaattaactcaagtgccttttggcaaatggaatatacactgctgattctgatattgtaatctttagtgacctatgacatggttccatcaccgag

SEQ ID NO: 812795 - DNA, 120 bp, Artificial Sequence
  ENSG00000242428_17 (sequence is synthesized)
ctgaggagaaacaaacaaaacaaaaaaccctacatccattttttggttgttgttggataccagaaaagtctcatacatcctccttacaattttttaaattccaggttaaacagctattac

SEQ ID NO: 812796 - DNA, 120 bp, Artificial Sequence
  ENSG00000242428_18 (sequence is synthesized)
tgtttacttgtgagagtatcagttaggactcttttatgtcaaaagttaatagaaaatccaacttgagctagttcacctaaatggaatgctcacattattggaaaccacagaggtagggca

SEQ ID NO: 812797 - DNA, 120 bp, Artificial Sequence
  ENSG00000242428_19 (sequence is synthesized)
ttctttgtttctccctttctgccatctggtgtcagctctgtcctcatggtcacaggacgggtgccagctacaaacagagtgcagcccagtctagcatcccaaacaagagtcataaaagtc

SEQ ID NO: 812798 - DNA, 120 bp, Artificial Sequence
  ENSG00000242428_20 (sequence is synthesized)
actcaattggcccagcataggtcagattcccattcctaaaagaataatgtggctaaataaatgaaatgcactaattgacctatcaatcaaagcccactccaggggctagagtgtgatcca

SEQ ID NO: 812799 - DNA, 120 bp, Artificial Sequence
  ENSG00000242428_21 (sequence is synthesized)
ttttactagacacacataggctgcactggccaggggagatacccaaacaaagatcagataatttttggaggagaaacatgtggcaaactatgctaggtagacaactaataaatgtctacc

SEQ ID NO: 812800 - DNA, 120 bp, Artificial Sequence
  ENSG00000242428_22 (sequence is synthesized)
acacttggttcttccatgtgttactagaaaataactttaaaattccactttattttgtaaccattacagtaataattagttcaggcaagaatcatcatgctaaactggtgaatgagagct

SEQ ID NO: 812801 - DNA, 120 bp, Artificial Sequence
  ENSG00000242428_23 (sequence is synthesized)
taatgaggaagaagatatttataaagtctcaaattatatccccacaaatgactcaactaatattaaagtaaaaacatagtaactttactatgagaaaacctggtagagaccaccttaacc

SEQ ID NO: 812802 - DNA, 120 bp, Artificial Sequence
  ENSG00000242428_24 (sequence is synthesized)
aagtgattgaagttaacatcagctgtaaacatcataagcctcctgataaactgcactgagaaggacacaacatcactttatagtacatttcaccaaagatgcataacatgaatctaatcc

SEQ ID NO: 812803 - DNA, 120 bp, Artificial Sequence
  ENSG00000242428_25 (sequence is synthesized)
taagaaaacatcagacaaactcaattaaggggcattctacaaaataactgacctgtacttttcagcagtgtcactgatgtgaaagacacagaaaggctgaggaaacattacaaattaatg

SEQ ID NO: 812804 - DNA, 120 bp, Artificial Sequence
  ENSG00000242428_26 (sequence is synthesized)
gagacaagtgaaaactaaaggtagtgtgtaattctggatcaaaaacataattgctatgaaggacagtatgtctatatcatagatagtagtactgcatcaatgttaaatggttttgaaaat

SEQ ID NO: 812805 - DNA, 120 bp, Artificial Sequence
  ENSG00000242428_27 (sequence is synthesized)
tgtactgtggtcatgtagtgaacgtctttgtccttagtaaatatacactgaagtgtttaataaaggagtatgaagtgtgcaacatactctcaaatagcttgaggaaaaaaatgtgtatac

SEQ ID NO: 812806 - DNA, 120 bp, Artificial Sequence
  ENSG00000242428_28 (sequence is synthesized)
attcatatataattaactaccacggagcacaagcagctttgcttttccatgatcaagctgctagagattttggggtgagggagcgaaatgaaggctaaataaaagaaccggagataagat

SEQ ID NO: 812807 - DNA, 120 bp, Artificial Sequence
  ENSG00000242428_29 (sequence is synthesized)
tacctttggaaaatgactccaaactttcttattataggtgtggattactttaattctgtatgcaattttaaaatggcagagttttagagcataagaaaaaagcaatgattagtggttaac

SEQ ID NO: 812808 - DNA, 120 bp, Artificial Sequence
  ENSG00000242428_30 (sequence is synthesized)
agctttgcttttccatgatcaagctgctagagattttggggtgagggagcgaaatgaaggctaaataaaagaaccggagataagataatcctgccatgttaaaagggggaaatctgaaca

SEQ ID NO: 812809 - DNA, 120 bp, Artificial Sequence
  ENSG00000242428_31 (sequence is synthesized)
ggcaaatgtggcaaaatgttaataattggtgaatatgcgtgaaaggtatatggtagttctttgtactatttttgtaacttttctttaagtttgaaattacttcaaaataaaaagtttttt

SEQ ID NO: 812810 - DNA, 120 bp, Artificial Sequence
  ENSG00000227066_0 (sequence is synthesized)
tgagtgacgcagatcctgagagcgctcctgggtaggtatttgccccggtgggatgccttatcagagtggtgcatggcaggcccccgtggaggatcaacgcagtggctgaacactgggaag

SEQ ID NO: 812811 - DNA, 120 bp, Artificial Sequence
  ENSG00000227066_1 (sequence is synthesized)
gaactggcacttggagtctggacaactggaatacggtgatcgggtatggatcacggattggaacatagcctccttgcagccacggtggagaggaccccagaccatcgtcttgaccactcc

SEQ ID NO: 812812 - DNA, 120 bp, Artificial Sequence
  ENSG00000227066_2 (sequence is synthesized)
cacagccataaaggtagaaggaatcccagcctggattcaccacagccatgtaaaacctaaagcatctgagacctgggaggtgagaccaagcttggacaacccatgcaagatgactttgaa

SEQ ID NO: 812813 - DNA, 78 bp, Artificial Sequence
  ENSG00000227066_3 (sequence is synthesized)
cagtcacacctggaagctgactggtccgtgcatggctgaagcatgaggaaactcatcgtgggactcattttcctaaaa

SEQ ID NO: 812814 - DNA, 120 bp, Artificial Sequence
  ENSG00000227066_4 (sequence is synthesized)
cctcagactgaggtagggcaaaaagttaaaacagactttctgtttaaaagggacttgtgtgtataatgctacccagtacaagatatgcagcccaagaagtgaccagcttgatgtgtgcta

SEQ ID NO: 812815 - DNA, 120 bp, Artificial Sequence
  ENSG00000227066_5 (sequence is synthesized)
taacccattggaactagtttatccctgttggaaaacagagtatgtaactctaggaattgatggaactggactggaagacctgggtagtgaagatgacagtgagaactcccactagtgagt

SEQ ID NO: 812816 - DNA, 120 bp, Artificial Sequence
  ENSG00000227066_6 (sequence is synthesized)
atgacagtgagaactcccactagtgagtgagattctcaaaggggggaatgagaagtgaggccatttctcttactgtctcctgtctctgaagaggaggaggaagtaaaagttgaaaaacaa

SEQ ID NO: 812817 - DNA, 120 bp, Artificial Sequence
  ENSG00000227066_7 (sequence is synthesized)
cagccggtgccactgatgaccaggcctgaggttaaaagatcaaccccccactctaaccacatgtgctctcaatctatcatgaccctttcatgtggacccccttagagttgtaagccctta

SEQ ID NO: 812818 - DNA, 120 bp, Artificial Sequence
  ENSG00000227066_8 (sequence is synthesized)
ggccaggaactctgtcttcagggagctcggttcttgagacatgagtctgccaaagctcccagctgttgagatgcgagtctgccaaagctcctggccgaataaagccaaatccttccttaa

SEQ ID NO: 812819 - DNA, 120 bp, Artificial Sequence
  ENSG00000227066_9 (sequence is synthesized)
agaggtgtaagcccttaaaacggccaggaactctgtcttcggggagctctgttcttgagacgcgagtctgccgaaactcccaggcgaataaagccaaatccttccttaacctggtgtctg

SEQ ID NO: 812820 - DNA, 120 bp, Artificial Sequence
  ENSG00000227066_10 (sequence is synthesized)
aggggttttgtccacggctcatcctgctacctttcttagttccctgaccgggaaatcgggtgactgatggacggtggaggcagccccttaggcagtttaggcctgccctgtgaagtatcc

SEQ ID NO: 812821 - DNA, 120 bp, Artificial Sequence
  ENSG00000227066_11 (sequence is synthesized)
agaagagaaactcatgtcagccccagccctggggctacctgacctgatgaagccatttacactgtatgtggcagagtgaaaagatggaagttgggagttttaatccagacggtggggccc

SEQ ID NO: 812822 - DNA, 120 bp, Artificial Sequence
  ENSG00000227066_12 (sequence is synthesized)
tggccaagaccagtagcctacctctccaaacagctagatggagtttctaaaggttggcccccatgtttgaggaccttggcagcaactgccctgctagcacaagaagcagataaactaact

SEQ ID NO: 812823 - DNA, 120 bp, Artificial Sequence
  ENSG00000227066_13 (sequence is synthesized)
cttgggcaaaacctgaacataagcaccccccatgctgtggtgactttaatgcataccaaaggacatcattggctaacaaatggtagactaactaagtaccaaagcttgctccgtgaaaat

SEQ ID NO: 812824 - DNA, 120 bp, Artificial Sequence
  ENSG00000227066_14 (sequence is synthesized)
ccctgcataaccattgaagtttgcaacaccttgaactccaccaccttactcccagtgtcagagagcccagtcgaacgtaactatgtagaggtgttggacacagtttattctagcaggcct

SEQ ID NO: 812825 - DNA, 120 bp, Artificial Sequence
  ENSG00000227066_15 (sequence is synthesized)
gacctccaagaccatccttggacatcagtagactgggagctgtacatggacaggagcagcttcgtcaacccacaaggagagaggtgtgcaggatatgcagtggtaaccctggatgctgtc

SEQ ID NO: 812826 - DNA, 120 bp, Artificial Sequence
  ENSG00000227066_16 (sequence is synthesized)
actgaagccaaatcattgccccaggatacttcagcccaaaaggtcaaactcattgctttaatttgggccttagagctaagtgaaggtaagactgtaaatatttatactgactctcggtat

SEQ ID NO: 812827 - DNA, 120 bp, Artificial Sequence
  ENSG00000227066_17 (sequence is synthesized)
gccttcttaaccctccaagtgcatggggcattatataaagaaaaaggcccattgaaatctgggggaaaagacataaagtaccagcaagagatcctgcagttagtagaggcagtatggaag

SEQ ID NO: 812828 - DNA, 120 bp, Artificial Sequence
  ENSG00000227066_18 (sequence is synthesized)
tgcagaggacaccagcgagcttccacctcgattgccttggggaactcccaagctgactcagaggcttgaaaagtagcatccacccccttctgggcatcaatcacagcccccctattccct

SEQ ID NO: 812829 - DNA, 120 bp, Artificial Sequence
  ENSG00000227066_19 (sequence is synthesized)
tcaatcacagcccccctattccctcaggcacctgaccttgtacctacttattctaaagaagagaaggactttctctaggcagagggaggacaggtgatagaagagggatggatctggtta

SEQ ID NO: 812830 - DNA, 120 bp, Artificial Sequence
  ENSG00000227066_20 (sequence is synthesized)
tcggacaggagaatagccataccacaactgctaggagccgcagtcatattggctatgcatgagaccacgcacataggccaagagccacttgaaaagttgttgggccagttcttctacatc

SEQ ID NO: 812831 - DNA, 120 bp, Artificial Sequence
  ENSG00000227066_21 (sequence is synthesized)
ggagcagccccctttgaagatctccaagtagacttcaccaagatgtccaaatgtggaggtaacaggtatttgctagttctagtgtgtacatactctaggtgggtggaggcctatccaaca

SEQ ID NO: 812832 - DNA, 120 bp, Artificial Sequence
  ENSG00000227066_22 (sequence is synthesized)
gcctatccaacacgaactgggaaagcttgtgaagtaacctgtgtgcttctccgagatctcaaccctacgtttggactgcccttacgaatcagctcagacaatgggctggtgtttgtagct

SEQ ID NO: 812833 - DNA, 120 bp, Artificial Sequence
  ENSG00000227061_0 (sequence is synthesized)
acgcgcggggccttttcccttctgtcttcctttccggcctcttgacgtagtctacttttactcagctcctgtcatagtgcttgtaagggagttgattgctatctggtgggagatacagag

SEQ ID NO: 812834 - DNA, 120 bp, Artificial Sequence
  ENSG00000227061_1 (sequence is synthesized)
ttgtaagggagttgattgctatctggtgggagatacagagtggaggcaggcatgggaaatacagtgcgttaaagctgattttcatcactgcagccaggaagagcctcctgaaagataaat

SEQ ID NO: 812835 - DNA, 120 bp, Artificial Sequence
  ENSG00000227061_2 (sequence is synthesized)
gacagcaacacttctcagctcaaaacctcaacagttgtagctcatttggagtaacactcagagccctccagccgcctcacgtgctctcccttcctctcccctcttacctctctgcccctc

SEQ ID NO: 812836 - DNA, 120 bp, Artificial Sequence
  ENSG00000227061_3 (sequence is synthesized)
cctgcccctccctgccccaggcacagggcagggaaggctcagctgatccctgcactgcagagtggcctgagggtgggctcctgctgcttgagatgtctcctgatgaccccattttaaaca

SEQ ID NO: 812837 - DNA, 120 bp, Artificial Sequence
  ENSG00000227061_4 (sequence is synthesized)
gcaagcctccctccacacatcttcctccccctccaatttatgtttctccagagcacttctcagatcttgatatgctgtaatcagacttttgtttgttgtgtattaagctctgcaataaca

SEQ ID NO: 812838 - DNA, 120 bp, Artificial Sequence
  ENSG00000227061_5 (sequence is synthesized)
cgcgcggggccttttcccttctgtcttcctttccggcctcttgacgtagtctacttttactcagctcctgtcatagtgcttgtaagaccccagaagtgacaagagggcaggaaacttctg

SEQ ID NO: 812839 - DNA, 120 bp, Artificial Sequence
  ENSG00000227061_6 (sequence is synthesized)
tgacaagagggcaggaaacttctggctcacgccagcacggtaaccactgcttctgtccgtctcctcgacagtccgcacaccactgcacaaggcagcggtttatctttttaattctctgct

SEQ ID NO: 812840 - DNA, 120 bp, Artificial Sequence
  ENSG00000227061_7 (sequence is synthesized)
tcattggcatagccttgactggcaaacaggagttgattgctatctggtgggagatacagagtggaggcaggcatgggaaatacagtgcgttaaagactacccggtatcaggtagctcttc

SEQ ID NO: 812841 - DNA, 120 bp, Artificial Sequence
  ENSG00000227061_8 (sequence is synthesized)
tcataagcacttttctatgttgtcatttagttgtagtaatcaacattttaatgactaagtgatatttcagagcatttcaacattcctgaataaaatgataatatggccgtaaaaacaatg

SEQ ID NO: 812842 - DNA, 120 bp, Artificial Sequence
  ENSG00000227061_9 (sequence is synthesized)
aggttgtaccacaatagaagaaatataactctagtctttaagaaagaaacgttactacctgtgtggctaacagttgctggcttttctctatgtttctcatactttggaatgaattagctc

SEQ ID NO: 812843 - DNA, 120 bp, Artificial Sequence
  ENSG00000227061_10 (sequence is synthesized)
tagaataaagtcagcatattgtgtgtctgagtcctgaacttctggctggtggacacagatctctgttgtatgcagccttcttgctggccaagtagatcagcacagagacactgagctcac

SEQ ID NO: 812844 - DNA, 120 bp, Artificial Sequence
  ENSG00000227061_11 (sequence is synthesized)
tctggctttctctgttctccagcctggccccctgcattcccacagcttaaagtttattttaagctttattctttcccacgtcctttgttttttttagataacgttcatgtaattatgaaa

SEQ ID NO: 812845 - DNA, 120 bp, Artificial Sequence
  ENSG00000227061_12 (sequence is synthesized)
ataaattcagagcaaggctgtctttctgagggcaggggtgcgttgccggcagccgaggcctgctggggatagtgttcctcgtctgccagtgcttgttctgtgggaataaagcaacaggat

SEQ ID NO: 812846 - DNA, 120 bp, Artificial Sequence
  ENSG00000227061_13 (sequence is synthesized)
cattttagaataattagggaaaaaatacaaaacactgagggtgaattagccctgccaatctggtggtcgttcctgagttcagcaaatttgcatccatatgtatctgtgtcttgtgactgc

SEQ ID NO: 812847 - DNA, 120 bp, Artificial Sequence
  ENSG00000227061_14 (sequence is synthesized)
attgatttggttttcaacttctttgcaagaatacaagctacggggaggctgccgcctcagtagagcctgtgttcactgatgtggccctgtggtaacagcgaggacagcaaggtgacgggt

SEQ ID NO: 812848 - DNA, 120 bp, Artificial Sequence
  ENSG00000227061_15 (sequence is synthesized)
gcagctcctgcccgtcaggcactcacagtcctgaagaagacagaggaagaaaagcccgttgtccagcaagcttgtgaggtggctgaagcctgtctccactgtatccagggcagaaaaata

SEQ ID NO: 812849 - DNA, 120 bp, Artificial Sequence
  ENSG00000227061_16 (sequence is synthesized)
ccggcgagacttcagcggggctgaggcctaactgaaaccaagatgagctttggttttatttcttagtataatgtcacctagtgagtttcaccaaatattgcatttgcataatgcattttt

SEQ ID NO: 812850 - DNA, 120 bp, Artificial Sequence
  ENSG00000227061_17 (sequence is synthesized)
gcatgggaaatacagtgcgttaaaggtaggttcagattgagtggagcagctttaaaggactaagtgtctggccagtcttcaataaacatgaaactgaagttagaaccaagaagtatccaa

SEQ ID NO: 812851 - DNA, 120 bp, Artificial Sequence
  ENSG00000227061_18 (sequence is synthesized)
gaaatcacctggtacagcaactccggaactaacagcctgtaggacactcagtgggctcctggtttcatattccataatgcaaacatctactgaggaccatgctagacagcggcaaaggcc

SEQ ID NO: 812852 - DNA, 120 bp, Artificial Sequence
  ENSG00000227061_19 (sequence is synthesized)
aaaaaaagcaccaggacttgacttcagctacgatccaagcaatcagatgtgcttttacatgtcaattgcatgcaaaccaccagtgcaagtttgaagtgttacgtgacaagagtagtaaga

SEQ ID NO: 812853 - DNA, 120 bp, Artificial Sequence
  ENSG00000227061_20 (sequence is synthesized)
atcgccttcaatgatgcatagggagcattcactatgggcccagcaccccacaagaccacctctatgcattatcttgttttatgccattagacatttgagaaacctgaaattcaaagacgg

SEQ ID NO: 812854 - DNA, 120 bp, Artificial Sequence
  ENSG00000227061_21 (sequence is synthesized)
cagccactcagacaaggtcagggagctggtagcagcagatccagggtccagccccgacagccgagctccagctctggcgtttgaccaccctgcgaatcctattataccacttgacctaaa

SEQ ID NO: 812855 - DNA, 120 bp, Artificial Sequence
  ENSG00000227061_22 (sequence is synthesized)
attcatgtgcaaatatagaaattacttcacgctcaggacttggaggattattatcaaaggcccctgcgggtaggtgattgggagtcatggctgggaagagctgaactcctcatgttctca

SEQ ID NO: 812856 - DNA, 120 bp, Artificial Sequence
  ENSG00000227061_23 (sequence is synthesized)
tggctgatccgagagccctgggtttggaagcagaacacccacctgtttagagctgtgattctgtcacttcctaggggtgtgatggtgggaattaaccaagtttcttcaccagtaatattt

SEQ ID NO: 812857 - DNA, 120 bp, Artificial Sequence
  ENSG00000227061_24 (sequence is synthesized)
gcacaataacaccgtcctcattctgctgtctatagtatttaaaactcctatattaaataacccttccaatactgctgcaaattaaaaacctggaccaaggggaccccaactaactactgc

SEQ ID NO: 812858 - DNA, 120 bp, Artificial Sequence
  ENSG00000227061_25 (sequence is synthesized)
agccacccctgctgggggcaagccagagcccactaaaacaggacatttggctacatttacagggcggtttaaatgatttgaagcaacagatgtgtatattgacttggaaggttttgcagg

SEQ ID NO: 812859 - DNA, 120 bp, Artificial Sequence
  ENSG00000227061_26 (sequence is synthesized)
aaactgtgtttcagtacttaaatagcatactgtaagggctgaccttgatccaaggggtcacaaatgtcacctcgttgggaggtgtcttttccaggatctacgttataattatgatctcct

SEQ ID NO: 812860 - DNA, 120 bp, Artificial Sequence
  ENSG00000227061_27 (sequence is synthesized)
tggaagcaccaggggagaaattccagatggttttgcaaggataaagtgagagcaaatgaacatccaggttatgtatggatgttcatggaggattaagtgagagaatggtgtggaaagtac

SEQ ID NO: 812861 - DNA, 120 bp, Artificial Sequence
  ENSG00000227061_28 (sequence is synthesized)
caggtaaaccaggaggcctgaagcacacgtgtaatatgtttattatttgacttaaatgaaagcatggatatttttaaaggttaaagaaaaaggttcaccattttaaactcatgtaaaatc

SEQ ID NO: 812862 - DNA, 120 bp, Artificial Sequence
  ENSG00000227061_29 (sequence is synthesized)
attatataaaattattattgcttttaactgagttcttgaatcatttcttcttaattcaaacaagtcattattctgtgaccagtaggagtttttgagatcagtctgtttgctactaaattt

SEQ ID NO: 812863 - DNA, 120 bp, Artificial Sequence
  ENSG00000227061_30 (sequence is synthesized)
gtctgcacttgggacttcactcaagaggaatgccagctttcttgtgtggaaccagaggcagtcggggcctgagccagcagcactacctgatcgaggaacaggtgcactgagaaaacagag

SEQ ID NO: 812864 - DNA, 120 bp, Artificial Sequence
  ENSG00000227061_31 (sequence is synthesized)
aagccactcaagactgttaactttttgtttgaaagctgcatcaaagtctgggtagccttcccagaaatactattcagtacatgagcacagcagcctgggacctgcagggctccgcaggtg

SEQ ID NO: 812865 - DNA, 120 bp, Artificial Sequence
  ENSG00000227061_32 (sequence is synthesized)
accctggctaactccactggaagggccccgcctccagcaacatcttcctcagtttccaccttctgtcctttgctgatttagtcccacaagaacttgagtctgaagacagctttgttttca

SEQ ID NO: 812866 - DNA, 120 bp, Artificial Sequence
  ENSG00000227061_33 (sequence is synthesized)
ctgctgtgataacaaaaacacaattatgaaataatgtaaacgctcatgcaaaaacacacagaaaagccaaacacaacagtggcccagccaagctctgcgagcttagtcctgtgtgctgtg

SEQ ID NO: 812867 - DNA, 120 bp, Artificial Sequence
  ENSG00000227061_34 (sequence is synthesized)
aatgccctgggcccctctggatgccaagtgccatggactcaggccttaaaggaattttcaagcaacactttaaatatacgcatttcaaaaagtgacttatacacaaaattcaagtgcgat

SEQ ID NO: 812868 - DNA, 120 bp, Artificial Sequence
  ENSG00000227061_35 (sequence is synthesized)
ggtgtactttttgttatttttactaactagaatatagggctcgtgtacattttacaaatttgttttgctttagccttttgttatcccatcaaatcgctgtcagggtcaccaggccagtcc

SEQ ID NO: 812869 - DNA, 120 bp, Artificial Sequence
  ENSG00000227061_36 (sequence is synthesized)
ttttcctcctgcctgctgtgggtgtgatatgcattctgtaaaacaggtgtctggcatggtttttgctctcattttgttgcttttatgttctttgatatggttaaacctatcttttattta

SEQ ID NO: 812870 - DNA, 120 bp, Artificial Sequence
  ENSG00000227060_0 (sequence is synthesized)
tgattttaattgacctttaaagtaatcaattttttgttaaattactcatacaaagcatgctatgaaataccagtaaatatcgggttaaaaattaactgaaagacagaaacttactattgt

SEQ ID NO: 812871 - DNA, 120 bp, Artificial Sequence
  ENSG00000227060_1 (sequence is synthesized)
gtgctgatttgatggaacagaggagtgaaaatatagtacgcaccttctggattgagactgtggttttcgtttttgtttttgttttttggtagtggcagagcttcaaactggagaatgttc

SEQ ID NO: 812872 - DNA, 120 bp, Artificial Sequence
  ENSG00000227060_2 (sequence is synthesized)
tttttcatgcgcagtttttaaaaattgtcattaaatattttcacaaagttaaaacaacattgaaagtaacttgggcaacttagatattccctgtacttgctgtaactcaaataccaaaac

SEQ ID NO: 812873 - DNA, 120 bp, Artificial Sequence
  ENSG00000227060_3 (sequence is synthesized)
atatttagagtttaggtgcatctatcattcgaggcatgtgatttctttacctgggtgaagcgaaagaaagttaaatcgatgaaatatgaaatgaaaatgagaatcaatttgtagaatgaa

SEQ ID NO: 812874 - DNA, 120 bp, Artificial Sequence
  ENSG00000227060_4 (sequence is synthesized)
ccataaaagaacgagatttttgaagagattattttattttgattgcagactgtaaattatcacagggagttgctgtaggaatgacattgaggcttacttttgggtcaatttgttcctgtc

SEQ ID NO: 812875 - DNA, 120 bp, Artificial Sequence
  ENSG00000227060_5 (sequence is synthesized)
ctgacccacccttggcagtggagacagctagaatttctctaactccatagaaaccagtctcactgttgctttaggactcgattctctccctacactgggcttcctttagtgctttgttat

SEQ ID NO: 812876 - DNA, 120 bp, Artificial Sequence
  ENSG00000227060_6 (sequence is synthesized)
gtaaatacagcttcaaaaatagaataaatattctgtaggcattacttggaaaacgagcttttattttaaagatgtgtgcttatttaagtcgcagacagagctttaaagagctcttgatag

SEQ ID NO: 812877 - DNA, 120 bp, Artificial Sequence
  ENSG00000227060_7 (sequence is synthesized)
tttaaaaggtgaataatttacattcgtatagtgtttacataatagggtgtgtacgacaaagccaaaacaacattgaaaataacctgagcaatttaaatattcttcctagtaactgtaaaa

SEQ ID NO: 812878 - DNA, 120 bp, Artificial Sequence
  ENSG00000227060_8 (sequence is synthesized)
taaaagtgccttcgaatggtacatttgctggcaggaaatttttttcatgttcccaggtggcaaggattctttcatgttcccttatatttgaaaactggtattagcgtttacttctcggac

SEQ ID NO: 812879 - DNA, 120 bp, Artificial Sequence
  ENSG00000227060_9 (sequence is synthesized)
tcagaccaattcccccttacctgtcagagaacatctagcaataaatgctgacaaagctacatagcaaagggcaaacctgtcacttccctttcagaaacctgtttatgcaccctcctgcaa

SEQ ID NO: 812880 - DNA, 120 bp, Artificial Sequence
  ENSG00000227060_10 (sequence is synthesized)
tcccaccacctgcccaggccaagtgagcccctctccgctactggtgtttcataatgctgggagctactttgatttcatgcattgcccttcagctgccatgttatgaggacacttggagaa

SEQ ID NO: 812881 - DNA, 120 bp, Artificial Sequence
  ENSG00000227060_11 (sequence is synthesized)
agctacaggagaggaactgaggtctcctgccatcagccacttgagtgagcatgggagtggattctccaaactccagttaagacttgagatgtccacagtggcagccactagcttgactgc

SEQ ID NO: 812882 - DNA, 120 bp, Artificial Sequence
  ENSG00000227060_12 (sequence is synthesized)
aacttacgagagaccctgagccagaggcactcagttaagtcatacacagtttcctgacccgtaaaacctgtgacacaatgaaggtttgttgttttgggggtaatccgttattcagcaata

SEQ ID NO: 812883 - DNA, 120 bp, Artificial Sequence
  ENSG00000227060_13 (sequence is synthesized)
gataacgaatacagaaggcttgtaattgtataaccaacgtgagtttataagcggatatctgacctcatttgttttctcctgaaaaagttatagaaaaatcacaagactgcaagtcactct

SEQ ID NO: 812884 - DNA, 120 bp, Artificial Sequence
  ENSG00000227060_14 (sequence is synthesized)
gggacggcgcaaggtggctgagcgaagctttttgctcggtgcttacagggagtacctgagatggtttgggaaaggaaacagggggtctcagaccgcttgggtgcagcgctctccccatgc

SEQ ID NO: 812885 - DNA, 120 bp, Artificial Sequence
  ENSG00000227060_15 (sequence is synthesized)
ataaacaagtataattacaatttctaaacctattgttttattctcaaatataattacaatttaaacaggatattgtagagctccatcatagggattaacactaattagaattaaagaacg

SEQ ID NO: 812886 - DNA, 120 bp, Artificial Sequence
  ENSG00000227060_16 (sequence is synthesized)
tttttgtgaaagtcagctttttttttttaaataaacactcgtcccttgataatgtatttctttttcataaaattaaaaaaaaaatgtgggttgtagtaggtgtatatatttatgtggtac

SEQ ID NO: 812887 - DNA, 120 bp, Artificial Sequence
  ENSG00000227060_17 (sequence is synthesized)
aaaatgtgggttgtagtaggtgtatatatttatgtggtacatgagatgttttgatacaggcatgacgtgtaataatcacatcatggaagatggcgtatccatcccctcaagcatttatcc

SEQ ID NO: 812888 - DNA, 120 bp, Artificial Sequence
  ENSG00000227060_18 (sequence is synthesized)
taaaaatgtacaattaaattattattggctatagtcaccctgttgtgctatcaaatattaggtcttattcattcatttaactatttttttgtacctatttatcatccccatccccggttc

SEQ ID NO: 812889 - DNA, 120 bp, Artificial Sequence
  ENSG00000227060_19 (sequence is synthesized)
cctcccaccacccaccccactacccttcccggcctctggtaaccatccttctactctctagctccatgagctccattgttttgatttttagctcccacaaataaatgagaacatgtaatg

SEQ ID NO: 812890 - DNA, 120 bp, Artificial Sequence
  ENSG00000227060_20 (sequence is synthesized)
ggagaggagctgtagggaagggggttgtgcaggcgctcgacgccgcagccttggcccgctgcgggggagggccgagaagggcactgggcgcccagagtaaccaacaccgagacgaatagc

SEQ ID NO: 812891 - DNA, 120 bp, Artificial Sequence
  ENSG00000227060_21 (sequence is synthesized)
gagggctcggggagaaaaaacggaggatggcaaacggcaaagccaagggcacgaggtagcgcagcgcgcacccagaggctcctgggacggacaccaccccacgctcacgggtcctctggc

SEQ ID NO: 812892 - DNA, 120 bp, Artificial Sequence
  ENSG00000227068_0 (sequence is synthesized)
ttggagtctggatcaggacccctgtcctgtaacatcttcctggagatcatgaagggactatagtgagaaaaccctgactcaatggctacctttgggtaaatgttggggtcctgtaacatc

SEQ ID NO: 812893 - DNA, 120 bp, Artificial Sequence
  ENSG00000227068_1 (sequence is synthesized)
aaacccctgatccaacaaaagctaactttgggtaagtggtggggtctggtaacatctttctctcgaaccacaaaagggacaatactgaggagaccctccgacgcaaaggaaatagactgg

SEQ ID NO: 812894 - DNA, 120 bp, Artificial Sequence
  ENSG00000227068_2 (sequence is synthesized)
agcactgattggacaactttggcttggcccccagggcaatggtgctgcaagctggatcactggggccgctcagggaaagggaatccagaagcctggcatgctgacaaaaggatattgcct

SEQ ID NO: 812895 - DNA, 120 bp, Artificial Sequence
  ENSG00000227068_3 (sequence is synthesized)
tttctcaaaactcaagagttatgaatggaccttaccatactgatgctttctcactgagctcctgtctactctgaatgcaagaaaccctcatagttaggcaggaatatcataatcgctatt

SEQ ID NO: 812896 - DNA, 120 bp, Artificial Sequence
  ENSG00000223985_0 (sequence is synthesized)
aggcggcgctccatgcgagttgtggccaccgcagtaccccagcaaaggcggggatctgatgggtcaggtctcggcgctggacggaaggctgctgctctggtgaagcgtctggccgccgag

SEQ ID NO: 812897 - DNA, 120 bp, Artificial Sequence
  ENSG00000223985_1 (sequence is synthesized)
cccaagtctgggctgctggggaccagccacgctccccactgctcattccttcatcctagagacattctgactctcctccgactgcgctgtgcacaggtgtgacaagctcttttacatctc

SEQ ID NO: 812898 - DNA, 120 bp, Artificial Sequence
  ENSG00000223985_2 (sequence is synthesized)
agtctgcacaacttcaggcacttagcagattgatatgcatccaacaaatattgattgaatatctgctaaatacccagtaatgtttcatgagtgattgggtgaataaaggaatgctggttc

SEQ ID NO: 812899 - DNA, 120 bp, Artificial Sequence
  ENSG00000223985_3 (sequence is synthesized)
caggaaagttcgtgctgctaggcagaggaactgcagcttgttggcaggtgaagggagcctgtttagctgtgtccagcaacaacttacgtggtcctgcttgtgttccaggtgaagcgtctg

SEQ ID NO: 812900 - DNA, 120 bp, Artificial Sequence
  ENSG00000258026_0 (sequence is synthesized)
tgattggaaagtgatgccattcacattggacacgtttaaatttgagacgctagtggaacaaccatgtatagacacctactcggcaatcctgcatatgatctcaacatcagaagagagatg

SEQ ID NO: 812901 - DNA, 120 bp, Artificial Sequence
  ENSG00000258026_1 (sequence is synthesized)
tgggctgatgacacagaactgagaatagccagcgttgccactgggagtaaccatcacatatgtggcaaaaaaggccattggcgcagatataatcacccaggcgggatgtgtaaaatggaa

SEQ ID NO: 812902 - DNA, 120 bp, Artificial Sequence
  ENSG00000258026_2 (sequence is synthesized)
aaagaaggcaacctagaagcaggattcaacgtatcagatacagtaatgaagacaataagaaattggattgatccaggtctggagttttgccacagagtgaaatggaacaacaatatgcag

SEQ ID NO: 812903 - DNA, 120 bp, Artificial Sequence
  ENSG00000258026_3 (sequence is synthesized)
acaatttcttagaatgctcacaaaagacctgaaaacatggggaggaagcagggcatttacagcaggtcttctctgacactgtgctggtgggcagggagccacctcattactaccaggcac

SEQ ID NO: 812904 - DNA, 120 bp, Artificial Sequence
  ENSG00000258026_4 (sequence is synthesized)
agcttataactcatgcaaaacaacatgctgcaatgttctgatgaaatgctcctctacagtcgaggctcccagaaggcagagagcatattcattaactcattctgctcaacacttagctca

SEQ ID NO: 812905 - DNA, 120 bp, Artificial Sequence
  ENSG00000258026_5 (sequence is synthesized)
tgtccatggagagatgttgaatatgagctcctattaaaaagagggaatacaatcaatcatttgagaatgtccaaaaagaacttttcctttccatcgagccttacaaattattctaagatt

SEQ ID NO: 812906 - DNA, 120 bp, Artificial Sequence
  ENSG00000258026_6 (sequence is synthesized)
gtttctgtaaataccatgtaattgggagagatacacagggagcgtcaattgtgtctgtaatgttttactgcttatgataaaaagatctgaaactaatgtgacaaaatactaagatttcac

SEQ ID NO: 812907 - DNA, 120 bp, Artificial Sequence
  ENSG00000259539_0 (sequence is synthesized)
ccaacaccccacagacacaccatccatgtgcgcaaccatgtgagtctgaaattacagcattagaagttcactcctttgctttctctcagagtcatgctttaaaacataaaaattgggaga

SEQ ID NO: 812908 - DNA, 120 bp, Artificial Sequence
  ENSG00000259539_1 (sequence is synthesized)
attgacacattatgcacactcattctggggtgttagtaacttgtcagctgaggctggtgaggcgccctggaaagtgcgggaagaggcacttggaagtgaccagcgacaggctcccgggct

SEQ ID NO: 812909 - DNA, 88 bp, Artificial Sequence
  ENSG00000259536_0 (sequence is synthesized)
aaaagcactggattaaataaaccgctctacaattctgtatgaagaatcttgctgtgttgcccaggcaggaactacctcctaggctcaa

SEQ ID NO: 812910 - DNA, 120 bp, Artificial Sequence
  ENSG00000259536_1 (sequence is synthesized)
gcaatcctcagcctcctgagagtagctgggactacagctcctctctcgatcggaagatttttacagccaccctactgatctttagggatttgtaaactattacccaggaagaaggcccat

SEQ ID NO: 812911 - DNA, 120 bp, Artificial Sequence
  ENSG00000259536_2 (sequence is synthesized)
tgcctttgcatgcatttgtctttacctcctgctgcctgggaacatccttccaggagcaatcgagtcaacagcaccacagacactgctattccgttgagaaaagttttatatggaaacaca

SEQ ID NO: 812912 - DNA, 120 bp, Artificial Sequence
  ENSG00000259536_3 (sequence is synthesized)
tactgatcatgaacacaataaacagggagggaagctcgggctcagccaggaaacctgccacaaggaagatgtttggaactatccaggagtagtgtcaaacactaacaccatatttacaag

SEQ ID NO: 812913 - DNA, 120 bp, Artificial Sequence
  ENSG00000259536_4 (sequence is synthesized)
gaaggaggacttccggttttaaaatggcggcttgacttccccgccccccagaaagccaaaaacaaatatgcagcccggagattttcctcagcgagaatccgaagctcagatttgaggatg

SEQ ID NO: 812914 - DNA, 120 bp, Artificial Sequence
  ENSG00000259536_5 (sequence is synthesized)
ggaggaagttggaggagaagccatgcatgaagtaaaaaatacatatacacagacataaacacccacattttcacacttcttttgcccatttgttccacaaggaacaaatgagagaaagaa

SEQ ID NO: 812915 - DNA, 120 bp, Artificial Sequence
  ENSG00000259536_6 (sequence is synthesized)
gcccagcctctctccctggagtccgtatacttactacagatttgttagagaagccccagatggggcttggattcaaggagcagacttcactcttactggccccactcacgtgacaattca

SEQ ID NO: 812916 - DNA, 120 bp, Artificial Sequence
  ENSG00000259536_7 (sequence is synthesized)
ccaagggaatgcttgggacacaagcatgaatgtccggaagaggcaagaaaatatatggctcacttaacttacacattacacataagaggcctcagtttctccaagtactttcacatttga

SEQ ID NO: 812917 - DNA, 120 bp, Artificial Sequence
  ENSG00000259536_8 (sequence is synthesized)
catgccagccccagtaacatggtttccaaacctcatgagaaagaattcaagaacatgagagactgattagttactactttctcaagttcattgcatacttaaaaatgaacacaatgcttt

SEQ ID NO: 812918 - DNA, 120 bp, Artificial Sequence
  ENSG00000259536_9 (sequence is synthesized)
atccttaactctattcaatctgtgaccaacacgtagctgcagtatttgccttttggcaaaaaagtctgttcttaaaaatctactgctgggctaaaaacaaatagaacaactacataaagg

SEQ ID NO: 812919 - DNA, 120 bp, Artificial Sequence
  ENSG00000259536_10 (sequence is synthesized)
atgatttcagctggaactagacggggaatcgattacctctcatcagaatcaagtccatccacaaagaactctgaagctaacttctcctggaggaaccgatcccagcattccttcttggct

SEQ ID NO: 812920 - DNA, 120 bp, Artificial Sequence
  ENSG00000259536_11 (sequence is synthesized)
tgggccagagttcgaagcatgtccttggaagtcacttcctgatttaaacctttgattcttcttagcttcttctctagagagagaagtagagcttaacaaggaaaatgagcatgacatgaa

SEQ ID NO: 812921 - DNA, 120 bp, Artificial Sequence
  ENSG00000259536_12 (sequence is synthesized)
attttaactaaatctaaaactcaaaatactaacttaaaaaatctctcaccgatgaggacatccacactccctgccaaagaggtcattttttaaggacagataaaagggaattgaacattc

SEQ ID NO: 812922 - DNA, 120 bp, Artificial Sequence
  ENSG00000259536_13 (sequence is synthesized)
ttcctttttccttcacaaagtcctcaccctgcattgtatcaaataaatgtttaacccgagaaaagggaaaagccataggttctcataaataagtcaatggcatgttttctttgaaatcac

SEQ ID NO: 812923 - DNA, 120 bp, Artificial Sequence
  ENSG00000259536_14 (sequence is synthesized)
gtaagcccagcaggtatctctctaaggaatgcttgttttccctggtttgacatgtgtatactactgtcttttttcaactccttgaaaataatctctctgaggagtaagtggttttttctt

SEQ ID NO: 812924 - DNA, 120 bp, Artificial Sequence
  ENSG00000259536_15 (sequence is synthesized)
tttgttacagtaacatgaagtggtttccaaatctcatgagaaagaattagagaaaatgatgaaagatccaacggttcattagatattaaaattgacttgatgagaactcaataagagacc

SEQ ID NO: 812925 - DNA, 120 bp, Artificial Sequence
  ENSG00000259536_16 (sequence is synthesized)
tttaaaatctctatgtgtgattaaattcttaataaaaagaatctcccaacattttttaaagttgctcaacttgtggcctagatgttggagtctaataaaaacaaatgtcttctaatccca

SEQ ID NO: 812926 - DNA, 120 bp, Artificial Sequence
  ENSG00000259534_0 (sequence is synthesized)
gaattcaaacaaacaatggttgcttttacctctttgatataaaaccccaggaaggctcacctacctgaatcacttttgtgagtaaaatcatattttctgctgccaaactgattaaaataa

SEQ ID NO: 812927 - DNA, 120 bp, Artificial Sequence
  ENSG00000259534_1 (sequence is synthesized)
gttaccatgacaccaattcctcattcctgaagaagatacgagatgaccagctgcaactaagcaaatactttgctcgcgttcagcccatagggtctgaatgctgttttccagctccagtcc

SEQ ID NO: 812928 - DNA, 120 bp, Artificial Sequence
  ENSG00000259534_2 (sequence is synthesized)
ttaaagcgattttcactgagctcttaaagctgaggaggagaaggcactcagggaatgctcccctcttggtgttctccgtgttctcatggtgagcagtgtcatatacaaccagtctctgat

SEQ ID NO: 812929 - DNA, 120 bp, Artificial Sequence
  ENSG00000259534_3 (sequence is synthesized)
ttgctgtacttcccaggctgaacatatgctgcagaatacctttgatgttgccacaattgtgtgtgtgatcttcaatcacggatgtcatcaaattttattaaacttaatgtagataaaacc

SEQ ID NO: 812930 - DNA, 120 bp, Artificial Sequence
  ENSG00000259532_0 (sequence is synthesized)
aagtcctattacccttaagtttcctcttaaaactaactttaaaagttagtttcaaatatcactcatattgtagatacatgctatagtatttaatggtaaaatatcattctacaacttcct

SEQ ID NO: 812931 - DNA, 120 bp, Artificial Sequence
  ENSG00000259532_1 (sequence is synthesized)
tctaagtagcatgcaggtggatcctagttcattgtgctattctttcaaatgttatgtatgtttcaattttttcataacaaaaagttggagaaaacagggccgggcgcggtggctcatgcc

SEQ ID NO: 812932 - DNA, 83 bp, Artificial Sequence
  ENSG00000259532_2 (sequence is synthesized)
tgggaggccgaaatatttggttttctacaatgaacatgtatgacttttgtgggacagtcatttatcctaactggttgagacat

SEQ ID NO: 812933 - DNA, 120 bp, Artificial Sequence
  ENSG00000259530_0 (sequence is synthesized)
cttgaccttccattttcctccctttcctggttgttctgcctgtgccctcctggcacatcagcagtcactgcaggcacatcgacaaaagacaccccaccgccacctgccttgattcacaag

SEQ ID NO: 812934 - DNA, 120 bp, Artificial Sequence
  ENSG00000259530_1 (sequence is synthesized)
gagcacaacctcgtctgaaggactccaatccacagagttaggaaccctcatgggaccctgctcatcctgagcccccaactagcatgtgagttccctggggctctttatggcacttccctc

SEQ ID NO: 812935 - DNA, 120 bp, Artificial Sequence
  ENSG00000259530_2 (sequence is synthesized)
aagtggttccatctacttaatgagcctcatgtcaccttatgaaccactgcctttaatataccctaccctacacacacacacacaaactccatatcttccatctctccctacccctaccac

SEQ ID NO: 812936 - DNA, 120 bp, Artificial Sequence
  ENSG00000259530_3 (sequence is synthesized)
tcacaaacatgtattaagacaatctatttttgaggtatagaaggtaccccaggtgactaacacaaagttcttgtagccaaggagctcagagaacctgaagataccttcactgtccttcac

SEQ ID NO: 812937 - DNA, 120 bp, Artificial Sequence
  ENSG00000259530_4 (sequence is synthesized)
agttatctcaaccttcagcattcccccagagaaatgctgccctctaggaagttctctccaaggaatcccacccctgtcctgagtatttctttaatctacaactttcctgaggctgtgtat

SEQ ID NO: 812938 - DNA, 120 bp, Artificial Sequence
  ENSG00000259530_5 (sequence is synthesized)
tgcacagggggcgtgccaatgggttctgcacttgtgtccaacacccttggtaaatcgacctttccagaggactttggagcccttcgaggattctcagcatctgcatctcccaggagctcc

SEQ ID NO: 812939 - DNA, 120 bp, Artificial Sequence
  ENSG00000259530_6 (sequence is synthesized)
cagcatgcagttggcacttgatgactgtttgtagctaaggtacttaggctgattttatttaatctttagtatcaggctgatattttaaaaattccaatttaaataaaacagttttaattc

SEQ ID NO: 812940 - DNA, 120 bp, Artificial Sequence
  ENSG00000242391_0 (sequence is synthesized)
gaaactacattttctgtaattagagattactctggattttataaataagaatgtggttcctgtaccagatcttggagaagagtacgcctctggaagtcacgggatatccaaagctgtctg

SEQ ID NO: 812941 - DNA, 120 bp, Artificial Sequence
  ENSG00000242391_1 (sequence is synthesized)
agcagagaaccccagagacaagaagggaggggagaatcaggaattggcttttttccctttcctgcttctcaggtcagataaattcagaactcttattcttatacccgcctccgcctcaag

SEQ ID NO: 812942 - DNA, 120 bp, Artificial Sequence
  ENSG00000242391_2 (sequence is synthesized)
ctagcctaaaacccacaatccaactcccttgatgaggatgatcattaacaacaatcactaaataagtacttactaagtgccaggcacagtactagataaataaaattgtctttttatcta

SEQ ID NO: 812943 - DNA, 120 bp, Artificial Sequence
  ENSG00000242396_0 (sequence is synthesized)
ccggcgccgctcacctgcttctggatgtcccgcacgcgctgctcgtgcaggcgcggagcgctgctgagcttgaacaccacccaggcgcgcacgtagtagtagatatcgaagataagcgag

SEQ ID NO: 812944 - DNA, 120 bp, Artificial Sequence
  ENSG00000242396_1 (sequence is synthesized)
agcggcaggaggaagaggcacacgaacacccagcgctggtggatgagcacgaactccagccccttcaggcgcacccacagcaggaagagcagcgcgcacacggccagcgacacggcgggc

SEQ ID NO: 812945 - DNA, 120 bp, Artificial Sequence
  ENSG00000242396_2 (sequence is synthesized)
cacttggaagcagcccagaaaggtgaagacctgttcgtgaactccagaggccattggaagcatggaaggctatggctggcactcttcctctttttccagttcactgaggcagatgggagg

SEQ ID NO: 812946 - DNA, 120 bp, Artificial Sequence
  ENSG00000242396_3 (sequence is synthesized)
cccggaggagaaagaatgaaggaaggcatttcagcccgagtaaactccccaggcccgctctgtgccaggcagtgttgcaagcctcgggtagggtggtgagcaaagcagatggccctgccc

SEQ ID NO: 812947 - DNA, 120 bp, Artificial Sequence
  ENSG00000223360_0 (sequence is synthesized)
cctggagtctcccctgtactctcttgttattggctgaaatgtgtacctccaaaatttatttattgaagccctaacctcagtatctgagaatgaaagtgtatctagaaacatggcctttaa

SEQ ID NO: 812948 - DNA, 120 bp, Artificial Sequence
  ENSG00000223360_1 (sequence is synthesized)
agatccaattgcagaccaattatctgaatttctgggggaaggaacaaagccttacttttcttgtcaaaactctccaggtgattcctgtgtctatccaaagttgagaacactggtctatta

SEQ ID NO: 812949 - DNA, 120 bp, Artificial Sequence
  ENSG00000223360_2 (sequence is synthesized)
gataatgggagtttgtcccagctctacaggtctggggataatgctgatggctgcatttggggaagaggaacagagaagccagcttgagcaacatcttctgagtcactggccaagaaatgc

SEQ ID NO: 812950 - DNA, 120 bp, Artificial Sequence
  ENSG00000260136_0 (sequence is synthesized)
aagttcggtgacctctgcccagccgagagcaggggagggtcccgcggccagggccccgagcggctcaccctccacggcgtggttcacctcttggatgaacagctgcagcttcatcaccag

SEQ ID NO: 812951 - DNA, 120 bp, Artificial Sequence
  ENSG00000260136_1 (sequence is synthesized)
ggtggctgcgtggccatccgccttcccggacgccgcctccttggagccggccctgaaggccgcattgatccactccttcacgtcgaagtcgtctgccaggaacttggagaagtccatggc

SEQ ID NO: 812952 - DNA, 120 bp, Artificial Sequence
  ENSG00000260136_2 (sequence is synthesized)
ggaactgcctcaggcctggcgtccagaacttaagagttggctccgggcggcaacggggatgcagaagcgagcgagcctgcgagagcaccgaggctagcctccgaggcgaaccccagaaac

SEQ ID NO: 812953 - DNA, 120 bp, Artificial Sequence
  ENSG00000260136_3 (sequence is synthesized)
gtaacttgcccctttgcgcttccccgctcagcgcactcagtttgcggctgggaatgaccctcgccgcccgccgttcttcttccggaagtcgttggccgttaccatagtgactgcaggcgt

SEQ ID NO: 812954 - DNA, 81 bp, Artificial Sequence
  ENSG00000260136_4 (sequence is synthesized)
tcccagctgctagggaggctgaggcaggattgcttgagcctgggaagcggaggttggaggaagccgtgattgtaccactgc

SEQ ID NO: 812955 - DNA, 90 bp, Artificial Sequence
  ENSG00000260136_5 (sequence is synthesized)
cccagctgctagggaggctgaggcaggattgcttgagcctgggaagcggaggttggaggaagccgtgattgtaccactgcattccagcca

SEQ ID NO: 812956 - DNA, 72 bp, Artificial Sequence
  ENSG00000260136_6 (sequence is synthesized)
gatcacaaggtcaggagttccatacaagactagcctggcgtggttgtgtgcacctgtaatcccagctactca

SEQ ID NO: 812957 - DNA, 65 bp, Artificial Sequence
  ENSG00000260136_7 (sequence is synthesized)
tgaacccgggaggcaaaggttgcagtgaacagagatcgggccactgttagtatttccttttaatg

SEQ ID NO: 812958 - DNA, 120 bp, Artificial Sequence
  ENSG00000260137_0 (sequence is synthesized)
aagtgggagacagatggatttcagtgggatgtcattatgaaaagcatataaccttctccaaataattaaaagcagcaacaaaagacaaaaagaagaaagccatttgaataaaaattaacc

SEQ ID NO: 812959 - DNA, 120 bp, Artificial Sequence
  ENSG00000260137_1 (sequence is synthesized)
ctgcagctattggctggtaagaacaaagcaagcacaaatggactgaaacagtttatgccttacatagaccacatacgcaagatcaccatagtgtcagctgcctttatctcctctcccaca

SEQ ID NO: 812960 - DNA, 120 bp, Artificial Sequence
  ENSG00000226133_0 (sequence is synthesized)
ctgcaccccatcatccactccaatctgtcctctacatagcggctaaatagatctttaaaagctcaaacctgcctagacagtaacgcctttctaccttggcctgccatttaggggtctttc

SEQ ID NO: 812961 - DNA, 120 bp, Artificial Sequence
  ENSG00000226133_1 (sequence is synthesized)
tgatggaattccagcttaactttccagccttacagcccctgttggtcctagttctctctggccaccagaactcatctgcttcctcctcccacgagaaactggggagagatggagacagca

SEQ ID NO: 812962 - DNA, 120 bp, Artificial Sequence
  ENSG00000226133_2 (sequence is synthesized)
cccaaagcctgctcttctttaagctgtttcctctcaactgggctttccatcgtgccattgctgggctaccttggcttggccaagccccatctcctattgtcgcagtgtgaataccagaag

SEQ ID NO: 812963 - DNA, 120 bp, Artificial Sequence
  ENSG00000226133_3 (sequence is synthesized)
cacttattcacccctgatgcaagtgtgactggagctattgaatgactgatgagatccgttgtaacaatcattctggcaaaggtgtggagatggctcagaggattgagctgggagcagggt

SEQ ID NO: 812964 - DNA, 120 bp, Artificial Sequence
  ENSG00000226133_4 (sequence is synthesized)
ggcctcagccacatgtgctaccatggctctgagcaggggccttcttggatcattcaaccagcagatgaagaaaaagagggcgaatggagaattatatgtcagagaattttatggatctta

SEQ ID NO: 812965 - DNA, 120 bp, Artificial Sequence
  ENSG00000226133_5 (sequence is synthesized)
ctggagggtaaattcaatcctggtaacttaattgtgggcaaaagtgcaaatctcctggcatccaattcttaccatagatttctgatgtctggaagcatggtggagcaacacacttctgaa

SEQ ID NO: 812966 - DNA, 120 bp, Artificial Sequence
  ENSG00000226133_6 (sequence is synthesized)
ccagagagggaagcaggagacttgagttctgatccggatctctctgccgttgggtgatcccctgccctcctctggacctcagtttccccatctctacagtgaggataataatcctagtgc

SEQ ID NO: 812967 - DNA, 120 bp, Artificial Sequence
  ENSG00000226133_7 (sequence is synthesized)
agggtgggagtgttggctgggtagatgtggtcatctgccaagtggccatgctgaggctttgggggctctactcccaccaccaatggggtccttctcagagacttgcactctcttcttcca

SEQ ID NO: 812968 - DNA, 120 bp, Artificial Sequence
  ENSG00000226133_8 (sequence is synthesized)
gctcactcatattgtggggctcagagaatgttaattattagggcccagcccacatggagggcttaagatgaaagcaagctcagagtgtaaagtctaatcaatgccccacacttggcgtca

SEQ ID NO: 812969 - DNA, 120 bp, Artificial Sequence
  ENSG00000226133_9 (sequence is synthesized)
gggcctcggcttggtctgcttggagatggatcattaatctagacactccgacttggaacactgggcacaggaagtcctgaaacattcctgaccacccacagctcagcctgtcagccccat

SEQ ID NO: 812970 - DNA, 120 bp, Artificial Sequence
  ENSG00000226133_10 (sequence is synthesized)
agcttgttgagggagggactgtgtctgattcagttacaattaccagatgagaatggccaattatgagagaattcagagtacaatcaagtccaataaatgccatagtgatgctgaggacaa

SEQ ID NO: 812971 - DNA, 120 bp, Artificial Sequence
  ENSG00000260135_0 (sequence is synthesized)
gtttaggcccagccagccttcctgagcctgtgcatagtcttcctggctcaaggaactctctctaccgaggtgtgatctcctaactcctggcactcatttacctatccatggttggtagtc

SEQ ID NO: 812972 - DNA, 120 bp, Artificial Sequence
  ENSG00000260135_1 (sequence is synthesized)
agcctccaagatgcctgcagtcatccctgcctcctgggattcatatcctcctccacattgtgccaggattgggctctgtggccaaaaagaaaacagcagatgagaggacgtgtctcttct

SEQ ID NO: 812973 - DNA, 120 bp, Artificial Sequence
  ENSG00000260135_2 (sequence is synthesized)
tctctctctctctctctctctcctcttttccttcttctcttccttggatctcttgctctgaggaaagcaaactactatgttgtgagcagcccaatggagaggcccacaagacaacgaact

SEQ ID NO: 812974 - DNA, 120 bp, Artificial Sequence
  ENSG00000260135_3 (sequence is synthesized)
tgtgagcagcccaatggagaggcccacaagacaacgaactgaagcctccagcaacaaccctgtgaggctggaactgcccataaaggctggcaccccagcagccaccttgagaaatgcagt

SEQ ID NO: 812975 - DNA, 120 bp, Artificial Sequence
  ENSG00000260135_4 (sequence is synthesized)
gatgatgctgagtggcaaggcagaaggcacagggtccctgcacctgaggattgctgctccaaacctgggccaccagcctgaagatcccgccagggagaaataaagctctgttttgctgaa

SEQ ID NO: 812976 - DNA, 120 bp, Artificial Sequence
  ENSG00000260135_5 (sequence is synthesized)
tgaccaggccatgtgtattcatcacttcgaaaggcaagcagggtctgtgagaagctggtgaagctctttgtgtgttcacatctctgattgtgccctgtgtccacacttagccaggacacc

SEQ ID NO: 812977 - DNA, 120 bp, Artificial Sequence
  ENSG00000260135_6 (sequence is synthesized)
tacccacttagtggtcttggctttgtttctagggtgagggcttgagctgtgggtaacagtgctgattattacatgctagtaagattgtctccctctttgaagtggtagaaaggtttgtcc

SEQ ID NO: 812978 - DNA, 120 bp, Artificial Sequence
  ENSG00000260135_7 (sequence is synthesized)
cttcagggtgattgggtgaatatcagaaagcaaccacaggaacattttgttgtactttgctaaggtctaaatatttgtctcctcccaccaaaaattagtggttgaaacctcatccccagt

SEQ ID NO: 812979 - DNA, 120 bp, Artificial Sequence
  ENSG00000260135_8 (sequence is synthesized)
gtgatgaaatgaggaggtgaggcctttgggaggtgacgaggtcttgaaggcagagcctttatggatgggattagtacccatataaaagagacctcagggagcttgttcaccccttctgtc

SEQ ID NO: 812980 - DNA, 120 bp, Artificial Sequence
  ENSG00000260135_9 (sequence is synthesized)
gcttgttcaccccttctgtcatgttgagtactcagcaagaagatgccatctatgaggaatggacccccaccagacacccaatctgccagtaacttgatcttggacttcccagcctccaga

SEQ ID NO: 812981 - DNA, 120 bp, Artificial Sequence
  ENSG00000260135_10 (sequence is synthesized)
cagaagcctagataaagaaacaagatttcaggcaggaagaaataataaagaggcaggacttcaagtgtcctgtgaaacacaacattcggcctccggcacacacatccgtgggagacggct

SEQ ID NO: 812982 - DNA, 120 bp, Artificial Sequence
  ENSG00000260135_11 (sequence is synthesized)
caacttctttataaagtgaggaaccaaattgtgaagacatctgttctgttattaatttcacatacatcttaagctcctcaaggccagaaatgaggcttcattcacgtcgaattaatgaaa

SEQ ID NO: 812983 - DNA, 120 bp, Artificial Sequence
  ENSG00000260135_12 (sequence is synthesized)
acctttcatctcaggtttgtaacacagaaaaccttcaatattgggaacagataacctcgaaggtgggttcatatctctcagcacgattgctgtaacttaactctgctgcacccgatcaag

SEQ ID NO: 812984 - DNA, 120 bp, Artificial Sequence
  ENSG00000260135_13 (sequence is synthesized)
gctttctctctgcctcataggtattttaatacaaatgttcctttcatttggctgattgaaggtctccaacctgcaataaatgaaacatctgatccccttgaatccaaataactttttctt

SEQ ID NO: 812985 - DNA, 120 bp, Artificial Sequence
  ENSG00000260135_14 (sequence is synthesized)
ctcttcaaataggaaaattggcacagcttgactttcttccactgccctcccagccacagcttagacacctacaaactcccaccgcaggctggagtgccctggagccctaactgtgatacc

SEQ ID NO: 812986 - DNA, 120 bp, Artificial Sequence
  ENSG00000260135_15 (sequence is synthesized)
cagagacagggttatgctacgttgcttagactgaccacaacctcctgggctcaatcttcctgcctcaacttcccaagtagctagaattacagggacagaacagatgctgtttcccagggg

SEQ ID NO: 812987 - DNA, 120 bp, Artificial Sequence
  ENSG00000260135_16 (sequence is synthesized)
tccatgttcctgctgcacacacatcaagaatgctgctaatttcagcgtctgccttccagacccagacgtcaaaacaactacctttcatctcaggaaagcaaactactatgttgtgagcag

SEQ ID NO: 812988 - DNA, 120 bp, Artificial Sequence
  ENSG00000260132_0 (sequence is synthesized)
cgcctgatacgggctaagggtctctgctctctgatacacattcatgtgtaaaataacaggctaagcactgttgaaaaaataaaggaaaacagacttcacaaggatctccgtgctgaaagc

SEQ ID NO: 812989 - DNA, 120 bp, Artificial Sequence
  ENSG00000260132_1 (sequence is synthesized)
cctggagaatcagctccttccaaaagatcaggggatgaagacttcaagaccgcaactgctgctgtctcacccctaggcaggaatggaccaccctccgccctccaccctccgccagcagcc

SEQ ID NO: 812990 - DNA, 120 bp, Artificial Sequence
  ENSG00000260132_2 (sequence is synthesized)
cacaggaagcaagtagaacctgataccacctcccgccagtctgtgaatatataatctgacttgtattttccctgttttcccattttgcatacttcagaataaagacatctgttcataaca

SEQ ID NO: 812991 - DNA, 120 bp, Artificial Sequence
  ENSG00000260131_0 (sequence is synthesized)
catccatgttgtagcatgtgtcagaaattccttcctttttaaggctgaataacattccattgcatgcatagactacattttgcttctctgtccattcgctgatgggcacttgggctcctt

SEQ ID NO: 812992 - DNA, 120 bp, Artificial Sequence
  ENSG00000260131_1 (sequence is synthesized)
gatgtacaaatatctgttcacattgagatctctctcctttggaaaaggcagggcaaatgtgaaaaaaaaatcatactttcctgatttattgtgactcaaaatttcccaaacctacttctt

SEQ ID NO: 812993 - DNA, 120 bp, Artificial Sequence
  ENSG00000260131_2 (sequence is synthesized)
atttttgaaaagtagatgtcacaattagtaaaaatcctgaaaattttgagtgaaatatgttaggtgatttcccttcgtaagaatataaaagaagtaaaataaaatgatgctgaatcttta

SEQ ID NO: 812994 - DNA, 120 bp, Artificial Sequence
  ENSG00000234807_0 (sequence is synthesized)
ccgggaaaacaagcccagaaggcggcggacactcgcataaagtcacgcagtagtactcggagcccggggtagaacctggacttcaaatctctgcactcccggccgggtggtgggcgcata

SEQ ID NO: 812995 - DNA, 120 bp, Artificial Sequence
  ENSG00000234807_1 (sequence is synthesized)
tcctgggtagcctctaggaagcgctagacacatggaaccaaggcagattcagcctggcagctggcaagtcatggagcactgcctgtccatctgcgagctaacaacagtcgcgctggaagt

SEQ ID NO: 812996 - DNA, 120 bp, Artificial Sequence
  ENSG00000234807_2 (sequence is synthesized)
caacaagggaaatggaaagggagagacccagcctccacaggggctcacgccctgggacctgtgccagtgtgaacaaggttttccggccccaggaagcaggcctaagtactctcatttcat

SEQ ID NO: 812997 - DNA, 120 bp, Artificial Sequence
  ENSG00000234807_3 (sequence is synthesized)
cactgaggagcctgagacgttcagtcattgattggacagccctcaccattcaagccctccttggtttacagcagcagaaagagaggctctgaaggttctagccagaggaagctgcagcca

SEQ ID NO: 812998 - DNA, 120 bp, Artificial Sequence
  ENSG00000234807_4 (sequence is synthesized)
ggcctggcagtctcccctgctcccttccaccagcttggttcctgtttctgctggtcctgggagcccccagcagatggactgcccttatcagccggctccaggccagaggaggaatcctcc

SEQ ID NO: 812999 - DNA, 120 bp, Artificial Sequence
  ENSG00000234807_5 (sequence is synthesized)
ggtcacgtgtggctctctggagggagagagacctcataaatacatacagcccacgcagaggaaggggggagggtcaaggggaaagaaaccttgacattctggcgactgggccaggattaa

SEQ ID NO: 813000 - DNA, 120 bp, Artificial Sequence
  ENSG00000234807_6 (sequence is synthesized)
agtccaccaggcatagtccttattggctatttctatgaggaatctcaaatccacatggcttccctggatgacaacgctgactttgactagccctgggatctggggcattcccagtgtgct

SEQ ID NO: 813001 - DNA, 120 bp, Artificial Sequence
  ENSG00000234807_7 (sequence is synthesized)
gctggcttgatccaggcctaatcctttgcccaggactgacctttcacagtttacagagcactttatctcctggctcagtgaagtctcacagaaccctccagagagaagggagtttatcat

SEQ ID NO: 813002 - DNA, 120 bp, Artificial Sequence
  ENSG00000234807_8 (sequence is synthesized)
caccctcaatttacagatgaggaagctgaggctgcgattgtaactgactgactgctggctacgcagctacaagtgaccgagtccagcctgaaagccacatatattctcccacaaaatcca

SEQ ID NO: 813003 - DNA, 120 bp, Artificial Sequence
  ENSG00000234807_9 (sequence is synthesized)
gagctgccaaacacatcctcctccatgagtcttgctttgtgcccatcactgagctccatgccccgggcgagccatcgttcctgcctggcgaagtccacaatccaataaggagggaaggtt

SEQ ID NO: 813004 - DNA, 120 bp, Artificial Sequence
  ENSG00000234807_10 (sequence is synthesized)
gaaagcagatccatggttgtttggggaagtgaggcagaaggaaaggattcagagaagcacaaggaaccttttagggtggtagacatgcttactatctggtactgagagtttctcatgtct

SEQ ID NO: 813005 - DNA, 120 bp, Artificial Sequence
  ENSG00000234807_11 (sequence is synthesized)
gcacgtatctaattgtacactttaaatacacacagtttattgtatgtcaattatatctccataaagctatttaaaaagaggaacgtaagtggggaaaagaatgaaggaagttggctggcg

SEQ ID NO: 813006 - DNA, 120 bp, Artificial Sequence
  ENSG00000234807_12 (sequence is synthesized)
tataattaagtaagtctgtgagcagtcttaaagtggggacacaaagtaccatgggcacgtaagagaagaaggtagagattcattcccaaacggaagagatcaggaaggagttcttagaac

SEQ ID NO: 813007 - DNA, 120 bp, Artificial Sequence
  ENSG00000234807_13 (sequence is synthesized)
agggtttcaacaaagctcaaggtatggataagtaagggtcaggttaagaaagattcagatggaagatacagatagagtttatttgggaaatagagagtggagtattatacacacgcacaa

SEQ ID NO: 813008 - DNA, 120 bp, Artificial Sequence
  ENSG00000234807_14 (sequence is synthesized)
ttcgcctttttacccaagttttgaaggactgaagttaaaactaacagcaactatcctctcttttcttcagaaattcagacacatgccctacttggcaggcagctagttttgctaataaga

SEQ ID NO: 813009 - DNA, 120 bp, Artificial Sequence
  ENSG00000234807_15 (sequence is synthesized)
ttcctgcccttctccctccctctctgtgcatctcatcccttcggtcccgctgaggcccctaccctctcggatttcctctttgaactgaactgccaaatacttgccagcttccagggccct

SEQ ID NO: 813010 - DNA, 120 bp, Artificial Sequence
  ENSG00000234807_16 (sequence is synthesized)
gagtacccacatttcagcctcttccaaaccccagagtaagaaggagatttggggagttctgggtgggcatgtgatgggagactaggtccaacataaaaagatatttccctttttcttcca

SEQ ID NO: 813011 - DNA, 120 bp, Artificial Sequence
  ENSG00000234807_17 (sequence is synthesized)
tactttttggcttagtaattgacatgtgaccattggagaattttgaatagtttattagaatacattgtgatagagaagaaggaaattcaagaattgttacaatgttgtacactgattaac

SEQ ID NO: 813012 - DNA, 120 bp, Artificial Sequence
  ENSG00000234807_18 (sequence is synthesized)
tggctaatttgctgcaaaaccaattctgatcactgctcttatggtttgtaatacattattttgggtttggatgatcctgttattcatagctttacataaagaaatattccaatgacatat

SEQ ID NO: 813013 - DNA, 120 bp, Artificial Sequence
  ENSG00000234807_19 (sequence is synthesized)
gaaacccatatatgaaattgtgggttagctcttgctttcaattttgtattatgtttgttgattttaaactgtctcctttcaaaagtttccttattaattaaataaaccactcagccacat

SEQ ID NO: 813014 - DNA, 120 bp, Artificial Sequence
  ENSG00000234807_20 (sequence is synthesized)
gactcagtcagggtcatacacacagttacctggtagggctgttgtgtgaccccaggctggccccagattgggctcttccactcacgctctttctgcgtctgcctctcagccatacaagcc

SEQ ID NO: 813015 - DNA, 120 bp, Artificial Sequence
  ENSG00000234807_21 (sequence is synthesized)
aaagaaacactgtgttcccagcccacgaatgaagctgaggcatgatggacaaggcttatggaactagacttttcttctccaagtgctctctcccacaacttccaaaattatccccatggg

SEQ ID NO: 813016 - DNA, 120 bp, Artificial Sequence
  ENSG00000234807_22 (sequence is synthesized)
gatgatgcttacaacagaaatgccagctccaccctctttccagctgcctgctggacatcactgcctggatttatgctcagttctagatacaatgcttggcctagagtgggtgctcactgt

SEQ ID NO: 813017 - DNA, 120 bp, Artificial Sequence
  ENSG00000234807_23 (sequence is synthesized)
tgaataaatagtcaatgatgtcctacagataatatctgaatctaagttcaccgtatccactgctgagtccccagtgcctagacaaggcttggggaacaattgttcaatgaataaatggaa

SEQ ID NO: 813018 - DNA, 120 bp, Artificial Sequence
  ENSG00000234807_24 (sequence is synthesized)
gaatgcattttccctccctccaacatagtttattttttggattgcctacttctgctgagatcctcatccctctacagtttctcaagccaaaagcccaggacttccccaggacaccccttc

SEQ ID NO: 813019 - DNA, 120 bp, Artificial Sequence
  ENSG00000234807_25 (sequence is synthesized)
tctcatgtgactctcagcaaactggtcaccacattctttcaattcaccctctgacctgtctttcatgccaatctcctcctctccaaatctgaacacatgaacttctttactttattgtgc

SEQ ID NO: 813020 - DNA, 120 bp, Artificial Sequence
  ENSG00000234807_26 (sequence is synthesized)
agaaaccaaactaccaagccccaggaatggcagagttggctggaacggggtgctctgattctgacagctctctttctcttacacctccatcttctgagttcattgatgtactggcctcat

SEQ ID NO: 813021 - DNA, 120 bp, Artificial Sequence
  ENSG00000234807_27 (sequence is synthesized)
tctctctcagcagtttcctcagtatcacagggatgtggatgctacacactcctatctatacagttttggggtcagagtagaaaaaacctctttcccatgtgctgcaatgtcataattcct

SEQ ID NO: 813022 - DNA, 120 bp, Artificial Sequence
  ENSG00000234807_28 (sequence is synthesized)
agagaactccaatttacctagtgtggcatatgggcctgcccctggaccagccactggggttggcagcaaagaacacctctgtgggagttagaagagggcactatcttctgagtgtctgca

SEQ ID NO: 813023 - DNA, 120 bp, Artificial Sequence
  ENSG00000234807_29 (sequence is synthesized)
cctccacaggtgcaagcttgccctgcagagcacaggctggattccagtccccacttattatccctgccagacaagcttctacagggcataacctgcacaactgtacatggcggacctggc

SEQ ID NO: 813024 - DNA, 120 bp, Artificial Sequence
  ENSG00000234807_30 (sequence is synthesized)
tggcagtggatgtggggctgggcactcccagttcgaatcagatgtctacacctggccaattactactgttagaaaggcagggtcatgcaaatgatctcactttccatgtggacacgtggt

SEQ ID NO: 813025 - DNA, 120 bp, Artificial Sequence
  ENSG00000234807_31 (sequence is synthesized)
cagagtggagggaggtttggaaaaagaacatttctctaagaaaggaaggtagcacgttcatggaccacagcagaatcatatgagctggaatgtgtttacaactcctaaacctgcttcttt

SEQ ID NO: 813026 - DNA, 120 bp, Artificial Sequence
  ENSG00000234807_32 (sequence is synthesized)
ttttggttctcttcattgatacaaagaaccatctgcccagttactctctccaaaaacccatgaggtatcctgaattctttcctctccctcataatcattctcctgaatatgtctcaaata

SEQ ID NO: 813027 - DNA, 120 bp, Artificial Sequence
  ENSG00000234807_33 (sequence is synthesized)
tattctaatcatctctccgtttcttctgccatctcctaggttaagcaactattaattcttgcttggcccattacaaaaatggcctcctaacaaaaacaaccccaaattcatcccatccct

SEQ ID NO: 813028 - DNA, 120 bp, Artificial Sequence
  ENSG00000234807_34 (sequence is synthesized)
tgggtagcctctaggaagcgctagacacatattcctatcaggcgaaggccgcctttcctggcctcccccacaggcccgccagcgattcgtccttacaaggctagcctccacgggctgccc

SEQ ID NO: 813029 - DNA, 120 bp, Artificial Sequence
  ENSG00000234807_35 (sequence is synthesized)
tctgtgtaaataaagccacagacttccgcccacaggtcgccgcaggtcccgcccgcagcgccgggccgcgggggaggcgggaactggtgctacggccgctacgcaggcctcgggaggctc

SEQ ID NO: 813030 - DNA, 120 bp, Artificial Sequence
  ENSG00000234807_36 (sequence is synthesized)
gagcaggtggaagaaatccaggctcagaccgtcggagtccccacccatgagcacccttctccactgatcactcagaacatggtaggccctagagagacagcagcccgaatcttcccagaa

SEQ ID NO: 813031 - DNA, 120 bp, Artificial Sequence
  ENSG00000234807_37 (sequence is synthesized)
accctgcaggagattccttcttcccattttatagaagggaggctgaggctcggcacgttgaaatggcttgaccaaggtcccacaggcaaaaaaatggtacagcaagatattgtaacccaa

SEQ ID NO: 813032 - DNA, 120 bp, Artificial Sequence
  ENSG00000234807_38 (sequence is synthesized)
tatctggctgcaaaacccagtctctccccaacccacctatcgtcaccgagattgtaaaacttctaaccgggaagaatcaaatacatgcacaacgggttacaggttaacagacagatggga

SEQ ID NO: 813033 - DNA, 120 bp, Artificial Sequence
  ENSG00000197322_0 (sequence is synthesized)
attccgcattcctagcctggcggcgcgcgcggctccttaatgagactcgggccaagggccgacctcgcgattccgctcgcccctattttatgtttgatttttccttcccaacgccggcta

SEQ ID NO: 813034 - DNA, 120 bp, Artificial Sequence
  ENSG00000197322_1 (sequence is synthesized)
gcgctgggacccgaatggggccggccagctgcggcgggaggagcctccacctccctcagctgcgtttctccagggtagacgccaccgcagtcactgatgtcccttttcaaaggatgcacg

SEQ ID NO: 813035 - DNA, 120 bp, Artificial Sequence
  ENSG00000197322_2 (sequence is synthesized)
ctccccaccgggcgccggaggtgttttgcagccgctcttccagaggcgcgggtagggggcaccctacccccacccccagagttcgctgggcactggctgggaatcagcctcgctgctgtg

SEQ ID NO: 813036 - DNA, 120 bp, Artificial Sequence
  ENSG00000197322_3 (sequence is synthesized)
cccagctcctctcgggccgcgggggctctggggctcagcttcgtgcgggatgggtccggggcgcagctgtgggaaacctatttattctgttgctggggaaggaagacggagaagaggagg

SEQ ID NO: 813037 - DNA, 120 bp, Artificial Sequence
  ENSG00000197322_4 (sequence is synthesized)
ggacagtgctttcctacagtagtatggtgcatatctccaacatcacaggcattgtaggtacaacagtgagcaggacaaaaccagctcttgtcctcatggaactaactttctagaggggaa

SEQ ID NO: 813038 - DNA, 120 bp, Artificial Sequence
  ENSG00000197322_5 (sequence is synthesized)
ggcagacactaagcttctaattgcttgcaattgtggtgtgatttggcatcatgcacttcgctcatcttatggagaagactgaggcctgtggttggaaagggcgagggagcagcctgctat

SEQ ID NO: 813039 - DNA, 120 bp, Artificial Sequence
  ENSG00000197322_6 (sequence is synthesized)
ctttagagaacacagtttcagcctcaagttcttcctgtacctccgatatggatctacccttcctggattgaagccttgtgccaagtccatgggcctgatgatcctctgactctccaaatg

SEQ ID NO: 813040 - DNA, 120 bp, Artificial Sequence
  ENSG00000197322_7 (sequence is synthesized)
ccagattttcctcctccttgcctcagggaagtgaagggcagccgatagcccacctggagaataaaatatgactacaacctgcagtgctccatggacctgtcattctcagcagtgtaaatc

SEQ ID NO: 813041 - DNA, 120 bp, Artificial Sequence
  ENSG00000197322_8 (sequence is synthesized)
ctactgctcagagagaaggcagttggcacaaggtagacagccagttgtttcagctattccaatcctgcatgtcatttacctggaaaggggttctatacattccctctgcctttcctacta

SEQ ID NO: 813042 - DNA, 120 bp, Artificial Sequence
  ENSG00000197322_9 (sequence is synthesized)
ccccagcagactgccctcggtctcacctgttagtcctagttacggattcccaaacagcaatgccactggagcttagataaggggaagtcagaggagccaccccaactggagcccgggctg

SEQ ID NO: 813043 - DNA, 120 bp, Artificial Sequence
  ENSG00000197322_10 (sequence is synthesized)
gagagaggacctggcatgtgtgtactcttctatcccagatgagcaccttatcaacttaaggtggtagtgtctctgctgtttccattctgtttgtgtcttctggacagaggattggcaatg

SEQ ID NO: 813044 - DNA, 120 bp, Artificial Sequence
  ENSG00000197322_11 (sequence is synthesized)
gttggaggttatctcagtcaccagttcccaggtgatgcctggaagaaccctgtcctcctgccaagaagccaggcagcaagtggggttctgtcccaggccccggtgccctacatggatgct

SEQ ID NO: 813045 - DNA, 120 bp, Artificial Sequence
  ENSG00000197322_12 (sequence is synthesized)
tatcaaggacccatacataaactggcacccacttcctcccatgcctgacctgccctcatgataggccaggtgacatctgtccttcagcatgcctctgtttttcagaatgtctaccatcag

SEQ ID NO: 813046 - DNA, 120 bp, Artificial Sequence
  ENSG00000197322_13 (sequence is synthesized)
gagacaatcagatgagccaatgtggagcatcatgaagacatgttcctgggatcatcctggaatccgactctgtctcagctcaagggggttccgagatttcctaagctagccctctcattt

SEQ ID NO: 813047 - DNA, 120 bp, Artificial Sequence
  ENSG00000197322_14 (sequence is synthesized)
tacagctgcaaaaacggaggcctgttaattcagtcattttatgaaatcctttgaaatttttattgagctctaattgtgtgtgaagtattatggaatgcttctgtactggaatgcataggt

SEQ ID NO: 813048 - DNA, 120 bp, Artificial Sequence
  ENSG00000197322_15 (sequence is synthesized)
tgaacaagacagaaaggcccagatggcagaagttcaagagctttcaccaacccatatagagaacctagtaatattaatgactaatgttaatgaatccatgctttttacgtgccagtcact

SEQ ID NO: 813049 - DNA, 120 bp, Artificial Sequence
  ENSG00000197322_16 (sequence is synthesized)
tacaacgctgttacgtaggtactgttattataaccattttccagatgagaaaactgaggctcagtgaaggcaagtttcttgcctagggtcatagagctataaagtagcagagtcacagct

SEQ ID NO: 813050 - DNA, 120 bp, Artificial Sequence
  ENSG00000197322_17 (sequence is synthesized)
caaaagcacatatatgtgattccaaagctcagatacgtaacccatttagccactttcactgtgatatgcaagggcccaggatttcatatatagcaaagctatcatttctgggtggacatg

SEQ ID NO: 813051 - DNA, 120 bp, Artificial Sequence
  ENSG00000197322_18 (sequence is synthesized)
tttaggggcagtggggtaccaggcataaataggctgttcaacacggggagggcagtgtgtgaaggaggccagcacaggggctctgggaacacaggcacctctgatgagaaagtagtgttc

SEQ ID NO: 813052 - DNA, 120 bp, Artificial Sequence
  ENSG00000197322_19 (sequence is synthesized)
tttctgcagtactgttctgagtagctcagcctcttgttccccttccccagcacccagattcacacctacatgctgttagacattcaccccatttagtacacagttatgcatacacgtggc

SEQ ID NO: 813053 - DNA, 120 bp, Artificial Sequence
  ENSG00000197322_20 (sequence is synthesized)
tattgtagcaattgtcgaactttcaccctgcagctgggctgctttgccttcccctgtaggctgagctcccagcttagattccagcaccaatagctatttgtgggacaggagaatgtcagc

SEQ ID NO: 813054 - DNA, 120 bp, Artificial Sequence
  ENSG00000197322_21 (sequence is synthesized)
agtgaagggcagcatgatggccagcatgtggctttcccaagcagagacctgggttccagtcctagaaggcaaggcaactgtattagtttgctcatgctgctgtgacaaaatactacagac

SEQ ID NO: 813055 - DNA, 120 bp, Artificial Sequence
  ENSG00000197322_22 (sequence is synthesized)
caaatggcttaaacgacagaagtttttttttctcaccgttctggaggctggagtccaagatcagcgtgctggcagggttggtttccccttaggactctttccttagctagaagatggaca

SEQ ID NO: 813056 - DNA, 120 bp, Artificial Sequence
  ENSG00000197322_23 (sequence is synthesized)
ccttcttgctatgttttcacatacggtcatttttctgtgttcatgaatcatggtttatcttcctcttcttataaggacgctagtcatattggatttgggccccatgaaaatggttcattt

SEQ ID NO: 813057 - DNA, 120 bp, Artificial Sequence
  ENSG00000197322_24 (sequence is synthesized)
taacttactcacctctttaaagacgttagctccaaagattgttgtatgctgagttacttggggttggaacttcaacgtatgaattttggaggtagaagatatatttgagagtaaaaaggg

SEQ ID NO: 813058 - DNA, 84 bp, Artificial Sequence
  ENSG00000197322_25 (sequence is synthesized)
gttctggttttgcaatcagatcttggcaatgacctggagcggtaggatataaataattcccacatgcttagcattccaataatg

SEQ ID NO: 813059 - DNA, 120 bp, Artificial Sequence
  ENSG00000197322_26 (sequence is synthesized)
gaacactaggcataaatgggctaaaaattactttggagcagcagtcttaaatggaccatttagggcaaactggaacatatggacaccctaacattctggccccatcactcactctacagc

SEQ ID NO: 813060 - DNA, 120 bp, Artificial Sequence
  ENSG00000197322_27 (sequence is synthesized)
catcttcttttaaaccactgcacctctctgagtctcagtttcttcatctgttgaatggagataatcatatcaactcccccaagcaggcacttttaaaatactagtaaatgcatactgatt

SEQ ID NO: 813061 - DNA, 120 bp, Artificial Sequence
  ENSG00000197322_28 (sequence is synthesized)
acctgacagtactgagcaccactgcatgctctgtaaaggttaaccattgctattattgaaaccaaactgctcactgaggtctatgggcctatgtgatttgacccctagctgcttttccaa

SEQ ID NO: 813062 - DNA, 120 bp, Artificial Sequence
  ENSG00000197322_29 (sequence is synthesized)
attcatttcttcccccttcccccttctcccttctattttattacactggcaccacaaaggccgcccagcagtcatatatcaagcacattcctgcctcagggcctttgtacctgttgttcc

SEQ ID NO: 813063 - DNA, 120 bp, Artificial Sequence
  ENSG00000197322_30 (sequence is synthesized)
ctccacctggaatgttttcccctaaccccttgctcctttacttcattcaggtttttgcccaactgccacttcctcagagataccttccgagatatatgatgagctgatataaaataatgc

SEQ ID NO: 813064 - DNA, 120 bp, Artificial Sequence
  ENSG00000197322_31 (sequence is synthesized)
aactattgttctacctccattgctttattcttttatgctactttaattggattcatagcagttggtattttattttagaattgcctgtgtatctatctgtctcttctgatagaatgtaag

SEQ ID NO: 813065 - DNA, 120 bp, Artificial Sequence
  ENSG00000197322_32 (sequence is synthesized)
ctccccaagggccaagattctgtatgaaccattcaccaacgtatccccagtgcccagaatggtgcctggcatatgtgcttaacaaaataaactgactggattatttatccatattcactt

SEQ ID NO: 813066 - DNA, 120 bp, Artificial Sequence
  ENSG00000226859_0 (sequence is synthesized)
gagcagtaagccaggtactggacaactaagcactgcagaaagacccagttggtctggtccctcagggcagcagctctggggggcaccgccacagcttttcactgtggagatcagcagcag

SEQ ID NO: 813067 - DNA, 120 bp, Artificial Sequence
  ENSG00000226859_1 (sequence is synthesized)
cagctatggcagcatcctgacctcacaggccttcctgccttgcatggaggagccaggcaggagaggagcaagacctgtagaagcctgggtgatagaagactacttgtgagctggtgtgag

SEQ ID NO: 813068 - DNA, 120 bp, Artificial Sequence
  ENSG00000226859_2 (sequence is synthesized)
gttacagaagtgatcttggtgttgagcacttaaaggcccaagatggaccggttctatgaaggtcggcagcatgagtatggtgtcacgactcagacaggatgagagtcatcattggatccc

SEQ ID NO: 813069 - DNA, 120 bp, Artificial Sequence
  ENSG00000226859_3 (sequence is synthesized)
tgggcctctcacccaggaccccaggtgcctacctttgaagctttcatcttcactcctgactgactgattggggctccattggtgagcccgactcctgatccaatccaggcctccagatga

SEQ ID NO: 813070 - DNA, 120 bp, Artificial Sequence
  ENSG00000226859_4 (sequence is synthesized)
cagtctgttgaagaatgggcagcacagattgtgattcttgagattctgagtatactcttgaagctgggttagtgtcctaggcttctctgcttgtaagaactgggctataatcccaggcaa

SEQ ID NO: 813071 - DNA, 120 bp, Artificial Sequence
  ENSG00000259764_0 (sequence is synthesized)
acaggaagttgttctcaccgctgcagcagtgacacaggaagttgttctcaccactgcaggtgcagaaaacaagcctgatactcatgacagcctatgaggggccaggcactgactgagcta

SEQ ID NO: 813072 - DNA, 120 bp, Artificial Sequence
  ENSG00000259764_1 (sequence is synthesized)
acaacctgcggagctgagagctgggagctccaaaaacgccagcagggaagaagcagtgggaccaaagcaaccccttcctgcatgtgcctccaaaagagacctttccttttctaatagatg

SEQ ID NO: 813073 - DNA, 73 bp, Artificial Sequence
  ENSG00000259764_2 (sequence is synthesized)
aatgtttgccaggatggtcttggtctcttgaccttgtgatccgcgtgcctcccaaagtgctgggattacaggc

SEQ ID NO: 813074 - DNA, 120 bp, Artificial Sequence
  ENSG00000259764_3 (sequence is synthesized)
ctagtacttaaatgcttttttcactttctcaaccaagggagtcactttggttttcctgcctttggaagacgtaaaaatgagaattccatacctatggcataaagtgtatggcataaattt

SEQ ID NO: 813075 - DNA, 120 bp, Artificial Sequence
  ENSG00000226853_0 (sequence is synthesized)
ctgccagtttcgctcccggttagcccaggactttttatagcatagagttttaaagcaagggcttagaatcagacctgggtcaaaatcctgccttccaccttcaccaaggcagtgtgacct

SEQ ID NO: 813076 - DNA, 120 bp, Artificial Sequence
  ENSG00000226853_1 (sequence is synthesized)
tgacgttcctacataagagattaaaatacgccaaattccagcgaaacagctgatgccagccagcttgaagacccctgccacagaagaagggaatcagcatgagaatacagcttcttcatc

SEQ ID NO: 813077 - DNA, 120 bp, Artificial Sequence
  ENSG00000226853_2 (sequence is synthesized)
ccctgtactcttcagccaattaatgatctccacacttgggaccactctaaaacccttaagaacctgagactcaaagtcctcctggagacgaatttgaggtttcctcctatctgtgtttgg

SEQ ID NO: 813078 - DNA, 120 bp, Artificial Sequence
  ENSG00000226853_3 (sequence is synthesized)
tggccctatgattaaacctctttctcttctgcaacctggtgtcccagtgtattaacttgccatgggcatcagacaacaaacctatatatagtatcccaaatatggtgctccactttgaaa

SEQ ID NO: 813079 - DNA, 120 bp, Artificial Sequence
  ENSG00000226853_4 (sequence is synthesized)
ggggcgggacttccggcttccctgctcccacaaaatggtagccgccgtgggggatgtccagttttttttcctcttcccaagtacagacgcagagcagacttgtctttccgcttaacctca

SEQ ID NO: 813080 - DNA, 120 bp, Artificial Sequence
  ENSG00000226853_5 (sequence is synthesized)
gcttctattctattgcggtacgggggtggggtgggggtggggaactacatgcatgtccactcagtatactgaaactggttacattgatggaaaacttccaaagcttcttgaaataaagac

SEQ ID NO: 813081 - DNA, 120 bp, Artificial Sequence
  ENSG00000226851_0 (sequence is synthesized)
caggtcctcatctctctgatcctgtttcccatcgtctctttacccttgatgaagataaaattcctggctagacaccttgcttaaagaaattaaataaagggacaaaatcaaagagttgga

SEQ ID NO: 813082 - DNA, 120 bp, Artificial Sequence
  ENSG00000226851_1 (sequence is synthesized)
cagaatatgaccttgaggaaatggagtattatatacaaatgtgaatgaaaaccaaaaggcagaagaatacacacagtatgctacgtttcacacaaaattaaacaccattccataatttga

SEQ ID NO: 813083 - DNA, 120 bp, Artificial Sequence
  ENSG00000226851_2 (sequence is synthesized)
gacaagggtgtttgctttccatggaccaaattgacatcacagagggccatcagaccagaaccatcttcagaggaccctgctcaagaggatgccggcagggacgaggagaccccagggaat

SEQ ID NO: 813084 - DNA, 120 bp, Artificial Sequence
  ENSG00000226851_3 (sequence is synthesized)
tgcctctctcccactgtgtgatgtcattgtgggatggtcaatacacatgcctatcctctctccagatgcagatgctaagaggactccattctgatgactgtctatatcaaggcctcctac

SEQ ID NO: 813085 - DNA, 120 bp, Artificial Sequence
  ENSG00000236532_0 (sequence is synthesized)
caagataggttgaaaggggagttcgtagtcatctcttctaatcaggagatccctgaaagccgaacatttaaatgttctcttcttgaaataaaaataccatagttttagttaggaatgtgc

SEQ ID NO: 813086 - DNA, 120 bp, Artificial Sequence
  ENSG00000236532_1 (sequence is synthesized)
tatgttgaaaataacagaaaaactgacctctgtggcttaaacaagtaaggatttattttccttccgtagctggaggaagggaggtgcagctttggctcagctcttaacagtgcaacatct

SEQ ID NO: 813087 - DNA, 120 bp, Artificial Sequence
  ENSG00000236532_2 (sequence is synthesized)
agtgcaacatctagtgcctctatagttctcttggacacagatggctgctttcgaagaagaaagaagtggaaagtgatggagtttctatgctccagctctctttgcctgctgccatccacg

SEQ ID NO: 813088 - DNA, 120 bp, Artificial Sequence
  ENSG00000236532_3 (sequence is synthesized)
tgctcctctttgccttctgccataattgtgagcccccctcagccatgtggaatggcccacagccaagccattgagagacaagtccatgggagacaaattagctcatgcagctgagatgtc

SEQ ID NO: 813089 - DNA, 120 bp, Artificial Sequence
  ENSG00000236532_4 (sequence is synthesized)
ctggagattttccacagcaccacttggccagtgcctagacaagaggccatctttgaagaagtaaacaagtaccatacactaaagggatgacagaacaacgaaacaaaaggcttccgaggc

SEQ ID NO: 813090 - DNA, 88 bp, Artificial Sequence
  ENSG00000236532_5 (sequence is synthesized)
tctgggaaggagtcaagtggaagtggctgccagggtgtggtgacgcaacctgtagtcccagcacttcgggaggccgaggtggcagatc

SEQ ID NO: 813091 - DNA, 120 bp, Artificial Sequence
  ENSG00000236532_6 (sequence is synthesized)
cctgtagtcccagcacttcgggaggccgaggtggcagatcactcgagctcaggagttcaagagcagcctggcaaaatcccgtgactccagaagtatgaaaattagccgggcgtggtggcg

SEQ ID NO: 813092 - DNA, 120 bp, Artificial Sequence
  ENSG00000236532_7 (sequence is synthesized)
atcctgtctcaaaaaacaaaataaaatataacaaaactggtatagacattcatatgtaggtttttgtatggatttggtatgatttttattgttaaagtttagtttttatgttttagagtt

SEQ ID NO: 813093 - DNA, 120 bp, Artificial Sequence
  ENSG00000236532_8 (sequence is synthesized)
atatatatatatgaatcatttaatttgtatgcttatgtgtttggctccttttcctcagcataatgttttaagattcctctatgaatcagttgcatatatcaggagttttttcttatagtt

SEQ ID NO: 813094 - DNA, 120 bp, Artificial Sequence
  ENSG00000236532_9 (sequence is synthesized)
cagtaatattccattatgtgaatatagtataatttctttatctcttcagctgttaatggacatttagggtgttcagtttggggatatttgaaatgttatgaacatttttgtacagatctt

SEQ ID NO: 813095 - DNA, 120 bp, Artificial Sequence
  ENSG00000236532_10 (sequence is synthesized)
atgatacatacatttttatttttcttatcagaatgatattactgagtcatgtgatatttttatttttaacattatgtaaactgttttaaatagaacaattgttttccaaagtagctgtgc

SEQ ID NO: 813096 - DNA, 120 bp, Artificial Sequence
  ENSG00000236532_11 (sequence is synthesized)
tatttataccttcagtcaaaatatacaaaagtttcttgttactgcacataatctccaacagaaaggacttatggtaaatctttaacaaattttagtcattctactccctgttggtggtat

SEQ ID NO: 813097 - DNA, 120 bp, Artificial Sequence
  ENSG00000236532_12 (sequence is synthesized)
ctttttgtggtatttttgaaagaaattgacttttattgagatatgatttacatataattaaatgaccacattaagagtacactttgataagttttgctaactgtacatatcaatgtaacc

SEQ ID NO: 813098 - DNA, 120 bp, Artificial Sequence
  ENSG00000236532_13 (sequence is synthesized)
accacaattgaaaattagatcttttttatcttctcaaagtgttcctttatgctcttctgtagacaatcttccccagtcctcaacacaggcaccaatggatatgaattcagtcattgtcga

SEQ ID NO: 813099 - DNA, 120 bp, Artificial Sequence
  ENSG00000236532_14 (sequence is synthesized)
ctggtgttctgcctgtcctagatgtcacgtaaatggattcaaatagatgtgtgctcttgtgtctgactccttttgttcagcgtggtgcttttgagatttatctgtgtcatttggggtatc

SEQ ID NO: 813100 - DNA, 120 bp, Artificial Sequence
  ENSG00000236532_15 (sequence is synthesized)
agtaattcatatcttttatttccaactagggttgtgtgattataccacaatgtcttttgcaaattagttgtttcattttatatattttatatgtatcagcagtttatgagttataaataa

SEQ ID NO: 813101 - DNA, 120 bp, Artificial Sequence
  ENSG00000236532_16 (sequence is synthesized)
aattacccagtttcaggtagttctttggtggtgttttcctgttgctctccgttctaacacctgatattgttggtcttacttttagccattttagtactagatgctccccgactcacgatg

SEQ ID NO: 813102 - DNA, 120 bp, Artificial Sequence
  ENSG00000236532_17 (sequence is synthesized)
aaatatcacaagttgaaaatgcatttttaatacactttaactatcaaacgtcatagcttagcctagcctaccttaaacaggctcacaacacttacattattctacacttgagcaaaatca

SEQ ID NO: 813103 - DNA, 120 bp, Artificial Sequence
  ENSG00000236532_18 (sequence is synthesized)
tctggcaacacagcaaactgtagagtatctcttgtttactctggtgatcttgtggctgactggaagccttagctccctgccactgtccaacatcccaagagggttttctactgctttcta

SEQ ID NO: 813104 - DNA, 120 bp, Artificial Sequence
  ENSG00000236532_19 (sequence is synthesized)
ctgaatgtgtattgcttttgcaccattttaaagtaaaaaaagttatatgtcaaatcatcaaaagttgttttgatgagattttctgtttgtgtagtaatatttcactttagttataatttc

SEQ ID NO: 813105 - DNA, 120 bp, Artificial Sequence
  ENSG00000236532_20 (sequence is synthesized)
tgtatacctgacagccaattatattgtgtatgtttatatttatttacttatttcataccttcttgtatgaaattgttgtccaaattttttgtccagtttctaaatcacagtttactttct

SEQ ID NO: 813106 - DNA, 84 bp, Artificial Sequence
  ENSG00000236532_21 (sequence is synthesized)
tcacagtttactttctcattattaataagacggagtctcttctctgtcgcccaggctcgagtgcagtggcgcaatctctgctca

SEQ ID NO: 813107 - DNA, 80 bp, Artificial Sequence
  ENSG00000236532_22 (sequence is synthesized)
ttttttcttttgtaaaatttgaatatataagtcccatataaggtcaatttattcttttttctcgcatggtcagtgctata

SEQ ID NO: 813108 - DNA, 120 bp, Artificial Sequence
  ENSG00000236532_23 (sequence is synthesized)
aggtcaatttattcttttttctcgcatggtcagtgctatacaagatgataaagatatatgcctaccttttcttttgttaagtttatatttcagctcatatgttaaatctataatccattt

SEQ ID NO: 813109 - DNA, 120 bp, Artificial Sequence
  ENSG00000236532_24 (sequence is synthesized)
tgagttaattttgtagatggggtgaggtaagaatagatacacaacttttaggctgatattcagttgtcctagcactagtttattgaagatacttttttccccattaaatgtccttgaact

SEQ ID NO: 813110 - DNA, 120 bp, Artificial Sequence
  ENSG00000236532_25 (sequence is synthesized)
cttgaactttttcaaaaaagcaattgactatatgtgtttgggtgttgatacagtttgagtctgtgtccccacccaaatcatgtcaaattgaaatccccaatgttggaggtggggcctggt

SEQ ID NO: 813111 - DNA, 120 bp, Artificial Sequence
  ENSG00000236532_26 (sequence is synthesized)
attggttcatggggacagattttccctttggtgttgttgttatgacagcgagtgagttatgagatctggttgttcaaaagtgtgtaacacctccccactctctcttcctcctgctctggc

SEQ ID NO: 813112 - DNA, 120 bp, Artificial Sequence
  ENSG00000236532_27 (sequence is synthesized)
catgtaagacgtgactgcttgcccttcaccttccgtcatggttgaaagtttcctgaggtctccccaaacatgcttcccatacagcttcccaactgtgaacaaatgaaatctcttttcttt

SEQ ID NO: 813113 - DNA, 120 bp, Artificial Sequence
  ENSG00000236532_28 (sequence is synthesized)
attacccagtttcaggtagttctttacagtagtgagggaacagactaatacagttatatcctgttccatcttttttctaatgctttgctgcattgtcttataacacagctttataatctt

SEQ ID NO: 813114 - DNA, 120 bp, Artificial Sequence
  ENSG00000236532_29 (sequence is synthesized)
tcttaaaatcataacctgtaggccctcaaaatcttttctttttaaaaattattttggctattgaaggtcctttgtgtttccgtataaatttgacaattgtctggttgatttcctcaaaaa

SEQ ID NO: 813115 - DNA, 120 bp, Artificial Sequence
  ENSG00000236532_30 (sequence is synthesized)
ttcttttggcttccaaaatttgaaagcagcctaagtgttatcaagaattgaatggataaataaaatgcagtacagatacacaatggagtactattcagcaatagaaagaatgaaatcctg

SEQ ID NO: 813116 - DNA, 88 bp, Artificial Sequence
  ENSG00000236532_31 (sequence is synthesized)
aggtcattatgttaagtgaaataagccatacacagaaagacaaacttcatatattctcacttttttgcgagagggagaatagattgat

SEQ ID NO: 813117 - DNA, 120 bp, Artificial Sequence
  ENSG00000236532_32 (sequence is synthesized)
aactcatggagatggagaatagattgatggttaccagaggcttggaaggatagtgggagtggggaatgtggatggttaatgggtacaaaaatacaggtttatagggttaatacctgttga

SEQ ID NO: 813118 - DNA, 120 bp, Artificial Sequence
  ENSG00000236532_33 (sequence is synthesized)
tacaacaacatggtagctacagccaacaataatttatcatacatttaaaaataaccaaaacagtataattgaaatatttgtaacacaaggaaaatgataagtacctgaggtgacgggtac

SEQ ID NO: 813119 - DNA, 120 bp, Artificial Sequence
  ENSG00000236532_34 (sequence is synthesized)
cctatttaccctgatgtgattattacacattgtatgtctgtatcaaaatatctcaggtactgataaatgcatacacctactatgtacccataaaaatcaaaaattaaaaattaaacaaca

SEQ ID NO: 813120 - DNA, 120 bp, Artificial Sequence
  ENSG00000236532_35 (sequence is synthesized)
agcccccctcagccatgtggaatgatggaaaacagaacaagccatggaggccccagggatcaggcagggccaagaggatctgatggcggaagggggagcacatcaacaagaccttacaag

SEQ ID NO: 813121 - DNA, 120 bp, Artificial Sequence
  ENSG00000236532_36 (sequence is synthesized)
gcaacttgcatggatgctctgaagcaactttgaggtctccttgatgaggaaagttggctcaacctgctgtagagtaggcccacagccaagccattgagagacaagtccatgggagacaaa

SEQ ID NO: 813122 - DNA, 120 bp, Artificial Sequence
  ENSG00000236532_37 (sequence is synthesized)
gagacaaattagctcatgcagctgagatgtcctggagattttccacagcaccacttggccagtgcctagacaagaaaatgtattttaatgtaaaacataccaggctattctttggtatga

SEQ ID NO: 813123 - DNA, 120 bp, Artificial Sequence
  ENSG00000236532_38 (sequence is synthesized)
agtctcatgcatcattcctgtgcctaagtgacaatctcagttgagaccttcaggttttcccaccttatctatctcaacgactgggttcctttccactttgccattcctcatccctccact

SEQ ID NO: 813124 - DNA, 120 bp, Artificial Sequence
  ENSG00000236532_39 (sequence is synthesized)
gactgccatattgatttttcaaaatgtaaatataattatgtcactcatcttccaaaagttcttaagtaattgcttataacccacaatatgatagaaaaactgagagtggtgtagaggatc

SEQ ID NO: 813125 - DNA, 120 bp, Artificial Sequence
  ENSG00000236532_40 (sequence is synthesized)
ctttaggccttgggcctgcctacctgctcagcattatctgctctaccctcattaaccccctctgcactggctatactgagaaatttggtatcccccaaagttatcatgacatgctgccct

SEQ ID NO: 813126 - DNA, 120 bp, Artificial Sequence
  ENSG00000236532_41 (sequence is synthesized)
tttggctggccagctcttgctacctgctgcaagagaacagctactctcccttcaagtccaaatgttatctatcctgttgaatgagaaatatcattaaacacatctttttcccttctgtgg

SEQ ID NO: 813127 - DNA, 120 bp, Artificial Sequence
  ENSG00000236532_42 (sequence is synthesized)
aggccatctttgaagaagtaaacaagtaccatacactaaagggatgacagaacaacgaaacaaaagattacagcaaagctttctgctttcctttcttgctctgataccctcaaaattata

SEQ ID NO: 813128 - DNA, 75 bp, Artificial Sequence
  ENSG00000236532_43 (sequence is synthesized)
tatactctgttcctgggattccagagtcttctgccacaaccaaggcttccgaggcgatccggcaaatcagagagc

SEQ ID NO: 813129 - DNA, 84 bp, Artificial Sequence
  ENSG00000236535_0 (sequence is synthesized)
ggccgaacttttatcttgaagtagatagtgtcaacaaatacaaaaataaaaataatgtctttaaatgaggtgatcagggaaggc

SEQ ID NO: 813130 - DNA, 120 bp, Artificial Sequence
  ENSG00000236535_1 (sequence is synthesized)
aataaaaataatgtctttaaatgaggtgatcagggaaggccttctctgaaggaattcatatattaatgcctatacagaagtggggagaaggttcagggttggaggaagagtaggacaaac

SEQ ID NO: 813131 - DNA, 120 bp, Artificial Sequence
  ENSG00000226856_0 (sequence is synthesized)
agcagcccacagcagccgagttcgcgccgccggtaggtgctgccatgccagggggcgggatcgtggagcgcctcgcagaaccgcacgaaagcaaaaacaaagccatctctccggagcaga

SEQ ID NO: 813132 - DNA, 120 bp, Artificial Sequence
  ENSG00000226856_1 (sequence is synthesized)
aatagaacagacgtggccggggaaagccaaatatttgtggctggactcagacacatcacgctccagtttgggttccaaggtgcttctctctggattttcacctgccttgccaaaaatgat

SEQ ID NO: 813133 - DNA, 120 bp, Artificial Sequence
  ENSG00000226856_2 (sequence is synthesized)
tgattacgctgggccaactgggtgtccggcaatacccaacaaatgactttggcccctaacagcaggtcttggccagacagaaatcaatatttcaccattaaaatctatcaaagaagagtt

SEQ ID NO: 813134 - DNA, 120 bp, Artificial Sequence
  ENSG00000226856_3 (sequence is synthesized)
cattgctgaaactcaatatcttcatttgaacaaacagagtggtgatttccaccccacagtggtgttgttcagaatgaacatgaaaataaagcagcgagcatgtagtcggctctcattaaa

SEQ ID NO: 813135 - DNA, 120 bp, Artificial Sequence
  ENSG00000226856_4 (sequence is synthesized)
atcctggatatggagtccgagatatggaaggccaattggctgccaaagaaatgggagagacaacacgtgcggtggcttcaaaggaggagggagagttgagtttaaactaatgaagtaaag

SEQ ID NO: 813136 - DNA, 120 bp, Artificial Sequence
  ENSG00000226856_5 (sequence is synthesized)
gcagggatgggagactgaaaggaaggaagacgctgacacttcttcagtgtgattgtatgccatacactgtgctgggtgctgttaatacaacaacgcttctggctatgtactgtttaaccc

SEQ ID NO: 813137 - DNA, 120 bp, Artificial Sequence
  ENSG00000226856_6 (sequence is synthesized)
cagggtagggctggaaaagaaagccacgtcctcctttactgtatcagcagtgaatttgcaccaccttctgggagcatgcctggatacacagcttagggacaagaaacctacgctcaccaa

SEQ ID NO: 813138 - DNA, 120 bp, Artificial Sequence
  ENSG00000226856_7 (sequence is synthesized)
gtgtccaccagctcctcggcaaggagggagtaaaacgaattttttctgccacaacttctctaggcatttgtctggtcttctgctggaaaatgtggatgtggttgtgatcatactagaccc

SEQ ID NO: 813139 - DNA, 120 bp, Artificial Sequence
  ENSG00000226856_8 (sequence is synthesized)
tgggaataaggacaaacctgatgaatggtgaagtgagcagaaagaaagtggatcccagaggacttttcagagaggagcttccaggccagccctaggctatacatctgtggactttgaagc

SEQ ID NO: 813140 - DNA, 120 bp, Artificial Sequence
  ENSG00000226856_9 (sequence is synthesized)
actacatgggtaatcaatatatagtggttcacagatcatttgtggttcccttttagcagtgatggatgtctggaatcgttgtgattcattttgtcagaccattaaacaagattctgtcca

SEQ ID NO: 813141 - DNA, 120 bp, Artificial Sequence
  ENSG00000226856_10 (sequence is synthesized)
gcgcgcgcgcagctgaaacgccggctgatgaaactgacaaaggcgagagcgcgcagcagcccacagcagccgagttcgcgccgccggtggctggactcagacacatcacgctccagtttg

SEQ ID NO: 813142 - DNA, 120 bp, Artificial Sequence
  ENSG00000226856_11 (sequence is synthesized)
acgtggccggggaaagccaaatatttcctgccgtcctggtgaacacaatcgagcaaggcagtgaagcaaacatcattaggtactgttattatccccactttacagatgagataactgagg

SEQ ID NO: 813143 - DNA, 120 bp, Artificial Sequence
  ENSG00000226856_12 (sequence is synthesized)
cacaaaagtttgaagcagcttgcccaaagtcatcttctaataagtggtggagccaggatttgaatccaagcagtctggctctagagtccagtgtattatccattaagttatgctgtttca

SEQ ID NO: 813144 - DNA, 120 bp, Artificial Sequence
  ENSG00000226856_13 (sequence is synthesized)
aaccacccaatgatgaggaaggatttcagtgaatctcctggaagagatctagagaaaattttttctacccagtgttgtcagtgcaaattcagctcctccaggaaaacattttatgaagct

SEQ ID NO: 813145 - DNA, 120 bp, Artificial Sequence
  ENSG00000226856_14 (sequence is synthesized)
tgcccatctagtactgatgctctgccttttcctgatctccaatgacagcacagctctagactcctggctggaaaaccaggatgactgtgtgctgaatattctgctcctgctattcatcta

SEQ ID NO: 813146 - DNA, 120 bp, Artificial Sequence
  ENSG00000226856_15 (sequence is synthesized)
gtgggccctgttcatggatctggcattgacaagatgccaagaagaaaatgaagaaaatgaataaagagaaaaggtcaccccctgaaaggaagcctttgtatactacagaaactccaactt

SEQ ID NO: 813147 - DNA, 120 bp, Artificial Sequence
  ENSG00000226856_16 (sequence is synthesized)
tcaacctgcaaatctctgtggagttttcaaccttcatggctgagtccagagaagaaatctggctgagagcttgagaccaccccttgaaaaaaaattaaatcaagttctcaaatgttccta

SEQ ID NO: 813148 - DNA, 120 bp, Artificial Sequence
  ENSG00000226856_17 (sequence is synthesized)
taactccttggtgtttctgccttacaatcgctccttataccccacccagatcctcagcactgcagctcccactgccactgcccgctgtgagtcacctccccctctcccttttttaaacca

SEQ ID NO: 813149 - DNA, 120 bp, Artificial Sequence
  ENSG00000226856_18 (sequence is synthesized)
aacggcaaggccatattgcagttatccataaatggaaaagcaagaagccaccaatacctgtttgagaagatggcattttaattagcacactccggctgccataaacccgggctcctgccc

SEQ ID NO: 813150 - DNA, 120 bp, Artificial Sequence
  ENSG00000226856_19 (sequence is synthesized)
cgccccctcctcccccctcccccgccgtgccctctctcaacctccccgctcacccccatctatgtaaaaaagccataaagcctctctccaatcgctttctcggagggagtttttgcaacc

SEQ ID NO: 813151 - DNA, 120 bp, Artificial Sequence
  ENSG00000226856_20 (sequence is synthesized)
aacaattcaatgtgccttgacattttaatagcctgccgtcctggtgaacacaatcgagcaaggcagtgaagcaaacatcattaggtggctggactcagacacatcacgctccagtttggg

SEQ ID NO: 813152 - DNA, 120 bp, Artificial Sequence
  ENSG00000236536_0 (sequence is synthesized)
aagtccacagcagcgcagcagccaggggtcattagccagtccatcttgcaaagtcatcagtctcaaagactggttcttaaacaagtgagcccagcccttttcccggcactaaacttctag

SEQ ID NO: 813153 - DNA, 120 bp, Artificial Sequence
  ENSG00000236536_1 (sequence is synthesized)
ctgatgaagagctcctggccattgggtacagggatccccgcaaggctcaggcgacgctctgatgccagaatactgagaggggaattcaaaatgaacacctaaccagaaccatcctgccca

SEQ ID NO: 813154 - DNA, 120 bp, Artificial Sequence
  ENSG00000236536_2 (sequence is synthesized)
tgagttcttaagtggggcttgaatgttacttttggagcaaaagtagtccaggaggtacctctcaaaaaatggctggagctagatactccctgctttgcaaactgcaacacgccctggctg

SEQ ID NO: 813155 - DNA, 120 bp, Artificial Sequence
  ENSG00000236536_3 (sequence is synthesized)
acgagtccagtctgctcatatacagctctttcttatctaacattttacctaacaattttcttttccacatttgcaaggatggctccctttttacttgttgacaggggttgtgcaggctgg

SEQ ID NO: 813156 - DNA, 120 bp, Artificial Sequence
  ENSG00000236536_4 (sequence is synthesized)
agagttggtgtcttagctgcccattaaccttgttggaaaacacactcacttcacttgtatcaaagagttgctggaataactgatgaaagaatgcaagaaataaatagttattcataggaa

SEQ ID NO: 813157 - DNA, 120 bp, Artificial Sequence
  ENSG00000283973_0 (sequence is synthesized)
aaagagtccggatctggggctccatcatgaatctctaagagtggcccagagattctcacgttccctagtcattcacccacgtgcctcagctgcagaacctgtcctcaaggtgctcacagg

SEQ ID NO: 813158 - DNA, 120 bp, Artificial Sequence
  ENSG00000283973_1 (sequence is synthesized)
ctgagggaaggcagacagaggacaagtggcaacctacaaaacaccaaatgggctccatactcaaccaaggtgcccctcagccagaactggacacattgccagagaactccaggggtcatc

SEQ ID NO: 813159 - DNA, 120 bp, Artificial Sequence
  ENSG00000283973_2 (sequence is synthesized)
tgtgagaagtagaggaaggcgtcccagaggagtgcaccgaagtcacccagcggccgagtgagaactccagtccagctttccacccgctactccgcgcatcccagcttgccttacagccgg

SEQ ID NO: 813160 - DNA, 120 bp, Artificial Sequence
  ENSG00000283973_3 (sequence is synthesized)
gtaccggctccaccattttgctagagaaggccgcggaggctcagagaggtgcgcacacttgccctgagtcacacagcgaatgccctccgcggtcccaacgcagagagaacgagccgatcg

SEQ ID NO: 813161 - DNA, 120 bp, Artificial Sequence
  ENSG00000283973_4 (sequence is synthesized)
catgggctgagtaaggcagacccgcaactgggaaaaggcatagactggatgtgctaagaaacaaggagctgtggagagactttgaggagggaagtagcaaaacccaaaagtcattcaccc

SEQ ID NO: 813162 - DNA, 120 bp, Artificial Sequence
  ENSG00000283973_5 (sequence is synthesized)
cccaggtttgagatgggtatgcatttccaggcaagagagcccggccggtgcaaaagcaaggcttggctcacaaacgggaatgtggggggtggagacagggaagggagaagtcaatccctg

SEQ ID NO: 813163 - DNA, 120 bp, Artificial Sequence
  ENSG00000283973_6 (sequence is synthesized)
ggcaagacctcctggagtctctctaacaaataaatactactttccatgcagtagacgctgttctaaacactttacaaatattaactcacttggtctttctacaaccctacgaggtggtac

SEQ ID NO: 813164 - DNA, 120 bp, Artificial Sequence
  ENSG00000283973_7 (sequence is synthesized)
gtcttcaggctcagagaagagaaggcattgtttgcccatgaatgtttgcaagtaaatagcagagctgggactcaaagagtccggatctggggctccatcatgaatctctaagagtggccc

SEQ ID NO: 813165 - DNA, 120 bp, Artificial Sequence
  ENSG00000283973_8 (sequence is synthesized)
agagattctcacgttccctagcttggggcctccatgaggctaacaatggggtcacatgtctctgtccctgggaaagtggccagcatggggctggcccagagaaggacaaggtggctgttt

SEQ ID NO: 813166 - DNA, 120 bp, Artificial Sequence
  ENSG00000283973_9 (sequence is synthesized)
cctagtgcaccgaagtcacccagcggccgagtgagaactccagtccagctttccacccgctactccgcgcatcccagcttgccttacagccgggtaccggctccaccattttgctagaga

SEQ ID NO: 813167 - DNA, 120 bp, Artificial Sequence
  ENSG00000246898_0 (sequence is synthesized)
aggaagtgaatcttcacagggaaggaagcaacaaaactctgcctttggcttttgctggctgagcagggaaaggcctatagacacagggcattgggcaggagctagaacagccctccctag

SEQ ID NO: 813168 - DNA, 120 bp, Artificial Sequence
  ENSG00000246898_1 (sequence is synthesized)
agcactacataaagcagccaatattttgcaaagcatagggaagagtgaaagtcatccggggcatttgcagacacagcactaagaacttggtgacaacagccctgaagcaaaacagcagca

SEQ ID NO: 813169 - DNA, 120 bp, Artificial Sequence
  ENSG00000246898_2 (sequence is synthesized)
tgtactgggcagggcttgggagataagacaggacatctgaagctaaacatggatcccctctgaaagctacaatcaaagtgtcatccacaaaatcttatctcaagccttgactagagaagg

SEQ ID NO: 813170 - DNA, 120 bp, Artificial Sequence
  ENSG00000246898_3 (sequence is synthesized)
acccacttccaagaccacagagttgaatgaattcagtccttgcagcccgttgaactgagggcctccccaacatgctcacctgcttcatcaaagcctgcgagagagagagtccactagcaa

SEQ ID NO: 813171 - DNA, 120 bp, Artificial Sequence
  ENSG00000246898_4 (sequence is synthesized)
gaggacattgcagtcttatctaatgcaatcactgaagtgacatcctgtcaccttggtcaccttttctattctattcattataaatgagtcccaagtcctgccacactcaagtggagggga

SEQ ID NO: 813172 - DNA, 120 bp, Artificial Sequence
  ENSG00000246898_5 (sequence is synthesized)
ttacacagggctggagtaccagcggtggggataatttggggtcatcttagagttcttccatcacacgggaattctcagctcaccaaatctgggattccgcatctggccattccttaagct

SEQ ID NO: 813173 - DNA, 120 bp, Artificial Sequence
  ENSG00000246898_6 (sequence is synthesized)
gaaggcctggcatatttttgagtgtccatttggatcagctaataaacccagggtttgtctactggctggaggagtaagaactataaggctaattgaaatgaatctacttaaaatagtgac

SEQ ID NO: 813174 - DNA, 120 bp, Artificial Sequence
  ENSG00000246898_7 (sequence is synthesized)
ctgatttttctaataattactggaaggtaagggttgattgagactttaaaataaaaccaaaaattattctaaatttttcatattttatataagaaagttttgatttttactgcaaccatt

SEQ ID NO: 813175 - DNA, 120 bp, Artificial Sequence
  ENSG00000246898_8 (sequence is synthesized)
aagagaatttttatacaaatattccaggctcattagttttcccaaaggcttctcataatcctttgatatttaaatcattccctctttcaagtcattttttatctgccttgtcgatactct

SEQ ID NO: 813176 - DNA, 120 bp, Artificial Sequence
  ENSG00000246898_9 (sequence is synthesized)
ttttgttaatttgcccaactcatctggatcttcctttgtcactggctctgtaaatttgagtatttctccaataatgctcctgtcaactttatgaaaccctttgtcttttgcaagatttaa

SEQ ID NO: 813177 - DNA, 120 bp, Artificial Sequence
  ENSG00000246898_10 (sequence is synthesized)
aaattccctttataataagcattctacagtaagtgaagactcactagcaaatatatgagtgatggatcaagagagacaaagtgttaaaaattgacagatgcaacttttaaaaatgaaatt

SEQ ID NO: 813178 - DNA, 120 bp, Artificial Sequence
  ENSG00000246898_11 (sequence is synthesized)
cttggttaccatctaacaaagtaagtacaggacctgtatgctgaaaactacaaaacactaatgaaggaatcaaagaaagtgtaaataaatggagagatataccatgttcatgaattggaa

SEQ ID NO: 813179 - DNA, 120 bp, Artificial Sequence
  ENSG00000246898_12 (sequence is synthesized)
gtctcagaattattaaaatgtaaattctatccaaattgatctatagattcaacccaatcacaatcaaaatcctaactggctgtataaattgacaagctgattccaacattcacataaaaa

SEQ ID NO: 813180 - DNA, 120 bp, Artificial Sequence
  ENSG00000246898_13 (sequence is synthesized)
tccaaagaatgtagaagagccaaacagctttgagaaaaggagaaaaaagttaaaggattcacattatctgattccaaggcttcttataaagctacagtcattgagtcagtatggtactgg

SEQ ID NO: 813181 - DNA, 120 bp, Artificial Sequence
  ENSG00000246898_14 (sequence is synthesized)
caaaaggagagacacattctatgtatctatctgtctatatatctatgtgaaatataataaagagttcagaaatagatccacaaataagatcaattgaattttggcaaagatgaaaaaata

SEQ ID NO: 813182 - DNA, 120 bp, Artificial Sequence
  ENSG00000246898_15 (sequence is synthesized)
attcaatggagaaaggacagaattttcaataaatgatgctgaaacaattagacatccatatgcaggaaaaaaatgtttgacctatatgttcattttatacaaaaaattaattcaaaaaga

SEQ ID NO: 813183 - DNA, 120 bp, Artificial Sequence
  ENSG00000246898_16 (sequence is synthesized)
atcatagacctaaatgtaaaacataaaaacttttaaacttttaaaataaaatataggtaaaatcttcgtgacctacaattaggcagagttcttggagatgacatcaagaatttaattcat

SEQ ID NO: 813184 - DNA, 120 bp, Artificial Sequence
  ENSG00000225037_0 (sequence is synthesized)
catacccggatcactcccctttgtattttattgccatgtaatgggatgttctttaaattctctgttgaatgaatgagactaggtctgagtgtacaacaattaaagtgacatcaacattct

SEQ ID NO: 813185 - DNA, 120 bp, Artificial Sequence
  ENSG00000225037_1 (sequence is synthesized)
ggagaaattcccagagaggctctttcttaagacatgaggctagggaactagatgtgatttagtgtagaagtcctatccccttggaaccaaagcagaacctattattcactaagggtggag

SEQ ID NO: 813186 - DNA, 120 bp, Artificial Sequence
  ENSG00000225037_2 (sequence is synthesized)
tcgacaggagagcttacagcctggtggaagaattggaaatcttattactagaaataaaggtgagaataagatggaagtgatccccttaccacctcagagagaataaaggattatacagaa

SEQ ID NO: 813187 - DNA, 120 bp, Artificial Sequence
  ENSG00000225032_0 (sequence is synthesized)
gacgccatcagcactgccactctgcccctgccccatcccctaccctgttgtgctggcccatgtgggctttggtgccagctctgctcagccatggaccctcgacttctctgaacctcagtc

SEQ ID NO: 813188 - DNA, 120 bp, Artificial Sequence
  ENSG00000225032_1 (sequence is synthesized)
tcctcttgcagcaaacgggctcatcacagccaggcctggcattgagccatggttgctaggactgtccacctagagggcccagccaggccttttgggtcatgcctctgcccctcaaggctg

SEQ ID NO: 813189 - DNA, 120 bp, Artificial Sequence
  ENSG00000225032_2 (sequence is synthesized)
atggagatggcgttttcagggaggatggatggggtaacgtgaggaaactgaggctcgggagtacagagcctgccccacctgctgcatgaccttgggtcaaccctgcccctctctgaggcc

SEQ ID NO: 813190 - DNA, 120 bp, Artificial Sequence
  ENSG00000225032_3 (sequence is synthesized)
tttagcaggtagagaatgggccagagcagctccgagtgccctgcagctctgctcttggattgctccaagcctcattccctccacattcctgactcctgtgtggctatgggccaagcagtc

SEQ ID NO: 813191 - DNA, 120 bp, Artificial Sequence
  ENSG00000225032_4 (sequence is synthesized)
tttccttgagcctctgacatccgattctgtgtcatggggttatcagccctgccttcttggtcctgggctgggagtggaggctccatcctggcctggatggggtggcaaagaggtaggtgc

SEQ ID NO: 813192 - DNA, 120 bp, Artificial Sequence
  ENSG00000225032_5 (sequence is synthesized)
ccccatccctcacccctgcctctgccaccagtgtcgggactcttctgcctggtgtgggcctgggcctggggggaactgatggagaggctagagggggcgtcctgcagggagaggcctcaa

SEQ ID NO: 813193 - DNA, 120 bp, Artificial Sequence
  ENSG00000225032_6 (sequence is synthesized)
ggaaggcaaggccagcacccaccctcaaagggcctctgtctcacccaggagactccatcctcccagcaaggtcagccaataactgtggggatggagtggagccgtgagtgggggcagagg

SEQ ID NO: 813194 - DNA, 120 bp, Artificial Sequence
  ENSG00000225032_7 (sequence is synthesized)
cctagactcccaccccacagggcggtcccgggcaagggctctccatctgcaaagtgcagctctggcccctgctctaggctgctatggctctgggaagccctcctcctgccccttctgggc

SEQ ID NO: 813195 - DNA, 120 bp, Artificial Sequence
  ENSG00000225032_8 (sequence is synthesized)
cccccttgccatgtgctatgtgcccaggccgtttctcagggctgcccgctgtgccctactgtgacctcagccactagaacaaacccgagagacctggagggagctcaccagacaggtcag

SEQ ID NO: 813196 - DNA, 120 bp, Artificial Sequence
  ENSG00000225032_9 (sequence is synthesized)
ggctgatgatgttcaagcgcatgaagacagtcctatggacttcctggaggagaaagagagagcagtatgtggcacctttgggaggcggcttccaggtttactccctggctccgtgacccc

SEQ ID NO: 813197 - DNA, 120 bp, Artificial Sequence
  ENSG00000225032_10 (sequence is synthesized)
agcccaccctagagccttggctttgaatcccatctccaccgcttcgtagctggatgcctctgggtctcctgttctttgagattacactggtgaccatactacatggatgtgcgggtggtt

SEQ ID NO: 813198 - DNA, 120 bp, Artificial Sequence
  ENSG00000225032_11 (sequence is synthesized)
agattcctgggtgggagggtggatggatggatggacggacgggccccaagtccaggtggcagctgtctaactggagcaggaactcggagacggatggggacactctgacctgcatgggta

SEQ ID NO: 813199 - DNA, 120 bp, Artificial Sequence
  ENSG00000225032_12 (sequence is synthesized)
ggctgtctccctcctgactctgggagtctcatctcctctggagtcatggtgggaagaaaggcggagaggaagttccaggagctgggaggcccgaggggtgacaggcatgccaggcagagg

SEQ ID NO: 813200 - DNA, 120 bp, Artificial Sequence
  ENSG00000225032_13 (sequence is synthesized)
acaggcatgccaggcagaggcaggcagatcacaggaggccagaagttcgagacctgcctagccaacatagtgaaacccgactctactaaaattataaaaattagccaggtgtggtggcag

SEQ ID NO: 813201 - DNA, 66 bp, Artificial Sequence
  ENSG00000225032_14 (sequence is synthesized)
aggaggcctcgtctctaaaacaagaaaaagaaggccagttgcagtggctcacgcctgtaatccccg

SEQ ID NO: 813202 - DNA, 120 bp, Artificial Sequence
  ENSG00000225032_15 (sequence is synthesized)
ctgtaatccccgcactttgggaggctgagtctggagacagcgaagaggttgaggtgttctcgtaaatcagtggtgaaaattcaaatcatctttgggaaagtgggttggcaacatgtattg

SEQ ID NO: 813203 - DNA, 120 bp, Artificial Sequence
  ENSG00000225032_16 (sequence is synthesized)
tgggaaagtgggttggcaacatgtattgaaacttcattcattttgacccagtaattccactaatgtggaaatctatcctgagaaaataatcctatataaagaaatgtttcatgcacaatg

SEQ ID NO: 813204 - DNA, 120 bp, Artificial Sequence
  ENSG00000225032_17 (sequence is synthesized)
cctggtcttgagacccggtcttgggacgcagggctaccgtgcagctgagggtgccggttttgggtatgggtactgtgtagaagtggaggaggaagctgaagcgcgggtcaccctcggggc

SEQ ID NO: 813205 - DNA, 120 bp, Artificial Sequence
  ENSG00000225032_18 (sequence is synthesized)
ttggggacagcaggctcacacagttgcccttggccgcccggccctggatgagttccacggtgcctccctcaggccccaagtccaggtggcagctgtctaactggagcaggaactcggaga

SEQ ID NO: 813206 - DNA, 120 bp, Artificial Sequence
  ENSG00000225032_19 (sequence is synthesized)
gactctgggagtctcatctcctctggagtcatggtgggaagaaaggcggagaggaagttccaggagctgggaggcccgaggggtgacaggcatgccaggtgtggtggcagacacccatag

SEQ ID NO: 813207 - DNA, 120 bp, Artificial Sequence
  ENSG00000282317_0 (sequence is synthesized)
cgtcctctcccgggaatgtacccacaggccccctctacgcgcttgggttgcccaggaaaccccaacggtgaccccacaatgcccagcagagccctcgccctctgccaatgacggggtcac

SEQ ID NO: 813208 - DNA, 120 bp, Artificial Sequence
  ENSG00000282317_1 (sequence is synthesized)
cagaatccagcgacccaaggaatccctcaaataagtcggccaaatttcgctgcgaactgatttacacatatggcctcacctggacaagaaggaatcttggaagttcctggggcccaactc

SEQ ID NO: 813209 - DNA, 120 bp, Artificial Sequence
  ENSG00000282317_2 (sequence is synthesized)
gtgtgttgcgctggagatttgtattttgtgaactggtttcaggtggtctcagcacttttctgttaacagggaaccagagtttcaggaaagatctcaaaacctaattttcttcatctcgcc

SEQ ID NO: 813210 - DNA, 120 bp, Artificial Sequence
  ENSG00000282317_3 (sequence is synthesized)
tcactcaaaggcctctttcttgtaagactatgattgttttttttaaataattttttttctgattgcaaacataagatttttgaagaaatgttgtaaaactaatacaaaaaagaaatactc

SEQ ID NO: 813211 - DNA, 120 bp, Artificial Sequence
  ENSG00000225039_0 (sequence is synthesized)
gcgaaacccgaagacttgcagggtaagaactgaagccaccaaaaggcttactataccacacaacacccaagccttcctttggggcatggggacagtggatctatggctcctcagggtgcc

SEQ ID NO: 813212 - DNA, 120 bp, Artificial Sequence
  ENSG00000225039_1 (sequence is synthesized)
gcttcattcacaacagaatggccattttctccagcatggccaactatccctagtctttttgtcatgacagcctagaaggcagaagctagggccaaggcggctgctaaggaattcctactc

SEQ ID NO: 813213 - DNA, 120 bp, Artificial Sequence
  ENSG00000225039_2 (sequence is synthesized)
ctactggggcctaatgtcaggctttccttatattgtggagtgggccctggaagatagttagagacccttcctgctgggcaccctgaagaggagcaagaggatctggtgagcaaaatgaag

SEQ ID NO: 813214 - DNA, 120 bp, Artificial Sequence
  ENSG00000286808_0 (sequence is synthesized)
cttcatccctgttgttgcaaatggcaggacctccctttttaatgctgaagttccatgtttcataccattgtggtcagaaaagataccgccctaatatatgatctgtcctggagaatattc

SEQ ID NO: 813215 - DNA, 120 bp, Artificial Sequence
  ENSG00000286808_1 (sequence is synthesized)
ccctaatatatgatctgtcctggagaatattccatgtatgctcgagaagaatgtgtattctgctgttggatggaatctcctgtatatggctcttagcagcctgaagccatggtttttagt

SEQ ID NO: 813216 - DNA, 120 bp, Artificial Sequence
  ENSG00000286808_2 (sequence is synthesized)
tgaaaggggcattactggcctggcccaaccagaaagagaaacaaagcatccatggctgtattctttcccttggacaccactgtgactatattgtttgaaggggtcagtcctctggcacat

SEQ ID NO: 813217 - DNA, 120 bp, Artificial Sequence
  ENSG00000286808_3 (sequence is synthesized)
acccccttccccaaccaatgccaatcaatcaatcattaacagttgctcaagacaagactgactggggagtggtcccaaggaagcctgatttcatatacacaaagacactagagtcccttc

SEQ ID NO: 813218 - DNA, 120 bp, Artificial Sequence
  ENSG00000286808_4 (sequence is synthesized)
tacacactgtcagccccttccagagcctttgatattgtttgttatgcacaaaatggatgtacctttagtactttatccacctcctgtttactgagatcttctccacactcttgagtcaac

SEQ ID NO: 813219 - DNA, 120 bp, Artificial Sequence
  ENSG00000286808_5 (sequence is synthesized)
cgagactggatcatgtttcggcgtacccggtaatttttggaaaaaatttcaagcaaaacctgtcgatgctttagtagcaaaaacacgttatgatgggaaacagtgatctaaaaagagaaa

SEQ ID NO: 813220 - DNA, 120 bp, Artificial Sequence
  ENSG00000286808_6 (sequence is synthesized)
catccccaaacaagacacccaagccatgcacctgactttgtgttgcagtctctgataaaaaccctcacgcagcacctctggttaaagatgagccaagtcatctctagagacccagcaaga

SEQ ID NO: 813221 - DNA, 120 bp, Artificial Sequence
  ENSG00000286808_7 (sequence is synthesized)
gaaataaaaacacaaaagtaaaggcattaatgctatgtctggaaacttgaatataaataaaaacaaaggtatatgccagcataacaaaagaactggtgaagagacatgagaggatgagtg

SEQ ID NO: 813222 - DNA, 120 bp, Artificial Sequence
  ENSG00000286808_8 (sequence is synthesized)
gcttgaacatatttctgcatggtaaaatgcaggcgtgcatcggacttagcaagcaggtgaagcgacaatctaagctgcacggagatgagaagagggtgtcaaaattggtgtgaagtctta

SEQ ID NO: 813223 - DNA, 120 bp, Artificial Sequence
  ENSG00000286808_9 (sequence is synthesized)
atgcacaaacatgccactgcatccatgaaacaggatgccgtaaaatacgttacaccccaaaataaaaatggaaaagattggattcagtatgtctaatatctgtcataagaattctgaaaa

SEQ ID NO: 813224 - DNA, 120 bp, Artificial Sequence
  ENSG00000286808_10 (sequence is synthesized)
aaacaaaaaaaagtaacaactcacaggattttataagaactcaattgtctagtacaataatgacccgcaccagggcacagctgaaatggcactgactgatatacagaataatgaaaaatt

SEQ ID NO: 813225 - DNA, 120 bp, Artificial Sequence
  ENSG00000286808_11 (sequence is synthesized)
ctgcagtttggcataaaggaaagaatacaggccaaatttaaaagaccaagaaggagaatgttatggaatttcaacaactctgaaaacttaaacaatggaaactctcttaaagatgcttca

SEQ ID NO: 813226 - DNA, 86 bp, Artificial Sequence
  ENSG00000286808_12 (sequence is synthesized)
tgaaaacttaaacaatggaaactctcttaaagatgcttcatgccgggcgcagaggctcacgcctgcaatcccagcacttggggaga

SEQ ID NO: 813227 - DNA, 120 bp, Artificial Sequence
  ENSG00000286809_0 (sequence is synthesized)
agtcatctctacatgatatcccacagatgccataagaggttaaataaattgatgaccaagaaatctctatttgatttaccaacatgtaagtcattggccacctgagaaagattcactgaa

SEQ ID NO: 813228 - DNA, 120 bp, Artificial Sequence
  ENSG00000286809_1 (sequence is synthesized)
gcaatcaagaccaagctgattgcaatgatgtcgctcatcaggctttctggaaacagatgggatagagtttgagggaagagatgtctattaaggatcaatatttgtgaaaggaaggggagg

SEQ ID NO: 813229 - DNA, 120 bp, Artificial Sequence
  ENSG00000286809_2 (sequence is synthesized)
aggaaagattggtcagagaaagaggttgaacatgatgcaagcctgacaaaaattcagccgaccagactgaggcctctggagtaaatgcggcccaatacttatcgtccttcaggccaacat

SEQ ID NO: 813230 - DNA, 120 bp, Artificial Sequence
  ENSG00000286809_3 (sequence is synthesized)
agccagcctttgtgattttgccttgctcgtggttatctgtgggccatcctgggaaggtcatgatctgtacaagatgacattgcacaatcatgaacagtttccattctgttctctccagga

SEQ ID NO: 813231 - DNA, 120 bp, Artificial Sequence
  ENSG00000286809_4 (sequence is synthesized)
aaacagtaggctatatgtacattctcctaaagtagtctggagcataagcacaatcttcagctttatttgcaaatttgagaaatggataaatgctcaacaggcatttttggattagttgca

SEQ ID NO: 813232 - DNA, 120 bp, Artificial Sequence
  ENSG00000286809_5 (sequence is synthesized)
gcttaccaggtgggtacttataagaacagagaaattttctcctgaacatgatgtatacctccaaacccacagaagaaaatgtggcatctacctaatgctctcaaattgtagtgaacataa

SEQ ID NO: 813233 - DNA, 120 bp, Artificial Sequence
  ENSG00000286809_6 (sequence is synthesized)
taatcacctctgtattggagatttggtatttttggccactaggcacccaatctctctttttattagcaccatgtgctggattgtctgtttcgacttggacagtaaagcaccaggtctaag

SEQ ID NO: 813234 - DNA, 120 bp, Artificial Sequence
  ENSG00000286809_7 (sequence is synthesized)
gccctgtgcagaaaatagttaacacagcagacctgaaactgctgccttaaaaaatcctgcttgaaaagttggctttgggttggtgtctggggacttggattttgagaggatttccaccat

SEQ ID NO: 813235 - DNA, 120 bp, Artificial Sequence
  ENSG00000286809_8 (sequence is synthesized)
tcccagaactgataagagtggcttgctgtgcctagactgtttgtacaaacaatatgatttacgctgaacatctgctttaccctggaagtctggaatgttggctcatgctgggcagagggt

SEQ ID NO: 813236 - DNA, 120 bp, Artificial Sequence
  ENSG00000286809_9 (sequence is synthesized)
acttatgtgaccagccctcaataaaaaccttgggtactaagtctttaacacgcagacttaggaaacaacatttcaaacatgctgtcataaactgttgctggaggaattaagtatgtgtgc

SEQ ID NO: 813237 - DNA, 120 bp, Artificial Sequence
  ENSG00000286809_10 (sequence is synthesized)
gactctacaggagaagaattcttggaagtttgtacctggtttcctctggacttcactcattgtgccctttccttttgcttgttttgctttgaatcctttcactgtaataaatcatagcca

SEQ ID NO: 813238 - DNA, 120 bp, Artificial Sequence
  ENSG00000286806_0 (sequence is synthesized)
ggtgcttaaagacatgagactgaggctaccaacatgacgtcactgaacagggagtcaggagctttgcacatagtcaactcttgcaaactattatgagtttgtcctgctccccactgcctg

SEQ ID NO: 813239 - DNA, 120 bp, Artificial Sequence
  ENSG00000286806_1 (sequence is synthesized)
gaaaccaagcaaacagagagttacaaaaaaagaattacaagcatgaagggtgaacaaccatgttaaatgccgttgacatgtcaaattagctgaggacttccgcagtgatggatgtaacac

SEQ ID NO: 813240 - DNA, 120 bp, Artificial Sequence
  ENSG00000286806_2 (sequence is synthesized)
tttgccacgcaaaaatgttaaacgtagatcaggcaggatgcaaaaatagcataacttcacactctgtaaagttacactccccagtacaactttcaaaccggagcaataaagagagaaaca

SEQ ID NO: 813241 - DNA, 120 bp, Artificial Sequence
  ENSG00000286806_3 (sequence is synthesized)
tcctcaattctaacatatgcattcaggccataattgtccctctaagcatggctttaactgcattccaacgtttgtacatgtaatattttaattatcgtttgttcaaaacataattttaat

SEQ ID NO: 813242 - DNA, 86 bp, Artificial Sequence
  ENSG00000286806_4 (sequence is synthesized)
taatattttaattatcgtttgttcaaaacataattttaattgccatcacgctttttctcaggcctgagagttttttaagactgctg

SEQ ID NO: 813243 - DNA, 120 bp, Artificial Sequence
  ENSG00000286807_0 (sequence is synthesized)
atgaagcagagccacagatacgccacagataagcttatgtaatgaagtgtaaacaaaatgagtcaaggagaagggacagaagacccaagtggagaaattgacaaactcaatcctggcctc

SEQ ID NO: 813244 - DNA, 120 bp, Artificial Sequence
  ENSG00000286807_1 (sequence is synthesized)
tcttctactaaagattacagatcttaaggcatagagtgcaagaaagcttagaagtagatgaaaaactaaagccttggtatttggttgtattggagtttttaccacaagaaaaaaatagtt

SEQ ID NO: 813245 - DNA, 120 bp, Artificial Sequence
  ENSG00000286807_2 (sequence is synthesized)
tgatggtgctggtttaaaggatggtgatgaaaaagaatcaagcttaaatcctatttaatcaaactcaatacggttatgctattattgcttaaaagtatttttatatgtgcctaattctgt

SEQ ID NO: 813246 - DNA, 120 bp, Artificial Sequence
  ENSG00000286807_3 (sequence is synthesized)
ttaatgatgacttcctaactggtctttgcaagttcaaagatcaatgaaccttgattttatagaccttattttaatattaaatacatccctctttaatgaatatcttgtataattataggg

SEQ ID NO: 813247 - DNA, 120 bp, Artificial Sequence
  ENSG00000286807_4 (sequence is synthesized)
ctgtatttttcttaattttgcctggtgtttaataatcttatgtgaggcattagaaagtatcttttaaattattttatcataaattttgttttatttgttacctttggagagttaactcct

SEQ ID NO: 813248 - DNA, 120 bp, Artificial Sequence
  ENSG00000286807_5 (sequence is synthesized)
aatcaggttatttaaaatcctagggcaggtcgaatgttagactttccccctgttaaaatagaaactttagacaaattaaatttaactgtgtttaaataggcaaagaatgattagcaagtt

SEQ ID NO: 813249 - DNA, 120 bp, Artificial Sequence
  ENSG00000286807_6 (sequence is synthesized)
aggcagcccctagaaccagaatagatagggtcagagcaattccggggcagccatgtgattggataacatttattcagagaaaaaggaatgtgacatacaaaaaaatggaaatgaagtaca

SEQ ID NO: 813250 - DNA, 120 bp, Artificial Sequence
  ENSG00000286807_7 (sequence is synthesized)
gtaacagctggattggcttacagtttggtgtttgccttatttgaatatgatttgaacagttgtatgcttgtgattgtcccaaacttggccactgtaattacacatccagttaggttatag

SEQ ID NO: 813251 - DNA, 120 bp, Artificial Sequence
  ENSG00000286807_8 (sequence is synthesized)
ttcactatgtatggagaaacctttagactcaacttaaaatatgtaaggaggcaacggtaggctaaacttaacactttaagcagatttattttacagtatcaattgccacaatagtgccct

SEQ ID NO: 813252 - DNA, 120 bp, Artificial Sequence
  ENSG00000286807_9 (sequence is synthesized)
atgctttaaaaggactatttttgaagattaagaaaatgtctctgaaaaaaaaaacttaattttagagatacaagtgttcaattataaaagcttctggttgaatgtgtgatatgattttgc

SEQ ID NO: 813253 - DNA, 120 bp, Artificial Sequence
  ENSG00000286807_10 (sequence is synthesized)
attataaaagcttctggttgaatgtgtgatatgattttgctgctgctcactctttgagtcctcgcagcctttatgagttgtaacactcaccgccaaagtctgcagcttcactcctgaagc

SEQ ID NO: 813254 - DNA, 69 bp, Artificial Sequence
  ENSG00000286807_11 (sequence is synthesized)
gaaaccacgaacccagcagaaggaagaaaatccaggcacaccatctttaagaactgtagcactcaccac

SEQ ID NO: 813255 - DNA, 120 bp, Artificial Sequence
  ENSG00000286807_12 (sequence is synthesized)
ctgaagtcagagaaaccacgaacccagcagaaggaagaaaatccaggcacaccatctttaagaactgtagcactcaccaccagggtctgtggattcattcttgaagtcagcgagaccaag

SEQ ID NO: 813256 - DNA, 120 bp, Artificial Sequence
  ENSG00000286807_13 (sequence is synthesized)
caaaatctcatcttgaattgtaataatacctgtgtatcaaggacgggaccaggtggagataattgaatcatgagggcggtttccctcaaactgttctcctgatagtaagtgagctctcac

SEQ ID NO: 813257 - DNA, 90 bp, Artificial Sequence
  ENSG00000286807_14 (sequence is synthesized)
ttccctcaaactgttctcctgatagtaagtgagctctcacaagatctgacggctttatatggggctttccccttcacccagctctcattt

SEQ ID NO: 813258 - DNA, 120 bp, Artificial Sequence
  ENSG00000286807_15 (sequence is synthesized)
gctgaactgtgagtcaattaaagctttttcctttataaattacccagtatctcgtacatctttataagcaatgtgagaacagacaaatacaatgtggatgaaatatgttatccagccagt

SEQ ID NO: 813259 - DNA, 120 bp, Artificial Sequence
  ENSG00000286807_16 (sequence is synthesized)
tccaccctggtatttctgcaatggcacttctaggccccagggaaaccagtcatagatgatataaaaattcagaaagttaatatttttgttcaagagaaactaatagctttgcaagccatt

SEQ ID NO: 813260 - DNA, 120 bp, Artificial Sequence
  ENSG00000286807_17 (sequence is synthesized)
ctttaacatagaatcagggatgcttcacatttaaactgtttttgtttgttaagaaaactagaaatgttcttaatatggttaatgataacctcttatatttgtcaagtattttgtaaagca

SEQ ID NO: 813261 - DNA, 120 bp, Artificial Sequence
  ENSG00000286807_18 (sequence is synthesized)
aagaacaattttacatccattactgggatttgtttcataacatccagatagagaatggttgttttgtaatttacctgaggactaacaggagcacaggtcttctgttttttggtacacttt

SEQ ID NO: 813262 - DNA, 120 bp, Artificial Sequence
  ENSG00000286807_19 (sequence is synthesized)
actattttgatggaaaggtaagtggttatcccaagtcctgcatctgggaaaacaccacaaattctgttctctcaactgtgaaatgtgagtgcatctaaaaagattaaagtacactttatt

SEQ ID NO: 813263 - DNA, 120 bp, Artificial Sequence
  ENSG00000286807_20 (sequence is synthesized)
ttgctttagaaattctgccatctaatatcaggctgaaggataaaactcaattcaaatatttcaattaccttaggcccttggctgacataacagttgaaatgtatttgctttccagaatac

SEQ ID NO: 813264 - DNA, 120 bp, Artificial Sequence
  ENSG00000286807_21 (sequence is synthesized)
cttcactacaaagtcatctgtttgggtctggaattccttccataaagttacaatttagatgaagttttctttgatttattcaatcttgttctatgtattttttactctaactagttaatg

SEQ ID NO: 813265 - DNA, 120 bp, Artificial Sequence
  ENSG00000286807_22 (sequence is synthesized)
ctttttgaatattgctatttaattcattggctgtttctacataaaacttactctcaagcagaattttacaaatgtattaaaatatgtaaaagtataatgagacttagtatgttagctctc

SEQ ID NO: 813266 - DNA, 120 bp, Artificial Sequence
  ENSG00000286804_0 (sequence is synthesized)
caggcatgagccactgcgcccagctgatttctttaaagacatggaatgcttcatgtattggcgtgtcatcctcccacaggggccatgctaatctctgtatcatttcaattgtagtatatg

SEQ ID NO: 813267 - DNA, 120 bp, Artificial Sequence
  ENSG00000286804_1 (sequence is synthesized)
agtatatgcactgctgaggcaagcacagaatctgcatgtttaataagctctccctccattcgtatgcctattaaagcttgtaaagtaggaaaccctgtgctgcaaaacaaaatctgaact

SEQ ID NO: 813268 - DNA, 120 bp, Artificial Sequence
  ENSG00000286804_2 (sequence is synthesized)
cctaacaaagttctccaacagcttttcaatcttattttatcttactccaacacttgaactctctgcttccaatgcaattcagaaaggaaagtatccttgcattgacaagtagaagaattg

SEQ ID NO: 813269 - DNA, 120 bp, Artificial Sequence
  ENSG00000286804_3 (sequence is synthesized)
gcctcagcctccagagtagctgggatgacaggcatgcaccaccagcccagctaatgttttgtgtttttagtagagacgggtttcatcgtgttggtcaggctggtctggaactcctggctt

SEQ ID NO: 813270 - DNA, 78 bp, Artificial Sequence
  ENSG00000286804_4 (sequence is synthesized)
ttttagtagagacgggtttcatcgtgttggtcaggctggtctggaactcctggcttcaggtgatccacccacctttgt

SEQ ID NO: 813271 - DNA, 120 bp, Artificial Sequence
  ENSG00000286804_5 (sequence is synthesized)
gaaattatctgaaagaatcgaacaaaataactcacctattctctgcccagagactcatcgcctttcatctgtggcctctatgacattctttttttttttttttcctgagatggagtctcg

SEQ ID NO: 813272 - DNA, 120 bp, Artificial Sequence
  ENSG00000286805_0 (sequence is synthesized)
agatctggtgagacagcatgggaagaaataacacatgggcttttgtgcagctggatataatgaaggtaaattgggtggaattcaaagatttgccagaaaaaagagagatgatttcactct

SEQ ID NO: 813273 - DNA, 120 bp, Artificial Sequence
  ENSG00000286805_1 (sequence is synthesized)
aaaatcattttgcaagataatattttacaaggaaccttttggacatgcattataagcggttacattcccattgtcctaaaaaactccctgcatagttgtactctatttttatcaagccat

SEQ ID NO: 813274 - DNA, 120 bp, Artificial Sequence
  ENSG00000286805_2 (sequence is synthesized)
gctctgacgcctcctgcctggttggcgataatccctaatgcaaagggatcgtgtgaaggtaaccaacccctgcctacattttactctggattccaagagtagactgggcttcagggacca

SEQ ID NO: 813275 - DNA, 120 bp, Artificial Sequence
  ENSG00000286805_3 (sequence is synthesized)
gatgccagggctggcacatctgcctaaaacccataattcttgaacttgacgtgctcagcctctccaaagccgcggcgctgacacagctccccctgcacgagtgtacagcagtcagacagg

SEQ ID NO: 813276 - DNA, 120 bp, Artificial Sequence
  ENSG00000286805_4 (sequence is synthesized)
aacggggagagggggctcaactttctgacggccacttagaggctgcctgaccacaaagacaggactgtaaaacatagaccgcatgtgacctgctggtgctcggcactgacccaggggagg

SEQ ID NO: 813277 - DNA, 120 bp, Artificial Sequence
  ENSG00000286805_5 (sequence is synthesized)
tgagagctgaggcccaccctcccctttctcctacacatggacacctctgagtggaataagggaagactgtcctttctccaagcttgaaggaagatgactgtgactcttttcctggacttc

SEQ ID NO: 813278 - DNA, 120 bp, Artificial Sequence
  ENSG00000286805_6 (sequence is synthesized)
aaggcatcgaagtgtcagctggctgccatcccagcgtctgacagggcagcaggagaaagaggccacctgtatcatccacccgtgctgcagctgaatgggatcggtgcagcatgatagagg

SEQ ID NO: 813279 - DNA, 120 bp, Artificial Sequence
  ENSG00000286805_7 (sequence is synthesized)
ccagctgccccgcaccaggtctgcgtgtcacagggcagagtgcatggtctcccttcacgtgcggggccaggtgactgcacagagtgatgagctgggcccactttcctgctattggccgcc

SEQ ID NO: 813280 - DNA, 120 bp, Artificial Sequence
  ENSG00000286805_8 (sequence is synthesized)
ccttcccttcccttcccttcccttccctatcgacagccttgcagggtggtggtttcctttgcccggagagttcagaggccttagttctggaaagcctcctgtggggagatggagtggcgg

SEQ ID NO: 813281 - DNA, 120 bp, Artificial Sequence
  ENSG00000286805_9 (sequence is synthesized)
ttctggaaagcctcctgtggggagatggagtggcggggatagggaccagagcagagagggcagcagcataaacaaagaggagaggcaaactgtttgagcccaggagtttgagaccagcct

SEQ ID NO: 813282 - DNA, 120 bp, Artificial Sequence
  ENSG00000286802_0 (sequence is synthesized)
tgaggactgccagcacgctgtcacctgtcattatcaacaacttgactaaaatacctctgtgtttgttttagcagagcatgtgttccctatgagaagaaagctcctggtataaggaaaatc

SEQ ID NO: 813283 - DNA, 120 bp, Artificial Sequence
  ENSG00000286802_1 (sequence is synthesized)
gaagaaagctcctggtataaggaaaatccttttttctgaacatcaagagagtgttgcaagaacctacccatttgcctgagagctgagccctgcccctgtacctgctatggccttctctcc

SEQ ID NO: 813284 - DNA, 120 bp, Artificial Sequence
  ENSG00000286802_2 (sequence is synthesized)
agcagtgagggctttgtctgactgcaggatggattcctctataaccacctgtgactgcaggaagctctggaggacctcgtctgcctgaagaaccaagaaggagcaaagacctgtcaggca

SEQ ID NO: 813285 - DNA, 120 bp, Artificial Sequence
  ENSG00000286802_3 (sequence is synthesized)
gcagaaatcttgtcttgtgatgaggaaattattgttcaacaaagccacaaatctaaccttgtaaacttcacattattcttaagattccacagtggtttctttccttccacagccacaata

SEQ ID NO: 813286 - DNA, 120 bp, Artificial Sequence
  ENSG00000286802_4 (sequence is synthesized)
aaaagtccaagctctttgttgagacatgaaaaccctgtgtagcagcctccctcctgcctgtccagcctcttctcccagggatgctgctcaccacccacccccggtgcagacaaccagatt

SEQ ID NO: 813287 - DNA, 120 bp, Artificial Sequence
  ENSG00000286802_5 (sequence is synthesized)
tctatgcagttctacaaacacacatcctccatagtttgcattatttgctttcttttttcttttgcctgaaggcctgcctacccttttcaaattaggataacatctattgatactttacct

SEQ ID NO: 813288 - DNA, 120 bp, Artificial Sequence
  ENSG00000286802_6 (sequence is synthesized)
aatagctcttacctcactggaagcttttctaggctaattatttatttatttatttacttttgatcactgttaagaatgttgataatagttcattaaaagtaaacaatgtattcaaattta

SEQ ID NO: 813289 - DNA, 120 bp, Artificial Sequence
  ENSG00000286802_7 (sequence is synthesized)
atttaaaaagttaaaaccttaaaaagaccgaacaggtaactgtttagtctatttaggagtagtggtgaatataatggaaaattgaacagttgagaaacttttttttctcttttgagacag

SEQ ID NO: 813290 - DNA, 120 bp, Artificial Sequence
  ENSG00000286802_8 (sequence is synthesized)
tctcactctgtcacccaagcacaagttcaatggtattatcacttcaaccttgaactcccgggctgaatgctgctgcctcagcctcctgcatagccaggactacagatgtgtgccaccgca

SEQ ID NO: 813291 - DNA, 120 bp, Artificial Sequence
  ENSG00000286802_9 (sequence is synthesized)
gctggctaattttattttttacttttgtagagatggaagtcctgtcatgttgctcaggatggtttcaatctcctggtcttaagcaatcctcctaccttggccttccaaagcgttgggatt

SEQ ID NO: 813292 - DNA, 120 bp, Artificial Sequence
  ENSG00000286802_10 (sequence is synthesized)
ataggtgtgagccactgtacctggcctgagaaactttaagaatttgaaactttaagggagtaacatggctgtccaaaatgggaaattaccaatcaaggaaaatacaacactgcatagact

SEQ ID NO: 813293 - DNA, 120 bp, Artificial Sequence
  ENSG00000286802_11 (sequence is synthesized)
taacagtcacacatgggaaggaaaaagaggcataaatacctcagccaataagtgattagtgactgaaatttgggtgtgtggggcacatcacagaaggaaggacctaggcattttttgacg

SEQ ID NO: 813294 - DNA, 120 bp, Artificial Sequence
  ENSG00000286802_12 (sequence is synthesized)
gttattttccttgttcccttctttcaaaaaaaatttagattcatgggtgtattaggacattcttgcattgctacaaatacctgagactgggtaattttttttcttattgtgtgattgtag

SEQ ID NO: 813295 - DNA, 120 bp, Artificial Sequence
  ENSG00000286802_13 (sequence is synthesized)
tcattgtgatatagtacgccattatgtgaatacactagtttacttgttctattgttgatggacattagggtaaaatttcagtttggtgctattgtgaatgatactgttgtgaccatttct

SEQ ID NO: 813296 - DNA, 120 bp, Artificial Sequence
  ENSG00000286802_14 (sequence is synthesized)
gtcccagtcttttaagtgaatgtatatatctaggaatggatttgctgggtcatttggtatttgtttttcaattttagcaattaaaaccaaacagttttccaaattgatgttctgatttat

SEQ ID NO: 813297 - DNA, 120 bp, Artificial Sequence
  ENSG00000286802_15 (sequence is synthesized)
acctcattagcaatgtgtgagaattccagttgcttcatattcttgtcaacacttggaattttgatttcttaaacagtcaccttcttttcattttgtgaggaaattgaaactcagataagt

SEQ ID NO: 813298 - DNA, 120 bp, Artificial Sequence
  ENSG00000286802_16 (sequence is synthesized)
gaaattacctgacctgtactaggctttgttctgagaatgcaaaggaccttgcagttcagaattaagcacttttttctgtttaactggtagtgacttatgaagtaaaaaatcatactcaga

SEQ ID NO: 813299 - DNA, 120 bp, Artificial Sequence
  ENSG00000286802_17 (sequence is synthesized)
tttgatatatgtatctttccaaggaggattacaagtagctatttatttttatctgatctgaatttaaaatagttttttggacactactgttttagggtgagtgagcaataatgatttagg

SEQ ID NO: 813300 - DNA, 120 bp, Artificial Sequence
  ENSG00000286802_18 (sequence is synthesized)
tatagagttaggatctacatttaattttttttatttaacttttattttaagttcggggtaatttataaagcaaagaggtttaatgggctcatagttctgcaggctttacaggaaacatgc

SEQ ID NO: 813301 - DNA, 120 bp, Artificial Sequence
  ENSG00000286802_19 (sequence is synthesized)
cttctggtaaggcttcaggaagcttttactcctggtggaatgtgaagcaggagcttgcatgtcacatgacaaaagcaggagcaagagagagtgagagagagtggaggtgccacatacttt

SEQ ID NO: 813302 - DNA, 120 bp, Artificial Sequence
  ENSG00000286802_20 (sequence is synthesized)
taaatgaccagacctccagagaactcactatcacacagacagcagcaagccataaaggatcttcccccatgatccaaacacctcccacgaggccccacctccagcactggggattacaat

SEQ ID NO: 813303 - DNA, 120 bp, Artificial Sequence
  ENSG00000286802_21 (sequence is synthesized)
tcaatatgaggtttgagtggagacaaatagcccaacttgatcaatggggttcgcatgcaggtttgttacatgactatattgcgtgatactgaggtttgggcttcagtcaaaacagtcacc

SEQ ID NO: 813304 - DNA, 120 bp, Artificial Sequence
  ENSG00000286802_22 (sequence is synthesized)
cagatagtgaatgtagaaccccaaaggtcgtttttcaaccctacttccctccctgcctcctccctcttgtattccccagtgtatattgttcccgtctttatgtacatgtgtattcattgt

SEQ ID NO: 813305 - DNA, 120 bp, Artificial Sequence
  ENSG00000286802_23 (sequence is synthesized)
ttagctcccacttacaagtgagaacatggagtatttggttttccgtttctgcattaattcacttaggataatggcctccagatgcatccatttttctgcaaacgacatgatttcattctt

SEQ ID NO: 813306 - DNA, 120 bp, Artificial Sequence
  ENSG00000286802_24 (sequence is synthesized)
aacgacatgatttcattctttttatggctgcatagtgtctcaaggtgtatatgcaccacattgtaaaaatccagtctactattgatgggcgcataggttgattctgtgtctttgctattg

SEQ ID NO: 813307 - DNA, 120 bp, Artificial Sequence
  ENSG00000286802_25 (sequence is synthesized)
atatgagtgtgggtgtctttttggtagaatgttttattttcctttgggtgtatacctagtaatgggattgctgggttgaataataataataattctatttttagttctttaagaaatctc

SEQ ID NO: 813308 - DNA, 120 bp, Artificial Sequence
  ENSG00000286802_26 (sequence is synthesized)
caaactgcttcccacagaggaatttacaatttgcaatcccactagcagtgtataagcgttcccttttctctacaacctcaccagtatgtgctatttttccctttttaataatataggcta

SEQ ID NO: 813309 - DNA, 120 bp, Artificial Sequence
  ENSG00000286802_27 (sequence is synthesized)
atttctaattttgttttacaagttttttgaagttgattgataagtaaaaattatgtttaagaggaacagcatgatattttgatacatgtatacattgtgaaatgattattataatcaagc

SEQ ID NO: 813310 - DNA, 120 bp, Artificial Sequence
  ENSG00000286803_0 (sequence is synthesized)
gagttggcaaagctgctgatgtgttagctgaagttgtgatgggattggaagtgacaaatacagttatttgatttgggggcaagggagtggaaatggaggaagagctaacaggtcttgaca

SEQ ID NO: 813311 - DNA, 120 bp, Artificial Sequence
  ENSG00000286803_1 (sequence is synthesized)
ttactggagggatgcttggtgcaacgttagaactgacctcactcaattcgggatgcacaagggatgaacacagctcattactgtgagaattctctgtcatggagcatcttgcaggactaa

SEQ ID NO: 813312 - DNA, 120 bp, Artificial Sequence
  ENSG00000286803_2 (sequence is synthesized)
tgagaaaccaagcccttcaattcaacatcccttcaagaagagaattctgtcaccaaccaagttagtttggaaacagattattccccagccaagcgctaagatgagacaccagccctggct

SEQ ID NO: 813313 - DNA, 120 bp, Artificial Sequence
  ENSG00000286803_3 (sequence is synthesized)
gacaccttgactacctcctgtgagagaccctgaaacagaagacccatctaggctatgccgattcctgacccatggaaacccatgccataataaaaatgtatgttgttttaaactactaaa

SEQ ID NO: 813314 - DNA, 120 bp, Artificial Sequence
  ENSG00000286800_0 (sequence is synthesized)
atccacaggcagggctagaaaagggagtggaacattttacttaggcaggaagcactgaagagaagaatctttttttcagtagacatttgtgggaaataaaaatttgtttagaagaattta

SEQ ID NO: 813315 - DNA, 120 bp, Artificial Sequence
  ENSG00000286800_1 (sequence is synthesized)
ggccaagagataaaatggtcttcttttgactgaggagagataagatagattttaagcagacatctgaagttaaagttattcctacagatggaagggtgcactttcctgccccttgacttt

SEQ ID NO: 813316 - DNA, 120 bp, Artificial Sequence
  ENSG00000286800_2 (sequence is synthesized)
ggaatcagcgaaagagatattagcaaaagtggtatgatgaaactgacactccatatgtgctttatggagttgtgttttcctgattcttcatggtccatgtagatgtgttgatgtctgtgc

SEQ ID NO: 813317 - DNA, 120 bp, Artificial Sequence
  ENSG00000286800_3 (sequence is synthesized)
tgtgtgggtacacctgcctgtggactgagctgatcagggttgaagctaggtcacagagatgcttcaggagttgaagttggaactgcagtcagccagcctgttacccaagagacaagcaga

SEQ ID NO: 813318 - DNA, 120 bp, Artificial Sequence
  ENSG00000286800_4 (sequence is synthesized)
atacattatcttttgttttatgctgaagtagagtgcagcaagcaaaaagcagcaaaagacacataatcaaagtacttggaatgctgactgtaaaattatgctgagaactggctgcatgat

SEQ ID NO: 813319 - DNA, 120 bp, Artificial Sequence
  ENSG00000286800_5 (sequence is synthesized)
aagatgcttttccttcctctttgttatttgtattattttgtaaagataggccagtgtgagtatgtccaaataagctaataatctatttcccttaaaatttcagcaaatattcaagagaat

SEQ ID NO: 813320 - DNA, 120 bp, Artificial Sequence
  ENSG00000286800_6 (sequence is synthesized)
aaaaatgtaagttattgtccacacagctaatgttaatttttcattaacataatttaagtctcggtgatagtttgaaaatgttcataatgttcattatctaataaaatagataattgtgga

SEQ ID NO: 813321 - DNA, 73 bp, Artificial Sequence
  ENSG00000286801_0 (sequence is synthesized)
gggggtaagccaccacacccagccagttcgtcatcttcttaaaggaacaccagtactattaaggtatagggtc

SEQ ID NO: 813322 - DNA, 120 bp, Artificial Sequence
  ENSG00000286801_1 (sequence is synthesized)
tcttcttaaaggaacaccagtactattaaggtatagggtcccaccttatgatctcatttaaccttaattacttcctcgaaggccctttctccaaatacacacccagtagggattagatct

SEQ ID NO: 813323 - DNA, 120 bp, Artificial Sequence
  ENSG00000286801_2 (sequence is synthesized)
tcaacatatggatctggggatgcacaattcaggtcataacaccccatgcctccagacccctaaaatttgaaccaatgtggccaactcctgcatctttgtggatatctcctactctctagg

SEQ ID NO: 813324 - DNA, 120 bp, Artificial Sequence
  ENSG00000286801_3 (sequence is synthesized)
gtgcatgagttttacccaggtatctggagagcatcccaaccatgtcttactgctcacgtcggattaacgtgacgccgtcaaacctgtgggccagtgtcaggacggccagaatacccgcct

SEQ ID NO: 813325 - DNA, 120 bp, Artificial Sequence
  ENSG00000286801_4 (sequence is synthesized)
ctttggaccacattgtgacagagagtgaaacacttcgcatagtttcatgccaaggccacacatgtctatcactggtcatccagtgggatgcaaacccattttgttcctccttcctgatgg

SEQ ID NO: 813326 - DNA, 120 bp, Artificial Sequence
  ENSG00000286801_5 (sequence is synthesized)
gctttgaaaagaacacattcatcagatcagcagccgcacagccccgtatttaaaactgttcatctgctgagtacacacaccatatttggcacagcagctacaactggactatttcttggc

SEQ ID NO: 813327 - DNA, 120 bp, Artificial Sequence
  ENSG00000286801_6 (sequence is synthesized)
taaatttttggtggtgcactgtcacctgctgtgaccatcattttcaggggggccaggtggacagaggaattggagatgtgttggaggccaaccttgagagtggtcctgacctccgcacgc

SEQ ID NO: 813328 - DNA, 120 bp, Artificial Sequence
  ENSG00000286801_7 (sequence is synthesized)
tgctgactttggttgactatcttttgggcagggacgggtgctccgccacggtggcccctgtggaaatgggcactctgccttatgatgcagcatatacctttagcagtggccttacctgct

SEQ ID NO: 813329 - DNA, 120 bp, Artificial Sequence
  ENSG00000286801_8 (sequence is synthesized)
gctgggtctgtgaaagatggaattaggaacgaagggctggggggaggtggcccaggccaccatcacaccctgtgaccaacgtggggaatttatgcctctagtcccttgcagcacaggctc

SEQ ID NO: 813330 - DNA, 120 bp, Artificial Sequence
  ENSG00000286801_9 (sequence is synthesized)
tgtaagtctataggccccggattccagaggttcatgcttccatcaaggctatctcaactgaaagctctggtgtcagctggcccacctgggcttcctgagccaggagacaggcagcgaaga

SEQ ID NO: 813331 - DNA, 120 bp, Artificial Sequence
  ENSG00000286801_10 (sequence is synthesized)
acaaagcccccccactggcagggggatggccttgaccatcaccgggaaagaggactactgccacatgagggacagggagatgtgtgcctggcactcgggggcctgctggggcatctcctg

SEQ ID NO: 813332 - DNA, 120 bp, Artificial Sequence
  ENSG00000286801_11 (sequence is synthesized)
gtgctcccacagccagttccagcggggctgggctgaacatgccatttccaggaagagtccagcgctaaggcctctggaggtgttctgttttgggagaccaggcagccaagtatttgtaca

SEQ ID NO: 813333 - DNA, 120 bp, Artificial Sequence
  ENSG00000286801_12 (sequence is synthesized)
aaagaggacccagaactgcccacaccaccacctctgggatccccccaccccaggggaggttaaagcaagcagagggacaccgactgctgccacacaggaggtctttggcatccaagctct

SEQ ID NO: 813334 - DNA, 120 bp, Artificial Sequence
  ENSG00000286801_13 (sequence is synthesized)
gtccaggcctcagcattctgcaagaggacaccacgctgccaccatgtgtcccagacaacagccagagatgtggaaggaagaggtgccgcgtggacttctctttttacaaagactttattg

SEQ ID NO: 813335 - DNA, 120 bp, Artificial Sequence
  ENSG00000251363_0 (sequence is synthesized)
gtctggttacaggagaagaagaaaagatcaacagacataaaatttcagaatgattgacagtctttaaaattgtatgtatgaatactaatgtttctaaattttggtaagaaatgttctgtg

SEQ ID NO: 813336 - DNA, 120 bp, Artificial Sequence
  ENSG00000251363_1 (sequence is synthesized)
taaatggatcactggaaaaatatattttgttgaatttaactctaactctatatttctccctgatttacaactataaaaatataatgttagaacattactgcgttaataaaaaacttgaat

SEQ ID NO: 813337 - DNA, 120 bp, Artificial Sequence
  ENSG00000251363_2 (sequence is synthesized)
cctattcggccatcttggctcctccgcatttgtttttatggtggttttgtattgtttttatagagctgccctcacatgcttcagcaacattagatgttctggagactggaaagtccaaga

SEQ ID NO: 813338 - DNA, 120 bp, Artificial Sequence
  ENSG00000251363_3 (sequence is synthesized)
gaaagtccaagatcatggtgcctgaggattcagtgtctggtggaccctatttaatgtgggagaggaatacataaaaaggtggatatcatgaggtgaaaatcattggagaccatcttggaa

SEQ ID NO: 813339 - DNA, 120 bp, Artificial Sequence
  ENSG00000251363_4 (sequence is synthesized)
cagcacgttttcaaatctgtataacagatgctatcttgtttgtcattaggtaagttcacctgaaaccctcaggcaagcctttcagaactaatgcctgttgtaattcccttatttcttatg

SEQ ID NO: 813340 - DNA, 120 bp, Artificial Sequence
  ENSG00000251363_5 (sequence is synthesized)
tgatttaaattgtgaaaagcccatatttcttttgaaaaatcattgcttgtcttttgtctctgatgttagcatgttttcaggcaatgtttttgaagttaaatatatttgttgtttagagat

SEQ ID NO: 813341 - DNA, 120 bp, Artificial Sequence
  ENSG00000251363_6 (sequence is synthesized)
gacttttctctgcccttttattttacatacaagggtactagtatccagagaggtcaagtggctaaggatgcaaaatttgtaataaaatttaggttttctgaatcttaatctttagtattt

SEQ ID NO: 813342 - DNA, 120 bp, Artificial Sequence
  ENSG00000178803_0 (sequence is synthesized)
gggctggttccagcagcaaccgccgggcagggcccctcccgaccgcgacctcctgtccgcaccgtagggcagccggccgggccagcctccctcacaggactaccgaggaagaggtaggat

SEQ ID NO: 813343 - DNA, 120 bp, Artificial Sequence
  ENSG00000178803_1 (sequence is synthesized)
ttcactctgtcacccaggcgggagtgcagtggtgcgatcatagcggggactacaagtgtgcaccacatgcttgtctacgaacctgaagtattctgatgcagtggagagagtgtagaactc

SEQ ID NO: 813344 - DNA, 120 bp, Artificial Sequence
  ENSG00000178803_2 (sequence is synthesized)
tggagtgaagagatctgcctggaaccctgactctatcactaggagattccttggaatgaaaccaatgggagtccagggtttgggagagtctcatcagagcagatgggcgagcagcagcca

SEQ ID NO: 813345 - DNA, 120 bp, Artificial Sequence
  ENSG00000178803_3 (sequence is synthesized)
gaacgcttgttgcctttggctgagaacactatcctggatctgaatgtcttctttgtcactccaagagatggccctgggactgagaagtggatggcagctgtgacagcaggagaggactgc

SEQ ID NO: 813346 - DNA, 120 bp, Artificial Sequence
  ENSG00000178803_4 (sequence is synthesized)
ctgaggctccccgggcagaggctctggtgccaggttagcagcaggaccgacggcagacccagcagccagagagtgaaaggccaacttctcagcccccctggcctgctccatcccgtcaac

SEQ ID NO: 813347 - DNA, 120 bp, Artificial Sequence
  ENSG00000178803_5 (sequence is synthesized)
tctcccaggaactaccagcacccacctaagggacaccagccgccctgtgaaaggacaagccagagacccctggagctcggatgtggaaggatgtggggagctgcctggtcctgtctccca

SEQ ID NO: 813348 - DNA, 120 bp, Artificial Sequence
  ENSG00000178803_6 (sequence is synthesized)
ctgccgcagagggacatgagggatggagcaggactggcaacctggagaggaagtcactcctggtcctgagccctgttcaaagggccaggctcccctctaccccattgtccatgtgacaga

SEQ ID NO: 813349 - DNA, 120 bp, Artificial Sequence
  ENSG00000178803_7 (sequence is synthesized)
gctcaaacacacagaccccaactttccctccaactccaatgctgtcggcacctcaagtggctggaacaggattggcacgggctgcagccatacctgggactggaggttctcctgcaccca

SEQ ID NO: 813350 - DNA, 120 bp, Artificial Sequence
  ENSG00000178803_8 (sequence is synthesized)
gcaggcccttttgcccctactaggagcctgggaatggagcattgacacagaagcaggaggaggaaggagagagcagagccagaaaccctgcagcaacggagggcctgcagcagctggaga

SEQ ID NO: 813351 - DNA, 120 bp, Artificial Sequence
  ENSG00000178803_9 (sequence is synthesized)
gggccgagtcctcccaagcccctgctttccatggagcacttgccaggcagccattcacaaagtgtgtcgttggcagggatgcaccagaccagctctcctggcaccatccctggccacact

SEQ ID NO: 813352 - DNA, 120 bp, Artificial Sequence
  ENSG00000178803_10 (sequence is synthesized)
tccctgagcagtactcaccagggcccacctgactcacgatagcccctgcccaacaggtacaagtggagctggtgctggccccgggctgcctcccacccaggtgcctggcctgtggctcca

SEQ ID NO: 813353 - DNA, 120 bp, Artificial Sequence
  ENSG00000178803_11 (sequence is synthesized)
aggtggactcccaggcccagcaccaccagcagcagcaacagacccctctgcccaggccggcctcacacggggctaaagacacccacggctcctgccagcagggtccacacaggccacctc

SEQ ID NO: 813354 - DNA, 120 bp, Artificial Sequence
  ENSG00000178803_12 (sequence is synthesized)
gctgcccgtcctctccctcagcccctccttaagcactcctgcaggctctcccagctgctgccagcacatcccgggtgaggcttgcccggacccacaggcaacctgggcccctgccaagcc

SEQ ID NO: 813355 - DNA, 120 bp, Artificial Sequence
  ENSG00000178803_13 (sequence is synthesized)
agaatccactctcagctgtgcctttctcggccctgagcaaagcagatcagtggagtcagaggcacctttggggcagacaggggaagaggagtgcattcattggggaaaggttgggagcta

SEQ ID NO: 813356 - DNA, 120 bp, Artificial Sequence
  ENSG00000178803_14 (sequence is synthesized)
cccagccgtaggctggcaaatcagctcctggccgggggcaccctgacttacaggctttgcctgatttctgtggtgtaaattctccccttgtgcccagtttcaagctactaatgtgtcgtg

SEQ ID NO: 813357 - DNA, 120 bp, Artificial Sequence
  ENSG00000178803_15 (sequence is synthesized)
gaccgtaactggggagcaacacagagtcagctggccacgatgccagtcactgctgagctgccaaaccttacgcgtcccagggggcacctgcctagaggccaggcactgcactggaccctc

SEQ ID NO: 813358 - DNA, 120 bp, Artificial Sequence
  ENSG00000178803_16 (sequence is synthesized)
agacacagcttgtgcagcctgcttaggagcttgggaaatgactgtcatctgtgatcttgctggtcccaggaagcccattttacagatgaggaaactgaggcccaaaggcacgaagcgacc

SEQ ID NO: 813359 - DNA, 120 bp, Artificial Sequence
  ENSG00000178803_17 (sequence is synthesized)
tctctcagcctcaccaagagcactggaaggtggtgtagggctgcggccgtgcgcacagagagcacagcagcaggaaggctcctgggcctccagctcccctccctcagaagcctcccagag

SEQ ID NO: 813360 - DNA, 120 bp, Artificial Sequence
  ENSG00000178803_18 (sequence is synthesized)
tgacaggaaggtcagaggccccggggagggggcggggccaggatctggcaatttcctatccctctctgttggctctgtgcatctaattactccttgagtcatctgttgctaaccaggagg

SEQ ID NO: 813361 - DNA, 120 bp, Artificial Sequence
  ENSG00000178803_19 (sequence is synthesized)
ggaaattaaatattaataatgtaatacttctctgtgattaccccttgttggggacagatcagagggcagatgctgccccatacagacaggggacacatgctgcggaatgtgcataatgcc

SEQ ID NO: 813362 - DNA, 120 bp, Artificial Sequence
  ENSG00000178803_20 (sequence is synthesized)
tcttgaaagaaccaccttataggattccacgcggtcagactcaaaactgctgctgcttcctgccttcctcctcacctcccccaacctggccactttaattaaaactccatttaatcaaaa

SEQ ID NO: 813363 - DNA, 120 bp, Artificial Sequence
  ENSG00000178803_21 (sequence is synthesized)
tcaccactccttgaatctggttctgcaaagtgggacagctgagacttaggctaagtgacttactgaggcagcagtcagcaccgtgtgggaccagcccccatgctgtttcccaaatggagg

SEQ ID NO: 813364 - DNA, 120 bp, Artificial Sequence
  ENSG00000178803_22 (sequence is synthesized)
caccttcctgcataccttgggcgtgatctgtaacagctcagaaagcttggacaccagcagggtggcacctatatggggagcacctgtccgcactgactgcattcaataagcgttcatttc

SEQ ID NO: 813365 - DNA, 120 bp, Artificial Sequence
  ENSG00000178803_23 (sequence is synthesized)
ggtgggtaaattgaggcccaaggagaggaatggacttgctgtggacattccaagagcccagaggcaactcaggccaaggcgagtctgtctgttctgaatctcttaggtcagttctgaatc

SEQ ID NO: 813366 - DNA, 120 bp, Artificial Sequence
  ENSG00000178803_24 (sequence is synthesized)
caaacagtaaccggacaagcccattctcaggagctcctcagctccattccgtgggggcttggttacctgtaacagggcctcaacaggagggtcatagacttgcccattgcttccaagcaa

SEQ ID NO: 813367 - DNA, 120 bp, Artificial Sequence
  ENSG00000178803_25 (sequence is synthesized)
cagggagttggcattgccctgcctcctgtgggactcgcaaacataaaatctcaggctctctcattctcacatctacattacatagcactgactctgtgccggacactgttcttagtgctt

SEQ ID NO: 813368 - DNA, 120 bp, Artificial Sequence
  ENSG00000178803_26 (sequence is synthesized)
tgcaaatagtaatttatatagtcctcattgactgggaagctatattaattttgacattattcctgagaaaagcatatcccttcctgggttctggccctgttaacaggaatgttttaaaac

SEQ ID NO: 813369 - DNA, 120 bp, Artificial Sequence
  ENSG00000178803_27 (sequence is synthesized)
cttcgcctctcggttagcaagcgatgaggcacgcccctccacaggcgggactgcgcggagtcgtcgcgcctcggctgcgagtcaggactgaggctgtccccctcccgcctccctcagggg

SEQ ID NO: 813370 - DNA, 120 bp, Artificial Sequence
  ENSG00000178803_28 (sequence is synthesized)
ccctggcgcgggtgcctccaggttccacccctcacctgccccttggtgtcgggccgggaccctggagaggtcgtgagggagtcctgggcgcgggctccgggaggctgcggcgcgggtctg

SEQ ID NO: 813371 - DNA, 120 bp, Artificial Sequence
  ENSG00000178803_29 (sequence is synthesized)
cctggcagaaaccctacccatccttcaagtccaggatagagatctcaaagaagtttcctaccgaagtgcagcagatccccaccacatctgggcccctcgggggcagggctttcctacatc

SEQ ID NO: 813372 - DNA, 120 bp, Artificial Sequence
  ENSG00000227896_0 (sequence is synthesized)
gcgaggtcgcgggccgaggaccaggcgcgggagcgggagcgggcgactggccgggccctcccggtctcggcagccacttctagctcccggcccagccgggagacgcaggtgccacggaga

SEQ ID NO: 813373 - DNA, 120 bp, Artificial Sequence
  ENSG00000227896_1 (sequence is synthesized)
tgggcagccgggcgggtggcgcagtgcaggcagctgtatcaatcgcttcccctccagggacccgccggtgcctggggaccgcgggctgtgcagctgtgccgggcctgcggaggccgccgc

SEQ ID NO: 813374 - DNA, 120 bp, Artificial Sequence
  ENSG00000227896_2 (sequence is synthesized)
ccgggagctgggaggcagggggcgcgtggtcaagagccgccctcgacctggcctggtcggtcctggcccggcgtaggtgacgatggcggggaccgcgaggcgccggacacccgaggccac

SEQ ID NO: 813375 - DNA, 120 bp, Artificial Sequence
  ENSG00000227896_3 (sequence is synthesized)
gagcagcgtcgcccctcgctttttcgcgcccctccagccctgcagtccttcctctaagtccgtctgcccctcaccgattgaaagtggccccgagaatattggatgagtgatctggtgtca

SEQ ID NO: 813376 - DNA, 120 bp, Artificial Sequence
  ENSG00000227896_4 (sequence is synthesized)
ggactgtaaaatacgcctatgaaaactgggggagaggaataaaacaagctggcagaacgtttttcatcgttgaagctgcgtgatgcgagcatatgtgctcatcatacagtctctttactt

SEQ ID NO: 813377 - DNA, 120 bp, Artificial Sequence
  ENSG00000227896_5 (sequence is synthesized)
gtgtatctgaaattttccataataaaaagtttaaagaagtgaaccagcgattgcctctagggaggacagtgaggtggcggatgacgggaggaaggagtcttaatttttcgctgtacgcct

SEQ ID NO: 813378 - DNA, 120 bp, Artificial Sequence
  ENSG00000227896_6 (sequence is synthesized)
ttttgtgctatcttaggtttttcccattcaatgtgttacctaattcagaaaattggtaagttttttttaaggctaccatgggaaaacagcgttctaaagagtagcgcaaccagttccccc

SEQ ID NO: 813379 - DNA, 120 bp, Artificial Sequence
  ENSG00000227896_7 (sequence is synthesized)
taagagaggtgcatgattcgtcggactccgacagccttggtgtttgttaggcggttaatggagacccacctgggaaattagaaaactactaattgctttcagtgagaagcccgcccttct

SEQ ID NO: 813380 - DNA, 120 bp, Artificial Sequence
  ENSG00000227896_8 (sequence is synthesized)
cccacaaatggataatttgcttttaatgcacccagaagttatccagctccctccggtataatcggggaaactccaaataaaggaaaaatagttcagagaccctgcagctcttcccaagag

SEQ ID NO: 813381 - DNA, 120 bp, Artificial Sequence
  ENSG00000227896_9 (sequence is synthesized)
gaatttaaggtggattttagtgtggttggattgttttgcctacctgactgcagaatttatattctgacatttacaatttcctaaatactgaatcagtactttttcttgtttcaaaataaa

SEQ ID NO: 813382 - DNA, 120 bp, Artificial Sequence
  ENSG00000227896_10 (sequence is synthesized)
tcaacttcttctgtagtttatatgaaaaacaagtccatgtcttccactgtgggtgggatgcacatgactgttttatttgggtcagttttgtctctttttttaattggcagtttaggaact

SEQ ID NO: 813383 - DNA, 120 bp, Artificial Sequence
  ENSG00000227896_11 (sequence is synthesized)
tgtttttatcattttgtttaaagatcttctggcagaggtgcaggctgcacttactataattatttagatgacaaggtggtgggtggtaattaaagggtaattatcatcagaggcaaaagg

SEQ ID NO: 813384 - DNA, 120 bp, Artificial Sequence
  ENSG00000227896_12 (sequence is synthesized)
tgtcgtgatcctcccaagaccaaaggatatgtctattatgcctggcctctctagtgctggacacttggcagggtcagtgcctgcatgaggctgaagtggaagggcttattgtttagactg

SEQ ID NO: 813385 - DNA, 120 bp, Artificial Sequence
  ENSG00000227896_13 (sequence is synthesized)
gtgccttttgagggcttttatgtgatggttgtgttaagtaatgaaacttagtagtgtcaaattcttgccactcaaagaatgatccccaatcagcagtgtagcatcacctggaagcctgta

SEQ ID NO: 813386 - DNA, 120 bp, Artificial Sequence
  ENSG00000227896_14 (sequence is synthesized)
aggaacgcataattcctatccctcaccccagctccactgaatcagaacctgcattttaacaggattcccccagctgattgggctgcacattaaagtttgacaagcactgatttaaagtat

SEQ ID NO: 813387 - DNA, 120 bp, Artificial Sequence
  ENSG00000227896_15 (sequence is synthesized)
acccatagcatttgacagcaatctagtatttttcgttaggatgagggagaggaagggagatgattaagaacctcctatgcatcaggtaagatgctaggctgttcaggggccttgtctgct

SEQ ID NO: 813388 - DNA, 120 bp, Artificial Sequence
  ENSG00000227896_16 (sequence is synthesized)
tcccagtccattactctatcttacaagtaaggaaatgggaagacttgtatgttacaactaatgagggagtcaaactttttcttgacggttggataccctttagtacttcttggtgttctt

SEQ ID NO: 813389 - DNA, 77 bp, Artificial Sequence
  ENSG00000227896_17 (sequence is synthesized)
cttgacggttggataccctttagtacttcttggtgttcttgaatctggtagaaagtggtacatgatttgagaagtaa

SEQ ID NO: 813390 - DNA, 120 bp, Artificial Sequence
  ENSG00000227896_18 (sequence is synthesized)
tcttctgggctctgtacccttgtgtggctcacactaaagacacccctcgggcccctcctggagggagttcagactcctggccctgcaggctgtaccaccaccttaaccccttacctccct

SEQ ID NO: 813391 - DNA, 120 bp, Artificial Sequence
  ENSG00000227896_19 (sequence is synthesized)
gcttccactgaggcaagcaaatgccctgaagtcccctcattcccttaccagggccctgggttccacaccagaatgagcaaacagaactccagtgtgggtaacacatggctgaacagcttt

SEQ ID NO: 813392 - DNA, 120 bp, Artificial Sequence
  ENSG00000227896_20 (sequence is synthesized)
ttgttgtattgtttttgttttcttagttctctcagctcaggctccatccccctggccacctcaacccctagaatggttgtctccatttcatgagaatcttcacactaacatcaagtagcc

SEQ ID NO: 813393 - DNA, 120 bp, Artificial Sequence
  ENSG00000227896_21 (sequence is synthesized)
agtaggtgcttttggttttgctagaatgcctgtgtgcaagctctcagatacctgattttctttcccccactgaatgttgtgtttgtcagaaactgaaatcatggatcagagccaagtttg

SEQ ID NO: 813394 - DNA, 120 bp, Artificial Sequence
  ENSG00000227896_22 (sequence is synthesized)
tagtacccttaggaggggcctctgccctcctgtgtgctgcctgggtgaggacagaaccccctaacctggagctccacttgagtgggcccatacctgtactttcctctgaaaaaagaaaat

SEQ ID NO: 813395 - DNA, 120 bp, Artificial Sequence
  ENSG00000227896_23 (sequence is synthesized)
cctgcaaagaaaatagaagacatctgttctgccattgccatgcccttgttctagcccagacatgagaactgtcagaattggagttactaaatagaacttttagtctttttctgataatgt

SEQ ID NO: 813396 - DNA, 120 bp, Artificial Sequence
  ENSG00000227896_24 (sequence is synthesized)
gtagtaaagtgtattacaacttatagaattctatttagggaactacaggtcagaaactaccatattggtagcagtcaatttttctttgccatcggatgtggaataaaatgttaaattgta

SEQ ID NO: 813397 - DNA, 120 bp, Artificial Sequence
  ENSG00000251365_0 (sequence is synthesized)
gggggctgcagctcagctccgggggggacgcgcctttctccacgggacctggggctcaggtgctcacgaggctggggcgctgcaggccacccgcaggggaaactgaggccctccattttg

SEQ ID NO: 813398 - DNA, 120 bp, Artificial Sequence
  ENSG00000251365_1 (sequence is synthesized)
tggggctggaagacctttccttccaaaagcaggtgtaggcgggagcacctgtgcagtccctctgttcagatcctcacccacttttaaatcaggaaacagcagatgaaatgcacagtgtga

SEQ ID NO: 813399 - DNA, 120 bp, Artificial Sequence
  ENSG00000251365_2 (sequence is synthesized)
aggacaaggattctgctgagagaattgctccgagggttgctcaagtgatcatgggaaataatgcatcaaaccattctttagatgcagctcaggtgtgccttttcttcgcctgtgcccatc

SEQ ID NO: 813400 - DNA, 120 bp, Artificial Sequence
  ENSG00000251365_3 (sequence is synthesized)
cacctgagatggaccataaccataaaagtcagaaggcactgacccttcaggacgtgacagggttaaaagatgctggagggaaagtctgtcattgacttttattcacttcctttctccatt

SEQ ID NO: 813401 - DNA, 120 bp, Artificial Sequence
  ENSG00000251365_4 (sequence is synthesized)
agaaggaagttggggatgagagaggggaaggagtagcatcttgttccgtcggcctccttgatctaagcctttgttgtgaattcgtttttaccacatttaaagtgtgatgcccagaatgga

SEQ ID NO: 813402 - DNA, 120 bp, Artificial Sequence
  ENSG00000251365_5 (sequence is synthesized)
actcggggctgctggcacccccatccatctttggaggccctggacataatcgatggggcaggcagaagacctgcagctccaagcctgctagtcggctcattctgggtctcctggaggatg

SEQ ID NO: 813403 - DNA, 120 bp, Artificial Sequence
  ENSG00000251365_6 (sequence is synthesized)
ccaaggtccctggccctctcagatctcctggagccatctcaccttcacaagttgaatgccctcatggaccactgagtgaatccagcgtatcaccctagtctacactttggccattctctt

SEQ ID NO: 813404 - DNA, 120 bp, Artificial Sequence
  ENSG00000251365_7 (sequence is synthesized)
caaaataaggagcctgatgtttcacaaaaccatctgttgccctcttctgttattacagctgaatgcttcagaaatcattctgcaccactaaaaataaaatccacgtagaacctgaaagaa

SEQ ID NO: 813405 - DNA, 120 bp, Artificial Sequence
  ENSG00000251365_8 (sequence is synthesized)
attgcacgggagatgtatcctttctcttgttgatacacatttggattgtttccagtttgggggtattttaaagctgctaggaaattcttgttctcatttctaatttttagcaagtaatat

SEQ ID NO: 813406 - DNA, 120 bp, Artificial Sequence
  ENSG00000251365_9 (sequence is synthesized)
taacttgaatttgtttcatcagacctttaaaatgcaggtttgaacatttaggaatattgtacagggaatggatccacgagacatctgcttgtttttgatgcagtgtgaagaatgcatgat

SEQ ID NO: 813407 - DNA, 120 bp, Artificial Sequence
  ENSG00000251365_10 (sequence is synthesized)
taattcgtaccaggcaggagcaactgtggcattgccaagtctcattcccagccctcatgtcctagaagatgaatgggatggagccagaagtgatgtgtaacatgggatggaagcagaaga

SEQ ID NO: 813408 - DNA, 120 bp, Artificial Sequence
  ENSG00000251365_11 (sequence is synthesized)
tagattccactgctaaaaactgcatggattatgggaagttggggatgagagaggggaaggagtagcatcttgttccgtcggcctccttgatctaagcctttgttgtgaattcgtttttac

SEQ ID NO: 813409 - DNA, 120 bp, Artificial Sequence
  ENSG00000251365_12 (sequence is synthesized)
catttggaagaagcataaattgcagatgataattcaaattcctgcatcaggtggaaagtagcagatttaaaacactgcaaagaaggggctgagcagtgagacggatgctttggaacaatc

SEQ ID NO: 813410 - DNA, 120 bp, Artificial Sequence
  ENSG00000251365_13 (sequence is synthesized)
cgcacttccagtggcatagctagggtggatgaaggggacacctctgaccacatctctctgccctctgactcaagtccttcctgctataatgaaatcccccatgctccctgagtttggcat

SEQ ID NO: 813411 - DNA, 120 bp, Artificial Sequence
  ENSG00000251365_14 (sequence is synthesized)
ctacttaatcaaagaatgtggagacttagttctcaggagggccgctactgagtgggtatgccactggtcaagagggtaacaggagacagaagacccaggaggagactttggcctaaatgg

SEQ ID NO: 813412 - DNA, 120 bp, Artificial Sequence
  ENSG00000251365_15 (sequence is synthesized)
atcagcaacaccacagagcatccactcccccagagcatcacccggaaggaccatccgttcggagacatcctgggagaacaagaggtttcttgtctgactctaaaatttattttatcagtg

SEQ ID NO: 813413 - DNA, 120 bp, Artificial Sequence
  ENSG00000251365_16 (sequence is synthesized)
gcagagtttctctgtggtcaaaccaccctgccagcctccctgctgcagccggcagcacgtcactccatgcgggaggggagccccacctaaggtgaggcacctgctccccctttgcctcct

SEQ ID NO: 813414 - DNA, 84 bp, Artificial Sequence
  ENSG00000251365_17 (sequence is synthesized)
ccccacctaaggtgaggcacctgctccccctttgcctcctgccatgagtggaagcttcccaagtcctcaccagatgcaaatgtt

SEQ ID NO: 813415 - DNA, 120 bp, Artificial Sequence
  ENSG00000251365_18 (sequence is synthesized)
gggctcttgactgctactgatttaaggggattacagaggcactgccagcgagcatgagcacaagagtttagcgcctctcggcagctgagagaggatgctgcatacttggggcctgggacc

SEQ ID NO: 813416 - DNA, 120 bp, Artificial Sequence
  ENSG00000251365_19 (sequence is synthesized)
tccgagaagaccttcttcagccgaaagcacaccttattcttgtcccagttgaaggcttcccaacggtcttcatgtggcacttgctgtgtgccaggccccactctgggcacttggtttatt

SEQ ID NO: 813417 - DNA, 120 bp, Artificial Sequence
  ENSG00000251365_20 (sequence is synthesized)
gagtttctctgtggtcaaaccaccctgccagcctccctgctgcagccggcagcacgtcactccatgcgggaggggagccccacctaaggttcttggccataaaatatggcttttggaaaa

SEQ ID NO: 813418 - DNA, 120 bp, Artificial Sequence
  ENSG00000251365_21 (sequence is synthesized)
ataaagctgagacttggagttcacggtgggggctcccccatctgtgaacagaagcagaagtttggaactgccttctttactgctcgagagggaaaacttgagtgaaaaccaggatgctgg

SEQ ID NO: 813419 - DNA, 120 bp, Artificial Sequence
  ENSG00000251365_22 (sequence is synthesized)
ttttagatattacccccaagaacatttattttaaacactagctaaagctctcgtaagaactgatgtcttataaggtaaaatactggtttaagaaagaagttgataaagggacagcaccag

SEQ ID NO: 813420 - DNA, 120 bp, Artificial Sequence
  ENSG00000251365_23 (sequence is synthesized)
acaaagagtggcagcaccaacaaccagtgcgagggctccgttcagaaggatctggatggtcgcctggacgtgctgccgtgtcatgtcttaggtggttagtcaatccacatgatggtttta

SEQ ID NO: 813421 - DNA, 120 bp, Artificial Sequence
  ENSG00000251365_24 (sequence is synthesized)
agtcaaattcccagctttgggaccaaccctatcccccacggcaatccaagaaacccgatccaggactctttccactgggagttgtcagaactgtgtcttcatccaagacaattggtttcc

SEQ ID NO: 813422 - DNA, 120 bp, Artificial Sequence
  ENSG00000251365_25 (sequence is synthesized)
catactcatacttagagggaaccctggcccctttaaggtggggctccctcaacttgggactcgttactcctcagttcagctcccctgccattgctggcctccttgacagagttcagagga

SEQ ID NO: 813423 - DNA, 120 bp, Artificial Sequence
  ENSG00000251365_26 (sequence is synthesized)
tgcggctccatccttctccctctgtcccagcttcttgtatgtgaaaacaaaccagggaggctggaggccctgagtacatttttttgaattctgggcagcagcgtcggtggcctcggtggt

SEQ ID NO: 813424 - DNA, 120 bp, Artificial Sequence
  ENSG00000251365_27 (sequence is synthesized)
tgtttatggaggaggagggagatggggaagtcattccctcctgttaacatttcggcttaagttagcttattcatatgaatgacacaaagtcgtaattgctcctaatcaaatctgtgcaca

SEQ ID NO: 813425 - DNA, 120 bp, Artificial Sequence
  ENSG00000251365_28 (sequence is synthesized)
cagtaaagcctcttttatgcaatgagtgtttacttaattgaatgttacatataaatgaaggttactccttcaagtgacaaacgtgagggatttcaatggaaaattctgaaaatgagcccc

SEQ ID NO: 813426 - DNA, 120 bp, Artificial Sequence
  ENSG00000251365_29 (sequence is synthesized)
tgaaggagggaagatgggagatgaaagatgctggaagagaacagaatggggccaagacgctccaggagagcaccgggggaatcccagttgctcttgggtttcacttccaagggcaaaacg

SEQ ID NO: 813427 - DNA, 120 bp, Artificial Sequence
  ENSG00000251365_30 (sequence is synthesized)
atgatgacaaattgctttctgagaatccatccctcttgcagggactttcagccagagacttgtccataatgggctctgcatcatgtcagagccctaaaccataattaaacaccattgcat

SEQ ID NO: 813428 - DNA, 120 bp, Artificial Sequence
  ENSG00000251364_0 (sequence is synthesized)
gtgtggcctgaacccgttttggttgtactgctatgttgtggccctgcccaggcctccaaggactggctgctgttaagctgtttaaaatccctgtaggcctcagatggcagcgacaccagg

SEQ ID NO: 813429 - DNA, 120 bp, Artificial Sequence
  ENSG00000251364_1 (sequence is synthesized)
gactcggcatagtccccagctctggcaggagtcaccacagccctagcctttagttctctacaggctggagtgtcgacaaactccacaggacacaactttttcaaaccaaatttaccctcg

SEQ ID NO: 813430 - DNA, 120 bp, Artificial Sequence
  ENSG00000251364_2 (sequence is synthesized)
cggtctgaaatgaccagtaggcccaggagaattttacatgtgaacagaacctaacccaccctggcaaatatgagacgtgtggtcactgcgggaacctggccagcagcagaccaaagcaca

SEQ ID NO: 813431 - DNA, 120 bp, Artificial Sequence
  ENSG00000251364_3 (sequence is synthesized)
gccagcaggggaaggctggggcccgcaagagttgtgttacaacaggacacccttcagttctctttcacttccttaaaatagcagcagagcgacttttgtagacgcaggctgccacagttc

SEQ ID NO: 813432 - DNA, 120 bp, Artificial Sequence
  ENSG00000251364_4 (sequence is synthesized)
acacaaggtcatggctgtttccgaatcccaccctttattgccctagcggagccactccccttacctccgcccccagaaactgctagcctgttcttaaattgatacagttacctttttaaa

SEQ ID NO: 813433 - DNA, 120 bp, Artificial Sequence
  ENSG00000251364_5 (sequence is synthesized)
tgttctaagtcaccggctctggagcttctttgcactttggaaccaacttgcgggaaggaactttaaaaatactgatatctcgatccatccccagaggttctgatttaatggtcttgggga

SEQ ID NO: 813434 - DNA, 120 bp, Artificial Sequence
  ENSG00000251364_6 (sequence is synthesized)
tatggccacggcatgaggactgttaaaactccgcaggtgattcttatgtgcaacaaagtttaagaaccactgatgtaggccatgtcgatgtcagtcttcacttaaatccaacaagacccc

SEQ ID NO: 813435 - DNA, 120 bp, Artificial Sequence
  ENSG00000251364_7 (sequence is synthesized)
agagctaaaacgttcacctgaaagaaaccccattcccaggcctgcatactgacctgcgctggctcacaagaagcaaagtggtcccttaacaggggcttcctggagaaaatgtcttgacct

SEQ ID NO: 813436 - DNA, 120 bp, Artificial Sequence
  ENSG00000251364_8 (sequence is synthesized)
aaaagagtgattcgagctgcagggatttaaggaccgagctgaagaagcccccgtcttccagcgcatgttattcccatgacagatgctaaaagttcaaggggataattcaatacaagaaag

SEQ ID NO: 813437 - DNA, 120 bp, Artificial Sequence
  ENSG00000251364_9 (sequence is synthesized)
aagatttgcttgggaaggtctgaatggccctagctttgtttgttaaccataacctctaccagctggaaacacaatgccccactaatactaacagtgcctgcttgtccaaacagcattctg

SEQ ID NO: 813438 - DNA, 120 bp, Artificial Sequence
  ENSG00000251364_10 (sequence is synthesized)
gccacttacagcaattgacacaaattctaacaggtctgttaatgtttttcagatcctaaacttgtagtagatttttatgttctctgcaatcagttttgcttcagcggccctgcaggtgtt

SEQ ID NO: 813439 - DNA, 120 bp, Artificial Sequence
  ENSG00000251364_11 (sequence is synthesized)
caaaaaataccccattcctattatttttctcttctttatcttcacaggtagatggggcaaagcattaccttgtgtaaaactgctgctaaaatatattcctagtgagaaaggtcaacttgt

SEQ ID NO: 813440 - DNA, 120 bp, Artificial Sequence
  ENSG00000251364_12 (sequence is synthesized)
gggctaaagtccttgtcacctcctgatcagttttcacttagggcacagcagtctgccattcaccattgggatctctgtgtgtttcttctctcttatgaaaggacatattgagcgctctag

SEQ ID NO: 813441 - DNA, 120 bp, Artificial Sequence
  ENSG00000251364_13 (sequence is synthesized)
gacttggctgcctacatcaagtagagggggaccctcatgattcactaaggggcctcagttctgaatatttctcattattcaaaaatgcaaagccattgtcattacgtggcagtttattgg

SEQ ID NO: 813442 - DNA, 120 bp, Artificial Sequence
  ENSG00000251364_14 (sequence is synthesized)
aaccaagggaggaattggtcccttttcatgttcttctcctaaatagagaaaaggtaattaaaacttggagcttaataagggccatctctatttgaacagcctaatacaaatccattctca

SEQ ID NO: 813443 - DNA, 120 bp, Artificial Sequence
  ENSG00000251364_15 (sequence is synthesized)
atacctttttacaccttgtctgaactgacttctactgtgtactccactgcatgggaattctggaactttagaacgaagggaactcaattcattctatatatatctcattcattcattttt

SEQ ID NO: 813444 - DNA, 120 bp, Artificial Sequence
  ENSG00000251364_16 (sequence is synthesized)
ttttcatttgttcaccaaatgctaactcaatacctacgtaacagagataatgttcttattgtctgtaaatcagaaaatgcatgcattgaataaacgccatatattcttggaagctgaggg

SEQ ID NO: 813445 - DNA, 120 bp, Artificial Sequence
  ENSG00000251364_17 (sequence is synthesized)
ctgataactcaaggtaaatgatcagctagtctcctatgaaataagtatcttatttcatgttacatgtagaaatgaccatgcaactttatcttaaagccaggccttattgagaaaaagggg

SEQ ID NO: 813446 - DNA, 120 bp, Artificial Sequence
  ENSG00000251364_18 (sequence is synthesized)
atccaaattccaaatgtttccttacatgctgagaggaaaccttggaggtctgagcgtgagtcataggtagagggaaatcatgctaagatatatattgtttccaccagacaggtagaggaa

SEQ ID NO: 813447 - DNA, 120 bp, Artificial Sequence
  ENSG00000251364_19 (sequence is synthesized)
gcagagaccctttggcagaagagatacagagaagagaggaggagaggttctggctttaccgttcaggcttgaaaccccaagtttagatggattgagggggaagcttaaggcaaacatgac

SEQ ID NO: 813448 - DNA, 120 bp, Artificial Sequence
  ENSG00000251364_20 (sequence is synthesized)
ccctgggccaacacaggctagaggaacaatgtagaaatgaccatgtaactttataggcatgaagaagatgcctgtgatggcactgagtctcctgtggctcccttgtgtgcccaaatgcct

SEQ ID NO: 813449 - DNA, 120 bp, Artificial Sequence
  ENSG00000251364_21 (sequence is synthesized)
gaaggatgtgagagtattggttgttagaatttcagggaattccaccaagtggggaatgactctgtattaagggctgcaaagaaaagctcccaggccaagcattgagtgggaggtgctacc

SEQ ID NO: 813450 - DNA, 120 bp, Artificial Sequence
  ENSG00000251364_22 (sequence is synthesized)
tgccctcagggatccacagggacttcaacagctgatgtggggtctcatcagcctcaaggtggccaagtttctatgctgagactatagcccacagttacaccagccatgatcctcagcagc

SEQ ID NO: 813451 - DNA, 120 bp, Artificial Sequence
  ENSG00000251364_23 (sequence is synthesized)
ggggaggcccgggtgggtacccggcgctccggctcccagtctcctgggcttctccagtccttcagcgccgttctccggtcacagggaatgaaagcgaggaagaaggaaacggtgtcgaga

SEQ ID NO: 813452 - DNA, 120 bp, Artificial Sequence
  ENSG00000251364_24 (sequence is synthesized)
attgcgaagagagaaagcatagaaaacccacattagaggcactcccagagcagaaacccttcggagcatcccgacttcctcggcccgcgtgcaatccaggcaaaattgaggttgtctctg

SEQ ID NO: 813453 - DNA, 120 bp, Artificial Sequence
  ENSG00000251364_25 (sequence is synthesized)
agccgccctccctaagcaggtcggaaagcccccgaatcatcccaggtcccgccgcgctgcactcgcaacctggggtggaggtccctctagtggttggcaccaaacaaaagttctgtctta

SEQ ID NO: 813454 - DNA, 120 bp, Artificial Sequence
  ENSG00000251364_26 (sequence is synthesized)
tgaagagccgaggtcaggaagcatttccctgtgcccagcgccaaggtctgggaccttaggtccaagaaaagcgttggcaatgtctgaccacaggaatgggttctcgaactggggaggact

SEQ ID NO: 813455 - DNA, 120 bp, Artificial Sequence
  ENSG00000251364_27 (sequence is synthesized)
ctcgctgtagcctcaagctcttggactcaggcgattctcctatctcagcttcctaagtagctgggactacagggctcagtgtggtcaaaagaagactatagaatcaaggatgaagagaag

SEQ ID NO: 813456 - DNA, 120 bp, Artificial Sequence
  ENSG00000251364_28 (sequence is synthesized)
gaacacagaataaaaggacgtctcagcaggaagctctgtgactactatgtaattcttacaatacagcaaatgatgccatacagtgaagcaccttgaaagattgctgggataagctgacag

SEQ ID NO: 813457 - DNA, 120 bp, Artificial Sequence
  ENSG00000251364_29 (sequence is synthesized)
catggcagccaaaatagtgaccccaggcttgcaggaattctgtgctttctggaggaaatggtcatgggtttcccaacctgccttttaaactaagagttggaatccaaccagcagcaatgt

SEQ ID NO: 813458 - DNA, 120 bp, Artificial Sequence
  ENSG00000251364_30 (sequence is synthesized)
cagatttgttgttgtcggtcatgaggtacatgctagtcccttgcaaggaacagtttcaggcacagctggatccagaggttcagacagtgtcatcaggactcattatcaccttctctactt

SEQ ID NO: 813459 - DNA, 120 bp, Artificial Sequence
  ENSG00000251364_31 (sequence is synthesized)
tgacagatgctaaaagttcaagggggggggttccaactcttttaaggtctcatcttcagcacttctaaactgtgggaaactatgtgaaaacaaatggagtggccaaacacaccattcatc

SEQ ID NO: 813460 - DNA, 83 bp, Artificial Sequence
  ENSG00000251364_32 (sequence is synthesized)
tatgtgaaaacaaatggagtggccaaacacaccattcatcactgtgcttctggacagctgcaagtccatacgtgttctgatga

SEQ ID NO: 813461 - DNA, 78 bp, Artificial Sequence
  ENSG00000251364_33 (sequence is synthesized)
agctgattttctaatcaagaagttatatcagtctttgtctgcagttgctcaaagactctcttttaaagtgcagagact

SEQ ID NO: 813462 - DNA, 120 bp, Artificial Sequence
  ENSG00000251364_34 (sequence is synthesized)
ctgcagttgctcaaagactctcttttaaagtgcagagactatccacctcagctatagcacagggctcagcactgtatttccagttatggaatacagttatttcatatatgttatattatt

SEQ ID NO: 813463 - DNA, 120 bp, Artificial Sequence
  ENSG00000251364_35 (sequence is synthesized)
cttaattctgtccctagttcctgctactgaggaagtccatactcagcaggacagtctcctggtctgccatgaattcaaacacaatctgtaaagacagtgaaggaagctacatctgtgcat

SEQ ID NO: 813464 - DNA, 120 bp, Artificial Sequence
  ENSG00000251364_36 (sequence is synthesized)
gggggctttagagaattattggcttgaagcaataagaggaacatctgggctgagtagtcctcgaagactctcatgtgattcaaaagtccttttcttccttattatttcctatcttgctct

SEQ ID NO: 813465 - DNA, 120 bp, Artificial Sequence
  ENSG00000251364_37 (sequence is synthesized)
caagcatctcctctggcagcagcaactggaactaaaagtgatttctctataacagcgagcaagtttctcatggcctttgctattaactctttcatgcctgctgacctgcaaaagaatcag

SEQ ID NO: 813466 - DNA, 120 bp, Artificial Sequence
  ENSG00000251364_38 (sequence is synthesized)
gagggctggtgctggagcagatggcgcactgtgagtgatggtttagattctgcctggactcaaaccatttggttgatggcgggaaccttgattttcccccttcttatcctgagagtgtag

SEQ ID NO: 813467 - DNA, 120 bp, Artificial Sequence
  ENSG00000251364_39 (sequence is synthesized)
ggtttctctgaattattatttctttctttgcaaggatccctggatcctcattcctgatataagactagttctaggtaagtgcacattcatgtgatatattggttccatactaggcaatgg

SEQ ID NO: 813468 - DNA, 120 bp, Artificial Sequence
  ENSG00000251364_40 (sequence is synthesized)
aagtgccacattatctgtaaggagcaggagaagagccattagccccagtcctgggaacgaactttctgtaactttaagaaacataaaactttaaatgcaactgaaagattatattctgtc

SEQ ID NO: 813469 - DNA, 120 bp, Artificial Sequence
  ENSG00000251364_41 (sequence is synthesized)
acctccaactactcacccataaatacaataggcaccacggaggctaggataaagtgcaaatttaagattataagtgtgcttataataaatattgacaacatcatgccttcaatgttatca

SEQ ID NO: 813470 - DNA, 120 bp, Artificial Sequence
  ENSG00000251364_42 (sequence is synthesized)
atgttgatgtcaccctgcaggcccaaggtagagaggtagaactgctccgctggctgccctgccatactttggggtcatgtgatacgatcttccatagccacggggccttggttgtcaact

SEQ ID NO: 813471 - DNA, 120 bp, Artificial Sequence
  ENSG00000251364_43 (sequence is synthesized)
cattcctgaactttgtgtgccaaagtgagtccagcttccacacccttcacctccaccaccaggctgatccagactgccaggctacgatcctccaagcaggatcctaccttgatcttaaaa

SEQ ID NO: 813472 - DNA, 120 bp, Artificial Sequence
  ENSG00000251364_44 (sequence is synthesized)
acttcctatgaagagctctaccatcatgttttctaaaaccagaagcccaccctaatccctgcctggcttttggttccttcattagaggcaatcactgccatagagagccccactcactat

SEQ ID NO: 813473 - DNA, 120 bp, Artificial Sequence
  ENSG00000251364_45 (sequence is synthesized)
ccctccatagacgccttagaactaggttgggagcacgagatgctcagcctttatattttgttatcttgaaccacatgggagtctttgaggactacccagcccagacatttctcttattac

SEQ ID NO: 813474 - DNA, 120 bp, Artificial Sequence
  ENSG00000251364_46 (sequence is synthesized)
tgcaagccgataattctctaaagcacctaagcacagacgtagcttccttcactgtctttacagattgtgtttgaattcatggcacagcagaagactgtcctgctgtgtatggagttcctc

SEQ ID NO: 813475 - DNA, 80 bp, Artificial Sequence
  ENSG00000251364_47 (sequence is synthesized)
ctcagtgtggtcaaaagaagactatagaatcaaggatgaagagaaggaacacagaataaaaggacgtctcagcaggaagc

SEQ ID NO: 813476 - DNA, 120 bp, Artificial Sequence
  ENSG00000251364_48 (sequence is synthesized)
gagaaggaacacagaataaaaggacgtctcagcaggaagctctgtgactactatgtgtgagtgaccgagctgaagaagcccccgtcttccagcgcatgttattcccatgacagatgctaa

SEQ ID NO: 813477 - DNA, 120 bp, Artificial Sequence
  ENSG00000251364_49 (sequence is synthesized)
tccatcttgcgaccaacctgaagatgaacagaaaggaaggaaggatggcccaatagcctgggaagaactggtgttcctgataccatcattaaccacagaatctacaatcccggaaccccc

SEQ ID NO: 813478 - DNA, 120 bp, Artificial Sequence
  ENSG00000251364_50 (sequence is synthesized)
catccttaaccatggaatctacaatcctatctctagaccctttgtccagatgctacagtttctttgttcaatctagtttgtgtcaggatttctgttcattacatcaaaagtattctaata

SEQ ID NO: 813479 - DNA, 120 bp, Artificial Sequence
  ENSG00000251364_51 (sequence is synthesized)
atgggtgagggagcagttttgtgtctggcagccatgggtcttcagcccacaaactaaggagatgggacaaggtctactgctcagcatgggctgtcacactcatgggcagctgagccaacc

SEQ ID NO: 813480 - DNA, 120 bp, Artificial Sequence
  ENSG00000251364_52 (sequence is synthesized)
cacgtgctccttgggttggaagactgtcatgcttcacgcaggcatctgctggaaagagtgttcaggtcactgaagctgccttcctgatatttcagaggtatgtgggaaaattcttagtca

SEQ ID NO: 813481 - DNA, 120 bp, Artificial Sequence
  ENSG00000251364_53 (sequence is synthesized)
caaataatattagaagtcagaatattttttttaataattgtgtccagaccacgtgggaggtttccaattaaagagagactttgcattttagtctaatgactggtttaacatgtataattc

SEQ ID NO: 813482 - DNA, 120 bp, Artificial Sequence
  ENSG00000251364_54 (sequence is synthesized)
ataagactagttctagataattcaatacaagaaagaagatttgcttgggaaggtagatggggcaaagcattaccttgtgtaaaactgctgctaaaatatattcctagtgagaaaggtcaa

SEQ ID NO: 813483 - DNA, 120 bp, Artificial Sequence
  ENSG00000251364_55 (sequence is synthesized)
ccaacctgccttttaaactaagatctcactgagcctggccctgtggaattactggaccgagctgaagaagcccccgtcttccagcgcatgttattcccatgacagatgctaaaagttcaa

SEQ ID NO: 813484 - DNA, 120 bp, Artificial Sequence
  ENSG00000251364_56 (sequence is synthesized)
gggtttctccctcaccactggatttttatctctgtactagtgctttgatttgttttaggagtctcacctctccacctgtcatatttccctggcaggctcatttctgctaatgcccacaat

SEQ ID NO: 813485 - DNA, 120 bp, Artificial Sequence
  ENSG00000251364_57 (sequence is synthesized)
atgtgtatcaatgagctttcaacgttaggtacacagctcttcaggcatgtatagcacattaatctgtctgcttctaagtggtctgttgacatgtttgggtgccagttatatctacaaggc

SEQ ID NO: 813486 - DNA, 120 bp, Artificial Sequence
  ENSG00000251364_58 (sequence is synthesized)
tgtgatcattgtcctgggttattctgtttgttctctctgcaggatgcattaggacacccaaggccatggccatcacttacatctaggattcaatcttatctcctgtgaatcactggaaac

SEQ ID NO: 813487 - DNA, 120 bp, Artificial Sequence
  ENSG00000251364_59 (sequence is synthesized)
ctcctgtcctggaaccctttttttccacatcccactggatgtcattcatagcaactggtcttgtgggttgtctattttattgtgttgtcttactcttcctcctggtatcagtttttaaat

SEQ ID NO: 813488 - DNA, 120 bp, Artificial Sequence
  ENSG00000251364_60 (sequence is synthesized)
cctcttgatgagatcagctgatcagtcgctaagcaacatagtcccccatgtctttgtaagattctctgcactcatggctagaatgatttattctggtatcttaagctgtgtttcagaacc

SEQ ID NO: 813489 - DNA, 120 bp, Artificial Sequence
  ENSG00000251364_61 (sequence is synthesized)
tcattctaaatatcaacctattcttgtaagtccactactgatcatctttagatattcttcagtcttccagagttccaaagggcagtaggaagaagcaatgaaaataccacctgtattctc

SEQ ID NO: 813490 - DNA, 120 bp, Artificial Sequence
  ENSG00000251364_62 (sequence is synthesized)
acatctttcattgttccactcaaaaaataccaccatgttcacttctggtggaacgtttatgtccatgagaagcagtggctttgaagagttttggcagactatggcgccttactcaacatt

SEQ ID NO: 813491 - DNA, 120 bp, Artificial Sequence
  ENSG00000251364_63 (sequence is synthesized)
gggaaggtatcttgccatcagaccttttgggtctccatgaaacttcttataccccctctgggaaaagtcactaactgtgatcttactgagcttctaaacacagcattttttttacactta

SEQ ID NO: 813492 - DNA, 120 bp, Artificial Sequence
  ENSG00000251364_64 (sequence is synthesized)
agtgagcgggggtcctcctcatttgtgcttctcttcttgtaagggtgacttcctcccagtaggatgaatctcatgcctatttgtgttattttgctaattccagcttcttttctactcagg

SEQ ID NO: 813493 - DNA, 120 bp, Artificial Sequence
  ENSG00000251364_65 (sequence is synthesized)
catacgtgttctggtgagtcttcaggttgtacgggaacagaggctgaatcaaggcagttcagtgagagtctagatgggagtgcttatggtgttctataataaagtacttatggaacaata

SEQ ID NO: 813494 - DNA, 120 bp, Artificial Sequence
  ENSG00000251364_66 (sequence is synthesized)
atagaaatggattcttagagaagcccaagagaaggaactatgattgcctcatttccctgacatttctaagtttggtggcataatctaattgacccaacccaccttggggtgccaggccat

SEQ ID NO: 813495 - DNA, 120 bp, Artificial Sequence
  ENSG00000251364_67 (sequence is synthesized)
caacagatattaggggtgaagttgtacatgcatgcaggggaggctgagatggtaggcaccgtgaataacatgttccagggtgggctctgcctcttgtctgctctgtaacatacccctgct

SEQ ID NO: 813496 - DNA, 120 bp, Artificial Sequence
  ENSG00000251364_68 (sequence is synthesized)
tccttgtcctgacctctcatttgctaaagtctgatttccagctttgaagtctctgctcaatctctccagccttctgctcatgtcttcacctcctaccttgcagcctgtcttttgacttga

SEQ ID NO: 813497 - DNA, 120 bp, Artificial Sequence
  ENSG00000251364_69 (sequence is synthesized)
tgttgcttgactgcaattcctgtgacttggccttggggtccactcccatgaaatgcttctctggcagccttggcaggtgtgtcccagtgttcctgagttccagtgttcctggctgtgtcc

SEQ ID NO: 813498 - DNA, 120 bp, Artificial Sequence
  ENSG00000251364_70 (sequence is synthesized)
ttgcaccagagcaggctgcttgagattagacacgctcctccctcctatcagtccaccttggctctgacactttcctcagcctccttttctttgtctgctggagcacagcaaagtttccca

SEQ ID NO: 813499 - DNA, 120 bp, Artificial Sequence
  ENSG00000251364_71 (sequence is synthesized)
gaaggtttaaatttacattcttggtcaaggtctcacaccatcatgacactgaagcagatagagtgacttccttctcttctaagctgtgtgcatgcctccatgcccctactagtttgtata

SEQ ID NO: 813500 - DNA, 120 bp, Artificial Sequence
  ENSG00000251364_72 (sequence is synthesized)
attccagtttctataatttcttccattctttcctgaaactttgtgctttctgttaaagtaggtttttagggatatttttcaggtcggttcatccctctgaatgtcttgggtttgtctgat

SEQ ID NO: 813501 - DNA, 120 bp, Artificial Sequence
  ENSG00000251364_73 (sequence is synthesized)
tgaagccaaatggacacagtgagtgtttcctttctgagtggagggaggtggctcttgcatcacctttgggtcctttagagctttagagtaaatgctcaaagactgcccacagctggattt

SEQ ID NO: 813502 - DNA, 120 bp, Artificial Sequence
  ENSG00000251364_74 (sequence is synthesized)
gctggctgtgaattagatctgggaggagaggacttagcaggaaaaagcttctgtatctaatgctgaaatcagagatgaagtctgaacagaagtgcgacatccaagagtcaggggcgggat

SEQ ID NO: 813503 - DNA, 120 bp, Artificial Sequence
  ENSG00000251364_75 (sequence is synthesized)
gtaggaggtgcatgggatgacaggggcggggctctgatctgagaagggcagtttcaatgtgcacagcagagcactggggaggggatgtgttgttccatacaagctgatggaagttgatag

SEQ ID NO: 813504 - DNA, 120 bp, Artificial Sequence
  ENSG00000251364_76 (sequence is synthesized)
aagaataggaacaaggcttggatggtggcaaaagacctacctgcaccaatgtgaaaaaaggggccctttcaaggctgagccaggttggaagagggcagagctgcttccaggacaccagag

SEQ ID NO: 813505 - DNA, 120 bp, Artificial Sequence
  ENSG00000251364_77 (sequence is synthesized)
agtgcagcaagtatgcagagaaaacctgggcaccaagagacctgggagagaggaggcagatgggtgggccaaagttctggtagttgggaaaggtgatagaaagcactgcattaatgctgg

SEQ ID NO: 813506 - DNA, 120 bp, Artificial Sequence
  ENSG00000251364_78 (sequence is synthesized)
gtcctctgcccttgtactaagagcagcacatggctgcctctgaatcctgcccatggagtaacatttgcttccatatgccacaaagatgagatggggccctgatgtgcctgttataggagg

SEQ ID NO: 813507 - DNA, 120 bp, Artificial Sequence
  ENSG00000251364_79 (sequence is synthesized)
gcagagcatcctgtgtgctctgtgagaagagctgggccacgtatctccaggtcaaagcccgcacagcagttatcccctccctctcttgtatcttcaacctttcctttcctattgggaagg

SEQ ID NO: 813508 - DNA, 120 bp, Artificial Sequence
  ENSG00000251364_80 (sequence is synthesized)
atttccgtatttccaagagcctgctcaagtggggtcagcatgtgtctctggtcaccaccctctcccctgtggaaggctgacaactctcccatctatacaaaatttgaaaccaccaattat

SEQ ID NO: 813509 - DNA, 120 bp, Artificial Sequence
  ENSG00000251364_81 (sequence is synthesized)
atgattgacactattacactggaacaatttcctgtcagactcccccaccagactctttacaggccggtgcttcatctacatctctctgtccacagcacttggtgtagtattcgcaaccta

SEQ ID NO: 813510 - DNA, 120 bp, Artificial Sequence
  ENSG00000251364_82 (sequence is synthesized)
gcaggaatgaaagagtccgtgtggagtcaagcacctcagggaaccccttgaaagcagtgacacatacctccaacaagaattgcctcttccttccttctgtggctttgcacagcatttttc

SEQ ID NO: 813511 - DNA, 120 bp, Artificial Sequence
  ENSG00000251364_83 (sequence is synthesized)
tttaattataaacacagttggtctctctatgctgtttaggctaagcacagcacagcttcaaactggaaggttaaatatttgtggtaaaaataacttatttgtgcccatgcaaatgtggca

SEQ ID NO: 813512 - DNA, 120 bp, Artificial Sequence
  ENSG00000251364_84 (sequence is synthesized)
acacaaactcaggcatgtagtgttctatgcagagaagctaaaaccaaggaatgacattaatttccggtgaaaatatgtgatgacaatcttagaattctggcttttcagaaaaaaaaaaaa

SEQ ID NO: 813513 - DNA, 120 bp, Artificial Sequence
  ENSG00000251364_85 (sequence is synthesized)
atgactgggaccttcactgccactgtcttcattctcatgggtgttgcctggctctttggcattcagagctagctctcagttgctttggtgcattaatagaaccactatgcctgtagattt

SEQ ID NO: 813514 - DNA, 120 bp, Artificial Sequence
  ENSG00000251364_86 (sequence is synthesized)
tctgtccaacaagaacttattcaatgctgactttgtgccaggcattttgccaggtgcttgttatacaatgatgaataacacttaggcccattctcaaggagcagtgggaggtgctgggga

SEQ ID NO: 813515 - DNA, 120 bp, Artificial Sequence
  ENSG00000251364_87 (sequence is synthesized)
tgacacacacacagataatatcaagtggcaccaaatgctatgtcaggggcaggcacagggtgctaggagaggatagcacagacgagaagcatttagctcataccacaggatcttcagaat

SEQ ID NO: 813516 - DNA, 120 bp, Artificial Sequence
  ENSG00000251364_88 (sequence is synthesized)
gcttcctgaagaagctgacaactgattagatgctaaaaagacaggctggatctaggcaggaaaagaggggttgaaaggacagcacaagaaaaagttaaagcagaagcaagggcatggggg

SEQ ID NO: 813517 - DNA, 120 bp, Artificial Sequence
  ENSG00000251364_89 (sequence is synthesized)
tgaatagaaagcactgtgtgaaccaccagccattaggtgtggccccaacataaagtataaggaggagatggaggcagggtcgcagaggaccttgaatgccaaggtagggaactcgatctt

SEQ ID NO: 813518 - DNA, 120 bp, Artificial Sequence
  ENSG00000251364_90 (sequence is synthesized)
cccactgaaggtcaactggagtcagaggacaagaaacaggatgaaggaaagaagactggacaggaggaagagagatgcatagtgagatgggttccagaggttcggagagagacagggcct

SEQ ID NO: 813519 - DNA, 120 bp, Artificial Sequence
  ENSG00000266261_0 (sequence is synthesized)
attagatccaactcagccatctgggaggctctgctcctaggctgtctttcttctgtcccttggcccaggatctgtgcagcccaagtcagacaagagaaccacgcctagatgattgcagct

SEQ ID NO: 813520 - DNA, 120 bp, Artificial Sequence
  ENSG00000266261_1 (sequence is synthesized)
gctgcaagattttaactgtttcctccctcccagaggaagctcggccactcattactgtgtgctggcgctggatggcagccagatgcgatgacgacaaggcagctagagtactcaggctca

SEQ ID NO: 813521 - DNA, 120 bp, Artificial Sequence
  ENSG00000266261_2 (sequence is synthesized)
gaagaccacgtgtctctgtgcctgctctggaaaggacagaagattcctgagctctgttataagcctgtgtggctttgtgtggtctgacaagcgacatttttttttgttttcatttttaaa

SEQ ID NO: 813522 - DNA, 120 bp, Artificial Sequence
  ENSG00000266261_3 (sequence is synthesized)
gagaagtaaaatgtaaggacttcaacaccaggacagccattcatctactcccatctcatagaactggacatgaggaattaaaagaaattaaagaacgtgtaagcaaaaattcattgtatg

SEQ ID NO: 813523 - DNA, 120 bp, Artificial Sequence
  ENSG00000247271_0 (sequence is synthesized)
agtcacagcctcagccgcagcggccgtgctacctaggtgatagcggagcggctggaattgagcataccacaaaaaagttctcattttgtgtcctcccatcccattctcctcactaaccaa

SEQ ID NO: 813524 - DNA, 120 bp, Artificial Sequence
  ENSG00000247271_1 (sequence is synthesized)
aggctaggaattatctgtgaatgtaggaccactggatttgcagtcttcatctgacactgtggagagtttctaggaatgaaacagatatatggccttgggtcccctttttttttctttttt

SEQ ID NO: 813525 - DNA, 90 bp, Artificial Sequence
  ENSG00000247271_2 (sequence is synthesized)
ggccacccgactccgcctctcgaagtgatgggattacaggcataaaccaccacgcctggccagaaggtgctttaacaccaaatctgaaaa

SEQ ID NO: 813526 - DNA, 120 bp, Artificial Sequence
  ENSG00000247271_3 (sequence is synthesized)
cacgcctggccagaaggtgctttaacaccaaatctgaaaattgttcagaagagaaacattgagcatgaacaccatctgtgcgagtcatttacttattgcccctcacctctaaatctacct

SEQ ID NO: 813527 - DNA, 120 bp, Artificial Sequence
  ENSG00000247271_4 (sequence is synthesized)
ctttttaagcttgcttcctgttcagttctgccaataggggtcactagagagagactgggaggcagaaggagagaatatgcttcctgttttttctgttcttgttaatgttgcttacaggac

SEQ ID NO: 813528 - DNA, 120 bp, Artificial Sequence
  ENSG00000247271_5 (sequence is synthesized)
cagcaatgcttcttcacctagagacacttctcccagcagtggcagtgccacttcagcttctttcagcactactggaatcagcctcagtgattccccctgtacccgctcagagattatcca

SEQ ID NO: 813529 - DNA, 120 bp, Artificial Sequence
  ENSG00000247271_6 (sequence is synthesized)
cagcagccagatggttctaccttccacaaagattgtggttgcaattctgggcttctaagttctggttacttcatatttttccttttgttcctccagccctagaggtggtagctgctttct

SEQ ID NO: 813530 - DNA, 120 bp, Artificial Sequence
  ENSG00000247271_7 (sequence is synthesized)
gaagttattatttctagatgacttttggtttttcagcctttgtattttgcttttcagccctctaatgcctgtataaccaatttccctgtaataaataaatttcctccattgaaataccta

SEQ ID NO: 813531 - DNA, 120 bp, Artificial Sequence
  ENSG00000247271_8 (sequence is synthesized)
agccgcagtcacagcctcagccgcagcggccgtgctacctaggtgatagcggagcggctgggtaggaagcaattgttctcaaacttcactagccccgtcggcgcggacgcttgtcgagaa

SEQ ID NO: 813532 - DNA, 120 bp, Artificial Sequence
  ENSG00000247271_9 (sequence is synthesized)
tgcagattcctgggtactgccagatacgctattactactgaactatttcacaaacccattttgaaagtcaaaaaccgagcactgagtctttctctgtaatccagctacaccaaccctaat

SEQ ID NO: 813533 - DNA, 120 bp, Artificial Sequence
  ENSG00000247271_10 (sequence is synthesized)
cttctctgaggtgatgcacagctgtcactggggagaaatggaatgccaggaaatgcacaaaggaaaagcatcctgacaaatgttttcagccttatgcgccacaccactaaagaacattgc

SEQ ID NO: 813534 - DNA, 120 bp, Artificial Sequence
  ENSG00000247271_11 (sequence is synthesized)
cacctgctgtaggatatgaagcttctgaagcacatgagaagtaagaggaaacaatggtcatgcccccaaaggtcttgctccacagaactggagggacacgttctgaagaatcccagattg

SEQ ID NO: 813535 - DNA, 120 bp, Artificial Sequence
  ENSG00000247271_12 (sequence is synthesized)
cattccagatgcaccccatggaaacatgggactttggtccttttccaacaccaggtcacaaggagaaagctcattttgcagctactcacagttactagcagggccatcatccttaacatt

SEQ ID NO: 813536 - DNA, 120 bp, Artificial Sequence
  ENSG00000247271_13 (sequence is synthesized)
tttctgttgactcagatctcagtgatttgtagaaggataaattatctaagtatgaatttcctcttaattctgaatagaatcttataatagcctctatcctgttacgacgttcccagtagt

SEQ ID NO: 813537 - DNA, 120 bp, Artificial Sequence
  ENSG00000247271_14 (sequence is synthesized)
cttatgaattcagtagggaataaaccagctgtttccatttcatggggagggcgggaggaacaatcttggactttttctttttttcaaccaatgtttattgaacccttattgtgaaccagg

SEQ ID NO: 813538 - DNA, 120 bp, Artificial Sequence
  ENSG00000247271_15 (sequence is synthesized)
agctgtattaggctctgagaatacacagttagcctgaacctacatgatgcttatactagggaagaagacacataaacagatacttttattataaaatggtagaaataattactaggtgtc

SEQ ID NO: 813539 - DNA, 120 bp, Artificial Sequence
  ENSG00000247271_16 (sequence is synthesized)
aaaggttcaaagttgaagggtatcactcagccttcctggaggagctgagacttgaattaagacttgaaggatgggccagatgccaagtggggagaagagctctgttgatctgttcattgt

SEQ ID NO: 813540 - DNA, 120 bp, Artificial Sequence
  ENSG00000247271_17 (sequence is synthesized)
ggtatccctaccaccccaccacatggtctagtacatggaagacatttaatacagtgaatttgcgaaagaaatctcagcagaggaaatgttataagcacaaacaaggcacgggaaactaga

SEQ ID NO: 813541 - DNA, 120 bp, Artificial Sequence
  ENSG00000247271_18 (sequence is synthesized)
aatgatttggatttacgagaagattaatccttataggatcatagatttctctgaaaaactaatagaagctatggtccgtcttcctaccaaaattaacatacactcaacatttaacaggta

SEQ ID NO: 813542 - DNA, 120 bp, Artificial Sequence
  ENSG00000247271_19 (sequence is synthesized)
aaacttgtacacactgagaaatctctgttatagggaattgggagcattgaggtttttaaaaacatctttattttatttattataaagtaggggaatgacataacttagagttactttgga

SEQ ID NO: 813543 - DNA, 120 bp, Artificial Sequence
  ENSG00000247271_20 (sequence is synthesized)
tgcatagtgaaggatgggcttaaggaagataagactagatgtggcagttcacttaagaggttgctgaaataattctgggtgagttagccagaactaggagtgaagacacgggcatggaga

SEQ ID NO: 813544 - DNA, 120 bp, Artificial Sequence
  ENSG00000247271_21 (sequence is synthesized)
agagtagtggggtgaagaatactttaagcggtaaaactggccttgctggtgtttggttggatttgagagcaaggaatgggaaggagctaaggttgactttcaggttttttgaaggacagg

SEQ ID NO: 813545 - DNA, 120 bp, Artificial Sequence
  ENSG00000247271_22 (sequence is synthesized)
gcagatggtggtgctagtaattgagataggaaatgcaggaaaagaggtttgggtcaggaatgggctgatggagagtctggggacgggagaaatgaggagtttgggtttggccatgttgag

SEQ ID NO: 813546 - DNA, 120 bp, Artificial Sequence
  ENSG00000247271_23 (sequence is synthesized)
atcacttgaggcgaccaggtaatgacagatacgagcgaagtggaaggataatggggagatgctgtaaactttaaggagcaaaggattatgggagagtggagtgggggtccagcatatgtt

SEQ ID NO: 813547 - DNA, 120 bp, Artificial Sequence
  ENSG00000247271_24 (sequence is synthesized)
ttcacttaattgggcagtgaggaggactggtggccactgagtctgaggaatgtggggagtaagatcataaggcagctcctcaaacaagggttggcggagggccagtgtcttcaggagcta

SEQ ID NO: 813548 - DNA, 120 bp, Artificial Sequence
  ENSG00000247271_25 (sequence is synthesized)
tgttaatttcccagggctgccacaaccaagcaccacaaactgggtgacttaaaacaactggaatttattgtctcacagttcttggggctagaagtcagaaatcagagtgaagcaggagaa

SEQ ID NO: 813549 - DNA, 120 bp, Artificial Sequence
  ENSG00000247271_26 (sequence is synthesized)
gaaggtctgaaggcagggaacctgaggccatttcatgcagacttcctagaactaaattcatgcagacttcctagaactttccatgcctaagtaacaaaaggaccagaggctattcccttt

SEQ ID NO: 813550 - DNA, 120 bp, Artificial Sequence
  ENSG00000247271_27 (sequence is synthesized)
gcaaacccccaccttttctgtgtggcagatgggaaatctaaagtacctcaatttgcatacgagtgtaactttgtttgctttggagtgtaactttgtaacttcactccagcctctgattgg

SEQ ID NO: 813551 - DNA, 120 bp, Artificial Sequence
  ENSG00000247271_28 (sequence is synthesized)
ttgctgtccacaaccaatcaaaatgattgcaggccgagtcttcgtttgcatagaagtgcggctttgtaacttcacttcagtctctgattgtgggccaccacttcatttacatgaggtgag

SEQ ID NO: 813552 - DNA, 120 bp, Artificial Sequence
  ENSG00000247271_29 (sequence is synthesized)
caccaagtggccaatgggaaacctctagggggtatttggatcagagaagattctgtatccgggcccatgagcctgctggtgccgctcccacgctgtggagtatactttaactttcaataa

SEQ ID NO: 813553 - DNA, 120 bp, Artificial Sequence
  ENSG00000247271_30 (sequence is synthesized)
tcctgggtactgccagatacggttggtgatcttgtagggctggagtggaagccatgaatctgcattttcatcatttctggccctctgcccgggctggggtgattcacggggattcgtagt

SEQ ID NO: 813554 - DNA, 120 bp, Artificial Sequence
  ENSG00000247271_31 (sequence is synthesized)
ggccccaaaggagcacgcagaacctcggctgctgtgcatttatcacctcttttgttcccggaggccgcaccccaggtccagtttacacagctgccaactccttttcttggttcccactgg

SEQ ID NO: 813555 - DNA, 120 bp, Artificial Sequence
  ENSG00000247271_32 (sequence is synthesized)
cgctgatgcggcgcagaccccgccggacctcttggtcggcccggggtaggctggggagccgcgggaacaggactggatagggaaagcggcaccgcagcgtccacgggcaagctgaaagtc

SEQ ID NO: 813556 - DNA, 120 bp, Artificial Sequence
  ENSG00000247271_33 (sequence is synthesized)
cgcttgatgtctttgcatcacagtggcgccctccccgcaggaacgcccggccgcctgcaccgaacgtttgcctgcagggaacggccaacccgccctgaaatactctttttgtgggctgca

SEQ ID NO: 813557 - DNA, 120 bp, Artificial Sequence
  ENSG00000247271_34 (sequence is synthesized)
gctttcggaattgagcataccacaaaaaagttctcattttgtgtcctcccatcccattctcctcactaaccaaaggctaggaattatctgtgaatgtaggaccactggatttgcagtctt

SEQ ID NO: 813558 - DNA, 120 bp, Artificial Sequence
  ENSG00000247271_35 (sequence is synthesized)
gacctggagtctgtttttccaaataggcaccttgaaatagatacgcttcttaagcggggaaagtacgaaattgagcataccacaaaaaagttctcattttgtgtcctcccatcccattct

SEQ ID NO: 813559 - DNA, 120 bp, Artificial Sequence
  ENSG00000247271_36 (sequence is synthesized)
agccccgtcggcgcggacgcttgtcgagaatgcagattcctgggtactgccagatacgggcactattgtgaggattaaatgagatcgagtgaacaaagcttctgaagtcctgctgggtga

SEQ ID NO: 813560 - DNA, 120 bp, Artificial Sequence
  ENSG00000247271_37 (sequence is synthesized)
acgtcttcataagaggccaagacaataacaatgatgacaaatctgggcaggtcagatcagcagcacatccaaggttcacttcgaagcctgtaggacgatgcctggcgctcaatagcaaat

SEQ ID NO: 813561 - DNA, 120 bp, Artificial Sequence
  ENSG00000204620_0 (sequence is synthesized)
atggcggcggccacgtgggataaggaaagtaagtgtcggctgtcgcgtggtcactgccaccaccgacgccaccagtccctcccggtaggcctcacactcagatacagcgcgccggcctcc

SEQ ID NO: 813562 - DNA, 120 bp, Artificial Sequence
  ENSG00000204620_1 (sequence is synthesized)
caccaaccgaaatgtttcacctccaagcacgggacccgcccgtcccagagaaagccaagcctacgtgtcagtggccattactctccccactcgctattccccggtcacggccggcgcggc

SEQ ID NO: 813563 - DNA, 120 bp, Artificial Sequence
  ENSG00000204620_2 (sequence is synthesized)
aaaacccggacgaacagcgagctcggaggagcacaaaaaacagggacggggctgcgccggaagacgattgataaagaacggagtctacctctgacacctaggctggagtgcagtggcatg

SEQ ID NO: 813564 - DNA, 120 bp, Artificial Sequence
  ENSG00000204625_0 (sequence is synthesized)
cagagaggaaagaaccctgggaacgggaggcgaagggataatgagctggggatgggagcagtcgcaggaagaatcctctgcctggagccggcaggctccaacccctcagcttgagagtca

SEQ ID NO: 813565 - DNA, 120 bp, Artificial Sequence
  ENSG00000204625_1 (sequence is synthesized)
ggagccccatagtccccacagcaataggaagcaccagctcctggtcccgaaaaaaggagggccccaactccagggactgcggcccgccctggagctgagaacacgcggactccagggaga

SEQ ID NO: 813566 - DNA, 120 bp, Artificial Sequence
  ENSG00000204625_2 (sequence is synthesized)
agagctggaagggccctcgaatgccattcacaggaacagcccaggaacccagggacttcagaagggctggtttgtccgaaaagtgagaggaggcggaggagagagcctgcgaggtcaagc

SEQ ID NO: 813567 - DNA, 120 bp, Artificial Sequence
  ENSG00000204625_3 (sequence is synthesized)
ggaggcggaggagagagcctgcgaggtcaagctgcagagaacatgagcttctacctccagatgtgccagggtgcatctcaataaacttggattttggccaggcgcggtggctcaggcctg

SEQ ID NO: 813568 - DNA, 83 bp, Artificial Sequence
  ENSG00000204625_4 (sequence is synthesized)
caccactacactccagcctgggtgacagcaagagatcttgtctcagaaataaataaataaaatttaaaaataaaaataataaa

SEQ ID NO: 813569 - DNA, 120 bp, Artificial Sequence
  ENSG00000230190_0 (sequence is synthesized)
ctaacctcaaggtgcatgccctccactcactaattggctcctctggctgtgatcgagctccaaaagggaaggaggctaattcaaatgggatggccccaaaataagaggaatagtgtgcat

SEQ ID NO: 813570 - DNA, 120 bp, Artificial Sequence
  ENSG00000230190_1 (sequence is synthesized)
ttaaaccaggatatgggctatacctgcttacagtaccctttatgcaatctccagttcattaactctagtagatattgtgaagatactatcaaaaaaaggttatgttcccccaaattaggg

SEQ ID NO: 813571 - DNA, 120 bp, Artificial Sequence
  ENSG00000230190_2 (sequence is synthesized)
aagccctaagggattccgtatctcctttttgtacagagtttgttagaaaatcagatactggtctgagaaaaatgctgattcagatggtcaagagactaaaaaaaagtactttaaaacatc

SEQ ID NO: 813572 - DNA, 120 bp, Artificial Sequence
  ENSG00000230190_3 (sequence is synthesized)
agaatgaaatcactgaaggcaatccttagctttatgatgtgctgtactcctggacaagatggtgagggcatgtggcaaagcatggcagggaattctttcaaaagtggaatccaggaagaa

SEQ ID NO: 813573 - DNA, 120 bp, Artificial Sequence
  ENSG00000230190_4 (sequence is synthesized)
acccttcagagagacttaaagccggtaaaagaccttttgcaaaagtgatccggggggcctccactttgtttctctggatatttctctgttgaaatataggtgtcaagcacgtcccatttt

SEQ ID NO: 813574 - DNA, 120 bp, Artificial Sequence
  ENSG00000230190_5 (sequence is synthesized)
agatgctcttcagacttcaaaacattaccttcctgctttcagggagccatttcatcagcttttgtactgtgtattcactgcagaccctgctgttatgcaaggtaccaccatggctaaaaa

SEQ ID NO: 813575 - DNA, 120 bp, Artificial Sequence
  ENSG00000230190_6 (sequence is synthesized)
ttcacaagacgattcttagttgcactgattttttttttatttgatctttcacaatgttgctgcttccgtttcaaaaacgtctcaaagctttgatttgattgcagctggattcaaggatac

SEQ ID NO: 813576 - DNA, 120 bp, Artificial Sequence
  ENSG00000230190_7 (sequence is synthesized)
ccaaagccaagtttgatcctgaattccccaaatcaaaagtatttcatttcagatgtatgttctatacctggccataataatgaacagcaaccattactggagcatgcttttgattttttt

SEQ ID NO: 813577 - DNA, 120 bp, Artificial Sequence
  ENSG00000230190_8 (sequence is synthesized)
ttcattaacagtcatttttatgatttggaaacataattagaagattcctattccagactacaaatcaatggatttgattctactacacatttgccaataaagagcaatggtatcaaatga

SEQ ID NO: 813578 - DNA, 120 bp, Artificial Sequence
  ENSG00000247853_0 (sequence is synthesized)
gctacaagaatccatccacctacaccccttctccacctgggtgtctctcagacccagaaaatggtgccattggcccactgacaactaaatgtggggacaggtctcttacaagccactggg

SEQ ID NO: 813579 - DNA, 120 bp, Artificial Sequence
  ENSG00000247853_1 (sequence is synthesized)
tagtaaaagcatcctgaggtggcataccatatcgcataattgcattaagaaaggcttttcgctgacgagcattaaaaccaagtacctaggggaagaagaaacccaggtgagaggcagcag

SEQ ID NO: 813580 - DNA, 120 bp, Artificial Sequence
  ENSG00000247853_2 (sequence is synthesized)
gtcgcattccaccaaagatgcaatatctgacactcacccctccttagaatcgtatggcacttacttcaatattcccaccaacacgggccaacagaggaggcaatggcttatctttatcat

SEQ ID NO: 813581 - DNA, 120 bp, Artificial Sequence
  ENSG00000247853_3 (sequence is synthesized)
tccgcaggcccttacgactgggcctacggggagctgcaagaagaaaaagatgaatgagtgacacaggtaggatattaaacaaagcaacatttagaaaagcaacaaaaaaagcacagccct

SEQ ID NO: 813582 - DNA, 120 bp, Artificial Sequence
  ENSG00000247853_4 (sequence is synthesized)
caccttctgaacgttcatcaaagtcttcatcaccttcctctgaagccactgagtaatcggactggttgtcggactggtcgtcctgccaatctggagggagagagggcagatgagcggggc

SEQ ID NO: 813583 - DNA, 120 bp, Artificial Sequence
  ENSG00000247853_5 (sequence is synthesized)
ccactgctctagtggaacggcccatgggtggggggcggggccggccacacacacctcggtcctcctgggagccatcattgtagttgacctgtttacggattctttttcctttgcccagat

SEQ ID NO: 813584 - DNA, 120 bp, Artificial Sequence
  ENSG00000247853_6 (sequence is synthesized)
ttcgggctagatcttcttgctgctgctcataatggtgccgcagcaatttctcccagtagtcaggatccacactttcttcctgtttaatgatttcccgttctacctcctcttcctcctggg

SEQ ID NO: 813585 - DNA, 120 bp, Artificial Sequence
  ENSG00000247853_7 (sequence is synthesized)
acagagggagggccaggactcaggagtgctgaagtcagcaccaccagctacccctggtcctcacagttcccactctgctagctccttttcatgactggactcttaaatacttggtgtgcc

SEQ ID NO: 813586 - DNA, 120 bp, Artificial Sequence
  ENSG00000247853_8 (sequence is synthesized)
tgtttggacctaagaacttagaagaaatttgattgagagtacacagctcctcataattacatatagattagcagtcagcataactcaagaaaaacatgggatagagctattatcacaggt

SEQ ID NO: 813587 - DNA, 120 bp, Artificial Sequence
  ENSG00000247853_9 (sequence is synthesized)
tgcactgatgcatatacaattgaaagatagcaaaaagaaaagaggtcagagccttagcaaggcagaatggagaaacttctgaagtactgtaaaagattttcataagagagaaggaaggag

SEQ ID NO: 813588 - DNA, 120 bp, Artificial Sequence
  ENSG00000247853_10 (sequence is synthesized)
aggatgactataagcctttctattcttcataaacttcataaaagcttaccaactgtctgcagaacgaaaagaattctatatagcctcttatgtcccaaaaacgttgatactcctctaaaa

SEQ ID NO: 813589 - DNA, 120 bp, Artificial Sequence
  ENSG00000247853_11 (sequence is synthesized)
gtgaatttttttcagacacttgaggaccactcactgattccacatcccttatattggaattaaacagctgctaatagcataacattagaaacaacctaaaagcccatcattatggaacta

SEQ ID NO: 813590 - DNA, 120 bp, Artificial Sequence
  ENSG00000247853_12 (sequence is synthesized)
attaaataaattacaatcggccctctgtatccacgggttccgcacctgtggattcaaacaaccatagatggaaaatattcagagaaaaaacaaaattatgtctgtactcaacatttacag

SEQ ID NO: 813591 - DNA, 120 bp, Artificial Sequence
  ENSG00000247853_13 (sequence is synthesized)
acttttttcttgtcattattccctaaccaatgtagcatttacattgcattggtattacttttatgtttacaaggaaaaaaaagtctttgggtacatatatgtgagtgtacatatatgtgt

SEQ ID NO: 813592 - DNA, 120 bp, Artificial Sequence
  ENSG00000247853_14 (sequence is synthesized)
atgaatatatgtataatttgtatacacataaaatatttttggaaagatataaaaggaactgaaaacattagttgtccccaagaagggaactaaattgttagaggacaggagagaaaagag

SEQ ID NO: 813593 - DNA, 120 bp, Artificial Sequence
  ENSG00000247853_15 (sequence is synthesized)
atacgtgtgtgtacatataaatatatatatatttttttgagagagggtctagctgtgttgcccaggctggagtagagtggcgtcattacggctcactgcagcctcgactgccaagtttaa

SEQ ID NO: 813594 - DNA, 120 bp, Artificial Sequence
  ENSG00000247853_16 (sequence is synthesized)
gcaatcctcccacgcagctgggaccacaagcgtgagcaaccacactcggctaatgtttttattatttagagacggaattttaccatgttgcccaagttggtctccaactcctgggctcaa

SEQ ID NO: 813595 - DNA, 87 bp, Artificial Sequence
  ENSG00000247853_17 (sequence is synthesized)
acgacctaggcatgagccaccgtgtctggcccttttgtgtattttgaactatgtaaattctatctattaaaaataaaacttaaaaat

SEQ ID NO: 813596 - DNA, 120 bp, Artificial Sequence
  ENSG00000228543_0 (sequence is synthesized)
gttgctgagaagcactccacaagcacacactctcgttattccactccacacaactgtgaaggagggaggaagaggaaggatgaagaaaaggaagaaggaggaagaagggaggaaggagga

SEQ ID NO: 813597 - DNA, 120 bp, Artificial Sequence
  ENSG00000228543_1 (sequence is synthesized)
agcaggaaggaggaaggaggaagaagaaggcaggaaggaggaaggaggaagaagaaggcaggaaggaggaagaaggaagcaggaagaaggaaggaggaagaaggaaaaaggaaggaggaa

SEQ ID NO: 813598 - DNA, 120 bp, Artificial Sequence
  ENSG00000228543_2 (sequence is synthesized)
gaaggaaaagggaggtagaaagaaagaggaaggaagaagaaacaggaaagaggaagaaggaaggaggaagaaggaaggaggaaagaggatgaagaaaaataaaagcggaaggaggaagaa

SEQ ID NO: 813599 - DNA, 120 bp, Artificial Sequence
  ENSG00000228543_3 (sequence is synthesized)
ggaagcaggaaggagggagaaggaaggaggaagaaggaaagatggaggaggaagaaggaagtaggaagaaggaagatggaaggaagaaaaaagaagaaggaagtaggaaggagggaggag

SEQ ID NO: 813600 - DNA, 120 bp, Artificial Sequence
  ENSG00000228543_4 (sequence is synthesized)
gaagaaggaagtaaggaggaaaaaggaagaatgaaggaggaagaaggcagtagaaaggaggaaggagggagagggaagtaggaaagaaaatggaggaagaggaagtaggaagaatgcagg

SEQ ID NO: 813601 - DNA, 120 bp, Artificial Sequence
  ENSG00000228543_5 (sequence is synthesized)
aggaatcagggaaaaggaagaaggaagtaggaagaagaaaaaaggaagacaggaggaagtagaaaggaggaagaagttaggaggaagaagggggaaaaaggaagaagaagacgaaggagg

SEQ ID NO: 813602 - DNA, 120 bp, Artificial Sequence
  ENSG00000228543_6 (sequence is synthesized)
aggacacactttttacacaaagttctgctaatttaacccttatgtgaaacagttaaatagcaactcctagtgagacagcaggcggaaagatttgaaggaaaactgttgctgccacaaggg

SEQ ID NO: 813603 - DNA, 120 bp, Artificial Sequence
  ENSG00000228543_7 (sequence is synthesized)
atgtactaattgaagcattagtacagtttctttgggggggtgtcagatgagtgtagaggaaccccctactctccacctttgcctagggcaatgtctgcatcagagattggtgccaacgta

SEQ ID NO: 813604 - DNA, 120 bp, Artificial Sequence
  ENSG00000228543_8 (sequence is synthesized)
ataatcagcctcacagaaagttggattcagagtctggaaagatggaagatacaatctttacagcctatggatagaccctcctttccaaacttcagcgtttggaatcttagtacaatttct

SEQ ID NO: 813605 - DNA, 120 bp, Artificial Sequence
  ENSG00000228543_9 (sequence is synthesized)
tcttagtacaatttctataccaaaggtgcttgccaaatgaaactctggatttacaacaaattgtgttttgaaaaatactgtatttgccaggcgcgcagcggctcatgcctgtaatcccag

SEQ ID NO: 813606 - DNA, 61 bp, Artificial Sequence
  ENSG00000228543_10 (sequence is synthesized)
ggtcagagagagagagagacagagagaaagaaatatttaaattgctccagttcaaataagc

SEQ ID NO: 813607 - DNA, 120 bp, Artificial Sequence
  ENSG00000228543_11 (sequence is synthesized)
gagagaaagaaatatttaaattgctccagttcaaataagccggtaataagccaaaccacctgtctcatagagagctggagagagagaagggtcagcaagggaaatgataaaataaacaaa

SEQ ID NO: 813608 - DNA, 120 bp, Artificial Sequence
  ENSG00000228543_12 (sequence is synthesized)
tcactgctatgaaaatttatatggctcaccccgcctctgaaatgagagttcaaaatagaaatgcttgctccttaacacgggttatcataacgagatgcatttaatacatgagtttgctgg

SEQ ID NO: 813609 - DNA, 120 bp, Artificial Sequence
  ENSG00000228541_0 (sequence is synthesized)
aggagccagtccctgccctccagaaactgtgtgtctgggggagaagatcacacacaggaaaatcaagtggtgacaagaggtgccatgagacagtatatagttcatttccccaccgcaaga

SEQ ID NO: 813610 - DNA, 120 bp, Artificial Sequence
  ENSG00000228541_1 (sequence is synthesized)
gacctcagactcagctggcagagaggagaagcagcgggacatcaggactatggctggacgtcagagagaagcagcttaacttcagaggtgcagcttgatggtgtaacttaggagaagaat

SEQ ID NO: 813611 - DNA, 120 bp, Artificial Sequence
  ENSG00000228541_2 (sequence is synthesized)
ctgactggagacggccagacttcagaagaagatgacctacccccccatccccttttcagcttcccttcccgctgagagccacttttattggcaataaaatcctccacatttaccaccttt

SEQ ID NO: 813612 - DNA, 120 bp, Artificial Sequence
  ENSG00000228540_0 (sequence is synthesized)
agtttaaatattacgtagtttgtgaagccttttgcaattctcccaatcagaataaaccagcctctaatccatggactcagaatgaatgaatggtctactgccacccttgtcacaggggac

SEQ ID NO: 813613 - DNA, 120 bp, Artificial Sequence
  ENSG00000228540_1 (sequence is synthesized)
caagcaaccttggagaatccacctgcaacattcctcagagaagctgcaacattactttaaaagaagttacagcagtgcatactattgttgctttcctacaatgtagcaaacagaaacttt

SEQ ID NO: 813614 - DNA, 120 bp, Artificial Sequence
  ENSG00000228540_2 (sequence is synthesized)
cccagtttggaagttaaggcattggctctgacattacttttgccccatctaagcttagtttggtagagtcatatatagggcaggatctagctaataattgtccttaactcaaaagcataa

SEQ ID NO: 813615 - DNA, 120 bp, Artificial Sequence
  ENSG00000228540_3 (sequence is synthesized)
tcttatttcaggtagaaagccacactaacttaattgccaaccagataaatggtgatcacttgaaatctgttttatacttataaataaatcttgaaatattaattatccgtgcttaaaaga

SEQ ID NO: 813616 - DNA, 120 bp, Artificial Sequence
  ENSG00000281468_0 (sequence is synthesized)
ccacatacaacaatgttcatatcctaaactccagaatctgtgaatatcttaggtaatgtgacaaaggaaaattaagatatagatagtgtcaaggttaacaagcagctgacttcatgataa

SEQ ID NO: 813617 - DNA, 120 bp, Artificial Sequence
  ENSG00000281468_1 (sequence is synthesized)
attatctttatcatgagcagaagcctcacgtaattagaagggcgcttaaatatgaaagagggagaaaaaaagaaactttatcacactgatgtgatattaggtcaactcaatgcaatattt

SEQ ID NO: 813618 - DNA, 120 bp, Artificial Sequence
  ENSG00000281468_2 (sequence is synthesized)
ttagcataaagttcagttcagttgttcaaacacctgtgatttatttttacatgcatattactatggatggtgataattaaacaaaaaatgcagaaaataaagaaatgctttctgaagagt

SEQ ID NO: 813619 - DNA, 120 bp, Artificial Sequence
  ENSG00000281468_3 (sequence is synthesized)
gagcccaggtactatattattatatgagtatagacaatgtggaccgtacatgtgattacatgtgattgtaaatgtgtggatgttttatatatgtataagtaatttgttgtataatatagt

SEQ ID NO: 813620 - DNA, 120 bp, Artificial Sequence
  ENSG00000281468_4 (sequence is synthesized)
gctcaggctgcatttttaaaaatttgtatgaggtgggtttgatcaagataaatgggtgaaataaaaatgataaggttggtaatagttttgactatgcaataaataacattgatgatagaa

SEQ ID NO: 813621 - DNA, 120 bp, Artificial Sequence
  ENSG00000228544_0 (sequence is synthesized)
aaaaaaaaaggcgagaatgtgtggcgtagctaatattctgtcttcaaactcagtaggaagtcaacaaagaaaaatcccgctgaaagcgccaaggccggctgggttccccgcacctcctgc

SEQ ID NO: 813622 - DNA, 120 bp, Artificial Sequence
  ENSG00000228544_1 (sequence is synthesized)
agtcctgcaggtacaactgatgcaccctgtagccccgctgtccctccaggatgtcccggtgggatgggagccggcgccaccccgacctgtgttccagccacccgcctgcagcccgggccc

SEQ ID NO: 813623 - DNA, 120 bp, Artificial Sequence
  ENSG00000228544_2 (sequence is synthesized)
cagttccggggcctgtaccgatcatatcctcctcccggttctcaaagctgatcctggtgttgtacttctccatcagagtcgaggactccagggtgtccctcacctttgtgtcgccctgca

SEQ ID NO: 813624 - DNA, 120 bp, Artificial Sequence
  ENSG00000228544_3 (sequence is synthesized)
gggcaaagcccccttcagccgtgcagacactctgaacgggagcctgtcagctttgaggggacgtgggctgtgcaggttcctcccagcccggggctacctcctcggtcctggacaccatct

SEQ ID NO: 813625 - DNA, 120 bp, Artificial Sequence
  ENSG00000228544_4 (sequence is synthesized)
gcactctgtcagccagcatgtctgtcattttcttctcaacggacttgaagctgcagaaggcaatagggacacagcagtgaggggcacaggcccgagagccatggtgggccacccaggagc

SEQ ID NO: 813626 - DNA, 120 bp, Artificial Sequence
  ENSG00000228544_5 (sequence is synthesized)
ccagtcctgagttgggtgctgtgccagaatcagggactcagaagctcagctccaggttctcctccgtgttcctctgggccaggaagcggctagtgatgtcctggccagtccgggggagag

SEQ ID NO: 813627 - DNA, 120 bp, Artificial Sequence
  ENSG00000228544_6 (sequence is synthesized)
agaagcagagtgcctcagaccccagcccagctcagccaccctcctgccatgctccgggagtgccagggagcattacccagacgtgagaggctcagccaccctcctgccattctctgggag

SEQ ID NO: 813628 - DNA, 120 bp, Artificial Sequence
  ENSG00000228544_7 (sequence is synthesized)
cgccaggggcattacccagacgtgagagcaccgtacagcactcttgaccttctccaccacagcagtcacgcccgactggtattccatttctgctgtggaggtctcttttctcctcactgg

SEQ ID NO: 813629 - DNA, 120 bp, Artificial Sequence
  ENSG00000228544_8 (sequence is synthesized)
cagagcagaggggaggggcagtcagcatgcagggatggctcaggggctctgtgtaaggctgtcagacacctctgtacctgcccagctgctggggcggccacccaagacacaggcatcctt

SEQ ID NO: 813630 - DNA, 120 bp, Artificial Sequence
  ENSG00000228544_9 (sequence is synthesized)
actgtgagcactgtgggcccggtggtgcttctcagaggcagcttaggggtcaggatgctcatcctctgcagagtcactggggactgggcccttggtgcagggcccttgggtgctggggcc

SEQ ID NO: 813631 - DNA, 120 bp, Artificial Sequence
  ENSG00000228544_10 (sequence is synthesized)
agcatctctgaggccacatttggctacaggctctcagcctctggagggagaggcagggacctgtccttcccttcaccctggcgaccacatgtcacacctggcctcagggtgacttgatcc

SEQ ID NO: 813632 - DNA, 120 bp, Artificial Sequence
  ENSG00000228544_11 (sequence is synthesized)
gttggcctgaatcagtgccagcctctccttgggaccctggctgggggcaggtggggagctgagcgcttacatttcagggtctccgtgctcatcaggttcgaggggaagtccaagtccatc

SEQ ID NO: 813633 - DNA, 120 bp, Artificial Sequence
  ENSG00000228544_12 (sequence is synthesized)
tggccctgatgggaggtgggggcggggaagggatgagacatccttggcagggagtgggccctgagtggtggccctgagcctgtgtccacccagctgtcatggggatgggcagccagccag

SEQ ID NO: 813634 - DNA, 120 bp, Artificial Sequence
  ENSG00000228544_13 (sequence is synthesized)
gccctggcctggggcttacccggcggtacttctcgctggtctccttcgtgtggatcttgtcgatcagcttcttctgctggttgagccggttctcccttgcccggcgctcctcgatgaagg

SEQ ID NO: 813635 - DNA, 120 bp, Artificial Sequence
  ENSG00000228544_14 (sequence is synthesized)
acgcctccctttgcctcatgttcctctggggacatgcgggtgggcacagggttggggagctgtctcaacaaggcccctaatggcagtaaagccagcgggcggttggccatgctcacctta

SEQ ID NO: 813636 - DNA, 120 bp, Artificial Sequence
  ENSG00000228544_15 (sequence is synthesized)
ctagactttggaactgcatccccggccaatggccacacccttttcctaaaccacttgtgcccgtggcccctcagctcacggccctccttgcccatgcctcagagcatgtgccagcccaga

SEQ ID NO: 813637 - DNA, 120 bp, Artificial Sequence
  ENSG00000228544_16 (sequence is synthesized)
cgctctgctgccctccagccgctggcccccagctgcctcctggccaggtccacctagaactcacggaagtgcattcagcctgcctgaagacagattcatcctcttccccaaaacctggcc

SEQ ID NO: 813638 - DNA, 120 bp, Artificial Sequence
  ENSG00000228544_17 (sequence is synthesized)
tcttccagcgtgcccttgggcagctaaaaccgtcatctgctaacccctgctcacgcaccccagacactgctctcaccctcgccactctcgttgccagcgcttagtggggttgcctcttga

SEQ ID NO: 813639 - DNA, 120 bp, Artificial Sequence
  ENSG00000228544_18 (sequence is synthesized)
ggagttctcagctccgttgctcctggccaccccttctccaccccgggtatacccaggtgatcagcgcttctgccctggcaccttccagtccctgcagcctgagtacaccctttctgaagc

SEQ ID NO: 813640 - DNA, 120 bp, Artificial Sequence
  ENSG00000228549_0 (sequence is synthesized)
gggcgcctccgcgctcccgcctcctcctggcaacctggtgcgcggctccggacctggcgacccacgaccggctggtcacttgctgccacctcgcaaaggcgcatctctagttcagtggtg

SEQ ID NO: 813641 - DNA, 120 bp, Artificial Sequence
  ENSG00000228549_1 (sequence is synthesized)
agctgcggccgggtcgctgcaactcgctccaggcctccggactcgtggcctcggtgtccctcgcggagccctcggtgtgtcgcttgcaggctctttttttgaagaaagcagggagggaat

SEQ ID NO: 813642 - DNA, 120 bp, Artificial Sequence
  ENSG00000228549_2 (sequence is synthesized)
ggccttgtgagagactccaggagcaaagagcgaccctcacaaggcccaagtcctcccagagctcagggaagctgtcgcttctgacagaagaagggagacaaagctccctcctgtgtgtcc

SEQ ID NO: 813643 - DNA, 120 bp, Artificial Sequence
  ENSG00000228549_3 (sequence is synthesized)
ctggtggtctagtggctaggattcggcgctttcaccgccgcggcccgggttcgattcccggccagggaattgttttacactggccgccctcccgcaggaatcttccttcactacgctgtc

SEQ ID NO: 813644 - DNA, 120 bp, Artificial Sequence
  ENSG00000228549_4 (sequence is synthesized)
agccggcctgctccaagggccagaagcagaacagtctccgcagcggggttaaagccgggcgaaggagggcaagtgctggtggaccacctctcacgacacaccgttcctgtttatctcagt

SEQ ID NO: 813645 - DNA, 120 bp, Artificial Sequence
  ENSG00000228549_5 (sequence is synthesized)
gtccgtcatccgcgggagcagctttagagagcgactgagcgtctcgctccggtgtacacagcccggcaaagatgccagcccccgtggagctgcacccaataagcccaccttctttcccgt

SEQ ID NO: 813646 - DNA, 120 bp, Artificial Sequence
  ENSG00000228549_6 (sequence is synthesized)
gctgcgaataactaagagagaggccaagccaagtcgtggcgtttgtggcagccccggacacgggcaccagccagtcagcggagcctcctcacctccgttgccagcgaaggcgctcgttag

SEQ ID NO: 813647 - DNA, 120 bp, Artificial Sequence
  ENSG00000228549_7 (sequence is synthesized)
gccttgggaagaggcgaccggaggcgatgcccgcgaatttgttaggggggtaagcggcgggtgaggtcctcgagggcggtcccgtttgctgattgagcggtagacggaggcgatgttcgc

SEQ ID NO: 813648 - DNA, 120 bp, Artificial Sequence
  ENSG00000228549_8 (sequence is synthesized)
tgacccaacaaggacagcaggtggagtaggcacagatggaaaactgctgccggtgccctaagcagaaggcaggtggaaaaatcagcactaggacgtcgaagcgatggtaccacagtcaaa

SEQ ID NO: 813649 - DNA, 120 bp, Artificial Sequence
  ENSG00000228549_9 (sequence is synthesized)
tcccacgacgtctacactctaccaagcacttgcgcacgctcccccttttccattcagtactcccaagaggggttcggaagaaccccgagtccattagttgctgatccctgtgatttcctc

SEQ ID NO: 813650 - DNA, 120 bp, Artificial Sequence
  ENSG00000228549_10 (sequence is synthesized)
catgtgggaaacggtgtttgtgctagaagaggctgcgctctttacctgacataacggggttcaagactgacaacgcctcacgcccacccgaaaacgtttacatggcttccttgtctcttt

SEQ ID NO: 813651 - DNA, 120 bp, Artificial Sequence
  ENSG00000228549_11 (sequence is synthesized)
ttttttctgtcctaaagtcgcctcatcttcacatcccctcttttttttcttccacactcgagagtgtctctctctctcagtaaaagctccaccaaatatttgaaatatctcaaccagaaa

SEQ ID NO: 813652 - DNA, 120 bp, Artificial Sequence
  ENSG00000228549_12 (sequence is synthesized)
aaactcgattcaccatcgccagccacgggaggactgggaggacctccagaggaggttaggttgacttcatggtaactttagatcctgaaacctcccaggatatttcttgtcttccctttg

SEQ ID NO: 813653 - DNA, 120 bp, Artificial Sequence
  ENSG00000228549_13 (sequence is synthesized)
atcgctcttccgcctacccaacaggacaggactcgacgcctttctttcctggcagcaagaggtccgttgcggacaagaccaaagtgagcagctggtttcccctacgtgtccttccgggcc

SEQ ID NO: 813654 - DNA, 120 bp, Artificial Sequence
  ENSG00000228549_14 (sequence is synthesized)
tgggcgtctctggagctcaggctgacccgagacctgactcccggccagtgggaccagcaggagcctggaagagcgcgcccaccggggtggaggttggtcgccgggggtcgagaaccgcag

SEQ ID NO: 813655 - DNA, 120 bp, Artificial Sequence
  ENSG00000228549_15 (sequence is synthesized)
tcaaaccctcttcttccccgggcaccgcgcacctgcccccggggatgccgaaggaagtggcccataaagcttctctgcaaccgaaagaggcctgaagctccaggagggccgagaggagcc

SEQ ID NO: 813656 - DNA, 120 bp, Artificial Sequence
  ENSG00000228549_16 (sequence is synthesized)
tcgttgagcgaacccagccctctgcctggctggccctggtcaacaggctcggaagaggctgatttggaggacagaacggaagaaaagacctaaaggtttcgaatctcatgatgtagagat

SEQ ID NO: 813657 - DNA, 120 bp, Artificial Sequence
  ENSG00000228549_17 (sequence is synthesized)
gttaaaagcctccaatcctaaggtctgactgtgcgggggagcgagggggtctcaagctggatggacccctgagccttcatctggagagtcctctgcacaagctcagacagcaggacaacg

SEQ ID NO: 813658 - DNA, 120 bp, Artificial Sequence
  ENSG00000228549_18 (sequence is synthesized)
cgcatcagtggttctcaagagggggcaacttcgcccttacacgcctctcacctccacgctgggacactaggtcacgaatgggggaagcggggagggagaatgctaaccccctggcatgta

SEQ ID NO: 813659 - DNA, 120 bp, Artificial Sequence
  ENSG00000228549_19 (sequence is synthesized)
tctagtcagcagaggcgacggctgctgctaaacaccttacaatccacgggagggcccctcccctaccccgaagtagccattccgcagaggtggagagactctcgtgtagctcaatgccca

SEQ ID NO: 813660 - DNA, 120 bp, Artificial Sequence
  ENSG00000228549_20 (sequence is synthesized)
cgcacttagccgatgggaaattacgaattgatgaccagttggctcttggatctgaggaaaaaactccagagtcagagggaactctcgaagttttgcccggagcaaacggaagggtggctt

SEQ ID NO: 813661 - DNA, 120 bp, Artificial Sequence
  ENSG00000228549_21 (sequence is synthesized)
tgccatcgcctaagatgggaaaatggcaggtgtcacaggttgcaggggaaggtcggagaccagctgagggccccggagccttcctggaaagagtttcccatccagcccgtctcggtttcc

SEQ ID NO: 813662 - DNA, 120 bp, Artificial Sequence
  ENSG00000228549_22 (sequence is synthesized)
gcagactcggcagcggcggcgggcagaaccgcgggggggggagagaccgtggtcacgaagggggttctcccagagtgaagcttcttcatctcactctagagttgctgatccctgtgattt

SEQ ID NO: 813663 - DNA, 120 bp, Artificial Sequence
  ENSG00000228549_23 (sequence is synthesized)
ggaggcgatgcccgcgaatttgttagggggcctagggagaaaaccgtggggactcagggctggaactttagtgtgatggggcagaagcttaattttcacatgattctcaacaaatggcag

SEQ ID NO: 813664 - DNA, 120 bp, Artificial Sequence
  ENSG00000228549_24 (sequence is synthesized)
catatcccatgtattatcatgtccaatggctgcaatatgaaggaggcttttccgaaatagttgctgctttggtaaaaaattaactagatggattcaaagtcaaatttgaagaaagctgag

SEQ ID NO: 813665 - DNA, 120 bp, Artificial Sequence
  ENSG00000228549_25 (sequence is synthesized)
caggcagaagaaacaatcagtgaacctgaagataaggcaatggaaatcatccagtttgaggaacagaaataaaaaaagattgaagaaaagtgaacagagcctaagtgaccatcaagtgga

SEQ ID NO: 813666 - DNA, 120 bp, Artificial Sequence
  ENSG00000228549_26 (sequence is synthesized)
acctggtgcgcggctccggacctggcgacccacgaccggctggtcacttgctgccacctcgcaaaggcgcatctctagttcagtggccatgtgctcatttccacttacctggcaggggag

SEQ ID NO: 813667 - DNA, 120 bp, Artificial Sequence
  ENSG00000228548_0 (sequence is synthesized)
ctatgaaagtgtaacctttcccctttttcaaaataagcattagcgtcattaaattcattactccctgcccccctttttttattgctggcatcatatacacaaaattcaataatagaaatg

SEQ ID NO: 813668 - DNA, 120 bp, Artificial Sequence
  ENSG00000228548_1 (sequence is synthesized)
tttaactgtctgaaattattttctggccattatcatcatcattattatttatttcttaattattgaaataattttgttactatagaagaggggagtattttaaaaaatctactcctgagc

SEQ ID NO: 813669 - DNA, 120 bp, Artificial Sequence
  ENSG00000228548_2 (sequence is synthesized)
cacctgagtcatattttccatttagtaaaatgaacatctggctgctgtatgatgccttttgtgtaccatcacctaagccacaattacctgcaaggtaattcataccactacagcacggtg

SEQ ID NO: 813670 - DNA, 120 bp, Artificial Sequence
  ENSG00000228548_3 (sequence is synthesized)
caaaaacagggttggtttgggatggtgaaagtcagccatcttagtgtcaatcttgcatgcaaattctaatgaagaaaagccactaccagcaggtccacacacactcacaaagaactcata

SEQ ID NO: 813671 - DNA, 120 bp, Artificial Sequence
  ENSG00000281460_0 (sequence is synthesized)
tgaccttcagacttgaacggcagcactggctcctcccctctccagctccatgaccttcagacttgaacggcagcgccggctcctccctgggtctcgaacctgcccagcctgcagattttg

SEQ ID NO: 813672 - DNA, 120 bp, Artificial Sequence
  ENSG00000281460_1 (sequence is synthesized)
gacttgctagccttcaggatcacattagccaattccttaaactcaacctctttctctgtatgtaggatatggacacctcctgctggctctttttccggagagcccagtgaacacaccgtg

SEQ ID NO: 813673 - DNA, 120 bp, Artificial Sequence
  ENSG00000281460_2 (sequence is synthesized)
aaagaccctcacctctggattgtaaccaactcagtggcagacttaatccatttctatctgctgacatttctcacatggaataggctgtttgacagattgaagctgtctccccccactccc

SEQ ID NO: 813674 - DNA, 120 bp, Artificial Sequence
  ENSG00000281460_3 (sequence is synthesized)
caggccagtgcacacttatctcccttgaatgttcattttgtgctcattttagagactgaggcacaaagacaggcaaatacaaggtgaagtcagtgacaaataaacaatgctatttaggca

SEQ ID NO: 813675 - DNA, 120 bp, Artificial Sequence
  ENSG00000226079_0 (sequence is synthesized)
acattactcatcactcaatctccaggaccaagttaatgttctgtatatagtaatgtcgacagcaacatctcccccaggtgtaacaactaaacgtgtctccagacattggcaaatatcctt

SEQ ID NO: 813676 - DNA, 120 bp, Artificial Sequence
  ENSG00000226079_1 (sequence is synthesized)
gggccatggagaaaacatcaccttcaattgaaaaccactgggccactctaatgccttcaagagagaagcagcacctttcattggaggtagctgtatcacaagacagcagcaacagcctta

SEQ ID NO: 813677 - DNA, 120 bp, Artificial Sequence
  ENSG00000226079_2 (sequence is synthesized)
agtcctacagcacacagcactgaataaatgcttttggacagttgtctatcttctgcctcagagaaaagatggagtcccgttaagaacatatgtaccttgtacctgacatagaaacttcct

SEQ ID NO: 813678 - DNA, 120 bp, Artificial Sequence
  ENSG00000226079_3 (sequence is synthesized)
cgaggcatcatcctcttctatgactctgaggatcaaaggcattttcttgtatttcttgaacaaagatttgtggaggacctactctgtgcagacattattagacaataaaggaagccaaga

SEQ ID NO: 813679 - DNA, 120 bp, Artificial Sequence
  ENSG00000226079_4 (sequence is synthesized)
gtctcaggcccttcgcccttgcttctcagaaaagaacagctaaccattgccaaccagaatgcatagaaactgaactacttctgtgtctgcaattgtcatcttggacaaattacctaaact

SEQ ID NO: 813680 - DNA, 120 bp, Artificial Sequence
  ENSG00000226079_5 (sequence is synthesized)
gcttgggctgagatatgtgaattcagatattgaagcttatttataccttcataattctatgcttccataatgattaaatccaccatagtaataaataaaggccttaaccacatgaagaaa

SEQ ID NO: 813681 - DNA, 120 bp, Artificial Sequence
  ENSG00000286119_0 (sequence is synthesized)
agccaaaggaatagtaacgcagtggagagcagtccatgatttaatgcactgaaaccaacagcctcggcccccagcacacacacgcaggctgggcagctccttctcaggggcccgcactgc

SEQ ID NO: 813682 - DNA, 120 bp, Artificial Sequence
  ENSG00000286119_1 (sequence is synthesized)
ctccttctccttggcaggtgtcttcttggggtcacacattggaacagccctgtctacagccttgcttgctgcccctgcggtgtggagacagcatcactcttgcccaggacgcctggctgc

SEQ ID NO: 813683 - DNA, 120 bp, Artificial Sequence
  ENSG00000286119_2 (sequence is synthesized)
ctctcaggggtgagggggtgagaccttgattttgtgggcctatagcagcctctttctagtcagataaaggctcaaaacctccttcctaccttcctcccttcctcccggcctgaggcagtc

SEQ ID NO: 813684 - DNA, 120 bp, Artificial Sequence
  ENSG00000286119_3 (sequence is synthesized)
accctcatagccctgtagagtcttcagagaagtggcaattcaaaggctgaatgctccattatgtggctccggcaaatggcttgtctcccgtggagagatacagaggagtgggtctttgac

SEQ ID NO: 813685 - DNA, 120 bp, Artificial Sequence
  ENSG00000286119_4 (sequence is synthesized)
aggctggagatgctctgatccgcccgcggtgctgtggagcacgccggtgccttgcgtgtgttctggcccagagcctactgggccacgatttgtgtatcttttgtaaagtgccatgcgtga

SEQ ID NO: 813686 - DNA, 120 bp, Artificial Sequence
  ENSG00000286119_5 (sequence is synthesized)
gccggatcggccctgacataattactggaatattttaatatgaagaagagtctctgagtcatctgctcacacacctccaccggggccccatcttagccaggacactggtcagagacagat

SEQ ID NO: 813687 - DNA, 120 bp, Artificial Sequence
  ENSG00000286119_6 (sequence is synthesized)
ttcctctgatggggaagtgacaactcagcctccccagagggagggctgagcacagagagacacctgcaaggagagaagcagcttcagggaaccgcccagaaaataaagggctcttgggat

SEQ ID NO: 813688 - DNA, 120 bp, Artificial Sequence
  ENSG00000286119_7 (sequence is synthesized)
cctgcagctcccattctcaggccagagggagcagtgcaacaaagggggccggcctctgctgacatcagcgagaccccaaataacaggaccctagaaagaagctttgtcagaccaaatctg

SEQ ID NO: 813689 - DNA, 120 bp, Artificial Sequence
  ENSG00000286119_8 (sequence is synthesized)
gggaggcagaggggaggaggaaggaaagccctcgggaagccacgctctcactcctctccatggggctctgggatggagacgtgagaaaaaggtaactgaagtctgagttgacaaagcctg

SEQ ID NO: 813690 - DNA, 120 bp, Artificial Sequence
  ENSG00000286119_9 (sequence is synthesized)
agacagaggaaatgtacagttgtaatgaaataaagcttacagtcaacttcatctgacacacatagaatgataggcagaatctttactgtgctgttgcctctcagtcctaaatgaccatcg

SEQ ID NO: 813691 - DNA, 120 bp, Artificial Sequence
  ENSG00000286119_10 (sequence is synthesized)
gttcactcacataaccgcagttagtgtgcctctcacaggggcacactctgcacttctggggtctgtggaggcgagcccagtcctgccgcacagctgctgttctccagatcctcgaggccg

SEQ ID NO: 813692 - DNA, 120 bp, Artificial Sequence
  ENSG00000286119_11 (sequence is synthesized)
aggcccttccactctctggggagaggatgccccagcatggaaacgaaaagtgataataaagaaagaaaagaagaaaagtgtcacagtggaaaagaccaagcagatcaagaggaataaaag

SEQ ID NO: 813693 - DNA, 120 bp, Artificial Sequence
  ENSG00000286119_12 (sequence is synthesized)
acaaaccacagactgggagaaaatatttgcagaagatatacacgacaaaggactcttgtctaaaatatacaaagaactcttaaaactcaacacaaacaaaataaacaatttgattaaaac

SEQ ID NO: 813694 - DNA, 120 bp, Artificial Sequence
  ENSG00000286115_0 (sequence is synthesized)
gggcaacccgctagcgtcccattgaatgctgtagagggttggtttttttttttgctctttgcaataaatcttgctgttgctcactctttgggtccgtgctgcctttatgagctgtaacac

SEQ ID NO: 813695 - DNA, 120 bp, Artificial Sequence
  ENSG00000286115_1 (sequence is synthesized)
tcaccgcgaaggtttgcagcctcgctcctgaagccagtgagaccaccaacccaccaacccactgggagaaatgaataactccagacgcgctgcctttaagagctctaacactcaccgcga

SEQ ID NO: 813696 - DNA, 120 bp, Artificial Sequence
  ENSG00000286115_2 (sequence is synthesized)
aggtctgcagcttcactcctgaaggcagcgagactgcgcacccaccagaaggaataaactccggacctatctgaacatctgaaggaacaaactcccgacacaacatgtttaaaaactgta

SEQ ID NO: 813697 - DNA, 120 bp, Artificial Sequence
  ENSG00000286115_3 (sequence is synthesized)
gtcagcgagaccaagaacccaccaattgcggacgcggtaggactgccaaataaagagactggaggaaacctcgaattcatctcctcaaggaattttggggctaggattttggagtgggct

SEQ ID NO: 813698 - DNA, 120 bp, Artificial Sequence
  ENSG00000286115_4 (sequence is synthesized)
tattctcatcctgatttggttcctctgtggggatctttaaacttggtgtcagctggtcactagaattcagaatctgagtgctcctagcaatggcagcagcagcaatagtaggtgactgaa

SEQ ID NO: 813699 - DNA, 120 bp, Artificial Sequence
  ENSG00000286115_5 (sequence is synthesized)
gaggagcatttcagtagtatcagtggctattttggcagtgggagtgccaacctgtagcaacccaacagggaagaagccaagtgaacagaaatggccattgggtgttaatcagctgtaaag

SEQ ID NO: 813700 - DNA, 120 bp, Artificial Sequence
  ENSG00000286115_6 (sequence is synthesized)
aagaaagcagaaagccaagggaatccaaaaaagagctttgccctgtaagcacagttgcctcacctatgacctccataactgagaaagaatttggctccagcaatattctctgtgaagttg

SEQ ID NO: 813701 - DNA, 120 bp, Artificial Sequence
  ENSG00000286115_7 (sequence is synthesized)
gtggcttgaatcactgccatgagcaaatgagttttctctacggagaatgaattctcctgagctgctgaaacaaaggataccagaagcaaaaaaaaaaaacggtatgatctttagagcaaa

SEQ ID NO: 813702 - DNA, 120 bp, Artificial Sequence
  ENSG00000286116_0 (sequence is synthesized)
tcaaactggcagtttactctggtaatctggcacccctaaagcaatgtagtagccttcaaagagattcctttgaaacactgacacttctcctatgtgtcagtataagagtattcagaagga

SEQ ID NO: 813703 - DNA, 120 bp, Artificial Sequence
  ENSG00000286116_1 (sequence is synthesized)
aattacttgtccagtgtctcaaagagcttactcagagacaacgtccaaattccagaacttctttgcctctaatttgctgctaagggtggtaactgtatttcaggcatgaacattagagga

SEQ ID NO: 813704 - DNA, 120 bp, Artificial Sequence
  ENSG00000286116_2 (sequence is synthesized)
tttttcatcagtctaactatagctggtagtgggggtgctgccatttatcaatttaatttttgcttgcaaacctggccatcatttacaaatttgtgtttttccatcctggttgctaatgtc

SEQ ID NO: 813705 - DNA, 120 bp, Artificial Sequence
  ENSG00000286116_3 (sequence is synthesized)
ttaattcatattttatcattttattgtatttgtaagacttctcaagtcctttgtgatgtaaatatggcccattaaaaatgaaaataaacagcccaatatgttcgttaggttggcttaaga

SEQ ID NO: 813706 - DNA, 120 bp, Artificial Sequence
  ENSG00000286116_4 (sequence is synthesized)
ttattaaattacaaattaagctacaaaaataaataaatattccattttatgctctttgggttggtttaagaaaaatgattaaattacaaattaaataactgttctttattttccccacaa

SEQ ID NO: 813707 - DNA, 120 bp, Artificial Sequence
  ENSG00000286116_5 (sequence is synthesized)
acaaaactattctgtatgactgcttgtaaatacacagctttattttccaaaggccctctccctttcctttgaccataagataaccattctacaaaatgtaaaggagagcaaactggctgt

SEQ ID NO: 813708 - DNA, 120 bp, Artificial Sequence
  ENSG00000286116_6 (sequence is synthesized)
ccagtgattgcctggccaatgtcctaaataatgcaagacaaaacctgttggggcccaataaaataaaaatccatggactcttagaggcttcggaattcaaatgagcctcatggatccaca

SEQ ID NO: 813709 - DNA, 120 bp, Artificial Sequence
  ENSG00000286116_7 (sequence is synthesized)
tcccttcaattagcaagctggcatttctgagcgagggactttccaaaacaggctgctcaagtttcttggccaataacagggtcatgcacaataaaaaaaaaaaatgcaacccacagctat

SEQ ID NO: 813710 - DNA, 120 bp, Artificial Sequence
  ENSG00000286116_8 (sequence is synthesized)
ttctcaaattaatttgtaaagtaagtttgactctttttctgtctcctttagaaatttgtcaactttttgggatttcaaacttttttattgtaagtgtcggagtaaaaacactcagaaata

SEQ ID NO: 813711 - DNA, 120 bp, Artificial Sequence
  ENSG00000286116_9 (sequence is synthesized)
ggaaagagaaaactaacaccaggaaggttgagagaaggaaagagaaagagaagcaaaaggggttaaggatggggatacttgttgactatagttatcaccagagtcagaggactaggggaa

SEQ ID NO: 813712 - DNA, 120 bp, Artificial Sequence
  ENSG00000286116_10 (sequence is synthesized)
gaggggaaaagcagaaaacagctccccacccatctatgtccagcccattaatagaattaaaatttgcttctgtattccaagtaattagcactttgcatctattttatttattgctactac

SEQ ID NO: 813713 - DNA, 120 bp, Artificial Sequence
  ENSG00000286116_11 (sequence is synthesized)
taagaaaacataaccgtgaaggcataaaagcaaacattttctgtagacacatgaggtgacacaagagtgttgaaacttctttaaggataaaggcctgatgttaggcatgtcgtgagcgca

SEQ ID NO: 813714 - DNA, 120 bp, Artificial Sequence
  ENSG00000286116_12 (sequence is synthesized)
aaaccaatttctgtgtaactaaatttaaaagagtcatattagaggggagaaatggaagataaactgcaaaacgtaaacaatgattacttaggtgatagagttatgtctgatctttgtatt

SEQ ID NO: 813715 - DNA, 120 bp, Artificial Sequence
  ENSG00000286116_13 (sequence is synthesized)
ttatgtctgatctttgtatttgactcatctgcatttataaattttatttaataagccttaatttcctaggccatatatcatatacaaatataagttatacctaacttataggtattataa

SEQ ID NO: 813716 - DNA, 120 bp, Artificial Sequence
  ENSG00000286116_14 (sequence is synthesized)
tatgaatatttacatatgcgtgtgtgtgtgtattctttcagaaaagcaaagttttcttcgggctttaaacacgcagcctctggtaaaggtgctattggtacaaaagttcaacaagcatag

SEQ ID NO: 813717 - DNA, 120 bp, Artificial Sequence
  ENSG00000286116_15 (sequence is synthesized)
ctccaagctttgacaattttcttacactttactaatactgctgtccaaaaactatgagattttcaaagcagccaacattgcagtggtgcaatggttaataacaagagagagaagagtgtg

SEQ ID NO: 813718 - DNA, 120 bp, Artificial Sequence
  ENSG00000286116_16 (sequence is synthesized)
gcctgaggttgtataaatgttttctcaatcttgaatcattaattttctccaaggaagtttctaaagaatcccaaatagtgcacactatttctgaaaggaacaggatttttttttctaatc

SEQ ID NO: 813719 - DNA, 120 bp, Artificial Sequence
  ENSG00000286116_17 (sequence is synthesized)
atggacccagacatctcagcctcttggtgtaatctggatatcagatgcaatcagcgaacagcctgagttttggaattagatctgagttcaatcccatatctcccatttactagctgtgtg

SEQ ID NO: 813720 - DNA, 120 bp, Artificial Sequence
  ENSG00000286116_18 (sequence is synthesized)
atcttggctgaattactgaagctctctgaacctcatttcgccatctgtaaaatggggatgtggttatcttccccactacatggctctcgtgagaatccgcggagatcacatttgtaaaca

SEQ ID NO: 813721 - DNA, 120 bp, Artificial Sequence
  ENSG00000286116_19 (sequence is synthesized)
cttctctcgctatgcctggcactttgttggggcccaataaaataaaaatccatggactctcagaggctccggtactcaaatgagcctcctggatccacgtctctttgattagccatctgc

SEQ ID NO: 813722 - DNA, 120 bp, Artificial Sequence
  ENSG00000286116_20 (sequence is synthesized)
aagctggcatttctgagcgagggacttttcaaaacaggctgctcaagtttcttggccaataataggcgccgggttctgtgcggtgggaacgagtaccaccaaccccagcaggagaccaag

SEQ ID NO: 813723 - DNA, 120 bp, Artificial Sequence
  ENSG00000286116_21 (sequence is synthesized)
cagaaatcaccatgggagtgcaagctaagaaagggcaaaagaagaaagagaagggcagaaaaacaaaacaaaatgaaaccactcaggcagcgacttacagtcttaaagagagaattcccg

SEQ ID NO: 813724 - DNA, 120 bp, Artificial Sequence
  ENSG00000286116_22 (sequence is synthesized)
gaagggagacaaggcagtttctttttctgtgtgacaataaaaaacggtaaacaagcctccagaagctcattcagcccccatataactttttcgagaaagaaaaggtgccgttcttccgag

SEQ ID NO: 813725 - DNA, 120 bp, Artificial Sequence
  ENSG00000286116_23 (sequence is synthesized)
ccctccggcttaaccactgcttcggtgctgacttatttcctacgtctgagaactgccagaaaatgagcaatatctgttctgaaggctgcaggctctctccccgcccccgcggggcggcgc

SEQ ID NO: 813726 - DNA, 120 bp, Artificial Sequence
  ENSG00000286116_24 (sequence is synthesized)
gcactcacccacccgcgccggagcggacctttggcttggcttgtcagggcttgtccaggagttccgctcctctctccaaccggggtccccctccagcgaccctaaagcttcccagacttc

SEQ ID NO: 813727 - DNA, 120 bp, Artificial Sequence
  ENSG00000286116_25 (sequence is synthesized)
cgcttcaattcctgtccgcaccccacgcccacctcaacgtggagcgcagtggtctccgaggagcgccggagctgccccgcctgcccagcggggtcagcacttcgcatcaaggcccaagaa

SEQ ID NO: 813728 - DNA, 120 bp, Artificial Sequence
  ENSG00000286116_26 (sequence is synthesized)
aagcaagtcctccagcgttctgagcacccgggcctgagggaaggtcctaacagcccccgggagccagtctccaacgcctcccgcagcagcccgccgctcccaggtgcccgcgtgcgccgc

SEQ ID NO: 813729 - DNA, 120 bp, Artificial Sequence
  ENSG00000286116_27 (sequence is synthesized)
tgccgccgcaatcccgcacgcgtcccgcgcccgccccactttgcctatccccgggactaagacggggtaagcctccacccgggcaggagagggctcaccagaggtaggagggtccagatg

SEQ ID NO: 813730 - DNA, 120 bp, Artificial Sequence
  ENSG00000286116_28 (sequence is synthesized)
cccagcatggttgttgagcaatcctccgaagtgaaagagcttccccaactccgtactgagcgggtccaccaacccgcgggagaagaggcagctccgcctgggcagccagggctggcctca

SEQ ID NO: 813731 - DNA, 120 bp, Artificial Sequence
  ENSG00000286116_29 (sequence is synthesized)
gggtgtgttccgtgccagtgcccgcccctgaggctccagccaagtcactcgtaaaccgcttccctcactccccagaagcgtctttgaacacctgtgtgtcactcttgcgcgagatcagag

SEQ ID NO: 813732 - DNA, 120 bp, Artificial Sequence
  ENSG00000286116_30 (sequence is synthesized)
acgagctcacgaaaagccccggtggtcaggaggatgggaaggaagcctcgctggggaacgcccgggttggggagggctccattgattcagcaacttggcctgcgcgcgggtagggagggg

SEQ ID NO: 813733 - DNA, 120 bp, Artificial Sequence
  ENSG00000286116_31 (sequence is synthesized)
gagaagtcagggtgaggaaggagtcagggttcgttgcacaaatgggcattcctgtcccggggcgttcctgcagtggctggcatgctcacttcaggtgaggacctcgagagccggcctcct

SEQ ID NO: 813734 - DNA, 120 bp, Artificial Sequence
  ENSG00000286116_32 (sequence is synthesized)
gccctttctaaaggcttctgctgtagttcaacctgggaagttggggaggtcttgaaggagaatggagctcagagcgcagaggtcctgcctgggtacaggagccttggctaattgctggag

SEQ ID NO: 813735 - DNA, 120 bp, Artificial Sequence
  ENSG00000286116_33 (sequence is synthesized)
tcactcagagaaagacttgcggggcatttgactgggctgtccatgttgtggctgcaacatgagaggctcacagacgtttctggaatggacagttaaccatatgaaaaagtacagatgttg

SEQ ID NO: 813736 - DNA, 120 bp, Artificial Sequence
  ENSG00000286116_34 (sequence is synthesized)
cgccatagggctctgaaaagggagggccccttagtttttatttctcaagaggaaaacaaagctaacaacttaagccaaatcgcatagccccagctatattaaacattcacaattacttcc

SEQ ID NO: 813737 - DNA, 120 bp, Artificial Sequence
  ENSG00000286117_0 (sequence is synthesized)
agagaatgatcaggaaggagcgatttgaggaaataacatgtgagctagacttttaaggaggagaaagagccagctgcagaaagccagcaagaatggtgtttaatgcaaagaaaatcataa

SEQ ID NO: 813738 - DNA, 120 bp, Artificial Sequence
  ENSG00000286117_1 (sequence is synthesized)
accgacccctagctggaaatgatcctaacctgtggaagctcctgaattgagtgaggaaccggctggcaggagagacggagtctcactgtgtcatccaggctgcagtacagtggcgcgatc

SEQ ID NO: 813739 - DNA, 79 bp, Artificial Sequence
  ENSG00000286117_2 (sequence is synthesized)
cataacccagctcatcctgactgatgccaccatttcaagagaagagaaatgagactgagaaagattaagatattttctt

SEQ ID NO: 813740 - DNA, 120 bp, Artificial Sequence
  ENSG00000286117_3 (sequence is synthesized)
agaagagaaatgagactgagaaagattaagatattttcttaagattggacactgtgttcctacccgttgtgcttgccttatagtcgaaagagaatttatttaagcacagagatcaagcaa

SEQ ID NO: 813741 - DNA, 120 bp, Artificial Sequence
  ENSG00000286117_4 (sequence is synthesized)
agttgttgatcagtaattctcattggtagacagaaataccagtggctaatgatcggctatacattgttgaattataggatgtatggtatttaaaatatatttatttaaaactaaattttt

SEQ ID NO: 813742 - DNA, 120 bp, Artificial Sequence
  ENSG00000286117_5 (sequence is synthesized)
taaagatttttgatgggtttaggggtacaggtgcagttgtgttacatggatatattgtgtagaggtgaaatctgagcttttaatgtacaactacccaaataagatacattgaacccgata

SEQ ID NO: 813743 - DNA, 120 bp, Artificial Sequence
  ENSG00000286117_6 (sequence is synthesized)
ggcagcatttcactttcaccctcattctatcctcccaccgtttggagcctccaatgtctatcattcaactcagtaagtccatgtccatggtttagcgcccacgtataagtgggaatgtgc

SEQ ID NO: 813744 - DNA, 120 bp, Artificial Sequence
  ENSG00000286117_7 (sequence is synthesized)
agttcttgattttctgtttctgagtcatttcactaaggataatgccctccagctccatacacattgctgcaaaagtcataatttcattcacttttatggctgaatagtattccatggtat

SEQ ID NO: 813745 - DNA, 120 bp, Artificial Sequence
  ENSG00000286117_8 (sequence is synthesized)
atatctaccagattgttttattcaatgatgtgttgatggacacttaggttgatttcacaactttgctattctgaattgtgatacaataaatatacaaatgcagaaggcttttttatataa

SEQ ID NO: 813746 - DNA, 120 bp, Artificial Sequence
  ENSG00000286117_9 (sequence is synthesized)
gctcttccctcagcccctgaggtctggagtgcttcccgttgggagatttactagttttcttgcttggctacccggcattaacaggcattggaaccgtgggaagcgagtctcctgcccatc

SEQ ID NO: 813747 - DNA, 120 bp, Artificial Sequence
  ENSG00000286117_10 (sequence is synthesized)
tctgttcatcccggacagttgcaattgtggagggaccctccaatgacattggacactggaggcccagagaaggaagtcctctgaagagaataaaatagtccacttaaagcaacaccagaa

SEQ ID NO: 813748 - DNA, 120 bp, Artificial Sequence
  ENSG00000286117_11 (sequence is synthesized)
gtctcttgggatatgtgaggacaatagctccctgtgtgtgctggagaccttggacaaagtccccaagtcatatccatacctacaaggtgtcagaagaaaagattacaacacatcccgttt

SEQ ID NO: 813749 - DNA, 120 bp, Artificial Sequence
  ENSG00000286117_12 (sequence is synthesized)
ttcggcagaaaggcctccccgggaggggctgggagctccccaagcaagggcaggcacttcccctccctttggccacttggccctggagggcttctttggagataaatcccacagaagggg

SEQ ID NO: 813750 - DNA, 120 bp, Artificial Sequence
  ENSG00000286117_13 (sequence is synthesized)
aggggaaattatgtaactcagggaaaaacgctatgtggagtcccatgtactcacaatctctctggaggaaaccaggcttcaccgtcgccaggtgacaacgaaatgccctaaccccgggct

SEQ ID NO: 813751 - DNA, 120 bp, Artificial Sequence
  ENSG00000286117_14 (sequence is synthesized)
gccagcagcacagggccatggaatccagggagaaacaagctctgagctgaggggtgtgtaaaatggaggttctgattcggtagctccggggcgggcctgagctctgcatttctgatgctc

SEQ ID NO: 813752 - DNA, 120 bp, Artificial Sequence
  ENSG00000286117_15 (sequence is synthesized)
acatgttagctgcaacccttaacaagcagaagtgaataatctattcggctactccacaacacagaatgtgtgcctatgtttcgtatgatagcacgaaagtaatgccttagaattactaat

SEQ ID NO: 813753 - DNA, 120 bp, Artificial Sequence
  ENSG00000286117_16 (sequence is synthesized)
gactctgaagcctccagttattttaaaggtgccgtcctagttatctcttggaaatacattgagaaaaaacaaccctttcacagcagcccagtgacctttctacaaacttacgcttgtgaa

SEQ ID NO: 813754 - DNA, 120 bp, Artificial Sequence
  ENSG00000286117_17 (sequence is synthesized)
ggactggacatttgcagctttaatgtttaattttggggggccaagtcatgtctaaacgggcttcttctttgagatccccccttttgcatgttgtggaaaaagtcagagcttcccctgtac

SEQ ID NO: 813755 - DNA, 120 bp, Artificial Sequence
  ENSG00000286117_18 (sequence is synthesized)
ctgtgatctcaacactgctgagctctgcctggaatcttggaactctccagcgatctcctctccttaagagtggacgtgggatgcctccacgcattcagtcaaaataaggttatggtgtgc

SEQ ID NO: 813756 - DNA, 120 bp, Artificial Sequence
  ENSG00000286117_19 (sequence is synthesized)
ctgttgtgtgctaggaattatcttctcatcagaaaaagaatctctctatgttttgggaataagtgaagaacaaaatgatgatgtgtaagaggttcttgccaaattggtcggcacagagaa

SEQ ID NO: 813757 - DNA, 120 bp, Artificial Sequence
  ENSG00000286117_20 (sequence is synthesized)
gccctggagaaaggctgacagtattgctggtgggggctctgctggctggtttccaggactcttcctctgggacagcttgtgcttcctgccaccctccccagggtcatttcttatccttcc

SEQ ID NO: 813758 - DNA, 120 bp, Artificial Sequence
  ENSG00000286117_21 (sequence is synthesized)
cctctctgcttcctttgttccatgcacatggcacactgtctacttgctcaatgctgtggtctcagccctagcactggactcagtaaggaattagttgagcgaatgaatggattctccagc

SEQ ID NO: 813759 - DNA, 120 bp, Artificial Sequence
  ENSG00000286117_22 (sequence is synthesized)
agtctctgacacacccataaaggcatgttcatccagtatgcacactgagtgtcctccacattccacagattgtgagaagcacagacacattacagagaatgagatggatacaatattgcc

SEQ ID NO: 813760 - DNA, 120 bp, Artificial Sequence
  ENSG00000286111_0 (sequence is synthesized)
gtatgaaactcctctaatggatgccctggagaacatcacatgaagccatttcatcgataacatcatgctgatcaggagactggcttcattgattataaaatgatctacaggagcctctgt

SEQ ID NO: 813761 - DNA, 120 bp, Artificial Sequence
  ENSG00000286111_1 (sequence is synthesized)
tcttgaaaggaaggggagaagagaggagagagaaggaaggggagagaagagaggaagggaggaactggacaagagctgtttgaaggagtccaggtaaaagaagactgtagctggtaccac

SEQ ID NO: 813762 - DNA, 120 bp, Artificial Sequence
  ENSG00000286111_2 (sequence is synthesized)
attgttagtagttgaggacctccagtacaattttcaggagaagtggcaagaatggacatccacctcccaccatgtgatgacatgcaaaacattaaaaacttgagatgaaagcatgccgtt

SEQ ID NO: 813763 - DNA, 120 bp, Artificial Sequence
  ENSG00000286111_3 (sequence is synthesized)
ctaaaacatatttggctcaaagaaaaagatgcttcccaggactacaaaagatctttctttaatgaaactttaattaaactttgctttaatttggatcacaacgaagaaaataaggacttt

SEQ ID NO: 813764 - DNA, 120 bp, Artificial Sequence
  ENSG00000286111_4 (sequence is synthesized)
tcatcttgccccatgtggaaagtatcagtgtctcctatgaataaaatttttggaatttaaatgtcttgcaatctttcaggacctttagtcccattgataattgactatgacaacaaaatc

SEQ ID NO: 813765 - DNA, 120 bp, Artificial Sequence
  ENSG00000286111_5 (sequence is synthesized)
ttacaaacatatatttttaggatggatacatgtaccagaaatacattattgtgtgccctctaaggtgttattagtaacaatggtaattagagggaacaaaagctgggaaaataaaattgg

SEQ ID NO: 813766 - DNA, 120 bp, Artificial Sequence
  ENSG00000286111_6 (sequence is synthesized)
gaggaggctataagccagttctttagggttaatgaaacaatagttgacatcatgttttccctccccaaagaagccaccaaatggcaacacataattagtatgaaataacactattcagaa

SEQ ID NO: 813767 - DNA, 120 bp, Artificial Sequence
  ENSG00000286111_7 (sequence is synthesized)
caattcttaggtgctaaatactttgttatctacaaagaacacatatttgaaaaacgtcaacttttgaaaagactcaaatagagtgtttgaatatgtgtcatgtttagaatctggtctgtt

SEQ ID NO: 813768 - DNA, 120 bp, Artificial Sequence
  ENSG00000286111_8 (sequence is synthesized)
tcatagggaatgttcttgctgtcaataccactgtgtgttacctcttcactgggaaggagtccatatgtctcagatttgcccttgaccacagacatttgccaagaagagacaagaaatgtg

SEQ ID NO: 813769 - DNA, 120 bp, Artificial Sequence
  ENSG00000286111_9 (sequence is synthesized)
tcctcatttgtacagatgtacggagaagaaagctcatcattttcaaaaaacaactaaaatgccttctctgtactgaacattatgtgtgtggattacagagtggaataagagggatgcaac

SEQ ID NO: 813770 - DNA, 120 bp, Artificial Sequence
  ENSG00000286111_10 (sequence is synthesized)
ctggccttaataagggagaggtgttcatggcacacgtatacctttgtaacaaacctgcacattctgcacatgcatctcagaacttaaagtaaaataaaaaataaaaataaagaagtgaga

SEQ ID NO: 813771 - DNA, 120 bp, Artificial Sequence
  ENSG00000286113_0 (sequence is synthesized)
agtccggctggccgctcacgcgtcgggcccccatttactctcgttactgaggagacacggctccagttttgacccgactacggttgttttcttcgtgtgtaccgcgaaatgctgatgacg

SEQ ID NO: 813772 - DNA, 120 bp, Artificial Sequence
  ENSG00000286113_1 (sequence is synthesized)
tccggttccgcgcagtttttttcctatttcgtttccaaccacagttgtgcggttcacagatttttcccttgggatgtgttttccatacctccaagcccactctcagagccttggggcccc

SEQ ID NO: 813773 - DNA, 120 bp, Artificial Sequence
  ENSG00000286113_2 (sequence is synthesized)
ataaaacttcatgcgcagctgctttctggtatttgcagacctggaaggcttctcgtattcttaatttggggaagagagacataggtttccttgtacaacgggatgaggatttaagagcag

SEQ ID NO: 813774 - DNA, 120 bp, Artificial Sequence
  ENSG00000286113_3 (sequence is synthesized)
aacgacactgatattttaaaggcgagggtatttagatttgtggagctgaaacttgcctgaaaagggagacaaaatttggaagtttgttgtgtgcagtttctgccccttacccccgccctt

SEQ ID NO: 813775 - DNA, 120 bp, Artificial Sequence
  ENSG00000286113_4 (sequence is synthesized)
cacttttaaactgcgcatatatcaacaatagttacggttgttgcagcagtctaaatttgattatcagaattgaccctaggcatgaatttttttttaaatataccaatgtcgtgttatata

SEQ ID NO: 813776 - DNA, 120 bp, Artificial Sequence
  ENSG00000286113_5 (sequence is synthesized)
cacttataccattatgtccagacttctcttaagcatagttcgtggtgggcagttttgtggtcatttagggatgaacttgggtagggaaagctgagcatacataatttattttaggaatgc

SEQ ID NO: 813777 - DNA, 120 bp, Artificial Sequence
  ENSG00000286113_6 (sequence is synthesized)
accagttctgccaacatttatcagaagtcacgtttttaaaaagctattctggaactgaagatgtcattggtttataagaggaaaatggaagccaaaagcttacacctcatgctctatctt

SEQ ID NO: 813778 - DNA, 120 bp, Artificial Sequence
  ENSG00000286113_7 (sequence is synthesized)
taaaaattaaggtggcagacacaatgagtagaaggcttttatgttaccagaatgaaggcttaaaatctgtcattttattgactcggctttctttttagaaatttctttaagatataaaag

SEQ ID NO: 813779 - DNA, 120 bp, Artificial Sequence
  ENSG00000286113_8 (sequence is synthesized)
aaatagattacgttctctggaacttctctaatctgaaatgtgttcaaaaaggaaaaagatctttaaaatacgccagttagtctatggtataatattaaacactattcatcactagagaag

SEQ ID NO: 813780 - DNA, 120 bp, Artificial Sequence
  ENSG00000286113_9 (sequence is synthesized)
ttatggtggtataccctcccctttctcagatgtccaccttaatgccagaaatgagcggagtttccctttgttgtgcaaaatgactgtgtccttgagggatgtttggatgctcttggtaaa

SEQ ID NO: 813781 - DNA, 120 bp, Artificial Sequence
  ENSG00000286113_10 (sequence is synthesized)
ccggaatcagccagaagcatatccggtgttagccttgttgtgtcatcaacattacaacagtgaggaaacccacatattccaatgaaagaggaaaacttaaagaagaagtttccagtgtat

SEQ ID NO: 813782 - DNA, 120 bp, Artificial Sequence
  ENSG00000286113_11 (sequence is synthesized)
tttctttgagatatatttattcctatgacctcagaagatcagcttttaccgtccaaggttcactttgcctaaaagctgattgttcctgtggaaacagtagcatcggatgaccctacaaac

SEQ ID NO: 813783 - DNA, 120 bp, Artificial Sequence
  ENSG00000286113_12 (sequence is synthesized)
aaagcattatgacatcatcagagccaacaacctggcatgacagatactaataaggaaaaaagaggttacaagaattctgacactcatcacagtggatccaatatctggtcccttgggttt

SEQ ID NO: 813784 - DNA, 120 bp, Artificial Sequence
  ENSG00000286113_13 (sequence is synthesized)
catatatgttagaagtatcttctcaggagggaaaagtcaatgccagtcatatcctttctagctattagaaatgtccatcagcttacgaggagattctccctcatctcacaaactacctgc

SEQ ID NO: 813785 - DNA, 120 bp, Artificial Sequence
  ENSG00000286113_14 (sequence is synthesized)
atctccacttccctggaagaaaaaaaaaatctggacatacccaagctgtgtatgtgcctgagatcttcccttccaagtctcctaggggctgatctcagcagagaaatggagacagttcag

SEQ ID NO: 813786 - DNA, 120 bp, Artificial Sequence
  ENSG00000286113_15 (sequence is synthesized)
tcaccaacagtttgttactggattttggaaaaggtaccaaagtaagaatccaaggcttgtattcttatcttagctctgtgattaacaagcttaggtaaggcttctaatctttctgggttt

SEQ ID NO: 813787 - DNA, 120 bp, Artificial Sequence
  ENSG00000286113_16 (sequence is synthesized)
ctttccttatcaataaaatgcgcaagtcagactgcataatctttatggtttcttccaaatttcaaattccatgcatctattaaagagaatcaaaattgtgcatgatttgtctaaaatacc

SEQ ID NO: 813788 - DNA, 120 bp, Artificial Sequence
  ENSG00000283195_0 (sequence is synthesized)
catgaagggagcacaaattctaacccactcctcaagagtccagtcaccacctccagatctatgtccaaaaacagctcttcgtatggctgagtgacattagcaacaagcacacagccatgt

SEQ ID NO: 813789 - DNA, 89 bp, Artificial Sequence
  ENSG00000261780_0 (sequence is synthesized)
tcttcacagggacacggaacctcccttaggagatcaatcccctgtactccttttctttgccctgtgagaaagatccacctatgacctca

SEQ ID NO: 813790 - DNA, 120 bp, Artificial Sequence
  ENSG00000261780_1 (sequence is synthesized)
aattttaaatcagaccttgaagatttgttgttcaaggagaaactgaagagcaagaaggaaagtgagagccagcaataccagcagagccagatctgagctgggagaaggggagaaagtttg

SEQ ID NO: 813791 - DNA, 120 bp, Artificial Sequence
  ENSG00000261780_2 (sequence is synthesized)
tgaagaggagatcggtgacctgggctccttatgtgcctgaaagagtttgagtttcctgttaactccaaatcaacagtattttcaacaagaaatgtgcaattgaaatcaagtgctgtttaa

SEQ ID NO: 813792 - DNA, 120 bp, Artificial Sequence
  ENSG00000261780_3 (sequence is synthesized)
aacatatgcgttgtattttgcttcaattataaaataccatcctctcaaaggtggttctaaattacaaaggactttgatttctaggtagattctgggtagagacttcctttcatattgagg

SEQ ID NO: 813793 - DNA, 120 bp, Artificial Sequence
  ENSG00000261780_4 (sequence is synthesized)
cattaatgacaccttttaacctgggaagcaatatgactggagttgtactttgagaagattaatcaggtttggttgcagaatgaaagagaagatgaagtcaagagattggtttagaggctc

SEQ ID NO: 813794 - DNA, 120 bp, Artificial Sequence
  ENSG00000261780_5 (sequence is synthesized)
tagcagaagcttagtcatatttcaaaatgatcaaatatcaagaaaaattctgagctgcataacttgtataaagtaattttcagtgatttttttcatggttatgataaaagaactggatta

SEQ ID NO: 813795 - DNA, 120 bp, Artificial Sequence
  ENSG00000261780_6 (sequence is synthesized)
gcagaaacttttaccctgaatcaagatttaatttttctttgagctcatcttaaggatatcggaacatagggagcaaacgatggtgtggctgcctcagtgcttgatttttaacggttttga

SEQ ID NO: 813796 - DNA, 120 bp, Artificial Sequence
  ENSG00000261780_7 (sequence is synthesized)
agagaatagttacatttcttctcctagtaagaactaataaatacattaacagaaatgaattccctatccctttgtacactggtctatttcttcaaaacattaaatactattgataagata

SEQ ID NO: 813797 - DNA, 120 bp, Artificial Sequence
  ENSG00000261780_8 (sequence is synthesized)
aaaaaaaaaatcgaaccagtgtcaaaattaatgcctattaatgtatattaaaaatccattgcaaaacacattttcaaaagcaatgtggaaacatatcattacaaccttagataggatttc

SEQ ID NO: 813798 - DNA, 120 bp, Artificial Sequence
  ENSG00000261780_9 (sequence is synthesized)
ttaagtaaaaaaaaaattgcaatctgtatgaaaggacattaacataaattcaactgcattaaaatcaagtgctttggctcctgagggacccagaaatattgacttctgaactattccttg

SEQ ID NO: 813799 - DNA, 64 bp, Artificial Sequence
  ENSG00000261780_10 (sequence is synthesized)
taactctcacagtggaagagaccttgaagatttgttgttcaaggagaaactgaagagcaagaag

SEQ ID NO: 813800 - DNA, 120 bp, Artificial Sequence
  ENSG00000261780_11 (sequence is synthesized)
gtttcgagttttgctactatattttgtcattcttgtatctaattacaagaaatttattagtaaatataggtaaatattattaggaacactaataccattccgatgttcatcacgtgtttc

SEQ ID NO: 813801 - DNA, 120 bp, Artificial Sequence
  ENSG00000261780_12 (sequence is synthesized)
tctgtatagcactaactaagcagcagggggaaaaatgcattaatcgctgctttgtatgtcacgcttgaatattataaaaatctttgttaaaaagaaaaatacatgcctccaatatcccag

SEQ ID NO: 813802 - DNA, 120 bp, Artificial Sequence
  ENSG00000261780_13 (sequence is synthesized)
agggcttaacgggtttatggcttacttcctagtttgagaaatgttggcctgaaaaactaaattattattctttcaaaatgtgtttccacaggaagttaccattaaaaatgaaaaaaaaaa

SEQ ID NO: 813803 - DNA, 120 bp, Artificial Sequence
  ENSG00000183470_0 (sequence is synthesized)
aaattgagggggattctacaaaatacacgacccgcactcttctaaggtgtcaaggtcatgaaaaacaagactggaaaaccaacacagactggaggagactaagaagacctgacaactaaa

SEQ ID NO: 813804 - DNA, 120 bp, Artificial Sequence
  ENSG00000183470_1 (sequence is synthesized)
tgccatgtgggaccctggaggggacccgggaacagtagtagaagagctggtgacatctgaatgaagtctgtaatttgggtaacagtactgtaccaatgttaatttccctgctctgccaat

SEQ ID NO: 813805 - DNA, 120 bp, Artificial Sequence
  ENSG00000183470_2 (sequence is synthesized)
gcgatgagggaacagaagagatgatggcaatgcaccttgcaggtgcagtttccttggggacccctgaacaaggaggttgttatctggccatcttcattcccaccttgtgggaactgggtc

SEQ ID NO: 813806 - DNA, 120 bp, Artificial Sequence
  ENSG00000183470_3 (sequence is synthesized)
cagggaaccaacacaaataagctgacaacttggctactgcttttgctgtgcctccagtttgctcatatcctcaatacagcaggacatccaggactgaccacgtatatcaggggtgactcc

SEQ ID NO: 813807 - DNA, 120 bp, Artificial Sequence
  ENSG00000183470_4 (sequence is synthesized)
aacagcacagagaacagccaacgggttcagggaacggcttcacaggtttgagacaccataactaggacaaagaccaactaaagaccatggacccaaattgtggatggagggatttaagat

SEQ ID NO: 813808 - DNA, 120 bp, Artificial Sequence
  ENSG00000183470_5 (sequence is synthesized)
gaacttccaaccatttggatgagctccaggaggtcatctctatctccctggaaatgcccatggtttgtatattgttttgagagaccaatttcaagagaagctgggcctgttgtccatcaa

SEQ ID NO: 813809 - DNA, 120 bp, Artificial Sequence
  ENSG00000183470_6 (sequence is synthesized)
agccccacggtgctttatcttcattctgagctggctgctcgtcagacgcagggcaggctgctgccaagagagcccgctgccgaggacctccgtctatcactgcctgggggacacgctgcc

SEQ ID NO: 813810 - DNA, 120 bp, Artificial Sequence
  ENSG00000183470_7 (sequence is synthesized)
ttgggattgttcaaactccagggaaaggacagttatccacacccacccactgtgctccttggagaagatctgagctcttctggttggaattcttgggtctttgggattctcaacatttcc

SEQ ID NO: 813811 - DNA, 120 bp, Artificial Sequence
  ENSG00000183470_8 (sequence is synthesized)
cacacaaaacactctcgggagctgggtccctaagttacacagagaacctggcttccctggtcttagcagatctcacagccccttcaccccggcctgtgacacacacagccctccagacct

SEQ ID NO: 813812 - DNA, 120 bp, Artificial Sequence
  ENSG00000183470_9 (sequence is synthesized)
tcctccacctgcaccactaggtttatgctagaaggttcccagtgtgcccacttctaagcagtctttgctgagggggatgaagaaaaggggacctgccaagaggccactgaggtggaggag

SEQ ID NO: 813813 - DNA, 120 bp, Artificial Sequence
  ENSG00000183470_10 (sequence is synthesized)
tcctcggagactaaagcagcagaagtttggagaacctcttcaaaagagacaggagaagcaaggctgcgtgcgagtcaggaagaacaggcatggtttaaatcttttttcttggagagtaaa

SEQ ID NO: 813814 - DNA, 120 bp, Artificial Sequence
  ENSG00000183470_11 (sequence is synthesized)
cattgtcacatttctgcctctgctgcttcagaggatgcgcctctctggacagcccttcaggcatcagcctgttggcagccgcgcgtcctggaatacggggtcgctggacataaatccatc

SEQ ID NO: 813815 - DNA, 120 bp, Artificial Sequence
  ENSG00000183470_12 (sequence is synthesized)
tgtactggccggggctgacagcgactgtcagtccccaggacagggtcaccacctttctctcccttcttctctctcctcttcccactgtttcaaggacagcagagtcttatggatttttct

SEQ ID NO: 813816 - DNA, 120 bp, Artificial Sequence
  ENSG00000183470_13 (sequence is synthesized)
tctcctgtcttgaatgtgcaaaggtccaggggaccacagcaatgccaccttctggtgtcaagagggaggtggaggcaggcactgaataaggtcccaggcgctccttgccctggaattttg

SEQ ID NO: 813817 - DNA, 120 bp, Artificial Sequence
  ENSG00000183470_14 (sequence is synthesized)
attcttcaaagggcatcagaatgcggtgaccagcagcacacagcaaccagtctctcagcggggctttaggcatggtcacttgggcttgcccagggaacctcatcccggaggatcttccag

SEQ ID NO: 813818 - DNA, 120 bp, Artificial Sequence
  ENSG00000183470_15 (sequence is synthesized)
gaagcctgaggtctcctactaatggaactgtgactggctcacccagagggggtcaggttgggaccttggagtgggcactagatgaagcaaatgggattgactctaataaaaacatggaag

SEQ ID NO: 813819 - DNA, 120 bp, Artificial Sequence
  ENSG00000183470_16 (sequence is synthesized)
tgcagggatgcatttcacagagcacatgagcaactcggagggacctgggaagccatgtggctgatgccttgctttacagaagaggacaccaggcccagagagaggaagagactccctggg

SEQ ID NO: 813820 - DNA, 120 bp, Artificial Sequence
  ENSG00000183470_17 (sequence is synthesized)
acagcatgcgcagccagtggcaaagccaggacccacatgccgatccccccttccccgcagccctccctgtgtggcagggttggtaccgatgcgataccacagccacagccctcccaacat

SEQ ID NO: 813821 - DNA, 120 bp, Artificial Sequence
  ENSG00000183470_18 (sequence is synthesized)
caacccactgggccgcctgtgggcctctgctcttcaaaggaagaaagagctatttgggataatggtcgcagagccctctgaagttccaaagagttggaaaaaatacatctataagaccca

SEQ ID NO: 813822 - DNA, 120 bp, Artificial Sequence
  ENSG00000254456_0 (sequence is synthesized)
actgttatggcgccctctataggcaacccagctcttctaatttaaaagttgctgcatttgtgatgattttcatcttgactggggatggtttttccagcatcatttgttagactattctta

SEQ ID NO: 813823 - DNA, 120 bp, Artificial Sequence
  ENSG00000254456_1 (sequence is synthesized)
cctccatggtgattcttggcgccattgtcaaaggccagctgactgtatatgttaaccctgggacttctgtaatattggatcatactgataaacctaatttctgacaaattcttcctcatc

SEQ ID NO: 813824 - DNA, 120 bp, Artificial Sequence
  ENSG00000254456_2 (sequence is synthesized)
aattcatgctccccattctgaacaccagcatcatgcatcctttgctctgttctaggcacaacaatcaaaagtgcttattcccaaactggacctgacttcagccagagcattgctgggaca

SEQ ID NO: 813825 - DNA, 120 bp, Artificial Sequence
  ENSG00000254456_3 (sequence is synthesized)
tatataaatctacgtttaatatttgaagacttgccagactgtttcctaaaacacctgcagcattttacattcccaccagcaaagtacgaaaagcttccaatttctctacatcctcaccga

SEQ ID NO: 813826 - DNA, 120 bp, Artificial Sequence
  ENSG00000254456_4 (sequence is synthesized)
caatcagttttttattttaaatgctatagttacaaagaaaagttttagaatgaattaatgctgtgattttaatcacaaagattaattttgcaataaaaatccctgataattatgattata

SEQ ID NO: 813827 - DNA, 120 bp, Artificial Sequence
  ENSG00000254456_5 (sequence is synthesized)
acaaactgatgtgtccttccaacaaccaggcctgagacctcacaagacccaactggatctcccagacagagcaggcagaacaccatttctgctgccccacagccctcaaagttgttactc

SEQ ID NO: 813828 - DNA, 120 bp, Artificial Sequence
  ENSG00000254456_6 (sequence is synthesized)
tctctcacaaccatcatcaagatcccattccctgctgcctccaagctggggagagaacataaagcttgagctcgcctcagaccagtggtatacagctcaggacagccaaggtgagatctg

SEQ ID NO: 813829 - DNA, 120 bp, Artificial Sequence
  ENSG00000254456_7 (sequence is synthesized)
caaccaacactcaagtggaagaggagcacacactttcagaccactgagggggtgcatgactgcaatcatgagcaaaatacagatgagcatgtggctgaagaagagtctacctactggcca

SEQ ID NO: 813830 - DNA, 120 bp, Artificial Sequence
  ENSG00000254456_8 (sequence is synthesized)
ttatatttaagcaccatctactgcatcacagtgtaacatcaacagcaaaaatactttgttaatataccccctggggaactaaggacaataatttaactacaaataaagaccctacctaaa

SEQ ID NO: 813831 - DNA, 120 bp, Artificial Sequence
  ENSG00000254456_9 (sequence is synthesized)
atcatcatgatgcactgttatggcgccctctataggcaacccagctcttctaatttaaaagttgctgcatttgtgatgattttcatcttgactggggatgctccccattctgaacaccag

SEQ ID NO: 813832 - DNA, 120 bp, Artificial Sequence
  ENSG00000254456_10 (sequence is synthesized)
catcatgcatcctttgctctgttctaggcacaacaatcaaaagtgcttattcccaaactggacctgacttcagccagaatatgtcaccgtgagattccctatgcagaggcccatgtggca

SEQ ID NO: 813833 - DNA, 120 bp, Artificial Sequence
  ENSG00000254452_0 (sequence is synthesized)
tgcaaaaaccctcagctcacccgagggccaatggaaatttattaattttttttgtccttttccatctttccccaagtggcttttccttgcaaaatgcctgacatgacaccagaggggaac

SEQ ID NO: 813834 - DNA, 120 bp, Artificial Sequence
  ENSG00000254452_1 (sequence is synthesized)
ggctggtgcccagcctctggcacggtgggccttccgcctccgcctgacatggggacaaaggggcacggtgggcaggcagcgcatgggtctgtctctggcagggcagagggcggcaggagc

SEQ ID NO: 813835 - DNA, 120 bp, Artificial Sequence
  ENSG00000254452_2 (sequence is synthesized)
agactccctccaggctcaagacacaggcccagcactgctacccgcccacccgccctagatatactcagatcccaccgcagctggacggctcgagctgggagtgtaggaagggagaggagg

SEQ ID NO: 813836 - DNA, 120 bp, Artificial Sequence
  ENSG00000254453_0 (sequence is synthesized)
agaaatcttacaggcaaaggctattcgacatttgggattcctaagctaatctttttatttttggaagggtgtctttctgagaaaggcagccagaggcacagcaccaacctttctgacagt

SEQ ID NO: 813837 - DNA, 120 bp, Artificial Sequence
  ENSG00000254453_1 (sequence is synthesized)
gtggtcttcacactgttagttctgacaaagggagtcaaggagtcgtccttggaggaggcgatgaggccagtggaagaattgtggctggggacccctccactgctgagggagatgtcgatg

SEQ ID NO: 813838 - DNA, 120 bp, Artificial Sequence
  ENSG00000254453_2 (sequence is synthesized)
gactcacagctggtgtggaggctgctgacagactgaaagcccaggccatccttgctaactgcggaggagctgctggcgttggtgccccagggccaagacagccccggcctcttaccagtt

SEQ ID NO: 813839 - DNA, 120 bp, Artificial Sequence
  ENSG00000254453_3 (sequence is synthesized)
ctgagctgtcatgcctcgccgccatgagcctgtctgggagatgacaggattcttcttgcccgacgtgcttttgtcggactcgtcagacacatcagaaggattccgcctccacttggaacc

SEQ ID NO: 813840 - DNA, 120 bp, Artificial Sequence
  ENSG00000254453_4 (sequence is synthesized)
tggctccatttttatgccgctgtctgagcctccgtctgatttcttgacatcatcaccagaccacagggaattcctctccacctgtgagtgcttctcagcatcagtctgtggacagagact

SEQ ID NO: 813841 - DNA, 120 bp, Artificial Sequence
  ENSG00000254453_5 (sequence is synthesized)
ctctgaattagtccttccccagtcccaggctgggaagcccctcactccaaaggcaaaaatgccaaaacactggagtagttaagggaaaaataagcattactttaaagatgtttggacttt

SEQ ID NO: 813842 - DNA, 120 bp, Artificial Sequence
  ENSG00000254450_0 (sequence is synthesized)
aaacaaaaaaaatgggctctttggttatactttaaggcagatttaaatccagtcttttgatttttgaattgtagatgatgtggttatgatctcagattttgcagtgtgagatatttataa

SEQ ID NO: 813843 - DNA, 120 bp, Artificial Sequence
  ENSG00000254450_1 (sequence is synthesized)
aattgagagaataaatttattctctctggttgtaattcaagtcatgttactttagcttttagacctatggggcagtagacagttggtgttttcagggatataaactgaggactctcaagc

SEQ ID NO: 813844 - DNA, 120 bp, Artificial Sequence
  ENSG00000254450_2 (sequence is synthesized)
tatacactaataggctgatggtgattttctttgggtcgagactgcagtgagttttgttttttatttttttttgagtcagagtctcgctctgtctcccagcctggagtgcagtggcgtgat

SEQ ID NO: 813845 - DNA, 120 bp, Artificial Sequence
  ENSG00000254450_3 (sequence is synthesized)
cttggctcacagactgcagtgagttgtgatttgcactactacactccagcccgggtgactgagtgagtccctgtctagaaagaaagaaatatcagaaggcattatcacttcacaactgaa

SEQ ID NO: 813846 - DNA, 120 bp, Artificial Sequence
  ENSG00000254450_4 (sequence is synthesized)
tattacagtagtaactagagtgcttacttcagctttttcctccaacactttcttgcctcatcctccgcagcatagctagtataggcctctctttctaagaccctgttttttatcatctta

SEQ ID NO: 813847 - DNA, 120 bp, Artificial Sequence
  ENSG00000254451_0 (sequence is synthesized)
ccaaaggacaaacaatagcctgtggacaagttatgagaggtgaagacccgcctgtgtaacagcgagaccatgtctcaattgaaaaagaaaaacaacaacaacaacaaacagagggaatcc

SEQ ID NO: 813848 - DNA, 120 bp, Artificial Sequence
  ENSG00000254451_1 (sequence is synthesized)
ccatcaaaaaaatgacagctccagaggcccataccccttcacatggaggaaactgtccatcctcggaggataaacctactttgggtaatattgagatagccactcacccaatgacacagc

SEQ ID NO: 813849 - DNA, 120 bp, Artificial Sequence
  ENSG00000254451_2 (sequence is synthesized)
tttgaagaacttttcaaagtacgaagatacaacttcatctggagacaacccatgttgtggaatgggaaggggggtgttacagaaaataaatgatatgcttggattcagacttgagatttg

SEQ ID NO: 813850 - DNA, 120 bp, Artificial Sequence
  ENSG00000254451_3 (sequence is synthesized)
aggagttgaaagccagatcataagatatttgaagagacacagtaacctctcaaaatgaggccaattttcttagatcaggcttttcacttgagtgctgtacatgtgtgtccttcaggtact

SEQ ID NO: 813851 - DNA, 120 bp, Artificial Sequence
  ENSG00000254451_4 (sequence is synthesized)
agtctcaacagttcagataactggacccattccagactgctaagacctacaaccccaaattcttcaccagaccacaagcacagttaatgcaactggtagaatatgttccgggaacatgtg

SEQ ID NO: 813852 - DNA, 120 bp, Artificial Sequence
  ENSG00000254451_5 (sequence is synthesized)
aaataccactttgaagactctcagaagtgagactaatgcttttttcatagttgctgaatgggaccaaaggacaaacaatagcctgtggacaagttatgagaggtgaagacccgcctgtgt

SEQ ID NO: 813853 - DNA, 120 bp, Artificial Sequence
  ENSG00000254451_6 (sequence is synthesized)
atagccataaagaatgcttttaaatcaagtaatacacttgacttagaaagacaagccagcggcaattataaaataatgacacctaagaatgttttcaagaagtctggttcataatgcatt

SEQ ID NO: 813854 - DNA, 120 bp, Artificial Sequence
  ENSG00000254451_7 (sequence is synthesized)
caaacttaaaaaaatattaaagacaactaaaaaaattttgctcatttttggagcaaaaaaactaccaaagaaggagcagcttgagggaatattaatggattatgagaagaaaatgaaact

SEQ ID NO: 813855 - DNA, 120 bp, Artificial Sequence
  ENSG00000254451_8 (sequence is synthesized)
gcagtgacactggaatccctgaagcatcaaatcttgaattggaggaaagtacttctttccatattttgtaatatgtcctactaaaggatagcaaagcagagttgtttgctcccatcttag

SEQ ID NO: 813856 - DNA, 120 bp, Artificial Sequence
  ENSG00000254451_9 (sequence is synthesized)
aaacttttaaataaaatttaggtattacttttaaacataggtccacagagaagacaaatctaagtggcaaaaataatgtgtattcagcgtcactattccccaaggatgacaaatgtatgt

SEQ ID NO: 813857 - DNA, 120 bp, Artificial Sequence
  ENSG00000254451_10 (sequence is synthesized)
tttttgctgtaatatctcccagttgactccatcttctcttctattgaattttcaaccagagagcttcttagttccttattcaaatacagttttggtagacctaaccagtattatatgtgc

SEQ ID NO: 813858 - DNA, 120 bp, Artificial Sequence
  ENSG00000254451_11 (sequence is synthesized)
ccatttttacttttgtacaaccacaaaattagcccagagtgggggagttcacttgataatttgctaagtgcaattgccaccaccagtactctatgatccagcccctccctacccaacatg

SEQ ID NO: 813859 - DNA, 120 bp, Artificial Sequence
  ENSG00000254451_12 (sequence is synthesized)
acatcatcgattaaaattcctaaatcaatgctattttttacttaagaatgtatagtatttttctttgactcttcagataaagaccctcaatcaatctaccactcaaatatcttcctaata

SEQ ID NO: 813860 - DNA, 120 bp, Artificial Sequence
  ENSG00000254451_13 (sequence is synthesized)
tttactgtaatacggtttccattgttctttaattttagctcttacctttcttcatctcagccctatatcacgaatattcttccttttcaaatggtcacattatttctaagtatccaccac

SEQ ID NO: 813861 - DNA, 120 bp, Artificial Sequence
  ENSG00000254451_14 (sequence is synthesized)
aatctctaccttctctcagaacagttgtgaaattttaagttgtatttttgaaaatttggtaaatcatttgatgcttaaataattgaataaggtcaggctgtgtttaataaatgtcagctg

SEQ ID NO: 813862 - DNA, 120 bp, Artificial Sequence
  ENSG00000254451_15 (sequence is synthesized)
tgctttatggtacgtaggtaaaacacaatatggcttaaaggtaaaaatcaaacaattcaccctaaggttagcgttacaatttttattatccccttaggttagcaaaccactgataacaaa

SEQ ID NO: 813863 - DNA, 120 bp, Artificial Sequence
  ENSG00000254451_16 (sequence is synthesized)
cccaggtgttactttgtcctttcttgttagacttaaactcagtaattccagattaagtctcatcctgatatcgtcaaaaacccaatttggcaattcaattatactgcctgcctttttaga

SEQ ID NO: 813864 - DNA, 120 bp, Artificial Sequence
  ENSG00000254451_17 (sequence is synthesized)
aaaatttccctttgtcgatggcatcacacttccaatctctttttcaatggttgccttcatcctcctacatgtgactgcaactccttcaagctacatcaaaaatacagttctttaattttc

SEQ ID NO: 813865 - DNA, 120 bp, Artificial Sequence
  ENSG00000254458_0 (sequence is synthesized)
gtgggcggggcctctggagagctcccgggggctctcttctgttctgcagcgagtaggcgtggctcgtagctcccaggtccgggctgataccgctggagtatgcagttcgccgccgcgccc

SEQ ID NO: 813866 - DNA, 120 bp, Artificial Sequence
  ENSG00000254458_1 (sequence is synthesized)
gaatgaggcggggcctgcgacccacatccagtctctcagcaaatcctgttggcttcactttcaaaagagatccagaatctgaccactcctggacaccttctttgccacccacccccggcc

SEQ ID NO: 813867 - DNA, 120 bp, Artificial Sequence
  ENSG00000254458_2 (sequence is synthesized)
tctccatcctgccagagggatcctttcaaaatccaagtcagatctgatcacttctccattcagaaccctctgagccccccatctcgcttagaggaagggccacagtccttgccatggcct

SEQ ID NO: 813868 - DNA, 120 bp, Artificial Sequence
  ENSG00000254458_3 (sequence is synthesized)
cctggtctatgtcatctgcctccaaactctggcctcattgctgttccttaaatgctccagacactctgcctcacagccttggtcttggctgttcctgctgcctggaatgctcttcctcca

SEQ ID NO: 813869 - DNA, 120 bp, Artificial Sequence
  ENSG00000254459_0 (sequence is synthesized)
cattatactccttcactgcctgctctgtctggaggacccgcacatcaatgccatgtttcttgaggtactccacagttgatgaaggcacctgggaaggtggaaaagagatgagtacagggt

SEQ ID NO: 813870 - DNA, 120 bp, Artificial Sequence
  ENSG00000254459_1 (sequence is synthesized)
cttgctctgttgcctaagctggagtgcaatggcacaatcagcttaccacagcctcaaaatcctgggctcaagtgattttcccacctcaggctcctgagcagctaggactacaggtgtgca

SEQ ID NO: 813871 - DNA, 120 bp, Artificial Sequence
  ENSG00000254459_2 (sequence is synthesized)
tccaaaagtgctgggattacaagcatgaacaactgtgcccagacttgattttctttcttaagccccacatttgaactgatggtcttgactttttgatacatgtttttgtaaagcacacaa

SEQ ID NO: 813872 - DNA, 120 bp, Artificial Sequence
  ENSG00000254459_3 (sequence is synthesized)
gtttttaattttgatgaggtctattaatttatttttccttttgttgcttgtggatttggtgttatttctaagaatccattgccatatccaaggtcttaaagatttacccttgttttcttc

SEQ ID NO: 813873 - DNA, 120 bp, Artificial Sequence
  ENSG00000278276_0 (sequence is synthesized)
gcggaagagccactcggggagagtgctgctgggaatgcctccacagagatgctgattgtacgcatgctgcgtaagcctcagatttttctgttcaggcccaaatgcgcagcacaatctgtg

SEQ ID NO: 813874 - DNA, 120 bp, Artificial Sequence
  ENSG00000278276_1 (sequence is synthesized)
actttggcagcacatatactaaaattggaactagacagagattggcattgcccccgagcaagaatgacacgcaaattcgtgaagccttcaataaaaaataaaataattttgttttcccaa

SEQ ID NO: 813875 - DNA, 120 bp, Artificial Sequence
  ENSG00000285280_0 (sequence is synthesized)
atgtttgcattgagctaagattgcaggcgcgtgaactgttcacaccaccaaaaatgcagtatctttagccaaatctgaattaatctgttcagaatgaacaagcagaatagtctttggatt

SEQ ID NO: 813876 - DNA, 120 bp, Artificial Sequence
  ENSG00000285280_1 (sequence is synthesized)
tgatccaaatccctgaagcactttgggaatgagaatggctatgccagacagagagaccctggcgacttatgatactgcagaacacaacaggcacttcagattggtcccagttaagttgag

SEQ ID NO: 813877 - DNA, 120 bp, Artificial Sequence
  ENSG00000285280_2 (sequence is synthesized)
ggagagcagtgatattgagcagtcagctaaagaaacaaagctgtagagaattgtgactccaaaggcaaagaaggaagtgctcctaatttgaactaatctaatagtcacatggaggattct

SEQ ID NO: 813878 - DNA, 120 bp, Artificial Sequence
  ENSG00000285280_3 (sequence is synthesized)
aatcattgttgcttgaagcatggacaactctggcctgacatggtccctggctcgtacctgtgacaggacactgaggcaaaagaaagcagtatagagatttattctcccactggcatgaaa

SEQ ID NO: 813879 - DNA, 120 bp, Artificial Sequence
  ENSG00000285280_4 (sequence is synthesized)
gctgtgattctgaccaccttctacatcactgtctaccacccctacaccagctcttagaagacagagtaactacaggatgctgtggtacctggagtgatgccagactgcagaggccacctg

SEQ ID NO: 813880 - DNA, 120 bp, Artificial Sequence
  ENSG00000285280_5 (sequence is synthesized)
gtgacatgaggagagattcaacttaacatggtgaggatggcagagtagagctaaagtggaaaaagcatttccctgatgaatttaagaagctactgaataaatatgtctggaagtacctaa

SEQ ID NO: 813881 - DNA, 120 bp, Artificial Sequence
  ENSG00000285280_6 (sequence is synthesized)
aagggatagataccagaagagaaattttgtgtacattttaatttgggttgtggaaaattgtattctctattaaagggtttagaggagtgcattcaaataatactcctaacagttggataa

SEQ ID NO: 813882 - DNA, 120 bp, Artificial Sequence
  ENSG00000285280_7 (sequence is synthesized)
actgtcatgagggcatttggctgtgaagttgcaatgagtggagaggcattgacattgttgctgatggtgacgttcctggttgatgacatagaagacttaatttcctcctcatgattaatc

SEQ ID NO: 813883 - DNA, 120 bp, Artificial Sequence
  ENSG00000285280_8 (sequence is synthesized)
tctcagttggagagtatacacactcttacacagaatccaggacgaaagccctcatcagatgcttacatcatgatcttggacttcccagcctccagactgatgctatggaagatcagaaaa

SEQ ID NO: 813884 - DNA, 120 bp, Artificial Sequence
  ENSG00000285280_9 (sequence is synthesized)
tataaatttatgaactgctataaactgttattttcttcgtgaagatcagcacaacaagatgttccagacttattcaacatattgtccagccagtcctggaaacaatcagttccctgagga

SEQ ID NO: 813885 - DNA, 120 bp, Artificial Sequence
  ENSG00000285280_10 (sequence is synthesized)
gtgaagagcaacaagaaaccatgacagcaaggccccaaacaggaacctcctgcattttctcatctgtgatgaggcacactgatgctggggattaatgagcctgaagatataaagcagtgt

SEQ ID NO: 813886 - DNA, 120 bp, Artificial Sequence
  ENSG00000285280_11 (sequence is synthesized)
ttaccactggaaaatgtctcctacactaaaagcagaggcacatgccactggccctccatgacacctgctcaccagacactgtccttccacttcagaaggataccggatcctcatcaggcc

SEQ ID NO: 813887 - DNA, 120 bp, Artificial Sequence
  ENSG00000285280_12 (sequence is synthesized)
gtctgacttcttaccttgggaatgagaaccttgacagaggaagcctcagaactgaagattctgggactcacagcagtggcccactcaggcccttgagactttggcttcggactaagagac

SEQ ID NO: 813888 - DNA, 120 bp, Artificial Sequence
  ENSG00000285280_13 (sequence is synthesized)
cattggaatctgtagttctgaggccttcagacttgacttggattgagccacgcttctggcctccccgtttctccggcttgcagacggctcatcgtgggacttccctgtttccataattgg

SEQ ID NO: 813889 - DNA, 120 bp, Artificial Sequence
  ENSG00000285280_14 (sequence is synthesized)
ctcggcctcccaaagtgctgggattatagtgtgagccaccatgcccggcctgtagcaaacatttaaaactgatctctgtgtatttagtcttgctctacttcaggacattctcaatactgc

SEQ ID NO: 813890 - DNA, 120 bp, Artificial Sequence
  ENSG00000285280_15 (sequence is synthesized)
ctcattttggcagggatgctgctaaatatcctacagtgcacagaacggccaccaacgaccaagaattatccagtccaaaatgtcagtaaagctgaggttaagaaatcctgttccagaata

SEQ ID NO: 813891 - DNA, 120 bp, Artificial Sequence
  ENSG00000285280_16 (sequence is synthesized)
tcacattttttggatgctgtggtacctggagtgatgccagactgcagaggccacctggtgacatgaggagagattcaacttaacatggtgaggatggcagagtagagctaaagtggaaaa

SEQ ID NO: 813892 - DNA, 120 bp, Artificial Sequence
  ENSG00000285280_17 (sequence is synthesized)
ccctcatttagtcctctacgtactgatatatatatagatgcctaaaccaaatggacctcatttcctttaaaattctgatatccaaaataagcagcaccagtattgaatttatttgcagtt

SEQ ID NO: 813893 - DNA, 120 bp, Artificial Sequence
  ENSG00000285280_18 (sequence is synthesized)
agaagtgtgttttccttcacttcaggatttctaaatgagggaaggtgtgggaacagaactggatcacagaggctccaacaagctgcatccccctctccacacccctaggtcccaagactc

SEQ ID NO: 813894 - DNA, 120 bp, Artificial Sequence
  ENSG00000285280_19 (sequence is synthesized)
ctgaggcacacatcagactcccaaagtcaggaagtggggatgtgagcagcaccatatggcagtgacagcaccttctgcaagaagagaaactctaaaccaattacaacaatatcatttctg

SEQ ID NO: 813895 - DNA, 120 bp, Artificial Sequence
  ENSG00000285280_20 (sequence is synthesized)
tgttgaaccataagtcattggaaacccactgcaaccatgcttccataatagcagctggaatctccaattctacagagaaaaggaatgttgaagtaacatacatgtagctttgaggaggag

SEQ ID NO: 813896 - DNA, 120 bp, Artificial Sequence
  ENSG00000285280_21 (sequence is synthesized)
gcacgtgcattcaagctcatggagaggattgacagccacagacaggcactcataagaactgaatgtaaatcatcaaagagaatatactcaggaggcactgtctaccataggatggaatgc

SEQ ID NO: 813897 - DNA, 120 bp, Artificial Sequence
  ENSG00000285280_22 (sequence is synthesized)
agtcgtgcaatcctagctaacataacctccaactcctgggcttgggatcttccacgtcagcctcccaaatagctaggactacagttgatgacatagaagacttaatttcctcctcatgat

SEQ ID NO: 813898 - DNA, 120 bp, Artificial Sequence
  ENSG00000285280_23 (sequence is synthesized)
agagtatacacactcttacacagaatccagttatattacctatacgtaaaagagatgctctgcctgattctcatcactggactctgcagtagccttgattaagaaaagatcacttcatca

SEQ ID NO: 813899 - DNA, 120 bp, Artificial Sequence
  ENSG00000285280_24 (sequence is synthesized)
ccctttacccattttctgtttgaacttagcatatcagatttgcagagaactgctaaaggcagcagccttttaatgatacttgggcaataccatccctaggcacctgtgtcagtcaccagg

SEQ ID NO: 813900 - DNA, 120 bp, Artificial Sequence
  ENSG00000285280_25 (sequence is synthesized)
tcaggacgaaagccctcatcagatgcttacatcatgatcttggacttcccagcctccagactgcagaagctttggaactggaatggctcttcagaactgacccagttgagacaagggggc

SEQ ID NO: 813901 - DNA, 120 bp, Artificial Sequence
  ENSG00000285280_26 (sequence is synthesized)
tagatctttggactgtgatctgaccactcactgactacaggctgctatcaaagaggagatgtaaacctgatgctatggaagatcagaaaatataaatttatgaactgctataaactgtta

SEQ ID NO: 813902 - DNA, 120 bp, Artificial Sequence
  ENSG00000285280_27 (sequence is synthesized)
ttttcttcgtgaagatcagcctccaggttcatcacatgactcagctaagagaaaatatccagtggctcatcgttacctgtgggaggaggtctgaactccatggctttgcattcatgttct

SEQ ID NO: 813903 - DNA, 120 bp, Artificial Sequence
  ENSG00000285280_28 (sequence is synthesized)
tgtttgtctcacttcaaccttcattccctccaagtcctcgttgtcctcccagggttcctctgctacagccgggggagtctgatccctgcttcctaaatttctctgaagcttatctacacc

SEQ ID NO: 813904 - DNA, 120 bp, Artificial Sequence
  ENSG00000285280_29 (sequence is synthesized)
agttgagggagagcagtgatattgagcagtcagctaaagaaacaaagctgtagagagtcaggaagcacgtgagcctacagctgaacttcactgtagaaagttgtaaggaaaaggccaaga

SEQ ID NO: 813905 - DNA, 120 bp, Artificial Sequence
  ENSG00000285280_30 (sequence is synthesized)
actgaagcagaagagcaagcaagaaagaaaattctctgcaggctctgtcttgcactggagttgctacctttagcccagtggatcactgtgcttgaaattcccacattattcattctgcag

SEQ ID NO: 813906 - DNA, 120 bp, Artificial Sequence
  ENSG00000285280_31 (sequence is synthesized)
aacaaatacttgaaaaatggcaggtgccgtgatgagatgcaataaaaggagcatctttagtgccagatgtggggaaacaaagaagaattatatacaattcctgatcttaagacatttagt

SEQ ID NO: 813907 - DNA, 120 bp, Artificial Sequence
  ENSG00000285280_32 (sequence is synthesized)
ggcattggaagacggacaattacaagtttaaatgactgacgtcgtaaagttacatacacagtgcacaggcaagatagcagaaaagatgtcttagttgaggttctactgaagcagaccctg

SEQ ID NO: 813908 - DNA, 120 bp, Artificial Sequence
  ENSG00000285280_33 (sequence is synthesized)
agattcaaatgcaagtagtgcttttgaaaatgtggcatgaggacgttaggtctggaactcctgcaggtctttcttttggaaaggaagctagaaagaggacaaagctgactcagaaggagg

SEQ ID NO: 813909 - DNA, 120 bp, Artificial Sequence
  ENSG00000285280_34 (sequence is synthesized)
gcggagctgagagcacatggagaaacagacatggtggacttctggaagtcaacattgtttctgtacatctattttttcctttatttctttttgtttgtttgtttaagaaatttgaatcag

SEQ ID NO: 813910 - DNA, 120 bp, Artificial Sequence
  ENSG00000285280_35 (sequence is synthesized)
atttactcttatttctaatcaaaagcatcataaccaacataatttttttttttctaacatcttggggcctaaaatccctctggcttatggactctgggtttataaatttaatcacctctg

SEQ ID NO: 813911 - DNA, 120 bp, Artificial Sequence
  ENSG00000285280_36 (sequence is synthesized)
ggcagagtacagctgctgatgcttgaacaacatgggtttgaactgagtgaatacacttacatgcggattttcttccacctctgccacccccgagacagcaagaccaacaccttttcttct

SEQ ID NO: 813912 - DNA, 120 bp, Artificial Sequence
  ENSG00000285280_37 (sequence is synthesized)
acctcttgtgttatctgctcagtgcccatcactacaatatagagatgccacaatgtatgtgaagaatggcgttcctcaagacccacctgctaaataaatcacaccaaacaagtttaacag

SEQ ID NO: 813913 - DNA, 120 bp, Artificial Sequence
  ENSG00000285280_38 (sequence is synthesized)
tggcatgcaaatgaatttgagagcttctgggagcatctcttccaagattctggctcagaggtggaagagacttgccttgtctcagcacttttttctcctcctgccttgtgaagaagtttg

SEQ ID NO: 813914 - DNA, 120 bp, Artificial Sequence
  ENSG00000285280_39 (sequence is synthesized)
tgttcacttccccttctgccatgattggaagtttcctgaggcctcccagccatgtgaaactgtaaatgagcgtgatcgtctcctaagatttgttggtctctgaggtcttccttccatcaa

SEQ ID NO: 813915 - DNA, 120 bp, Artificial Sequence
  ENSG00000285280_40 (sequence is synthesized)
gtctaaatagatgtcagatttcagaaaacgtgtataactgtcttgttccatgagctgatacactctgctttgtgcagcatcaaaactgtggaggggtcagtatcttagtatgctttgctt

SEQ ID NO: 813916 - DNA, 120 bp, Artificial Sequence
  ENSG00000285280_41 (sequence is synthesized)
aatagttgctataaagtggatttctgaagagaatttcttggctagatattaagaaaaaactggaagcaggacaacaaaataattgtgagaagattttcaggtaatcctaattaaaaagaa

SEQ ID NO: 813917 - DNA, 120 bp, Artificial Sequence
  ENSG00000285280_42 (sequence is synthesized)
aacaaaaagtagtcatatggaaatgtgccttctgctgatattaaaaagcataccattgggtgttattgatctgtttgtctatgatataggtcctgcctttccccatttcacaaaaagagg

SEQ ID NO: 813918 - DNA, 120 bp, Artificial Sequence
  ENSG00000285280_43 (sequence is synthesized)
cattttatcttgtccttccttgttcctcagttactatttaaatagaaattaaagcaaagttggcaaaataaaatgccagttacattacaaggaaagaacaacctgtttcaaggtcatatt

SEQ ID NO: 813919 - DNA, 120 bp, Artificial Sequence
  ENSG00000285280_44 (sequence is synthesized)
tccaaagaggaaagaaagtatgttttatttggcttataaataaagtagcactgacccagtgaaagcataaacgttttcgattttaatctactgcactctagccacatgttatgcataagc

SEQ ID NO: 813920 - DNA, 120 bp, Artificial Sequence
  ENSG00000285280_45 (sequence is synthesized)
aagcgtggattgatcagtttttaaatatcaaattattcctaaagtgagttattaaataattttcatgatttcagaagaatatgaccattacttctataaccaatcagaattataataaat

SEQ ID NO: 813921 - DNA, 120 bp, Artificial Sequence
  ENSG00000285280_46 (sequence is synthesized)
aataactttttaacctataattactgattttaaaaataacttagtctgaacctgagaactgtgttatgtatttaagcagtatttacaggttaggagttttgagtgttcgttaaggtctta

SEQ ID NO: 813922 - DNA, 120 bp, Artificial Sequence
  ENSG00000285280_47 (sequence is synthesized)
gcacattgctgtatgccttttattggcacaattccatttaattttcacatcagccctacggagtaagtcttgttatactcatgtttatagatgaagaagttgacgttcaaagagttaact

SEQ ID NO: 813923 - DNA, 120 bp, Artificial Sequence
  ENSG00000285280_48 (sequence is synthesized)
tgcattaaatcttacagacagtaaaagatagtgtaagtgcttgaacccaggttcatcttatttaaaattacaggacctttacaactaaactgccgtaaagaaaagaaagtccttactgtt

SEQ ID NO: 813924 - DNA, 120 bp, Artificial Sequence
  ENSG00000285280_49 (sequence is synthesized)
gaggaatatggagattaatgggcaggacaggcatgtatgaaccaaggactgaggaagcacaattaaaagagtgacttattctgttcaaagtagcagaggaaaatcaacttgcataaaatt

SEQ ID NO: 813925 - DNA, 120 bp, Artificial Sequence
  ENSG00000285280_50 (sequence is synthesized)
caaatagaagtcttccagaaaataacataaacattatttcaaatagagtccttcactaattcacaagcatgagtgtcgactctgtgccatctgctgcgctctgaaatattatgcaaaagc

SEQ ID NO: 813926 - DNA, 120 bp, Artificial Sequence
  ENSG00000285280_51 (sequence is synthesized)
cctttgttactatggttagtcttgtgcttgatacagacattcaaagtgaagtcagcgtactaatatcaagaaaagtgctatgtatgttctgagtgctcatgatgcattaactaaagtgaa

SEQ ID NO: 813927 - DNA, 120 bp, Artificial Sequence
  ENSG00000285280_52 (sequence is synthesized)
aactaaagtgaatggattttgttggcataatatgaatataatagtaaagcaaaaatactaattcaagaaatgaataaaggatgaatgagaaagaagtttattaattaaaattttaagtaa

SEQ ID NO: 813928 - DNA, 120 bp, Artificial Sequence
  ENSG00000285280_53 (sequence is synthesized)
aagtaatgtgcaatgctctacaagattatcccagcacattagttacttcctgtttctcttactcactttgggcagctgcattaagtcagttcacaatggaaccatttctcatacagaggc

SEQ ID NO: 813929 - DNA, 120 bp, Artificial Sequence
  ENSG00000285280_54 (sequence is synthesized)
agtaacttactaaacagtcctttagaaggcagcagtggtgaatgcagctgccaaaagtgcttgatagaacctgggattagaattcacactggaagaagctggctcaatgtgtcatacaaa

SEQ ID NO: 813930 - DNA, 120 bp, Artificial Sequence
  ENSG00000285280_55 (sequence is synthesized)
tatgaaatgcatgtaattgcatgtttctaaattgaaactctggcatctgttggagtatttttctgatgccaagaaaccaaatgaaacaaaaagtcaagaaaatctgaagttggaaaccca

SEQ ID NO: 813931 - DNA, 120 bp, Artificial Sequence
  ENSG00000285280_56 (sequence is synthesized)
agtaccatataatatccgaagtaataagttgcattgtttcttctgtaacatttggctttgtagctctgatttgccatagaatgtggtttcttttgccataataaatgatttatgtgatga

SEQ ID NO: 813932 - DNA, 120 bp, Artificial Sequence
  ENSG00000285280_57 (sequence is synthesized)
ccgagacagcaagaccaacaccttttcttctttctcctcctcagcctactcaacatgaagacgagtgaagacctttataatgatccacttccacttaatgaataacctcctgctgggact

SEQ ID NO: 813933 - DNA, 120 bp, Artificial Sequence
  ENSG00000285280_58 (sequence is synthesized)
ctacaggaactcaactgcagactaggaggcaaaggagccgacggatgtattccacactgaacagcatcctgggatccagaggggtaaacaagacgtctggtaccatcactcctggcccct

SEQ ID NO: 813934 - DNA, 120 bp, Artificial Sequence
  ENSG00000285280_59 (sequence is synthesized)
gtctccatcacaggggacacatgaagttccatcagctaccaaatcataacagggtaacatcagttgagtagcagctgtgcctgaaatgaaaacattaatgatcactgagttctccacgta

SEQ ID NO: 813935 - DNA, 120 bp, Artificial Sequence
  ENSG00000285280_60 (sequence is synthesized)
aggtagcagaggaaaaaaggaaaaacaaataacaccaacagtagctgatactatccccaaatctgtagctggacacagagcataatttggtaagcagaattcctttttctaccatacatc

SEQ ID NO: 813936 - DNA, 120 bp, Artificial Sequence
  ENSG00000285280_61 (sequence is synthesized)
ctatctctatgttctcctttccctttgccagcactatggttggacagggattctctcctggtaggataatctgaactttcatttctctaagtcctacaataaataagcaaattgattcca

SEQ ID NO: 813937 - DNA, 120 bp, Artificial Sequence
  ENSG00000285280_62 (sequence is synthesized)
ttctgtagcttttcagtgaagaggtagttatgtaatatgtatctaaaaaaataaattcaagttatgtattttaaaaataaattcaaggtctatatattttagaaaaaggaaaaatcatgt

SEQ ID NO: 813938 - DNA, 120 bp, Artificial Sequence
  ENSG00000285280_63 (sequence is synthesized)
ttaaatatataattacatgtcttaatttatgttgttctaccttgataattctatacctctattattttgcttttataccttttctccccaaattttcttaaattgaaactcttggttcct

SEQ ID NO: 813939 - DNA, 120 bp, Artificial Sequence
  ENSG00000285280_64 (sequence is synthesized)
aattacatgtacatacttatttatcttataccatatacatatagtaatttcaaaataacaatacaaacattattatcattaacaataatgctgccgaataaagcttgtgatttctttgtg

SEQ ID NO: 813940 - DNA, 120 bp, Artificial Sequence
  ENSG00000285280_65 (sequence is synthesized)
tccacttccacttaatgaataggttatactctccagactgttgccccaggacgtgtttaccttggccttttgaatgtggtccattgaaagaataaaaatggtaaaaaaaagaaaaccgct

SEQ ID NO: 813941 - DNA, 120 bp, Artificial Sequence
  ENSG00000285280_66 (sequence is synthesized)
gtaggactactggaaaagagagaaaaggctactttttataccattgacatataagaaatgtagaacttctggagtgtgtgaaacacagggaaccacactgaaaccaaactaatcagactt

SEQ ID NO: 813942 - DNA, 120 bp, Artificial Sequence
  ENSG00000285280_67 (sequence is synthesized)
gaaaatatggtagttcatgggaaacctgttgctggagtggtcagtatttgagcaagaagttaagtcctcctcccagaatatcatccatctcagtttctgatttttttttttttttttttt

SEQ ID NO: 813943 - DNA, 78 bp, Artificial Sequence
  ENSG00000285280_68 (sequence is synthesized)
ctgatttttttttttttttttttttttagagggagtttcactattattgcccaggctggagtaacaatggtgcaatct

SEQ ID NO: 813944 - DNA, 120 bp, Artificial Sequence
  ENSG00000285280_69 (sequence is synthesized)
ggcgtgagacaccatgcctggtggtgcagtttctgctctttttgcagctgtcaagaataaccagcatcaaccctgggatatgaacaagtaactctgaagatgctgaagcttaaagggcta

SEQ ID NO: 813945 - DNA, 120 bp, Artificial Sequence
  ENSG00000285280_70 (sequence is synthesized)
agagagttggagcctgaagaaaagaaggtttcttttcattggaacacataagtgctcagtgtttcatttggaatatcatatgatactgtttcccaactttatgaaaactagatgttttgg

SEQ ID NO: 813946 - DNA, 120 bp, Artificial Sequence
  ENSG00000285280_71 (sequence is synthesized)
ctgtatttctaaactttataactgttatataaaatgtgtatctattttacctatggggaaacttagattaagcaaggtgaaatgatttaccctttgctggtaagtagtaaagccagactt

SEQ ID NO: 813947 - DNA, 120 bp, Artificial Sequence
  ENSG00000285280_72 (sequence is synthesized)
gaaatcagcagctacaaagccaggcttttgctaccatactgtctgttatttacctgttttttctcttcatacatatgtttggtgtgttagaataagacattgaaaaaacaaaaaaccaaa

SEQ ID NO: 813948 - DNA, 120 bp, Artificial Sequence
  ENSG00000285280_73 (sequence is synthesized)
actttagttctaggaagtcagcgtgaaacgcctgaagttttctgcctccagactctactctcctgcctcaattctactctctacttttataagctcgactcacatttgatgacatagaag

SEQ ID NO: 813949 - DNA, 120 bp, Artificial Sequence
  ENSG00000285280_74 (sequence is synthesized)
ctcacatcaagtacgatttctttctagatggctctaactcagttattgttatctaattgcacacatatctctgattattggcattagtcatttggaaatttattgtatgctgctttgttt

SEQ ID NO: 813950 - DNA, 120 bp, Artificial Sequence
  ENSG00000285280_75 (sequence is synthesized)
tattatttctctttttcacctgccttgtgcttacttccccaattggactacagattctttaaggattagaaggctaatatacctactttttgtctctatagcatctaaaacagtaatctg

SEQ ID NO: 813951 - DNA, 120 bp, Artificial Sequence
  ENSG00000285280_76 (sequence is synthesized)
cagatattaggtattcagaatataattcaatctagaatcatttgggaagtttaatttttaaagaactctgaatcatttttctcaaaactgtcatataatgctaaattttcatttcaggtt

SEQ ID NO: 813952 - DNA, 120 bp, Artificial Sequence
  ENSG00000285280_77 (sequence is synthesized)
ctgagagattcttttcttttaagcccagcatttatgactttcaaattttaataaatagaacgcccaaagttagtcaacagaaacgtcctaagttaacgtgggtgacctaagttcctttgc

SEQ ID NO: 813953 - DNA, 120 bp, Artificial Sequence
  ENSG00000285280_78 (sequence is synthesized)
tgtattttgtacacgttttatatattgcatcaagaaaagcaaatgattgctgaaatgagtaataaggagcttcactggctagtcaatcttattccggaagcaaaaacttccacgcaaggc

SEQ ID NO: 813954 - DNA, 120 bp, Artificial Sequence
  ENSG00000285280_79 (sequence is synthesized)
tcatttacatgtgcacactgcaaaaggaagttttgggcaaaatgtctgcagactctgttcaacatgcgtgtcccacttaaccacatgatccttataaaaccacctatatccgttctcata

SEQ ID NO: 813955 - DNA, 120 bp, Artificial Sequence
  ENSG00000227305_0 (sequence is synthesized)
atagcaaccctgctgcagagtctgtgagaggctcttggcctctacctggtctgtggaaaatcaaactctgggcacaagtcatgaagccagcacgttggggagacaccgtgtcacaatgac

SEQ ID NO: 813956 - DNA, 120 bp, Artificial Sequence
  ENSG00000227305_1 (sequence is synthesized)
aaggaggtgccgggggtaatggtgacagcctggagcacactccggaggcaggtggtgcagatggagagccctcatccctctatgcatgtagaagaataccttacacttgaagtcattctg

SEQ ID NO: 813957 - DNA, 120 bp, Artificial Sequence
  ENSG00000227305_2 (sequence is synthesized)
aaaatactgtgactcaaagaggtccagagatgccaagaagctcacagtgaggagcatcactaagtggacaagggccaggtgacaggtgatgagatttctatgaagaaacagataccctgc

SEQ ID NO: 813958 - DNA, 120 bp, Artificial Sequence
  ENSG00000227305_3 (sequence is synthesized)
cttggccactacctgtgctgctaagttgaagggcaatgtcttttaggatatttggtcacccctctatttatacacagctccgaagaaacccagcactggacaaattctctcaaacttttc

SEQ ID NO: 813959 - DNA, 120 bp, Artificial Sequence
  ENSG00000227305_4 (sequence is synthesized)
cccaagcttggccaccaatctgttttagatgaagactccatttggaggaaatctgctaattatctgcctggctttcaggaaaacagctttatgcattttactggaaaaatgcttttgcct

SEQ ID NO: 813960 - DNA, 120 bp, Artificial Sequence
  ENSG00000227305_5 (sequence is synthesized)
tggtagcattcccaaaaccaagtcctgcgactctgtctgaaatcatgctaaaacagaacagaactcagaatcttactacgctcactctgcaaaataaaagcagtacctgagaatttttaa

SEQ ID NO: 813961 - DNA, 120 bp, Artificial Sequence
  ENSG00000227306_0 (sequence is synthesized)
cagaaatgaaaagtctgccttatggaagacaaggcaccgacgctttccctgacagcatcatcatcacccaactagggcagctgacccgcgtcttcctcacgacgtggaatggtttgagtc

SEQ ID NO: 813962 - DNA, 120 bp, Artificial Sequence
  ENSG00000227306_1 (sequence is synthesized)
aagggttttcatggccatgagccacgtggaggctgtgccttttgtttcctgtgagaaatcttcaaccagcgccactctcagcctcccctctgccagcgcttctgtggctgcacctgcatt

SEQ ID NO: 813963 - DNA, 120 bp, Artificial Sequence
  ENSG00000227306_2 (sequence is synthesized)
ttcttgtcccgccaagcctgactgtgagctgttgtgacgttgccactttgctcggaaaggaccccttaccttttatttcccttgcatttctttcaattctaccattgaccatttctcata

SEQ ID NO: 813964 - DNA, 120 bp, Artificial Sequence
  ENSG00000227306_3 (sequence is synthesized)
cgtgtggtcatcattgtatttcgcccccattttgtgaggtttagtgtattcttaaagtttcctgggttttgatgagagcatattctgtcattatatttaacaggtgttttccccagcttg

SEQ ID NO: 813965 - DNA, 120 bp, Artificial Sequence
  ENSG00000227301_0 (sequence is synthesized)
gccctgggagccccctccaggagctccgggcaagcagcccctcatggtccatggtggaactgcaccctcagcactggtgagggtgtcgcaggagcctgcgaggaaggtggggtctcagtg

SEQ ID NO: 813966 - DNA, 120 bp, Artificial Sequence
  ENSG00000227301_1 (sequence is synthesized)
cttttgcacagggcgagtggagctggaaatgcagcccccagtggtttcagttattccagacatctcacaaatccttaaggaggaggctgtgtccctagagtcctgtagtcgagacatttg

SEQ ID NO: 813967 - DNA, 120 bp, Artificial Sequence
  ENSG00000227301_2 (sequence is synthesized)
agaatttgggacccagttggaagtggttgcgtatttccattgtgtgggaatatgtaaaaggcccaagcctcaccaagaagggaagaccaggctgctctcatctcaagggccagttgcttc

SEQ ID NO: 813968 - DNA, 120 bp, Artificial Sequence
  ENSG00000227301_3 (sequence is synthesized)
acacaccggagtgggcctaatgttcaaggagcttctttctccatttctccccacagtgcttaacgtctcaggccacgggctgccagcactcacctgccgaggccgccctgcggcctccct

SEQ ID NO: 813969 - DNA, 120 bp, Artificial Sequence
  ENSG00000227301_4 (sequence is synthesized)
acgctgctgtgcttccctttgcccttgaaaagaatgaggtttaggggaggctctgcacagtcctgtgctgtccgggatagctgagcagaagctgttgaagccggcctgctggactgagct

SEQ ID NO: 813970 - DNA, 120 bp, Artificial Sequence
  ENSG00000227301_5 (sequence is synthesized)
tggtccagcagcctatccacgtgagagccctggctatctggaggcacagggagctgctgggcctgcagcgtcccacctggagggaaagaacgcaccgccaaggaggcgtgggccctgcag

SEQ ID NO: 813971 - DNA, 120 bp, Artificial Sequence
  ENSG00000227301_6 (sequence is synthesized)
cccgtgctgggccgcgaatctggtagccacgcttctccggcggaacgcggcgccccctggcggcagaacgcttgtggccgccgttacactcgtgtggaaacagcgccatctgccgaatgc

SEQ ID NO: 813972 - DNA, 120 bp, Artificial Sequence
  ENSG00000227301_7 (sequence is synthesized)
tccatctcattgctgattggcccacacagactttgtaaggatttttccttctgcttgcttaaatcaggccatattgagcctattcaaagtgtacttctgaaatgaaaaaagaaagtgact

SEQ ID NO: 813973 - DNA, 120 bp, Artificial Sequence
  ENSG00000227301_8 (sequence is synthesized)
gtacaagatgttttgctcactggaaaaacgaggatgaatggaaaatgggtagcgattatctgaataatatgtgcttcctgtctgtagtgaggtgtgaacatggtggggccgcacattgca

SEQ ID NO: 813974 - DNA, 120 bp, Artificial Sequence
  ENSG00000227303_0 (sequence is synthesized)
agaaattttcctttaaatacaggttttctgcatcccataggccttaataggaagatgtatggttaccctcttgacacaaggatgatttagaatgtgagttccatgaggaagagggcaggg

SEQ ID NO: 813975 - DNA, 120 bp, Artificial Sequence
  ENSG00000227303_1 (sequence is synthesized)
atcttgattttgttccctgctgtattcccaaggtgtagaatgaagactgacacataaccatgcctgctttctcttcaccttccaccatgattggtagtttcctgaggcctccccagccat

SEQ ID NO: 813976 - DNA, 120 bp, Artificial Sequence
  ENSG00000227303_2 (sequence is synthesized)
tgggagcagctgcaaaggaacaccacaatgatattccactggaaaaagggccaaaccacctgatcataagaacatcttatcaatatcctcctgggcagcaagccatactgcccagctccc

SEQ ID NO: 813977 - DNA, 120 bp, Artificial Sequence
  ENSG00000227303_3 (sequence is synthesized)
tcccacccatacctcagctgcaaccaggatcacccccattgctggacatcacatccaacactgggcttcaattcgtgggctaaactcccctgtccaggcggccacccagcaacacattga

SEQ ID NO: 813978 - DNA, 120 bp, Artificial Sequence
  ENSG00000227303_4 (sequence is synthesized)
taccatccttctcctctgccaagtccagtaccagtgcctccaggaaaacaactctgaagtccaacacccactgcttcaaaacccaaaccctgattacagctcccctattcggcaggaagc

SEQ ID NO: 813979 - DNA, 120 bp, Artificial Sequence
  ENSG00000287498_0 (sequence is synthesized)
aaagagtaaagaagaaagagaaacaggatgtgagaaatcgagactgagagacagagaaactgcgggagagaaagagagagcgtgagataatgaagcagagaaagacaaggacattgtccc

SEQ ID NO: 813980 - DNA, 120 bp, Artificial Sequence
  ENSG00000287498_1 (sequence is synthesized)
ctcgtcctgccatggcccatatcccaggaggacctgtcaccatcctccaccttggtgagacattgcccaagttaatgggcccaacaatagggtcagactacattgctgctccatttccaa

SEQ ID NO: 813981 - DNA, 120 bp, Artificial Sequence
  ENSG00000287498_2 (sequence is synthesized)
gaaattctccacgtgcaacatcacatttcctgtaactccagtgcctcaggtctcgactcaaaggtcacctcttcagagaggcccctcctaatgaacttcctaagcccaggctatcctatg

SEQ ID NO: 813982 - DNA, 120 bp, Artificial Sequence
  ENSG00000287498_3 (sequence is synthesized)
gatgcactcctcccaccatctgctctcccaagctctgctgaaacccccctgcctagaacaatttgcttcgtagctgactttccataaacattcatacaatggatacagaaatgacacaga

SEQ ID NO: 813983 - DNA, 120 bp, Artificial Sequence
  ENSG00000287498_4 (sequence is synthesized)
ggtcagcatcagaacccaggatcccccaaagccctgtttctctctttcacagcctctctctaccttattcctatcaccaagggattcttctctctttccctctttctactatttgttaga

SEQ ID NO: 813984 - DNA, 120 bp, Artificial Sequence
  ENSG00000287498_5 (sequence is synthesized)
atggaaagcactgggccggtaaagctgtcactcaggatatgattttttctctgccactttctggctgtgtgcttttcttaaatcatggaactgcaactgaaaacgcatggatgacaacac

SEQ ID NO: 813985 - DNA, 120 bp, Artificial Sequence
  ENSG00000287498_6 (sequence is synthesized)
aaggattattttaaagattaaatgaaataactaggatgactgggcctggcatatattaagcatcaattaacattaattgctttgcatccttctctttgtttctctcctctcccattgttc

SEQ ID NO: 813986 - DNA, 120 bp, Artificial Sequence
  ENSG00000287498_7 (sequence is synthesized)
cttccttataaattaattccctgcctttctcacaatctttactccctactcataaagcttctgccagggttgtcagcaggatttatgtacttgaattgaactgagttaggtaggcatgaa

SEQ ID NO: 813987 - DNA, 120 bp, Artificial Sequence
  ENSG00000287498_8 (sequence is synthesized)
tgaaaggcaagttatctctttctagggggagaaaaatttaaggcagagtgatgtgagaagtgtcgacaagacccaggaaagcccagggagaggggctggggctaaggcgtctgcccgctt

SEQ ID NO: 813988 - DNA, 120 bp, Artificial Sequence
  ENSG00000287498_9 (sequence is synthesized)
ggcagcagctgtgatgttcggagtacgtgttcagaccagcagtccctgagatgctattccacttattctggagaccactctgctcttagccccgctgggcaggtagatttggaaatgttt

SEQ ID NO: 813989 - DNA, 120 bp, Artificial Sequence
  ENSG00000287498_10 (sequence is synthesized)
attgcatgagatgtgggatggaagaaagaaacctgaattgggaatgaagaggcttgttccaccttccctcaatcctgccagtagccagctacagagcttaggaaaagtctgtttacctcc

SEQ ID NO: 813990 - DNA, 120 bp, Artificial Sequence
  ENSG00000287498_11 (sequence is synthesized)
agggagtgagagaagagaactgcagaagcttaaagaagcaccatttgcaaagtttttttttgttctgtttccaacaatcttacttattcgcagcacagattctgttaggcttagacttgt

SEQ ID NO: 813991 - DNA, 120 bp, Artificial Sequence
  ENSG00000287498_12 (sequence is synthesized)
gtttcggtggcactggattgatagactcatactaattggtgtgggtgtctcaattttctccgtccaactttgctggggtctcgccttctctctatggaagctcttctcaggctcacaaga

SEQ ID NO: 813992 - DNA, 120 bp, Artificial Sequence
  ENSG00000287498_13 (sequence is synthesized)
gctgagatttctcagaggcgcctgtagatggatttgccttttttctgctatatccatctgaagccacagcaactctctctgagccaaaaccactcactaattaatacatttcacagggtg

SEQ ID NO: 813993 - DNA, 120 bp, Artificial Sequence
  ENSG00000287498_14 (sequence is synthesized)
aatgaagcactggcacgaccagcagcttggggcagctcccaaagccatggccttgcccagtgcccagaaagtcctgcctggagacggccagtgccagtttcctccatgccagcacctcac

SEQ ID NO: 813994 - DNA, 120 bp, Artificial Sequence
  ENSG00000287498_15 (sequence is synthesized)
ccttctcatttgaacccagaaatgtgttgacttccagtgccccctaccaccctagctgtgtcattttctccttcacctgtttgcatttccaaggaagcacaagtcacagtcataggggct

SEQ ID NO: 813995 - DNA, 120 bp, Artificial Sequence
  ENSG00000287498_16 (sequence is synthesized)
cgtgatctattttttattctccccttttctgggcagaatgatggatcaactctggaaaacctattaggaaagggctgggccatcctgcgtttccgccaggcctgtccaggtgactttgag

SEQ ID NO: 813996 - DNA, 120 bp, Artificial Sequence
  ENSG00000287498_17 (sequence is synthesized)
tcaacccactgagagctacttggccacaggccatctctgtggggcaccatgtttatttgaaccactgaccctggccctagaagaaaagatgaagacttagtgataccccttctccccatc

SEQ ID NO: 813997 - DNA, 120 bp, Artificial Sequence
  ENSG00000287498_18 (sequence is synthesized)
tatccccaccaggggctttttggagtgtctttaatttacagtctgttggaaagcactcagaatcactctaccctacactcaaggcaggacccttcatcatccatctgcgccaggccagcc

SEQ ID NO: 813998 - DNA, 120 bp, Artificial Sequence
  ENSG00000287498_19 (sequence is synthesized)
tgcaggcatatatccctgaacttcccagtgaggttctgaaagaactgggaaactgaggaagagattggaaatagaggaggccccagtgatggctgtttgtatcaatcatcacattgattt

SEQ ID NO: 813999 - DNA, 120 bp, Artificial Sequence
  ENSG00000287498_20 (sequence is synthesized)
gcttagggaagtcttattctaacattacactggttggtgatcaggcctccaggcccactggactcctaagataaggctccagctccacagagttggaagacaaaattgtccgctccctcc

SEQ ID NO: 814000 - DNA, 120 bp, Artificial Sequence
  ENSG00000287498_21 (sequence is synthesized)
ttgcattcacccagcccggggtcttatctggcagatgattgcttgttgctccagctttctctgtcctaacctctacaaccatagtcaccaatgatttacttattcttagacccagccata

SEQ ID NO: 814001 - DNA, 120 bp, Artificial Sequence
  ENSG00000287498_22 (sequence is synthesized)
acctcacattttccatgaatcagctagccccctatggtttcctgcaatgtttcctttattttctatttccttatgacattctttaaatgaatctccttctataattaccatttgacccct

SEQ ID NO: 814002 - DNA, 120 bp, Artificial Sequence
  ENSG00000287441_0 (sequence is synthesized)
gtccctagaacttgtcatcaacttgaccaaaactgtttagaattcttcttcagaacaatactctacttagacacggatagtgtagattaagtgatgccaccagagactcacgactgggat

SEQ ID NO: 814003 - DNA, 120 bp, Artificial Sequence
  ENSG00000287441_1 (sequence is synthesized)
atccattgtgtgtcattgaagacttctaatgaaggaactgacaggctgtaggaattactgagctattagatcatctcagagaaagtgtgatactcaatgtatgtctccttttttcctcta

SEQ ID NO: 814004 - DNA, 120 bp, Artificial Sequence
  ENSG00000287441_2 (sequence is synthesized)
caaaagtgatgattcatacataatcaaagaaatgccatttcaacagtatggctggaattttgaaaatctctagcagcttgtctttttttcagtagactaataaattttaccttttttttt

SEQ ID NO: 814005 - DNA, 120 bp, Artificial Sequence
  ENSG00000287440_0 (sequence is synthesized)
ctggactcaagtgatcctcccaccttggtcatccaaagcgctgggactacaagcatgagccaccgcgcccagccagaacctgagtattcaatgtttccataaatggatttcactgagtgc

SEQ ID NO: 814006 - DNA, 120 bp, Artificial Sequence
  ENSG00000287440_1 (sequence is synthesized)
ggatttcactgagtgctctcaaccctggagacggcagaaccaagtctctctacaccctttcccagcaaggggccagggccacagaggaagaatcgcccctgaactctcagaatcctaaag

SEQ ID NO: 814007 - DNA, 120 bp, Artificial Sequence
  ENSG00000287440_2 (sequence is synthesized)
cttcaatggttctggaaatcagaagtcccagaatgaaggtgccatcggtggcgctggttcctcctggaggctctaagggaaactccgtctcctgtgcttccccagcttccagaggtgacc

SEQ ID NO: 814008 - DNA, 120 bp, Artificial Sequence
  ENSG00000287440_3 (sequence is synthesized)
tgcattccccagctccttgccccctcttccatcctcagagccacagcttggcatcctccagtctctgtctctgacctcttcttcggtcctcgttcctcctactgcccctcgcataaggac

SEQ ID NO: 814009 - DNA, 120 bp, Artificial Sequence
  ENSG00000287440_4 (sequence is synthesized)
ccttgtgattacgctggatccaccagataacccaggatcctccccccatctccagacccttaacttaatcacatccacgaaggaagtccctgctgccttgtaaagtaacatcttcccagg

SEQ ID NO: 814010 - DNA, 120 bp, Artificial Sequence
  ENSG00000287440_5 (sequence is synthesized)
cttcaaatcataggtttaaacctctgtatcttatcccatccatttcagtgtagctcttgcctgcccacgccatttgcttgataaatatttgttctgggagctaggtttgcacaactgatc

SEQ ID NO: 814011 - DNA, 120 bp, Artificial Sequence
  ENSG00000287440_6 (sequence is synthesized)
aagccaggcaaagccttattttcccaaagcctatattccagtggggaaagacaggcaatacatgggataaatgaataaatgatattctcagcacaattgctttttggaggataacttggt

SEQ ID NO: 814012 - DNA, 120 bp, Artificial Sequence
  ENSG00000287440_7 (sequence is synthesized)
aaaatttatgaaaatttaaattgtgcctgttctctgactctgcaagcctgctgttaaaaattcatatataatgatatgtgtacaagcctgttctttttttttttttaatgaaataatttt

SEQ ID NO: 814013 - DNA, 120 bp, Artificial Sequence
  ENSG00000287440_8 (sequence is synthesized)
tatttgctgtgattatacatattgacatttgcacactttttaaaactttttatttggaaaaaatttaaattttatagataagttgcaaatataaaaagagtgtaaagaatacccatacac

SEQ ID NO: 814014 - DNA, 120 bp, Artificial Sequence
  ENSG00000287440_9 (sequence is synthesized)
ccttttcccagaaagacttattgttagcatttcacacaattggctttttggtttctttctttccccacccacctcaccccatggttctctctctccatacatgttacatacacataatta

SEQ ID NO: 814015 - DNA, 120 bp, Artificial Sequence
  ENSG00000287440_10 (sequence is synthesized)
tatacttaatttttttcttagtaaattgaaggtgtcacatacatgatggccctttactccaaacatcagtgcatatttcctaagaatgtagatattctcttacttagccccagtagttat

SEQ ID NO: 814016 - DNA, 120 bp, Artificial Sequence
  ENSG00000287443_0 (sequence is synthesized)
agccccggcgtgggggccccctggctggttgggcagctcccggggctgagcctcgacactccagtcctgtgatctgtcattgacaaaggctgtttttgtctacctggtccgaggaggtgc

SEQ ID NO: 814017 - DNA, 120 bp, Artificial Sequence
  ENSG00000287443_1 (sequence is synthesized)
aagtcacatcagacaggagggaagaggagaagggcaagtggagcgtacccattcatttaagggtacactgggaagaaaatactaatgagaaggagaatattacaatgaaaggaagcagga

SEQ ID NO: 814018 - DNA, 120 bp, Artificial Sequence
  ENSG00000287443_2 (sequence is synthesized)
gagcaaataagagattcgacctacacatggttttgattctgcgtgaggccggtcatacccagatgaaaagctagacatccagctacgtacatccctggagatacccagacgatggaatgg

SEQ ID NO: 814019 - DNA, 120 bp, Artificial Sequence
  ENSG00000287443_3 (sequence is synthesized)
ggaggtttagcagcatccttggcctcactcgccagatgccaatagcatccccctctcctagttgtgacaattgcaaacatatccagacattgccaaatgtcctctggggggcaaagttgc

SEQ ID NO: 814020 - DNA, 120 bp, Artificial Sequence
  ENSG00000287443_4 (sequence is synthesized)
cacagctgggagccactgctctgcaggtttggacgctgtgcctgcaattccatgcagcatcacgggctattgatcatgtgtcagacggagcttaaattggtcgatcgcatcctcaagtag

SEQ ID NO: 814021 - DNA, 120 bp, Artificial Sequence
  ENSG00000287443_5 (sequence is synthesized)
ccactccagagcgtgattatctgacacctgtaatttaccatcctggttacatggggggcaaacgtggaattatgcacatcagcgggcccagggcctgttttccatggacttagtgttcct

SEQ ID NO: 814022 - DNA, 120 bp, Artificial Sequence
  ENSG00000287443_6 (sequence is synthesized)
gctgagcatggcctcggtctccccgagttgttaaagacattgacgcctcagaactgactctgcctccacttaatcagctcaccagaaaattacaataaaaatcatctgccacttatgaaa

SEQ ID NO: 814023 - DNA, 120 bp, Artificial Sequence
  ENSG00000287442_0 (sequence is synthesized)
acagggggcaccccaaagtggcaagaaggcccccaaaggatggagacagcacatctggcttgaaggtggatgttgagatagcccgggaaaaaagcggtgaagctgtgttcctcccatgga

SEQ ID NO: 814024 - DNA, 120 bp, Artificial Sequence
  ENSG00000287442_1 (sequence is synthesized)
caacaatgccttccctgcagcccctgcgccgggcccgggggagttgtggagtccctgtcttataccaggagcccagagttgatctctgcaccactctatcactgctgggggtgaggaaat

SEQ ID NO: 814025 - DNA, 85 bp, Artificial Sequence
  ENSG00000287442_2 (sequence is synthesized)
atggaagatcagtggagccttctttctgccatcttgctttaccctcacacccaagaatcagaatgcagaacttttaatcagaaaa

SEQ ID NO: 814026 - DNA, 120 bp, Artificial Sequence
  ENSG00000287442_3 (sequence is synthesized)
cacacccaagaatcagaatgcagaacttttaatcagaaaagcattcagaactcaggaaggacatggaagacatcctggttctccacgtttaacattggactgtttcttcaacttaggtgc

SEQ ID NO: 814027 - DNA, 120 bp, Artificial Sequence
  ENSG00000287442_4 (sequence is synthesized)
cactaatcagggattatcaccgataatttgacttggactatggagttcattcaaatactttatctagacaatttaagtactggcttatttgtcatgaaaatctgacaaagtaatttcttg

SEQ ID NO: 814028 - DNA, 120 bp, Artificial Sequence
  ENSG00000287442_5 (sequence is synthesized)
gtattcagttgatttttactctgtttgggttagcagtttataaaccagtcagtctcttcattaaagttctgggaattcttactcgttcaaatgatatgattctaaagttctcaaaaatct

SEQ ID NO: 814029 - DNA, 120 bp, Artificial Sequence
  ENSG00000287442_6 (sequence is synthesized)
gtattctagaattcttctcaggaccttttccctcctttcatgaaactccttaaagatacagtattctataattttgcaagcttgtacagttttcagaaactgcctcagaattaagcaatt

SEQ ID NO: 814030 - DNA, 120 bp, Artificial Sequence
  ENSG00000287442_7 (sequence is synthesized)
tacagtggaaatgtttttaaattgtcatagacacaattgacaagaaaattttattatttacaggcgtgagccaccacacccagcctctgaagttaatttaataaaattttatgaataaat

SEQ ID NO: 814031 - DNA, 120 bp, Artificial Sequence
  ENSG00000287444_0 (sequence is synthesized)
aggagctcgcactccaaccaattaagaaaagatttggctacaatgacacattggctggaagacacacccacaaacccatggaccaccggactgaattaactcatgcgattatggaggctg

SEQ ID NO: 814032 - DNA, 120 bp, Artificial Sequence
  ENSG00000287444_1 (sequence is synthesized)
agaaatcccacactctgcttctgcaaactggagaccctggaaggctggcggtgtaactctgagaactgggaatctgatggtgcaagtcccaggagagggcagaagactgatgtctccact

SEQ ID NO: 814033 - DNA, 120 bp, Artificial Sequence
  ENSG00000287444_2 (sequence is synthesized)
caaccaatcaggcagacagagcaaactctccctcctctgcttctgttgttctattcaggccctcaatggattggatgacaggactggatgaggacccccacactggggagggccatctgc

SEQ ID NO: 814034 - DNA, 120 bp, Artificial Sequence
  ENSG00000287444_3 (sequence is synthesized)
tttactcagccactgattcaaatgccggtctcattcagaatcactctcacagacacaaccagaaataatgttttacgtaggcactccatgccccaatcaagtcaacacataaaaataacc

SEQ ID NO: 814035 - DNA, 120 bp, Artificial Sequence
  ENSG00000287444_4 (sequence is synthesized)
ttgacactcatcctcatctcctgaaaccatacttaatctccaaataatgacaataacaagataataattctgcctaatatgatacatctatcctgtgtgccaccgaaaatgcacaaactc

SEQ ID NO: 814036 - DNA, 120 bp, Artificial Sequence
  ENSG00000287444_5 (sequence is synthesized)
tttcccagaaaaggataggaatgagtgatgtttagtcttctctttgatattcttctgaaacttaaagactgtgatgttgcggagacaaaagtgagtccatcttgaatgctgatctgccat

SEQ ID NO: 814037 - DNA, 120 bp, Artificial Sequence
  ENSG00000287444_6 (sequence is synthesized)
actgacttcttactaaccccagtctcatgaatgcctctgattcctactttatttactgtccttggtgtaagaacatgtacacactataaatcctgcctttaggtcaaggcaaccttgata

SEQ ID NO: 814038 - DNA, 120 bp, Artificial Sequence
  ENSG00000287444_7 (sequence is synthesized)
ttaccacacaaatcacaggctatgacgcacacagcattcttgcctgttctggagggctgctgtgttaggccgtccctgcattactataaaaaatacctgaggctaggtaattcgtaaaga

SEQ ID NO: 814039 - DNA, 120 bp, Artificial Sequence
  ENSG00000287447_0 (sequence is synthesized)
gatctgatgattgtgtgtatttaaaatcctgtcatcagcacactagaccagtcataccactatgcacttgacaatgaaaacagaattggtgaagcaatactgtggtagttctactttcct

SEQ ID NO: 814040 - DNA, 120 bp, Artificial Sequence
  ENSG00000287447_1 (sequence is synthesized)
cccaccagtgaaccctttcagaatggcttgagctggcaacaaagcacgaagccatggctcagcagtgccacgctgggggaaagagtccctttaccaccttgttttctacatagaggtagt

SEQ ID NO: 814041 - DNA, 120 bp, Artificial Sequence
  ENSG00000287447_2 (sequence is synthesized)
gtaactgactgtatttaaaaaaaaagataatcacagagatacagagtatgtccagaggaaggcagtatagtgttatagttaaaagtatgcataggctttagaattagacgtgcttagatt

SEQ ID NO: 814042 - DNA, 120 bp, Artificial Sequence
  ENSG00000287447_3 (sequence is synthesized)
tttatttttggttaatctttgtaagaacacccaaatgagaataataccagtagtctcttcatagggctgctgaagcataaaggagaaaaggcatgtaagaaatcaataatgtcagctatt

SEQ ID NO: 814043 - DNA, 120 bp, Artificial Sequence
  ENSG00000287447_4 (sequence is synthesized)
attattaccttgacattcatctctaatttctaaaatgtaaccttccttttagatgtggtatctatgtgctcttcagtgacatcaaaattcatactgataggataccagttttgaagtatc

SEQ ID NO: 814044 - DNA, 120 bp, Artificial Sequence
  ENSG00000287447_5 (sequence is synthesized)
atacagcttctactcccatctccacccctacttccctgattttgtaaagtgatttggtttcgattaaatattgtaaaggaaataatcaagtacaaataagatgactatagattccagttt

SEQ ID NO: 814045 - DNA, 120 bp, Artificial Sequence
  ENSG00000287447_6 (sequence is synthesized)
gcccagaacagtcttggcttatgactattaaactggcataattaataatagagtctcctttccctgttacagtgctctggcttgaatgggaaataatttgatcatcgtatatataacacg

SEQ ID NO: 814046 - DNA, 120 bp, Artificial Sequence
  ENSG00000287447_7 (sequence is synthesized)
atgttgaatgctaccctggcaaacaggtcaactcagtcaaactggtttcttcatgtagatactgccttactatggaaatgaaggtggaaacattcatctttgtcagaaattatgtcaaat

SEQ ID NO: 814047 - DNA, 120 bp, Artificial Sequence
  ENSG00000287447_8 (sequence is synthesized)
tattcaaatttattggtgaattacaacaaacatcccagctgatgaacatctcagtcatatgttttttagagaacacttatggtcctgaaaagataacattgcaatgagctttcccattct

SEQ ID NO: 814048 - DNA, 120 bp, Artificial Sequence
  ENSG00000287447_9 (sequence is synthesized)
gaagcaaagatgtttggatagagaatggggtctgttattcaagataataatttatttcaatcataaaaattacaaagatatccagaactgtaagtatcaaaatatatccctttagatagt

SEQ ID NO: 814049 - DNA, 120 bp, Artificial Sequence
  ENSG00000287447_10 (sequence is synthesized)
gttgctgttgttttctttccccctctccttgttatggtcctctttcaagactcttacgaagctgtctctaagaccctttctgtcagtttccatcttttctatagacatactatagccttc

SEQ ID NO: 814050 - DNA, 120 bp, Artificial Sequence
  ENSG00000287447_11 (sequence is synthesized)
acattaacactgcttctctggcttgaggtaataaacgattagctacagcacagtggtgtgatgttcatgttattctttgctgtactacacctagccaatgtttcaaaaattaatgcaagt

SEQ ID NO: 814051 - DNA, 120 bp, Artificial Sequence
  ENSG00000287447_12 (sequence is synthesized)
atatcaggatctgaaattaactttttatagccaaaagcaacatcctgctaggaggagaaaaacctattataaatgggctggcatctgattgcttgtacatggttagtaccaggaaactaa

SEQ ID NO: 814052 - DNA, 120 bp, Artificial Sequence
  ENSG00000287447_13 (sequence is synthesized)
aaggtctaactaggtagtatctattattagtaagtcacagatctattactaaagatctgagatgaacctaaattggctaatgtttttatgatgttatatagaaataattagaaaaaaata

SEQ ID NO: 814053 - DNA, 120 bp, Artificial Sequence
  ENSG00000287447_14 (sequence is synthesized)
ccagcatgaaaaataacagcatttcccccgaactgtatattatcttgggatatattttttccaggtaattatttaaaactagtcactaaaaatatattcaaaagtatatgttattcaata

SEQ ID NO: 814054 - DNA, 120 bp, Artificial Sequence
  ENSG00000287447_15 (sequence is synthesized)
agcactatcaaaaaatcactttgaaaaatgcgaacagaaaaaatcaacctaggataatgcacatatctatttctctttgaaaaattttaaataatttctaattgaagtacctatatagga

SEQ ID NO: 814055 - DNA, 120 bp, Artificial Sequence
  ENSG00000287447_16 (sequence is synthesized)
gaaatcaatttaatgtgctacaaagcaaaggtatttaaaaattttatttaaaactgcccatgtgtttatattcagttattttactggtgtttagaccaagcttgactatagtggtaatct

SEQ ID NO: 814056 - DNA, 120 bp, Artificial Sequence
  ENSG00000287447_17 (sequence is synthesized)
tttttgtttcttttcattcaggatgtaaaacatatgctatgaaaactttaaaatctgcaagaatactttatttaaattactcatgttaaaaatcaatacctttagctaataaaaataggg

SEQ ID NO: 814057 - DNA, 87 bp, Artificial Sequence
  ENSG00000287447_18 (sequence is synthesized)
gatacagctataactctagaggagaaggatataaaattttaccagttctggcatgtttaattaattaggagaacagtgtaaaatagt

SEQ ID NO: 814058 - DNA, 120 bp, Artificial Sequence
  ENSG00000287447_19 (sequence is synthesized)
ctggcatgtttaattaattaggagaacagtgtaaaatagttgtctatattccttaggctactgattgctttctacatttggaagatgggggacaagacgggagaggagggagttttattt

SEQ ID NO: 814059 - DNA, 120 bp, Artificial Sequence
  ENSG00000287447_20 (sequence is synthesized)
taaaagtgcgtattaaaacaaaaatgttattaatgtccttagagattacaggtggtgctatagattgaaacatgaatatttaggcttagaatggacactaaaattctaaaaaataaatgg

SEQ ID NO: 814060 - DNA, 120 bp, Artificial Sequence
  ENSG00000287447_21 (sequence is synthesized)
agcaaatctttatattttaaaaagatttcaagctataattatcgattgaaaatgtttacttaattatgttgtcacttgattttcaactagtagccacagctctaatctataaatagagtt

SEQ ID NO: 814061 - DNA, 120 bp, Artificial Sequence
  ENSG00000287447_22 (sequence is synthesized)
aggaatggtagcacatcaatttttctctttcatttttaaatgatcagctgaaatagagaatgaaatgcaatctttaatatagttttaaaagactttaagttacttttgaactacgaacat

SEQ ID NO: 814062 - DNA, 120 bp, Artificial Sequence
  ENSG00000287447_23 (sequence is synthesized)
gtgaaaaattacaaataggatcactgacagtaatttttataagtaaaaaggtacaaattgttgctatttgtgctcttcattcttaatcctttgcttatctttcttttgacctttatccaa

SEQ ID NO: 814063 - DNA, 120 bp, Artificial Sequence
  ENSG00000287447_24 (sequence is synthesized)
atgaatcacactaactcttgaatgctttctctcacttgatttctaaagctgttcatcacacttgctggctagaagcacagctggcaagggatctaagcctcatcactgggcaaacttgcc

SEQ ID NO: 814064 - DNA, 120 bp, Artificial Sequence
  ENSG00000287447_25 (sequence is synthesized)
cttctggttttgccaagaatgacatttccaatggaagaaaaagttactgtatgggacactggatactctatttatttgtgagaaccaatagctccaaccccctttgttagcactacatat

SEQ ID NO: 814065 - DNA, 120 bp, Artificial Sequence
  ENSG00000287446_0 (sequence is synthesized)
atacagcgtcctcattagcgatgtcgtgtacagtgtcctcatagggagctagaagaacacagagttaaggtcagtgccctggtgctggagactgtgaatcacccaggggcttgcttggtg

SEQ ID NO: 814066 - DNA, 120 bp, Artificial Sequence
  ENSG00000287446_1 (sequence is synthesized)
ggtgctggagactgtgaatcacccaggggcttgcttggtgtgatgcatggaggtggctgattacagcatgggtcaagctgatggtgggacatactcccaggtggacctgcactagtgaag

SEQ ID NO: 814067 - DNA, 77 bp, Artificial Sequence
  ENSG00000287446_2 (sequence is synthesized)
ctaagggatgtggctcagaacactttctgctgtgggaatcattttccaggttcagaaaacacgcacagccaagccca

SEQ ID NO: 814068 - DNA, 82 bp, Artificial Sequence
  ENSG00000287446_3 (sequence is synthesized)
aaagaaattaatggagagaggagaaaatttgagaatccacagattgctgtcctgtctcagtatttcctgtgaccacctcctt

SEQ ID NO: 814069 - DNA, 89 bp, Artificial Sequence
  ENSG00000287446_4 (sequence is synthesized)
ccacctcctttttcaactgaagactttgtacctgaaggggttcccaggtttttcacctcagcccttgtcaggactgatcctctcaacta

SEQ ID NO: 814070 - DNA, 74 bp, Artificial Sequence
  ENSG00000287446_5 (sequence is synthesized)
tacatccacacacaccaaggcacctcgctcatgcaaggtgtgtgtcctctaacaaagtttcacactctaaaccc

SEQ ID NO: 814071 - DNA, 120 bp, Artificial Sequence
  ENSG00000287446_6 (sequence is synthesized)
aaggtgtgtgtcctctaacaaagtttcacactctaaacccagataacttttcaaacccaagttctgttgattcccctactttgagtgctccatagatgctcatttgtctactaaacactg

SEQ ID NO: 814072 - DNA, 67 bp, Artificial Sequence
  ENSG00000287446_7 (sequence is synthesized)
atttttatgttaattctgacattgcgttgttagtacaagtgtttttttcagctgtgttgccaagcat

SEQ ID NO: 814073 - DNA, 120 bp, Artificial Sequence
  ENSG00000287449_0 (sequence is synthesized)
atagcaagtgccaatgataagctgcataggcctcttttggcaagactttagtctgtcacccttgggttaagaatgaataagccgggtgtggtggtgcatgcctattgtcacagttactcg

SEQ ID NO: 814074 - DNA, 120 bp, Artificial Sequence
  ENSG00000287449_1 (sequence is synthesized)
aggaggatcacttgagcccaggagttctggactatggtgtgctatgccgatcgggtgtctgcaataagttaggcaccaaatagtgaactcctgggagcatgggactaccaggttacctaa

SEQ ID NO: 814075 - DNA, 120 bp, Artificial Sequence
  ENSG00000287449_2 (sequence is synthesized)
caggttacctaaggaggggtgaattggctcagatcagacatggagcaggtaaaaactgccctgctaatcagtagagggatcgcacctgtgcatagtcactgcatgccagcctgggcagca

SEQ ID NO: 814076 - DNA, 120 bp, Artificial Sequence
  ENSG00000287449_3 (sequence is synthesized)
cagcaacaccccacctccaaaacacgacaagaaaagaacgaataaacaaaaaaaagaagcatggtaacaaatataacttatttttttcaggagccagaggaaaatttcagaaaaattgtg

SEQ ID NO: 814077 - DNA, 120 bp, Artificial Sequence
  ENSG00000287449_4 (sequence is synthesized)
tagtatattaaaagtgatgtaaagaagacatgatttttgaaaaatggagcagaaagcccaaagagaaatcatgcttcaatgaaaatcaagataagatgcagacaagttgagaagaaaagg

SEQ ID NO: 814078 - DNA, 120 bp, Artificial Sequence
  ENSG00000287449_5 (sequence is synthesized)
gatctggagagacaagaaggaaatgcagacatgccctgtcctcttcctcctccctgagccctaggtcctgaggaaagaaaggcagctacagagcagtttctccggccctacatgtggcat

SEQ ID NO: 814079 - DNA, 120 bp, Artificial Sequence
  ENSG00000287449_6 (sequence is synthesized)
ctcttcccacccttggcactgtgcaagatgcatggcacgaccccaggatgcagaaagcataggaataactaagaataaattttatgccaaacctgcagaaaggcactctggatcagaaat

SEQ ID NO: 814080 - DNA, 120 bp, Artificial Sequence
  ENSG00000287449_7 (sequence is synthesized)
gaagttgcattcctgaacttgccattgtcttagaggggctaatgcaatttaaatcagtgattggagaacagaccagaaaacttcccaaatgtggaggacattggacaagaaaactgatta

SEQ ID NO: 814081 - DNA, 120 bp, Artificial Sequence
  ENSG00000287449_8 (sequence is synthesized)
gagaaatgataaatatgaaaaagagaatagtgatccaattataagatattgcaaagctcagaacttggtaaaaatcacctgaacatgcaggcttgttcatggagagattatggatcagaa

SEQ ID NO: 814082 - DNA, 120 bp, Artificial Sequence
  ENSG00000287449_9 (sequence is synthesized)
gcaagagcccaagaggctggaggaggcgcactgctgcaggcttggaggggccgctccagctggctgggggctccccggacctgcgctggctgccgcagcagagcttcggcttgaagggat

SEQ ID NO: 814083 - DNA, 120 bp, Artificial Sequence
  ENSG00000287449_10 (sequence is synthesized)
ccagggcaagtgcgcgggcttcgtggcatcgcgccgagtccttcagcgtcggcgccagctccagccaagcatcctatgcccgcgcggtgcaagaccaggcgggcggcgctcccttcctgc

SEQ ID NO: 814084 - DNA, 120 bp, Artificial Sequence
  ENSG00000287449_11 (sequence is synthesized)
ctctatcacctgccgggcaggtgggagagcaaactcccccttgcgccctagctcccggaaatgtacagagacaagataataagcggtagaagaatagaaataacatcataattaacctag

SEQ ID NO: 814085 - DNA, 120 bp, Artificial Sequence
  ENSG00000225424_0 (sequence is synthesized)
gtacttcatcgttatctactgaaaaaaaaaaagtactgatgtctttatccttggagaggagaggtgtaatcgagatggagaagatgagacaaatggagcacatagaagccacacaacctt

SEQ ID NO: 814086 - DNA, 120 bp, Artificial Sequence
  ENSG00000225424_1 (sequence is synthesized)
gactggtggaaaccaaacatatgactacatcagtctacaaaagcatcatggtattcccacataattcagaagcatgccaggccattcagaatctacagaccagagcaatcatgcaagata

SEQ ID NO: 814087 - DNA, 120 bp, Artificial Sequence
  ENSG00000225424_2 (sequence is synthesized)
atggaagataatgacaaaacaatataatgacaagataatggaagatagtgacaaaaatattctgagcatcattgatttagtcaccctttatttcataaacatcttagaattttcttccca

SEQ ID NO: 814088 - DNA, 120 bp, Artificial Sequence
  ENSG00000287999_0 (sequence is synthesized)
gggcatatgcctcggagactatgttccccaagcagctttgtgagccttgggagaccagctcaggatgaagccttgtcttctgttatccattgctgcctatctacaggtaatattccaaca

SEQ ID NO: 814089 - DNA, 120 bp, Artificial Sequence
  ENSG00000287999_1 (sequence is synthesized)
ttgccacaaggttcgagggtgacacatctcacacatgtacgtgaacaaccaatcatcatgctcatgaactacaaaaggatcaggtttttctccaaaggctaaacagaaatcggtcctttc

SEQ ID NO: 814090 - DNA, 120 bp, Artificial Sequence
  ENSG00000287999_2 (sequence is synthesized)
aaaagacttcaccactgatatcaaccaacctcctgccacttctcctctcttctgtggtttggacacagctgaccagcatttcttcctggtaagagaccaacaaccaccgagactttctag

SEQ ID NO: 814091 - DNA, 120 bp, Artificial Sequence
  ENSG00000287999_3 (sequence is synthesized)
cggaggatgtgcagtgggggttttcatgtcctctgcttcaccttttgacatcagacagctgaaaactccacgctgggatcatgctaatgccaccattgtttgaacatgggacccatgaag

SEQ ID NO: 814092 - DNA, 120 bp, Artificial Sequence
  ENSG00000287999_4 (sequence is synthesized)
gatcaggaagctcagttatgcatgcatgtatgtctcctttcacaaatattcgtgactcctcctgtagcttattgaatatgcatatttttgtcaacctgctcagaattaatctctgtctta

SEQ ID NO: 814093 - DNA, 120 bp, Artificial Sequence
  ENSG00000287999_5 (sequence is synthesized)
ttctcaacctcggagtacctgtttttggctcctagctggagcatatacttcccagcctgtcagaacgaccaccctgcaggctgccatcctttgtgaaaaataaagctgtccttttattta

SEQ ID NO: 814094 - DNA, 120 bp, Artificial Sequence
  ENSG00000287998_0 (sequence is synthesized)
acgcgtaccgccccgttcccccaccgtttccgacccggcagcttctggaaaacagcgcccttgatcctcccgggcaggaagaagggccaaggaaggggttagaagggaaagagttaggat

SEQ ID NO: 814095 - DNA, 120 bp, Artificial Sequence
  ENSG00000287998_1 (sequence is synthesized)
ttcccaagaaccagccctgaaggcctggaggtgggggatttcgcttcttagttggacgggagccccttgggttcctcacttcttagcccgcgccctgcgggaggagcgactctgcttgtc

SEQ ID NO: 814096 - DNA, 120 bp, Artificial Sequence
  ENSG00000287998_2 (sequence is synthesized)
cctcaagatgcttgtgaaggtgcccgctgcgctctgacaccggcgatctcttagaatgaagaccatccctgggcaaaattgcgaagaagtggaaggaaagaagagaaagaagaagaaagg

SEQ ID NO: 814097 - DNA, 120 bp, Artificial Sequence
  ENSG00000287998_3 (sequence is synthesized)
aaggaatatagcaagtgaatcagacaagaggccaaaagaaagatgactttaaaacatcatgggctgtgtatagcaaagacaatcctaagcagaaagaataaagctggaggcatcacgcta

SEQ ID NO: 814098 - DNA, 80 bp, Artificial Sequence
  ENSG00000287998_4 (sequence is synthesized)
atggcactgttttcagaaataaggccacacatctacaagcatctgatctttgacaaatctgacaaaaataagcaattggg

SEQ ID NO: 814099 - DNA, 120 bp, Artificial Sequence
  ENSG00000287998_5 (sequence is synthesized)
atctgatctttgacaaatctgacaaaaataagcaattgggaaaggattccctattcaataaatggtgctggaagagctgcctagccatatgcagaaaattgaaatggaaccccttcctta

SEQ ID NO: 814100 - DNA, 120 bp, Artificial Sequence
  ENSG00000287998_6 (sequence is synthesized)
cgtgttatataaaaattaactcaagatggtttaaagacttaagtgtaaatcccaaaagtacaaaaaccctagaagaaaatctgggcaataccattcaggaaataggaatgggtaaaaatt

SEQ ID NO: 814101 - DNA, 120 bp, Artificial Sequence
  ENSG00000287998_7 (sequence is synthesized)
gcaataccattcaggaaataggaatgggtaaaaatttcatgatgaaaatgtcaaaagcaaatgcaacaaaagcaaatattgacaaatgggatataattaaactgaagagcttctgcacag

SEQ ID NO: 814102 - DNA, 87 bp, Artificial Sequence
  ENSG00000287998_8 (sequence is synthesized)
tacaagaaaaaaacaaacagccccattaaaaagtgagcaaagacataaacagtgagcatatgaagaagagctccacatcactgatca

SEQ ID NO: 814103 - DNA, 120 bp, Artificial Sequence
  ENSG00000287998_9 (sequence is synthesized)
taccaaatcacaccagccagaaaaaaatcaagaaacaacagatgctggcaaagctgtggaaaaataggaatgcttttgcactgttgggaggaaggtaaattagttcaaccattgtggaag

SEQ ID NO: 814104 - DNA, 120 bp, Artificial Sequence
  ENSG00000287998_10 (sequence is synthesized)
tgaacaatgagaacacatggacacagagagaggcacaacatacaccctatggactgtttgggggtgtgtggtgggggaaaggagagcatcaggaaaaatagctaatgcatgctgggatta

SEQ ID NO: 814105 - DNA, 120 bp, Artificial Sequence
  ENSG00000287998_11 (sequence is synthesized)
ggggtgtgtggtgggggaaaggagagcatcaggaaaaatagctaatgcatgctgggattaatacttaggtgattggttgatagatgcagtaagtcaccatggcacacgtttacctatgta

SEQ ID NO: 814106 - DNA, 120 bp, Artificial Sequence
  ENSG00000287998_12 (sequence is synthesized)
taaaatgaaattaaaaagcaacaataaacaaacagaatcatgggctgataatacatcgttaatttttcttagtccacaaataatgtgaaatattattctgaaagtagaagccagttagag

SEQ ID NO: 814107 - DNA, 120 bp, Artificial Sequence
  ENSG00000287998_13 (sequence is synthesized)
tccatgtcatcattttagttaattgctcatttacttaagtattctattcagacattcatacttatagataaaaaagtattttacagcatttgtctagttagtaaatataatagttggaag

SEQ ID NO: 814108 - DNA, 120 bp, Artificial Sequence
  ENSG00000287998_14 (sequence is synthesized)
gggatacttataaaagtataactcccagagtaatttttcagcaacatgaaatgaaatggacttttatccttgtcttatttcaactagaaacatgttgaatcacatcattgtttagggttt

SEQ ID NO: 814109 - DNA, 120 bp, Artificial Sequence
  ENSG00000287998_15 (sequence is synthesized)
tgctttctttaattcttgtaaactaattaagtatcaaacaaaatattatatatatatatggaatgaaagcttttggcatgacgcatttataggtaaggacatcttcagtttttgaaggaa

SEQ ID NO: 814110 - DNA, 120 bp, Artificial Sequence
  ENSG00000287998_16 (sequence is synthesized)
aaggcctgctgatgcttttataaagggacttagagcgttttgttttagtgcacacatacttgctctcaccatgagcctttgtaccattctctaatgccgttgcacatctggatgatgtgg

SEQ ID NO: 814111 - DNA, 120 bp, Artificial Sequence
  ENSG00000287998_17 (sequence is synthesized)
agagtgatgacatattgaggactattttctggctttcctttttatatacccttttttttcttctttaaaaagaaccatgcagatgtaactgtaaaacctttattctaatgagagagccga

SEQ ID NO: 814112 - DNA, 120 bp, Artificial Sequence
  ENSG00000287998_18 (sequence is synthesized)
gagtttgggagaacccacctggaaaatcttattttttatctttcctgctttctttatagggagctcaccaagttcataggttagggagaacttaaatgaaataaagaactaaaagtggcg

SEQ ID NO: 814113 - DNA, 120 bp, Artificial Sequence
  ENSG00000287993_0 (sequence is synthesized)
agggtggaggcaggcacaatgcagacaaaggcaggtgatgatgacattgtaggatttggaagctgatggtagaaatgagaaccaatgacagatgcaagatacatgggaagaaaaatgggc

SEQ ID NO: 814114 - DNA, 120 bp, Artificial Sequence
  ENSG00000287993_1 (sequence is synthesized)
agacgtggtagcatattggagaggaggtgttaaaagtcatccgtgtgctgacttgaacaactgcatggccgaggaaaagtgaagatccctttgtcgttcaccaggcctccaagaactggc

SEQ ID NO: 814115 - DNA, 120 bp, Artificial Sequence
  ENSG00000287993_2 (sequence is synthesized)
cacggagggcagtgacctctcagccttcactttcttctgctcctccctcacccctcagctccagcctcgctggtccccggctcttccttggtggtgccagggatgctccttccttggggc

SEQ ID NO: 814116 - DNA, 120 bp, Artificial Sequence
  ENSG00000287993_3 (sequence is synthesized)
ttgccctggtgtttcctccacctggaatgtgcccctcacagatggctgcaaggccaagccctcctccttcagtctctgctccatcatcagcttcccagtgagcctgccccgaccttctca

SEQ ID NO: 814117 - DNA, 120 bp, Artificial Sequence
  ENSG00000287993_4 (sequence is synthesized)
cacctgctgctgctctccatgtgtgtaagtgccttctgagatggacatagggacataaagacatgtgaaaaatagcctaataaggatccttgtggtaaaatcagatggaaaacagggagg

SEQ ID NO: 814118 - DNA, 120 bp, Artificial Sequence
  ENSG00000287993_5 (sequence is synthesized)
aagagttccaccgtctccagcagctcatttgaagcagctcctcagagtttcacaataataatcagtgctggcccagtgccgccggattattttgtatattcatgaagctgctcatcagcc

SEQ ID NO: 814119 - DNA, 120 bp, Artificial Sequence
  ENSG00000287993_6 (sequence is synthesized)
gtcaggagaatgtgcagtaatccttggatgaaataaggccaatcagtggaataatgaggaaggaaacaatgaagactttcaaatgaacctgaaaaaccatttcagagctttaagatcatg

SEQ ID NO: 814120 - DNA, 120 bp, Artificial Sequence
  ENSG00000287993_7 (sequence is synthesized)
cagtgagtcaaagacggaagtatcttaattattttaataaagtcttatttcctcttcatcatgcccaaaaagcaaaaccaaaagcaagatgaggtgcagtggaaataaatatttaaagca

SEQ ID NO: 814121 - DNA, 120 bp, Artificial Sequence
  ENSG00000287992_0 (sequence is synthesized)
aaaggaaataattgccttaaaagttgtctcacagttctgagaatgacatgaaaccatagcacctccaattggacatgacttgaggcatcaccttgtcatctacctctctaaaggagactt

SEQ ID NO: 814122 - DNA, 120 bp, Artificial Sequence
  ENSG00000287992_1 (sequence is synthesized)
gtttgtttgtttgtttgtttgttttgcattttccaggttttagaggatacttacatttcttggctcatgaccccttccttcactttcaaagttagtcatgattggtcaagtctttctcat

SEQ ID NO: 814123 - DNA, 120 bp, Artificial Sequence
  ENSG00000287992_2 (sequence is synthesized)
tagtcatgattggtcaagtctttctcatactgcaccactctgacacttcgtgtttgtagtcaaatagtccctctcctttcctctaataaccattgtgattacattgggcctatccggata

SEQ ID NO: 814124 - DNA, 77 bp, Artificial Sequence
  ENSG00000287992_3 (sequence is synthesized)
ctctaataaccattgtgattacattgggcctatccggataatacaggctaatctccctgtgatggttaatatcgagt

SEQ ID NO: 814125 - DNA, 120 bp, Artificial Sequence
  ENSG00000287992_4 (sequence is synthesized)
gtcagtggactgggagagacaggctcaccctcaatctgggtgggcaccacctaatcagctgccagagtggctagaataaagcaggcaggaaaagatggaagagcagacttgctgagcctt

SEQ ID NO: 814126 - DNA, 90 bp, Artificial Sequence
  ENSG00000287992_5 (sequence is synthesized)
tcttgaacatcagacttcaagttcttcagctgttggactttcggacttaccccagtggtttgcttgccacagactgaaggctgcactgtt

SEQ ID NO: 814127 - DNA, 120 bp, Artificial Sequence
  ENSG00000287992_6 (sequence is synthesized)
acggcctatcgtgggactttaccttgtgactgttgaatgaaagagatcaagagaactgaatctctaagccactacccatcttcatacagggtggaagaatatacaagacagaagatctca

SEQ ID NO: 814128 - DNA, 120 bp, Artificial Sequence
  ENSG00000287992_7 (sequence is synthesized)
tttaactgaaaatttaacttcgactttaatattcctagagtttttctacacatgaaatattagaaaacatgctaccttgtatgtgataaaatttaaaaatgacatgctgcatgtttaata

SEQ ID NO: 814129 - DNA, 120 bp, Artificial Sequence
  ENSG00000287992_8 (sequence is synthesized)
ttgaatttatactcatattgcatattcatgattcattacacaaatttatattttacaggtatataacagacagagtcaatgagaattactggccataaaaataatttatagagtaaaagg

SEQ ID NO: 814130 - DNA, 120 bp, Artificial Sequence
  ENSG00000287992_9 (sequence is synthesized)
caaagtatattgttagtaccggggaagagcatgcatgtgaatcaagttgcagtgcttattacttgtatgaaccttgggcaagttatttaaactttgttattcagtgttctcgtctgcaaa

SEQ ID NO: 814131 - DNA, 120 bp, Artificial Sequence
  ENSG00000287992_10 (sequence is synthesized)
ctgggtataataagtagcgtcaacttcacgggattgctatgaagattaataaattaacatttataaagtattgaaataaggcctagcatataataagatatagattagtgtttgttaaat

SEQ ID NO: 814132 - DNA, 120 bp, Artificial Sequence
  ENSG00000287991_0 (sequence is synthesized)
actcacacctgcctctcctaactgcctcttaaacctgccaatccccatgctggtgagaggaagatgaggatgcaggtccttggcccttggccacggcccacttgctccctctgcctcagc

SEQ ID NO: 814133 - DNA, 120 bp, Artificial Sequence
  ENSG00000287991_1 (sequence is synthesized)
cggcttccctctgggccccccgatgtcattggtcatgggctttttccttctcaggctgacccagtgtgtaaatcagtcttcccatgtggtcaattctcaagacgatgatcagcaaagtta

SEQ ID NO: 814134 - DNA, 120 bp, Artificial Sequence
  ENSG00000287991_2 (sequence is synthesized)
gagacccaaggatttaacaaaagaaagagaggaaaaagcctcagctggaaaaatggtttagtgagctttccacactggtctaggggcccatgacatttttgctctgtcctgatggtgaga

SEQ ID NO: 814135 - DNA, 120 bp, Artificial Sequence
  ENSG00000287991_3 (sequence is synthesized)
ttccactctaaaacaaacccaacagggtcagggctgtttactcaaatatttcccccccaaaaccgagttgtgaaaactgtcaacctcaccaacgttggggacacggatttgcctccagcg

SEQ ID NO: 814136 - DNA, 120 bp, Artificial Sequence
  ENSG00000287991_4 (sequence is synthesized)
tgagaagcgagtcccctgcctttgcactggggaccaatcagaagacaagacaagccatggggtgcgggcgcccatggtatctggccatctgggggcccccgcttctctcggccggctgtg

SEQ ID NO: 814137 - DNA, 120 bp, Artificial Sequence
  ENSG00000287991_5 (sequence is synthesized)
gaggcaagggagattttttttccagagcttggtggggctccatatggtcgagatcaaaggtgttgctgggtgcatggttctgctttatttccaagcactgctgttaattagaaaacaaga

SEQ ID NO: 814138 - DNA, 120 bp, Artificial Sequence
  ENSG00000287991_6 (sequence is synthesized)
ccatgcaaatttcggtggctggcttttgtttttttcccccacactctggaatgaatgatgaggctatgaagtttttcttcattgtaaaaaacaaacaagttaatgcattgatctaggggg

SEQ ID NO: 814139 - DNA, 120 bp, Artificial Sequence
  ENSG00000287991_7 (sequence is synthesized)
tattgccctggtgattgatgaaaatgagagagaaatagtaaagtgtgactttttgaagggagggagtaaagattcttctactcttcctcttttttctctccttggttccacacccatttc

SEQ ID NO: 814140 - DNA, 120 bp, Artificial Sequence
  ENSG00000287991_8 (sequence is synthesized)
ttatgcacagtggcaggcctcgctttctgttgacattccattgttaatgatccagagaaagttcctctggatttcaaggatggattgaaaacaaattttggaagtttgaagacaaacatc

SEQ ID NO: 814141 - DNA, 79 bp, Artificial Sequence
  ENSG00000287991_9 (sequence is synthesized)
tggattgaaaacaaattttggaagtttgaagacaaacatcacagataaaaaaggatctgtgtgcaggttctcactctgc

SEQ ID NO: 814142 - DNA, 84 bp, Artificial Sequence
  ENSG00000287991_10 (sequence is synthesized)
tggctgcgtggcccagtctggtctcaaattcatgagctcaagtgatctgcctgccccagcctgccaaagtgctgagattacagg

SEQ ID NO: 814143 - DNA, 120 bp, Artificial Sequence
  ENSG00000287991_11 (sequence is synthesized)
caggcatgagccaccacacctggcctgaagtatctctcttaattctccccatgaacctctgagataggttttattattcccattttgcaggtgggaaaatgagactttaaaaatttggta

SEQ ID NO: 814144 - DNA, 120 bp, Artificial Sequence
  ENSG00000287991_12 (sequence is synthesized)
ttgcaggtgggaaaatgagactttaaaaatttggtaactttctctgttacaatctccctttgaatcctgcacatttccttcatagcctttaccacagagtaaataaatatttttgtagta

SEQ ID NO: 814145 - DNA, 120 bp, Artificial Sequence
  ENSG00000287990_0 (sequence is synthesized)
agagcacatttctcaactgcaagctgctgggtgcctcaggctgccagagaaaacagagctcccccatcctgctgaagggaatgaaaaggaactctgtccacaatgcacatttggtaacac

SEQ ID NO: 814146 - DNA, 120 bp, Artificial Sequence
  ENSG00000287990_1 (sequence is synthesized)
ccatacctggatctgctggaccatgttgcgcagctgtaccagaaactccttggcttctttggccctgtctgacagtccgttcagcgcctgggagagctggctctgcaaagacaaagaagg

SEQ ID NO: 814147 - DNA, 120 bp, Artificial Sequence
  ENSG00000287990_2 (sequence is synthesized)
aagccatggagctgtaatcacaggatacaccaacaaggccagcgagactcaaaactgaagagtcatcaacctcctcagattcctcttgtctgaggttggacctttttgctggcatttgta

SEQ ID NO: 814148 - DNA, 120 bp, Artificial Sequence
  ENSG00000287990_3 (sequence is synthesized)
caggttactgaaaaggtgtcacgatctgaaggtgaatgagaggagaaaaatgatgcagctgaagccctgatctccagtcaagttgttcttggctgggagcatgctgagaatcaccgaggt

SEQ ID NO: 814149 - DNA, 120 bp, Artificial Sequence
  ENSG00000287990_4 (sequence is synthesized)
ctcccagaaagatgacaagttgttcaagcctgaaggagagaaacaaagaactctgcctcctccttccctccttgcgtggctttcgtcctcagcttccaccctgaccctggctccccttgc

SEQ ID NO: 814150 - DNA, 120 bp, Artificial Sequence
  ENSG00000287990_5 (sequence is synthesized)
ctccccaggagggagagatcaggcacttaccctgggactgactgtggaggacgtttcaggacctacttctcacgctcagcaaatgggtaatgcaattcaatccatcccgcccaatgcctg

SEQ ID NO: 814151 - DNA, 120 bp, Artificial Sequence
  ENSG00000287990_6 (sequence is synthesized)
acttgcccaagctgctgagtgtgcccaggcagaagacagtatcttctttccatttcccactgtaaacattcttcacgtggccttttcccctcaattcaccacaaatattggatagcgata

SEQ ID NO: 814152 - DNA, 120 bp, Artificial Sequence
  ENSG00000287990_7 (sequence is synthesized)
aactgggacaaatgaaaagaagctttctggctgtctcggatctgaagttacaggcacaggatgggtcaaaagggtcactcgaagagttggtacaaaacagaggaggcggcaaacaagcac

SEQ ID NO: 814153 - DNA, 120 bp, Artificial Sequence
  ENSG00000287990_8 (sequence is synthesized)
tggcagcttgatggctcagaaaatgacccagctgcctccccgggcgtggggcaccttctggtgctgtatcacagtgcatgccattcaggcaccgcaacaccactgggcccaggagccaaa

SEQ ID NO: 814154 - DNA, 120 bp, Artificial Sequence
  ENSG00000287990_9 (sequence is synthesized)
gcccactcccgctccttcccaggtacaaagataaacacaacactcaggaaaaaagtgatcattgatgcaatgggactttgagggaaggccgccaaggagaataacagtttttctgatgaa

SEQ ID NO: 814155 - DNA, 120 bp, Artificial Sequence
  ENSG00000287990_10 (sequence is synthesized)
atattgatctctgggtcacattgctcagcaattacccattgccggttactcagtacattgctgacatagtacaatcaaaaagtgtaagcaagaaattctaataattgtaagcaagaaatt

SEQ ID NO: 814156 - DNA, 120 bp, Artificial Sequence
  ENSG00000287990_11 (sequence is synthesized)
ggtgctttcaatgcaatcccaatcacctccctgccattttgcagaggtgccgagaggatacccctgagtgaaggtttcaccactcacatacggaacagctggaacacaaaccctcatctg

SEQ ID NO: 814157 - DNA, 120 bp, Artificial Sequence
  ENSG00000287990_12 (sequence is synthesized)
atggcaaactcatgctctttgctccagcctcccaaaaaaagagaattctctcaccctcacaggccaaaacaattgtttaattgtttaatccacggtgagagcatgtacaaccagagaagg

SEQ ID NO: 814158 - DNA, 120 bp, Artificial Sequence
  ENSG00000287990_13 (sequence is synthesized)
tgagaggatgactatgattgattatgaggtggtctgattatgcttagcagccagatagtatgtaaattacagcatgactagttaacctatgaaacattcaacttttttcctgcatgaagt

SEQ ID NO: 814159 - DNA, 120 bp, Artificial Sequence
  ENSG00000287990_14 (sequence is synthesized)
tttctggtgaatttgaaaaagtcccctaagagaggagtctcatggaggagggaagaagctttggattcaggtccactgacaactttgtcaactactggcctaagatcttgggcagagatt

SEQ ID NO: 814160 - DNA, 120 bp, Artificial Sequence
  ENSG00000287990_15 (sequence is synthesized)
gggtgaagtgggaattaagtaaaggaaggagacctcacagagtgactggtacttggggaaccatcaagctgagctgtccaagggtcctgattccccctctaggaaacatttctattcctc

SEQ ID NO: 814161 - DNA, 120 bp, Artificial Sequence
  ENSG00000287990_16 (sequence is synthesized)
ctgcttgcacctttagtgcctgcaagaatggatcccttctccggtttctctggtgctggaagatcctggatataccccaaccccagttcactatagtcagatggacaggaatcctccaag

SEQ ID NO: 814162 - DNA, 120 bp, Artificial Sequence
  ENSG00000287990_17 (sequence is synthesized)
accagctggtctgcagatgccaatttatctctaagcccagcaaagggctggcgcagtgaacaggctatgatttgcaaaagagtagctgggcctgggaatggaagcacacagtatagggac

SEQ ID NO: 814163 - DNA, 120 bp, Artificial Sequence
  ENSG00000287990_18 (sequence is synthesized)
aaaggatgtgtgtgtgtgtatgagtgtgcatatggtgtgtgtgtgtatgagtgtgcatatgcctgtgagtgtgtgaaagtctatgtgtatgtgggtaagaatgtgagtttaagagtgtgt

SEQ ID NO: 814164 - DNA, 120 bp, Artificial Sequence
  ENSG00000287990_19 (sequence is synthesized)
aagtatgtaagaatgtgtatgtgtatgtatgtgattgtatgtgagatatgtcatcagtggagtatggggaggctcttggctttgggggaggctcttggctttgagcaaggctggtatcag

SEQ ID NO: 814165 - DNA, 120 bp, Artificial Sequence
  ENSG00000287990_20 (sequence is synthesized)
ggctttgagcaaggctggtatcagaggaatcttatgggtagggatttgctccattaaactgctgcttattgttaattggttataagaaagattcgaggccgggcgtggtggctcatgctt

SEQ ID NO: 814166 - DNA, 120 bp, Artificial Sequence
  ENSG00000287997_0 (sequence is synthesized)
gtgtgatagcaaatgtggcttctgcaccagacacgtgccaactgccatccagataccaggccccgggctgccaggatggagactgtcacttcccttggcaagggacccactgccgggtgg

SEQ ID NO: 814167 - DNA, 120 bp, Artificial Sequence
  ENSG00000287997_1 (sequence is synthesized)
gcagggtattaagactcagtggacttctgaaacaatcaccaccctagcctatggcctgtttacagtctttagtttgggacaggccacagcctgatgccaagcatgtggtaaagcagtctc

SEQ ID NO: 814168 - DNA, 120 bp, Artificial Sequence
  ENSG00000287997_2 (sequence is synthesized)
gatgccacctgtcctgaaggctgttccatcgtaagagccctggaggagccgccaccctcagtcccacaccatctcctggacccactccaagctgttttcagaagcacgtcctactcaatc

SEQ ID NO: 814169 - DNA, 120 bp, Artificial Sequence
  ENSG00000287997_3 (sequence is synthesized)
agaaactcaaaagtccggagtgtgatcccgctctacccccgactctcctccctgcagcaccgagaaggaccatcgcaagggtgaggcacatgggaatacaaagaaccagtatggaagcgc

SEQ ID NO: 814170 - DNA, 120 bp, Artificial Sequence
  ENSG00000287997_4 (sequence is synthesized)
agaggtaccgaaggtcacacagccacgggggctgccccatccacggcttcatacgccatctcaaacaaagatgtggaaactgcatatccagctaaacccacaggccaagggggctttgtc

SEQ ID NO: 814171 - DNA, 120 bp, Artificial Sequence
  ENSG00000287997_5 (sequence is synthesized)
tgtctttccacagacccctgccctctctgtacagtcctcccgtgccctcatgagcacctcctggtggggaggaggcctctaccgctttcccgcagaagctggagctgtgaactcaccggt

SEQ ID NO: 814172 - DNA, 120 bp, Artificial Sequence
  ENSG00000287997_6 (sequence is synthesized)
gtagacaaagcgcccaggagcacctttgcagaactgcttggatttgtaggagagggtcacttcgacgacgccaggaatgtgcctcggcggggtctggactcggatggcatggggagttat

SEQ ID NO: 814173 - DNA, 120 bp, Artificial Sequence
  ENSG00000287997_7 (sequence is synthesized)
cagctacaaaaaccacacggtgaacaggcgctcagcggcgctggctatgagaggcggacacttgccagttggatataattaccaaaatgagcacaaattggaccatcgtcttggaatgcc

SEQ ID NO: 814174 - DNA, 120 bp, Artificial Sequence
  ENSG00000287996_0 (sequence is synthesized)
acttcccacctgactcacccttggcaggtgtggtattcatgctgatagtgcatgctgagtgcagccttctgggccaagtgggcagaacaagccctgtggacccaagccaaactagcgcaa

SEQ ID NO: 814175 - DNA, 120 bp, Artificial Sequence
  ENSG00000287996_1 (sequence is synthesized)
aagccctgtggacccaagccaaactagcgcaaaggtgccactggccatggaggtttctggctggaaaagtaaaaccctaaggaccctatgacaatggcatctcattgtggttttgatttg

SEQ ID NO: 814176 - DNA, 120 bp, Artificial Sequence
  ENSG00000287996_2 (sequence is synthesized)
ttttatatgttctctgactccttgtatgttttcctttgagaatgtttgttcatattctttgcccattttttaatggggtaaattgatttttgcttggtgatttttttaagtttcttatag

SEQ ID NO: 814177 - DNA, 120 bp, Artificial Sequence
  ENSG00000287996_3 (sequence is synthesized)
attctaaatattagcaaagtctaacttttgattggtagaaaaaccaagaagctgcgctgaaaccagggattttagtagttagccatccaaagcaaataacagtaaatcctgttcaaaagt

SEQ ID NO: 814178 - DNA, 120 bp, Artificial Sequence
  ENSG00000287996_4 (sequence is synthesized)
ctgaggaatcactgagaatttgcatattatggagtctacagatttcactgaatcagatgactgagttgaacttgagatgtgatccaaaaaagaaagcttctgtaaaattcctgaaagctc

SEQ ID NO: 814179 - DNA, 120 bp, Artificial Sequence
  ENSG00000287996_5 (sequence is synthesized)
tttggcagcgcatttcactgtagtgggcatctacacatctgagaaaattttgataatgggaacatgaaaggggatgatagagaaacaatgacactcagcagaagtaaaagctcttaacac

SEQ ID NO: 814180 - DNA, 120 bp, Artificial Sequence
  ENSG00000287996_6 (sequence is synthesized)
ctctcatttcagctttatgaagtgaaaagtacaatacatactcccaagatcattctgtcctttactggtaaacgacacttggtgccaataaatctatggagaaattatcaacttttgttc

SEQ ID NO: 814181 - DNA, 120 bp, Artificial Sequence
  ENSG00000287996_7 (sequence is synthesized)
ctacatcatacaaaaatatagatttccccataatgtgacaatcgtattttttcaaaaaaaaattaatgatgcattgcatggtagcaattagacctagaaaagacaacgtgaacttggtga

SEQ ID NO: 814182 - DNA, 120 bp, Artificial Sequence
  ENSG00000287996_8 (sequence is synthesized)
aatacaaggaacaagatgacacaaacaaatccttttgaatatttggtgtatattctacccaataaacacacatatcctcccctatcttatttgttcaattcccttctctccctcagttga

SEQ ID NO: 814183 - DNA, 120 bp, Artificial Sequence
  ENSG00000287996_9 (sequence is synthesized)
agcaattgaaaggaaaatcttattcttagccactatttagcattctcagtaattattcacattagtttctgcttagtatctgaagcttacattccccagatgattatttcttgctgctta

SEQ ID NO: 814184 - DNA, 120 bp, Artificial Sequence
  ENSG00000287996_10 (sequence is synthesized)
tgataagatataaactgggttcacatgaacaagaattattatttaataaatacttaatctgtttaaataaacctatatttttatcagtaacatctctcaaaaatattgtttggaaagaga

SEQ ID NO: 814185 - DNA, 120 bp, Artificial Sequence
  ENSG00000287996_11 (sequence is synthesized)
tcaccactctggggtgaagagaagggtggagatttaaatattaaatctcctatgacataattctaatatattttgatagaggcatgccctactgttgtgagtgttactttatgaataaac

SEQ ID NO: 814186 - DNA, 120 bp, Artificial Sequence
  ENSG00000287996_12 (sequence is synthesized)
tgggacccaaagagatttggtaatcaaatagtcaataaatgtaatattccatgtatatgtgaaattgtataattgagcttcaaacctattaaaaactaaagtgttcatttatattcataa

SEQ ID NO: 814187 - DNA, 120 bp, Artificial Sequence
  ENSG00000287996_13 (sequence is synthesized)
ttagggcatgaaatatggaacataagagaatttgttctttggtggtgtgtgtcttcatccattcagactgctatataacaaaacaccataaactgggcagcttacaaataacagaaattt

SEQ ID NO: 814188 - DNA, 120 bp, Artificial Sequence
  ENSG00000287996_14 (sequence is synthesized)
gtttcttacagttctggatactgcgaggtccatgctcaaggtgccggcagactctgtctggcaagggctcactttctggttcatagatgctgtcttctaattgggttttcacatggtgga

SEQ ID NO: 814189 - DNA, 120 bp, Artificial Sequence
  ENSG00000287996_15 (sequence is synthesized)
atagggtcaaggcagctctctggggccccgtttataagggcactaatcccatgtcagaatgatttcctaacaaccccacctcctaatgccatctcatttgtgactaaatttatacatgtg

SEQ ID NO: 814190 - DNA, 120 bp, Artificial Sequence
  ENSG00000287996_16 (sequence is synthesized)
ataggaacaagagatgtttcaaagcagctctccacaatcaacagccatgcattctctcttcacatatctgacttttaacctctcagagacatgttttctcatagaagaataaagttttct

SEQ ID NO: 814191 - DNA, 120 bp, Artificial Sequence
  ENSG00000287996_17 (sequence is synthesized)
atggtagctgaaacttttctctgcgtgtctcagctcaggttatgttgcctaatttaaatcacgagaaatatgacctcagctcatgccttctatagaacaagttagcacaccaagaacaca

SEQ ID NO: 814192 - DNA, 120 bp, Artificial Sequence
  ENSG00000287996_18 (sequence is synthesized)
ttcccttctgctgtatctcttatgccctgactatgaatataaatgagcacagcttgtgtttaaatgcattttacatcctattataaatatcacacacatttgaaatgtagcattcatgga

SEQ ID NO: 814193 - DNA, 120 bp, Artificial Sequence
  ENSG00000287996_19 (sequence is synthesized)
ctatttgatcatcaaacactctggatttcagtctatttataaattacacccattactgtggaacatgtcattagtaaaacatattagaatgataagatgagagatgcattctttactatt

SEQ ID NO: 814194 - DNA, 120 bp, Artificial Sequence
  ENSG00000287996_20 (sequence is synthesized)
gcatgcctcctctgccctccctgtggtggtagtctctttccacataatcattttctttaacagatgttactgttagtagtttgcagatgtaaattatgttgaaacattaacatctttgga

SEQ ID NO: 814195 - DNA, 120 bp, Artificial Sequence
  ENSG00000287996_21 (sequence is synthesized)
atcttggactaatgtccctgactctgtgaaataatctatgttaataataaactccttcataagtctagtaccaccacagaattcttcccatacatttccttctcttgactaccctgacca

SEQ ID NO: 814196 - DNA, 120 bp, Artificial Sequence
  ENSG00000287996_22 (sequence is synthesized)
ccatgcctagcctggttctctcccaccatgcatcatgtcagattctaagaaaattttctcagacttcaagaatcactgagtttcctctatcacgttttcctcataggatctttatccttt

SEQ ID NO: 814197 - DNA, 120 bp, Artificial Sequence
  ENSG00000287996_23 (sequence is synthesized)
tctttacattatttattttatccagtgtttttgtttgcttatgtattttcaaattaattgaaaaacctaaaagaacacaagcaaacgattaagtatgttttgggttctgttgtacttgtt

SEQ ID NO: 814198 - DNA, 120 bp, Artificial Sequence
  ENSG00000287996_24 (sequence is synthesized)
tgtagagttcagtgtttttctgggagctcaacatatgagtacattttacctaatttagaacacaatcttatccttgattcagagataagattatataaacaaataggacaaaaggagctg

SEQ ID NO: 814199 - DNA, 120 bp, Artificial Sequence
  ENSG00000287996_25 (sequence is synthesized)
ctattaaaaagttcaagatttgatgtccctctaaggggacacagcaataaagacaatttacagcatgtacttttcaccaaaacattttttagttgacatttttctgcaaaactacacatt

SEQ ID NO: 814200 - DNA, 120 bp, Artificial Sequence
  ENSG00000287996_26 (sequence is synthesized)
tatttgtactcttttggacaaccttgagttgaaaatttcaaagtaaaaagagccaacttgtagctactaaaaagtggaggaggacttcgctaccaatttagctttggtgatggccataag

SEQ ID NO: 814201 - DNA, 120 bp, Artificial Sequence
  ENSG00000287996_27 (sequence is synthesized)
ttagcttgagagatggaagaataaggtgattcagcagagggctttttctgcaactaccccttcttagatagcctttctactctacttcagtagcatgcccaattgccctccaccaaacat

SEQ ID NO: 814202 - DNA, 120 bp, Artificial Sequence
  ENSG00000287996_28 (sequence is synthesized)
aaggcccaagaaaaatcatcccaattcacaatgcctcaaaacacatattttaatataggatatgctgtttctatactgtgtctcagaatgtactcttgcattatatttgctactgataaa

SEQ ID NO: 814203 - DNA, 120 bp, Artificial Sequence
  ENSG00000287996_29 (sequence is synthesized)
atagcaccctcaatgtatacaaagacaaaacacttgaatactatccagttattatggctgttctgttgatgaatttcagcttcactcctgtggctataaactttcagtgcctcatagttt

SEQ ID NO: 814204 - DNA, 120 bp, Artificial Sequence
  ENSG00000287996_30 (sequence is synthesized)
taacagagaaacaatggcctgagtcaaactattattttttttcagaaataacatataaggcatattaaatatttatcttgtcaccataaaataacaaccaagaatttaaaacaatacaaa

SEQ ID NO: 814205 - DNA, 120 bp, Artificial Sequence
  ENSG00000287996_31 (sequence is synthesized)
ttacttttttagacagaagactgcaaacacaatatgtctcaaaatattttacaacactattagtaactgatcaggagtctttatatcttatcatctaatggcctttaataacaatgcaca

SEQ ID NO: 814206 - DNA, 120 bp, Artificial Sequence
  ENSG00000287996_32 (sequence is synthesized)
taattgatcaagcattgaagattcaattacttttcagacagatatgcatgtgacaaccatacgtttatttgattttccttcagagagaaatggcattttgaaactcaaatattcatatat

SEQ ID NO: 814207 - DNA, 120 bp, Artificial Sequence
  ENSG00000287996_33 (sequence is synthesized)
ccattctgagcccatgaaaaccctggactgagccacgttatcggggctgcctgcctatggatagaatctactcacttctgctgacagctgttctgccattcaataaaactcctccacctt

SEQ ID NO: 814208 - DNA, 120 bp, Artificial Sequence
  ENSG00000287996_34 (sequence is synthesized)
gctcactcttcaattgtccgggtaacctcattcttcctgggagggacaagaactcaggacccagatgaatggcgaatgtaaaaaggagtgtaacacgttcttggcaggttcgctgctggg

SEQ ID NO: 814209 - DNA, 120 bp, Artificial Sequence
  ENSG00000287996_35 (sequence is synthesized)
agtgatgccatgctcctgtttattggaccgcaggagtgaagagcagtgacacttctgggggcccagacctgtacctctatcaccctcccgtcctctgccagtaatcaggcggccacccca

SEQ ID NO: 814210 - DNA, 120 bp, Artificial Sequence
  ENSG00000287996_36 (sequence is synthesized)
tgtgatggaaagtggcgacagggctaggccagcccgagcgccaagggctggtgggaagtggcagcactaaacgagctgaaacaggctctccgccattcactgggctgtgggtaatgggaa

SEQ ID NO: 814211 - DNA, 120 bp, Artificial Sequence
  ENSG00000287996_37 (sequence is synthesized)
caagagagctgtagagcaccccccaccttggggctccagggttgctggtatctctttctcgggaaccaccacattctcttcgtccaaatgctgccacccacaatgaaagctgcttgtggt

SEQ ID NO: 814212 - DNA, 120 bp, Artificial Sequence
  ENSG00000287996_38 (sequence is synthesized)
gccaatgcctgtgccaacacctggagctgcccgccccaccacagcagccagcacgcccggctgtgtgcagtggctggcccctgcactcacttgctcacacacccctcacccctctgagcc

SEQ ID NO: 814213 - DNA, 120 bp, Artificial Sequence
  ENSG00000287996_39 (sequence is synthesized)
tggcttgccctcagcaggcatgggatctaggccagtagcacgagccaagtgcagcctgctgggctgagtgggtgaaatgagcccagcaggcacgagtaaaactcaagcagaggtgccgcc

SEQ ID NO: 814214 - DNA, 120 bp, Artificial Sequence
  ENSG00000287996_40 (sequence is synthesized)
agccacaggagtttctggctggtgaagtgacacccaaaagatcctgtgacagaggcgtctatgataaacacattcccagcagtaggaatcacatttttcaaaaatatggcattatgaagg

SEQ ID NO: 814215 - DNA, 120 bp, Artificial Sequence
  ENSG00000287996_41 (sequence is synthesized)
tttatgacaatttcaaactaaaataaggtaaatgtaaagaagtgtgtgaggcatgttgagagaagaaatcttagagataggtgagatggagaacatgacaaatcttcaatattttggttt

SEQ ID NO: 814216 - DNA, 120 bp, Artificial Sequence
  ENSG00000287996_42 (sequence is synthesized)
ttactttacaaagatttttgaactgttaaaggtgtacaattgatattaatggattttaaaatgattttctgtatacagtatgtaaagtaatttaaaagagggaagaaatagatgtgagat

SEQ ID NO: 814217 - DNA, 120 bp, Artificial Sequence
  ENSG00000287996_43 (sequence is synthesized)
acctgttgcaatagtccttgagagagattatgataattttgactaagacaatgataatgggcagtcgatgtcactaaaataatagaaatattaaagaagtgaaaacaacaggatttgttt

SEQ ID NO: 814218 - DNA, 120 bp, Artificial Sequence
  ENSG00000287996_44 (sequence is synthesized)
agaattggtgacgtaggtgaggaataatgtgtcaagactttatttctattttgcacaatcaaataattgttacttttattaagaatgttatttgaaaggtataatcatgatttttcaaac

SEQ ID NO: 814219 - DNA, 120 bp, Artificial Sequence
  ENSG00000287996_45 (sequence is synthesized)
aaatttaaaagaaacacatgccaaagcttttaatattacaagctggtttattttattgtaggtattaggagaactttgaagaagttacaactacctgtagcttaaaggtgcataacaaat

SEQ ID NO: 814220 - DNA, 120 bp, Artificial Sequence
  ENSG00000287996_46 (sequence is synthesized)
atataggcaatcaggaatggaatgctgaaatgaatttgttcaatggatgtaaaagtggtttatttcatagtaaggaatggaaatcaactgagtttctaccagacaaaatttattaatgac

SEQ ID NO: 814221 - DNA, 120 bp, Artificial Sequence
  ENSG00000287996_47 (sequence is synthesized)
tatggataaaaataatgttaattgctcccagtcatctattacttagagagttgtcaatagctcaaagacaaggaaatgcaataaaatgccataaaattcacagaattcacagatagatat

SEQ ID NO: 814222 - DNA, 120 bp, Artificial Sequence
  ENSG00000287996_48 (sequence is synthesized)
gcgctgaaaccagggattttagtagttagccatccaaagcaaataacagtaaatcctgttcaaaagtctgaggaatcactgagaatttgcatattatggcaaacactttgcaattcttga

SEQ ID NO: 814223 - DNA, 120 bp, Artificial Sequence
  ENSG00000287996_49 (sequence is synthesized)
aggaatgggtgctttctgtatctcaaggtattaatctatgtattcatgttgttacacattgtataacaattccttgtccatctcttcccacagtttgtaagctctttcagaaaagggact

SEQ ID NO: 814224 - DNA, 120 bp, Artificial Sequence
  ENSG00000287996_50 (sequence is synthesized)
gtctttgttgcttttatagcatgagtacgtggcatatcacagcagttattattataaacattattcattaatttagtgaattaattttcaattgaatacaaataaatattttaaattagg

SEQ ID NO: 814225 - DNA, 120 bp, Artificial Sequence
  ENSG00000287996_51 (sequence is synthesized)
aacattattgctagatttatatgctctactaaaatagttgtagtaactgtccagattacaggaagaatactgaggccttctctagaacataaatttgtgcattcattatgacaattgggc

SEQ ID NO: 814226 - DNA, 120 bp, Artificial Sequence
  ENSG00000287996_52 (sequence is synthesized)
ccttcttactcatggtactaattaaaacactattacgtgtacttggcattgagctcttatcaagaactaattttctttttgaaaattagtagaaacagaagaaaacagtagaaaacagaa

SEQ ID NO: 814227 - DNA, 120 bp, Artificial Sequence
  ENSG00000287996_53 (sequence is synthesized)
gaaaatatcagtcttaaaaactgattaaatcttaatgcacaattatcaaattatttgaataaaacaaacaactataaggaatgaaaagaaagtacacttggaagagggctaagcgggcaa

SEQ ID NO: 814228 - DNA, 120 bp, Artificial Sequence
  ENSG00000287996_54 (sequence is synthesized)
cttgaaagacaagtacatgatttgaccttttgacttggagttttatatgttggcatgattccagggtcttgtgttctttctcccctgattcttccctttgggtgggctgccgacatgggt

SEQ ID NO: 814229 - DNA, 120 bp, Artificial Sequence
  ENSG00000287996_55 (sequence is synthesized)
agtggcctgctggcacttggaagaggagcatgctcagtgtgtttactggatttgtatgcttgttcacttcaggcatccttcccttaccagctgaatgtccctaggagatcatataccagt

SEQ ID NO: 814230 - DNA, 120 bp, Artificial Sequence
  ENSG00000287996_56 (sequence is synthesized)
taaatgccaccattttgcctcctagtgtgcatgtgtgagcccactcacccaactcctgacatcttactggcaaactgctgatgaccagcttctggtgtttctgtttgctggagtactggc

SEQ ID NO: 814231 - DNA, 120 bp, Artificial Sequence
  ENSG00000287996_57 (sequence is synthesized)
tttctctggtgctggctgtgactagttattattttagagagacagttaacaatagcctgaccatcagttgttggtcgcctgatattcctggtgtgtttgtggttgggggagccctcttct

SEQ ID NO: 814232 - DNA, 120 bp, Artificial Sequence
  ENSG00000287996_58 (sequence is synthesized)
gctctgctcatgtctgactagcaacttactgtatcatttttatgctatgaagatagcttcttctcctgaacctcctgaactatctgtttcaaacttctgcagcttcctcacctctctcag

SEQ ID NO: 814233 - DNA, 120 bp, Artificial Sequence
  ENSG00000287996_59 (sequence is synthesized)
tgttcatggaattgaacagagttctggccttgctctagattagactttggcttaagagagttctggccttgctctagaatgttgtggctggtttggtcctctatccagactactacaact

SEQ ID NO: 814234 - DNA, 120 bp, Artificial Sequence
  ENSG00000287996_60 (sequence is synthesized)
ttctccatatcagcaataagtctattttgcttacttatttgtgagttcattgcagtagtactttattttctttaagaactttttctttgtattcacaatttggctaactattggttcaaa

SEQ ID NO: 814235 - DNA, 120 bp, Artificial Sequence
  ENSG00000287996_61 (sequence is synthesized)
tctttcacttgaacactagaagcaattgtagggtaattaactgacccaatttcaatagtgttgtacctcaaagaataaaggggcctgaggagaaggagagagataggggaatggccagtt

SEQ ID NO: 814236 - DNA, 120 bp, Artificial Sequence
  ENSG00000287996_62 (sequence is synthesized)
agtgggacagtcagaagacacacatttatcaattaagctttctgtcctatatgaatgcagttcatagcatgccacaacaattacaatagcatcatcaaaggtcactgatcacagaccatc

SEQ ID NO: 814237 - DNA, 120 bp, Artificial Sequence
  ENSG00000287996_63 (sequence is synthesized)
ataactgatataatattaatgaaaaagtctaaaatattgtgagaattaccaaaacatgacacaaggacacaaaacgaacacatgctgttggaaaaatggtgctgatagacttattaaata

SEQ ID NO: 814238 - DNA, 120 bp, Artificial Sequence
  ENSG00000287996_64 (sequence is synthesized)
caggactgccacataccttcaattaaaaaaacatctgcaaagcgcaataaagtaaagcacaataaaatgaagcatgcctgtgcttgaaagagctaggaccatattgacttcctaggagac

SEQ ID NO: 814239 - DNA, 120 bp, Artificial Sequence
  ENSG00000287996_65 (sequence is synthesized)
atgacaatccaaaaaataaattttcttattaaaatagtagaataacgaattgtaatagtaatataatcatgacaatgtagtggcgattaccatcgaccccctaaagtttcactgaaaaat

SEQ ID NO: 814240 - DNA, 120 bp, Artificial Sequence
  ENSG00000287996_66 (sequence is synthesized)
ctctggcagggttgattcatgagagaaaaggtatacaattttatttaacatgtatacacaagtgccttcaggatgaagacccaactatcacggatgccactggctggggacagtgctgct

SEQ ID NO: 814241 - DNA, 120 bp, Artificial Sequence
  ENSG00000287996_67 (sequence is synthesized)
ggtggcaaaagaattttccaaggaagacgtggggaaagaaaggcagatttattagagagaaagtatgctgcagggaagcaacaggcagcacagcacaaaagaggctgtttacaaagaggc

SEQ ID NO: 814242 - DNA, 120 bp, Artificial Sequence
  ENSG00000287996_68 (sequence is synthesized)
aggggttggaacagcaagacctgatactgagttgtactggaggggctgctttcagataaggtgtgcagataagatggtgctgctggggctaggaggtatttgggaacaggatgtcatgcc

SEQ ID NO: 814243 - DNA, 120 bp, Artificial Sequence
  ENSG00000287996_69 (sequence is synthesized)
agccgttgtctgtgattagctgtctttccaaagaaacaattgttccccccacacctgggatcccttgctcttgttgcttagcgaacttatcaggactccacaccaaatttctaatgagtt

SEQ ID NO: 814244 - DNA, 120 bp, Artificial Sequence
  ENSG00000287996_70 (sequence is synthesized)
acagaaacttatatatcattctgaggttacaaaaagaaagggggcttggattctggtaaaataggttataggaggaggcagaaaaggaattctattgagaggcaataaattattgttagg

SEQ ID NO: 814245 - DNA, 120 bp, Artificial Sequence
  ENSG00000287996_71 (sequence is synthesized)
gagaataattggactcaggaacagagattaacttgtaaatagttttcaatgggatataaatgatctttggagatagtaaaagtttctgctaaggtgtgaatcttgtcttttttttctgca

SEQ ID NO: 814246 - DNA, 120 bp, Artificial Sequence
  ENSG00000287996_72 (sequence is synthesized)
atagataatgtgataacagagagggaaggaaaaaacaattgttcttagtgggtttggatcttaggcagataaaggaacttaagttcctttaggagagacagtggggactggtagtggggc

SEQ ID NO: 814247 - DNA, 120 bp, Artificial Sequence
  ENSG00000287996_73 (sequence is synthesized)
ggggggaatggtcagtggttaagggagaccctgaggcttctctagtttagcatgtcaaaatgccagattttggggtactgatttcggagccccaaaagcaaaagtagcaaatcctgaaag

SEQ ID NO: 814248 - DNA, 120 bp, Artificial Sequence
  ENSG00000287996_74 (sequence is synthesized)
acaggaatacgtatttgtaaaggtgctgatatgcaattcacactgaaaagcaaaagtgtattgctgacatcctagaattgacagtgaccaaacatgagttgtggtgcttgtcttagttat

SEQ ID NO: 814249 - DNA, 120 bp, Artificial Sequence
  ENSG00000287995_0 (sequence is synthesized)
gtcaggagactgagtggatctggcaatgggagctcatgaaaattctcttctggcacttctaattctcaagaaagtaaggagcaaggtaatcagctgaggtggcatggggagactgcactg

SEQ ID NO: 814250 - DNA, 120 bp, Artificial Sequence
  ENSG00000287995_1 (sequence is synthesized)
gaggtctgaaagagcaagcggataacattaaacatggaagctttccatttgtggcactgaatgatggcctacacagagcatccttcaaaagctgcaattaagtacccatctaacttttca

SEQ ID NO: 814251 - DNA, 120 bp, Artificial Sequence
  ENSG00000287995_2 (sequence is synthesized)
gcaatacaagcccagttgagatcttctggtccatttgcttgaaatttctttttgattgcatccttacagcttgtgaagatcattttacttttcagaggtggtagttctggtgcccacaaa

SEQ ID NO: 814252 - DNA, 120 bp, Artificial Sequence
  ENSG00000287995_3 (sequence is synthesized)
aacaaacaaacaaacaatactcttccggatttcttcgtttcaaagcttgcatcatataaagcatagcagcaatctttttcaggaagcattcccacaaagtgcttgaaaggaccagttatg

SEQ ID NO: 814253 - DNA, 120 bp, Artificial Sequence
  ENSG00000287995_4 (sequence is synthesized)
gttacaccaatatctccagctgagatctctttgccctcttctacaatgatgcactttttgtctgcactgagacaaaaaatgacagtcttctttcttttcttgatttcttctgatgtggag

SEQ ID NO: 814254 - DNA, 120 bp, Artificial Sequence
  ENSG00000287995_5 (sequence is synthesized)
catttatgaacttttatgtcacaaaaaatgtgacatacttcatcagcaacttgcactcctgagtccgtctttgccgccacggtcacagggacacaggggaggccgctggtgggcaccgag

SEQ ID NO: 814255 - DNA, 120 bp, Artificial Sequence
  ENSG00000287995_6 (sequence is synthesized)
tctgcggagtgtcctcttcacagctgcgtaccaagagactgcactgctcttaactataaacgtctgaacactgaatattaaacactaaagcctaaaccctgcccgcaccccgactctaat

SEQ ID NO: 814256 - DNA, 120 bp, Artificial Sequence
  ENSG00000287995_7 (sequence is synthesized)
gtctatgtgtaaagcgttttaactatggcagtgagtaaagaaggcatctccttccactcccctttgcttactctgccccaggccacagattcctggccagtcccctcatttccttctggt

SEQ ID NO: 814257 - DNA, 120 bp, Artificial Sequence
  ENSG00000287995_8 (sequence is synthesized)
ctttactcacacatccccttccccaaagagtttaagccaactgtgcagttagagagaacagtccccacaagagaccaccctcacttctgacaccaactgcaatttagggggaaaaccacc

SEQ ID NO: 814258 - DNA, 120 bp, Artificial Sequence
  ENSG00000287995_9 (sequence is synthesized)
caaaaccaccctcaggttacataacttgctagcagggctcacggaaagctgttgtattcatagttatgttgtattacagggaagccatacagattaaaatctgccaaggggagggataaa

SEQ ID NO: 814259 - DNA, 120 bp, Artificial Sequence
  ENSG00000287995_10 (sequence is synthesized)
atcagccaaggcagagtctaggagggtctctctaaatatgaagcttccgtttgttctctgtgaagtcatgggcaccacttatcaccagcaggcctaaaacccactttacctatttgtgta

SEQ ID NO: 814260 - DNA, 120 bp, Artificial Sequence
  ENSG00000287995_11 (sequence is synthesized)
ttgtctctctgtcccataggaatgttagcttcatgacggcagggaatttggtcagctttactcactgctgtgtgacttctagaactgcaccatccaatattgtagctactagccatgtgt

SEQ ID NO: 814261 - DNA, 120 bp, Artificial Sequence
  ENSG00000287995_12 (sequence is synthesized)
gggtactgagcacttgaaaaatggctgtcccacctcaaaatacaccataagtgtaaaatacacatgggattttaagggcttagtattaaaagaaaaatgtaaaataactcactgctaatt

SEQ ID NO: 814262 - DNA, 120 bp, Artificial Sequence
  ENSG00000287995_13 (sequence is synthesized)
tgttatactggttatgggttaaaatgatatttggtagatattgggttatataaaatatatcattaaaatgtatttctcttttttataaacttaaattgtgatctgcaatgtgtgtgtgtg

SEQ ID NO: 814263 - DNA, 120 bp, Artificial Sequence
  ENSG00000287994_0 (sequence is synthesized)
ctttctcgggcaccatgtgatgtcttctaccatgtacagtgcaacaagaaggctctcaccagatgctggaccttgatattggactttccagcctccagaactatgagccatcatttttct

SEQ ID NO: 814264 - DNA, 120 bp, Artificial Sequence
  ENSG00000287994_1 (sequence is synthesized)
tttcagagtactattggaacaagatgtgtcaatgtgaagatctccagctgttaatgttcactaggctctcatgccagcctgtattttctgggcccttagcctgtgatacaggctaggccc

SEQ ID NO: 814265 - DNA, 120 bp, Artificial Sequence
  ENSG00000287994_2 (sequence is synthesized)
tcctacatggggtcctgccacttctcaggaagaggacttacccggcatactttgtgcctttagataaaaccgctaccattctatcactttggagatttcaaattacaaagaaactattca

SEQ ID NO: 814266 - DNA, 120 bp, Artificial Sequence
  ENSG00000285595_0 (sequence is synthesized)
aaacaccctgacaatcaccaaggaagattgactacaccgagctgtttacaagatgcttttgatggtgacatatagagcaacatgtgttacacaatgaaacagatccagagagatggactg

SEQ ID NO: 814267 - DNA, 120 bp, Artificial Sequence
  ENSG00000285595_1 (sequence is synthesized)
accttgcccatgactcacagaaagtgaccaacctagcaagcctaggaccccagactgccatgaaaacatccacatgtacatggtgtggcggctcatttacaaaaaggagctgctattatt

SEQ ID NO: 814268 - DNA, 120 bp, Artificial Sequence
  ENSG00000285595_2 (sequence is synthesized)
gccatcttggctatctgtgatgcttgcaactcatcggggctcctcggggcacaggactccaggaccgactctccagcaccgcctctccatcgccagttcttgctactaaccgctgccttc

SEQ ID NO: 814269 - DNA, 120 bp, Artificial Sequence
  ENSG00000285595_3 (sequence is synthesized)
ttggagggttttcatttcccagtgtacactttcagcgcatagaatgtgcatattatattcaaaggtttcctgtcacttaagtagtaacgtcttagttttctcttaagctctcacacccag

SEQ ID NO: 814270 - DNA, 120 bp, Artificial Sequence
  ENSG00000285595_4 (sequence is synthesized)
cacactgcctgacagagagcatttgtgaaagggtgcatgaactacacagaagtgaactgatgtgagctttttatatgtacacctaaaagtaaacgttttcagaatatcatgatggaggga

SEQ ID NO: 814271 - DNA, 120 bp, Artificial Sequence
  ENSG00000285595_5 (sequence is synthesized)
accagattgctgttatcaaacacacctagattctgcatcatacaaccaggtataacctcttagttccccttcaggtcatcccagaaagattaaactgcagcactgaaaaagttctgcata

SEQ ID NO: 814272 - DNA, 120 bp, Artificial Sequence
  ENSG00000285595_6 (sequence is synthesized)
atcattactgataatatattgcataaagctagaaattctccaaataaaaaaagtctaagaatataatctggaaaaatagggggccctttcccaaccaagcttctgctccttgagaacatt

SEQ ID NO: 814273 - DNA, 120 bp, Artificial Sequence
  ENSG00000285595_7 (sequence is synthesized)
ctaccacagtatataatatgaaagtatttttgtctggttttgatatcaggatcatatcagattcatcaaatgaacaaagatatcactcaccaggataaccaacacatagagaagatatga

SEQ ID NO: 814274 - DNA, 120 bp, Artificial Sequence
  ENSG00000285595_8 (sequence is synthesized)
caattgcagcctagactaaaattctggctttgaaggtatacagaagtggatgagatatttgaagatacttattggaggtggaatcaacagcattcattgatggattaaacatggagaatg

SEQ ID NO: 814275 - DNA, 120 bp, Artificial Sequence
  ENSG00000285595_9 (sequence is synthesized)
agagaaaagaggaatgaggaatgattcacaggtttcttgcttgagtaattgggtgtagagtggttccctttactaaaatgatggaagtctggaagaggaaaacgtttcaggagagagaac

SEQ ID NO: 814276 - DNA, 120 bp, Artificial Sequence
  ENSG00000285595_10 (sequence is synthesized)
caggagtctagggtatacatacgacatttcagacaaaggtttcctggatgaaaaatctaggtggtcatttgtcctgcaaaaataagaagatattttgggagggcaaccaggcacattcaa

SEQ ID NO: 814277 - DNA, 120 bp, Artificial Sequence
  ENSG00000285595_11 (sequence is synthesized)
gctccatggcatgatacccatgcagtgaggcctttgcctaatatgggcctggcactgtcagaggtaccaagaatatgagactgagtaagttcttgtcccaggaaattaatcagaggaaaa

SEQ ID NO: 814278 - DNA, 120 bp, Artificial Sequence
  ENSG00000285595_12 (sequence is synthesized)
gacaatgtaatagataatcacaaagcagtgtaacaattttcacgtgatatttactccatattatctgcacagggcattgaggggatagggagatgcttgggatggagagtcaggctcata

SEQ ID NO: 814279 - DNA, 120 bp, Artificial Sequence
  ENSG00000285595_13 (sequence is synthesized)
gacggccttctagaatagttgatctccaaagaaaggataagctggacagccttctggaaggtggaagacagtcaagaggagagaggttatttggggagaagaaacaggacagcctcagta

SEQ ID NO: 814280 - DNA, 120 bp, Artificial Sequence
  ENSG00000285595_14 (sequence is synthesized)
agacacagagacaatatgttatgtgtggttaattaaagtgcttccaattatagaacaaggagagggcagggaaaagaagggaaagccgaaacctgaagggtcctgtatttcacaataaaa

SEQ ID NO: 814281 - DNA, 120 bp, Artificial Sequence
  ENSG00000285595_15 (sequence is synthesized)
ggattattatatcatcctatggggatggaggagcagaacacttacaatgtttcaaataggaagggacatgctagacagatttgtgttttagatggatggttctggcagtggtgtggagat

SEQ ID NO: 814282 - DNA, 120 bp, Artificial Sequence
  ENSG00000285594_0 (sequence is synthesized)
agtctctcaaataacagataaagaaattaggcaaggtactgctgtctccatctctgtaaaataaaacctaggcactttcactgataatagactagcaccaacatgcagtcagtaacacgg

SEQ ID NO: 814283 - DNA, 120 bp, Artificial Sequence
  ENSG00000285594_1 (sequence is synthesized)
gacactaaaaacaagccatttggatcacacaaagaagaatattgactcgtgccactttaaaacatgtgatattatttggcattcacaattctttccctatttgttgtctgtattgaattt

SEQ ID NO: 814284 - DNA, 120 bp, Artificial Sequence
  ENSG00000285594_2 (sequence is synthesized)
ttcctttgacttagtgcacttgctcatgtatcttgccctcttttaaaccttggttggtgacggttctttgcacaattgcggaggtcttttgctactccaattgcataaataactgaagta

SEQ ID NO: 814285 - DNA, 120 bp, Artificial Sequence
  ENSG00000285594_3 (sequence is synthesized)
aggctgcaaaagtcaaccgagcttgggcatcaaggacaatgaagttgctgagtatctcttgtgcctcactgactcctttccagtcaggagacgaccagtttgaagcagaagaatgtcctg

SEQ ID NO: 814286 - DNA, 120 bp, Artificial Sequence
  ENSG00000285594_4 (sequence is synthesized)
agagccaaagcgattccatcctctggacatgagctgtgtggtgtccccgtcctcatacctattccagaaccacactggtccctgctctcgtctccgaactgtcggaggatggacctgctt

SEQ ID NO: 814287 - DNA, 120 bp, Artificial Sequence
  ENSG00000285594_5 (sequence is synthesized)
ttgcaaggacctgaactccctgtgttgttgcttaagatttttacccaggcatgaaaaggaaatgaattctgccaactcatcgctgtgtctgtgggaacagaaactcagggcacctattct

SEQ ID NO: 814288 - DNA, 120 bp, Artificial Sequence
  ENSG00000285594_6 (sequence is synthesized)
ctgcaagaaaagcatcaattccctgtaagaaaagtttcccacctgagacaatgacacagaccaacataaatgctcttttggttttatgatttctgatattagattttacttgattttttt

SEQ ID NO: 814289 - DNA, 120 bp, Artificial Sequence
  ENSG00000285594_7 (sequence is synthesized)
atttttaattttttaaatttcattttgagagttaaaagggttacttcttttatttccagcagttcaaggaatttcagagcaatcttggtccagagttggtaataaagacatttaaatgag

SEQ ID NO: 814290 - DNA, 120 bp, Artificial Sequence
  ENSG00000285597_0 (sequence is synthesized)
atccgggtcctgatccgggactctgagatgaagagctgttggagcagaagagtcctgagagaaaaagacggaaaatcgtggaaaggcgctgtggaaaggagtagtgtggaaaggagaccg

SEQ ID NO: 814291 - DNA, 120 bp, Artificial Sequence
  ENSG00000285597_1 (sequence is synthesized)
cggggatgaggagaggagagaggcaggctgcatcaccgaatgggcagcatgtcttaaagtacactgtttgtcttaaagtacaccgtaaagcctctcttgtgcctgttgtttagagcctgc

SEQ ID NO: 814292 - DNA, 120 bp, Artificial Sequence
  ENSG00000285597_2 (sequence is synthesized)
cctttttgcttaatgtgtatggacatctttctaggccagtacttatagagctacctcattcattttatttatttatttgtttgtttgagacagggtctggctctgttgcctaggctggag

SEQ ID NO: 814293 - DNA, 120 bp, Artificial Sequence
  ENSG00000285597_3 (sequence is synthesized)
tgcagtagcacgatctgggctcactgcagcctccacatcccaggttcaagcaatccccctgccttagcctcccgagttgctgggaccacagacatgtgctaatttttttatgttttgtag

SEQ ID NO: 814294 - DNA, 120 bp, Artificial Sequence
  ENSG00000285597_4 (sequence is synthesized)
ctcgctatgaacgtttgtgtctcctgaagttcatatgttgaaattctactcccccaggaggctgaacaagagggtaaagctcttataggagggattaggttattagggtgaaaccctcat

SEQ ID NO: 814295 - DNA, 120 bp, Artificial Sequence
  ENSG00000285597_5 (sequence is synthesized)
gagtggaattagtgctcttattcaaaaggcctgagagaggtcccttgtcccttctgccatgtgaggttacagtgagatgatggctgtgagatgatgatgaggaactggccctcatcaaac

SEQ ID NO: 814296 - DNA, 120 bp, Artificial Sequence
  ENSG00000285597_6 (sequence is synthesized)
accagatcttctagtgccttgatcttggacttcctatttccacaactgtgagaaatgaatttcttttgtttaaaagacgcctagtcaaagtggcacctggctccatgtcctgtgtatgtc

SEQ ID NO: 814297 - DNA, 120 bp, Artificial Sequence
  ENSG00000285597_7 (sequence is synthesized)
tgactcccagaggccagaggtaggctcagaagggtggggttaggggatgggttaggtccagctggtagttgatgagggtggcctgagggatccagacaggaagctccatgccatgtttct

SEQ ID NO: 814298 - DNA, 120 bp, Artificial Sequence
  ENSG00000285591_0 (sequence is synthesized)
cagcatccgaaatgcattttttgtggggacagcagcacacgtggggaaggaacacagaatcggctgtggccagcgggtctattcatgccgtgaagatcctcccagacccctcccgatgcc

SEQ ID NO: 814299 - DNA, 120 bp, Artificial Sequence
  ENSG00000285591_1 (sequence is synthesized)
tactgggcttcaggccccaggaaacaaagctaagtcatgctagcccctgctctggagaaaccgcttcccggtggctgggatggaaacaagcaccaggccccgaggatgcagaatcagagg

SEQ ID NO: 814300 - DNA, 120 bp, Artificial Sequence
  ENSG00000285591_2 (sequence is synthesized)
attcccaggagcttcgttaactggcctttgcgttgctcgtgctgcattatcttgagttaatatttgccctccatattttcaagtaacaggccaagtcaacttggcgttgcggattgcaaa

SEQ ID NO: 814301 - DNA, 120 bp, Artificial Sequence
  ENSG00000285591_3 (sequence is synthesized)
catcagccctgagtatggcccaaacttcaagaaccttgggctccaacagcactggccggcggtggtgactgacgggtggtgaattgagccatggagagatggccctgagtgccagtgaac

SEQ ID NO: 814302 - DNA, 120 bp, Artificial Sequence
  ENSG00000285591_4 (sequence is synthesized)
aatgctccccttctgaatcctgaggccctggagaatttctgcaagcatgagtcaccaccttccagaaagaacccatggccactgaagagctgcttccgacccagccccagatggagtttc

SEQ ID NO: 814303 - DNA, 60 bp, Artificial Sequence
  ENSG00000285591_5 (sequence is synthesized)
ttgttgcccaggctggaacccttagcctccggagtatctgggattacaggcatgcaccac

SEQ ID NO: 814304 - DNA, 120 bp, Artificial Sequence
  ENSG00000285591_6 (sequence is synthesized)
tgtatttttagtagagacagggtttctactgtccacacccaaggctcttggacagattccagatgccaggctgagaatctttgcaagtccctgttagctggcccagtgcccgccaggtca

SEQ ID NO: 814305 - DNA, 120 bp, Artificial Sequence
  ENSG00000285591_7 (sequence is synthesized)
gcccagtgcccgccaggtcatgggaattcagcaaacgaccccagtgggggcagtgtggccatctgaagaggcctcagctttgcacgacacagagtgaatgatcccagctcagccccttcc

SEQ ID NO: 814306 - DNA, 120 bp, Artificial Sequence
  ENSG00000285591_8 (sequence is synthesized)
tggctgcaaaaccgtgggccctccagtcctcaagcccctctgcattcatcttgtgggatgaactcccccacagagggtatggacagacgtggtgtgcacagtgggtgccctattagtgaa

SEQ ID NO: 814307 - DNA, 120 bp, Artificial Sequence
  ENSG00000285591_9 (sequence is synthesized)
ggttattatttgttgaacttggttgaacccaggccaccttcggcagctgccctagtccaatccttcttttcttacttccacttgacaagtgtcattaagcccatgtatcagactgtctct

SEQ ID NO: 814308 - DNA, 120 bp, Artificial Sequence
  ENSG00000285591_10 (sequence is synthesized)
gaagagtaatgctggggtgtttgatggtgatgacaatgatgtccaaggatctgttaagccacatccacatggcctggcagtggctgcgtctcccttccgagaaagaccccagagcaagtc

SEQ ID NO: 814309 - DNA, 120 bp, Artificial Sequence
  ENSG00000285591_11 (sequence is synthesized)
ccttaggaacactccctctctaggaaggcactgccatggaaagatcatggcaggggctgccaggtctaggaagttctcagcacacgtgggccggggaggcaactgaccttccacgcccag

SEQ ID NO: 814310 - DNA, 120 bp, Artificial Sequence
  ENSG00000285591_12 (sequence is synthesized)
catcttgtggaaggcatgatgcactgccagccctgcttcccctcctctgcgctcctcacctgggcaacctaaagaaagtgtgggtggagttggcactgcatccatggtggaacatcaaca

SEQ ID NO: 814311 - DNA, 120 bp, Artificial Sequence
  ENSG00000285591_13 (sequence is synthesized)
atgccggtgatgagggtaattttcagatgagttgagataagcctgctgcgttactctctgaccttcgccgtcattttcacacaataggtggatgataatgttgagctgtgtctaagagct

SEQ ID NO: 814312 - DNA, 120 bp, Artificial Sequence
  ENSG00000285591_14 (sequence is synthesized)
catgaacccaaacaaacagaagcaatttcagctgcagaagtccttcagggcttaaaagcattgtttgctacgcattaggcatttctgaatctgaagagaatcttttttctctccctttcc

SEQ ID NO: 814313 - DNA, 120 bp, Artificial Sequence
  ENSG00000285591_15 (sequence is synthesized)
tatttctcaaataaggatgatctagggaaaaatatcaggggagtggaggtcaggagaggagtgtgtggattcagctctgcctggggcaaggcgctttttctctctgccccccttcccccc

SEQ ID NO: 814314 - DNA, 120 bp, Artificial Sequence
  ENSG00000285591_16 (sequence is synthesized)
atttccatctgtaataaggcacaggctggaccagacatgcctccagtgcctgctagctccaccaataaggaccgtgaataacacttattcccattcccattttactggtttccgaatatg

SEQ ID NO: 814315 - DNA, 120 bp, Artificial Sequence
  ENSG00000285591_17 (sequence is synthesized)
ttattcccattcccattttactggtttccgaatatgagaagatcattgccaatttttctcttttctctttcaacactactgtgatggttaatggtgagtgtcaacttgattggattgaag

SEQ ID NO: 814316 - DNA, 120 bp, Artificial Sequence
  ENSG00000285591_18 (sequence is synthesized)
agaggcagacccaccctcagtctgggcaccagctaatcagctgccagtgcggctaggataaagcaggcagaggaacatggaaggacgagactggctgagtcttccagcctccatctttct

SEQ ID NO: 814317 - DNA, 65 bp, Artificial Sequence
  ENSG00000285591_19 (sequence is synthesized)
ctgccagtgcggctaggataaagcaggcagaggaacatggaaggacgagactggctgagtcttcc

SEQ ID NO: 814318 - DNA, 120 bp, Artificial Sequence
  ENSG00000285591_20 (sequence is synthesized)
tgcactgttggcttccctacttttgagatgttgggactcggactgcttccttgctcctgggctagccgatggcctattgtgggacttcaccttctaaccgtgtgagtcgattctccttaa

SEQ ID NO: 814319 - DNA, 120 bp, Artificial Sequence
  ENSG00000285591_21 (sequence is synthesized)
gggacttcaccttctaaccgtgtgagtcgattctccttaataaactcccttttatatatacatctgtcctataagtcctgtctctctagagaaccctgactaatgcaactacttcataag

SEQ ID NO: 814320 - DNA, 120 bp, Artificial Sequence
  ENSG00000285591_22 (sequence is synthesized)
ccactctgctctccttctaccacacttacctgctcacagggcaaaacctgtcagggatgtggagctttgtagggcagacgaacccaccagcctcccatgcaaggcacccgagaggggtta

SEQ ID NO: 814321 - DNA, 120 bp, Artificial Sequence
  ENSG00000285591_23 (sequence is synthesized)
gaggtagtaaggaaaagggctaacggaggtggctcctggatagacaaacaccagttccaagtcctcaggccccagaaacctctcaggacccaatctcatttgttcaactccaagtcaacc

SEQ ID NO: 814322 - DNA, 120 bp, Artificial Sequence
  ENSG00000285591_24 (sequence is synthesized)
atgacccatggaaagctcatgaatccgtggtggccagcaggcaagaaacaatgttgctatatactggtgtttgccatcggtggaaattcatactacggaatgatctcatccgtgtgcatc

SEQ ID NO: 814323 - DNA, 120 bp, Artificial Sequence
  ENSG00000285591_25 (sequence is synthesized)
tgctccagctgccctaacaaagtagcacactggggccttaaacaacagagatgcaattcctcacagttccggaggcgggaagtccgagatcacagtgttggcaggtctgattcctcccaa

SEQ ID NO: 814324 - DNA, 120 bp, Artificial Sequence
  ENSG00000285591_26 (sequence is synthesized)
ggcctctctccctggactgcagaggctgattcctacctttgtccacacatggtcgtccctttgtgtgtgtctgtgtcctaatctctattcttacaaggacaccagtcacagcagattagg

SEQ ID NO: 814325 - DNA, 120 bp, Artificial Sequence
  ENSG00000285591_27 (sequence is synthesized)
gcccaccctgatgacctcattttaatttaatgaacctctttttttttaatcggcatacattacttatttttattaatgtaaaataaaatatattaacattctattcgctacatgtcaaaa

SEQ ID NO: 814326 - DNA, 120 bp, Artificial Sequence
  ENSG00000285593_0 (sequence is synthesized)
gcctctttcctggagtgcagcctgagtcacagctcgaaacttctcccaccttctccgggtggagggggcttccccagtcttggggtgcgcacctcaggcaacgacccatccctcactccc

SEQ ID NO: 814327 - DNA, 120 bp, Artificial Sequence
  ENSG00000285593_1 (sequence is synthesized)
ctgtgctgggactgcatgggaagctggactacactcctcagcctcccttgaagttgcagtgaacttatgatggtttgttctaaccaccgtaatgtgagtaaaagttatgttatgtgcact

SEQ ID NO: 814328 - DNA, 120 bp, Artificial Sequence
  ENSG00000285593_2 (sequence is synthesized)
ttctaggctaagacttcccctttcccttaaaaaaaatcaatgttatcaacacagaatttacatacaatgaaaagcaccctttgaaaatgtacaacttgtatatccccaataccagcttga

SEQ ID NO: 814329 - DNA, 120 bp, Artificial Sequence
  ENSG00000285593_3 (sequence is synthesized)
tttccgtgaccccaaagggctttctcttgcttcactgtaataaatccctcccacccacaggtgactgcctgatccactgtatgttatcgtagattagatttgcacattcacggatttcat

SEQ ID NO: 814330 - DNA, 120 bp, Artificial Sequence
  ENSG00000285593_4 (sequence is synthesized)
atacataaaatcatacaacatgaagtggtctgggctggctactttcgcttcacatgttttaaaatgcattcatgttgttgtgtatatctgtggtttttacctttttaggctgggattaca

SEQ ID NO: 814331 - DNA, 120 bp, Artificial Sequence
  ENSG00000285592_0 (sequence is synthesized)
gagctctgcactccatgggaacttcagtcaggtggaaagttattctcttctctgcagcttgaaagtgccacccacacttctggggtgctatgaagaaaagcacttgagaatcacgcccta

SEQ ID NO: 814332 - DNA, 120 bp, Artificial Sequence
  ENSG00000285592_1 (sequence is synthesized)
gtcacttcaaaccacctacgatccccggacacaccaagctctttcttgcttctttgattcagcacaaaacaaacatcaaaaaacaattgaccatgaaaactcttctccttgtttgcctgc

SEQ ID NO: 814333 - DNA, 120 bp, Artificial Sequence
  ENSG00000285592_2 (sequence is synthesized)
agcctaattgctactcactggtataaggtaaacaacccaaatgagtgacttgaagagacacagggtccacaccccgcaggagtacaaggaattgcagtagtggtattacagcaaagaaga

SEQ ID NO: 814334 - DNA, 120 bp, Artificial Sequence
  ENSG00000285592_3 (sequence is synthesized)
tgcatcaggaaaccagaatggtggttcatcaggaaaattacaacaattaacataagtgctgcaaaaatcaacactttaaatgtcacactcactagtctgtccaaagactgtaaaagtacc

SEQ ID NO: 814335 - DNA, 120 bp, Artificial Sequence
  ENSG00000285592_4 (sequence is synthesized)
atccccgttgctggactaacagtaaatatgaagcaatcaccaccaaaccttgggcctgatggctttacaattgatgtgacattctctgagtgataaaatagcctctcattttacaaaagt

SEQ ID NO: 814336 - DNA, 120 bp, Artificial Sequence
  ENSG00000285592_5 (sequence is synthesized)
tgagtctgaatttggccccaggccctctagctctttcaggaaaggctgttactgaacaaatgaagatttaaccagctcaagcatcaaaccgcacattccagtttgctaaaaaggtaaaca

SEQ ID NO: 814337 - DNA, 120 bp, Artificial Sequence
  ENSG00000285592_6 (sequence is synthesized)
gttcaaacaggaagttatgatatgtacccatccacaggtcaatgaaagtttttatttacattggaaaaccttgtgtacactggactaataaacccaataaaatcagatcttttggtgtca

SEQ ID NO: 814338 - DNA, 120 bp, Artificial Sequence
  ENSG00000241985_0 (sequence is synthesized)
gtctgggttatgctatttggaactgtcattgatggtgagatagagatgatggaagaaaacccaaatataccagaaatgggtagtacacctccattgtctatttatattttattctcatca

SEQ ID NO: 814339 - DNA, 120 bp, Artificial Sequence
  ENSG00000241985_1 (sequence is synthesized)
gtttgagacaagcctgggcaacatagcgagattctgtctctacagaatttttttttttttttttttttgagatagcgtttcactcttgtcgcctaggctggagtgcaatggcgccatctc

SEQ ID NO: 814340 - DNA, 120 bp, Artificial Sequence
  ENSG00000285599_0 (sequence is synthesized)
gggcacagagccaggtcaggcatggggaagggaccacacaggtgagccaggcagggcacagttaggaggagggcagagcacaaggtggagggcgggggcagtacctccagcgcacacatc

SEQ ID NO: 814341 - DNA, 120 bp, Artificial Sequence
  ENSG00000285599_1 (sequence is synthesized)
ccaaaggagaagatgtccacagcggtcccatcggccacctctgaacagaagagagcacaggacacgtaggagagaagcgcagggaattgcttgaggctgcctgatgacacgtactctgtg

SEQ ID NO: 814342 - DNA, 120 bp, Artificial Sequence
  ENSG00000285599_2 (sequence is synthesized)
ctctgcctgcccggggccttgcccgtgctcaccctcgcgcaggcctcagaggtatccagccagtacttgtgcaacttcacgatgttcgggtggtccaccagcaccagctgctcgaacacg

SEQ ID NO: 814343 - DNA, 120 bp, Artificial Sequence
  ENSG00000285599_3 (sequence is synthesized)
gtctggatcttctcctggggagggagggtggtcgctgggtggtcagcaggtggtcacccaagcaggatgaggagggggcagcggtctcacctcgtgcgccgcgaaggccttcctgtctcc

SEQ ID NO: 814344 - DNA, 120 bp, Artificial Sequence
  ENSG00000285599_4 (sequence is synthesized)
gaagtggagctcgttccacaccacctctaccccctcctccgtgtccatggctaggaaggtgctctgaagccctggcatgttcccttggtttacctgggggtgaataaagggttatgtgtg

SEQ ID NO: 814345 - DNA, 120 bp, Artificial Sequence
  ENSG00000277232_0 (sequence is synthesized)
atggaactcgagagcaccattttcagggacgaagataagctgtttatttggggcaggctgtggggagagctgtgcagcaaacagccacccggggcccagggcagaggccttccaggctgg

SEQ ID NO: 814346 - DNA, 120 bp, Artificial Sequence
  ENSG00000277232_1 (sequence is synthesized)
tgttccttcaccagaagactgggggctcaaaaagggcagggcagccctcactcaccagtctccccagcctcacccagctcagcacagggcaccaggcaggggctgagagtgctggggtag

SEQ ID NO: 814347 - DNA, 120 bp, Artificial Sequence
  ENSG00000277232_2 (sequence is synthesized)
gccggaaccatgtatagcagctccttgtgtgtagggagaaagttaaaactgccatctaagggtgtcgatgggaagactaaaagtaggctcacccacctgctgtgaagcagcgcgcgcgag

SEQ ID NO: 814348 - DNA, 120 bp, Artificial Sequence
  ENSG00000277232_3 (sequence is synthesized)
ctgttactaacagtagtgaaaagccgggatccctgcccccgaggcacgcactggggcgccggctgacccagagacctgagggagactcattgccggagctgcacagcctgtggggctgga

SEQ ID NO: 814349 - DNA, 120 bp, Artificial Sequence
  ENSG00000277232_4 (sequence is synthesized)
ggggaaccgtcgcccttggcgggcttccccaaccgccaaggcctgaggaccgccgagggcgtggcgggagcctgtcctcggttttacaggccggctggggagctgcgttggaggagagag

SEQ ID NO: 814350 - DNA, 120 bp, Artificial Sequence
  ENSG00000277232_5 (sequence is synthesized)
ccaggggctggggcccggtgatggagcctgccttggggagtgcatgtgttggagagaggtgggaagcagataggataaccctgacctgagccatggagacgcaaggacaggactggtaga

SEQ ID NO: 814351 - DNA, 120 bp, Artificial Sequence
  ENSG00000277232_6 (sequence is synthesized)
cgggtcagtgggcagcaacttaagactgacctcgcttgagcctttgcctgcgaacgaggtataatacccacctcgggggcttgaggatcaaatgaggggctccacccacggcaaagtgtc

SEQ ID NO: 814352 - DNA, 120 bp, Artificial Sequence
  ENSG00000277232_7 (sequence is synthesized)
tctgctcatgggagaatggcagagggatccccaacagtcattcctgatactcctctccctgtatcatgtcagcacatagtaggtgtggcctatgtatggcagattcatttctgcccccaa

SEQ ID NO: 814353 - DNA, 120 bp, Artificial Sequence
  ENSG00000277232_8 (sequence is synthesized)
taggatttgctgtagtttggatgtgtgtcccctcaaaatctcatgttgaaatgtgatcccaatgttggaagtggggcctggtgggaagtaattgggtcgtgagggcagatcccttatgaa

SEQ ID NO: 814354 - DNA, 120 bp, Artificial Sequence
  ENSG00000277232_9 (sequence is synthesized)
tggttcagcaccatccccttggtgatgagttcttgcttagttcacacaagatctggttatttaagagtctaagacctccccttctctcttactcctgctctcactatgtgatatactggc

SEQ ID NO: 814355 - DNA, 120 bp, Artificial Sequence
  ENSG00000277232_10 (sequence is synthesized)
tatgtgatatactggctccccatcaccttatgtcatgatcttaagcttcctgaggttgcaccagaagcagatgccagcaccatacttcctgaaaagcctgcagaactgtgagccaattaa

SEQ ID NO: 814356 - DNA, 120 bp, Artificial Sequence
  ENSG00000231519_0 (sequence is synthesized)
acatcagtaaaagataccatctgcaaggctactttattccccaaccttccaaagaatgagaacagtctgagtaaactagggcatgatcaaagatacatgtcttcaatgtaaaccaaacaa

SEQ ID NO: 814357 - DNA, 120 bp, Artificial Sequence
  ENSG00000231519_1 (sequence is synthesized)
aacgtaggtgattccctgtaagaagacatggcatcagggaaatttcagatggcatacaagaccttagtgaggatatcctgagaaatgtgaagaaaggggttgctgattcacaaagcgtac

SEQ ID NO: 814358 - DNA, 120 bp, Artificial Sequence
  ENSG00000231519_2 (sequence is synthesized)
taaaaaccagcaagacaaccaaattttcaaccatttgagcagccatctgggctggcaagagggtgtacaggtccatggaaaacatcctgagaaatgaagacatggaagacccagaaaggt

SEQ ID NO: 814359 - DNA, 120 bp, Artificial Sequence
  ENSG00000231519_3 (sequence is synthesized)
agtgactttcccaaggtcacaaagttaaaagcaatgagacctggggacactcttgttgcatcacaccattctgtcaaaaaaactggtgtttactctgtaaacaatgtaataaaaatgaaa

SEQ ID NO: 814360 - DNA, 120 bp, Artificial Sequence
  ENSG00000231510_0 (sequence is synthesized)
gatgcccacctctcatcacaggcccatgctggggccatgcacacagattacctggaatgactggcccacagaacccatcattggatcacaggcccatgctggggccatgcgcacagatta

SEQ ID NO: 814361 - DNA, 120 bp, Artificial Sequence
  ENSG00000231510_1 (sequence is synthesized)
acaaagtgagaaggcgagttaaatacgttttgatgaagatagacagagcttcactcttgttgcccaggctgcagtacaatggtgcgatctcagttcaccacaacctccgcctcccgggtt

SEQ ID NO: 814362 - DNA, 120 bp, Artificial Sequence
  ENSG00000231510_2 (sequence is synthesized)
ggattacagagcctgactttctcatcgaaaccatggctgcttggacccaggctctccccatgaggtaataaatgtgcaagcactttgcagggaaaataagtgcctgacacctgacataaa

SEQ ID NO: 814363 - DNA, 120 bp, Artificial Sequence
  ENSG00000231515_0 (sequence is synthesized)
agctggtgaggctccccctgccttgccgtggatggagggagacgatgttccggagctggtcaggctcccgcgttgccgtggacggagggagacgatgttccggagctgaagccgaagcaa

SEQ ID NO: 814364 - DNA, 120 bp, Artificial Sequence
  ENSG00000231515_1 (sequence is synthesized)
tttgaccttgctggttctctggtggcttttctgagtctgggtcattgatagacgaataagctacaacgaaggtgcccctgggccgcaaacccatctccaaaggctgcgagactctggagg

SEQ ID NO: 814365 - DNA, 120 bp, Artificial Sequence
  ENSG00000231515_2 (sequence is synthesized)
gagagagtagtcaggaagaagaggcattttaccagtttccctcggctgtcccagccaacatcacatctgctgctgcttatatttgtgtccagctgctgttatgtgggtaattcaggggca

SEQ ID NO: 814366 - DNA, 120 bp, Artificial Sequence
  ENSG00000231515_3 (sequence is synthesized)
attcagaggcatgaagtttcagacgagactgagagccatggagtttgctttaatctccggaacatggaggattaaccgtgtgaccttgggtgagtcccccccggctgtggctcttcatgt

SEQ ID NO: 814367 - DNA, 120 bp, Artificial Sequence
  ENSG00000231515_4 (sequence is synthesized)
ctgcagtgggttttagagaaaggcctgtctccctatgtcacagagatttgggaacaagaaatgaaaactgatgcagaaaccactcaaagctccttggaataaagatactatctgaattgc

SEQ ID NO: 814368 - DNA, 120 bp, Artificial Sequence
  ENSG00000255479_0 (sequence is synthesized)
ctgtgatgtggaggccatagctccactggactcatgaggagactgaggctcagagcaatgaagtgacctgctcaaagttaaggagcttcagtttggacccaatttgttctgatcctaagg

SEQ ID NO: 814369 - DNA, 120 bp, Artificial Sequence
  ENSG00000255479_1 (sequence is synthesized)
tcactatccttaatccctctccctgtggggtcttccctatcttgagcctgtggacagctgtgcagtggcaagaaaaaggccttcagagctacgcagacctggcttcaaatcccagcctcc

SEQ ID NO: 814370 - DNA, 120 bp, Artificial Sequence
  ENSG00000255479_2 (sequence is synthesized)
ctgatgagccctggtggtcttgcatgcttgcccttgggactcagacaccatattgtgaggaagcccaagctacatgcagaggccactatagttgttctggccaacagcccaagcttcagc

SEQ ID NO: 814371 - DNA, 120 bp, Artificial Sequence
  ENSG00000255479_3 (sequence is synthesized)
ccaaatgcagacttgagaacaaactaaatgtcattgtctcaagccaccaattttcagggtggcttggtacacagcaccaggtaacaggaatagcccccctcttcctctgcagctctcccc

SEQ ID NO: 814372 - DNA, 120 bp, Artificial Sequence
  ENSG00000255479_4 (sequence is synthesized)
aggtacaggcaagctccccaacccatgcttcatccccaccccacagacagaacctggagtcagtcctcccacccacaactgtgccttccaaactaagctcaaagcccagctctgttgctt

SEQ ID NO: 814373 - DNA, 120 bp, Artificial Sequence
  ENSG00000255479_5 (sequence is synthesized)
tcagatgggtgccctagggcaagtcaccaaccctatatgacaaatccctctgtgtcaaatgggaattataatagtgcccctgaggagtcttggagagatttaataaagtgcctggaacat

SEQ ID NO: 814374 - DNA, 120 bp, Artificial Sequence
  ENSG00000255478_0 (sequence is synthesized)
tcactgatagagaatctaattgctttccagtaggcggggactacataaattctggagcaccagcctgccacagggctggagtgcaatacgtcttcatggctcactgcagcctcaacctcc

SEQ ID NO: 814375 - DNA, 120 bp, Artificial Sequence
  ENSG00000255478_1 (sequence is synthesized)
atctcagcctcctgaggagctgaggccacagctgcatgccaccatacccagcaccaggctcaggctggaaaccatccaaagcgcaatccctgacctcaggcagctcacagtccagtgggg

SEQ ID NO: 814376 - DNA, 78 bp, Artificial Sequence
  ENSG00000255477_0 (sequence is synthesized)
gaacgtggaaagtctagactgactaagcctggcctccatctgtctctggtgctggatgtttcctgggcttaacaccag

SEQ ID NO: 814377 - DNA, 120 bp, Artificial Sequence
  ENSG00000255477_1 (sequence is synthesized)
tgatttgccactgaaggctgcactatcagcttgtctacttttgaggttttgggactcaggttggctccctggctcctcagcttgcagatgggctattgtgggactttaccttgtgatcat

SEQ ID NO: 814378 - DNA, 120 bp, Artificial Sequence
  ENSG00000255477_2 (sequence is synthesized)
tagatcatgacatggagccctcatgaatgggattcatgctctttcgaaagaggtcccacgactgccttaccccttccaccatttgaggacacagctaggagataccgtctatataccaga

SEQ ID NO: 814379 - DNA, 120 bp, Artificial Sequence
  ENSG00000255477_3 (sequence is synthesized)
aatacacaagagaagagacctcattgaaacctcaacagacaccaaatctgctgtcaccttgatcttggactccccagcgtccacaactgcaagaaataaacttctgttgtttataaatta

SEQ ID NO: 814380 - DNA, 120 bp, Artificial Sequence
  ENSG00000255476_0 (sequence is synthesized)
tttgtggctccccagcctacaaaagactttcatgtcctctattgggctgggaaaatcctgttcttcaagttatctttagtcatgctagaaaagaagcaaactgggaagagaaagacaaga

SEQ ID NO: 814381 - DNA, 120 bp, Artificial Sequence
  ENSG00000255476_1 (sequence is synthesized)
gaaattcataggggaaaaaaaattaaagaccagacttaaggttcctgtgagaaaaaaggaaactgaattataaatctgtcatatttagaaagactatgaaaatgatgttagataaaaatt

SEQ ID NO: 814382 - DNA, 120 bp, Artificial Sequence
  ENSG00000255476_2 (sequence is synthesized)
agtgcagtgcttgttcaagaagttttgcaaaggagaagaggaagatgaggagtgtagtgaccagccattagaagttgacaacaaccaagtgggagcaatcatcaaagctcatccttttac

SEQ ID NO: 814383 - DNA, 120 bp, Artificial Sequence
  ENSG00000255476_3 (sequence is synthesized)
aactacacgagaaggtgccgaagagctcaccattgaccattctatggtcatttggcatttgaagcaaactggaaaggtgaaaaagctcgataagtggatgcctcatgagctgaaccaaaa

SEQ ID NO: 814384 - DNA, 120 bp, Artificial Sequence
  ENSG00000255475_0 (sequence is synthesized)
agggacgcagcagtgagggtaaaccagccgatgccttggtcttcacgggaccctctgaaggagaatgaagaaatccagaagcagtggccaccggccaaaagaatggccacacagcctctc

SEQ ID NO: 814385 - DNA, 120 bp, Artificial Sequence
  ENSG00000255475_1 (sequence is synthesized)
cagaaccacagcggggctgcactgggacccatgctgggtctctgcctgaccctgggcttttcagagagcccacaaaggcttttctccaggaacaccctccctgttccagaccacatggca

SEQ ID NO: 814386 - DNA, 120 bp, Artificial Sequence
  ENSG00000255475_2 (sequence is synthesized)
cttcagggtttctgagagtctcggtgaactcacacacccaggcactgaagaagacgaggctgcggagagaagtctagtccctccggagaggccgagtgatctatgggaatggctcatcac

SEQ ID NO: 814387 - DNA, 120 bp, Artificial Sequence
  ENSG00000255475_3 (sequence is synthesized)
aggctggagtgcccacaattctctctctccttaatttaaagaaatatagaggagcatgtttgaaggagcataaaaaaattataatgcgaactcactgactcactctttcaacaaaaatgt

SEQ ID NO: 814388 - DNA, 120 bp, Artificial Sequence
  ENSG00000255474_0 (sequence is synthesized)
tgccttttaaacgcttgttctgtctctttctaactcctttgtctccgccggactcggggtatccgctgggtggtgtggggctggtttccccaacagctttctctccacccagcttcatag

SEQ ID NO: 814389 - DNA, 120 bp, Artificial Sequence
  ENSG00000255474_1 (sequence is synthesized)
atgacaccctgcctgctaggccagatgttctccggccaagaacactattatagctgcctggcttctccctgagcagcgtcaggtgtgaggagtgcgcatggcagctgcccagtgacagat

SEQ ID NO: 814390 - DNA, 120 bp, Artificial Sequence
  ENSG00000255474_2 (sequence is synthesized)
ttcatttcagtcaacaaccacataacagatcatcaaaatacataaagcaaaaactgacagaactaaagttaaatatacatatctacaattatgtagagaataacaaacaaaaaaatagaa

SEQ ID NO: 814391 - DNA, 120 bp, Artificial Sequence
  ENSG00000255474_3 (sequence is synthesized)
caaaaatgttccacgccttggtcaatggtaccaccagccagcgaggttcccaagccaagaacttcggaagcatccgtgattcttcatcttccacatccactttatcaccggaagcacgca

SEQ ID NO: 814392 - DNA, 120 bp, Artificial Sequence
  ENSG00000255474_4 (sequence is synthesized)
tttcacatcttgcttgaatgacttccccaggcccagccagtctcccgcctccagctccgcccccttctgactccctttatgtggtacaatcagagagcccttcccaaagcacaaatctgc

SEQ ID NO: 814393 - DNA, 120 bp, Artificial Sequence
  ENSG00000255474_5 (sequence is synthesized)
tttcactgctttgcttcaagccctttcgtggctcctatttccagctggatgaggtccaagcctcttaacgtgctgtacgtgtacatgcctgacccccgctacttgaccagccaagtttct

SEQ ID NO: 814394 - DNA, 120 bp, Artificial Sequence
  ENSG00000255474_6 (sequence is synthesized)
tcatagcgctgtgtctttgttcctcctgcctagaatgtccttccccttttctctcgcttcatggtgtgccaaactcctatcctgtgagatccagcttacacgtcagcttccccgtgatgc

SEQ ID NO: 814395 - DNA, 120 bp, Artificial Sequence
  ENSG00000255474_7 (sequence is synthesized)
ttttcctaactccctattcagccagtgaagtgctccctgcgttcccatgtggcttgtatctctgtaaaagctccacagagctgttttaatttatccgttaatgtacatgtcttccccact

SEQ ID NO: 814396 - DNA, 120 bp, Artificial Sequence
  ENSG00000255474_8 (sequence is synthesized)
agacttttgctccttaaagtatctccttcatctctgctttgcataacctaacagagttcaacacataggagtgtcttaataaatgctgaataaaataattaataaacaaatgaaacaata

SEQ ID NO: 814397 - DNA, 120 bp, Artificial Sequence
  ENSG00000255472_0 (sequence is synthesized)
tgtgtgttattaactttttattttgaattgattatgggttgacaggaagttacaaaaaatggtacagagggggctcgtgtgcccttcacccagtttcccccaatggttacatcttacata

SEQ ID NO: 814398 - DNA, 120 bp, Artificial Sequence
  ENSG00000255472_1 (sequence is synthesized)
ctcagatgtggttttagaaatttatgttcgattagagccgggcctgcctcattcgctgcctggtcaggggcagactctggagtctgggggatttgggaggagcttctggaagagaaggga

SEQ ID NO: 814399 - DNA, 120 bp, Artificial Sequence
  ENSG00000255472_2 (sequence is synthesized)
tggggaatgggtgagagaagataccttgaaatgccagtgagccaaggtaagaagactggaagaaaaagaggttggaaaaaggaagtcttgttacagggatcagagtgttggaaatggaga

SEQ ID NO: 814400 - DNA, 120 bp, Artificial Sequence
  ENSG00000255472_3 (sequence is synthesized)
cagctggcctgtggtggtagaggttggggagtggctcaggaattaaattcccgaatagagaccagcgatacctattggatcagcttcatacttgcgggagcagagtaggtagagcttctg

SEQ ID NO: 814401 - DNA, 120 bp, Artificial Sequence
  ENSG00000255471_0 (sequence is synthesized)
ctatttcttgatccctctcagctactgggagctgctttgtgccttggaagcctcaagctgaaatggatgtcagcctcaagtttaactccaagagggttcaccttgtttctttgaacaaaa

SEQ ID NO: 814402 - DNA, 120 bp, Artificial Sequence
  ENSG00000255471_1 (sequence is synthesized)
accacagtgtctctagctcccgctcctggatacttggttactgtgtgtttcggtaaaaaagcatccacaacatgaatatccactaagctgtaacagggcctgctgcaactatagtatttc

SEQ ID NO: 814403 - DNA, 120 bp, Artificial Sequence
  ENSG00000255471_2 (sequence is synthesized)
ctgaaaaagtatcaactgccacaagggccacaaataaagtctgtgaacttgaaataaccatggagaatgaaatgttctgattcagatcatcggtgggatttcactgggaaatctcccact

SEQ ID NO: 814404 - DNA, 120 bp, Artificial Sequence
  ENSG00000255471_3 (sequence is synthesized)
attagatcacatcctgaaacattaagcatatgctcctttgtgaggcttgcctggctgaacttgaactggattgagtgaataatttcttaaaaacaatcaaaatcacagatttattctatt

SEQ ID NO: 814405 - DNA, 120 bp, Artificial Sequence
  ENSG00000255471_4 (sequence is synthesized)
ttaaatacttatatttacttatatttcattcagaaattagttaacaaataatttttgagtatcctgggaactgttctaatcattaaacatgcaagtttgaagaaagtaaggatgaatctg

SEQ ID NO: 814406 - DNA, 120 bp, Artificial Sequence
  ENSG00000255471_5 (sequence is synthesized)
cctgcgtggggctctcaatctagcgagaagcagataagaagacaaatgtcagggaagatcacacaaccttcaggatctaaaccttaaccttcctggctgatgctgaaagagagcttgtat

SEQ ID NO: 814407 - DNA, 120 bp, Artificial Sequence
  ENSG00000255471_6 (sequence is synthesized)
gaaacacgttcttacaaaactatttggtggatcgtgacaaagacgaatgactgggtactataatttaaaatggaaaataagggatggagaagacttaatcctatctggaaggagccagtg

SEQ ID NO: 814408 - DNA, 120 bp, Artificial Sequence
  ENSG00000255471_7 (sequence is synthesized)
cacagcaaagatggcagagagagaaaagagagggagtgacaatgaagtaaggctacagagagatgaccaagtgtcccagaggaggaattctctttcggaaagagatagacacctcttcct

SEQ ID NO: 814409 - DNA, 120 bp, Artificial Sequence
  ENSG00000255470_0 (sequence is synthesized)
tggagagcgctttcaggaagtcggacttacaggaggctgcgtacagtgctgcctggaagatctgcacgatccagccgtggtacttcatgagggccatttcgtaggccttggtggcgttga

SEQ ID NO: 814410 - DNA, 120 bp, Artificial Sequence
  ENSG00000255470_1 (sequence is synthesized)
cgcggatgaggttgaggtggttctcgtccggctcctcgttgcagatgctctggaggaagacctggatgaagcggaggcctcttttcagccacatcagcgccagcgtggcccctactttga

SEQ ID NO: 814411 - DNA, 120 bp, Artificial Sequence
  ENSG00000255470_2 (sequence is synthesized)
gccgctctgctccatacatttctttctccacctccaggatgttctgcagggtccggaacttggctgggttggtgtcgtacacagctttgatttttgtgatgttgctgcttatgtctgcct

SEQ ID NO: 814412 - DNA, 120 bp, Artificial Sequence
  ENSG00000255470_3 (sequence is synthesized)
tgatgggagtaaacactggggacccaaggcaatcgaagaagggcggcaggtgggacaccgcctcgaggaagggcccagtctcgatctgcttgtccgcgggcagcggcttcagcaggtgtt

SEQ ID NO: 814413 - DNA, 120 bp, Artificial Sequence
  ENSG00000255470_4 (sequence is synthesized)
accgcaccccccgccaccgccgtcagcgcccgggcagtcacagccctttttttgaggcagtgagcagacctgcaatgaaggggaacagctgttctcagaacgaccaactgcagaggacac

SEQ ID NO: 814414 - DNA, 120 bp, Artificial Sequence
  ENSG00000255470_5 (sequence is synthesized)
tctgttgagtgggaggttcctgtaggagttccagtgagatctggtgactgagccagcctttgcaagatgctggatgaccctgtgattttcaggtaggagctgcttgagagaaatagttac

SEQ ID NO: 814415 - DNA, 120 bp, Artificial Sequence
  ENSG00000255470_6 (sequence is synthesized)
caacactcttctaaattccacacctagtctgttgcactagaaattccaagacagtttctctgctcttaaagacctcagggtgcggttgaagagaaagatgtgaggacaaatatttgaagt

SEQ ID NO: 814416 - DNA, 120 bp, Artificial Sequence
  ENSG00000255470_7 (sequence is synthesized)
acactgttataagtgctgtagtggagcaatgtgtgaggccaagtgagttcagaatgggcttcagggacagaatctaagccttcatgaagttgaagttttctcctatcaaaagaaaaagaa

SEQ ID NO: 814417 - DNA, 120 bp, Artificial Sequence
  ENSG00000248646_0 (sequence is synthesized)
agtgaaaccatctgggcctggagtaaaggtgtttggcattgttactgtggtcactgatgaggaggtagagggaggattcacagccaagttgccatgatcttgtcgttatggagacagaca

SEQ ID NO: 814418 - DNA, 120 bp, Artificial Sequence
  ENSG00000248646_1 (sequence is synthesized)
cgttgtatctcattagcagaagagcctagtgagataggagttgcatctctgctcatccagatctctagagaagggatctacccctggactttttcctggaaaactcttcacgaagccata

SEQ ID NO: 814419 - DNA, 120 bp, Artificial Sequence
  ENSG00000248646_2 (sequence is synthesized)
ggtatggatggaagaaaatgcaccagtccaatagcagtaggagcctgggtattctatgcatttgagtatctcacatcttctggatctgcctaaacccagtcgccaagtaccacagatatt

SEQ ID NO: 814420 - DNA, 66 bp, Artificial Sequence
  ENSG00000235643_0 (sequence is synthesized)
taataaatcttgctactgcttactttttgggtccacactggttttatgagctgtaacactcaccac

SEQ ID NO: 814421 - DNA, 83 bp, Artificial Sequence
  ENSG00000235643_1 (sequence is synthesized)
tcttttgctctttgtaataaatcttgctactgcttactttttgggtccacactgggttcactcctgagccagcgagaccacga

SEQ ID NO: 814422 - DNA, 88 bp, Artificial Sequence
  ENSG00000235643_2 (sequence is synthesized)
aacccaccagttgcggacacagttgttgtcacagcccggcctgccccaacctgcctcagaggaagcatcggagacactccaccagctt

SEQ ID NO: 814423 - DNA, 120 bp, Artificial Sequence
  ENSG00000235643_3 (sequence is synthesized)
acctgcctcagaggaagcatcggagacactccaccagcttctcccatggcttccctcatcctggggccaaggcagcatctggtacagagctgaggcaggggagagatatccttggagcca

SEQ ID NO: 814424 - DNA, 120 bp, Artificial Sequence
  ENSG00000235643_4 (sequence is synthesized)
cctgagcaactcaggcttcttccatgtggcaggggcggggtgaggccacagacagctccagctcacatcaacccagctaatggcttcacaggaaagagggaagcaaaatcccagagaagt

SEQ ID NO: 814425 - DNA, 120 bp, Artificial Sequence
  ENSG00000235643_5 (sequence is synthesized)
ctgattggcccggcctggatctcatggctgtgggcaatggaaaagctgagggaactggagaacagctgctgtcctctccctgcgcacatctgttctgcctcatgccaaagggagacaatg

SEQ ID NO: 814426 - DNA, 120 bp, Artificial Sequence
  ENSG00000235643_6 (sequence is synthesized)
gctaaagggggcctgtactggtcaggccctgcagagaaacagaacacacaggttgtgtatgcatgtataggtaggtagggagacagagagtggggagagagagaggttcgagaaattggc

SEQ ID NO: 814427 - DNA, 120 bp, Artificial Sequence
  ENSG00000235643_7 (sequence is synthesized)
tcatgtgattacagaggctggcaagtccaaaatttgcagggtgggtgatacggtttggctgtgtccccccaccaaatctcatcttgaattgtagctcctgtaattcccacatgtcatggg

SEQ ID NO: 814428 - DNA, 75 bp, Artificial Sequence
  ENSG00000235643_8 (sequence is synthesized)
atcttgaattgtagctcctgtaattcccacatgtcatgggagggaccccatgggaggtaattgactcatggggct

SEQ ID NO: 814429 - DNA, 88 bp, Artificial Sequence
  ENSG00000235643_9 (sequence is synthesized)
gatctgatggttttataaaagggagttccctgcccaagctccctcttgcctgctgccatggaagacgtgcctttgctcctttgtcgtg

SEQ ID NO: 814430 - DNA, 120 bp, Artificial Sequence
  ENSG00000177822_0 (sequence is synthesized)
tgcggtttcacagagccaacattattctctacctccccttcctcttcctctttctttatggatggcaaacagcgttcagatgacagattttggaaaattgtcttaggagacgcattctca

SEQ ID NO: 814431 - DNA, 120 bp, Artificial Sequence
  ENSG00000177822_1 (sequence is synthesized)
ggcagttccagtgtattggtattttggatgtttctctgcattttgtcatacggttcagaagggtgataggctttctgtgaactgctgggcttcaagaaggctattatcttccactcaggt

SEQ ID NO: 814432 - DNA, 120 bp, Artificial Sequence
  ENSG00000177822_2 (sequence is synthesized)
ttaatggaggaatttatgggattttgccaccttgtgaggttcagtgctagaatttctgcgttggatggatcaagaatctacggggagccaagtcacttaaaagtatcagttattcccaat

SEQ ID NO: 814433 - DNA, 120 bp, Artificial Sequence
  ENSG00000177822_3 (sequence is synthesized)
attcccttcatctaatgaagttcctccaaatttcatgatccttgtgacaatccaccccagactatggtgagagacccagagctgcagcagttttggttgtggttattctgacattgaccc

SEQ ID NO: 814434 - DNA, 120 bp, Artificial Sequence
  ENSG00000177822_4 (sequence is synthesized)
gaagggagcaagaatgtttctcaggagcccttgcctggactccccttccagaccacaacttccccggtgatatgggaccctggaggaggaagtctacaatgtgggagagatgagttacca

SEQ ID NO: 814435 - DNA, 120 bp, Artificial Sequence
  ENSG00000177822_5 (sequence is synthesized)
attagggaactggcattcccctcctccactgtttgaaaaggtcagaactggtccttcaagccaaataagttactgcttttgaggtgaagctggtaagacagatctggggcctgcaggcaa

SEQ ID NO: 814436 - DNA, 120 bp, Artificial Sequence
  ENSG00000177822_6 (sequence is synthesized)
agtgggttcagtttccgtttgtagtcaaggcaacttcttccaaaagaggctttcaacctgcctgggcttctaggcccagttgagatccagtgtgactcacaggttataactagtggacct

SEQ ID NO: 814437 - DNA, 120 bp, Artificial Sequence
  ENSG00000177822_7 (sequence is synthesized)
tccatcctcacggagccttggctacacctaccacttggcctgggtcagaaataaaacaaaaactaaaacgaacaaacaaacaaacttaaaaacataaaggtagagaaagaaagaaaacca

SEQ ID NO: 814438 - DNA, 120 bp, Artificial Sequence
  ENSG00000177822_8 (sequence is synthesized)
cctcagtttgaatctggggttgtcatgtctagctgtatgacgttgagcaagtcactcgacttctctgagcctcagtttccacagattatagggctgagtgagatgaggttgtgacggtgt

SEQ ID NO: 814439 - DNA, 120 bp, Artificial Sequence
  ENSG00000177822_9 (sequence is synthesized)
ttgcacactacattggacaaggggctgagcatcatcatatggccaaaagcctgacaaacaacactggtccccacacaagcaactctggtccctcctgaacccacaccaagccaagtgttc

SEQ ID NO: 814440 - DNA, 120 bp, Artificial Sequence
  ENSG00000177822_10 (sequence is synthesized)
gagttcactttctttctctcccccgcgctccccctctccccgcccgccggcccctccagcctcctccaaggcggcggaccaggccgggccggagttttcggggttcagcccgcgagcggg

SEQ ID NO: 814441 - DNA, 120 bp, Artificial Sequence
  ENSG00000177822_11 (sequence is synthesized)
aggaccggggaggcgagggaggaggaaggcgagaagggccagatcgcgggagagcccaatcacggggcgagctggacctggctgtgatcatttataatccttgactcctccgctccgcca

SEQ ID NO: 814442 - DNA, 120 bp, Artificial Sequence
  ENSG00000177822_12 (sequence is synthesized)
cttgtcaagatgacaggggtcatccgtgaataacacttcacgctgatgaatggctcttgccggctttcggctctgatgaggggtctgcccgccgccgattgaaaacactaatgaacttac

SEQ ID NO: 814443 - DNA, 120 bp, Artificial Sequence
  ENSG00000177822_13 (sequence is synthesized)
agacactgccgggaagacggattccgaggcagaagggtgtaattaaggatttccacccccgaagttccatcatttgaggccgttaggaaaagctgatgttgtgcagtgccaaactaccac

SEQ ID NO: 814444 - DNA, 120 bp, Artificial Sequence
  ENSG00000177822_14 (sequence is synthesized)
acgcttcctccttcggatgaatccctggaaagcagagaggcagctcgctacgtgaccatcatgctttttacctcactgagctgttgtcaagagagggcggggatggcgggcagctcacgt

SEQ ID NO: 814445 - DNA, 120 bp, Artificial Sequence
  ENSG00000177822_15 (sequence is synthesized)
cgtgccctccgcagcaataaaaactggagcgggagaagaaatgcaagacatcgctgtctgttttgcaagcctctggccgctctcagcaaactctgcccggcgcggctggtgactttgcgg

SEQ ID NO: 814446 - DNA, 120 bp, Artificial Sequence
  ENSG00000177822_16 (sequence is synthesized)
agagcctctgaaaatgacccgcgccttcctttccacagtgttctttcgtccgagaccgaaaagcgcaaatgacctttggacagggaagggaggcagtaaacactcagacttccttaccag

SEQ ID NO: 814447 - DNA, 120 bp, Artificial Sequence
  ENSG00000177822_17 (sequence is synthesized)
cccctggtgggcactgcagcagaacaattgtctgccccccaggttcaagcacctaggcctccgccccgcatcacctggccaggggcggacccgggagtcctccgaaggctccactcccca

SEQ ID NO: 814448 - DNA, 120 bp, Artificial Sequence
  ENSG00000177822_18 (sequence is synthesized)
agtttgctgctcctcccaagacactggccactttctactcactgaagttcccaccgcagcgctggctcccggctccctagctcccgccccctgtctgcaggaaagccctcccccggagct

SEQ ID NO: 814449 - DNA, 120 bp, Artificial Sequence
  ENSG00000177822_19 (sequence is synthesized)
tttcgggtccgggacggggcggcggcagaggtggggcgtgcgtgcttggggctgccgagtgagtgcggctccctggtgcgcgcccgagcatctccccgccctctcctgggaccagcagtc

SEQ ID NO: 814450 - DNA, 120 bp, Artificial Sequence
  ENSG00000177822_20 (sequence is synthesized)
tgcccgtggagggctaggagcccgcgaccaggcctgccccggccgtcgccaacctgtccttggaagcgtggcggagactggtgcgctctcagcctcgtcgcgccagccgcctcgcgccac

SEQ ID NO: 814451 - DNA, 120 bp, Artificial Sequence
  ENSG00000177822_21 (sequence is synthesized)
cctccactttcagcttcagagcagaggattccgccgacctccacctgtacctgtactcggccgttaggaaatccacttgcatttttaactaccgtgcagaaccagaaacagatcgagcac

SEQ ID NO: 814452 - DNA, 120 bp, Artificial Sequence
  ENSG00000177822_22 (sequence is synthesized)
tgggagaacaaggacgacgcctcctaggaaagcctgaacctttatgttagtttatccaaagtttgggctagaagtgaggagaatccctaaactcgaggtggtgtgcccagacccacagcc

SEQ ID NO: 814453 - DNA, 120 bp, Artificial Sequence
  ENSG00000177822_23 (sequence is synthesized)
gcgcttcccccggtgcagatcgcgggagagcccaatcacggggcgagctggacctggctgtgatcatttataatccttgactcctccgctccgccacttgtcaagatgacaggtaaccta

SEQ ID NO: 814454 - DNA, 120 bp, Artificial Sequence
  ENSG00000177822_24 (sequence is synthesized)
aaaaatattgcctctgacattagggaactggcattcccctcctccactgtttgaaaaggtaggattgcatcctgcaagaagatgctgaagtcctaccccctagtacctgtgaatgtgaga

SEQ ID NO: 814455 - DNA, 120 bp, Artificial Sequence
  ENSG00000177822_25 (sequence is synthesized)
tcgggtctcatattcacaaaatgtggtacagagacacaatgaaatactaagcaaccggctgggcatggcggcccatgcccataaccccagcactttgggaggctgaggaggcagatcacc

SEQ ID NO: 814456 - DNA, 76 bp, Artificial Sequence
  ENSG00000177822_26 (sequence is synthesized)
gtgagccaagattgtgccactgttggtcatattaaaatgaggtcattagggtaggcctaatcccaatatgactgat

SEQ ID NO: 814457 - DNA, 120 bp, Artificial Sequence
  ENSG00000177822_27 (sequence is synthesized)
atgaggtcattagggtaggcctaatcccaatatgactgatgtccttataaaaagggaattctacacacagacaggcaaacagagagagaagacattgtgaacacacagggagaatgccgg

SEQ ID NO: 814458 - DNA, 120 bp, Artificial Sequence
  ENSG00000177822_28 (sequence is synthesized)
ctacaagcaaaggaatgcctgagcctactagaagcaaggagagtagccgtcagaagaaaccaaccttgctgacaccttgattttcgacttgtagccactagaactgtcagacaataattt

SEQ ID NO: 814459 - DNA, 120 bp, Artificial Sequence
  ENSG00000177822_29 (sequence is synthesized)
tctatcatgtaggccacccagtttgtggtactttgttatggcagaccaaggaaacacatgtatcctccatttctgtcttacattccatatgcagtcttttagcctttcttgttggttccg

SEQ ID NO: 814460 - DNA, 120 bp, Artificial Sequence
  ENSG00000177822_30 (sequence is synthesized)
gcttccatatttatccacaagtgtctgctcaccccctcctctgctaccactgcgcactgtgcctgagtccctccatctctcacctggctccctgcagtagctgcctaaccagtccccctg

SEQ ID NO: 814461 - DNA, 120 bp, Artificial Sequence
  ENSG00000177822_31 (sequence is synthesized)
cttgtaccttggtctcctcacaacctacttccaacatggtagccagagtggtgctcttaaaacagtagtaactgcactcagatgtttatcgcagcactattcaaaacagcaaagtcatgg

SEQ ID NO: 814462 - DNA, 120 bp, Artificial Sequence
  ENSG00000177822_32 (sequence is synthesized)
aaccaacctaagtgtccaccaacagttaactggataaacaaaatgtggcacatagacacagtgaaatactaagcaatcggccgggcatggtggctcatgtatgtaatcccagtactttag

SEQ ID NO: 814463 - DNA, 120 bp, Artificial Sequence
  ENSG00000177822_33 (sequence is synthesized)
taaaaggtgaagtgacatctttactgagaccttcccggtcagatgcaatcggattgactgaaagctctcagaacgaaacgaaattctcccacctgggcagcacgtgctggccagagaaat

SEQ ID NO: 814464 - DNA, 120 bp, Artificial Sequence
  ENSG00000177822_34 (sequence is synthesized)
gactgatgaggagtcagctctgcactactgctggacaacaatttcaacatctcatttaaaactaaagcagtgagttaaggtggtttctgaattatgtattaaactcagcttccagatata

SEQ ID NO: 814465 - DNA, 120 bp, Artificial Sequence
  ENSG00000177822_35 (sequence is synthesized)
cgctgcagaagccttctgtcccctgcctgccccggaaagcggtgacatcccggggctttccgctcgctggaagccccccaggatcctgttaagacgcccccgcagaagacgcggggcctc

SEQ ID NO: 814466 - DNA, 120 bp, Artificial Sequence
  ENSG00000177822_36 (sequence is synthesized)
cctcgccacacatcgggggccgaagaggacctggcgggctcccctccccgcccccactgggcgcccagcctccggactgccttcctcagggaccccggggctccccagtacgggggcgcg

SEQ ID NO: 814467 - DNA, 120 bp, Artificial Sequence
  ENSG00000177822_37 (sequence is synthesized)
gtgcgagggagaggaggagaggagaggagcctaccatgcgcttcccccggtgcagatcgcgggagagcccaatcacggggcgagctggacctggctgtgatcatttataatccttgactc

SEQ ID NO: 814468 - DNA, 120 bp, Artificial Sequence
  ENSG00000177822_38 (sequence is synthesized)
aatcggttttaggatggagagaagttgaagccaacccagtctgagtggtaagggtgaaagagagacattttatcgtaataaaagtcttcattgattaggaacttagaacagctccaacaa

SEQ ID NO: 814469 - DNA, 120 bp, Artificial Sequence
  ENSG00000177822_39 (sequence is synthesized)
ttgctaagtgcccgagcgcagcgcgttaagtagagaagtcttggtagtaagcgaacccgacccggctctcggggcgctagtgacggaaagcagcacgcatatctttgcgggaagaatcta

SEQ ID NO: 814470 - DNA, 120 bp, Artificial Sequence
  ENSG00000177822_40 (sequence is synthesized)
gagtcgccctgggatagatccatctccttctgccactgaatttcacacttgaaaaagataaggtcatgggggcggatgaatgatatccctcactcatttagccattcttattattatata

SEQ ID NO: 814471 - DNA, 120 bp, Artificial Sequence
  ENSG00000177822_41 (sequence is synthesized)
aaaaaaaggcttgtcaattatgaaggtgtgtcccagatattacatgaagatcatgcaaactacttgaaatttgaatccggacatgatcgtaaggaaactctttcataaagcacttttgtg

SEQ ID NO: 814472 - DNA, 120 bp, Artificial Sequence
  ENSG00000177822_42 (sequence is synthesized)
gcctagttcccacacacacacaaaagtattaggtctttaaaacttttccaagtagtaagtgagactccctcttactgtctacgaatacacaataaagagatgagacactgccccaatcct

SEQ ID NO: 814473 - DNA, 120 bp, Artificial Sequence
  ENSG00000177822_43 (sequence is synthesized)
aaagaggccagaactgaagtgctacattgtgtgagttaggggatgcttcttttttccagctcttttttctagaatcctcattacagctaacgctggtaataaaggtaggaaaacaataga

SEQ ID NO: 814474 - DNA, 120 bp, Artificial Sequence
  ENSG00000177822_44 (sequence is synthesized)
actcataaaacttagaaatggtaataaatcttggctcctgtctctagcccagttccttcttacatgagattcaaagtttttcagtatgcaatgctgaacgttcacactatggttgcaaaa

SEQ ID NO: 814475 - DNA, 120 bp, Artificial Sequence
  ENSG00000286419_0 (sequence is synthesized)
gcggagtggacactttggtgggggagacagatgtccagaaggacacgccatccagacacataatcttgtgagggtgagagctcacatggtgctctgagtgacaaggacagtggctgctct

SEQ ID NO: 814476 - DNA, 120 bp, Artificial Sequence
  ENSG00000286419_1 (sequence is synthesized)
gtttggaggcttggagaggcctctctgaggagaggatgtttagggcatagacctggtggtttcaaggctcttctggcacccgtgatgaggaaagctgtgattctgtggcccctctggcat

SEQ ID NO: 814477 - DNA, 120 bp, Artificial Sequence
  ENSG00000286419_2 (sequence is synthesized)
ttcctggaccttcgggcttctgagtctatttgaacttcatggccaggtgcctctcactaatgaaagggcctccactgagatttccttgggaacaaaggagagctcagttgttcttgaggc

SEQ ID NO: 814478 - DNA, 120 bp, Artificial Sequence
  ENSG00000286419_3 (sequence is synthesized)
tgcccagcctggaggcaggtgctggctggactgacctcctgggacccacttaagctttctacaaacaacacatcatctgggctgagtggggggttctcggggcaaaaaaaaaaaaaaaag

SEQ ID NO: 814479 - DNA, 120 bp, Artificial Sequence
  ENSG00000286419_4 (sequence is synthesized)
tcttctacggaagctgccttgtgacttggccctgagctcaggcagggtggggaccctgagcaccagagaggtcattgttccgtgaaagccaaggcggcaacccctccctcttccccttct

SEQ ID NO: 814480 - DNA, 120 bp, Artificial Sequence
  ENSG00000286419_5 (sequence is synthesized)
tgtgcttggaacctccagacccctggactcccaggggagcccagggagtcagtgtatgaggtgctgaagccaagtccttccagagcttgggggaaggtcagttggtttataaatcacctg

SEQ ID NO: 814481 - DNA, 120 bp, Artificial Sequence
  ENSG00000286419_6 (sequence is synthesized)
aatttcatcagggtcaccatgggggagcttcatgcatttttcaaagggcagttgttgggtggtcactctgtgttaggcgcagtgtaggagcctggagaaataaaccaaaatgtacctgaa

SEQ ID NO: 814482 - DNA, 120 bp, Artificial Sequence
  ENSG00000237919_0 (sequence is synthesized)
gcactgtgctagactcaggcaatacaaggatggacaagaaagaaagcatccctgccttcatgaaactcacagtctgaagtcaataaacaaaaatttcaggaagaagcatgcaatttttgg

SEQ ID NO: 814483 - DNA, 120 bp, Artificial Sequence
  ENSG00000237919_1 (sequence is synthesized)
taattcaatgaaatataaagatgaatcagaagtccggtatagaatgcatcatccattggttctggatttaacatacaaaatccgtaaaagaactgaaatgttctgaagcttgaatctctc

SEQ ID NO: 814484 - DNA, 120 bp, Artificial Sequence
  ENSG00000237919_2 (sequence is synthesized)
tcactcagatttgggacattagtctcattctgaagcacaccaatgcttccagaactaccagcatgctgtaatgaaaggctagtaacacagtcagaagaggaagcaaggttggtttgacat

SEQ ID NO: 814485 - DNA, 120 bp, Artificial Sequence
  ENSG00000237919_3 (sequence is synthesized)
gacttgctcttgatgcataaagctttggtgcttccttgtcacctgatactataaataacattccaaactttttaataaaatgttttattcccttatgtgggaatattattaactagtaaa

SEQ ID NO: 814486 - DNA, 120 bp, Artificial Sequence
  ENSG00000237919_4 (sequence is synthesized)
gacaaacaaaaagataaggagaagaaagaggaaacaaaagctaaaaggttcaccttaactttcccagcattttcgtcatcttcttttttgtcttcaaattcaaaggcaacagtcatgcgt

SEQ ID NO: 814487 - DNA, 120 bp, Artificial Sequence
  ENSG00000237919_5 (sequence is synthesized)
tgttgtctctgctcttcccacagtgtagggttaaagctgtcactgtctgactggaaatctacagttagattccaaagtattattgtttttttaaaaaacaattttacacaaagtatttaa

SEQ ID NO: 814488 - DNA, 120 bp, Artificial Sequence
  ENSG00000237919_6 (sequence is synthesized)
tatagtatgcaaaaatggtgatagatactacaaacaaatacggaaataaagaagaaagaaagaaaaaaagaaagagaaagaaggaaagagaaaagaataaaattcccttgatatttatta

SEQ ID NO: 814489 - DNA, 120 bp, Artificial Sequence
  ENSG00000276542_0 (sequence is synthesized)
aagatactgttgccccaagtagatatcataatttgttacaataagtaaaaatgtatattattcaatactaaactgttataccacatttcaagtttttaaaactttatcttccttttatgc

SEQ ID NO: 814490 - DNA, 120 bp, Artificial Sequence
  ENSG00000276542_1 (sequence is synthesized)
atagatagtagtagagcattaagaacatgcatggctatcacctgaggtgttgattgtaaattcacattcctaggctttgtctcttaactactgaatcggaatctttgggagtgaactgac

SEQ ID NO: 814491 - DNA, 120 bp, Artificial Sequence
  ENSG00000276542_2 (sequence is synthesized)
aggaatctgaattttaaaaataaggtcttcaggtgattctcatgcatctaaagataactgctttaatatataacaaagaaacccaaagagggacacttgaggattttttcaatatatctt

SEQ ID NO: 814492 - DNA, 120 bp, Artificial Sequence
  ENSG00000276542_3 (sequence is synthesized)
atctgctgtttagaattttacatatgcattggatgatacatcttcttttactgacaaaaaggcttttctctggagaaaataaaaaggcagctttccctgagagcacacacttctagcaaa

SEQ ID NO: 814493 - DNA, 120 bp, Artificial Sequence
  ENSG00000276542_4 (sequence is synthesized)
gccccaatccatatgactctaagacagagtgatttccaccttctagtccttactttcttgcaaaaggggctttcaaatctcattactgatggtcccatcttttattactggtgttatcaa

SEQ ID NO: 814494 - DNA, 120 bp, Artificial Sequence
  ENSG00000276542_5 (sequence is synthesized)
tgggatgcttgcagcagcttaagtatgtggataaagaaggaatgcacaatatacggtactgaatatttttaaaaagtggtctttcagaatgtctgtatgtgtgggggcccatgcttaggc

SEQ ID NO: 814495 - DNA, 120 bp, Artificial Sequence
  ENSG00000276542_6 (sequence is synthesized)
atatgtgcatgccagtgtgttatttatgttgaaaccaatgttttacattaatggctggaattccagaaaaataagaaaatatttgtattttctaaaccattaaaagtttagtggaactca

SEQ ID NO: 814496 - DNA, 120 bp, Artificial Sequence
  ENSG00000243295_0 (sequence is synthesized)
ggcaaccgcgggactcctggagaaatggtgggcggtccaaacggtgagcagcacgctccttacttaggtcatgacctctgccgactaaaaaggctaaactcagcgtggattagggctata

SEQ ID NO: 814497 - DNA, 120 bp, Artificial Sequence
  ENSG00000243295_1 (sequence is synthesized)
ccaggtactggactcttctagagtactgtcacatcggtttggtctctcctcgtggtaaacagataactggaacaactgactttcctctagaggatttgaactggaggaggcttgaagttg

SEQ ID NO: 814498 - DNA, 120 bp, Artificial Sequence
  ENSG00000243295_2 (sequence is synthesized)
aacaatggaactctcagtaccaacttccctttacagtctgatctcagaaatctgacagccagttgtattcccccagaccctctaccttcacctgtaagtctaagtggcaggaatttcgca

SEQ ID NO: 814499 - DNA, 120 bp, Artificial Sequence
  ENSG00000243295_3 (sequence is synthesized)
taagagtatacacccaactaaactgttgacaagtagcataaagggtagaataaagatttttccctggccaggtgtggtagctcacacctgtgatcccagaactttgggagaccaaggctg

SEQ ID NO: 814500 - DNA, 90 bp, Artificial Sequence
  ENSG00000243295_4 (sequence is synthesized)
gctggaagattgcttgagccggaagattctgtctccacaaaattttaaaaaattagctgagcgtggtggcatgcgcctgtggtcccagct

SEQ ID NO: 814501 - DNA, 70 bp, Artificial Sequence
  ENSG00000243295_5 (sequence is synthesized)
tggcatgcgcctgtggtcccagctactcatagggtgaggcgtgaggatcgctttaatccgggaagtcaaa

SEQ ID NO: 814502 - DNA, 120 bp, Artificial Sequence
  ENSG00000243295_6 (sequence is synthesized)
ctgtgagggaaagtcagaaatggcttccctggggaccaagagggcccacactgctcttcccgctgcttcctcttcatctatatttcacttggctctctaaattcatcacagctacaggaa

SEQ ID NO: 814503 - DNA, 120 bp, Artificial Sequence
  ENSG00000243295_7 (sequence is synthesized)
tttttttttttttttttagttgtagcctttaaatacatcttaattaactgaaaagcccttgaaaaagcaagaaaaagtcaaagaaagtatttcaagataaaggtctcttcactgataatt

SEQ ID NO: 814504 - DNA, 120 bp, Artificial Sequence
  ENSG00000243295_8 (sequence is synthesized)
tggaagttgttgcatgtcaatgtgttgctagaattgtaaaagaaatgtttataacattctgatgatggagccaaaattgcagaatgaataaaggagaggaagaagaaacctgttccttga

SEQ ID NO: 814505 - DNA, 90 bp, Artificial Sequence
  ENSG00000243295_9 (sequence is synthesized)
agaatgaataaaggagaggaagaagaaacctgttccttgaagataacgttaactgagtcaaataactcaggaaatgcctttcacctcctg

SEQ ID NO: 814506 - DNA, 120 bp, Artificial Sequence
  ENSG00000243295_10 (sequence is synthesized)
accaagaatcataaggacactgaattcaggaaacagggattagaacacgggagacctgcaaaaggatattcaggatgcaactacacaatcaggcctagaacgcagctgacagagatcgat

SEQ ID NO: 814507 - DNA, 120 bp, Artificial Sequence
  ENSG00000243295_11 (sequence is synthesized)
cgggacacgggggctcaggatggaggactgtaggttaaaaaaaaaatggaactcatgtatcttctgagtttttgaatcttatgtgcattcagaaacctacaaagagtctgtactgaggtt

SEQ ID NO: 814508 - DNA, 120 bp, Artificial Sequence
  ENSG00000243295_12 (sequence is synthesized)
gtcccacatggcagtttcaggcgcaattcttctggagatgacaaagggcaggaaggtgcttcagctggtcggttggccagagtttctcatcaaggagtacatgctgtttgctccccagat

SEQ ID NO: 814509 - DNA, 120 bp, Artificial Sequence
  ENSG00000243295_13 (sequence is synthesized)
ggacagcctggatgagctacaaatccacagagcctgggacacaaggtggaaattacactgccagtacttttaatcttgcacagctctgcacacttgaaattgcaagtggcccatttccaa

SEQ ID NO: 814510 - DNA, 120 bp, Artificial Sequence
  ENSG00000243295_14 (sequence is synthesized)
atgagcatctattgggacaatatcctatatcttgtcagaatgagtcccattaaatcctcagctggaattagaccaaaaacttgtaataattacagtaaacttattaaaaagttgaagccc

SEQ ID NO: 814511 - DNA, 120 bp, Artificial Sequence
  ENSG00000243295_15 (sequence is synthesized)
aaagggcaggaaggtgcttcagattcatgtttccatgtgatgtttttcttccatctgaaaaactactttttgtgagaggaagacatgatggcaggtctagctgtcaagctgcttggatgg

SEQ ID NO: 814512 - DNA, 120 bp, Artificial Sequence
  ENSG00000243295_16 (sequence is synthesized)
ccttggagtcagaatctgcaggaaccacaagagattggatgagaagctgggggcagagttctaacagcagcccaagcctccacagtgccaagatgggccatctgcctgtgagaagggaaa

SEQ ID NO: 814513 - DNA, 120 bp, Artificial Sequence
  ENSG00000243295_17 (sequence is synthesized)
ttagcaatgactctggcttatttctaatttagcagaaaaaaaaaaatgattcaagcaatatcatgtgcttctatatcttcaaagcaataccacaccatcaattagcagctcagcgtacca

SEQ ID NO: 814514 - DNA, 120 bp, Artificial Sequence
  ENSG00000243295_18 (sequence is synthesized)
acagttctaaactttttgcgagcttcttggaaacaagatgtggagcttcagcagaagaaaattgaggcaaacatgctgcagttgctacaggcaaggcaaacgggattgctattcttctac

SEQ ID NO: 814515 - DNA, 120 bp, Artificial Sequence
  ENSG00000243295_19 (sequence is synthesized)
tcaagaactaattttcattttgatactaccttgacgtctgttataaatccatcttatcttataacaattcaataggatgacaaagagatatgcaaagcccaggaaatatggccttcccac

SEQ ID NO: 814516 - DNA, 120 bp, Artificial Sequence
  ENSG00000243295_20 (sequence is synthesized)
ttctgctactgccattggaagacacagaaataaagcattaagtggcctcaacaacacagatcataccagaggaatccaaataatttagagcctgtgaatgttaatgccttcctggttatt

SEQ ID NO: 814517 - DNA, 120 bp, Artificial Sequence
  ENSG00000243295_21 (sequence is synthesized)
aggcaaccgtctgttattgtcatatgccttacagatggcaacattgtgccaatccttagaagaagtttttgggaaataataggaaataaataaaacaaaaactaatcatctttgcaaaaa

SEQ ID NO: 814518 - DNA, 120 bp, Artificial Sequence
  ENSG00000243295_22 (sequence is synthesized)
ttttcaatcagtccttgtttatggctaagcaaaaacaccgaaatgagaaggtgtgaaaccacaacacccagcttctcagggggggaattgtcttttgtttcattataaaacgtagtgtta

SEQ ID NO: 814519 - DNA, 120 bp, Artificial Sequence
  ENSG00000243295_23 (sequence is synthesized)
gaatggaagtgaattgctcattctcagcctggggcacctgccaaacccatgcccccactcccagaaggagctctagtcaccatcaggaatgaatgacccagcctctccccagtagtgtgg

SEQ ID NO: 814520 - DNA, 120 bp, Artificial Sequence
  ENSG00000243295_24 (sequence is synthesized)
cccccctttcctctctcatctgctattctaccttcaacattcactgcctcccctactaagttctgagagttaaagacaagagtaataaagaaatgatttggaaacctggcctagcaaata

SEQ ID NO: 814521 - DNA, 120 bp, Artificial Sequence
  ENSG00000243295_25 (sequence is synthesized)
cataaagattacaaatgatctatttccctgccactcagtgtgtatcttctaggatcaaacatcaaaccaaagatggcagaaatgcattcagagcctcattttatgactttactttgctta

SEQ ID NO: 814522 - DNA, 120 bp, Artificial Sequence
  ENSG00000243295_26 (sequence is synthesized)
ttgcatttcttttcttggaaatgtaattgctttagaattactgggatcatgggaaaagcatgccatcaagaaagtaagcgattgagtgggggaaaagtaataaagtcaatttatttaagt

SEQ ID NO: 814523 - DNA, 120 bp, Artificial Sequence
  ENSG00000243295_27 (sequence is synthesized)
gttggccctgtgtaaaacaaatgtcattatacttatctttttctctgtttatgttttcatttttcatatgagaaatataattttcttttaggaattatataattaaaaaattacaagcga

SEQ ID NO: 814524 - DNA, 120 bp, Artificial Sequence
  ENSG00000247131_0 (sequence is synthesized)
gggcccgagaggcggcctcaggttaacttcaagcatgttgggctctccaggagggagaagaggcacctttgccgtgggttgaggactcctagaaccaacctgagactccgcggccatata

SEQ ID NO: 814525 - DNA, 120 bp, Artificial Sequence
  ENSG00000247131_1 (sequence is synthesized)
caccttacgacgtgtgtgtgtgtggcgggagatgggaggggaggaatcctgtagaacccagatcccatcattccagcaactgccagagcgttcgagaatgtcatgtctgtacctgtcttc

SEQ ID NO: 814526 - DNA, 120 bp, Artificial Sequence
  ENSG00000247131_2 (sequence is synthesized)
tctcatcttttgtgccaactgttttatcaaacttctaccccactttaggtcttccagtagatacctgaaaccctgaactacaatatatgtgaaatacagtgaatggcagaaatactttga

SEQ ID NO: 814527 - DNA, 120 bp, Artificial Sequence
  ENSG00000247131_3 (sequence is synthesized)
taaaagatgtaaatgcctaccgactgcagaagacaacatcaacaaagcacacttcacaaaaagtacaacacaaatatactgcccaggttctaaaacatgtataagagttaacaaaatcag

SEQ ID NO: 814528 - DNA, 120 bp, Artificial Sequence
  ENSG00000247131_4 (sequence is synthesized)
ctgaggttgagcagaaattgtataggaaaaaataggaaaaacacagagaccaatctcagctgcaagaaggttcagctagacactgcaagcaaaagtataactcctgaagatacaggaaaa

SEQ ID NO: 814529 - DNA, 120 bp, Artificial Sequence
  ENSG00000247131_5 (sequence is synthesized)
gaccttaactgagggatggtttcctgctgtgtcctcggaaccccagggcctggttcatagagacaagtaagcagtgactgaagaaagttgcaaatgtgaagacctagaatttaccagtga

SEQ ID NO: 814530 - DNA, 120 bp, Artificial Sequence
  ENSG00000247131_6 (sequence is synthesized)
atgacaatttgaatgtgagaagcttagaaaaagagaagatggtggtcagcaagggaagaagaaaaataaaaacatgtgaaaaaatgagaggaatggatataggcagaggaccaaatggca

SEQ ID NO: 814531 - DNA, 120 bp, Artificial Sequence
  ENSG00000247131_7 (sequence is synthesized)
tcaaactcacagcaaataggctagattcacctatttcaaaaggaaattctttctagcataaagaaaagacaaatatttaaggtgatgaatatctcaactacactaatttgatctttgact

SEQ ID NO: 814532 - DNA, 120 bp, Artificial Sequence
  ENSG00000247131_8 (sequence is synthesized)
caaattatatgaatgtattaaattattacctataccctgaaactatgcgcatctattatgcatcaataaataattatttaaaaaaatagaaatgctagaaccgaaaaactcaataaagaa

SEQ ID NO: 814533 - DNA, 120 bp, Artificial Sequence
  ENSG00000247131_9 (sequence is synthesized)
attaaaaaagaaaatcaagctactgaagagatccctgggctgtgatggaaacaaataaaatggcttatttctaagggcactcaactattgagtaagtctgagccgaaaggtataaagtac

SEQ ID NO: 814534 - DNA, 120 bp, Artificial Sequence
  ENSG00000247131_10 (sequence is synthesized)
accacaaaaataagcttcttagatagcctattgctttgtggttataataattatacactccactggatagcaagcaatctacttatctacacgtgtaagtttgacttgaagtttcttcta

SEQ ID NO: 814535 - DNA, 120 bp, Artificial Sequence
  ENSG00000247131_11 (sequence is synthesized)
tttttcatctgctggagtaactcaattactaggccatctgtatttgcaaatctgcaaagtgaatgttgtcatccagtagccttgccacatgtgtcctgagtactttttacattctttagc

SEQ ID NO: 814536 - DNA, 120 bp, Artificial Sequence
  ENSG00000247131_12 (sequence is synthesized)
ttccttgattcacttcagccaccctagaaattactgagtttcaaattagattaagtctccctgagaagtgaaataaatattggatggagagaaggaaagaagattcagatgggtggggat

SEQ ID NO: 814537 - DNA, 120 bp, Artificial Sequence
  ENSG00000247131_13 (sequence is synthesized)
gaagaatgagccgtgtgaaggaagcatgtttgctaataaacctcacggaggatgacctgagtacacaatgcggtttcatacttttatcttaatgctgctcattatagccaactataatct

SEQ ID NO: 814538 - DNA, 120 bp, Artificial Sequence
  ENSG00000247131_14 (sequence is synthesized)
ctgcctgcctgacaatggtttgtgtatatgtctgttcgcccacctagacctggaattccctgaaagcagaacctagtcttcatctgcgtatccccagctcctagaatcaggactggcaca

SEQ ID NO: 814539 - DNA, 120 bp, Artificial Sequence
  ENSG00000247131_15 (sequence is synthesized)
aagctgttactcagtatctttttgttgaatgaaggaagcaaagactcaaatacattttttcatttttttcaccttatgaaacttttggcctcataaaactttttgacttatgaaactttc

SEQ ID NO: 814540 - DNA, 120 bp, Artificial Sequence
  ENSG00000247131_16 (sequence is synthesized)
ttaagggctatgaagtaaggttgaatgcattgctttgtgttcaaaatcccttcagcccctgtggtagtcaatggaaatttatataatctgattacttattatatcaccaaacctccagag

SEQ ID NO: 814541 - DNA, 120 bp, Artificial Sequence
  ENSG00000247131_17 (sequence is synthesized)
ttgggcacagactggagggtgaacccaccaactaaaagaggcagagggacacatgagtgttcacacaagtgataaattaacataaactactttaaaggttatttaaaatttacatgtctt

SEQ ID NO: 814542 - DNA, 120 bp, Artificial Sequence
  ENSG00000247131_18 (sequence is synthesized)
ggagttaaccctaaagtagcagttcttaatttagggctcatggatctttagcaagtccaaggatgaattttagggggcatatttatgaaccacaaaaacaaacatcaaagacaaaatgag

SEQ ID NO: 814543 - DNA, 120 bp, Artificial Sequence
  ENSG00000247131_19 (sequence is synthesized)
ttatacaaagacatgtgttttggaagggaggtgatctacagctgtcattagattattgaaggagcctatgatccaaaaataatataattcataacttcaaacagatattttcagagtatg

SEQ ID NO: 814544 - DNA, 120 bp, Artificial Sequence
  ENSG00000247131_20 (sequence is synthesized)
acaagaaatatgcacaaggatgttcatcatggcatagagagagtggaaaattggaagtaatccaaatggatttcaataaaggagtgttgagcacataaataaaacatatatgatatgctg

SEQ ID NO: 814545 - DNA, 120 bp, Artificial Sequence
  ENSG00000247131_21 (sequence is synthesized)
gaagatgaggtatcaacagccactactattaggcaaggtacaagtatcacaacactagtgccatctgagaatccatgtcaacccttagctaaggaagtagctcccaacctggagatctct

SEQ ID NO: 814546 - DNA, 120 bp, Artificial Sequence
  ENSG00000247131_22 (sequence is synthesized)
gggtccttgaggactcttaaagtagttatggagctcattgaactattttcaacatttcaaaaagatatcacgtagcaattgtacatccatccttaataaaactgcacaagcaaactgaaa

SEQ ID NO: 814547 - DNA, 81 bp, Artificial Sequence
  ENSG00000247130_0 (sequence is synthesized)
atggcttatgtttaagaaagtccacggccgggtgccggtggctctcgcctgtaatcccagccttttgggaggccaaggtgg

SEQ ID NO: 814548 - DNA, 120 bp, Artificial Sequence
  ENSG00000247130_1 (sequence is synthesized)
ctctgtctcaaaaaaaaaaaaaaaggtcctgaagaatgcagcagcctagaagggcagtagaccaaaggtggtgagaaataggagctccctgcacagaacaggagggctctcctgtctatt

SEQ ID NO: 814549 - DNA, 120 bp, Artificial Sequence
  ENSG00000247130_2 (sequence is synthesized)
ctgcacagaacaggagggctctcctgtctattaactatcaggcgggcagatctcgttagtaccacagagccatcatagaggaagccacagcgttgtctagttatgcaaaggaggctccta

SEQ ID NO: 814550 - DNA, 120 bp, Artificial Sequence
  ENSG00000214614_0 (sequence is synthesized)
ggcctgctgggggagggggccgcggggggcgggggagctcacctccgccattcttgtagcacaggctgcagccgtctcctcccggtgctcgctccttccttgagctctgtccaccgctgc

SEQ ID NO: 814551 - DNA, 120 bp, Artificial Sequence
  ENSG00000214614_1 (sequence is synthesized)
ccactgggggctagagcttcccggctaccctggaagctggaggctgggaccagctcttcaggtgacaggcctctgtgtctccacagtggccagaggggagcctgcctgactgatgagcaa

SEQ ID NO: 814552 - DNA, 120 bp, Artificial Sequence
  ENSG00000214614_2 (sequence is synthesized)
ggctccactttgtcaccaaggcagagaaggggcccggctccctgatctgatcgtggacactgcagtccccagatggctcatcccgttaagctaagccctcggccatccctccagctttag

SEQ ID NO: 814553 - DNA, 120 bp, Artificial Sequence
  ENSG00000214614_3 (sequence is synthesized)
gaagaaaagcagttctggcccaagccagactgagcttcctggggtcttctctggcccagcctttgactgaagctggtctggagacaggggcgttagagaagtgactcatagatggcctaa

SEQ ID NO: 814554 - DNA, 120 bp, Artificial Sequence
  ENSG00000214614_4 (sequence is synthesized)
ataagcggggccactcaaggacccaggacagggggaagagggccaacccatctggaccgcaggcaaaccccatggcctttgagagaagagagaagaggacccggtgaagtaggctccgag

SEQ ID NO: 814555 - DNA, 120 bp, Artificial Sequence
  ENSG00000214614_5 (sequence is synthesized)
ggcctcagcccagcaggagcgcagggagctgcaccaggaactcacagaggatcagggagaattctgagaacatgctactgtggtgctgcctagagaggaaggataaatgatgacaagtac

SEQ ID NO: 814556 - DNA, 120 bp, Artificial Sequence
  ENSG00000214614_6 (sequence is synthesized)
atctctgagtaacgtatggccacttgttcatgaaaactgtttttctgaaagcttgtgaaggtcttgaaatactcgctatcagttgaggacaaacatttacaccctccttccacagggagt

SEQ ID NO: 814557 - DNA, 120 bp, Artificial Sequence
  ENSG00000214614_7 (sequence is synthesized)
aagcaggctggatgggtccatctatggatgatcttccccagccccttcctcttcccagctcattcctggctctctgtgtgaacaggtctcatcagtggaatgtggttgatgaagtgaggt

SEQ ID NO: 814558 - DNA, 120 bp, Artificial Sequence
  ENSG00000214614_8 (sequence is synthesized)
cttcaattttctcatctactgtgtggtcatgttattttcctcatctgaggcttaaaaactcacctgcatgcagcacatgacagcttaaaatctcttgtgaacaaaacagtaacaaagaca

SEQ ID NO: 814559 - DNA, 120 bp, Artificial Sequence
  ENSG00000214614_9 (sequence is synthesized)
cccaccagcgttgagcatcccgtgttgatgacagcgaccaccatgggtcaacgtcctcttcacaatcctgtgtcagagcatcacttgactgatttcattagcaacttcccaggagaatca

SEQ ID NO: 814560 - DNA, 120 bp, Artificial Sequence
  ENSG00000214614_10 (sequence is synthesized)
gcttacaaaatacttgtcccattttccatgcagatgtaacccatctattttactgaagaaatgggaagagctgaatgctgaatacactgaatgtctgcaggttgtgcaagtttgtgactt

SEQ ID NO: 814561 - DNA, 120 bp, Artificial Sequence
  ENSG00000214614_11 (sequence is synthesized)
tatcactttctaatttctgatctgtgtggaccactctacagatttttctcactggtgtgatcagccttctggatgtcaaatataatagactttcaacaatataaaagtcaacacaagctc

SEQ ID NO: 814562 - DNA, 120 bp, Artificial Sequence
  ENSG00000214614_12 (sequence is synthesized)
ctcatggtttcagtgctcagtgatgactctaaacttacacaatgtgtttctttattagttttgttttctggtatctctactcggcatcttcaccacacccattttatgtttcttatacag

SEQ ID NO: 814563 - DNA, 120 bp, Artificial Sequence
  ENSG00000214614_13 (sequence is synthesized)
gtaattgataattttaaaatttattggtgcttactttaattaaataagcagacagtatcttagaatttaaaaaaaatgtgcagtaaaaggaaatgcaataaattttaatgtaaggaaacc

SEQ ID NO: 814564 - DNA, 120 bp, Artificial Sequence
  ENSG00000214614_14 (sequence is synthesized)
tggccaggctggcactggcacagtcttcatggcggaagatctccacacagtcgggagtgttccaggtgtggccacatgtggcccagggcagcgtggtgctaaaggacttgaccaggcttt

SEQ ID NO: 814565 - DNA, 120 bp, Artificial Sequence
  ENSG00000214614_15 (sequence is synthesized)
gtccgcccaccttgtccctgccctcctcccggggaggagtcgccgctccagcgggaggcaggatggttgctacctggggcggccgccagctcctcccgcagtgctccgggccgcccctca

SEQ ID NO: 814566 - DNA, 120 bp, Artificial Sequence
  ENSG00000214614_16 (sequence is synthesized)
ccccagggtcgcccgctcctagtgtggcccaggcttcccggcctgcccctcccagccctaggaagacgtcccccgggccccctcagccctccgcctccccttctctccctttctccccgc

SEQ ID NO: 814567 - DNA, 120 bp, Artificial Sequence
  ENSG00000214614_17 (sequence is synthesized)
tttcagatgttgcttgtccaaggggtgggggtggaagggagagagagcagaggctcgagagggatgtaggagagctgatggcactttggggacagcctcagggctgcaattgaggagggc

SEQ ID NO: 814568 - DNA, 120 bp, Artificial Sequence
  ENSG00000247134_0 (sequence is synthesized)
ttgctgcccttcctcttccccagggcacagaaacactctccactgcggccaaggattgcaggagaggtggcatcagtgattcaagacttcttttcctacctcttcagtgtttctttcagt

SEQ ID NO: 814569 - DNA, 120 bp, Artificial Sequence
  ENSG00000247134_1 (sequence is synthesized)
gatctgaagttaaagccagggggaatatcacagaagtgaagtgcaattctcatcatgtcatatcaagagcacacactaacaaacaacatgacttattgctgaatattgaacttgatcacc

SEQ ID NO: 814570 - DNA, 120 bp, Artificial Sequence
  ENSG00000247134_2 (sequence is synthesized)
tggctgaggtgaataaactgacactggaacattcaggaacttcttcatggtcatggtcacccagctagagtgtggaagccaggctgtctgattccaggatctgtgttcttaatcctatac

SEQ ID NO: 814571 - DNA, 120 bp, Artificial Sequence
  ENSG00000247134_3 (sequence is synthesized)
agtcaaccactatttttaagattcacagatgttcgggtccaattcaccagaatgccaagttatacagggttgtggaatcaaaaactgcaattagtaataaaatgtgatgctatctagaat

SEQ ID NO: 814572 - DNA, 120 bp, Artificial Sequence
  ENSG00000247134_4 (sequence is synthesized)
gtttttcatacatatatatgcttcttgggactctccctgcaggttaagagaaattgagaaacgatggagaatttaagtgttttagatcctacatacattagacttaaaaatagtaactat

SEQ ID NO: 814573 - DNA, 120 bp, Artificial Sequence
  ENSG00000247134_5 (sequence is synthesized)
gtacatgagtatttgtaaacttaagaatgaacataacatgaaccatgtggcacctataaaatgaaaataaaatacctacaaaccaaatgagagcaataaaagaagctttaaggactttca

SEQ ID NO: 814574 - DNA, 120 bp, Artificial Sequence
  ENSG00000247134_6 (sequence is synthesized)
gcttccattgctgacctctaccgacctctacctgtggtccttcctctactgcagcagagacactgttttcttcctttgttcttccaaccccatgttctctggtgctacaacaagccactg

SEQ ID NO: 814575 - DNA, 120 bp, Artificial Sequence
  ENSG00000247134_7 (sequence is synthesized)
agtaggcgggagaagaaagggtagggaacttccttcctgccccctccgagttttgcctctctcactggcagcaacccagcgcttccattgctgacctctaccgacctctacctgtggtcc

SEQ ID NO: 814576 - DNA, 120 bp, Artificial Sequence
  ENSG00000247134_8 (sequence is synthesized)
aggcaagtaagctacagacttcacaatgtaaggaataatatggtggtgagttacatttgtgatttttttttgtctcatatcccataatatctcatatctcataatcagttagaaagcaca

SEQ ID NO: 814577 - DNA, 120 bp, Artificial Sequence
  ENSG00000247134_9 (sequence is synthesized)
atggaaaagtattccactgccaatggtgttagagaactgctcacaaattcaacagaaatgcacagataccaaagcagaaaggacaataaacaagagtcttcatggtcaaaagattagaag

SEQ ID NO: 814578 - DNA, 120 bp, Artificial Sequence
  ENSG00000247134_10 (sequence is synthesized)
ctgcagctttcaatgggagggacaggttctggaccacactgcagtgcttttctgctttctgtgctttcccactctagagctgaagaaggtaacgaccccaaaatgtcaatatacgtagac

SEQ ID NO: 814579 - DNA, 120 bp, Artificial Sequence
  ENSG00000247134_11 (sequence is synthesized)
caaaaaccagccccaataaaagtctgctctctctagccaaaggactacagtagggcagcccagcaagacagaaaaccttcagacaacctaccccagccaaacactaccaaaaaaagtaaa

SEQ ID NO: 814580 - DNA, 120 bp, Artificial Sequence
  ENSG00000247134_12 (sequence is synthesized)
aacccttgctgcacgtgaccaccaagggagcttttgaaaactaccggtgcctgggctggcattcccagagattattgcaactggctggggtgggttctggccgctggtgttgtctaagag

SEQ ID NO: 814581 - DNA, 120 bp, Artificial Sequence
  ENSG00000247134_13 (sequence is synthesized)
gcacgtgaccaccaagggagcttttgaaaactaccggtgcctgggctggcattcccagagattattgcaactggctggggtgggttctggccgctggtgttgtctaagagctttggcaca

SEQ ID NO: 814582 - DNA, 120 bp, Artificial Sequence
  ENSG00000247134_14 (sequence is synthesized)
gggctggcattcccagagattattgcaactggctggggtgggttctggccgctggtgttgtctaagagctttgttctctggtgctacaacaagccactgagttgttctttgttcagagtg

SEQ ID NO: 814583 - DNA, 120 bp, Artificial Sequence
  ENSG00000247137_0 (sequence is synthesized)
cagcaggtaagttgtaaaaccagtaaaaaaacacaggtcattagtcaaaagagtgcttcaggtctcctgactccaaatccgagaatcctttcactgtagcatgtttactgctcaaatatt

SEQ ID NO: 814584 - DNA, 120 bp, Artificial Sequence
  ENSG00000247137_1 (sequence is synthesized)
tctacaaccctattgcttaacaacaggaatgaattatttcaccatttgttgcaaacgtatgggtcacgttttgtgccagcagcagaaaatacagaaattagtaagaattacctgccctcc

SEQ ID NO: 814585 - DNA, 120 bp, Artificial Sequence
  ENSG00000247137_2 (sequence is synthesized)
aggggcatcaccaacctggattcccctctcggcccagtttttccacccttattgccttctcccttcaggaataatgaactcgtcctggaagcgtaccttactttttaatatctctgcctt

SEQ ID NO: 814586 - DNA, 120 bp, Artificial Sequence
  ENSG00000247137_3 (sequence is synthesized)
gtcatgtgctgttcgtcttaccaggaaactaccctgcttttcccccagttttggtctgtgaacacatttgggaaattcttctgatcctaccgctactctcttgaggtacagtaaattgtc

SEQ ID NO: 814587 - DNA, 120 bp, Artificial Sequence
  ENSG00000247137_4 (sequence is synthesized)
tttgacttccatcaccttttgtaatattacaattgccatctactgagttcctatgatctgcctggcattgtactaagtgctttatattttcttgttcatttttttatgccaacataaatg

SEQ ID NO: 814588 - DNA, 120 bp, Artificial Sequence
  ENSG00000247137_5 (sequence is synthesized)
agtttgactcaattcttattataacctgccaaaataagtattcctcttcctttttacagagagagaaacaagggaaaaaaaagttaattgcctgaggatatactgctagtgttgcgggac

SEQ ID NO: 814589 - DNA, 120 bp, Artificial Sequence
  ENSG00000247137_6 (sequence is synthesized)
aaatagagacgggagaggccaaacagaattcaggacaaccctttattattaaggtgatcactggctcagtcggactggggtccagaaagtctgagcccggaacaaagggatcaatcacct

SEQ ID NO: 814590 - DNA, 120 bp, Artificial Sequence
  ENSG00000247137_7 (sequence is synthesized)
tttaagcaatttgtggcgggagtttggtgctacaggaagcctacttgcagaagcaagaacaaaggcagttaattattcttttacatttgttacaccacatgtcttacatccttgggaatg

SEQ ID NO: 814591 - DNA, 120 bp, Artificial Sequence
  ENSG00000247137_8 (sequence is synthesized)
catgcttttgtagcaattgcttatcaaccttgtgactttacagcgcgctagggagggaagcaggaactcgtggtgcctcaaggaacgtgaaacggtggaacacagataagcctctccgtg

SEQ ID NO: 814592 - DNA, 120 bp, Artificial Sequence
  ENSG00000247137_9 (sequence is synthesized)
agcggttaatattctctcttaacccaggcctccggagggtggggggctatatttcattctacctctaaggaaaagaataaacttcttgactaatatacttataaaattcattaattcccc

SEQ ID NO: 814593 - DNA, 120 bp, Artificial Sequence
  ENSG00000247137_10 (sequence is synthesized)
cttcactagtaaataataaatacctgacttaggattccaaaataggtcttgaatttttctgcaggagctcctcaaagtctctgaattcccacaaccttttattagatcacttatcccatt

SEQ ID NO: 814594 - DNA, 120 bp, Artificial Sequence
  ENSG00000247137_11 (sequence is synthesized)
gtattataattatctgtttaacaatttttcctcacccctaaaggaccctgagcttctggaaggtagggactgtatcttaaaatcttggcatttctgatgtctagaatatttcatttaaga

SEQ ID NO: 814595 - DNA, 120 bp, Artificial Sequence
  ENSG00000247137_12 (sequence is synthesized)
gaagggcttagtaactgttgtgtgggtgggttgatgagttaactgtcaggcaggtgaactaataggctgaagataaagtttttcactgttggaagtgaatttgggattagtcatcctaat

SEQ ID NO: 814596 - DNA, 74 bp, Artificial Sequence
  ENSG00000247137_13 (sequence is synthesized)
tttcactgttggaagtgaatttgggattagtcatcctaatcccctcacttttagagatggggcaactgagtcat

SEQ ID NO: 814597 - DNA, 88 bp, Artificial Sequence
  ENSG00000247137_14 (sequence is synthesized)
aagaaaaaacaaaacaagacatggggcagctgaggccttttgtataccaggcatttatcgagttattcatgtgggccagtttctgtga

SEQ ID NO: 814598 - DNA, 120 bp, Artificial Sequence
  ENSG00000247137_15 (sequence is synthesized)
aggcatttatcgagttattcatgtgggccagtttctgtgataaatgatttgcaaataatacccaacttaatctgtattgttatttttatttttacagatgaagaaacagctcagatttga

SEQ ID NO: 814599 - DNA, 120 bp, Artificial Sequence
  ENSG00000247137_16 (sequence is synthesized)
ccaagatcacacaagtaggagttgaggaattggaacccactatgactgactccaaattaatatagtgtttatagccacttacataataatggtaaaggttttatttttttcactatacaa

SEQ ID NO: 814600 - DNA, 120 bp, Artificial Sequence
  ENSG00000247137_17 (sequence is synthesized)
tatgtagtagataaatttactgaggaaatgagacagcacgtgacaaatccttaaaggatacacacatgacaggaaggattagaagaggaaacagaaacaggtaacagagaagcagaaaaa

SEQ ID NO: 814601 - DNA, 120 bp, Artificial Sequence
  ENSG00000247137_18 (sequence is synthesized)
cctcatgcgaacctatctaggtccgtctctggagtggcctgtcatcgatcgcgccctccatcgctgagcgacacaagtggaaccccccaggactgcattctgcttttggtctgtgaacac

SEQ ID NO: 814602 - DNA, 120 bp, Artificial Sequence
  ENSG00000247137_19 (sequence is synthesized)
gtgttgctatgctttcctctgtacaagctggtggtgtatcaattcgttcttccttaactttgggactgtcacagggttcctgcaattcgtttttgacaatgttcaacataatattcaagg

SEQ ID NO: 814603 - DNA, 120 bp, Artificial Sequence
  ENSG00000247137_20 (sequence is synthesized)
ggttttcaactggtgtcttgctgggagatggtgtacaatcaaatgaagatgtctacaaaatgaaaggccctatgagtactgatgaaagttcaaaattctcacattaaataacatttagtc

SEQ ID NO: 814604 - DNA, 120 bp, Artificial Sequence
  ENSG00000247137_21 (sequence is synthesized)
ttgtaagacccttgtatgaacaagagaacacacatacaaccaaatgcaaatgaaacacctgcctcccaacaaaatgtgccataaagacaaccagaaataaaatatatattgcacgttcaa

SEQ ID NO: 814605 - DNA, 120 bp, Artificial Sequence
  ENSG00000247137_22 (sequence is synthesized)
aggagtttgagaccagcctcgccaacatgatgaaaccctgtttctactagaaataaaaaaattagccaggtgtagtggcgtgcacctgtaattctggttacttgggaagctaaggcagaa

SEQ ID NO: 814606 - DNA, 78 bp, Artificial Sequence
  ENSG00000247137_23 (sequence is synthesized)
tttctactagaaataaaaaaattagccaggtgtagtggcgtgcacctgtaattctggttacttgggaagctaaggcag

SEQ ID NO: 814607 - DNA, 120 bp, Artificial Sequence
  ENSG00000247137_24 (sequence is synthesized)
attataaagtcttctcaataaaatcgtctcaaaaataataaaaataaaagcagaagttaatgaaatagcaaataaaattgatgatagtaattagctggtgtttgaaaagaacaataaata

SEQ ID NO: 814608 - DNA, 120 bp, Artificial Sequence
  ENSG00000247137_25 (sequence is synthesized)
tactttctcggagtctctttccagcctcccgactccagccacttggctggagaggcagcagggccgtcgccttggaaacgagtacacttccgacgtgctgaggtcatttcccgttcctca

SEQ ID NO: 814609 - DNA, 120 bp, Artificial Sequence
  ENSG00000247137_26 (sequence is synthesized)
agataagcctctccatgaagaaacagctcagatttgaccaagatcacacaagtaggagttgaggaattggaacccactatgactgactccaaattaatatagtgtttatagccacttaca

SEQ ID NO: 814610 - DNA, 120 bp, Artificial Sequence
  ENSG00000247137_27 (sequence is synthesized)
cctttattattaagatgaagaaacagctcagatttgaccaagatcacacaagtaggagttgaggaattggaacccactatgactgactccaaattaatatagtgtttatagccacttaca

SEQ ID NO: 814611 - DNA, 120 bp, Artificial Sequence
  ENSG00000249865_0 (sequence is synthesized)
gcatctgtgaggtcatctccctttctgtagagcatatgatctttactgatgcacctgcatctggctcagacttagtcacccagccctgaaattatatcatatcacaggtcattctctgag

SEQ ID NO: 814612 - DNA, 120 bp, Artificial Sequence
  ENSG00000249865_1 (sequence is synthesized)
agttgaaatccgtaaggtgcttgggagaatgcctggcgcctggaagcactgttgctgcagtaattctgctgacgtcatccccatacttgccatcctcttgcagggttgtaggttctaagg

SEQ ID NO: 814613 - DNA, 120 bp, Artificial Sequence
  ENSG00000249867_0 (sequence is synthesized)
gctgagcaatgtcaagatttagaagtgtacagctctccttttctcccttctcaatgattttatttcctgtagtttgtaggaggactttcagagagctgttctctttatccttctctgtgg

SEQ ID NO: 814614 - DNA, 120 bp, Artificial Sequence
  ENSG00000249867_1 (sequence is synthesized)
ctctggctcttttctgtatcatagagaagttaaaaagagttgattatcatctactctcctagggtggtcaagacttgaggattcagaggctgtttctcaatttaagtctctaagaatatg

SEQ ID NO: 814615 - DNA, 120 bp, Artificial Sequence
  ENSG00000249867_2 (sequence is synthesized)
cccttcagccttcttaccttgacttctggaactttattggtgaaaaaaaactacggcatgactctgacaatcctttgaagtcatgaatatacaagagcatgaataagagaagaaaagatg

SEQ ID NO: 814616 - DNA, 120 bp, Artificial Sequence
  ENSG00000249867_3 (sequence is synthesized)
aatgtgctacatatacacaatggaattctatgcagccataaaaaaagaatgagatcgtgtcttttgtgggaaccaggatggagctggaggttattatccttaacaagctaatgcaggaac

SEQ ID NO: 814617 - DNA, 120 bp, Artificial Sequence
  ENSG00000249867_4 (sequence is synthesized)
aaatactgcatgttctcacttgtaagtcagagctaaatgataagaacttacaaacacaaagagggaaacaacagacactggtgtctacttgaagggagaaggtgagaagagagatagaag

SEQ ID NO: 814618 - DNA, 120 bp, Artificial Sequence
  ENSG00000249867_5 (sequence is synthesized)
gatagaagcagaaaaaataactactgggtagtgggcttaatacctgggtgatgaaataatatgtaaaacaaacccccattacaggtgtttacctatgaaacaaaccttcacatgtacccc

SEQ ID NO: 814619 - DNA, 120 bp, Artificial Sequence
  ENSG00000249867_6 (sequence is synthesized)
tcagagaccaggatcattctgataccaaaaccagggagagacacaacaaaacacaaaaacttcagaccaatatccctgatgaacaccaaagcgaaaatcctcagtaaaatactggcaaac

SEQ ID NO: 814620 - DNA, 79 bp, Artificial Sequence
  ENSG00000249867_7 (sequence is synthesized)
cgtatatttagaaaaccccatcattcagccccaaatctccttaagctgataagtaaattcagcaaagtctcaggataca

SEQ ID NO: 814621 - DNA, 65 bp, Artificial Sequence
  ENSG00000249867_8 (sequence is synthesized)
gtaacagacaaacagagccaatcacaagtgaactcccattcacgaatactacaaagagaataaaa

SEQ ID NO: 814622 - DNA, 120 bp, Artificial Sequence
  ENSG00000249867_9 (sequence is synthesized)
atcgtaaggagatttttcccccattttggacgttataaccgtccagtctacagaatatcacaggctctacttttgtgtcaatttaaaatgaggatacagaaaatgaaggcaaagggaaac

SEQ ID NO: 814623 - DNA, 120 bp, Artificial Sequence
  ENSG00000249867_10 (sequence is synthesized)
tgttgacaatcctttgaagtcatgaatatacaagagcatgaataagagaagaaaagatggaagataaaaagcagaagggtgctggagatataatggtgaataatgttgcaatatgcccag

SEQ ID NO: 814624 - DNA, 120 bp, Artificial Sequence
  ENSG00000249867_11 (sequence is synthesized)
tcttcatggaatcaacagtccagtggggaaggcagataagtgagcatattccttctacttacagaaaaagtcaactgtaaaacagcctcaggcaggtctttcaggagatattccagaagg

SEQ ID NO: 814625 - DNA, 120 bp, Artificial Sequence
  ENSG00000249867_12 (sequence is synthesized)
cattgttatcatacaaaatgatagctccatgagtatcattttccctgaagaccagtgggacaagatgaggagatggaagacagtgatatggatgatcctgaacctgagactgtataggcc

SEQ ID NO: 814626 - DNA, 120 bp, Artificial Sequence
  ENSG00000249867_13 (sequence is synthesized)
taggctaatgcatgtgtttgtgtcttcgtttttaactaaaagcttaaaaagtaagaaaaataaaaataaaacatttgaaaatacaaaaatcatatagaattaaggacataagaatatttt

SEQ ID NO: 814627 - DNA, 120 bp, Artificial Sequence
  ENSG00000249867_14 (sequence is synthesized)
gaaataatctttgtatataagtttagtgtagcctaagtgtacagtgtttataaatctacagtaatgtcccagaccttcacattcactcatcactcactcactgactcactcagagcaact

SEQ ID NO: 814628 - DNA, 120 bp, Artificial Sequence
  ENSG00000249867_15 (sequence is synthesized)
tccactcctgcaagctccatccattgtaagtgccttataaaagtgtaccactttttatcttttatactgtatttttactgtaccctttctatgcttgtttagatacacaaataccactgt

SEQ ID NO: 814629 - DNA, 88 bp, Artificial Sequence
  ENSG00000249867_16 (sequence is synthesized)
taccctttctatgcttgtttagatacacaaataccactgtgtaacaattgcctacagtattcagtaccgaaatatggggtacagatga

SEQ ID NO: 814630 - DNA, 120 bp, Artificial Sequence
  ENSG00000249867_17 (sequence is synthesized)
cttgcacaactatatgcaagcatactctatgatgtaaacatactctaggatgttcgtataagcatactctacagtgtttgtgtaagaatactctaaatttgtgtaagcatactctacgat

SEQ ID NO: 814631 - DNA, 120 bp, Artificial Sequence
  ENSG00000249867_18 (sequence is synthesized)
gtttgcataaccatgacatcacctaatgatacattttcagaatgtaacccattgttaaacatacatgacagtatttaataaataattaaatgattgctgtattccaggcactgtaccaaa

SEQ ID NO: 814632 - DNA, 120 bp, Artificial Sequence
  ENSG00000249868_0 (sequence is synthesized)
gcaatgcagtgattgctgcacccagagcctgttcctctcccaactccttgaaattctcagctccttcctcaagtccctgctcctatgaattggttacacctccatcatgctgcaaaaatt

SEQ ID NO: 814633 - DNA, 120 bp, Artificial Sequence
  ENSG00000249868_1 (sequence is synthesized)
atacacctgtgtcattcagagctaccattcctgaagcttttggtcctgctccaacagtggcgtttgcaatccaggactgtcatgcagtttccatcgttatcttctgtggagttcttcatt

SEQ ID NO: 814634 - DNA, 120 bp, Artificial Sequence
  ENSG00000249868_2 (sequence is synthesized)
cccacatctgtggaccttaaaatcctacggttgagtgcctgccttggatcagcagtcggttcgttaccttggttctcagacgatgcttgcaacaacgccatgcgattcgcccactcttgg

SEQ ID NO: 814635 - DNA, 120 bp, Artificial Sequence
  ENSG00000230649_0 (sequence is synthesized)
gcaattaaagacttcagagaatgccagatttttcagaatgcatcatagaattttcaaagctgtaagaaagaggtgaggatgctgagatgtagagagactgatttgctcaagataacaaag

SEQ ID NO: 814636 - DNA, 120 bp, Artificial Sequence
  ENSG00000230649_1 (sequence is synthesized)
agttttattgatttgggaacccatggaagggggtcagctgtgagatatcacatgatcagactgactgcctgaccagactgactgccatcctgttaaaggaatgaatcacagttcatctcg

SEQ ID NO: 814637 - DNA, 120 bp, Artificial Sequence
  ENSG00000230649_2 (sequence is synthesized)
cagatttatggcatgcctacagaaaaagtaccttatgatgcaaacctgaaagtttaaataatctcctgaaagttccacaatcagatgagaaaactgaggttcaaagaagattatcattcc

SEQ ID NO: 814638 - DNA, 120 bp, Artificial Sequence
  ENSG00000230649_3 (sequence is synthesized)
tgtgaaacctccccccaaaatccatgttatcatccttttgaataatactggagtaatttctgtatccataaaagatggtgaatcctttttagataaattatttagttatgaaataaaggc

SEQ ID NO: 814639 - DNA, 120 bp, Artificial Sequence
  ENSG00000230649_4 (sequence is synthesized)
gaaactattttagaagcaataggaattcagcttcatagcatcagagaaccttctaaggggcagaattgagggcttcactaagggattagctttaaaaaaagtgcaaactaaaaatttcat

SEQ ID NO: 814640 - DNA, 120 bp, Artificial Sequence
  ENSG00000230649_5 (sequence is synthesized)
ttggaaattagtagaatttcaagagattcaagatcttctaagttggttgtgattgcagaagagtgagggaataggtagagcctcagagatggtaacagggctttgagatatttgagagtg

SEQ ID NO: 814641 - DNA, 120 bp, Artificial Sequence
  ENSG00000230649_6 (sequence is synthesized)
cctcagagatggtaacagggctttgagatatttgagagtgctacagttgtctagaggcctaaattgaagttacttagttgtgtggtgatatggttcagctgtgtccccacccaaatctca

SEQ ID NO: 814642 - DNA, 65 bp, Artificial Sequence
  ENSG00000230649_7 (sequence is synthesized)
cccccatgcgcattcccttgcacacactctcttgcctgcaccatgtaagatgtgcatttgctcct

SEQ ID NO: 814643 - DNA, 120 bp, Artificial Sequence
  ENSG00000230649_8 (sequence is synthesized)
ttgcacacactctcttgcctgcaccatgtaagatgtgcatttgctcctcctctgtcttctgccatgattgtgagacctccccagccatgtggggctgtgagtccattaaatctctttttc

SEQ ID NO: 814644 - DNA, 120 bp, Artificial Sequence
  ENSG00000230649_9 (sequence is synthesized)
atagaattttcaaagctgtaagaaagaggaatgaatcacagttcatctcgcagatttatggcatgcctacagaaaaagtaccttatgatgcaaacctgaaagtttaaataatctcctgaa

SEQ ID NO: 814645 - DNA, 120 bp, Artificial Sequence
  ENSG00000230649_10 (sequence is synthesized)
cgcctgtaagtcacctttcttgaaggggtatcttcaagaagacccaagcctgcctagctttcctggtgtcctcctggccataggaaactctcctgtttttgtctcactgcaccgttacct

SEQ ID NO: 814646 - DNA, 120 bp, Artificial Sequence
  ENSG00000230649_11 (sequence is synthesized)
cttcttttccataccattctactccagccaggttccagctttcatcattctccagagaagacatctccattttcacataagctccccaactctcaagaagacatgtcaaacttcaaagaa

SEQ ID NO: 814647 - DNA, 120 bp, Artificial Sequence
  ENSG00000230648_0 (sequence is synthesized)
aacgaggggagccaacaagagagggatgtcggcatcgggtgtgcggttccaagaactgattggctgtggagattagaagttaggaacctttgcaacggaaagcggcctcgggcaggcgcc

SEQ ID NO: 814648 - DNA, 120 bp, Artificial Sequence
  ENSG00000230641_0 (sequence is synthesized)
cgcgggcgaggggacggcgagcccccgctgcctaaacagaaaacggaggcgatgatctgggtaactacgggcggagtgggaggaaacctgctctgcacagttaagataacccgggtcccc

SEQ ID NO: 814649 - DNA, 120 bp, Artificial Sequence
  ENSG00000230641_1 (sequence is synthesized)
tccactcctctgcccccacagtccacatgtccaccctgggggccatggcttattgattcttccatgtatcagcccaagaatcccctgctgccttctgaataaagggtgcaaatacacgaa

SEQ ID NO: 814650 - DNA, 120 bp, Artificial Sequence
  ENSG00000230645_0 (sequence is synthesized)
ggagaagaaaaggggtactgctctggaaaagagagagaaagagagaaaaaaaaggaagcaagaaaaagaaaaaaagaaaagcaagcaagctgaatgtcttccttcttccacctcctttgt

SEQ ID NO: 814651 - DNA, 120 bp, Artificial Sequence
  ENSG00000230645_1 (sequence is synthesized)
tcctgctgtactgccactgcccaatatataatatttcaggaaacattgctttatgaagggctccataacagttaatgaaggagagccaagatacccaccttggagcccaagctgaggggt

SEQ ID NO: 814652 - DNA, 120 bp, Artificial Sequence
  ENSG00000230645_2 (sequence is synthesized)
attttcgatgtgtatcttgtggaaccagtcctgccaatctcatccagtgactaaaaatgcctaacctcctgggaatggaggtcaagcaagtttcagcctcattttacacaacacctattc

SEQ ID NO: 814653 - DNA, 120 bp, Artificial Sequence
  ENSG00000230645_3 (sequence is synthesized)
aagatggaggtgctctggttcaaatcactctgacaagcagtcactacccctgccccaaagccaagcattgtagggaatcttatctggtaacaaagagttgatctgaagtgatgtttgaaa

SEQ ID NO: 814654 - DNA, 120 bp, Artificial Sequence
  ENSG00000230645_4 (sequence is synthesized)
atgagtggggtggttgtttgttgaatcagtgagacaatgagtagggaatgagggagactgtcatttaattggtaaagaccagaggtgctaattgttctgcaattccatagcatttcactc

SEQ ID NO: 814655 - DNA, 120 bp, Artificial Sequence
  ENSG00000230645_5 (sequence is synthesized)
gcaccctggggaagctcagctttgcattcccacttctattagacagcctttgtgacacacacaccttgtccctgtgaacatggtgaatggaaattatcttctccacattaactttgaata

SEQ ID NO: 814656 - DNA, 120 bp, Artificial Sequence
  ENSG00000230645_6 (sequence is synthesized)
catgggccaaggaaatggccctaggtgtataccagtcctgcttctttctcactccttggctagagaaagaaagaatttagcaaattcatcattagtcaagaataaggggctgcattttgt

SEQ ID NO: 814657 - DNA, 120 bp, Artificial Sequence
  ENSG00000230645_7 (sequence is synthesized)
tttaaaaatcctctccttccattttcaattctagtacaggccatatcagaattataattaatgaaataaatgttaattcaaattatctatatttaatgagttcatgattcattaacttga

SEQ ID NO: 814658 - DNA, 120 bp, Artificial Sequence
  ENSG00000230645_8 (sequence is synthesized)
aaagaatccatttgtttgcataaaatgaatctcaatgatggaactatataattatttagtatgaatgatgatagtgcacttaataaaattagaacaattttttggttaatgttacagatt

SEQ ID NO: 814659 - DNA, 120 bp, Artificial Sequence
  ENSG00000230645_9 (sequence is synthesized)
tgaagttttattcacttcacagttgcatgagaagcagtgtgatattcgaggacagaggttctcaaactgtcttcccagactagcagcatcagcagcatcagggaagttgttgaaaagcaa

SEQ ID NO: 814660 - DNA, 80 bp, Artificial Sequence
  ENSG00000230645_10 (sequence is synthesized)
aaaggcgccgccagaatgggcgccgaggctgaggcaccgagagcgagcgtgggctgcgagggctgccagtatgctgtcac

SEQ ID NO: 814661 - DNA, 120 bp, Artificial Sequence
  ENSG00000230645_11 (sequence is synthesized)
gtgggctgcgagggctgccagtatgctgtcacctctcagtatgatagaaaaaacctgctgtactgccactgcccaatatataatatttcaggaaacattgctttatgaagggctccataa

SEQ ID NO: 814662 - DNA, 120 bp, Artificial Sequence
  ENSG00000230645_12 (sequence is synthesized)
cagttaatgaaggtcctcagagcaatgttaaactgaagagattattgtgagcatcctgtgtcttgggggaactctttcaatatttcaccattaaataaaatatttactgaaaagctttaa

SEQ ID NO: 814663 - DNA, 87 bp, Artificial Sequence
  ENSG00000230647_0 (sequence is synthesized)
gacagaacccaaaggaaaagagccagggtgcggattggcagaagctattctggcccatgtgcagagcatcaagaatgtgtgctgcaa

SEQ ID NO: 814664 - DNA, 120 bp, Artificial Sequence
  ENSG00000230647_1 (sequence is synthesized)
ggagaagagaaaaaagtgcatgaagtaaagaaaaagcagggaatgagagaaaaaaatggaggagtgagtgccacagcccagtcagtaagtgctacatggagtctcactctgtcgccaggc

SEQ ID NO: 814665 - DNA, 120 bp, Artificial Sequence
  ENSG00000230647_2 (sequence is synthesized)
attattacaggaactttttctggacagacaagaacctaagtctgaacatctaaaaggctcacaaagaatcaagcaaatttattgaaagagaccaatacttattagacctatcttcgtgaa

SEQ ID NO: 814666 - DNA, 120 bp, Artificial Sequence
  ENSG00000230647_3 (sequence is synthesized)
ctgaagatcgagaaaaaaattccaagaggcatttggacagaaaagcatgttgactccacaggaacaaaaatcaaactgcattcaaaattctcctctgcaatgtctaatagcaggagaaat

SEQ ID NO: 814667 - DNA, 120 bp, Artificial Sequence
  ENSG00000230647_4 (sequence is synthesized)
aaaatagtaccaacagagcttcaagggaaaaagactgcattctaagaatcctatatttaggaagttgttcaagtgaaagggtaatggaagaaatgttcttagatgtgcaactcactgtta

SEQ ID NO: 814668 - DNA, 120 bp, Artificial Sequence
  ENSG00000230647_5 (sequence is synthesized)
tcagtgaccactgaaacaagtataaagaaaattaagtctagatgattgttttacatataattataaaacagaataaaagtgtaaaacgcaactcttggaagaggatatttatagtataaa

SEQ ID NO: 814669 - DNA, 120 bp, Artificial Sequence
  ENSG00000230647_6 (sequence is synthesized)
aatggcctaattataataatttgaacctaatgttttgccgcacaaaaatagaaatgaaggagatagaatggtaggagaaaacacttatttcctcattattcccaagagggatattattta

SEQ ID NO: 814670 - DNA, 88 bp, Artificial Sequence
  ENSG00000230647_7 (sequence is synthesized)
acacttatttcctcattattcccaagagggatattatttaactcttgataaagataactggaaatacaaacaggatgtatcctttctc

SEQ ID NO: 814671 - DNA, 120 bp, Artificial Sequence
  ENSG00000275162_0 (sequence is synthesized)
ggacgaggccgggcgtgtggccatgtgtgcgtgcctgtgctcatgggacccaccggcccggccagccgggtctacctgagggccccacacccctcaggcagctgaaggggaaagggcctc

SEQ ID NO: 814672 - DNA, 65 bp, Artificial Sequence
  ENSG00000275162_1 (sequence is synthesized)
ggcggagacaaagaccaggcagctggacctcgggcagcctcgaccacccaggacagaggttgcag

SEQ ID NO: 814673 - DNA, 120 bp, Artificial Sequence
  ENSG00000243836_0 (sequence is synthesized)
cctttgtagcggacgcccctcgacccacccacccgatcccggccgcaccctgctctgcacccgcaccccacccccagacctcaccctgccctgccgtgcgctcaacagccagatgctggg

SEQ ID NO: 814674 - DNA, 120 bp, Artificial Sequence
  ENSG00000243836_1 (sequence is synthesized)
cccagacaagcgctcttccgctagtgtgccgggatgagcgggggctggacttctagaaaggggtctgcgggcgcaggagctggggtccgcggtctggggccggctgatcaccagttcctc

SEQ ID NO: 814675 - DNA, 120 bp, Artificial Sequence
  ENSG00000243836_2 (sequence is synthesized)
ttaggaaccggtgaacctcagggggcccattgcacatccaggtgtgaaactgcggtgtggcctccagccaacacaagccatcagccccatgctcagctcccagcaggcagagcgttcaga

SEQ ID NO: 814676 - DNA, 120 bp, Artificial Sequence
  ENSG00000243836_3 (sequence is synthesized)
gtccacacaccgctgaccttacctacttcctctttccaggtcgtagattacagactctcctctgggaaattgcccccagatctaacaggagtacaagaagctgggtagattggaaaacag

SEQ ID NO: 814677 - DNA, 120 bp, Artificial Sequence
  ENSG00000243836_4 (sequence is synthesized)
caccgaattcccctggaactgaggacggaagccttcccagtcctgcagccacctgcagactctcacaagcacggtgctcccgggagaagaccttgctaccccaggcccaaggcagtcgag

SEQ ID NO: 814678 - DNA, 120 bp, Artificial Sequence
  ENSG00000243836_5 (sequence is synthesized)
agaaaacgggaagccctgaaggtttttcaccccgggggaaggcagccagaggagggcacagtgtggaagaactcaactttttaaagacagagatcagctttaaatattgctaagaaagaa

SEQ ID NO: 814679 - DNA, 120 bp, Artificial Sequence
  ENSG00000243836_6 (sequence is synthesized)
gccccctggtggggatgagccagccatctctgggggttgagtctggactgtagagctgtgggtgcagatgtcctcagccagcctgtcttcccttttctcttgcaggtcgtagattacaga

SEQ ID NO: 814680 - DNA, 120 bp, Artificial Sequence
  ENSG00000243836_7 (sequence is synthesized)
ctctcctctgggaaattgcccccagatctaacaggagtacaagaagctgggtagattggaaaacagcaccgaattcccctggaactgaggtctcccctaattcccctgaaactggggtct

SEQ ID NO: 814681 - DNA, 120 bp, Artificial Sequence
  ENSG00000243836_8 (sequence is synthesized)
ggggtcggtggagccgggatgtcaagttcaccttccagccgccgcgggctccctcggcctggggcgcctctaatggaccccggggtcggcctgagccctcccggagcgcccggcggctgg

SEQ ID NO: 814682 - DNA, 120 bp, Artificial Sequence
  ENSG00000243836_9 (sequence is synthesized)
ttagggcagttccggcgccgacttcgctggggacggggaaggtgacccccctactcggatcccccaggtcctaaagccaacacaagccatcagccccatgctcagctcccagcaggcaga

SEQ ID NO: 814683 - DNA, 120 bp, Artificial Sequence
  ENSG00000243836_10 (sequence is synthesized)
tagcattgttcaactttatgatggtatgaaagtgatgacattcagtagaaattgtacttcaagtgccaatacaatcagtttttcacttttggtgcagtattcaataaattacatgagata

SEQ ID NO: 814684 - DNA, 120 bp, Artificial Sequence
  ENSG00000243832_0 (sequence is synthesized)
cagggactgcctgtggatccatgccaattgctgtgatcagccagcccatccaggagagaagctgtgacttccccaagcacaccaagctgtaactctctgggtcctgtcatttgggctgat

SEQ ID NO: 814685 - DNA, 120 bp, Artificial Sequence
  ENSG00000243832_1 (sequence is synthesized)
gagaaagcagcttccgaggagagacatgattcatccaaagagacgattcatgtgagagccagctttcaggccaagtattgatgggagacatctggctgattggccaacagcaggtagaga

SEQ ID NO: 814686 - DNA, 120 bp, Artificial Sequence
  ENSG00000243832_2 (sequence is synthesized)
ttttgacattgcacacaagcaaggatgacaccatgaccatctttgaaagggcagagctggacttttgcataacattattcaggttaatgacaccttggtacacatcagtcaattaaataa

SEQ ID NO: 814687 - DNA, 120 bp, Artificial Sequence
  ENSG00000243832_3 (sequence is synthesized)
taaataaaatgtattgactcttagtcttcaataacacctctgagacttgttaataatacttgtggattgaagatatataaacaaaatcaatatttattgaaaaaatgttcaacgtttgag

SEQ ID NO: 814688 - DNA, 120 bp, Artificial Sequence
  ENSG00000243832_4 (sequence is synthesized)
aacttagattaaccttgttaattgatcctataaagtgtcaaatttttgactgatttgtttacttacatgcttgtgaaattctttgggatggatattgcttcctaatacaatgtttgtagc

SEQ ID NO: 814689 - DNA, 120 bp, Artificial Sequence
  ENSG00000248118_0 (sequence is synthesized)
atgcgcggcctgccgggggcggcctcttgcagttcccgccctgacgcagcgcgagattagagctcctgctagtccccagctgaccctgggcctcaaaggcaagccctgacctcagtcaca

SEQ ID NO: 814690 - DNA, 120 bp, Artificial Sequence
  ENSG00000248118_1 (sequence is synthesized)
cggggtggcggtgatatggtttggctctgtgtgcttcactctgcctcactcgccttccgcctgctggacgctgccctgttccccgcaggcggccgccgtggagggcaggcaccgcgctcc

SEQ ID NO: 814691 - DNA, 120 bp, Artificial Sequence
  ENSG00000248118_2 (sequence is synthesized)
ctggctgctcccggggccttccaagcacagccacggccatggggccgaaacccagacctcgaggggcctgcgggcagagctcgacaagcccagctgctacactgaagggaaaaacctgag

SEQ ID NO: 814692 - DNA, 120 bp, Artificial Sequence
  ENSG00000248118_3 (sequence is synthesized)
gaagcccctgaccttcttgaataacctggatattgcagaatcatgcctggcacacggcactggcagagacgcagaagggaaagtgtccagcgatgagagataccggccagggggcaaatc

SEQ ID NO: 814693 - DNA, 120 bp, Artificial Sequence
  ENSG00000248118_4 (sequence is synthesized)
ttcagcttgcagcactcactttgcagatccagttggaattatttgtgttgacgctctctgctctctccgctctcccctggaaatgacgaggaactgagtacagtggacaatggcttccgt

SEQ ID NO: 814694 - DNA, 120 bp, Artificial Sequence
  ENSG00000248118_5 (sequence is synthesized)
gtccctagctccccccgagccatgagctgctacatcaaaagtctgcagtgggctgcccttcccataatatttcaatttaagcaccgacttgctgctgcggagtcatatctcattcatgct

SEQ ID NO: 814695 - DNA, 120 bp, Artificial Sequence
  ENSG00000248118_6 (sequence is synthesized)
gcagcctttgcaggagtcagggatcattatggagcaagcactgagaaaaaacagattacagcttggcaccgagcagccaggttgcaccccagatgcttcagggacatggtgcctgctctg

SEQ ID NO: 814696 - DNA, 120 bp, Artificial Sequence
  ENSG00000248118_7 (sequence is synthesized)
gagaatggggcagcttccacactgcccaggagccagggcttctgacccaggagcgaaagtctgtctcttccatttctgggagctggcagtatttgcacgactttctgggcctcaggcatc

SEQ ID NO: 814697 - DNA, 120 bp, Artificial Sequence
  ENSG00000248118_8 (sequence is synthesized)
ccattgcccaccaggaattaccttcctccaggatcatggtgaagatgacatgagatgctaatgcttggcctgcggttgctatttttagttctccactttcctggaaagcatgcagttgaa

SEQ ID NO: 814698 - DNA, 120 bp, Artificial Sequence
  ENSG00000248118_9 (sequence is synthesized)
gttcatgacggtattctctcaacgtgtgactcaaagacagaggccgtttcccatccaccggttctcacactgccccattctgcagcttcaccatccacgcgctaagaaggcaggccccaa

SEQ ID NO: 814699 - DNA, 120 bp, Artificial Sequence
  ENSG00000248118_10 (sequence is synthesized)
agtctcagcacccagccgctggggtcctcgctcttatggacagaaaactcaagaatgaatatgtttccccatcttgtgcccttttgcctggaaactatacagagcaggggtccctgctgg

SEQ ID NO: 814700 - DNA, 120 bp, Artificial Sequence
  ENSG00000248118_11 (sequence is synthesized)
cattccttctctgtactagtacggcttcggaaagtactggttctctgaggagcgctcagttgcatctggaaggtgcagtgtgcacagcgatgccccttgacaccaaggtgtgagcatttg

SEQ ID NO: 814701 - DNA, 120 bp, Artificial Sequence
  ENSG00000248118_12 (sequence is synthesized)
agctgtgctggaaggttctccatggaatagtgcccaccctggagggtcctgtgccgcgcacttgaggaggctgtggtggtgaggagagactctggagcaacccacactcccgataagtca

SEQ ID NO: 814702 - DNA, 120 bp, Artificial Sequence
  ENSG00000248118_13 (sequence is synthesized)
ggactgagagtttgggtcttaggtggctttgggtcattacgccctctcaagtggattgctctaagccctgtttatttgttaatgtgaatagttggatggaattgcctttgttctaaaatc

SEQ ID NO: 814703 - DNA, 120 bp, Artificial Sequence
  ENSG00000248118_14 (sequence is synthesized)
ttttattctgcctaaagtctctgggtcagcaagcacatgccacatggcttctctctctgcatgggaatgcacacctgagtagggaggctggccagcccgtgctgccctggtggggtgagt

SEQ ID NO: 814704 - DNA, 120 bp, Artificial Sequence
  ENSG00000248118_15 (sequence is synthesized)
gttagctggctagggttgctggaacagaggggattcaaccacaggaatttattctctcacaccatggaggcccaaagccccagatcatggtgctgtagggccaggctccctctgagggca

SEQ ID NO: 814705 - DNA, 120 bp, Artificial Sequence
  ENSG00000248118_16 (sequence is synthesized)
ctagggaggacctgtgcccatcctctccagctcctggtggttccttggctcgtggcagcacagcttgtaccttcacgtggcactctccctttatgtgtgtggatgtgtccaattttcctt

SEQ ID NO: 814706 - DNA, 120 bp, Artificial Sequence
  ENSG00000248118_17 (sequence is synthesized)
ttctgttggggccccagccgtagtggcttagaggctcacctactctaacaggacctcgtctgaactcatgacatctgcaagactgtgtatccaaataagagcacattctgagatgctggg

SEQ ID NO: 814707 - DNA, 120 bp, Artificial Sequence
  ENSG00000248118_18 (sequence is synthesized)
ggttaggacttaagcacagaagatttgtggggaggtacacagttcaatccatctggaaggtggatagccatggcagggtggaaagacgtgtgtgggtataggccggaggtggcctcactg

SEQ ID NO: 814708 - DNA, 120 bp, Artificial Sequence
  ENSG00000248118_19 (sequence is synthesized)
gagaaacctgtgcacggccccacaaggcagcagctgagcgtggaaggggctggagctgccccgtggtagggaaggggccgtgtggccagcagcagcatctgcctttgtcatcactgggtg

SEQ ID NO: 814709 - DNA, 120 bp, Artificial Sequence
  ENSG00000248118_20 (sequence is synthesized)
ggaccacgagggcaatgctactcttcccctcacaccttctacaggcaagttggccaggtgtcaatgcagccaggtgacacggccgcctggagggcaggagcagacagccccatggaggct

SEQ ID NO: 814710 - DNA, 120 bp, Artificial Sequence
  ENSG00000248118_21 (sequence is synthesized)
ctaggagatagacagggaggccgcagctgtccaggagctgaagtgagcagcagagggcgccgggggagatgcgccctagcaccaggctctgagtgccccagcgagcttccttgccttgac

SEQ ID NO: 814711 - DNA, 120 bp, Artificial Sequence
  ENSG00000248118_22 (sequence is synthesized)
tttcctcactgggaacccgggcctggagtccatatgaagcctcagcccaggggagggtctacctgtccaggaggctcccaccatccagctcgccctggatggtgccctcagaggtgcctg

SEQ ID NO: 814712 - DNA, 120 bp, Artificial Sequence
  ENSG00000248118_23 (sequence is synthesized)
ggcatggggtcacctcggagagtctggaggggcctccggacagtgcggccacgggctgtcctctgcttctcagtgcccaagacagggaaccagagcacagcactgaacacgttttagtgc

SEQ ID NO: 814713 - DNA, 120 bp, Artificial Sequence
  ENSG00000248118_24 (sequence is synthesized)
tcttttagttcatgtgctgcttgctgaatttccctgaattcagagaagagcctgacgcagaggaagcatctgagatcttctgtatgttttctcgtctgtgcaaagtgttttcaactcttt

SEQ ID NO: 814714 - DNA, 120 bp, Artificial Sequence
  ENSG00000248118_25 (sequence is synthesized)
caaaggtcggcattcactgaatttcagctccccttggcttgatctctcatacaaaggttctcaaattccctgaaaatatgcaatgattttctcactcaataaacgacttttctgtcacca

SEQ ID NO: 814715 - DNA, 120 bp, Artificial Sequence
  ENSG00000248118_26 (sequence is synthesized)
ctgctgccgtcccgggctgtccattgttgaagctgaatgaatctgtgcccttaacttccccaaacacatcagcaaatcatgtgagcatcagatgggagcacctcagtgataagataatgg

SEQ ID NO: 814716 - DNA, 120 bp, Artificial Sequence
  ENSG00000248118_27 (sequence is synthesized)
cccccacaaagaaggcagcaggcgtcctgagatgtccaacgtgtcctttctgttggtccacacttgagctacttaaggctaccagcacatgtcctggcaaaacctttgtagttttctcct

SEQ ID NO: 814717 - DNA, 120 bp, Artificial Sequence
  ENSG00000248118_28 (sequence is synthesized)
ataaactaagcataaatttcgtgggagatgacagattacttcatataccatgcaagcaagcccagacaatagctttagccatgactgattgcctcgctgtaacccactttgtgttaaatg

SEQ ID NO: 814718 - DNA, 120 bp, Artificial Sequence
  ENSG00000248118_29 (sequence is synthesized)
cattcttgctgttcaattccaccactgtaattttgttcttctgcattccccggccctctgcggactaaccaggttccttcagtaatgatttcttttctattgtattgttttctgcataat

SEQ ID NO: 814719 - DNA, 120 bp, Artificial Sequence
  ENSG00000248118_30 (sequence is synthesized)
caagttggtaggtgggggtttgggtgacacggccatctgtcaagttcatttgctctgaaaatgcaagaaataatggcctctacaacttggggctatccgttataaaagaagaatatcagc

SEQ ID NO: 814720 - DNA, 120 bp, Artificial Sequence
  ENSG00000248112_0 (sequence is synthesized)
tttcagaggcgtattgctacatttggggcaatgcgtacatatgtggtttcgttagctccagcgggggctaatcctctgacagagccacctctcacacgaaacactgaatggaggcgatcc

SEQ ID NO: 814721 - DNA, 120 bp, Artificial Sequence
  ENSG00000248112_1 (sequence is synthesized)
cgagatggatggagcagcagcagcgcaggttgctgcagctgtgctgccagagattgtaattcaggaaccaatctcaagctgagcagaggaaaaaatgagatgcttcatgaaaatggccaa

SEQ ID NO: 814722 - DNA, 120 bp, Artificial Sequence
  ENSG00000248112_2 (sequence is synthesized)
atgtcatcaccagctattttgtgagaagagctatgttaggagccatccacatgtaaaatggactttcaccaaattccatccatctgccggtcatggaagctcacaacatgtatgtctcct

SEQ ID NO: 814723 - DNA, 120 bp, Artificial Sequence
  ENSG00000248112_3 (sequence is synthesized)
tttctggcactaagaaatacagacacttgtgatttactactgggcacttataggaatggagtcaactatttcctaagaaactcaaagactgaaatgagaaattcagaaaataaaaatatt

SEQ ID NO: 814724 - DNA, 120 bp, Artificial Sequence
  ENSG00000248112_4 (sequence is synthesized)
ttctgtgttagaaaactatataccagaaagcctgaaaagtgaggcaaagggcacgaaattctggttaataagatgttgtagattagtgagaacttgaaaatgtttttgcttctagtatat

SEQ ID NO: 814725 - DNA, 120 bp, Artificial Sequence
  ENSG00000248112_5 (sequence is synthesized)
tttttggaatttctaaactatattagctccctttcttaccttaggaattacagtattgtgatcatgtgagaagatagttctaaatattaataaatatttttaacttcatcaaatacgtct

SEQ ID NO: 814726 - DNA, 120 bp, Artificial Sequence
  ENSG00000248115_0 (sequence is synthesized)
ggaaaggattccttatcagcagacagttacagctcccactaggacactgccttctcagcggcttcagttatcagatattcctggacatactttccaagccatgaaaaataacagccacag

SEQ ID NO: 814727 - DNA, 120 bp, Artificial Sequence
  ENSG00000248115_1 (sequence is synthesized)
ctttcccagcactctgacaaacatccatgagcccccaaagaccgggaagtaatgatgatgcagctgcggcaccatagaagaaacaagtgatttcagtcaaagggcctggactcacgagct

SEQ ID NO: 814728 - DNA, 120 bp, Artificial Sequence
  ENSG00000248115_2 (sequence is synthesized)
agcaactttggacagattcttgaactctcagcctcagtttctgcttctgtaaagggagataactacagtgaccttcaggttatcttgaagatgccaatgagctagtgaaaatgcaattta

SEQ ID NO: 814729 - DNA, 120 bp, Artificial Sequence
  ENSG00000248115_3 (sequence is synthesized)
atctgtacagaactaaacaaatgctcttttaatacaaattaattaaaagcaggcatcttaagaggtggcttaagaagactcctgcatcatcatagggagttaaaattctgagcaaaaagc

SEQ ID NO: 814730 - DNA, 120 bp, Artificial Sequence
  ENSG00000248115_4 (sequence is synthesized)
cttctggaggagaagcataggacaggcagccccaagactggactggatagatgttgctgagccaccaactctctgagggacctgagacaaagccaggtgacctcaccagtgctccatgtt

SEQ ID NO: 814731 - DNA, 120 bp, Artificial Sequence
  ENSG00000248115_5 (sequence is synthesized)
ctcaccataagttctataggacactcaaatattctcaggacatcagtttactatacacatgcacacacacatattttacatttcattcaaagggtaaaacatagactccctttgttctat

SEQ ID NO: 814732 - DNA, 120 bp, Artificial Sequence
  ENSG00000248115_6 (sequence is synthesized)
aaacctacaaacatgtctgagcattttttacataaatatttcacaaatattttacatgaatacttcgacttataagtccatattttaacaatggcatcttttccaatgtgtacattatgg

SEQ ID NO: 814733 - DNA, 120 bp, Artificial Sequence
  ENSG00000248115_7 (sequence is synthesized)
aagtgtggttggggtgtacagcctaggagctcagggactgcacaggcctgttctttatggatgcattgcattcatctcccacagccatttgtagcttcagctgtttctgaaagcagccac

SEQ ID NO: 814734 - DNA, 120 bp, Artificial Sequence
  ENSG00000248115_8 (sequence is synthesized)
tttcccttttgatgtctgaggtccattattttcatttttgacttaaccaacaggtgttctctcttgaactctttcctacatgagctgtcttgcctcagggttcccacggacaggagagtt

SEQ ID NO: 814735 - DNA, 120 bp, Artificial Sequence
  ENSG00000248115_9 (sequence is synthesized)
tttcctacagtgttactgagaggcacagagaaatcagttcctcctggtccactggctccgctctcagcactgcagtctcttgtgaccacgctgaagtctcaacgtttcccccttctgagg

SEQ ID NO: 814736 - DNA, 120 bp, Artificial Sequence
  ENSG00000248115_10 (sequence is synthesized)
aaattgtgagagtgcacaagatgtttttgaaccttggtgcagaatccagaaagaagtgcagcctctggtgacagggtcttgggctagccatgtgaagcctggctttatgtcaggcctctc

SEQ ID NO: 814737 - DNA, 120 bp, Artificial Sequence
  ENSG00000248115_11 (sequence is synthesized)
aaatgtgctgtacaaacctacctgcaggtctactctaggcagaaggggtggaccgatggcaccaacaaacacatctgtacacacaacagtgcagcagacacttgtggatggggtatgaga

SEQ ID NO: 814738 - DNA, 120 bp, Artificial Sequence
  ENSG00000248115_12 (sequence is synthesized)
caagctgtagatgccctcaattaaatctgaggacaaaagaagactgcccagagagtggcactagcatggcaacaaaatatttcaaaatattaatgggttttacatacacgcataaaatca

SEQ ID NO: 814739 - DNA, 120 bp, Artificial Sequence
  ENSG00000248115_13 (sequence is synthesized)
catttttctgaccttataacacatttcagtcatttaggtattgagtttgtaatgcttgtggatactcgaaaaattgaaagaggcaaagttagacttcttgtccccaagactggaaatatg

SEQ ID NO: 814740 - DNA, 120 bp, Artificial Sequence
  ENSG00000248115_14 (sequence is synthesized)
tcccttcgttgggagttgggtggtgttgaatgcagttggggtggaaggagaggagagctaatgggaaaacaaagaataagtaaatgttctacattcctgagaaaaggggccctgccccct

SEQ ID NO: 814741 - DNA, 120 bp, Artificial Sequence
  ENSG00000248115_15 (sequence is synthesized)
agccatctctgcagcaaagccctgggggagagagagagaatgctcagacatgtttgtaggtttacagaacaaagggaatctatgttttaccctttgaatgaaatacaggaaagcaaaata

SEQ ID NO: 814742 - DNA, 120 bp, Artificial Sequence
  ENSG00000248115_16 (sequence is synthesized)
cctagagcagaaatggctgtgtgacatgtcagacaaggtcatagagttttccatggccctgcactgcccgtggctcatgtggcatgactgtaggtgaaacccagaatggactctcaaggt

SEQ ID NO: 814743 - DNA, 120 bp, Artificial Sequence
  ENSG00000248115_17 (sequence is synthesized)
gccctgggctcccttcctcaatggctgaagaaggcttctcttgacctaatggagtttaaagagacttggggatatagtgaactagaccccagaagcctttcaaacaggaactagggggcg

SEQ ID NO: 814744 - DNA, 120 bp, Artificial Sequence
  ENSG00000248115_18 (sequence is synthesized)
cccaccaggaccttgtggactgacagtggaggctcaatgagacaaaatgtgtcatggagatgccttcaggacagacagcattcgggaacagataccagctccttacagtcttggcctcca

SEQ ID NO: 814745 - DNA, 120 bp, Artificial Sequence
  ENSG00000248115_19 (sequence is synthesized)
gattagacatggccctggaaaaaggtgatgggggacctggaattaccagacagcaattccgttcccccacttagtggaatgggagcacaacatgtaaattaaaggaattagagaaaaaca

SEQ ID NO: 814746 - DNA, 120 bp, Artificial Sequence
  ENSG00000248115_20 (sequence is synthesized)
attgtgctaatttccaactcctacttatatatatgatttgttaactctggaggatgcagccatcagcataagcaaccaacagaagaacacgctggatcctctccttttcctgacagtgtg

SEQ ID NO: 814747 - DNA, 120 bp, Artificial Sequence
  ENSG00000248115_21 (sequence is synthesized)
attgctgtggtcagcaacaccatggaggcttcactgtgggacttcagatttgttggtgaagagaaagctatgggggtcccactctccctcccagcttgaggtctctgagatgcaacacaa

SEQ ID NO: 814748 - DNA, 120 bp, Artificial Sequence
  ENSG00000248115_22 (sequence is synthesized)
ggagccttggaatgaatttctccacagccagagctctaaatctggaagaagcccaagactactgctggagctcacagaatggtcatccctggagcagcagccatctcccctacatcctac

SEQ ID NO: 814749 - DNA, 120 bp, Artificial Sequence
  ENSG00000248115_23 (sequence is synthesized)
ctgcctccccatcatacttagaaggcaaacctccttccccttggagcctggaaggggagcggtggctgaggaaccagaggaaagcaaggtggcttcatgacagaggtcaaggggactatg

SEQ ID NO: 814750 - DNA, 120 bp, Artificial Sequence
  ENSG00000248115_24 (sequence is synthesized)
ttagatagggctttttatggcaagtgacagaaatccagcttaaattatcttaaggaaaagaggaaaatgtactggctcaagtaaccaggctgagggaagggcaggtggccaccagggtcc

SEQ ID NO: 814751 - DNA, 120 bp, Artificial Sequence
  ENSG00000248115_25 (sequence is synthesized)
tgggacagtgcaacgaggacttggaacccaccaggccctttctgtctcttgtctcttctctctaaggctcagtttaattctcctgcagattggtgccttccttgcagtataaaaacatgg

SEQ ID NO: 814752 - DNA, 120 bp, Artificial Sequence
  ENSG00000248115_26 (sequence is synthesized)
ctgccagctgctctcatgagcacctcttcccagcttcatgattaagaaggaatgctcttccttccattccagttagtaaagtcctagacaagaaagccaaatggcccagtcctgtgggca

SEQ ID NO: 814753 - DNA, 120 bp, Artificial Sequence
  ENSG00000248115_27 (sequence is synthesized)
aaaaggtgaagcactataaaagacagttcccattaacatcaagtggaggaagaggaagagtagctgcccatgaaggattctcagaaggagggctgggtgcccagcaggcaacagcacaga

SEQ ID NO: 814754 - DNA, 120 bp, Artificial Sequence
  ENSG00000248115_28 (sequence is synthesized)
ccgggtgagcagcaggggaaaagaaacagggatgagacagcagggctggagttgctgaaatcctggcaaaattcgatttgtggtcagaatgaaacatgccttcataactcaggtcttcaa

SEQ ID NO: 814755 - DNA, 120 bp, Artificial Sequence
  ENSG00000248115_29 (sequence is synthesized)
tgctttggggaactcatgtggcttgggaggctgaaggcacacaagagaggagggcaaggggatcagagacaccccacaattccagaaaccaccctgggcttcaaatgcaaatgttgctga

SEQ ID NO: 814756 - DNA, 120 bp, Artificial Sequence
  ENSG00000248115_30 (sequence is synthesized)
catgcagaaggagtggggttgtaaacataagggttggaaaaaaaaaagaacgcagtctggttgcagtatttccacctgagccctgcagagctgttctgccagacagtctacaaagcatgc

SEQ ID NO: 814757 - DNA, 120 bp, Artificial Sequence
  ENSG00000248115_31 (sequence is synthesized)
acctgggtctgcaagtgctgggtgtgtgcttctatttaataaataaccctggcacactgtataaacatcagatgaacatgaaagctgcaacatctggagaactgtcaccatctgccactc

SEQ ID NO: 814758 - DNA, 120 bp, Artificial Sequence
  ENSG00000248115_32 (sequence is synthesized)
tgaggggagcatttaaagaatcagcgggataggagcggtatgtggcctgagttaaaaaaaaatgttggcagctgctgccagctatcagttgctgcgaatagcagtggttcttcctgacgt

SEQ ID NO: 814759 - DNA, 120 bp, Artificial Sequence
  ENSG00000248115_33 (sequence is synthesized)
ggcagtttatggactttcacaaatcccgggtgacccctcacaaaggcggaggccaacatactaaccggctccaatagccatcactcaccaagtgcgtttacaaggctttgttcctgtctc

SEQ ID NO: 814760 - DNA, 120 bp, Artificial Sequence
  ENSG00000248115_34 (sequence is synthesized)
ttttgtggcctcacaatggcagatgcacaccaggtcccacaaccagagaaaaagagagggaggttactcgtggagatgtcagaaaaagtactccccttgtgcctgacttctttgattaaa

SEQ ID NO: 814761 - DNA, 120 bp, Artificial Sequence
  ENSG00000248115_35 (sequence is synthesized)
cccttgtttgattttgtccagagaggcaagacttcaacatgtagctctaagtgctgggccaggcaccccaggtttagatgaaaaactaacgctgatagaggtatgtgtttacatcagacc

SEQ ID NO: 814762 - DNA, 120 bp, Artificial Sequence
  ENSG00000248115_36 (sequence is synthesized)
gaggttatacttacatttttcatttgttaatataaatctaagttaaccacctcaagcgggactcagcaagggctgctctttattaatgggctggtcgttgctgtttttaagagagtgtca

SEQ ID NO: 814763 - DNA, 120 bp, Artificial Sequence
  ENSG00000248115_37 (sequence is synthesized)
ttaaccctaacatacgggctccttgtgtaattgaacagtaaatgtgattatgatcccaactgccatctccaggcacttcttggaacacaagttctttgtacaggagaaatagtcagacac

SEQ ID NO: 814764 - DNA, 120 bp, Artificial Sequence
  ENSG00000249249_0 (sequence is synthesized)
agtcagcccgcggcttttctgtcttcctttctggcccagcgagagcgcccagggggtgggcgtcttgccccgggcgtcgagagtttggggccgtcccgtacgcggcgcgccgcaacccag

SEQ ID NO: 814765 - DNA, 120 bp, Artificial Sequence
  ENSG00000249249_1 (sequence is synthesized)
tccccgcgaccacagcagcctgctccccaccgcgcttgcagagcccggacgcgcgtgagtcgggggcccgcagaggcctcacccttggaggtcgccgcttgtcaggcctgactgctgttg

SEQ ID NO: 814766 - DNA, 120 bp, Artificial Sequence
  ENSG00000249249_2 (sequence is synthesized)
cccgccgcccccgaggggccgctcgaggccggactgctgctttgccgtggcaggccccacccgggacgtggcgctgcgggccggggcggtccagctgcaatccctactccctgccaaagg

SEQ ID NO: 814767 - DNA, 120 bp, Artificial Sequence
  ENSG00000249249_3 (sequence is synthesized)
gccaaaggagaacccagttactgaacatcggatgagaccatggatagtaaattgggagtgaaggtccatacctgggtctcagaagcacagtacagttacaccagcctcctgagtatgaca

SEQ ID NO: 814768 - DNA, 120 bp, Artificial Sequence
  ENSG00000249249_4 (sequence is synthesized)
gcaacattccttcagggattaaagaaaatgcttcagaagattggaacactgctcagccttcccaaccttcttttaccactgatgtttctaccttagtgatcttcctccttattttaatgc

SEQ ID NO: 814769 - DNA, 120 bp, Artificial Sequence
  ENSG00000249249_5 (sequence is synthesized)
ttctttctctttacaattaaaagttcataaaatctttcaacattatttttcactacaaaagtctgaagttctctgtgaaatgcctacatgtaagaattaagatagattttaaagactgtc

SEQ ID NO: 814770 - DNA, 120 bp, Artificial Sequence
  ENSG00000249249_6 (sequence is synthesized)
agtctcaaaattccatgctcatcagttagtgcatgatattaaattatgcttttttcctccttttaaatataccaacattatattgctgatttttttatttacctgggtaagagcactgac

SEQ ID NO: 814771 - DNA, 120 bp, Artificial Sequence
  ENSG00000249249_7 (sequence is synthesized)
tcggttctcactaggaaacaaaggtgggtcttctccaacttgaaaatcaaaatatacagttttatgtgtgaaagtagaaaattcattgctgaagcaaaatttgtatgtcccatttttgga

SEQ ID NO: 814772 - DNA, 120 bp, Artificial Sequence
  ENSG00000249249_8 (sequence is synthesized)
ggctgtgaaggtaaaactatcatactgtttcttcatctctttgtataacactttaccatcaggatcttctaatcgacaatctacatcatagtgaccaccagtaatcacctgtaagagatt

SEQ ID NO: 814773 - DNA, 120 bp, Artificial Sequence
  ENSG00000249249_9 (sequence is synthesized)
aaaaaagaaaaatcactgtgaaaagtgtgaaaaattaatcagatttaatcagatttcctattaaaatggcaataaggtgatgggcaaaggacttttactatctttttaaattttcaccag

SEQ ID NO: 814774 - DNA, 120 bp, Artificial Sequence
  ENSG00000249249_10 (sequence is synthesized)
tggatggaacttgggagattttacttcaactaaactttacagaaactgaacaagtattctccaacttttattcactttgaactagccagacaactgtgctaattaatggagatctattag

SEQ ID NO: 814775 - DNA, 120 bp, Artificial Sequence
  ENSG00000249249_11 (sequence is synthesized)
atcacttaattctcccagcaaccctacaatatacttttttccttccatttgacagactgaaaaactgatgttaaataagcgaactattcaagactgttcatctaaattaagtgggaaagg

SEQ ID NO: 814776 - DNA, 120 bp, Artificial Sequence
  ENSG00000249249_12 (sequence is synthesized)
cagaacttgaactccaaagtcatattcttaacctctaagcttactgcctgcaatattttccttctgaaaattttctaacccactttcctattagcatcatccaagcacacacacagtgaa

SEQ ID NO: 814777 - DNA, 120 bp, Artificial Sequence
  ENSG00000249249_13 (sequence is synthesized)
gtaacaaggtaggccaatccttaggattacaccccattcatacttctatcatagaacttaagctcattttactgccaaattacaaatagattacatttattaagttcttttatagtcagt

SEQ ID NO: 814778 - DNA, 120 bp, Artificial Sequence
  ENSG00000249249_14 (sequence is synthesized)
tatatggaatttgatatacattttgttttgaactacactataagttgagtaacggagtgggctattctaaaagtatataatcatttacaaccttgttttgaggagagacacgtaactgat

SEQ ID NO: 814779 - DNA, 120 bp, Artificial Sequence
  ENSG00000249249_15 (sequence is synthesized)
taaataaaatattgttgaaactcttgtgattaaagcaaaaacaaaataacatgaaggacaacaagtctgtttatctagaaagccagtacttaatggcaaacatactgaatggaagcctgg

SEQ ID NO: 814780 - DNA, 120 bp, Artificial Sequence
  ENSG00000249249_16 (sequence is synthesized)
aggtaggtgatatgagtctgaacagaactgtggaactactttccacggcttatgcttaatcagttacaattccagccatttgggttgtacagaggagggagagatttttcctgcggtaac

SEQ ID NO: 814781 - DNA, 120 bp, Artificial Sequence
  ENSG00000249249_17 (sequence is synthesized)
gaagaaagagggagtgcagagaggtgaacagagtgaacgtatacacattgggttgaatgaagggttcccaaaccaccatgtgattggggagcacaagattgttattttcaaccttgaact

SEQ ID NO: 814782 - DNA, 120 bp, Artificial Sequence
  ENSG00000249249_18 (sequence is synthesized)
ctcttggttagcatcctgacattctaggtcaaactttggatttaaaagaaggatctgtgtgaccttttctcacttgagagaagatgactaatgaactatgttacatatcattttgataat

SEQ ID NO: 814783 - DNA, 120 bp, Artificial Sequence
  ENSG00000249249_19 (sequence is synthesized)
ctaatgaaaataattatgcacttatgaaactgtaaaaatatgtaaatgttaatatacagataaaatgttttgatataaaagtgtcttatcaattggggatttaccaatccccatcctcac

SEQ ID NO: 814784 - DNA, 120 bp, Artificial Sequence
  ENSG00000249249_20 (sequence is synthesized)
caaaaagtcagtaactttttctccaggtgaaaataacttcattttgctatactgaattatacgtatttgaccattgtattctgaataatcaaacacatacatacaaaccgaatagcacca

SEQ ID NO: 814785 - DNA, 120 bp, Artificial Sequence
  ENSG00000249249_21 (sequence is synthesized)
gaacttatcatcaccccacttctcttccatcaaacttaaaacaagtaatctcacttaacagtatccctttaaacctgtccaatcacctactattgaaactgaggatcatcccaaactaac

SEQ ID NO: 814786 - DNA, 120 bp, Artificial Sequence
  ENSG00000249249_22 (sequence is synthesized)
tgtccctatctatccatatgatcacacaaatctctcaatctttttgcccctctcaaattcatcgcattccgaaaccacaatccagacaggactattgccacaacttcctaaaaggtcttc

SEQ ID NO: 814787 - DNA, 120 bp, Artificial Sequence
  ENSG00000249249_23 (sequence is synthesized)
ccactacccaatatcttctccctcgaactcagggtttctcaacctcgcattattcccattttgaactgaataattctgtgttgtaggaggctgtatggtcctgtgcactgtgacacgtta

SEQ ID NO: 814788 - DNA, 120 bp, Artificial Sequence
  ENSG00000249249_24 (sequence is synthesized)
aacagcatacctggtctctaactactagatgcaggtagctgcccttctcctaaaatgatgccgaatgtctcctgggaagaaggggtgcccatctccccatctttcctcattccccattga

SEQ ID NO: 814789 - DNA, 120 bp, Artificial Sequence
  ENSG00000249249_25 (sequence is synthesized)
gcaatcacttaaaaactttttgataattacctgtggcctgcagacaaatctaaacctcttaacaatggtatactattcacatgttcttcctcccaggtagcttcagaacctcttttattc

SEQ ID NO: 814790 - DNA, 120 bp, Artificial Sequence
  ENSG00000249249_26 (sequence is synthesized)
acacccttactcgttctatgttcctaaaataccagactaccagaaattctctgaacaagtctttgctttacatctgcactgacagtgcagttcaacagggtttgctaaagaatcacacgg

SEQ ID NO: 814791 - DNA, 120 bp, Artificial Sequence
  ENSG00000249249_27 (sequence is synthesized)
atcaaaatgacagtgtttgcaaatctacagtttattactgtaggttatgttataaatctacagtttataacattatacgactatatatgtctatgtaagctctctgaggtcagagtcagt

SEQ ID NO: 814792 - DNA, 120 bp, Artificial Sequence
  ENSG00000249249_28 (sequence is synthesized)
ctctgggaggtagtataataaagtggctaagaatttaacttgggactgaaaagagccccaaaaggaaaagaatataaaacattacagccaaaggctgcctcacagcaagagatctgaaaa

SEQ ID NO: 814793 - DNA, 120 bp, Artificial Sequence
  ENSG00000249249_29 (sequence is synthesized)
ggtcaggtgtgggctccttcggcttccctttgttaggtgtgtggccagacatatactctctcagatctggaaccacccaagtgtgcaaagaaaacaccctggaaccaagcaacccaaaat

SEQ ID NO: 814794 - DNA, 120 bp, Artificial Sequence
  ENSG00000249249_30 (sequence is synthesized)
agagtcctgattgcatttttaaatattttgctggtcacataggcatattcctgctacgcagctagtctcaacaacagagctctgggttgggggtgtggtctcatgaagaccaggagcaaa

SEQ ID NO: 814795 - DNA, 120 bp, Artificial Sequence
  ENSG00000249249_31 (sequence is synthesized)
tcatcaatctcattgttaccaataaataatgttgacaaactggtacaaactgcccccaaagcccttggactcacagtcacaaagctattataatagcttcatattaaagctaataataat

SEQ ID NO: 814796 - DNA, 120 bp, Artificial Sequence
  ENSG00000249249_32 (sequence is synthesized)
agttttgtgactattaataaatataactatagtcacaaaactattattattcagtgtattttcaatgccatgcacaaatgttagcaatatagctcaggctaatttcaggcctgctggaac

SEQ ID NO: 814797 - DNA, 120 bp, Artificial Sequence
  ENSG00000249249_33 (sequence is synthesized)
tgtcatgaacatatctgcctggggccccttcttctctcctctgccgccttgtagagcaacggctacttatcttgcagactcacctctaacatcagctcctcagctaaatgtcccctgatg

SEQ ID NO: 814798 - DNA, 120 bp, Artificial Sequence
  ENSG00000249249_34 (sequence is synthesized)
atccttctgtctcctgccagcactatacctagtgtgtacctttattgtcacatttaacattttatgactatatatgtctgtgtaagctctctgagatcaaagtcagtctctgggaggtag

SEQ ID NO: 814799 - DNA, 120 bp, Artificial Sequence
  ENSG00000249249_35 (sequence is synthesized)
ggcaatccctactccctgccaaaggagaacccagttactgaacatcggatgagaccatggatagtaaattgggagtgaaggtccatacctgggtctcagaagcacagtacaggtttttag

SEQ ID NO: 814800 - DNA, 120 bp, Artificial Sequence
  ENSG00000249241_0 (sequence is synthesized)
tttccattgttgctggagtgtgcgtgagtgtctgaaagaaaatgtaagagacgaacctttgcaaaagcagactcctgctaaggaaaaataagctttgccacccagttttggtcatgggga

SEQ ID NO: 814801 - DNA, 120 bp, Artificial Sequence
  ENSG00000249241_1 (sequence is synthesized)
cttgagttactgtgacctcagaggcccctaggggcctgatcattttttttctttcttttttcctccatcttttcttttcttttctttctttcttccttcctttttctttgcttgcttttt

SEQ ID NO: 814802 - DNA, 120 bp, Artificial Sequence
  ENSG00000249241_2 (sequence is synthesized)
tttttttcaaatgagtgattgattttaatgaggattgctataggatgctataggatgctataggaatgtctaatgtacagtacattagacattcaagcctctgcataaggtgtgggaaac

SEQ ID NO: 814803 - DNA, 120 bp, Artificial Sequence
  ENSG00000249241_3 (sequence is synthesized)
aagattgcctcatcatcatgctccaatatggctcagaaaggcactgagaaaacctagccttagctaggctaagagcctagcttctggcctggcttttacgtggtcagcggatgtgcgtcc

SEQ ID NO: 814804 - DNA, 120 bp, Artificial Sequence
  ENSG00000249241_4 (sequence is synthesized)
atccccctgcactggttccccttgtcctttctgtggctctcctggattcctctcgttcagctccttggtgtacagagcctatgtcaatggcaatggtgagggaaattgccagagccctgc

SEQ ID NO: 814805 - DNA, 120 bp, Artificial Sequence
  ENSG00000249241_5 (sequence is synthesized)
cctccaggcctgtccttattcatggggatctgagaagaagagattaggacccagacatgcacagaggagaccctgtaaggacacaaagagaagacagccatctgcaagccaagaagaaag

SEQ ID NO: 814806 - DNA, 120 bp, Artificial Sequence
  ENSG00000249241_6 (sequence is synthesized)
gccttgggggaaaccagccctgcccacaccttggtctggacttccagctgattcttggatgagctggtccttaggcacggaggcaggactgtgagaaaataaatttctgtttttaattca

SEQ ID NO: 814807 - DNA, 120 bp, Artificial Sequence
  ENSG00000241475_0 (sequence is synthesized)
attccaaacggtatggcgagcactgcgcatgcgggaaacccaccctgtaagggaagaatcctgggaaagaggcaagcctatgaagtcccaggatcaagatgggaccatctagttgcagga

SEQ ID NO: 814808 - DNA, 120 bp, Artificial Sequence
  ENSG00000241475_1 (sequence is synthesized)
aaacaagctgagtgaggattcccactgattctatactatgatcataccaatcacctctgagaagcccaatcactacaaccactaaccacaacataaatcaacgtgaggacctgagagctc

SEQ ID NO: 814809 - DNA, 120 bp, Artificial Sequence
  ENSG00000241475_2 (sequence is synthesized)
gcttgctcccactctgtccctagcccagcctggtttttccatcacatgcttcttaggcagcagggagctgaggcagggggaacatttagttcctttttcaaagactgggaacacttaaaa

SEQ ID NO: 814810 - DNA, 120 bp, Artificial Sequence
  ENSG00000241475_3 (sequence is synthesized)
cctgcccttgggcttggccgaggctggtctgggagtaccatttgcaaatggctcttgcttcacggttgcatctccatctgggtaaacaacctagcgacagcgctggctcttcttaaggct

SEQ ID NO: 814811 - DNA, 120 bp, Artificial Sequence
  ENSG00000241475_4 (sequence is synthesized)
gtctgttatggactgaactgtgtccctctcagattcacttgttaaagtcctgaccccagtacacctcagaatgtgactgtatatagaaatagggcatgtaaagcagtcatgacggttaag

SEQ ID NO: 814812 - DNA, 120 bp, Artificial Sequence
  ENSG00000241475_5 (sequence is synthesized)
taaggtcatatggattggctctagttcaaacgtgactggtatccttctaagaagaggaagagacaccagagctcactctctttccacgcacacaatggccatgtgagcacactgtgagaa

SEQ ID NO: 814813 - DNA, 120 bp, Artificial Sequence
  ENSG00000241475_6 (sequence is synthesized)
gatgccatccgcaagccaagaagagaggccttgggagaaaccaaacctgctgtcaccttgatcttggacttccagcctcaagaactgtgagaaaataaatttctgctgtttattccaccc

SEQ ID NO: 814814 - DNA, 120 bp, Artificial Sequence
  ENSG00000241472_0 (sequence is synthesized)
caccgcatctttataaagggccgccttggggcgcgaaaagttcgtgaggtgtagtcgcggcaaccaggaggtgcacccaccactagaatttgaacatcctaagaacaggtatttttgtct

SEQ ID NO: 814815 - DNA, 120 bp, Artificial Sequence
  ENSG00000241472_1 (sequence is synthesized)
ctgctttgctgatgtatcctcagcaaccggaactgcctgacatgcccagttctggtgatgatttcacttttgacagaagctgtccctcaaaagcaaacatgcaatagaagaaacagatct

SEQ ID NO: 814816 - DNA, 82 bp, Artificial Sequence
  ENSG00000241472_2 (sequence is synthesized)
ccagacatggccaaatgtcccctggggggcaaaatcacccccaattgagaactactgctctaaactgcgtgatctcggctca

SEQ ID NO: 814817 - DNA, 120 bp, Artificial Sequence
  ENSG00000241472_3 (sequence is synthesized)
aaagcgccacgccccgcgagggtaagcgatctacgccctaccccaccggagagcttctgggcgcgtccccttctccgggagacctaaggagggcaaccaccgctcccaatctcccttggc

SEQ ID NO: 814818 - DNA, 120 bp, Artificial Sequence
  ENSG00000241472_4 (sequence is synthesized)
tatttatcaggcaatggtgcaagacccactcgagcacgctcagctatcatatggaaaaaacaaaaacaccacatttgccttattatacacacagaaccaacagctctttctgagatttgc

SEQ ID NO: 814819 - DNA, 120 bp, Artificial Sequence
  ENSG00000241472_5 (sequence is synthesized)
ttgatgaataacatatcctcctggcttccctttctaagacttatctatatttttaaacaagctaaagtgttatcagctgaggcagaatgtaaaatgaaattttgctgcacatacccagaa

SEQ ID NO: 814820 - DNA, 120 bp, Artificial Sequence
  ENSG00000241472_6 (sequence is synthesized)
actctagtttgttattcctacaattataccaacatatactttgtccttttaccaacccctttctccatgtctttctgctcatgatggtcttagaaaagagtggcctttttcattagagat

SEQ ID NO: 814821 - DNA, 120 bp, Artificial Sequence
  ENSG00000241472_7 (sequence is synthesized)
aaatctcccaaatgatcacccatgtctatgcctacagcacacagacagcatcctctgcaatgtccttagctatttatacaaaggtcaccaccaatcaacagtgccttgatctcaatagcc

SEQ ID NO: 814822 - DNA, 120 bp, Artificial Sequence
  ENSG00000241472_8 (sequence is synthesized)
aaaagcgactgggtgttggggagcagcttttgggagcgtccttgagcaaagcgccacgccccgcgagggtgcacccaccactagaatttgaacatcctaagaacaggtatttttgtctct

SEQ ID NO: 814823 - DNA, 120 bp, Artificial Sequence
  ENSG00000241472_9 (sequence is synthesized)
gccttaaatgggtaaatttcatatggtatatgaattatatttcactaaaactttaagaaaacattatacagtactgttcaaattttaagtggtccaatttaaatgcactattgtatacaa

SEQ ID NO: 814824 - DNA, 120 bp, Artificial Sequence
  ENSG00000241472_10 (sequence is synthesized)
ttctatgtaatgtccttaccatggtatatgttaactataaatatctatgcccctacccttagtatcaaagcatatattatatgccagtgagccaagccccacatgtctgtgaaatgtggt

SEQ ID NO: 814825 - DNA, 120 bp, Artificial Sequence
  ENSG00000241472_11 (sequence is synthesized)
cttctagccatagaagtagcttgtgctcctagggtattccttgaggctctgtatgaagaatgtccatttgtttgagtccctaacctacagaatattcctgaccatggaaatgtgatagat

SEQ ID NO: 814826 - DNA, 120 bp, Artificial Sequence
  ENSG00000241472_12 (sequence is synthesized)
aggagtaagcacatggaccaaaaggcctggaggctcatcatttaaggtacaagccaattatgtagtctttgaaagaatgctttgaaattcagcttgcttgattcaattcccaatattttc

SEQ ID NO: 814827 - DNA, 120 bp, Artificial Sequence
  ENSG00000241472_13 (sequence is synthesized)
tcccaacatgtgatatgacatcacttcatgtgaaaatagcgaagctccaaacattttctttcagtcaccttattaagctcgctgagccctgacagcctaatgaaaggctaagggggaaga

SEQ ID NO: 814828 - DNA, 120 bp, Artificial Sequence
  ENSG00000241472_14 (sequence is synthesized)
aaatgtcccaacttctacactgttgaagatgggctaatgagaggttagcttgcaagaatcattctttcttggcatcctgcttctgactgcttggctttcagcttatacccagcatgaaaa

SEQ ID NO: 814829 - DNA, 120 bp, Artificial Sequence
  ENSG00000241472_15 (sequence is synthesized)
tttaatttcctcgcagttgaaggtagtttaaagcttattactcacatgctaaaatgttgatgtatctgtttttgtgcttgttttctggatgattggaatgctctgcagtgatgttcatat

SEQ ID NO: 814830 - DNA, 120 bp, Artificial Sequence
  ENSG00000241472_16 (sequence is synthesized)
cagcagtacagcgctggacttcctagtgaagaaaacagcaagattatagacacagtttagaaacaaaggaacaccatatacatttaaaggcataaagtatttactcactccctggccaca

SEQ ID NO: 814831 - DNA, 120 bp, Artificial Sequence
  ENSG00000241472_17 (sequence is synthesized)
gccaccgttaccttctcaatcccaacttcggatataattattgatatatttataacgagtttatgaagaatgtgaaaaaggtataaagatttcattatttactatttcatcaatcatcta

SEQ ID NO: 814832 - DNA, 120 bp, Artificial Sequence
  ENSG00000241472_18 (sequence is synthesized)
cttttttctagtttttgacctagtccctgagatgtaaaacaatatctctttttgaatacatcatagtctatgggtgagaaaaatattcaaaaagatagtcaaacatgatgaatacaaaag

SEQ ID NO: 814833 - DNA, 120 bp, Artificial Sequence
  ENSG00000241472_19 (sequence is synthesized)
aggcctgagaaagctctgatgggagcacagaacagaggaaggctttagacaggtgaaaaaatttacctaagtcttaaaggaagaaagggaatttctaagaagtataatctctaccatgat

SEQ ID NO: 814834 - DNA, 120 bp, Artificial Sequence
  ENSG00000241472_20 (sequence is synthesized)
ttgcaatatgcttacaggccttatagcctcattttataattgtgagggtgcattgactctaaagactcagtgctgaaataaccctaataacagcccaactaatggtcatatctcatatat

SEQ ID NO: 814835 - DNA, 120 bp, Artificial Sequence
  ENSG00000241472_21 (sequence is synthesized)
acagtcttgacaaattatttgtgaactctagtattttaaaagttatccttctttggaaaaatagcagtagcagaaataacactcttatcctaccttggccgtggatttaaacgtcatcca

SEQ ID NO: 814836 - DNA, 120 bp, Artificial Sequence
  ENSG00000241472_22 (sequence is synthesized)
ttagcctaatacaacgttgctgaaaagccaaatttttctacactatatgcttcaaacccaagaaagtactggagctgactaataagggaagtcattagcagtacacagctgctacaaaga

SEQ ID NO: 814837 - DNA, 120 bp, Artificial Sequence
  ENSG00000241472_23 (sequence is synthesized)
gcctgaacaaagtaacacaaaattatcaggagaaatgttttacacagaacagatgtagcagagtttagaagcatgcagactttttttttccacaaaggagttgcctagtaattatgcatg

SEQ ID NO: 814838 - DNA, 120 bp, Artificial Sequence
  ENSG00000241472_24 (sequence is synthesized)
atacagcttctgtatttatcaggcccagttctggtgatgatttcacttttgacagaagctgtccctcaaaagcaaacatgcaatagaagaaacagatctcaatggagtctcactctgtca

SEQ ID NO: 814839 - DNA, 120 bp, Artificial Sequence
  ENSG00000241472_25 (sequence is synthesized)
gacgtcaccgcatctttataaagggccgccttggggcgcgaaaagttcgtgaggtgtagtcgcggcaaccaggagcaggtgcacccaccactagaatttgaacatcctaagaacaggtat

SEQ ID NO: 814840 - DNA, 120 bp, Artificial Sequence
  ENSG00000241472_26 (sequence is synthesized)
gttactgtactcaaagaatttaaggtataaaagcaaagaatttctgtgtgttcaaagaaacagtattcaatgactctccaattgttggacactgtaaattgaagtttccataattatagt

SEQ ID NO: 814841 - DNA, 120 bp, Artificial Sequence
  ENSG00000241472_27 (sequence is synthesized)
aagtctccagacatggccaaatgtcccctggggggcaaaatcacccccaattgagaactactgctctaaactgtgagtctgagtttcaactgatgtagtacaggttttacacataagcaa

SEQ ID NO: 814842 - DNA, 120 bp, Artificial Sequence
  ENSG00000241472_28 (sequence is synthesized)
actacttacaatgtctgtgaatactccaggcctcataagattgatcatttttgcaacctggaaaacatccacagcattttcattctccagttgctgggacagggtggtaagggcacataa

SEQ ID NO: 814843 - DNA, 120 bp, Artificial Sequence
  ENSG00000241472_29 (sequence is synthesized)
cattcctgctgaaactgctccatacctgggggagaaaaaaaaaagatacgatttcagatgtacaaagggaccaaatatattgaaatgaaattactgtcatgtattttcatagaaactaag

SEQ ID NO: 814844 - DNA, 120 bp, Artificial Sequence
  ENSG00000241472_30 (sequence is synthesized)
tagactgttttgacatttactctaaagacacgactgaatgaaatgctggtgggggagggatttggaagctagcataaaggtgagatttgtttatgaaagtggagtatcccaaattggttc

SEQ ID NO: 814845 - DNA, 120 bp, Artificial Sequence
  ENSG00000241472_31 (sequence is synthesized)
atgagacgtttagcttgatatctaataggaaatgagaggttcagaagtagacttaggagagctaaagatgatttggtgttggtgatgagttgggtggtacaatagaaaaaacaataaaga

SEQ ID NO: 814846 - DNA, 120 bp, Artificial Sequence
  ENSG00000241472_32 (sequence is synthesized)
gaacctcttaactagacgttattggacaagcagccagtgatgaagggctctgaatttttttttaacaattccaaacagttaaattgaacttacagaatatgaaaaatttaaaaatggaat

SEQ ID NO: 814847 - DNA, 120 bp, Artificial Sequence
  ENSG00000241472_33 (sequence is synthesized)
aaattaatttcatatgaaataattattttggcactgaagtggaactttcctaatgagagcactttctatgaaatccttggaaagataaatgtggttctctttgcctcacaaaaaagtctt

SEQ ID NO: 814848 - DNA, 120 bp, Artificial Sequence
  ENSG00000241472_34 (sequence is synthesized)
agaaaggtagtaaatttccatcaggccaggttggcaactccacttttcacaagaatctgtgatggcacacagtttccacattagtgatgagaaaacagatggattaaatgaattgttcaa

SEQ ID NO: 814849 - DNA, 120 bp, Artificial Sequence
  ENSG00000241472_35 (sequence is synthesized)
gatgatgttgctggctggtggcagaaatgagactggagttcagatgccctgtgcccattgttttttgaaaaacttaaatgtcatttctgaattgttacataaaattaaaatattacatgt

SEQ ID NO: 814850 - DNA, 120 bp, Artificial Sequence
  ENSG00000241472_36 (sequence is synthesized)
tttatatctttaatacaaataagaccagagtcccccttagccaccccccaactttagaggtaacctctccagaggtaaaaattattacacgtgtagatacagccttccagatttaggtgt

SEQ ID NO: 814851 - DNA, 120 bp, Artificial Sequence
  ENSG00000241472_37 (sequence is synthesized)
atcactacatttcagttcaactcattatttcatctgctacatgcataccaggtttaccttctagatggacatttagcttgtttgaatttgtgcactttagcataggtactgagtagaagg

SEQ ID NO: 814852 - DNA, 120 bp, Artificial Sequence
  ENSG00000241472_38 (sequence is synthesized)
gctagggtcacaggtatgcctgtttttagttttaaagacactgccatatttctttcccaagtggctgttacctgttcatactattcccagcacgagaacacttgcttctcctcatcattt

SEQ ID NO: 814853 - DNA, 120 bp, Artificial Sequence
  ENSG00000241472_39 (sequence is synthesized)
taaacttgaaacacttttgccaatctgatgagtggaagactgtatcttactagggttttaatttacatttccttgattaccagggaggctgaatgtctttttatgaatactgaccatcta

SEQ ID NO: 814854 - DNA, 120 bp, Artificial Sequence
  ENSG00000241472_40 (sequence is synthesized)
tatttcctcttctgaaatcgcctaattaacacttttctactaagtttgcctcttccaaaatgatttatataggagttatttttatagtgtctgtagtacttgtgagtttttttgcccccc

SEQ ID NO: 814855 - DNA, 120 bp, Artificial Sequence
  ENSG00000241472_41 (sequence is synthesized)
gatctgtttctcttaacattgtttgtggtcattttgttatacggaagtacagtttagatgtaatcaagttgatacatcttttatttttggctttttttggaatcttgtttgagaatgctt

SEQ ID NO: 814856 - DNA, 120 bp, Artificial Sequence
  ENSG00000241472_42 (sequence is synthesized)
gtgaggtgtagtcgcggcaaccaggaggtgggcgtgtggtaacgcggcgcgcgggagggtggcttgaaagggtctttatgaaccctagggaaaggccgtctggtgcacccaccactagaa

SEQ ID NO: 814857 - DNA, 120 bp, Artificial Sequence
  ENSG00000241472_43 (sequence is synthesized)
gagttaaatataagacctaggcctgacaagaatgttccatccttttggccaccagacgactccggggtatggacaaatgacagaagtcagtaataagagatgccatgttgggacttaagt

SEQ ID NO: 814858 - DNA, 120 bp, Artificial Sequence
  ENSG00000241472_44 (sequence is synthesized)
ggaactattagagaagaaagattccctttgcactggggtggagacatgtaagtctaacatggccagaggctgctctgtacaaacaggcagagggcctgcttgagcgagaagaccacacag

SEQ ID NO: 814859 - DNA, 120 bp, Artificial Sequence
  ENSG00000241472_45 (sequence is synthesized)
acagcaaatcccagaaactgacggcaagagaaacacagacagaccaaaccagccaagtcctgatgttccatcttacaaattcagccaggcccaatgctcctgaacttctcaattccatga

SEQ ID NO: 814860 - DNA, 120 bp, Artificial Sequence
  ENSG00000241472_46 (sequence is synthesized)
atcaaacttttttttttccccttgagctttaaggcattttgaaatggatttttgtcaactgcaatagaaaagggttctgaacaacaaaagggttctggtgatgatattgccaactatttg

SEQ ID NO: 814861 - DNA, 120 bp, Artificial Sequence
  ENSG00000241472_47 (sequence is synthesized)
tcaacaaatgtgagttctcgttctcttccttggtcaaagaatgtgggtcaaatagaaaggacagtgatagtacctaccgtacagatctgttgtgagaatcacatgagttggtgccaccca

SEQ ID NO: 814862 - DNA, 120 bp, Artificial Sequence
  ENSG00000241472_48 (sequence is synthesized)
agtgcttggcacagtgcctggcactcaaaaggactcactgaacattagcactaacaccactgtacagcgggagacttggaagagacagaattcagagaccttgagtgtagttttccacta

SEQ ID NO: 814863 - DNA, 120 bp, Artificial Sequence
  ENSG00000241472_49 (sequence is synthesized)
tttcatgaacctattaagttgtagtatcaacaacttggagaaaacacactcaaaaatcagaataactgcaaagggccattccttggttgtggtagaaaatgctgccacagtgagcaggtt

SEQ ID NO: 814864 - DNA, 120 bp, Artificial Sequence
  ENSG00000241472_50 (sequence is synthesized)
tgaaccccccggtgccaggcctgcctcctgaagaaatgatccagaaggttttgatctgcctcaatgctctacttatgtcaagtctgtttgccaatcatccagtcttactgtgcctcaaaa

SEQ ID NO: 814865 - DNA, 120 bp, Artificial Sequence
  ENSG00000241472_51 (sequence is synthesized)
ggcagaagaaaagcactgttgttctagctaaaaaactgcattgccaaagggaaacgcatgtctcctctgtatttaccaattttctatgtgagctccccaatgctttcttctttcgcatta

SEQ ID NO: 814866 - DNA, 120 bp, Artificial Sequence
  ENSG00000241472_52 (sequence is synthesized)
ataataattttttaaaagttggacagaaaaaaggtccttgtcccctctaggctgtatgcttagccaactcattcatcctaacactaatttaattttactttccttgctctataagaattt

SEQ ID NO: 814867 - DNA, 120 bp, Artificial Sequence
  ENSG00000241472_53 (sequence is synthesized)
tctttttcacactcattttttgtgctactgggagtaggaatttggtaaaagctcaagtccagactctgttggatgaagtttaaagctctggttactttaaatgaagcttttgatgaaata

SEQ ID NO: 814868 - DNA, 120 bp, Artificial Sequence
  ENSG00000241472_54 (sequence is synthesized)
tgaagaatgtgaaaaagatctgaccaccctagctatggactgaagttggagcctcttttctaatataatgcaattgaccaagactgcttgggagcagctgtcagtattgtttaaagctgt

SEQ ID NO: 814869 - DNA, 120 bp, Artificial Sequence
  ENSG00000241472_55 (sequence is synthesized)
cattcaatatggccaaactctttgttatctaaaaccccttgtctgatctgttgcctctgtttcacttttccaattagatgaatgacagaaacaaaaaatcgtaataaatattgtcaaatc

SEQ ID NO: 814870 - DNA, 120 bp, Artificial Sequence
  ENSG00000241472_56 (sequence is synthesized)
ggggagcagcttttgggagcgtccttgagcaaagcgccacgccccgcgaggcaggtgcacccaccactagaatttgaacatcctaagaacaggtatttttgtctctgctttgctgatgta

SEQ ID NO: 814871 - DNA, 120 bp, Artificial Sequence
  ENSG00000241472_57 (sequence is synthesized)
tgcactgcagcgtgagtatggctccagaggctgcacctaataacttccttgagctctaatgattattggtatcttttactaatgtgtatctgttctaaactacacaaaagcatacaaagc

SEQ ID NO: 814872 - DNA, 120 bp, Artificial Sequence
  ENSG00000241472_58 (sequence is synthesized)
catctccctcttttaaaaacttgaaaatgtgggtatcacctttaattaaatattttaaatttctctctccaaatcagatttatctatgtgtgggagtttagatagtcccaagacttttgc

SEQ ID NO: 814873 - DNA, 120 bp, Artificial Sequence
  ENSG00000241472_59 (sequence is synthesized)
taagacagtatttccaatttaatcttaagtagaaaaatgtatgtaattaagagatttattataaaacatttggcaaagaaggaaagaaaacagtaactatgtaggtagtttttattagat

SEQ ID NO: 814874 - DNA, 120 bp, Artificial Sequence
  ENSG00000241472_60 (sequence is synthesized)
gtcaccgcatctttataaagggccgccttggggcgcgaaaagttcgtgaggtgtagtcgcggcaaccaggagctgatcctttctgtgagacaccaggctgttgaggaagaatctatggca

SEQ ID NO: 814875 - DNA, 120 bp, Artificial Sequence
  ENSG00000241472_61 (sequence is synthesized)
aaaaaaaaaagccccacaggcattaattcaatccacctttctgggaaagtgtgtttaatgacagttcttaccctttccttactcttactaaactccaatatattctgttctaacatagtt

SEQ ID NO: 814876 - DNA, 120 bp, Artificial Sequence
  ENSG00000241472_62 (sequence is synthesized)
tataacctatggtttggaaaacactggtttaaggagctttaaggctgccctttggctcttctctaaaatgagataataaagtgtgatcacaaatcagtctacgtaagaacatgagcaatg

SEQ ID NO: 814877 - DNA, 120 bp, Artificial Sequence
  ENSG00000241472_63 (sequence is synthesized)
ctagccaaacttagcacgttgggacctgccttttgaaactgccttataagctctgagccatgctcttttgaagagtttcaagggcagacaacttttgaaaatggatttgaaacaagttag

SEQ ID NO: 814878 - DNA, 120 bp, Artificial Sequence
  ENSG00000241472_64 (sequence is synthesized)
tcttttgttttcgggttttgaaggtcacacctttggcatgtacttctttagggttgagttgttcaggtatcttatgctgagagattttggcttttagtaccttagtctgagatttacttt

SEQ ID NO: 814879 - DNA, 120 bp, Artificial Sequence
  ENSG00000241472_65 (sequence is synthesized)
cttgctttgatgtaaggaaggggtctgattacagttattttatttttccattggataaccagttgtcccagcacttcttattttacagtgtgatcttttctcactgacatcagcttcctt

SEQ ID NO: 814880 - DNA, 120 bp, Artificial Sequence
  ENSG00000241472_66 (sequence is synthesized)
tttatcatgtactacattcttatatatgcaagcctatttctgaactctgttttgaccttttattctgtttgtctattttttgtacctccccacgtgtatcccaattccttaataagtctt

SEQ ID NO: 814881 - DNA, 120 bp, Artificial Sequence
  ENSG00000241472_67 (sequence is synthesized)
tttcaagaccttttaaagtgagacctgcatatgttgaaagagtttcagagagtgaagctgggttcttagaagctggaatgtcccagcagaatgtagaaatgcgaaaaattcggcacagta

SEQ ID NO: 814882 - DNA, 120 bp, Artificial Sequence
  ENSG00000241472_68 (sequence is synthesized)
tcctgtttccatgattttccagtggctctcagtacattcactagtctctatgactgttaatccaggcttttcttgaggcccagttctggtgatgatttcacttttgacagaagctgtccc

SEQ ID NO: 814883 - DNA, 71 bp, Artificial Sequence
  ENSG00000241472_69 (sequence is synthesized)
attacaggcgtgagtcactgtgcccagccaagtttacactcatggcctcaagtgatccacctgcctcggcc

SEQ ID NO: 814884 - DNA, 120 bp, Artificial Sequence
  ENSG00000268895_0 (sequence is synthesized)
tgggcatcctctgcccaaactcctttgcaaccatcagacccaggcaaccgtgtggccagcttcctggacctggtcctgggcaaggacattcagcatggaggtcaggatgaatgtggtcat

SEQ ID NO: 814885 - DNA, 120 bp, Artificial Sequence
  ENSG00000268895_1 (sequence is synthesized)
gccccctgtatcctcctcccccagcagcccccagagatggttcccacagtcaccgagctcctcaatggtcacagtagcgctgggctcagagagggcgccttccccatcggtccggtagct

SEQ ID NO: 814886 - DNA, 120 bp, Artificial Sequence
  ENSG00000268895_2 (sequence is synthesized)
gcagctgtagttgccaggctgatggactggaaaggtggcctccacatcctcctgggcctcaggcacctccagaaactcatggtcgccctcccgcctcagcagaaaagtcacaccccgcag

SEQ ID NO: 814887 - DNA, 120 bp, Artificial Sequence
  ENSG00000268895_3 (sequence is synthesized)
cacacctcggcacactgctgttgttttcaggccgggggtgatccaggacactggcgccatcgagagccagggagcaggcaaggactctgtgggtggggtggagttgaagagtgcttctgc

SEQ ID NO: 814888 - DNA, 120 bp, Artificial Sequence
  ENSG00000268895_4 (sequence is synthesized)
ataacaggagacgtgggaagcccagcagaacctgggccccacactcataagactgtgaaggagacagggatggagggcattgctgggaaaaggcaggcaggcaccagtggaaacaaggca

SEQ ID NO: 814889 - DNA, 120 bp, Artificial Sequence
  ENSG00000268895_5 (sequence is synthesized)
tacggcaagagaaaaagagtgtgtgggagctgtacggcatgccgggcctgctggggacacaaccatgtattccttacaacacagacatcatccccatttgacagatgggaagattggggc

SEQ ID NO: 814890 - DNA, 120 bp, Artificial Sequence
  ENSG00000268895_6 (sequence is synthesized)
ttggggctcagagacatcgggtgacttggaggaagggagaccccccagtcaacaacctacccactgcctcctggcccccaattcatgccccggctcacttggccctgtcagctccaggag

SEQ ID NO: 814891 - DNA, 120 bp, Artificial Sequence
  ENSG00000268895_7 (sequence is synthesized)
cttgctcagctgggtccatcctgtggacaagcccgagcggcagcggtagcggccctgggtgtcacccgtcagcaggaactggtgcttgatggcaggtgagtcaaggtgcacaggctcctg

SEQ ID NO: 814892 - DNA, 120 bp, Artificial Sequence
  ENSG00000268895_8 (sequence is synthesized)
ggccaccccattcttgaacagctggaagtctggagtctccaggtgggcctggcacgtcagcgtcacattggccaagggtttcagcagtgattcggactctgcccacaggctgggctgcgt

SEQ ID NO: 814893 - DNA, 120 bp, Artificial Sequence
  ENSG00000268895_9 (sequence is synthesized)
aaggggtggctgggatcagctcagtgccacagagacagggctcccccccggcctgggcccaccattcccagacctcacccctgcactcacatatggctgcttctgtcactgggccccagg

SEQ ID NO: 814894 - DNA, 120 bp, Artificial Sequence
  ENSG00000268895_10 (sequence is synthesized)
tgacacctgcggagacagcccccgtaaggctcctgttcccgccccctcccgccccagggacccagaccccaggaggcctcaccccacagcaagagaaagaccacgagcatggacatgatg

SEQ ID NO: 814895 - DNA, 120 bp, Artificial Sequence
  ENSG00000268895_11 (sequence is synthesized)
gtcgcgctcactccggtgcagtgagtgtctgggtgatggatcctagaacctgttctagaaggagacgctgagttctccccactctacctggagctgctgaggtcaagtggagagtgccgg

SEQ ID NO: 814896 - DNA, 120 bp, Artificial Sequence
  ENSG00000268895_12 (sequence is synthesized)
ggctgaagcccagcgagcccctccctgtcacaccacactgcacatgtgacaccaaaggcatttattgagcatctactgtgtgccagatgcaaagaagacagtgggataactgggcaagga

SEQ ID NO: 814897 - DNA, 120 bp, Artificial Sequence
  ENSG00000268895_13 (sequence is synthesized)
gcattccaggcagagggaacagccagtgcaaacatgggagatgcgggtgcagtgagaaggagcagaggagaccaggagttgaggcgactgcagagcgattgcagagctcatagacgtgat

SEQ ID NO: 814898 - DNA, 120 bp, Artificial Sequence
  ENSG00000268895_14 (sequence is synthesized)
gaagaccagctgggcactgcagcggctctggcttctgctgtgagggacggggagctgtggagactccctctgtttggtcccatttccatattgctgagcacctgctgcatgctctctgtc

SEQ ID NO: 814899 - DNA, 120 bp, Artificial Sequence
  ENSG00000268895_15 (sequence is synthesized)
ctgctcagagccagtacctggatggaggctgtgtgttctgggtggactgggggagaatgcattctttgcagaagagacaaccaggtgctgaggcctgaagtcataaccagacctggggca

SEQ ID NO: 814900 - DNA, 120 bp, Artificial Sequence
  ENSG00000268895_16 (sequence is synthesized)
ctcagacaaggactggtggccaggccagaggagcagagctcagggtgtgcacagaactcagaagtcagaccactgaacagtgacagaacctttcagcccattggcaatgaggctgcccag

SEQ ID NO: 814901 - DNA, 120 bp, Artificial Sequence
  ENSG00000268895_17 (sequence is synthesized)
gcagccagaggcctggtcaaatctgaggtctgcagagatggagctgtcattctgtgtttcctttggcagtcccaacaccagcctcgttgcaccctcctcttagcttccctgggttctcca

SEQ ID NO: 814902 - DNA, 120 bp, Artificial Sequence
  ENSG00000268895_18 (sequence is synthesized)
gccctaagggtggtagcagcttcctgcaagtatccagctctgagattctgcaacatccacttttgctctctgagccttgcaaaacctgcacaatcagtccctaacttatatcccctctgt

SEQ ID NO: 814903 - DNA, 120 bp, Artificial Sequence
  ENSG00000268895_19 (sequence is synthesized)
tccttctccatcactggttcattctgcatggtgtgacccaccacggctctggagtcggatttccacccaggtcattcagctgagacctgcgcttcccaggcctacccgtgacatgtgctc

SEQ ID NO: 814904 - DNA, 120 bp, Artificial Sequence
  ENSG00000268895_20 (sequence is synthesized)
agttacctgagctgctggtggtcactcatgtggctatagcctgctgcctggaggccaggcctcccgcttcccctgcctccccctctcctcaccacagcctgttgggatggaacaggacag

SEQ ID NO: 814905 - DNA, 120 bp, Artificial Sequence
  ENSG00000268895_21 (sequence is synthesized)
gggtgagaccgtggtgctttcacactcagcctccatggacatcctgtcattcccacccggggaggtctggtccccaccctgggtgtcccagcctagctccgctacgagtgtgagggccca

SEQ ID NO: 814906 - DNA, 120 bp, Artificial Sequence
  ENSG00000268895_22 (sequence is synthesized)
atcttccctgtcttgttcctgggcgcagagggctcctccggcgccgccgagctgcgcccgctgccttcacaccccggacatccgcgccacacggacccagaccccaggaggcctcacccc

SEQ ID NO: 814907 - DNA, 120 bp, Artificial Sequence
  ENSG00000268895_23 (sequence is synthesized)
tgtcacaccacactgcacatgtgacaccaaaggtggggttcacctcttttcagactttctgcggttgccctcacatgggctgtctggaggtgcaccctcactcttcctgaggactgtggt

SEQ ID NO: 814908 - DNA, 120 bp, Artificial Sequence
  ENSG00000268895_24 (sequence is synthesized)
ggccgcgcccgcgcctgcgcctcagccccggcttcatcttccctgtcttgttcctgggcgcagagggctcctccggcgccgccgagctgcgcccgctgccttcacaccccggacatccgc

SEQ ID NO: 814909 - DNA, 73 bp, Artificial Sequence
  ENSG00000268895_25 (sequence is synthesized)
tcccaagagacccgcctaggcaacatggtgagacactgtccttacaaaaaattttaaaattagccaggtgtag

SEQ ID NO: 814910 - DNA, 120 bp, Artificial Sequence
  ENSG00000268895_26 (sequence is synthesized)
aggagttttgagacccgcctaggcaacatggtgagacactgtccttacaaaaaattttaaaattagccaggtgtagtgacgcaagtctgtcatcccagctgcttgggaggctgaggtggg

SEQ ID NO: 814911 - DNA, 120 bp, Artificial Sequence
  ENSG00000268894_0 (sequence is synthesized)
aaagacaaagccagtggaatggtccgagtgtggcatccgctgcatttataaagaataagagctgcagtgggtgtgattcttggacagagtggcgctcatccttgttcctgcaatgaagga

SEQ ID NO: 814912 - DNA, 120 bp, Artificial Sequence
  ENSG00000268894_1 (sequence is synthesized)
catgccagcctccaggctctttgacagatgattggaactgtgcaaatattatggaagataccccgtgtcaagaagctgacagcacacacgtttgggaaggatttagtggctgaagcactt

SEQ ID NO: 814913 - DNA, 120 bp, Artificial Sequence
  ENSG00000268894_2 (sequence is synthesized)
acctcagtctacgactcctgccaagattatcagccacgctagaaactaaagggtgaaaacagggtttctctgctgcaattccatctcttcctctagaaacttgtcgtaggaatgactccc

SEQ ID NO: 814914 - DNA, 120 bp, Artificial Sequence
  ENSG00000268894_3 (sequence is synthesized)
tgtaacttcccacacctgcctcttctttctgtaagtgttggctaacagaatcccctccttcctcggtccttgctaagtgactgaattcagaaactcctggacaatattacaaccatccgt

SEQ ID NO: 814915 - DNA, 120 bp, Artificial Sequence
  ENSG00000268894_4 (sequence is synthesized)
caagaattttcctgtgcacagcatagggatctgtttctcttaccatcagaaagggattcatagtcataatcatattcgtcctcctcatcttcctcttcctcattattggcaggtcggggg

SEQ ID NO: 814916 - DNA, 120 bp, Artificial Sequence
  ENSG00000268894_5 (sequence is synthesized)
ttggcattcccaccattataagcctgcacttgcatagatgctaactgatgagcctgtaaaatagcaataattgtaaactgcagatgccaagttaatgaattcatttataacctttaaaac

SEQ ID NO: 814917 - DNA, 120 bp, Artificial Sequence
  ENSG00000268894_6 (sequence is synthesized)
ctagattccctcgaaatgcaatgtcaacacttgggtgaacgttagcattcctacaggaagaatcctggagcttttataaacaatctccagaagactgtgtgcagtgcccagctagccagg

SEQ ID NO: 814918 - DNA, 120 bp, Artificial Sequence
  ENSG00000268894_7 (sequence is synthesized)
ttcccaggacaacccctccaagagaaagctttggtgatttggagaaccagcatcaatcccaagtgactgaagaagtgaatcacccatcaatttttcagaagtatgtctctgttaagaaac

SEQ ID NO: 814919 - DNA, 120 bp, Artificial Sequence
  ENSG00000268894_8 (sequence is synthesized)
cattttttccccttcttaaaataatatctacaggctcctgaccttgagaacaatattagaatccctatggacaaagaggccaaaagaattgttgttggtttaaataaaattgttttcaaa

SEQ ID NO: 814920 - DNA, 120 bp, Artificial Sequence
  ENSG00000268894_9 (sequence is synthesized)
cggctttctgaaccataaatcagattaacaaaacaggcctagaaactttaggaaacttgatgtgtgcagccagggaggtcacatactccgtgtttactggaattactgtgaagtgataag

SEQ ID NO: 814921 - DNA, 120 bp, Artificial Sequence
  ENSG00000268894_10 (sequence is synthesized)
catcagtacaggtctgggaacctacctagcttaagaaaatcatctgaaatataggaaacgttacttgcatgaactaaatgcaggaaacaatctaaacggggtagaggaacggggtcagta

SEQ ID NO: 814922 - DNA, 120 bp, Artificial Sequence
  ENSG00000268894_11 (sequence is synthesized)
agcaatggttgtctgctggagagaatgagatatgaaaaaataattgatatatatttattgaacaaaggaagtgaacaaattcttttattcaatatttatgcattgaatatactatataga

SEQ ID NO: 814923 - DNA, 120 bp, Artificial Sequence
  ENSG00000268894_12 (sequence is synthesized)
ttatatatacacacatatataattctgcatgtgtatgtgtgcatacatgtgtgctaatatatactatatataatgtatgtgtgtgcatacagataatagctatacatgtaaatatataca

SEQ ID NO: 814924 - DNA, 120 bp, Artificial Sequence
  ENSG00000268894_13 (sequence is synthesized)
ctatataaatatacatataattctgtatttgttttatatatttaaagtgcaattatataaaatgacagtcacgaagtcctagatattaaatgttaatatggcaggggttcttcacttgtt

SEQ ID NO: 814925 - DNA, 120 bp, Artificial Sequence
  ENSG00000268894_14 (sequence is synthesized)
tttttttttttgcatatggcttgtaagaagggacttgggatgatgaaaggtgacatacactgaaattgataatgtagcaaaattaaaataaacggcatagcaaaatgaacagtttatagt

SEQ ID NO: 814926 - DNA, 120 bp, Artificial Sequence
  ENSG00000268894_15 (sequence is synthesized)
attttcctcatgtgcatcaaacaaatgattgtaaaaagaaatatttagaaggtattataacaatcattctggcaatccaatttagctattttgagacaggaaataaaatcagggaaaaaa

SEQ ID NO: 814927 - DNA, 120 bp, Artificial Sequence
  ENSG00000268894_16 (sequence is synthesized)
tgtaagaaatttcatttttctaaagagaaaatacactatacctatgaagaaatgtatgctatgtgaacacttttaaaaaacaacatacttggaatttttaaaataagccgaacaaccaca

SEQ ID NO: 814928 - DNA, 120 bp, Artificial Sequence
  ENSG00000268894_17 (sequence is synthesized)
tgcttagaagctctatcacatgacctcctgatcttccacgattctctactggtacagagactttatctttcacacagacttcaaatatctttgggaatttgtgctccttatttactgagt

SEQ ID NO: 814929 - DNA, 120 bp, Artificial Sequence
  ENSG00000268894_18 (sequence is synthesized)
aaagacttattattgggtgcaatgcaaagtcttcacaattataattaaaaagtaaagttttcatgattgttattaatttactaagtgataatcataacagaaaataaaatatatctgaat

SEQ ID NO: 814930 - DNA, 120 bp, Artificial Sequence
  ENSG00000268894_19 (sequence is synthesized)
gcaaaggtacctgagtaaacattctgcaatctctaacaaatgtttaatgcaaatgaaacacactgaaaacctaattctcatgtgagaagaatccttcgctagtaatctgtagttaacatc

SEQ ID NO: 814931 - DNA, 120 bp, Artificial Sequence
  ENSG00000268894_20 (sequence is synthesized)
attcgtgtgactttttgtgttgcgtcattagcattgcctatgttttttctctttggtggggccagaaggaaagatcttgttggcttagtggtatgaaaaccagggagggaggggaaatga

SEQ ID NO: 814932 - DNA, 120 bp, Artificial Sequence
  ENSG00000268896_0 (sequence is synthesized)
cgcagagcagcccgatgcccagagcgatgcccgcgctcgccccagcactcagctgtgtctctagcacccgctctcggtagcagaggaggaagatgaccaccgagccaaacagcaacccag

SEQ ID NO: 814933 - DNA, 120 bp, Artificial Sequence
  ENSG00000268896_1 (sequence is synthesized)
agcaggtccaaggggtcaaggacatgggatcccaggggaaccagagacaaagacactaagatcagagaattgagggtcactggagtcatgacggcatcagtgatggggccattgaggtca

SEQ ID NO: 814934 - DNA, 120 bp, Artificial Sequence
  ENSG00000268896_2 (sequence is synthesized)
ggggaggttagagagatatggctgttggtggtcaatgggaaggcaaacataaccattgagatcatgagggttgatgtatttgaggatcacaggagttaggataaatcttttgagtcaaga

SEQ ID NO: 814935 - DNA, 120 bp, Artificial Sequence
  ENSG00000233340_0 (sequence is synthesized)
ttcttttggggacagcaatgtgctgcgtgcactatcaccactctccagtaaccacgttatcaactggttatcaagggcccatgtatgtggcaagaaggctatgctgggcattgactaagg

SEQ ID NO: 814936 - DNA, 120 bp, Artificial Sequence
  ENSG00000233340_1 (sequence is synthesized)
ggcatacagacattaaatatttactaaggaaatgaataagcagaagaaagaagagaagaaaggaaagaaggaaggaaatagatgtttatcttatttgaagttaataaaatattaaaaagc

SEQ ID NO: 814937 - DNA, 120 bp, Artificial Sequence
  ENSG00000233342_0 (sequence is synthesized)
cgcataaagggaacgggtggggacacagggcccctgcagcctcaggaggatcagcagtggcctggtttactcgtgtcgtcattcgtcgtgggcaccttgtccccggggccggccagttac

SEQ ID NO: 814938 - DNA, 120 bp, Artificial Sequence
  ENSG00000233342_1 (sequence is synthesized)
tcctgccggaagcatctccagcttggggatgttggagggtccctggccccacctggctggggatggagtgtaagccgaggagatgccatgtgagggtgcagcgaggagttgggctgtcta

SEQ ID NO: 814939 - DNA, 120 bp, Artificial Sequence
  ENSG00000233342_2 (sequence is synthesized)
aaagcaaagaaagagattgcatcagacaccgcatctgctgacaccttgttcttggacttccagcttccaaaaccgcgagaaataaatgtctgtgtctaaaccccaaccctaccacctcaa

SEQ ID NO: 814940 - DNA, 120 bp, Artificial Sequence
  ENSG00000233342_3 (sequence is synthesized)
tcggtagcagtcaccattgaacatccttgaagcaattcttccaaaattaccttgcatcaaagactgcacaagaactgctctaagcggaaggactgatgtcggcaaccagggttccaccag

SEQ ID NO: 814941 - DNA, 120 bp, Artificial Sequence
  ENSG00000233342_4 (sequence is synthesized)
gggctgcagacagcccttgaccttcagggctagtgtgagcatccctgtgcaatggcttattgggaaattgatgtgcattgcaccggaagcaatctcctcatcttcctgcttactcatcag

SEQ ID NO: 814942 - DNA, 120 bp, Artificial Sequence
  ENSG00000233342_5 (sequence is synthesized)
actgaaaaaggcaacacagactaccattcattgtgtggctacaaggcactatgcattttcatacaatatatctaaagcccataatactcaccaaaataaaccattgctgccacaatttaa

SEQ ID NO: 814943 - DNA, 120 bp, Artificial Sequence
  ENSG00000233342_6 (sequence is synthesized)
catgtcctgatctttttctgagcattcagtctcctatttcctaagtgctcagcaaaacatttgccagcccaattcttaatttcattatcatcagcaaaatgaataatcagaattaattgg

SEQ ID NO: 814944 - DNA, 120 bp, Artificial Sequence
  ENSG00000233342_7 (sequence is synthesized)
tgaatggtttcttcctagcacccctttaagaaactttcccctgcaatctccatgggcactagcttcagcccttgagtataaataagtcagtaataaagaatgtaggagcctaataataaa

SEQ ID NO: 814945 - DNA, 120 bp, Artificial Sequence
  ENSG00000233349_0 (sequence is synthesized)
gagtgcagtggcgtgatcttggctcatcgcaacctccgcctcctgggtgcaagcgattcacctgcctcagactccggaagacctgagattacagggggtatccagtacaatgatgaatag

SEQ ID NO: 814946 - DNA, 120 bp, Artificial Sequence
  ENSG00000233349_1 (sequence is synthesized)
atagaaatggataaagcagaaacacttgtgttattctcaattccagagatatcctttaccaaataaagaaaattctcttcaccaagaaatggatcatggtggtattctgatccgagactt

SEQ ID NO: 814947 - DNA, 120 bp, Artificial Sequence
  ENSG00000233349_2 (sequence is synthesized)
ctgtgagaaaaaaaaatgtctgctgtttaagccaccttgtctttggtgacaacccaggctgattaagacagttatcatatattatttatttacatattactagattctatgtaacatttt

SEQ ID NO: 814948 - DNA, 120 bp, Artificial Sequence
  ENSG00000233349_3 (sequence is synthesized)
gttaagttttatgtttacaagttatttcatattttatgtcaagtttttttaagggttttataaagattttgctgccctcatgaaacaattaggtaacatttttctatgttgtgaaagtaa

SEQ ID NO: 814949 - DNA, 120 bp, Artificial Sequence
  ENSG00000233349_4 (sequence is synthesized)
aattggtatcatatcttcttaaataattgatttaaattaaaatttaccagtaaaattactgatgtcttgaatttctttgtaggaagacttatgggagtagattcagtttattttacaggt

SEQ ID NO: 814950 - DNA, 87 bp, Artificial Sequence
  ENSG00000258977_0 (sequence is synthesized)
agtggcaacttgttcgggtatccttccccagtgtggaagctttagttcttttgctctttgcaatgtgcgtttacactgtgtttatga

SEQ ID NO: 814951 - DNA, 120 bp, Artificial Sequence
  ENSG00000258977_1 (sequence is synthesized)
tgcagcttcactcctgaagccagcaaagaccacgaacccaccaggaagaaggaacaactccagacacgcagccttaagagctgtaacactcactgccaaggtcttcagcttcactcctga

SEQ ID NO: 814952 - DNA, 120 bp, Artificial Sequence
  ENSG00000258977_2 (sequence is synthesized)
caaggtcttcagcttcactcctgagccagccagaccatgaacccaccagaaggaaaaaactcggaacacatcccaacatcagaaggaacaaactctggacatgccgcctttaagaactgt

SEQ ID NO: 814953 - DNA, 120 bp, Artificial Sequence
  ENSG00000258977_3 (sequence is synthesized)
ttgaagtcagtaagaccaagaacccaattccggacacgtttggaccatggaaaggcagctcaacatctgagaagccagtcttactccctgcaggcaacagctgcttccagaaaacagccc

SEQ ID NO: 814954 - DNA, 120 bp, Artificial Sequence
  ENSG00000258977_4 (sequence is synthesized)
ggcaacagctgcttccagaaaacagccctgtaattgtcaccatcaaatccatatattttcaagggaagttggtcccacaccagaagtcatagctgaatcaccagcagtaatgcagggaca

SEQ ID NO: 814955 - DNA, 120 bp, Artificial Sequence
  ENSG00000258977_5 (sequence is synthesized)
cttcttggcttttccaaccctctgccatgcttgaacatctttgtgaaagtccaggaacaacaaataagcttaaggataaaagccccccagccataccaccacaaccccctgttaaactca

SEQ ID NO: 814956 - DNA, 120 bp, Artificial Sequence
  ENSG00000258977_6 (sequence is synthesized)
tgcatgacttgtagaatcctttccccactgtcactaaaaggctttttacattttccctccttaaaacaccagtttactgaatggaacgctatttcctaaatatttgctacacacacagct

SEQ ID NO: 814957 - DNA, 120 bp, Artificial Sequence
  ENSG00000258977_7 (sequence is synthesized)
gtatatagagttcccaggagatgacttttttcttgtcatcttttaaaactacagttatatgttgatttaattatcttctctctagattacttcaccaaagtacagttcctacaggaagat

SEQ ID NO: 814958 - DNA, 120 bp, Artificial Sequence
  ENSG00000258977_8 (sequence is synthesized)
aatgatctgacctaacctactattggctgaaggaaggagaaaagcagctgaagatgtctgttgagtgattaccctcataatccgtgactaagaacatccaaatcagcatggcttcttcct

SEQ ID NO: 814959 - DNA, 120 bp, Artificial Sequence
  ENSG00000258977_9 (sequence is synthesized)
gtctgaaattattactacttagggtttttcacgtgttatttcatttattgattattctgttttaaacttgcaagacgtattgtctcttcagaaataaaactttatcacttgcttcatcaa

SEQ ID NO: 814960 - DNA, 120 bp, Artificial Sequence
  ENSG00000258976_0 (sequence is synthesized)
agttctgataactccacatctccaggttctgcagaaacagtggtgagcaacgcagacaagatatctgttgctttagagctgtcattgtggtttgggaagtcagacaagaaatgattttat

SEQ ID NO: 814961 - DNA, 120 bp, Artificial Sequence
  ENSG00000258976_1 (sequence is synthesized)
aggttgttgaataggacttttcctctgctcttggaatatctgctgaagccacaaagatagaacaatgagggctaaatattcttgcattctgaagagaagtactagacaccttactaaagg

SEQ ID NO: 814962 - DNA, 120 bp, Artificial Sequence
  ENSG00000258976_2 (sequence is synthesized)
aaagtcactgaagcataacactgctgcatttgtgggcagggctgagatttcccctgagggaactccccaactcaaaccaaatgaagggagctcccagagagaaccagtcatctgcaagaa

SEQ ID NO: 814963 - DNA, 120 bp, Artificial Sequence
  ENSG00000258976_3 (sequence is synthesized)
gaggaggctctgtccctataactgtccccccactgatgctgactatgttgctggatgttacaggcacctcggtgcattaaactacagcaagacagttcatgggagaacccaacatatgtc

SEQ ID NO: 814964 - DNA, 120 bp, Artificial Sequence
  ENSG00000258976_4 (sequence is synthesized)
tttaggaattgaggacgtacataaatgaagagacttgtgtgcacttcctgtctggagaattctgatcgtggagcctcgctggagtggcctgtgtggcaaggtgagaagtgggcagggtga

SEQ ID NO: 814965 - DNA, 120 bp, Artificial Sequence
  ENSG00000258970_0 (sequence is synthesized)
aatcaccaacttcttaccattgactcacttataaccgtttccagatttatggaggatgaagacctatcgtaccaatgtggcagttgaaaagtgaattgcaacacaatgagatatattcac

SEQ ID NO: 814966 - DNA, 120 bp, Artificial Sequence
  ENSG00000258970_1 (sequence is synthesized)
tgtgcattcagaactggaactgcaggtgtaccattactgttgatagaggcatctcctgccgcggtccacccagcctgagctgccagcctgcctagcttctgcaaagccccgagttgtcat

SEQ ID NO: 814967 - DNA, 120 bp, Artificial Sequence
  ENSG00000258970_2 (sequence is synthesized)
ggcaaccacttcctgagacttgatactcatgcctgcagactctgggtcctgacttaaatagttttattttttttaaaaaggcataaattgatagtgcaataaaatctggtttaaagattg

SEQ ID NO: 814968 - DNA, 120 bp, Artificial Sequence
  ENSG00000258979_0 (sequence is synthesized)
ggacgtgcgtgtgtgtggagagtggctgtgaaagcgacacgggctctgtgggaagagaagtaaggaggacttctgggaaggaaacgaggttctcggatgagcaggggctgtgatatgaaa

SEQ ID NO: 814969 - DNA, 120 bp, Artificial Sequence
  ENSG00000258979_1 (sequence is synthesized)
gtgatcaagagatgggaccatctagttgcaagagaacaagctcagggctccccctgattctacatgatggatttcaggaagataaaatagccgtggcattttgaaaaccagctcagaaga

SEQ ID NO: 814970 - DNA, 120 bp, Artificial Sequence
  ENSG00000258979_2 (sequence is synthesized)
tataagcatatgaaatggtgagtgtttggtgaaccgcacggtagagtggttaagcatttggtcttctgagtcagtcgaaactttggcttaaggcccaactgcatcatttactagctgtgt

SEQ ID NO: 814971 - DNA, 120 bp, Artificial Sequence
  ENSG00000258979_3 (sequence is synthesized)
gaccttcagcaagtgacttaccttatctgagctccaatatccttatctctatactgggggtaaagttaccaacctcctaaaatattgtgaagatttctggaaatggtgtttataaagtat

SEQ ID NO: 814972 - DNA, 120 bp, Artificial Sequence
  ENSG00000258979_4 (sequence is synthesized)
tgtcattatcaggaggaagaaaagaagaaggaaacattttctaggcttttaaaacttgtttcatccacttctgacctcagaataattacaataatctattactgtgtcataatatctaaa

SEQ ID NO: 814973 - DNA, 120 bp, Artificial Sequence
  ENSG00000258979_5 (sequence is synthesized)
agaacctatctctaccattgtgggaggaaccatattagttcagcagagtaactgggttcacgctgccttctctaccttctcaggcttctctgtgaggcttggtagaacgatttactcttc

SEQ ID NO: 814974 - DNA, 120 bp, Artificial Sequence
  ENSG00000258979_6 (sequence is synthesized)
ttcctgcattcttactgtgtggagtctgtgtgcctccagttagccctcgcctcattaccctttcctgtgtcaacagctgtgattgatatcgggatggattcgaagtgaggcagctagcag

SEQ ID NO: 814975 - DNA, 120 bp, Artificial Sequence
  ENSG00000258979_7 (sequence is synthesized)
cgtgaccttgagcaaatcagttcatttcactggggctttgtctcttcatctggacactggggtcgtatcacccacctcacaaggttacatgagatggttttcccagcatgtaataggttc

SEQ ID NO: 814976 - DNA, 120 bp, Artificial Sequence
  ENSG00000258979_8 (sequence is synthesized)
tcataaagatcatagttactagaattagtggacgtgtctggttttcccactgtattgtaaacgtgttaaggactgtattagtctgcgctcatgctgctaataaagtcatacctgagactg

SEQ ID NO: 814977 - DNA, 120 bp, Artificial Sequence
  ENSG00000258979_9 (sequence is synthesized)
aaagtgaaagaaaggaggaagtccacacccttgggtttgggggcatcggatccagtgtgcaatgtgagaagtaaaatgaagaggagaaatgatctagagagactttctgatgaagcaaac

SEQ ID NO: 814978 - DNA, 120 bp, Artificial Sequence
  ENSG00000258979_10 (sequence is synthesized)
accagatatcctagaatttcagcaaatctaagactccgtcaagtgttagatgccccattattttatgtattattaataaagaaaaaaacactgccaattataattggcattgattgaaag

SEQ ID NO: 814979 - DNA, 120 bp, Artificial Sequence
  ENSG00000243155_0 (sequence is synthesized)
acattcctatcctggaaacatactgctgcactgacttttctccgtgtgaccccacaattgacatggctcctccatcccagcgctggaagggccagtgggaagaggaaatagatgtctgca

SEQ ID NO: 814980 - DNA, 120 bp, Artificial Sequence
  ENSG00000243155_1 (sequence is synthesized)
ctcctggctgcagctggacaacagaagccccatgccgcctgtccagttcggaggagaactagctgctgccttgccttccgggacctcgtttgctgaggagggacttacagactccactgg

SEQ ID NO: 814981 - DNA, 120 bp, Artificial Sequence
  ENSG00000243155_2 (sequence is synthesized)
tgttttgctgttgctcattccatgcatctttggcagctcttttcttctgctcagacccttccccgtgctcagacagtgcaccgctgtcccatctaaagaaacctgtcaggaatacgagct

SEQ ID NO: 814982 - DNA, 120 bp, Artificial Sequence
  ENSG00000243155_3 (sequence is synthesized)
ggcatgagccactgcgcccggcctaagcttctaatttcaagatgtcatcagacagcagggggacagtggagtcaaacctgccaactctaccccctcccgcacactccccaccaacgcact

SEQ ID NO: 814983 - DNA, 120 bp, Artificial Sequence
  ENSG00000243155_4 (sequence is synthesized)
acactccccaccaacgcactctcagctgcagttgcctagggcaaaggctctgcaggtgcagactcctagagagccctggacaattcagaaagagcccctgaggggagaagcctagtcctg

SEQ ID NO: 814984 - DNA, 120 bp, Artificial Sequence
  ENSG00000243155_5 (sequence is synthesized)
tagtcagaggctttctgaattcccagagctgcacggctcagccaaagaccagaaaagcctctgaccacagccagaaggccctgccttgtttgctaaggccgccccagccatggggctgag

SEQ ID NO: 814985 - DNA, 120 bp, Artificial Sequence
  ENSG00000243155_6 (sequence is synthesized)
gaagaggagagggcatacctgagtctgggcgcccattcccagaggccacgcagaagccgaaagtgccccctggggagcgctgcagctgcagctggctggtgccgtctgggaacacctcca

SEQ ID NO: 814986 - DNA, 120 bp, Artificial Sequence
  ENSG00000243155_7 (sequence is synthesized)
ccaggcggcccacggtgcgagccaggctgggagcacccacgtcctccacactgagggcacgccgtggtgaagtcttggccggcctgcgagggaaccagagacacagtgagggcaaaaagc

SEQ ID NO: 814987 - DNA, 120 bp, Artificial Sequence
  ENSG00000243155_8 (sequence is synthesized)
cctggcttacagatgaccgatgcctcacagacttaagagcctggcattggaggctggggttctgctgacttcagccagcaaaaagagcctgctagggccaaaactggtgggtttccgccg

SEQ ID NO: 814988 - DNA, 120 bp, Artificial Sequence
  ENSG00000243155_9 (sequence is synthesized)
ctgtgcaaggccccccaaggcctgctgtggaactagaaaccccaccctcccaaagcagtggtttcaaattttggggggtacagagacctttgtaagaatctgacaaaaggtataacttta

SEQ ID NO: 814989 - DNA, 120 bp, Artificial Sequence
  ENSG00000243155_10 (sequence is synthesized)
tgtcacatttccaggagctaacatacaccctgaagtacatccacgccccaggaaagagcagccagcctacagggcctcatcggacagggtgggattttccaagcaggtcatgggtcacgg

SEQ ID NO: 814990 - DNA, 120 bp, Artificial Sequence
  ENSG00000243155_11 (sequence is synthesized)
gcctctttgggggcctctgtctctatgtgtttattcagatctttagctgggctaagaaaactctctaaactttctgatttcaagatgtcattgcacagcagagggacagtggaatcaaac

SEQ ID NO: 814991 - DNA, 120 bp, Artificial Sequence
  ENSG00000243155_12 (sequence is synthesized)
cggccaactctaccccctccagcgaccccaggccttctcagagcccaatgcaccgagggtccatgcagggcactgaggtgctgagactcccgtggcagcctcgtctccacacatcacatg

SEQ ID NO: 814992 - DNA, 120 bp, Artificial Sequence
  ENSG00000243155_13 (sequence is synthesized)
tcctgttgctttcccttcaaaggaccctgctcagagccatgatgctgaggcaggaaggagttaagcttttggctccgctggtcactctctgagtttatcctccaaaccatgtgtgcccct

SEQ ID NO: 814993 - DNA, 120 bp, Artificial Sequence
  ENSG00000243155_14 (sequence is synthesized)
catacctgccagctgcactgtggtcccctggccctgctaccaggtagaggctggaccggttccccttgctgctcagcagagaatggaggttctgaaaagaggcagctttccgacgctggt

SEQ ID NO: 814994 - DNA, 120 bp, Artificial Sequence
  ENSG00000243155_15 (sequence is synthesized)
gagagggtgacacctgatgagaaagggacaatattgcgggtgagaaaagctacctgggaggtgctgacagaggacttggccccaccatgaacctgagggccctgtaagaaagtgacagca

SEQ ID NO: 814995 - DNA, 120 bp, Artificial Sequence
  ENSG00000243155_16 (sequence is synthesized)
caagcttttatcattgcttccaagaattcaacaggaaccaccatgacttactcaaggacatcatgggtctacataggccatctgaggagtcaagggagtttttgttttgctttttagctg

SEQ ID NO: 814996 - DNA, 120 bp, Artificial Sequence
  ENSG00000243155_17 (sequence is synthesized)
aaataacaactttagtgctatactaatttcctcattgattaaggaaatctaatgtactcattaaggaagaaatgaaagtaagtttattatacagtaataaatatcactttagagttaaaa

SEQ ID NO: 814997 - DNA, 120 bp, Artificial Sequence
  ENSG00000279668_0 (sequence is synthesized)
agattcccaggtcacctcatagacagggctgcactgggcctcctgcctaggcctgttcgatgaagcaccaacaagccccacagctttgttgcttttgctatgcccactgggaccagtgag

SEQ ID NO: 814998 - DNA, 120 bp, Artificial Sequence
  ENSG00000279668_1 (sequence is synthesized)
agaagtgcggtcttatccctgggaggagagaaagagccagcatctgcaggcgcccacaggatgtcaaggtcacatggaatgatggtgatcgatatagacgtgatctcagagttcactccc

SEQ ID NO: 814999 - DNA, 120 bp, Artificial Sequence
  ENSG00000279668_2 (sequence is synthesized)
tcatcatacagtggaggaaacgaggcccagggaggggcggaacatttttccaagtcatacagcaagaactcagaggcctcttggttcctgctcttgccttgaggtggttctgcggggcgc

SEQ ID NO: 815000 - DNA, 120 bp, Artificial Sequence
  ENSG00000279668_3 (sequence is synthesized)
tccagagcccccaagaaattcttctgaaattcagttctccacaggacacctgggctcctcctctgtcctcccagcccctcacagaggagtagtttcccttctggcctgcctaagtctgtc

SEQ ID NO: 815001 - DNA, 120 bp, Artificial Sequence
  ENSG00000279668_4 (sequence is synthesized)
ttgtcttctggacttcagtggccaccatggacctcccaagctttctcttgggctcttccagtgccgacctcagcttggctgcctcacactctgtctggtgggcacttacaggagccatgt

SEQ ID NO: 815002 - DNA, 120 bp, Artificial Sequence
  ENSG00000279668_5 (sequence is synthesized)
ccacagaccacctcgcctgggctgtggaggccccgttctgagaccacgtgcagtccaaaaaaggaagctaaaaggggtcagaggaaaacatccccgtgtagggtgagggtgaatctcagt

SEQ ID NO: 815003 - DNA, 120 bp, Artificial Sequence
  ENSG00000279668_6 (sequence is synthesized)
tcaactctctttatcctgacatccagaattccagacctttgtgggcactgatccctgagactgggctctttaagctctttcactgatccctggggtccgaaactttcagcttgcactttg

SEQ ID NO: 815004 - DNA, 120 bp, Artificial Sequence
  ENSG00000279668_7 (sequence is synthesized)
gtttggtaaaccactgactgtcctaccaaacgcccccgcaccccacaaactcaacctgtgctcttcatgtgctatctcctgttcgatccccacactgaccttctgggttagggacttgca

SEQ ID NO: 815005 - DNA, 120 bp, Artificial Sequence
  ENSG00000279668_8 (sequence is synthesized)
tgtccccattttatagatgaggagcctgaggcccagagaggtaagtcacctgcccagtatcacacagcctgagattggcagagccagatctcatggaatgagagccctgtctcacctccc

SEQ ID NO: 815006 - DNA, 120 bp, Artificial Sequence
  ENSG00000279668_9 (sequence is synthesized)
tagagacagagcttaattgataactttgagttgatactgaaaggtcacaggaattgcagcagataaggtgttctgaggaactggctctctagcacctgtggtaattaattcagtatccct

SEQ ID NO: 815007 - DNA, 120 bp, Artificial Sequence
  ENSG00000279668_10 (sequence is synthesized)
ttttgtgtcccagagaagcacagtggctaaagcgcacagcacaagcttggagatcagatggacatggcttcaaatctcgtctctgctgtttacaaaaagtatgaccccaggagagggatt

SEQ ID NO: 815008 - DNA, 120 bp, Artificial Sequence
  ENSG00000279668_11 (sequence is synthesized)
tataccctctgagctgtagtttcctcatccacaatgtgggagcaggattttagaggataccgagagattaaatgagatctttcttatagagtccttagcaaggggcttggcaccatggat

SEQ ID NO: 815009 - DNA, 120 bp, Artificial Sequence
  ENSG00000279668_12 (sequence is synthesized)
ggtaatatcatcatgatgatgccaggtattttcattgctattccttattattcatcagtatttttattcattgctattgctggttgtattcatcattaataaataatagcattgtttatt

SEQ ID NO: 815010 - DNA, 120 bp, Artificial Sequence
  ENSG00000279668_13 (sequence is synthesized)
ggatgtcaaggtcatacaagttactgatgaggtgacaagatggaagatcacttctcacaaagatgataccttctcacaaggactaaaaggtttccagatagatttgagctctttccatat

SEQ ID NO: 815011 - DNA, 120 bp, Artificial Sequence
  ENSG00000279668_14 (sequence is synthesized)
tgtgcaccaatgatgtcacatggccctctcatcccaacccctagaggaccctcagtgaatcaaaggcatatcaagattacagagcactatatgtaaatgaagggataggtgaagactaaa

SEQ ID NO: 815012 - DNA, 86 bp, Artificial Sequence
  ENSG00000279668_15 (sequence is synthesized)
ctcagatttaaaaagcctgtagaatgatttataatcctttgggaactattgtcaatagcaaaacttggaaccaacccaaatgccca

SEQ ID NO: 815013 - DNA, 78 bp, Artificial Sequence
  ENSG00000279668_16 (sequence is synthesized)
agtggagggaaagaggagggagagcatcaggacaaatacctaatgtacacaaggcttaaaacccagatgacgggttga

SEQ ID NO: 815014 - DNA, 90 bp, Artificial Sequence
  ENSG00000279668_17 (sequence is synthesized)
ggagtggagggaaagaggagggagagcatcaggacaaatacctaatgtacacaaggcttaaaaccctcatggtacatgtatatctgtgta

SEQ ID NO: 815015 - DNA, 120 bp, Artificial Sequence
  ENSG00000279668_18 (sequence is synthesized)
atctaggcctacatccctgcggcccctagactatctcaatacctggatatatcacttatctactctattctacatattgtccaggggtatggagatatctggcctaatcacaattcatca

SEQ ID NO: 815016 - DNA, 120 bp, Artificial Sequence
  ENSG00000279668_19 (sequence is synthesized)
ctcagagtgctgcatgtaacaagggtgtgtgcacacttgagaagccaaaaggggacctactgacttctggacttctgagaagtacgtcatatcttcccacagcttcagaacttggagttt

SEQ ID NO: 815017 - DNA, 120 bp, Artificial Sequence
  ENSG00000279668_20 (sequence is synthesized)
cagggaatctgttgacgactgggccatggaattagaggggcatgttttggactacgagcagtggagataagaatccccaactcatccatcatcagctttgtaagagtgggagggcagact

SEQ ID NO: 815018 - DNA, 120 bp, Artificial Sequence
  ENSG00000279668_21 (sequence is synthesized)
ctgcctctgtggcgctgtccctaaacctctcttggagtcagagtacccagcttaagaaagcacctatggaacaaggtgggtatcatggagtatgcagggagttagcacacaaggagacat

SEQ ID NO: 815019 - DNA, 120 bp, Artificial Sequence
  ENSG00000279668_22 (sequence is synthesized)
ggcacagactctcttggcttgtggcctgtttgtgggtccattatgaccagggttattggtgtccttgctgttcttttctcccatgtggtgggggtgggagagagtggtcagcaattcctc

SEQ ID NO: 815020 - DNA, 120 bp, Artificial Sequence
  ENSG00000279668_23 (sequence is synthesized)
gtaggagcaggtgtcccagtcctgatgaggccatcttgtatctctatgctacatgggactcagggagcctatggagttctcctccagctcttgctttttttcggtagagacttggaaact

SEQ ID NO: 815021 - DNA, 120 bp, Artificial Sequence
  ENSG00000279668_24 (sequence is synthesized)
tttccccaatgtagcaacagagacgttaagtcccagctctgacttctgtctttaccttttgttcccagaccatggggtttaacctcctctgagtttctagaaggtaccatgagctacctg

SEQ ID NO: 815022 - DNA, 120 bp, Artificial Sequence
  ENSG00000279668_25 (sequence is synthesized)
tggctcaagaaggaaggggaatcatgtacccaaatggatagaagttttgaaggtctcaagcagaacctcacatcttccccaaacctgatactcagtatcccagcttctgcttgcttgagt

SEQ ID NO: 815023 - DNA, 120 bp, Artificial Sequence
  ENSG00000279668_26 (sequence is synthesized)
atgaagactgctgggggctgtaagaccacatcaccagggggtactgctttattggtatggtcactttgaaggcaaaacttgttcgtgcaccagcttaacttagagattgtgaagagtcac

SEQ ID NO: 815024 - DNA, 120 bp, Artificial Sequence
  ENSG00000279668_27 (sequence is synthesized)
tgaggaatttatgtccatcaaaagtggagattgctttgcgaacttcatagtcaggctgaaaaactgtctctaaagtatacaggtgtcaggtatcagatatctttttttatagttcagtta

SEQ ID NO: 815025 - DNA, 120 bp, Artificial Sequence
  ENSG00000279668_28 (sequence is synthesized)
ctacattctactcagccagtatacctactatgggccaagcatgtacaaattctattaattaaattttgattatcaccatggaataaatttgggcactgagtcacggagattaaataattt

SEQ ID NO: 815026 - DNA, 120 bp, Artificial Sequence
  ENSG00000279668_29 (sequence is synthesized)
tacctgaggtcaagcagacggtttatggtcaggttgggcttcaagcctaaaccactcttactcaaacgttcatgctttttctactttcaaagcctccctctgtcttcatatcattctgca

SEQ ID NO: 815027 - DNA, 120 bp, Artificial Sequence
  ENSG00000279668_30 (sequence is synthesized)
aaatggttgcctgaacacctgctatgttggacttgaactcactaccaccccagatgaccaatgaatggctaagagaggtttgaatgttttgattaggcctgttaacatgtgcttagtctt

SEQ ID NO: 815028 - DNA, 120 bp, Artificial Sequence
  ENSG00000279668_31 (sequence is synthesized)
ccctctttctcctccctctcctcctctcaccttctatcacttgacttctgacacttgcctagccctggatggagggactcccttgtcttcactcaagaaagggcaagctcagtagctcag

SEQ ID NO: 815029 - DNA, 120 bp, Artificial Sequence
  ENSG00000279668_32 (sequence is synthesized)
cttgaggctgttcctgcatcttcaagaaggagcccaaggccgggaggagcttcctctttccctgaactaactcagtcagtgataggccctggtaatttctctctctctgaaagaaaaaga

SEQ ID NO: 815030 - DNA, 120 bp, Artificial Sequence
  ENSG00000279668_33 (sequence is synthesized)
aagaaatgaagaaaagagaggaagaaagaaagagaaagaaggaaaaaaagaaagagaaaaaaaggaaagaaagaaagaaaaagaaagaaaaaaatgaaagaaaaagaaagagaggaaagg

SEQ ID NO: 815031 - DNA, 120 bp, Artificial Sequence
  ENSG00000279668_34 (sequence is synthesized)
gaacagaggtgagaacagagacagaatgagcagttagaccatgattgcaagagtccaggtgaggggcaccaagatggaaaggatccaatccactgtcataactcccttgcgtcactacta

SEQ ID NO: 815032 - DNA, 120 bp, Artificial Sequence
  ENSG00000279668_35 (sequence is synthesized)
ggaaggaaaattgcctccagccttctccagctctggcagggaagtttcagttatctgggtgaggataagcttctccaggagtccaaggctgctgcaacagctgggctcagcattgaaatg

SEQ ID NO: 815033 - DNA, 120 bp, Artificial Sequence
  ENSG00000279668_36 (sequence is synthesized)
gggaccatctgggagccacacgacggagactgagttggcaccttgagagggaggcagagctgcgatgcacagagcggtgctgaggcagactcacagctatgcagcaatcgcgtccccagc

SEQ ID NO: 815034 - DNA, 120 bp, Artificial Sequence
  ENSG00000279668_37 (sequence is synthesized)
ccagcaccagcactactgactgggaaaggacttctcgccccgatgcctgccctgctgcaaaaaccccctagcttcctttcagcacaaagcacagctgctctttgtctttcattttcaccc

SEQ ID NO: 815035 - DNA, 120 bp, Artificial Sequence
  ENSG00000279668_38 (sequence is synthesized)
tgaatcagctgtccccagcctacgtggccagtgcctgcccttctgcacttcccaccctgtgctgtttctcgccacctgttgtcagcctgcgcctgccatgtgacttttaagaaaaaagac

SEQ ID NO: 815036 - DNA, 120 bp, Artificial Sequence
  ENSG00000279668_39 (sequence is synthesized)
aaccttcatccttccacttagacattctttttttcttagccagaatctttctttctctccctagaaaatgtctttgagactatacttaatgatttttttttttttgatggagtctcgctc

SEQ ID NO: 815037 - DNA, 70 bp, Artificial Sequence
  ENSG00000279668_40 (sequence is synthesized)
ctgcaacctccatctaccttgcacaccaccatgcctggttaagttttatatttttagtagaaacagagtt

SEQ ID NO: 815038 - DNA, 120 bp, Artificial Sequence
  ENSG00000279668_41 (sequence is synthesized)
caggcgtgagccaccgagcccggctaagtaatgattttctattcgtttcttccttctatctccccgccccctcttcttttataagtgtccttattggatttttttctctgatcatcggta

SEQ ID NO: 815039 - DNA, 120 bp, Artificial Sequence
  ENSG00000279668_42 (sequence is synthesized)
gggaaggtgagtggatgagggagaccagttagagggctggaaaaatggtctcagaagagaacagtgcagatggtgagaagtggatgtgttggactagaaatggataaaatccacagaagt

SEQ ID NO: 815040 - DNA, 65 bp, Artificial Sequence
  ENSG00000279668_43 (sequence is synthesized)
cactgaccttctgggttagggacttgcatgtccccattttatagatgaggagcctgaggcccaga

SEQ ID NO: 815041 - DNA, 120 bp, Artificial Sequence
  ENSG00000279668_44 (sequence is synthesized)
gacattgtatggaaaagcatcgtgaaaatccctggcctgttctgctctgttctgattaccggtgcgtgcagcccgcagtcacgtacccgctggttgctcaatcgatcacgaccctctcac

SEQ ID NO: 815042 - DNA, 89 bp, Artificial Sequence
  ENSG00000279668_45 (sequence is synthesized)
acggacccccttagagcgctcggggagctcggtttttggagacgtgagtccgccggtgctcccagctgaataaagccctttccttccac

SEQ ID NO: 815043 - DNA, 120 bp, Artificial Sequence
  ENSG00000279668_46 (sequence is synthesized)
gaaaaagaaactttccttcccccagtgaatggccctttacaactctgccactgatgaggagactgtggttaactggtatctgtcgtgattcacatgagacaaaaactatctattacagaa

SEQ ID NO: 815044 - DNA, 120 bp, Artificial Sequence
  ENSG00000279668_47 (sequence is synthesized)
accatcaaataccaacagctgggcctggacgttatttgatgagcttctagagatctccaatggaagaagactcatctaaaaaaggaccttgcctggaatgtgtttagagtgggaaataca

SEQ ID NO: 815045 - DNA, 120 bp, Artificial Sequence
  ENSG00000279668_48 (sequence is synthesized)
gtgctctcatgggtacagtgcactcttcatggatagctactaaaactccctgccctggctctgctatgaagttccccctacctagatgagtggctttgaaagcaaaagataatgattgac

SEQ ID NO: 815046 - DNA, 120 bp, Artificial Sequence
  ENSG00000279668_49 (sequence is synthesized)
atctgagcagtacagaagttgatactgacagcaggctgtactactttggcaagatgataatgacttatatagatgtggcaaaccagttaaactgtctaaacatgcccatatgcaatagtt

SEQ ID NO: 815047 - DNA, 120 bp, Artificial Sequence
  ENSG00000279668_50 (sequence is synthesized)
tattttacttttatttagttgtttattgagatagggtcttactcccatccaggatgaagtgcagtggcatgatcacgattcactgcagcctccagtttctggcctcaagtgatcctctca

SEQ ID NO: 815048 - DNA, 120 bp, Artificial Sequence
  ENSG00000279668_51 (sequence is synthesized)
gcagcaccactggggtgaagcttccaggaacagaagcaggcaggaagccaccaggaagcaagctggaagtcctttttttctccatccttgcaaccttcctctagtgccccctattagcac

SEQ ID NO: 815049 - DNA, 120 bp, Artificial Sequence
  ENSG00000279668_52 (sequence is synthesized)
aacctaatgttaacccagatggcaagaaaataggattggcagcaccagtaagacaaagctgcacagagaagggtggatttaaaatggaaagacagtaacttaatgatgaacacatatggg

SEQ ID NO: 815050 - DNA, 120 bp, Artificial Sequence
  ENSG00000279668_53 (sequence is synthesized)
acaggtgacccttcattggccatacttccatggtgcccagaacagtgatggctagagtgtggtattagaaagaccttggatttggagtaaatggacccatttctactgcttaatttcagt

SEQ ID NO: 815051 - DNA, 120 bp, Artificial Sequence
  ENSG00000279668_54 (sequence is synthesized)
gtgacttattggtcaagtcatcaatatctctaagctttcatttccttatctgtaaaatggcaaaaataacccctgacctacatcctacctacctacctttgatgcaagcaagaaatcagt

SEQ ID NO: 815052 - DNA, 120 bp, Artificial Sequence
  ENSG00000279669_0 (sequence is synthesized)
acgggcagtacttcccactctgctgcactgccttgctttcctcctggcggggaagaaagaaggaaggaaagaagacccagagctggaatcatacacatcatcgcaattcatccacaccgc

SEQ ID NO: 815053 - DNA, 120 bp, Artificial Sequence
  ENSG00000279669_1 (sequence is synthesized)
ttcgaagagatgatggcacgggacccaggacctgaggaagctgcagtgggtgaaggggagaaacagaggagcaggggctggagaaagagtggggagtcatcaaccaccctcctttctcct

SEQ ID NO: 815054 - DNA, 120 bp, Artificial Sequence
  ENSG00000279669_2 (sequence is synthesized)
ggcgtctggttttcggggcccagaggtcttctctagggcctcagagaagcttccaagtctgttcatttctctttccccacccctgcttgtatcacaaataaagaaattattgacaactga

SEQ ID NO: 815055 - DNA, 120 bp, Artificial Sequence
  ENSG00000268764_0 (sequence is synthesized)
gactgaggtcaggatggctgtggcttccgagtgccctatgggactctcaccctctgatatggtttggctgtgtccacaccctacaattcatcttgaattgcagctcccataattcccaca

SEQ ID NO: 815056 - DNA, 120 bp, Artificial Sequence
  ENSG00000268764_1 (sequence is synthesized)
acggagctctaagtgacatggctcacagtgtgaactccagacacgctttgcagctcaactcctactgttgaatggttagttctttatgtgagttttaagtggcattaaatcaaatcgcta

SEQ ID NO: 815057 - DNA, 120 bp, Artificial Sequence
  ENSG00000272678_0 (sequence is synthesized)
gaaaacccaaaactgccaaatctgaaatgagggaaacacatcctgtgtgagaccagttccacagcatgaacacacacacatatacaccagtacatacaccgacatacacacagtacaaat

SEQ ID NO: 815058 - DNA, 120 bp, Artificial Sequence
  ENSG00000272678_1 (sequence is synthesized)
ttctaatatagagaatttacaaaatatagaatttggcatatctatctgtgagatctccaaggctttcaataatacaaaataaaaaatacaaaaaagacaagtggggatccccgccctccc

SEQ ID NO: 815059 - DNA, 120 bp, Artificial Sequence
  ENSG00000272678_2 (sequence is synthesized)
cccgagtggcgtcctcgtttgcttgtgtgtctcttacacgcatacaactagcatagtctaaagaagggcacggagaacttgttttgttttatttaataaatatttttctcagaatcacca

SEQ ID NO: 815060 - DNA, 120 bp, Artificial Sequence
  ENSG00000272672_0 (sequence is synthesized)
tccttgtgtctctggacataaaatgtataaactgttccaggtaagcatcacctttcttgtggaaattcatgggattatttgctgagagttaatcctgaaaagtttcatcccatagtctca

SEQ ID NO: 815061 - DNA, 120 bp, Artificial Sequence
  ENSG00000272672_1 (sequence is synthesized)
tccaccccctcctactgctgtgggacccctgatggtagaaacttccccagccccacctactgccactgtaagctgtccttccttcactcctaagattccaggctctggagtgacagtgcc

SEQ ID NO: 815062 - DNA, 120 bp, Artificial Sequence
  ENSG00000272672_2 (sequence is synthesized)
tttttactgtaaatgggaatagtcataatgcctaccaaatgggttttattgtgtgtgacaattgaatgaggcgattcatttgaggcactgtgcctggcagatagtaagtacgcaataata

SEQ ID NO: 815063 - DNA, 120 bp, Artificial Sequence
  ENSG00000272672_3 (sequence is synthesized)
ctattgttacttttatccccagagactgttggccttccctaatatgcattgtctccttccttggtaatggaattttcagtggacacctggaacacaataaaatgtgtatttttaaaagcc

SEQ ID NO: 815064 - DNA, 120 bp, Artificial Sequence
  ENSG00000272677_0 (sequence is synthesized)
gggggaggggaggctcacaccctgcggcggcttaagcctggatttacgcactggaggagggaattagccctgagatgtcagccctgtgcccctggcgctgtccacccggacgcccgcgga

SEQ ID NO: 815065 - DNA, 120 bp, Artificial Sequence
  ENSG00000272677_1 (sequence is synthesized)
gcgccaggcgccgcagcggaccgcgcgcgcactgattgccgcagctactctccctgccgtcgccgcccgggaccgggtgacattgaggttttcgtctatcgccgctgggccgatagggct

SEQ ID NO: 815066 - DNA, 120 bp, Artificial Sequence
  ENSG00000272677_2 (sequence is synthesized)
tccaagtaagatttttgtttgcctgcttttctcctggaatttttttgtttttggtcgaagaagcagctcccactttgcagttgtgtcagccaatcacgacagcttcccagacttccgtgc

SEQ ID NO: 815067 - DNA, 120 bp, Artificial Sequence
  ENSG00000272677_3 (sequence is synthesized)
aagtgcctgctttgaggccaaggtggccataaatggcagctcctcaggctcctccacaatctctggtttcttatgtttctccatgagctcagctttttcatcaactccaatgcttcaagc

SEQ ID NO: 815068 - DNA, 120 bp, Artificial Sequence
  ENSG00000272677_4 (sequence is synthesized)
cgaagtcattagtgaatgttctacaatccttcagctgcagctccagaccttcactcctccagcttctcctacatccatctaaccctcaattcctacattaaatctctttattccagaata

SEQ ID NO: 815069 - DNA, 120 bp, Artificial Sequence
  ENSG00000272677_5 (sequence is synthesized)
ttttgtttgcctgcttttctcctggaatttttttgtttttggtcgaagaagcaggtaacttgcatatcttaaggaaaacattgtttttgctttgcttttgttgtttaaagatcctaaaac

SEQ ID NO: 815070 - DNA, 120 bp, Artificial Sequence
  ENSG00000272677_6 (sequence is synthesized)
gtaccgtgattcctttacgttactaataattggaaagtgtgttaaatcaagggttcgcttaatgttctttagcctttgtacatagaatatataaatgtcgtgagtcatctttacgaggtt

SEQ ID NO: 815071 - DNA, 120 bp, Artificial Sequence
  ENSG00000271320_0 (sequence is synthesized)
cgagaagactaacagaaaaagccatatgacctgaagattagatacattggtacagattgctaaattttatcaatagatatttctgtttactgggcacacagttaaattctatttctctgc

SEQ ID NO: 815072 - DNA, 120 bp, Artificial Sequence
  ENSG00000271320_1 (sequence is synthesized)
cagcctccttgtatcaacttacagctaagtggttgagtctgactgattgaatgtgggctaaagtaatatataccactttagggcctgactcgtaaatatatccttatgatctctctatct

SEQ ID NO: 815073 - DNA, 120 bp, Artificial Sequence
  ENSG00000271320_2 (sequence is synthesized)
atgacagagacccatcttggaaggggcttggatccctgagtcactgcttggaggagagctgcctgagatggcttcctgatcatgaacatccacgttggactttgcctgagcaaggaataa

SEQ ID NO: 815074 - DNA, 120 bp, Artificial Sequence
  ENSG00000271320_3 (sequence is synthesized)
acatcctatcttaagacaatgtgatttggagtttttggcatatgaccagcttcaattacgctgcataatttacatgtcttttccctctttcccaggtaactcatatgcctcccagatgtt

SEQ ID NO: 815075 - DNA, 120 bp, Artificial Sequence
  ENSG00000271320_4 (sequence is synthesized)
tatatttggaaagagggaagaagacccaaataataactgagatcaaatttctcaccaactcactgggactctgagagatgcatttcatttgatttaaagaaaataaattactttgaaact

SEQ ID NO: 815076 - DNA, 120 bp, Artificial Sequence
  ENSG00000271327_0 (sequence is synthesized)
gcccattaaataaaaaagcgtaaaagtcccttgcttctttctttttcagaatggggatagtttaaaagtgtctgtttgcaatccccaaatatcatattgcttttggcagctgatattctt

SEQ ID NO: 815077 - DNA, 120 bp, Artificial Sequence
  ENSG00000271327_1 (sequence is synthesized)
tagcagctgattaagtgatacatattttacacaaaacagaatatcctgaatcaaagggattttgaatatttatttgaactggctttatctcaggtatatatctggaattcactgaaaata

SEQ ID NO: 815078 - DNA, 120 bp, Artificial Sequence
  ENSG00000271327_2 (sequence is synthesized)
aaatgggtggtaaggactcaaagatgacagaggatagcaacaacaataacaagatggagatcaggaagtaggtatgcaaatacctgtaggttggatgtatataggaaaagctaccatatc

SEQ ID NO: 815079 - DNA, 120 bp, Artificial Sequence
  ENSG00000271327_3 (sequence is synthesized)
aaactgggcagaagcaaccaatccagaaaaataacttctagcatccaatcatattgtggtgagattaaactcacaagaaagttaaatgaggtttagagaacatattctcaacccatacat

SEQ ID NO: 815080 - DNA, 120 bp, Artificial Sequence
  ENSG00000271327_4 (sequence is synthesized)
acttcattggagcaactcttgttaatcttaaggggaattatggaactccattcttccttcttatttagaagaaaatagattcaaggccaaatttgtaggccaaattgaagatataacgag

SEQ ID NO: 815081 - DNA, 120 bp, Artificial Sequence
  ENSG00000271327_5 (sequence is synthesized)
attttttttttaactcatcgtctttgccaaattctctagaacataaaacctgaggcaaagattacttgctaagtctatgttgggtggtgcaatttcagggctataaaagggaatgagaaa

SEQ ID NO: 815082 - DNA, 120 bp, Artificial Sequence
  ENSG00000271327_6 (sequence is synthesized)
gacataacttcacaaagaacaaagcctgttgctgggtcctgcatgtcaccttgaaacagtccatcaggtggggagggcagtgggaggagcaatggggggagaaagaggaatttatcttct

SEQ ID NO: 815083 - DNA, 120 bp, Artificial Sequence
  ENSG00000271327_7 (sequence is synthesized)
tgacctctagtcccttgattcaaaatttaactctgatttaagggagccgttgggtaagccagattccacatcccactaaactgcctggaagaggtgggaggagagcagccattaaggtat

SEQ ID NO: 815084 - DNA, 120 bp, Artificial Sequence
  ENSG00000271327_8 (sequence is synthesized)
gaggtacagagtcccatcaggtgagacccatgtctgtagccactgaggttcctgttgcaacaggtgagatgtgatcttcccaaagccccagcttcttccgcaggaggctgagacagcagg

SEQ ID NO: 815085 - DNA, 120 bp, Artificial Sequence
  ENSG00000271327_9 (sequence is synthesized)
cccacggatgtccattcaggaagaggctaaggcttgggggtcaggtgaagaatcttgagagacacaaaaattgttctagtatagtcatgacttaaaattataaagaataattttcaagtc

SEQ ID NO: 815086 - DNA, 120 bp, Artificial Sequence
  ENSG00000271327_10 (sequence is synthesized)
ttttagcaaatccatgaattggtgtttttgtggagatatgaatgactttcagtaaaagagtcaccgaatcataataggtatggaggtggaaattctattattaagatttatgattactga

SEQ ID NO: 815087 - DNA, 120 bp, Artificial Sequence
  ENSG00000271327_11 (sequence is synthesized)
aatattttcatgattactcagatccatttctggactgaccttatgcttaaccagatgatgtttattattaaagctgatttttaacgagtgttcattaataaaaaatgctcttaaccacaa

SEQ ID NO: 815088 - DNA, 120 bp, Artificial Sequence
  ENSG00000236733_0 (sequence is synthesized)
acactgctgccatagcggtctttgccaagacttgtccatgctgaggcccaattcctcccctggcatagggttccctgactggggctgcttgtgtaaagaatggatcaggcgacaaaggat

SEQ ID NO: 815089 - DNA, 120 bp, Artificial Sequence
  ENSG00000236733_1 (sequence is synthesized)
ctcctgtgagtcagaatttggtcaagaatttcagtgcatcttgatgctgattgagaataccacctgaaactgatctgaagtaataacaggctagcaacgtaatcatctctgtgttggtcc

SEQ ID NO: 815090 - DNA, 120 bp, Artificial Sequence
  ENSG00000236733_2 (sequence is synthesized)
cctctccattttcagcagcagaagacatctacaagagaaacacactgccctttgaacttcaatgttactctgaaatacaatatattaataatattgctaaccaaaggatctattttagtt

SEQ ID NO: 815091 - DNA, 120 bp, Artificial Sequence
  ENSG00000236733_3 (sequence is synthesized)
aagtatgtttttgttattgctattgctgttgttcctaaggaagacagaaacatttcagaatactaaaaaagaaatctgcattccttaatctttcaaaaataaatctaaaacattttcgta

SEQ ID NO: 815092 - DNA, 120 bp, Artificial Sequence
  ENSG00000232436_0 (sequence is synthesized)
tggaactaatacataacttcagtaaagtttcaggatacaaagcaatatacaaaaatcagtagtatttctatatactaataatgttcaaggtgacagccaataaaacatgcaatcctattt

SEQ ID NO: 815093 - DNA, 83 bp, Artificial Sequence
  ENSG00000232436_1 (sequence is synthesized)
atgttcaaggtgacagccaataaaacatgcaatcctatttacactaaccagcaaaaaaattaaaatatctagaaaatcatctc

SEQ ID NO: 815094 - DNA, 82 bp, Artificial Sequence
  ENSG00000232436_2 (sequence is synthesized)
tagcactatgtctatcaaactaccaatgtcattttcacaaaattagaaaaaaaactattctaaaattcaaatggaaccaaaa

SEQ ID NO: 815095 - DNA, 88 bp, Artificial Sequence
  ENSG00000232436_3 (sequence is synthesized)
gctggaggcatcacattacctgacttcaagccatactataaggctgtagtaaccaaaacagcatggtaatggtaccaaaggagacagg

SEQ ID NO: 815096 - DNA, 120 bp, Artificial Sequence
  ENSG00000232436_4 (sequence is synthesized)
agcctcacatctacagcaatctgatctttgacaaagttgacaaagtatgattgcaggactacaaacagagaacatttgcagagccataattttctaccatactgataggcccactgatga

SEQ ID NO: 815097 - DNA, 120 bp, Artificial Sequence
  ENSG00000232436_5 (sequence is synthesized)
acctttacagtcctcctctttgagccatgcttcctgcttccgtgggccaagtttatgcttctgagctcctgacgagtgcttctgcaactgatccacatgcacatagccaggtgccctatg

SEQ ID NO: 815098 - DNA, 120 bp, Artificial Sequence
  ENSG00000235427_0 (sequence is synthesized)
ctgccatgttgtgagttgccctgtggagaggcccatgtggaaaggaactgagagagggctctggctaaaaccactgagacacggaggccctcagtctgacagcctaagaggaactgaatc

SEQ ID NO: 815099 - DNA, 120 bp, Artificial Sequence
  ENSG00000235427_1 (sequence is synthesized)
gaatgatgtctgcctgtccctgggccctgtgaagatctctgtggccactcgcactttgggaattttgctgcataatttcgaaaaaaactagtgcatgttgtcagcttcattcctagtatg

SEQ ID NO: 815100 - DNA, 120 bp, Artificial Sequence
  ENSG00000235427_2 (sequence is synthesized)
tctaagccatgaactcaggtgggaaaagggggagggggatgatactctggtgttctaactggctaagcttcctcttgggaagaattaaaaataaacaggcaaaggaaaggaaggaaccac

SEQ ID NO: 815101 - DNA, 120 bp, Artificial Sequence
  ENSG00000234771_0 (sequence is synthesized)
gcctccgttctctgcatccctccaccccagtatccctgcacctcttcatccctccattcctgcatccctctatttttccatccctccattcctgtatccctgtgccctccatcctccatc

SEQ ID NO: 815102 - DNA, 120 bp, Artificial Sequence
  ENSG00000234771_1 (sequence is synthesized)
ccagcatccctccatccctgctccccactctcacttcccttcccttcacagacaggcttttcctgccatcctcagaccccacccagggttacctgatgcctttccagctgcacacgggga

SEQ ID NO: 815103 - DNA, 120 bp, Artificial Sequence
  ENSG00000234771_2 (sequence is synthesized)
ctgactcacctctctctttctcagtcccaaagtcccgaaagagagcatctgatgtggtcagcttgtgacaaggcgtccaccttctgtccatgacatggaggccaggggaaggtctcactg

SEQ ID NO: 815104 - DNA, 120 bp, Artificial Sequence
  ENSG00000234771_3 (sequence is synthesized)
cccagcaccccaccctgtgctcccaggccttttgaatgttcctcctgctcagcccagtgactgcgggctgtggctcctcctccagcctcccctcgaggtcctggtcttacttaggaggcc

SEQ ID NO: 815105 - DNA, 120 bp, Artificial Sequence
  ENSG00000234771_4 (sequence is synthesized)
ccgggtgtagatgccttcccacccaccaggcattgccccttttcctggcttcacagactcgggaataaagtttccttctgtttcccctcttgcagaaggagatccggttggcagctaaac

SEQ ID NO: 815106 - DNA, 120 bp, Artificial Sequence
  ENSG00000234771_5 (sequence is synthesized)
cgcgctgggaacaggggcctgagtcctggactagggctctttccccggggctgctgcagatggggaggagcctacacccgcctcccgagtgctaatcagacctgacaggctggagaatgg

SEQ ID NO: 815107 - DNA, 120 bp, Artificial Sequence
  ENSG00000234771_6 (sequence is synthesized)
ccagtcagcctgaggccaccgcgggacaccacctaggcccagcttctccccccaccagagggcgccagagcccgccaagcctcgtaggagatggcaacagggcctgctgctgccacctag

SEQ ID NO: 815108 - DNA, 120 bp, Artificial Sequence
  ENSG00000234771_7 (sequence is synthesized)
cggccaattccgggaatgaatctcggcacgctcattacccagcgactctgcccatcttgaccctttatgtgaagcagaacagccgcttccgcagtgagctgtcagaaggcgtcgtgcctg

SEQ ID NO: 815109 - DNA, 120 bp, Artificial Sequence
  ENSG00000234771_8 (sequence is synthesized)
tcttgctagtggggaaactgaggctcagagaggcagaagacttgcccaagatcacaccaccgggacccaggattcaagcgcaggcctgcccaggctctctgtggcctcctggctgcgagg

SEQ ID NO: 815110 - DNA, 120 bp, Artificial Sequence
  ENSG00000234771_9 (sequence is synthesized)
aggcagccagggaccaggtgccacccttctgagacacctgagatcccaggcccgagaggatgaaggcgggattacctggagcgtgtctgaatgctggaggaagaagggcagctgggagat

SEQ ID NO: 815111 - DNA, 120 bp, Artificial Sequence
  ENSG00000234771_10 (sequence is synthesized)
gaagctgtcaggatgggccgcatcccatttcctgcctcgtttcagttcaactttccaacagacctccctggctcgtcttgctcttctctaatggacaaacaaacaggctcagagaggtgg

SEQ ID NO: 815112 - DNA, 120 bp, Artificial Sequence
  ENSG00000234771_11 (sequence is synthesized)
tgtgacttgcccaaggtcactcagcttggatgctatggaacagggacgtccactgtcccagtctgtttatgggaagccgctctgcaactgtcctgacccaccacatgccccaccgctgtt

SEQ ID NO: 815113 - DNA, 120 bp, Artificial Sequence
  ENSG00000234771_12 (sequence is synthesized)
tctcttgccctgaccccttgttccctggaccagggtggcacagctccaggctcttgggcccttcccgagggcaggcacctgtgactgtgtccccaaagacctgagtggctgagggggccc

SEQ ID NO: 815114 - DNA, 120 bp, Artificial Sequence
  ENSG00000234771_13 (sequence is synthesized)
cacagagcttggacttcctggaggacaaggaggggtctgccagccacccccaccacgcccgccccagggctcccctggagcttccatgccagccggactcaggtgggtctggaggagcac

SEQ ID NO: 815115 - DNA, 120 bp, Artificial Sequence
  ENSG00000234771_14 (sequence is synthesized)
cgtgcctccaatcagaccttgagatgtgccccctgcccccactgtgccctcccctgcccaggagtctggttgcaaaccctgattaaggggattttatctccaccagagggccagtaggtg

SEQ ID NO: 815116 - DNA, 120 bp, Artificial Sequence
  ENSG00000234771_15 (sequence is synthesized)
ggaagtagcttaaacaatgcaggtttataatctcacagttctggaggtcaagagtctgaaatgggcctcatggggctaaaaccaaggtgtctgcagggctgtgttccttctggaggctcc

SEQ ID NO: 815117 - DNA, 120 bp, Artificial Sequence
  ENSG00000234771_16 (sequence is synthesized)
agggcaggaaggggaggatccacttctgtgcctttccagcttctagaggctgcctgcgttccttggctcgtggccccttcctccaccttcaagccagcagcggaggcctgagtccttctc

SEQ ID NO: 815118 - DNA, 120 bp, Artificial Sequence
  ENSG00000234771_17 (sequence is synthesized)
atgccatctctctgttctctctcctgcctcctcctccacactgaaggacccctgtgatcacactggcccccccaccggatgacccaggataatccatctccctgtttgaaggtcggctga

SEQ ID NO: 815119 - DNA, 120 bp, Artificial Sequence
  ENSG00000234771_18 (sequence is synthesized)
ttagcaaccttcattccatctgcctccttcattccccctggccatgtaatgggattcacagcttctggggattaggacatggacatcttgtggcgggggcataattctgtcgacgacacc

SEQ ID NO: 815120 - DNA, 80 bp, Artificial Sequence
  ENSG00000234771_19 (sequence is synthesized)
ggacatcttgtggcgggggcataattctgtcgacgacaccaagaaacacttggatgttaaggattcaccgaacactgttc

SEQ ID NO: 815121 - DNA, 120 bp, Artificial Sequence
  ENSG00000234771_20 (sequence is synthesized)
ggcaacaagagtgaacctccatcacaaaaaacaaacaacaaaaaaaatcaggtataattacatacagtgaaacatatggtgactcaagtacacagttcagtgttttttttgtttttgttt

SEQ ID NO: 815122 - DNA, 120 bp, Artificial Sequence
  ENSG00000234771_21 (sequence is synthesized)
atgtgtcctgcttcttcccaggctccaccatctcttcccctaaaggcaaccaccattctgatttctctcaccaaagactggaaaaatatcccaatacctggatgtatgcctcacgtgtcc

SEQ ID NO: 815123 - DNA, 120 bp, Artificial Sequence
  ENSG00000234771_22 (sequence is synthesized)
gtcccgctggccccagcacccaggtatagttagttactgctgtgcctggcttcactctcactttttttttttttttctttttttgagacatagtctcgctctgtagcccaggctggagtg

SEQ ID NO: 815124 - DNA, 62 bp, Artificial Sequence
  ENSG00000234771_23 (sequence is synthesized)
gcaggccggccttacctggtatggtttttaggttcatgttgatgcctggagtttcagtaatt

SEQ ID NO: 815125 - DNA, 120 bp, Artificial Sequence
  ENSG00000234771_24 (sequence is synthesized)
ggtttttaggttcatgttgatgcctggagtttcagtaattccctcccattcgttgctgagtagcactgcaacacatgcaggcagctatttggggatcttttcacctgttgatgggtgtct

SEQ ID NO: 815126 - DNA, 120 bp, Artificial Sequence
  ENSG00000234771_25 (sequence is synthesized)
ggactgtttccagtttttggctgttacaaatgaagcctctgtgagccacgtacaagttcttctgtggatgttttcatttagggaaaggggtaaataggagtggaagtgctgggtcacagg

SEQ ID NO: 815127 - DNA, 120 bp, Artificial Sequence
  ENSG00000234771_26 (sequence is synthesized)
gcaaatgtccatttgagtttattagaaacaattctccaaaatgattggcattttaccttgtactagcagagtctaggagtgtggctgctcccagattctcatcaaactacagtgctgaca

SEQ ID NO: 815128 - DNA, 120 bp, Artificial Sequence
  ENSG00000234771_27 (sequence is synthesized)
tctttagttctaggccttctagtgtggatgcactggtatcttgttaaatgcttttaactgttttggtagagatggggccttgctgtattgcatagtctggtcttgaacacctggcctcaa

SEQ ID NO: 815129 - DNA, 120 bp, Artificial Sequence
  ENSG00000234771_28 (sequence is synthesized)
gctgggattacaggtgtgagccactgctctgggcctcattcagtgttttgcttctccctgacaactaatggagttaagctcgttttcatgtttattggccattaagtcatcttgcttttg

SEQ ID NO: 815130 - DNA, 120 bp, Artificial Sequence
  ENSG00000234771_29 (sequence is synthesized)
tattggccattaagtcatcttgcttttggaagtgccaattgttaactggcttgtcctcttctttttgccttacacagttaatacatgctggagattacatgtactgcaaagattttctcc

SEQ ID NO: 815131 - DNA, 62 bp, Artificial Sequence
  ENSG00000234771_30 (sequence is synthesized)
atacatgctggagattacatgtactgcaaagattttctcctagccggtgacttgtcagatgg

SEQ ID NO: 815132 - DNA, 63 bp, Artificial Sequence
  ENSG00000234771_31 (sequence is synthesized)
cagtggcatgatctcagctcactgaaaccactgcctcccgggttcacgacagctaatttttgt

SEQ ID NO: 815133 - DNA, 73 bp, Artificial Sequence
  ENSG00000234771_32 (sequence is synthesized)
acaggcgtgagccaccgcgcctgcccagcttatctattcattggaggatctgagtgacatgagaaacttaggt

SEQ ID NO: 815134 - DNA, 120 bp, Artificial Sequence
  ENSG00000234771_33 (sequence is synthesized)
gcctctggagtagctgggattataggcacctgtcatcacacctggctatccacttaggttttcaaagggccccttggtcttggggtggagagtgaagggaagcagggggaagaagtttag

SEQ ID NO: 815135 - DNA, 120 bp, Artificial Sequence
  ENSG00000234771_34 (sequence is synthesized)
gtggagagtgaagggaagcagggggaagaagtttaggtcttgcaatcatccaggtgagacatgatattgtctttgatcagtggcaggggtggaggtcgggagaagcggccagagagcaga

SEQ ID NO: 815136 - DNA, 120 bp, Artificial Sequence
  ENSG00000234771_35 (sequence is synthesized)
tctattttgcgggtggggctgacggtatttgctggtggactgccctggaaccagagggaagtacagagtcaggttgactacaaggtgtttggcttaagttcgtagaagaaaggagttgcc

SEQ ID NO: 815137 - DNA, 120 bp, Artificial Sequence
  ENSG00000234771_36 (sequence is synthesized)
atttgctggcatgaggaaaatgaagaagcagattttgggaggaaaatgaagggttcggcttctgacatgctgaactcgaggtgctgtttaagtggatgtggatttcacagttgtactgat

SEQ ID NO: 815138 - DNA, 120 bp, Artificial Sequence
  ENSG00000234771_37 (sequence is synthesized)
gaagctggaattcgttcaagtatcaaaggagtgtcatctaaatatagatattgaaggtaatcctcagtcagatgaggttactgagagggtgtgaggaggcaggagcggggtgaggctggg

SEQ ID NO: 815139 - DNA, 120 bp, Artificial Sequence
  ENSG00000234771_38 (sequence is synthesized)
aggggcagctggggggaggggagagaagcccagcgacgtcctcggtgtctgtgaagatggcacttccggcggagggagagatcccccgcaccctgcctgagacaggctgaggaacgaccc

SEQ ID NO: 815140 - DNA, 120 bp, Artificial Sequence
  ENSG00000234771_39 (sequence is synthesized)
tacacagcaactcagggcaccccaaatcgaacacgcaaccattaaagagggagcgcctctaagaagccgaaagggggcaccaccaggctccagaggggaaaacagggcgcattttctaac

SEQ ID NO: 815141 - DNA, 120 bp, Artificial Sequence
  ENSG00000234771_40 (sequence is synthesized)
atgtcagcacccccagaccacccaggcccccgtcagaaaaatactggctccatgatcagctttgaaacaactttattagaaggctgctttaaatgacaacttctaacgtccaattctttc

SEQ ID NO: 815142 - DNA, 120 bp, Artificial Sequence
  ENSG00000234771_41 (sequence is synthesized)
ttaatttgctttttgacgactccagttatatgttcatatataacaatttttgcattgatctttgcatcctattgaagatttcctcatcaggtcattctggtggaatggaagtgcaaccgt

SEQ ID NO: 815143 - DNA, 120 bp, Artificial Sequence
  ENSG00000234771_42 (sequence is synthesized)
gaggtcgccagttggccggcattgttaagcaagggcagcagaaggctgggagggacggagccagtcccccaccctctcctccagcccccgcccaccacaaattcacagtgagaggcacct

SEQ ID NO: 815144 - DNA, 120 bp, Artificial Sequence
  ENSG00000234771_43 (sequence is synthesized)
cactgccttgacattcagaaaagagtgaaataaagaaaccctcgcagcgcaggaaataactggattccaccttcaaggttattgaggttcctccctctctctccacgcccccagtcaaac

SEQ ID NO: 815145 - DNA, 120 bp, Artificial Sequence
  ENSG00000234771_44 (sequence is synthesized)
cctgaaatcctaaggctgggggcaagcccttccccaacctgccaaaggaaaggagccagggctgctgccttctggccgcttttctgcctccagtcccaaaaggaatttctctggacagat

SEQ ID NO: 815146 - DNA, 120 bp, Artificial Sequence
  ENSG00000234771_45 (sequence is synthesized)
gtgactgcagcggcccaaggccccccttctcctcctcctcccatcccactgggcgggcttgggaaggtacaatcaaccatgaacataaatatgaataaaaaatgaacttgaaaatgacaa

SEQ ID NO: 815147 - DNA, 120 bp, Artificial Sequence
  ENSG00000234772_0 (sequence is synthesized)
actgttctgctgctggttttgctttgactctcccagaggaaaaccggggttgtcactggaagttcctgaagtaatctccttttttagcaaacttttcattattacactatttgggtcatg

SEQ ID NO: 815148 - DNA, 120 bp, Artificial Sequence
  ENSG00000234772_1 (sequence is synthesized)
tgattatgctgattttgcttcactgatattctgtcatgtccttagatttctaatgaaactgctcagaaatcaaccaggtaaaattttatgggaaagttaggtggggaactagcacttggt

SEQ ID NO: 815149 - DNA, 120 bp, Artificial Sequence
  ENSG00000234772_2 (sequence is synthesized)
tatgtttgtataaaaagaaacccacaaaattttttctcaaaacagtgtttctggttgtcaaatgaaataggggagcaattagacttctgtctggtgagtagattaaaatatttctgctga

SEQ ID NO: 815150 - DNA, 120 bp, Artificial Sequence
  ENSG00000234772_3 (sequence is synthesized)
tagttatgcatacatatgtagttaaagaagtcaagaaatacaagagaatgaaaatcaagttgagaaaagcagtcatatctgaggcttcctaagagaagtgatgcccaagacattaaaaca

SEQ ID NO: 815151 - DNA, 120 bp, Artificial Sequence
  ENSG00000234775_0 (sequence is synthesized)
gggccgcgcgcggtagggctgggctgggctctggacaacgcgcggcagctcatagtcctccggctcccgccgcagcgctcccagcccggcctttcaagcaatcacatggtacggcagaga

SEQ ID NO: 815152 - DNA, 120 bp, Artificial Sequence
  ENSG00000234775_1 (sequence is synthesized)
ctcagccccggacgcttttaaagagctctgtcggggaaccttgcccatggcctgccccaagggggcattccggtctcttctttcaaccctctcctgcacccccattggggagccccaggg

SEQ ID NO: 815153 - DNA, 120 bp, Artificial Sequence
  ENSG00000234775_2 (sequence is synthesized)
gtgaaccgagactcagacttacccaaggtcaccaaagctggcagagctcccggctgcctgactgttctgtccaagtgcccccacacctcgacgccttcagcagccgctagctccagggat

SEQ ID NO: 815154 - DNA, 120 bp, Artificial Sequence
  ENSG00000234775_3 (sequence is synthesized)
tcctggggaagccaaggccggccggtgctgggttcccgcggaagggagaagaaggaggagccatagctgggctcagcattatagcgcctggcggagcactgcgcaaggcttcagctgaga

SEQ ID NO: 815155 - DNA, 120 bp, Artificial Sequence
  ENSG00000234775_4 (sequence is synthesized)
tgcttcacccgacatcatgggccagaacagacgaaacaggcagcgcctcagctccccacctgcccgagcctctcctgagctcacctgcagaaaggccaaaagggacggcgcctaagaagg

SEQ ID NO: 815156 - DNA, 120 bp, Artificial Sequence
  ENSG00000234775_5 (sequence is synthesized)
cccagcagacccgctcccttggagggaagagacagattcgctctcctgacgtccagtccaaagtgctttgttcccatagcattgtctcctcccgtttccaggcaaatctaacccagcccc

SEQ ID NO: 815157 - DNA, 68 bp, Artificial Sequence
  ENSG00000234775_6 (sequence is synthesized)
attgtctcctcccgtttccaggcaaatctaacccagccccaagagaacacttccctcctctctggatc

SEQ ID NO: 815158 - DNA, 65 bp, Artificial Sequence
  ENSG00000234775_7 (sequence is synthesized)
tctcctgcctcagcctcccaaataactggtattacaggtgcctgccaccacgcctagctaatgtt

SEQ ID NO: 815159 - DNA, 120 bp, Artificial Sequence
  ENSG00000234775_8 (sequence is synthesized)
caaagtgctggggttacaggcgtgagtcaccgggcccgggcttccagctcctttactttcaccccacttcatctggctgctctacaattcccacagtgaggagggctaacttagacccat

SEQ ID NO: 815160 - DNA, 120 bp, Artificial Sequence
  ENSG00000234775_9 (sequence is synthesized)
acttagacccatccaccacgtccagaagttaccccttgttgggggacggctggccctcgactgggcatggaactctctgttatttcaatactcctcaaaggttttaagtttggtctctag

SEQ ID NO: 815161 - DNA, 120 bp, Artificial Sequence
  ENSG00000234775_10 (sequence is synthesized)
tgccaaaaaatctggcatgaaatctcacttatgtctcttcttagtgtgtgactttgtgcacattactgaaccaagaagcctccgttttctcatctgtaaaatagaaattataatactttc

SEQ ID NO: 815162 - DNA, 120 bp, Artificial Sequence
  ENSG00000234775_11 (sequence is synthesized)
cattacagcgagtgtttggtaaatgctaataatgatcattacctttcctaccctaacacctaactaaagagaatggggtgaagggtacatgggcaggtagttctggagagaaaagtgcag

SEQ ID NO: 815163 - DNA, 120 bp, Artificial Sequence
  ENSG00000234775_12 (sequence is synthesized)
tgccccatcacgtgcttgagtcttctccaacctggccacctccttgcgttcccaccccctatctgcaagggggtgggtggcagctgcgtccctcccctgcccatgccctgacagtgccaa

SEQ ID NO: 815164 - DNA, 120 bp, Artificial Sequence
  ENSG00000234775_13 (sequence is synthesized)
agggctggcacagctgctgcaatggcccaaatgcctcaggttagggctaggtaggggacagctgggggtaaaggagacgtgagaggaggcagagcaggggcacccttctctaccagcatg

SEQ ID NO: 815165 - DNA, 120 bp, Artificial Sequence
  ENSG00000234775_14 (sequence is synthesized)
tccactcaccctgcagcttcctaagcctctcaggtcagccagggacctctgacctcactcctgtccagcctgagggggtttccccctctttccctctcttgttctctggcctctagtacc

SEQ ID NO: 815166 - DNA, 120 bp, Artificial Sequence
  ENSG00000234775_15 (sequence is synthesized)
tcctcctccatggctggacccacccagtctcccagccccgttgcccaactccctctcctgcccacatgctgcccagctgtcgctgcccctgagctggcactctgcccacctgcaccactc

SEQ ID NO: 815167 - DNA, 120 bp, Artificial Sequence
  ENSG00000234775_16 (sequence is synthesized)
atgaatcgccagcattcacactctgaccctggaacctccacctgttcccctcggtctgagcagcagggctgtgtggccccatctgttgtcctccagccaggactcagtgcaagggactac

SEQ ID NO: 815168 - DNA, 120 bp, Artificial Sequence
  ENSG00000234775_17 (sequence is synthesized)
acttcaacccccgccaacttccacctgccaggagagggcgggaaggactggctgggatgatgcctgatttggggggctccttatctcctggaagagcaggccttgttctcccctgcccca

SEQ ID NO: 815169 - DNA, 120 bp, Artificial Sequence
  ENSG00000234775_18 (sequence is synthesized)
ggcccaccagcactgtcttaaaagaccaacattacaactgaaaaagcaaaaagcccacacttcccaaaggacatttgcatatttaatagcattctcctattacatttcacttgttgatgg

SEQ ID NO: 815170 - DNA, 120 bp, Artificial Sequence
  ENSG00000234775_19 (sequence is synthesized)
caagcccctaaatcagaagctggtcagtgcaagatggtaagcagaaagacacaacagtggcaacattttcaattaatgtttcattatacaaacaatatgtgaatgcgctttccttgataa

SEQ ID NO: 815171 - DNA, 120 bp, Artificial Sequence
  ENSG00000234775_20 (sequence is synthesized)
aaaagtgaaaccactgtagttcaggctcaaattccatttaaccagttccctaaatcaagaccctttcatctaaacgcagaggtgaccattgttaccagtttgatgtgtatatttccagga

SEQ ID NO: 815172 - DNA, 120 bp, Artificial Sequence
  ENSG00000234775_21 (sequence is synthesized)
atttttctatgtatttgcataatataagtgtgtgtgtatatgtacatttacacacaagtatgtttacattacatataaataagagtatgtatatacccctatacacacatttatatatgc

SEQ ID NO: 815173 - DNA, 120 bp, Artificial Sequence
  ENSG00000234775_22 (sequence is synthesized)
aaatatatatatattcaaaaaaaatgtagtactatcatgggtttgggttttgttattttttacatgaattgtaaactacaaatattctgcagctagattcactaaaaaagtcttatcaag

SEQ ID NO: 815174 - DNA, 120 bp, Artificial Sequence
  ENSG00000234775_23 (sequence is synthesized)
gccggccggactcctgggagccctggtctggcctccagcgacccctcacccctcacggcacagcatctcttctgcaggacttcagaatgccccctctgggatctcccaaagcagtcggta

SEQ ID NO: 815175 - DNA, 120 bp, Artificial Sequence
  ENSG00000234775_24 (sequence is synthesized)
gccctggcaccctcccccaatcctaaaaccctgctctctccatgaaaccagtccctgcatcttctcatcccatattgttttgcaggctctaccctgagtcattatattcctttctcatcc

SEQ ID NO: 815176 - DNA, 120 bp, Artificial Sequence
  ENSG00000234777_0 (sequence is synthesized)
gataaagacagagctgagagggccacagttttagtgacagcctcagctgtgacaaaggagagaaaacagaaagacctgggaaagtgcaaggatgaagcaattaagtttgagaaatgtgat

SEQ ID NO: 815177 - DNA, 120 bp, Artificial Sequence
  ENSG00000234777_1 (sequence is synthesized)
gtgaggtttaggaaaggtggattttagccccagcagacttttagctggacacggacctaataccttgagacttcattgttcccattaaagaaaaaattatcttctgactttctaggggtt

SEQ ID NO: 815178 - DNA, 120 bp, Artificial Sequence
  ENSG00000234777_2 (sequence is synthesized)
tgggggtcccagatatcaaaagatttaaaccacttaggaggtttccattggaaggagaagactgtctttagcccactgcatcccctcaagccatcccaagctttctctgtgccagggact

SEQ ID NO: 815179 - DNA, 120 bp, Artificial Sequence
  ENSG00000234777_3 (sequence is synthesized)
cagtgatggcgagactcaagcacgcatatcttgatggactccaaaatgctcttcctaattccttctctgtggctcattcttcatcctctatttgcattgagtccattcaaaggacatccc

SEQ ID NO: 815180 - DNA, 120 bp, Artificial Sequence
  ENSG00000234777_4 (sequence is synthesized)
aacatcatcagttaaccaagtgtgtgttccaccccagggaaggacagcgtagggccgagaggaatcacggctgaatggtctgagatcccgacctgcagaagtaactggccacttcaggga

SEQ ID NO: 815181 - DNA, 120 bp, Artificial Sequence
  ENSG00000234777_5 (sequence is synthesized)
agagatgactaagagcacttagaatttatccagctctcaaggcgacttcaccaaggaacaaccacagtgttgttttttcacagaaacaccaaacttggaaataaacccttccaggctgta

SEQ ID NO: 815182 - DNA, 120 bp, Artificial Sequence
  ENSG00000234777_6 (sequence is synthesized)
ggatgacttggaagtgatttttaaaaaattattacatcaatgtcagtatgacaaactttgccagttcaaatgtgtactgccttggaagtggcattgcatgaggaaaaattattttctaac

SEQ ID NO: 815183 - DNA, 120 bp, Artificial Sequence
  ENSG00000234777_7 (sequence is synthesized)
aaaaataggaataaaattcaaaattatatataaaaatctaaaatgaaaacgacagaacctgtagtaacctctgcatgatgtaaaggtggttgcaataaaaatcgcgaggaaaactgaaaa

SEQ ID NO: 815184 - DNA, 120 bp, Artificial Sequence
  ENSG00000234777_8 (sequence is synthesized)
tctttcttaggagcctttgcaccagcacagttgagttgttacaccattcacttctgtctctaacttaacaacccaccttgggaggtttaactcaatatatctttgttactatttataaaa

SEQ ID NO: 815185 - DNA, 120 bp, Artificial Sequence
  ENSG00000234779_0 (sequence is synthesized)
ctcacttgagcacaatccaagatgaaagtttctgggttgtgtccccttcgcttcctctcaccctcgctcccccgcggagccaaggagccagcaattgtgcaagaggagaccggcgcacag

SEQ ID NO: 815186 - DNA, 120 bp, Artificial Sequence
  ENSG00000234779_1 (sequence is synthesized)
ctctggggaagacgccgaggctgcgcccgagtctgaacgaagctgcctccagccacatgaagtcagtagggctgttctgaggggccccgagatttgatgactgttttttaggttgcggaa

SEQ ID NO: 815187 - DNA, 120 bp, Artificial Sequence
  ENSG00000234779_2 (sequence is synthesized)
cctactccgagagagcaaacactttggacgaagtgattcatattgatagatacatttgttgggaggtggcttttttcattctcaacagaaaacaaagaaataaattaagtcttcccctga

SEQ ID NO: 815188 - DNA, 120 bp, Artificial Sequence
  ENSG00000236883_0 (sequence is synthesized)
ttcaaaaaagtaggcaagtactttgctttattgacatcaaatggaacttcttgtccctcacgcagtccacacaacagtaaaggcacaatgaggcatattaaaacatagccagtttcaaca

SEQ ID NO: 815189 - DNA, 120 bp, Artificial Sequence
  ENSG00000236883_1 (sequence is synthesized)
catgtttgcacgcagggtcacgttctgcaacaaacttattctaataacagtattcagaaggcaccctatgggacacaggtgtccgttgcgggcagccaggtgcagagcggtgtagccgtc

SEQ ID NO: 815190 - DNA, 120 bp, Artificial Sequence
  ENSG00000236883_2 (sequence is synthesized)
tgaggtcatggcctccttgccagcgccccgatgcaggagcagcctggcagtgctcgtgtgccccgtctccgcggccacgtgcaggggtgtctgtgccagcaggctgcagacgttgacgtc

SEQ ID NO: 815191 - DNA, 63 bp, Artificial Sequence
  ENSG00000236882_0 (sequence is synthesized)
tgcctttaagaactgtaatactcaccgtgagggcccgcggcttcattcttgaagtcagtgaga

SEQ ID NO: 815192 - DNA, 120 bp, Artificial Sequence
  ENSG00000236882_1 (sequence is synthesized)
ccaagaacccaccaattccagacacagtgggatcacagagagagccaacagtccaggccatgacaagctggcacccagctctgcttcacatgatcaaactgcatcacggaagctgcacac

SEQ ID NO: 815193 - DNA, 120 bp, Artificial Sequence
  ENSG00000236882_2 (sequence is synthesized)
catgatcaaactgcatcacggaagctgcacacgatgacaccctgtctggaaagtttttgccagagggcaaaagactgcaagcagaatatccctttgccatttctcattcaggactggccg

SEQ ID NO: 815194 - DNA, 120 bp, Artificial Sequence
  ENSG00000236882_3 (sequence is synthesized)
ttgtctgaaagcaaacctcaaggacaggacttctggactccgcagccacttcaggctgctgctccatcgcatgaattccagcaggtggcgctgcaccccgcgcggacccggcttgcctct

SEQ ID NO: 815195 - DNA, 120 bp, Artificial Sequence
  ENSG00000236882_4 (sequence is synthesized)
cggccccagggaggtcggttgatgagcagtcgggaagtgggtctgcgcgcaccccgctgcagctgtggcaaacgcaaacgatgacacacaggcttgacgagggcctttgtcagaagcaat

SEQ ID NO: 815196 - DNA, 120 bp, Artificial Sequence
  ENSG00000236882_5 (sequence is synthesized)
tttcaggatctgccatgactcagattcactttctgtaaaccagagtcaacattacatttccctttactctgggccattccttgaatttttaggtcaccagttgtttttgtactaactgaa

SEQ ID NO: 815197 - DNA, 120 bp, Artificial Sequence
  ENSG00000236882_6 (sequence is synthesized)
gggatttgagtatttcacaagcaccttatttttattagcatttttagggcattaccaatttgggacggatctgtagtgtgagagattgttgtcactcttagctccaaacataggttgact

SEQ ID NO: 815198 - DNA, 120 bp, Artificial Sequence
  ENSG00000236882_7 (sequence is synthesized)
ttatatattatttacatgttcagaattatactgtgtagaaattcaaatgaaacttgcaaaatacttttctggcaggaagccctggagaggatcgttcatggaaacaaggatgacgactgg

SEQ ID NO: 815199 - DNA, 120 bp, Artificial Sequence
  ENSG00000236882_8 (sequence is synthesized)
ggtaagaaatgcaggtgactcgtgagtggtcagggagtggaagagaagacggctggaaggttttagcattcagaaaaaaaatggagacaactagagttgatctgaagattatggcagaat

SEQ ID NO: 815200 - DNA, 120 bp, Artificial Sequence
  ENSG00000236882_9 (sequence is synthesized)
tcaatattgggggaaagaaacaagatgggggttagaaattagaaacagcagagctccacaggttggaaaggttggaaaggatttgagcaagagaacaaggagcctgctaatagcaccctg

SEQ ID NO: 815201 - DNA, 120 bp, Artificial Sequence
  ENSG00000236882_10 (sequence is synthesized)
ggtttacatcaagagaagcacctggagagaattaactcgggaggaggtgggggcatgggaaaccttttcatctccaagagcgggcaggaacagcagctggcctgaacttgaaggtacacc

SEQ ID NO: 815202 - DNA, 120 bp, Artificial Sequence
  ENSG00000236882_11 (sequence is synthesized)
aggtagcttgcgtgggccaggagaaggtgattctcttctatgcctctctccaacgccctgcttctgatgctgctcctctacctgtattgaggggaagatacatccctaagaagttccctg

SEQ ID NO: 815203 - DNA, 120 bp, Artificial Sequence
  ENSG00000236882_12 (sequence is synthesized)
aaccccattctttgttgtggctaactggtccccttggaatttttctactaattttcaattccccctctcacctggtgaaatcttgaatcttactgttcaataaaagttcttctaccgaaa

SEQ ID NO: 815204 - DNA, 120 bp, Artificial Sequence
  ENSG00000236882_13 (sequence is synthesized)
agtctgcttgtgacagaagcagcagatgatcagaaatggagggcgctttctgacaatgacaccatcatcccacagggaaggaacatctgactcttggctcccactaagatgctgccagag

SEQ ID NO: 815205 - DNA, 120 bp, Artificial Sequence
  ENSG00000236882_14 (sequence is synthesized)
catttgtccaactggcgtggctgtagctccttcctgcaaggcaatgctgaagaagctatggaagcaagaaggaagcatggattctaaaaactgacaacaaaccacttacccctattgctc

SEQ ID NO: 815206 - DNA, 120 bp, Artificial Sequence
  ENSG00000236885_0 (sequence is synthesized)
agctgctgaacggtggccccatggtgcgcgcaggctggtgtgcggagcgtgcggaaccagcggagcgggatcggcgtgagcagcgtactggctggtctcaaactcctgatcccagtgatc

SEQ ID NO: 815207 - DNA, 120 bp, Artificial Sequence
  ENSG00000236885_1 (sequence is synthesized)
cctcacaaagtgctgggattacagctgttttaccatgatgtgcttaggtgttctttcatttgtattcatcctatttgaggtttgtatatgcattttctatttgtttctctatgcatcagt

SEQ ID NO: 815208 - DNA, 120 bp, Artificial Sequence
  ENSG00000236885_2 (sequence is synthesized)
gattttgcttatatatttttaattctaaaattcgtattttttataatttccatttctctgctgaaattcttcaatttgccatcaacttgttgagggtattaatcacaatttaaacaaatt

SEQ ID NO: 815209 - DNA, 120 bp, Artificial Sequence
  ENSG00000236885_3 (sequence is synthesized)
catgtctaattactctaatgaggttttggtagatctattactattatatattattctcttgatttttggtcaagtgttcttgtatcctggtaattttggatttaatgctagatgtcatat

SEQ ID NO: 815210 - DNA, 120 bp, Artificial Sequence
  ENSG00000236885_4 (sequence is synthesized)
acttagagataacataataggggcagccttttcaataatagtaagagacaaaaagtggcctattaaatacagttactttggatttcggggaaagaatttcttcctttatgaggaagaagg

SEQ ID NO: 815211 - DNA, 120 bp, Artificial Sequence
  ENSG00000236885_5 (sequence is synthesized)
caagacccttttcatctttgatcattggttagctaacggttttaaaaggattaggactaaatataaatgccaaaattatctttgttttttgtcaacatataaaagcatgtcttttaaatt

SEQ ID NO: 815212 - DNA, 120 bp, Artificial Sequence
  ENSG00000236885_6 (sequence is synthesized)
gtatgtttgtttttacttttgcttttattattttaaaaagtcttagcattgtaaacaatatattttgttgttggtgttattagttgtgtctagcttataaatctaaagctttgttattat

SEQ ID NO: 815213 - DNA, 120 bp, Artificial Sequence
  ENSG00000236885_7 (sequence is synthesized)
accaagaacttatgataccattccaggtaaagaattatagatgattatcaggatacgcaagatgaaacatggatgtctgtcatgatttaataatgaattatttggcaagtgtggaagttg

SEQ ID NO: 815214 - DNA, 120 bp, Artificial Sequence
  ENSG00000236885_8 (sequence is synthesized)
ctatgatatgtattgtgggtggaattgtgtcccccaaaatgatgtcctgaagtcttaacttctggtacctgtgaatgtgactttatttggaaatagggtctttgcaaatgcaatcaagtt

SEQ ID NO: 815215 - DNA, 120 bp, Artificial Sequence
  ENSG00000236885_9 (sequence is synthesized)
aggttgagatcatactagattcgggtgagcccgaaatccactgactggttttcctctaaggagagagagatttggagacacagattcccagggaggagtaccatgtgactacaggggcag

SEQ ID NO: 815216 - DNA, 120 bp, Artificial Sequence
  ENSG00000236885_10 (sequence is synthesized)
agactggagcaatacagctgcaagcggaggaatgtcaagaattgccagcaaccaccagaagctaggaagaaaaaggaagactcctctctggggccctcagaaggaacatgatggccaata

SEQ ID NO: 815217 - DNA, 120 bp, Artificial Sequence
  ENSG00000236885_11 (sequence is synthesized)
ccttaattctggacatctggcttccaggactgtgagagaatacatttgtgttgttttagccacctagtctgtggtaatttgttacaggagctgtctaagaaactaatataatatgttatg

SEQ ID NO: 815218 - DNA, 120 bp, Artificial Sequence
  ENSG00000236885_12 (sequence is synthesized)
ctgaattattttattttatattatgtatttctctacagctggaaataagttattattagtgtcatgtgtcccatatatcatgggttgacatttcaattctaattaaagaagcaactattt

SEQ ID NO: 815219 - DNA, 120 bp, Artificial Sequence
  ENSG00000236886_0 (sequence is synthesized)
caaacatgcccccatgaaagcagggacctctgtgaaagcaggaattgagaaattgggctcactactgaatattccctgggagttcatcagtcctgccacagaatagaagctcagtctgct

SEQ ID NO: 815220 - DNA, 83 bp, Artificial Sequence
  ENSG00000236886_1 (sequence is synthesized)
agggctcctgccaaatgccagccggagctctcccgtaagagatggggcctccacgtgaaaagtaactacaaaacagaaccaga

SEQ ID NO: 815221 - DNA, 120 bp, Artificial Sequence
  ENSG00000236886_2 (sequence is synthesized)
ggggcctccacgtgaaaagtaactacaaaacagaaccagaaaatagtcatgctgttcaagtgagttggcatatcacttcatgctactttgaaataaaatttcctcttattttcttatgga

SEQ ID NO: 815222 - DNA, 120 bp, Artificial Sequence
  ENSG00000236886_3 (sequence is synthesized)
cttttcgttgaggcaaaccccgcggccgtgcagcagggcgtgcagcggcttctcctcgtcctgccgggggaggcagcgcagcccctgggcgcagcgctcggtgtagacgccgcacgactg

SEQ ID NO: 815223 - DNA, 120 bp, Artificial Sequence
  ENSG00000236886_4 (sequence is synthesized)
cccctcggccagggcgcaggtcatgcagcagccgcagcccggctccttgaccagctcgcagcccagggggctgggggggcacatggagagggctttctcgtcgcagggctcgcagtgcac

SEQ ID NO: 815224 - DNA, 120 bp, Artificial Sequence
  ENSG00000236886_5 (sequence is synthesized)
tgctttgaacgcctcctgctccatcacagtgactgctcaaggcaggacacctgatcctatcggaatccacccacgggaaccagcaagtgattcttgaacatttatgccagagaaatgaag

SEQ ID NO: 815225 - DNA, 120 bp, Artificial Sequence
  ENSG00000236886_6 (sequence is synthesized)
acttatcttgacatgaaaatgaatggacgtttatttgtaatagccaaacctggaaacaatccaagtgtccttcaacagatggggcctccacgtgaaaagtaactacaaaacagaaccaga

SEQ ID NO: 815226 - DNA, 120 bp, Artificial Sequence
  ENSG00000273783_0 (sequence is synthesized)
agaacttgcaaagcgttgctggaaaagacgggagttctactgacactccagtccaaagctaggtgggaccgcctcctgtcgcacgtttccgcctggtcccgcgctttaggagctaggaaa

SEQ ID NO: 815227 - DNA, 120 bp, Artificial Sequence
  ENSG00000273783_1 (sequence is synthesized)
tgtgacagaggcggtgcctactgcctcgctaggaatggccgcggaggaggactggtcacgtggcgtggcttccggcctctggcgcgttcctattcgggaaggttttaaatgcggagtcat

SEQ ID NO: 815228 - DNA, 120 bp, Artificial Sequence
  ENSG00000273783_2 (sequence is synthesized)
ctcttgatttgtcagcgaggctttgactgtgagcttcgcggcgttcgcgcctcaccgcctcaccgaggtgggtacgctgcgaagactaggcttatgttacccagaggttagtcctctact

SEQ ID NO: 815229 - DNA, 120 bp, Artificial Sequence
  ENSG00000273783_3 (sequence is synthesized)
aggccacgtactttaaataatttatcacgctagtggaaatgcggggtggaagaaaaccccaccagcctttggattgtaacagcacagtaactttccctggtttttaaaaatattgccaaa

SEQ ID NO: 815230 - DNA, 120 bp, Artificial Sequence
  ENSG00000273783_4 (sequence is synthesized)
catgcccttgacccaccaactcgcatggcctctcgctataagagagcaagccggctgtgttccatgttcaattcaataagtgcaattcaataagcttttgacttgttctgcccaagcaaa

SEQ ID NO: 815231 - DNA, 120 bp, Artificial Sequence
  ENSG00000273783_5 (sequence is synthesized)
tcctgcctttatatcgaccttgcaagcagaacagagaatgctgtttggaaggcagaattcatagtacctagttttcttgtccctgggaattttgagggacttgaaatgtcgcgtggatga

SEQ ID NO: 815232 - DNA, 120 bp, Artificial Sequence
  ENSG00000273783_6 (sequence is synthesized)
gtgagggagtttgtcttccagagacaaagcaaaacgaaacgtcaaagttctgtgctggtgaaaccagatttgaagaatatcaaaggcgtcttaccaaagaggaaaaaaaatgcatcttgc

SEQ ID NO: 815233 - DNA, 120 bp, Artificial Sequence
  ENSG00000273783_7 (sequence is synthesized)
caagacttgaagaaagggattagagaaaccagaggccttgaatactcagaaaatgggagattgtgaatgggtgtagaggatatctatgaaccttgacatttcttttcacgccaagtccat

SEQ ID NO: 815234 - DNA, 120 bp, Artificial Sequence
  ENSG00000273783_8 (sequence is synthesized)
tcccctgttaacagttgcttcccagtttcctgcacagctgcatggtctgggacacttaaagaaaaaaatcacaggaaatcagtgttcttggtatattatataaagttatgattctatcaa

SEQ ID NO: 815235 - DNA, 120 bp, Artificial Sequence
  ENSG00000224308_0 (sequence is synthesized)
ggaagcgtggtaggagaagatgcctgtgcatgccgctcatgtttccagcagggcaatgtagatgcatgtcaggaaagatgattagatagtttagaaccagatccttgtctgagatggaaa

SEQ ID NO: 815236 - DNA, 120 bp, Artificial Sequence
  ENSG00000224308_1 (sequence is synthesized)
ctgcagctgctaattaagaagagtagagctcgaggaagccgccagctgccagcctggtgctgcctctcctgcaagtgtgaagtgtggctgcatccagaagcactgaaaataattgattag

SEQ ID NO: 815237 - DNA, 120 bp, Artificial Sequence
  ENSG00000224308_2 (sequence is synthesized)
aaagagaaagagactgaaaatgtcataaatgaggagataattggagaaaatcattgtgaagaggtatgaatggatggcaacacaaatggagtaagacttaaagagatataagcctaccaa

SEQ ID NO: 815238 - DNA, 120 bp, Artificial Sequence
  ENSG00000224308_3 (sequence is synthesized)
atgctgacatgatttttgtgagttgtgaagatttaaagaaatctgtttgaataacaatttttgaggctacctataaatttgtgttcattacttccactaagcaaggttcttttgattatt

SEQ ID NO: 815239 - DNA, 120 bp, Artificial Sequence
  ENSG00000224308_4 (sequence is synthesized)
cttttgattattctttgatcattgaaatgttttatattttatttaatttacagcaacaaaaataactcttgagaagaaataaatgtgaacctatggagataattatttagtaatgtttga

SEQ ID NO: 815240 - DNA, 120 bp, Artificial Sequence
  ENSG00000224308_5 (sequence is synthesized)
agaacatttcattgcacttattaatgagtataagaatattatgaaaacagaaaaataatgagccttgtaagagttcacacaattattttatgtaattggtattctatattcaaggagagc

SEQ ID NO: 815241 - DNA, 120 bp, Artificial Sequence
  ENSG00000224308_6 (sequence is synthesized)
ttgaatgcagaaattaaagaagcatatgctcatttgaaaagagacaaatctagtagtgtaattaaagcttgtgccttataacacaataaaaatattcagaaggattttatccttaattgt

SEQ ID NO: 815242 - DNA, 120 bp, Artificial Sequence
  ENSG00000224308_7 (sequence is synthesized)
gacataaaatgatttctaacctttattttttgagtcagaaaaaacggaggaagcatgggttcttctttgctatatgaaatcaaagtaactttacaaatttgaagtgcttagttatctaaa

SEQ ID NO: 815243 - DNA, 120 bp, Artificial Sequence
  ENSG00000224308_8 (sequence is synthesized)
gcaagaaaccagtgctatcagccagtattgcattttgtttacatgtaatagaaatccaactaaacaaggattttattttcatcatgttacagaaagttaggatataggaagtccttcctt

SEQ ID NO: 815244 - DNA, 120 bp, Artificial Sequence
  ENSG00000224308_9 (sequence is synthesized)
gtagttgctcaaggaaatcatgaaggaccaagtttattctagcttcctgctctgccacctttagcaagtggacagtccccctacctctcataggcaatgaacttcttcatatccaagcat

SEQ ID NO: 815245 - DNA, 120 bp, Artificial Sequence
  ENSG00000224308_10 (sequence is synthesized)
gtgcttagggcagaagaaagggattggtgagaacaaaaatcacatgccagtgaagtctgttcatcttatattaggaaataatagctcctgcaaatgtcttacttgataggcttctaccac

SEQ ID NO: 815246 - DNA, 120 bp, Artificial Sequence
  ENSG00000224308_11 (sequence is synthesized)
tggaactgcctcacatgactaccactagatagaatggaatctggcttgatgagtatttttaagtggatacatttacttcctaaacaaaaccaatattctattaataaaagagaaaggaag

SEQ ID NO: 815247 - DNA, 120 bp, Artificial Sequence
  ENSG00000224308_12 (sequence is synthesized)
aaagattcttgtaaggcagctaatatttctgtcacacagagaaaaacaaattgataatgcagtacaaggttgatattttaaggtagagatttttagcttgagcatttagcatccatttgt

SEQ ID NO: 815248 - DNA, 120 bp, Artificial Sequence
  ENSG00000224308_13 (sequence is synthesized)
agcatttagcatccatttgttcttttaatgtaaatgtcaaacaaaatacaaaaatcgtatgtataattaccaaaaactatttaaaagtaaatttataattcactcaatagagtaatatag

SEQ ID NO: 815249 - DNA, 120 bp, Artificial Sequence
  ENSG00000224308_14 (sequence is synthesized)
tttaacgtgtttttgctttcaaaaaatacaaaagataaaaaaagaatatacagctaaacagtctatatggaaaaaaccataaaagtgtcaaaagtaagatgatggcttatgaaaattaca

SEQ ID NO: 815250 - DNA, 120 bp, Artificial Sequence
  ENSG00000224308_15 (sequence is synthesized)
tttttacatttatggatgtgacctgaatgtaaatgtaagtaaattgtaaatgtattataaatgaatgtaaaaaccaaaataaagttgtttattggcaagattgatttaaaaaaaagaaaa

SEQ ID NO: 815251 - DNA, 120 bp, Artificial Sequence
  ENSG00000224307_0 (sequence is synthesized)
gggatttggatcctgccagctcgtccctgcaaccccctactccggtcccctcaaacctgtccgtggctggcagccctgtgatacctcgccacattctgcaacagaatccgagatagaggt

SEQ ID NO: 815252 - DNA, 120 bp, Artificial Sequence
  ENSG00000224307_1 (sequence is synthesized)
agaagtgggggagtacgtcgtggctgtcagggcagctttctgtaaaatgctgcctggaggagcatgtgattccagaccctcctctctgcaacgaaagtgaggttgacacctgcaggcctg

SEQ ID NO: 815253 - DNA, 120 bp, Artificial Sequence
  ENSG00000224307_2 (sequence is synthesized)
ttgcggctgacaagagaaaagaatgtgcccctgtgatcatgtgaaagcatcagccaggggtccaagaacttccctctggagcctcacactcccagcgtggcacccagcagggaacagatt

SEQ ID NO: 815254 - DNA, 120 bp, Artificial Sequence
  ENSG00000224307_3 (sequence is synthesized)
cacactcccagcgtggcacccagcagggaacagattctctccaaacctttgtgaatgaatgaaggatgacgtcactagaatccatccctgttttattttttatttttattttttgagaca

SEQ ID NO: 815255 - DNA, 120 bp, Artificial Sequence
  ENSG00000224307_4 (sequence is synthesized)
ggcccacccctgccctccccacaaagggtcacgggagccaccgcctgactttgaagcccactgacttgcggctgacaagagaaaagacagggtttcattcttgttgctcaggctggcgtg

SEQ ID NO: 815256 - DNA, 120 bp, Artificial Sequence
  ENSG00000224307_5 (sequence is synthesized)
gtcttaggtaacagagcatgggacagagccactgcagccatgcccagggagggccggggtgagtaagcattgtgaggttttgggcagaacgtggctgcactgtgcacgcggtgagggatc

SEQ ID NO: 815257 - DNA, 120 bp, Artificial Sequence
  ENSG00000224307_6 (sequence is synthesized)
gaagggggcccccaaagacactcgaagaacagtgggggccctgaaaagtgccaatgctgagcccagacagatggaagaccttggacaaattccccgacacccctgagcctcgatttcctc

SEQ ID NO: 815258 - DNA, 120 bp, Artificial Sequence
  ENSG00000224307_7 (sequence is synthesized)
atctgaaaagtggggtggtgatgacagcacatctcagagggctgggaggacgaagccaccaagtgacagctgcgatggatccacaggggcagcagccgagcaacccgagatctgcagagc

SEQ ID NO: 815259 - DNA, 120 bp, Artificial Sequence
  ENSG00000224307_8 (sequence is synthesized)
catggtgggcccagccccatcctgccccccatgcagccagtgagaagccctgctgctggaggggatggagctacggggaccgatcaattacaccacagtgtgaggtctctgtgccttcca

SEQ ID NO: 815260 - DNA, 120 bp, Artificial Sequence
  ENSG00000224301_0 (sequence is synthesized)
agtgaggttacagttcactaggtatggaggagccttaggccaaacttaaaatatgtaagaggcagctttatgctaaacttgacaaaagaaagcctcagagtgggaaagtcaacctaagag

SEQ ID NO: 815261 - DNA, 120 bp, Artificial Sequence
  ENSG00000224301_1 (sequence is synthesized)
agaaaccgtttattttgtgggtaatgctgagtgcccatttgagtggagacctaaaaaccagactctgagcagtagcatgaaccaaatgttgtcctagacctgaagtttggccatatccca

SEQ ID NO: 815262 - DNA, 120 bp, Artificial Sequence
  ENSG00000224301_2 (sequence is synthesized)
acaactaaccagcattccttcctgataatagaccactgaccttggagtggctctggccagtctacaaaggatgcacactgagtaccttagtgtcctctgcttcaccttttgacatcagag

SEQ ID NO: 815263 - DNA, 120 bp, Artificial Sequence
  ENSG00000224301_3 (sequence is synthesized)
ggcagaaaactccacccatgcctccaggcttccatgaagaggcatgaagctcagtttccgctttcataaatatttatgactcctcctgtagctattaaataatgtatatttgaccactca

SEQ ID NO: 815264 - DNA, 120 bp, Artificial Sequence
  ENSG00000273253_0 (sequence is synthesized)
cggcgtcacggggcgcgcgctgatgcgaacggggtgacagatgggaacgcctccgagaccgccagcgacgaccccgctcgggcagccccggatttcctcggctgcaccggcgccggcagc

SEQ ID NO: 815265 - DNA, 80 bp, Artificial Sequence
  ENSG00000273253_1 (sequence is synthesized)
ggccgggaccccacccggaccccgccgcggttctgggccgccggagcctcgcgccgcctctcggggaccttgtcccctgg

SEQ ID NO: 815266 - DNA, 120 bp, Artificial Sequence
  ENSG00000273253_2 (sequence is synthesized)
tcggggaccttgtcccctggcctccggcctctcgggcccctcgcctgccgtctaggagggaaggggccttggatctgtgccccgcccatggaacagcgcccgggctcggagaggccccgc

SEQ ID NO: 815267 - DNA, 120 bp, Artificial Sequence
  ENSG00000273253_3 (sequence is synthesized)
gaggccgcaggcgcagaccctcccggagggctgggcgggcaccggggtcttcggctggcttgagggacccgacccctgggggaggaatttggggtctgtgtgtccgaatgaacgcggggg

SEQ ID NO: 815268 - DNA, 120 bp, Artificial Sequence
  ENSG00000273253_4 (sequence is synthesized)
gccccggccccagaggactgtctgagaggccggtggccgcggatcctggacgcgcctccctcctgcctgtggtttccctttattccggcagcggcgcgagcccacccttcacatacagga

SEQ ID NO: 815269 - DNA, 120 bp, Artificial Sequence
  ENSG00000273253_5 (sequence is synthesized)
gctacatccagaagcttctcctggggccacagcgtgggcttccgagactctgcgtgaccccagctctgcccctttggggctgcgggtgaagccctcaggaccctccgcgtgcgttgggca

SEQ ID NO: 815270 - DNA, 120 bp, Artificial Sequence
  ENSG00000273253_6 (sequence is synthesized)
ggtgcacacattgtctgcccagagagggccaagatgccccaggcaccccttcgctccgggggctcaggacacaggctcccagctgaggccacgcctggacccagagctgatgtttggctg

SEQ ID NO: 815271 - DNA, 120 bp, Artificial Sequence
  ENSG00000273253_7 (sequence is synthesized)
cacgcgagcccactcgggacagacccaagaacacgaattctctccctttggatttaaggctggtgttttttgacatttacttcagtttttctctctgaaattaaaattacctgagtaaaa

SEQ ID NO: 815272 - DNA, 120 bp, Artificial Sequence
  ENSG00000235285_0 (sequence is synthesized)
cagtggcttagcttcctctagaccagaggacattctgtgctcccaaaacagaatgctacacatgggaacaagggaaagggaggctttgagaggtcagccagcaaggcccctgcttcaagc

SEQ ID NO: 815273 - DNA, 120 bp, Artificial Sequence
  ENSG00000235285_1 (sequence is synthesized)
acatcagcgtggaatgaaaagagtcaaggatggagcccccacaggacttagcaagaatgccaagtacatcgtgctgtctcctcccgcctccatgctggtgcatatgccgcccttcctccc

SEQ ID NO: 815274 - DNA, 120 bp, Artificial Sequence
  ENSG00000235285_2 (sequence is synthesized)
tggaatgccctcgtcttccagaggctgcttcatttgagagccttctctgattcatccaggcaaattaacagataataactgttttagctactaaatattaaactctctcaaggcagggtc

SEQ ID NO: 815275 - DNA, 120 bp, Artificial Sequence
  ENSG00000273257_0 (sequence is synthesized)
agtgccctgggttgaaggagtcttggtgagttaaacacccattattgtctttggctgtaaatgaactcaaggtcactaggaagtgagtggaaagtcagatgaactctgtctctcagaggc

SEQ ID NO: 815276 - DNA, 120 bp, Artificial Sequence
  ENSG00000273257_1 (sequence is synthesized)
actttcaaagatgaagctgtgacagatcagaaatctgtatttttgagccagactatgtctgtgtctaggtttgcctttgtctttttgttgtcagaatttcattaaactaattattcattc

SEQ ID NO: 815277 - DNA, 120 bp, Artificial Sequence
  ENSG00000261570_0 (sequence is synthesized)
gggccgggggcgggaaccggctcggatgctcagggacggtgggggtggcagggcccaccggcttgaggctgcctttcccggcgttccctcgtttattggctcactcttcctttcatccat

SEQ ID NO: 815278 - DNA, 120 bp, Artificial Sequence
  ENSG00000261570_1 (sequence is synthesized)
cagattactccatttgattctcacaagaacatcgtaaatggaaaagactagaattgccctgagttcacagattggtcatcgaggtcaaagaaatcaagtgacttctggaggccacacagc

SEQ ID NO: 815279 - DNA, 120 bp, Artificial Sequence
  ENSG00000261570_2 (sequence is synthesized)
taataaacagcaaggcaatgacttgaacccaggtcttctggttccagggagaaagacacatgggcaggagaataccacatggagacacagacacacgaggggaggatgcctgctgaccat

SEQ ID NO: 815280 - DNA, 120 bp, Artificial Sequence
  ENSG00000261570_3 (sequence is synthesized)
cctgccaaggaattaaattttgttcagacatccactcttcaccttcccagcccctgtttgcctgtaactacaaagcagaggcagggagaaagacacatgggcaggagaataccacatgga

SEQ ID NO: 815281 - DNA, 120 bp, Artificial Sequence
  ENSG00000261570_4 (sequence is synthesized)
gaggatgcctgctgaccatggaggcagaagtgggactgacgcatcgatcagctgagggatgccaagcactgccagcaaacaccagaggcttgatgggggcgagtattctcctgtgcaggt

SEQ ID NO: 815282 - DNA, 120 bp, Artificial Sequence
  ENSG00000261570_5 (sequence is synthesized)
atcagagggagcctggccttgcagataccttgattcctgacttctggcctctaaaatggtgagagaatgaacttctgttgttttaagccccccaggtttggtactttgttatgatggccc

SEQ ID NO: 815283 - DNA, 120 bp, Artificial Sequence
  ENSG00000261570_6 (sequence is synthesized)
tgggaaactagcacagctctcatctcttgccctaagtgaacttatccatctccataatttaaaaaccatctgtttgctgatgattcccaagtaatacagtaaagctacattagatgaaaa

SEQ ID NO: 815284 - DNA, 120 bp, Artificial Sequence
  ENSG00000261570_7 (sequence is synthesized)
tttctactgctctgcaggaggatccgatgactgtgaccgactgggacaccgacccaggaatgcctggcggggtggagggtctggagactgcaattgagatttcacctgattcttggccac

SEQ ID NO: 815285 - DNA, 120 bp, Artificial Sequence
  ENSG00000261570_8 (sequence is synthesized)
aaagtttcaagggaaccagagctaatgaagacagcatggaagggcaccgccgagacctacctgtgggagtccacctcaccctcaagaacagctaccattttaacacagatggataaaccc

SEQ ID NO: 815286 - DNA, 120 bp, Artificial Sequence
  ENSG00000261570_9 (sequence is synthesized)
catgaaagtgaacttcctaaatgcaaattctgatcttgaagccccagctggcacatctactggagaccctcccaagcaacaagatgtagatgctttagagataacaaactatacaagttg

SEQ ID NO: 815287 - DNA, 120 bp, Artificial Sequence
  ENSG00000261570_10 (sequence is synthesized)
tcttccattctttctccttcctctattttcaacacggataaaatacatatatatttatcttgctgagctcagtaggattatttagctttatttccatggctgccttttcttaatgtaata

SEQ ID NO: 815288 - DNA, 120 bp, Artificial Sequence
  ENSG00000261570_11 (sequence is synthesized)
ggcaaagatctttggaaagtagcctgggacatacctagtggtaagccacctgctctgggttgagggtggatctattctagtcagaggctttgtgatctggacaaaggaattgagtatgtg

SEQ ID NO: 815289 - DNA, 120 bp, Artificial Sequence
  ENSG00000261570_12 (sequence is synthesized)
gctgtcaaactgtcaggcaatactaaatttggctggccagctgaattctagcagaaaatcatgcaaaataaggtttagcaattggggaaaaatggcccacaggaaaaacaaagggatgaa

SEQ ID NO: 815290 - DNA, 120 bp, Artificial Sequence
  ENSG00000261570_13 (sequence is synthesized)
attccgtaggactacacggccatagaattctaacttgagggctgcaaccagctatgtgaccttgtagtacaaggaccagtcttcagatacaaaatagagtttggagttaaagggatcttt

SEQ ID NO: 815291 - DNA, 120 bp, Artificial Sequence
  ENSG00000261570_14 (sequence is synthesized)
gagaagaagccattatccaccccctcctcccaattttatatgccctaagaaaaaggtttctttcaacttagaaaggtatgattcttgaagtgcacttcctccgagttttcctgagcctct

SEQ ID NO: 815292 - DNA, 120 bp, Artificial Sequence
  ENSG00000261570_15 (sequence is synthesized)
caatcaaaatgacttgcacctgcccatccattcccattggcttatgctcctaccctgcagtattggcttcattatgcctcaccttgtacacctgtctgattcctctcctagattatcagc

SEQ ID NO: 815293 - DNA, 120 bp, Artificial Sequence
  ENSG00000261570_16 (sequence is synthesized)
tgatagtgcctgccacataattgatggtcaataaattttggttaaatagtaacaagaaactcccatttaaaaaatgtgttatcgttatcattctcaatctggatgctctcctctatacac

SEQ ID NO: 815294 - DNA, 120 bp, Artificial Sequence
  ENSG00000261570_17 (sequence is synthesized)
agcaggggaaatgttatcagtcccctacactctccagtgactattctgtgtctttcctagggttttaggtgagctcaatttgatagaggtatacaacataaagtataactcaagacttca

SEQ ID NO: 815295 - DNA, 120 bp, Artificial Sequence
  ENSG00000235280_0 (sequence is synthesized)
gttccgggtctccacgccctcctggtttgcgggcagccgcgaagccgcgagtggaccgagcgagtgcagctgcctccgcggggccgcgcctggccgccgcctccctttacctccggccgc

SEQ ID NO: 815296 - DNA, 120 bp, Artificial Sequence
  ENSG00000235280_1 (sequence is synthesized)
cccgtggcaggtgtagaagctgcagaggccgcagcagcccagcgcgccccttccgtgtggccgcatgccacccgcgccgcgcccagcattccagcgtccaacagagcatgcgtgcaccat

SEQ ID NO: 815297 - DNA, 120 bp, Artificial Sequence
  ENSG00000235280_2 (sequence is synthesized)
tgcaccattccagcatccggcaacaatgcaccagcattccagcgtccaacagagcgtgcgtgcaccattccagcatccggcaacaatgcaccagcattccagcgtccaaaagagcatccg

SEQ ID NO: 815298 - DNA, 120 bp, Artificial Sequence
  ENSG00000235280_3 (sequence is synthesized)
gcaacatcccggtgtccagtggcacatgtgcacctggacgttccagtgtggtgagctttcaggcacggagcaaggccaaagggataaaaagatgaaggtgacgcagtactcccccttata

SEQ ID NO: 815299 - DNA, 120 bp, Artificial Sequence
  ENSG00000235280_4 (sequence is synthesized)
gtgcctacaggccttataggccagacagatctggaaataaataattcataataaaaaataattacagaataagaggcataataaccagatagaaagtattgaataaatctgtaagaaatg

SEQ ID NO: 815300 - DNA, 120 bp, Artificial Sequence
  ENSG00000235281_0 (sequence is synthesized)
ctcgccatccttcctcgtggtcgcgcacccggttggatttcacagtcatggaagttctgctttaaaatccgtttctgaagaagtgttaatggaggaacacagccttgctgatactctgat

SEQ ID NO: 815301 - DNA, 120 bp, Artificial Sequence
  ENSG00000235281_1 (sequence is synthesized)
ttcatcccagtgatacctatttaggacttctgagctctaaaacgtataagaaaaacagcagacgaacaccaggtgagggagagtgtattaaacacctggacggtactccgcaaatatgac

SEQ ID NO: 815302 - DNA, 120 bp, Artificial Sequence
  ENSG00000235281_2 (sequence is synthesized)
cagggacaaaatgtcccattgacagtcatgctctggagcaggatgggcagtgagagaccagagaccacaggatgggggaaacacaaatgctgacctcaaggagaagctgaagccaagagt

SEQ ID NO: 815303 - DNA, 120 bp, Artificial Sequence
  ENSG00000235281_3 (sequence is synthesized)
attaatcacagtggtgaagataagaaagatgaccccaagtaagaaagcccagaaaggcacttgctgttgactccctcagaaagaacaccacgaaagaccatggatcatgtaaagtaagaa

SEQ ID NO: 815304 - DNA, 120 bp, Artificial Sequence
  ENSG00000235281_4 (sequence is synthesized)
ggctcacctcaagaacaaagcgcggtttcctccctcgccatccttccttatggtcgcgcacccggctcacctcaacaacaaagcgcggtttcctccctcgccatccttcctcgtggtcgc

SEQ ID NO: 815305 - DNA, 120 bp, Artificial Sequence
  ENSG00000235281_5 (sequence is synthesized)
cccctgcctctgattgtcatctttgggggccagagaagtgagcagctatccttcccagtccctggtccctccaagcagtgacaacaaagaatggaccaggcgaggcattgtgtgtagaca

SEQ ID NO: 815306 - DNA, 120 bp, Artificial Sequence
  ENSG00000235281_6 (sequence is synthesized)
ttaggccaattactcatagccgcctgcccctcctcagttacctggacatatgtcttgtgttctggaatcaaaactaattctgaatgcatatcctgaaaacatgggacacttactcagatt

SEQ ID NO: 815307 - DNA, 120 bp, Artificial Sequence
  ENSG00000235281_7 (sequence is synthesized)
tcactcttgggtgtcattggccttttaattattttctatcaatagaccgaccttagatttacttgtcaaaaaaagtaaggtcattttatgagcactttcattccaatttcctagatgtct

SEQ ID NO: 815308 - DNA, 120 bp, Artificial Sequence
  ENSG00000235281_8 (sequence is synthesized)
tttctgattagaaaaacctataaactatgtagctttgaatttatagaatcattattcctgaaggttttgctgtcctttgcgctcagagatggtcccactgactcagagatggtcccactg

SEQ ID NO: 815309 - DNA, 120 bp, Artificial Sequence
  ENSG00000235281_9 (sequence is synthesized)
acccagcatggcagagcctgtgattgcagctccaggggccctcaattcatttgtttccctgcctctccatctccccatgttatcctgtcaccccaaaaagcacctgcctgcaacacggtc

SEQ ID NO: 815310 - DNA, 120 bp, Artificial Sequence
  ENSG00000235281_10 (sequence is synthesized)
caacaaagcgcggtttcctccctcgccatccttcctcatggtcgcgcacccggctcacctcaagaacaaagcgcggtttcctccctggcaatacttcctcgggatcgtgcacgcggttca

SEQ ID NO: 815311 - DNA, 120 bp, Artificial Sequence
  ENSG00000235281_11 (sequence is synthesized)
tttccctaagacaagttatgcaaactgataagagcagagtagacccttagttaatgtgtttccttttttagtagttcttaattcttcaatttccataagaatttagattaaaagatgtag

SEQ ID NO: 815312 - DNA, 120 bp, Artificial Sequence
  ENSG00000235281_12 (sequence is synthesized)
ttttgctcagatgatgccaaaatcatatgtgcatctttttaaaactgattatcaaatataattatgtagtcagtgaattaagcaagaataaaaacgacagtgaaacaaatacagtttcct

SEQ ID NO: 815313 - DNA, 120 bp, Artificial Sequence
  ENSG00000235281_13 (sequence is synthesized)
tcatgtaaaaatgtgtgtagagtttctttcatgtaaaatgttaattttcctggaatgccagtttgcgaaactccttattcagatgtcttttagaaaaatgcaataccccaagagaccgcc

SEQ ID NO: 815314 - DNA, 120 bp, Artificial Sequence
  ENSG00000235281_14 (sequence is synthesized)
attttctttagtaagttcccatttttctgctgctgtttgtgattcctgggccgctaagttagtgttttataagcctttgccttggctcttccttgtttcaatcctctaaacctgtcaaaa

SEQ ID NO: 815315 - DNA, 120 bp, Artificial Sequence
  ENSG00000235281_15 (sequence is synthesized)
ataacttaaccctgctttattgttcccataaattcatatgtaactagtagctaaatccaatttgtatcaatctgcctttctttgtagcgtattctaaatctcccagcatgtttcccaaaa

SEQ ID NO: 815316 - DNA, 120 bp, Artificial Sequence
  ENSG00000235281_16 (sequence is synthesized)
gtagaatcctattaacaccaaataaccagctctgtattttattcaatagttattatagaccttccagtgtcacagtgcagaaaggagcctgatctcaccactgatatattacagcaagaa

SEQ ID NO: 815317 - DNA, 120 bp, Artificial Sequence
  ENSG00000235281_17 (sequence is synthesized)
taagaaatagcccagctcaggctactgggttgaagaactgccagagcgtgatcgccaacgtgcagatttctgatctacgtgtaatgtagaagctgactgttctgtatctgacgtttcatt

SEQ ID NO: 815318 - DNA, 120 bp, Artificial Sequence
  ENSG00000235281_18 (sequence is synthesized)
gtgacccaccaagagaagctcatcttaactagcaatgcaaatgacacacttatacatgtgcacacacacagagcacttcaaaaagcaacactttattaactatgctacttctaaagcatt

SEQ ID NO: 815319 - DNA, 120 bp, Artificial Sequence
  ENSG00000235281_19 (sequence is synthesized)
ttaatcccagctcttaacttttgcagaaagtgtttataagcattcaattgattactattcacagttagaaaaaaatatattggtcacgtatgtggtaataaaactgcaaagtgtaccgag

SEQ ID NO: 815320 - DNA, 120 bp, Artificial Sequence
  ENSG00000235281_20 (sequence is synthesized)
ttaaagttaacctctttagagcagatgagccctgcttattctagggcattcagctatgtctaatcaatcgctcctgtgcttggaagaatgggaacacgacacagtttccccttcttcctt

SEQ ID NO: 815321 - DNA, 120 bp, Artificial Sequence
  ENSG00000235281_21 (sequence is synthesized)
cactgtagcggtgagatagacgatggtcacattggtaccatcacggcgctgcggtcatagcagtccctatttatcccacaggttcccctgaattccgaggcatcccacatttcacatgag

SEQ ID NO: 815322 - DNA, 120 bp, Artificial Sequence
  ENSG00000235281_22 (sequence is synthesized)
caaatagccttgacacctgccgcgtctccaggacaataggcatttctgacccacatgatctgcacaaagaagaaagcctctctctctttctcaccactgcatccccaactgatgtggacc

SEQ ID NO: 815323 - DNA, 120 bp, Artificial Sequence
  ENSG00000235281_23 (sequence is synthesized)
gtgatacataattggagttaaataaatagttgaggttgtcctgggggtcgtgcctttttaaggctatgtgattatgccaattcatagaaaacatgagatgattaaaaagagaaataattg

SEQ ID NO: 815324 - DNA, 120 bp, Artificial Sequence
  ENSG00000235281_24 (sequence is synthesized)
aacaacaaagcgcggtttcctccctcgccatccttcctcgtggtcgcgcacccggttggatttcacagtcatggaagttctgctttaaaatccgtttctgaagaagtgttaatggggaaa

SEQ ID NO: 815325 - DNA, 120 bp, Artificial Sequence
  ENSG00000235281_25 (sequence is synthesized)
aactagcctgtcacaacttcaaggatgctgtcggaagacacaagattcctgggtcagagccaaaggaccgtatcaacgatggcagtgcctgggcatcccacatgtgtgtttattctcctt

SEQ ID NO: 815326 - DNA, 120 bp, Artificial Sequence
  ENSG00000235281_26 (sequence is synthesized)
gcccagaaaaatggtgtggaacgccctcgatgaaacgtgtacacagtgggttgcatgacaggagaaaatctcagagacttaggaacccaaatatgttattgtgagcagtgagcattgctg

SEQ ID NO: 815327 - DNA, 120 bp, Artificial Sequence
  ENSG00000235281_27 (sequence is synthesized)
cccgggaagacaacatctgtatcttccaacagtgttaactgcacagacatccttgaaaagatagtccagaacaaagggtggttagtgccttgctggcaaaatgtgataaaaatatgacac

SEQ ID NO: 815328 - DNA, 120 bp, Artificial Sequence
  ENSG00000235281_28 (sequence is synthesized)
tctttgaaattatcgtccaatgtgtctttcccatatgaaatagacaacactttaaacacaactttaattaaatttttatacattccaatttgggaagcagtgataatttaaattatgaca

SEQ ID NO: 815329 - DNA, 120 bp, Artificial Sequence
  ENSG00000235281_29 (sequence is synthesized)
aaattcactggatggcagtgtcagggagagaatggggaggccatgctgagaaaatgtttatacgtgcaaaggaagagaattgcgtaggacctcataaacagcttttgactttgccagtga

SEQ ID NO: 815330 - DNA, 120 bp, Artificial Sequence
  ENSG00000235281_30 (sequence is synthesized)
caaactcaagtgtgctacggaagagtcagctcctgcaacctggagcggaggcaaggggtccgtcctcagtaagtgtggtgggtcaaatggtgcccccaaaaacctcagaatgtgactgtg

SEQ ID NO: 815331 - DNA, 120 bp, Artificial Sequence
  ENSG00000235281_31 (sequence is synthesized)
cttgaaataagagtctttgcagagacaaagaaggagacacagagagacaaagagacgaagagaggagggtgatgtgaagatggacgcagagatcaaatccatgaagctaaggaattccag

SEQ ID NO: 815332 - DNA, 120 bp, Artificial Sequence
  ENSG00000235281_32 (sequence is synthesized)
gaagcggagagagctgggacagagatatggaacagaccctctctctgagcttccagaaggtgtgattttggacttctcatccgcagctctgggagagaataaatttctgttgttttaagc

SEQ ID NO: 815333 - DNA, 120 bp, Artificial Sequence
  ENSG00000273258_0 (sequence is synthesized)
gcacccggggccaggagcggaagtccgaggggaccccacggcggaggagcggcagagcccgggccccgcgggagagagaggcgggagcctctcacactaacagttgatcggcggattcca

SEQ ID NO: 815334 - DNA, 120 bp, Artificial Sequence
  ENSG00000273258_1 (sequence is synthesized)
gggcaagttacttaacctccctacaccacagtttccactgctgtaaattggggatgatgataataacagccacctcacaaggttgcctggagatttgattaaatgaaataattagcatgg

SEQ ID NO: 815335 - DNA, 120 bp, Artificial Sequence
  ENSG00000261578_0 (sequence is synthesized)
acaaaatggcagcctctaagtgctctttcccgccctcatccaaccatggagttatgaagtagattacagagccatgtagtctgagtctgttttttataactcgcactcagaactgaagaa

SEQ ID NO: 815336 - DNA, 120 bp, Artificial Sequence
  ENSG00000261578_1 (sequence is synthesized)
ttttgtaaagttctgggactgtagaatcacagaacgacacccggtaatccacagggtcatggagtaggtactcaccgtcagctgtggcccagctcaccaccatgggtcagcagggtcacc

SEQ ID NO: 815337 - DNA, 120 bp, Artificial Sequence
  ENSG00000261578_2 (sequence is synthesized)
agcctctttatgcctttcacagtaatgcagcggccagctatggctatgtgttcctcatgctttgtgtacatgccatcatctcctcacaactgcaccaggtgtttttgtcaccatacagat

SEQ ID NO: 815338 - DNA, 120 bp, Artificial Sequence
  ENSG00000261578_3 (sequence is synthesized)
gaggaaaccagcataggccaggctttatctgtcaggtggcaattctcacattcttccttgtcctaccccaggggccgggccagctgtgtaaatcccatgaatcagagagggtagaggtgc

SEQ ID NO: 815339 - DNA, 120 bp, Artificial Sequence
  ENSG00000261578_4 (sequence is synthesized)
actgataaaccaaaaagcactgggattccatttattttttattttcaaataagttgcagaagttatgcagttctacatagctccgatcagactgtggattctagatcttagagtataaaa

SEQ ID NO: 815340 - DNA, 120 bp, Artificial Sequence
  ENSG00000261578_5 (sequence is synthesized)
agccaaaggtcaaagtcaaagtcctttctctcctggccccttttcacggatggggaatctgaggcccagagacgagtaagttcccatggtccatggccaggattctgtgcttcagaacgg

SEQ ID NO: 815341 - DNA, 120 bp, Artificial Sequence
  ENSG00000261578_6 (sequence is synthesized)
cctatgtaatttgtgggacccagtataaaatgaaaatgtggggccccttgttcaaagttattaggatttcaagatgacaagaacagagcattaaaccaagcacagggtctttctatggtt

SEQ ID NO: 815342 - DNA, 120 bp, Artificial Sequence
  ENSG00000261578_7 (sequence is synthesized)
tcactgcccatgaagccagccctgctgccatttgatcatctcatttctagaggaggggcaaacacccagacagtgttggtcaggatggcagaagagagtaggtgtggatttgtgtgtaat

SEQ ID NO: 815343 - DNA, 120 bp, Artificial Sequence
  ENSG00000261578_8 (sequence is synthesized)
ccaatccctctgtagttcagggagccagttagactcttccaaatgcaggaatgtccctctgtcgttatcacacaaccccctggtttccccaccttgccatggccaaaaggctttcagagg

SEQ ID NO: 815344 - DNA, 120 bp, Artificial Sequence
  ENSG00000261578_9 (sequence is synthesized)
gaaaaggcagctaaagaggtggattctaccacccagctgccaccaaaccagctcatgggctgtttctctggactgccaggaatatgggggggcagaggcctgccccttgctcactttatg

SEQ ID NO: 815345 - DNA, 120 bp, Artificial Sequence
  ENSG00000261578_10 (sequence is synthesized)
tgcttacagaatttaaagtccaccagcgctaaagcccactcatacctaatctccaccaagggcactgtctatgacaacagaggtcatcataggctaataggaccttgcccatcaatgttc

SEQ ID NO: 815346 - DNA, 120 bp, Artificial Sequence
  ENSG00000261578_11 (sequence is synthesized)
agtgttccttgttggctaacgttcaccagggtgcaaatgttggttgatatataatgtttatcatatgaatgacagcttccaccaatgaccaatatccacaaagggaaaatgtctgttgga

SEQ ID NO: 815347 - DNA, 120 bp, Artificial Sequence
  ENSG00000261578_12 (sequence is synthesized)
ggcagtgtctgctgtatatcagtgcccagtgttcactggtagctaattgcaattatacttgctctgtgcatcaatacccaatgtcagtccatagctcggcttctaacgacagcaaatgtc

SEQ ID NO: 815348 - DNA, 120 bp, Artificial Sequence
  ENSG00000261578_13 (sequence is synthesized)
tatccagttaagtcacatgccctgtgtttattcttctctttatttatttaagtactagtggttctgtctacagggattattgtgtttgttgagcttggagggaaattccccctgtgttta

SEQ ID NO: 815349 - DNA, 120 bp, Artificial Sequence
  ENSG00000261578_14 (sequence is synthesized)
ttctttagttcccaaacctatttattattttcttttgcatatccattagatagtcaaagtgttctgaactggaggtacaaacacattcatgtttctttttgtctcccttccctccctccc

SEQ ID NO: 815350 - DNA, 83 bp, Artificial Sequence
  ENSG00000261578_15 (sequence is synthesized)
acacattcatgtttctttttgtctcccttccctccctccctccctccctccctttctttctttctttctattcttttttcagg

SEQ ID NO: 815351 - DNA, 78 bp, Artificial Sequence
  ENSG00000261578_16 (sequence is synthesized)
tcaccatgctcagctaattttttaatttttagtagaaaaggtctggtcttgaactcctgagctcaagaaatcctccca

SEQ ID NO: 815352 - DNA, 120 bp, Artificial Sequence
  ENSG00000261578_17 (sequence is synthesized)
atatgtatatgtaacacataaataattacatacataatacaggaagacacagaaataattacatacatgatacaggaagacacagaaaaagagaaactggtctgataccagaagtatcaa

SEQ ID NO: 815353 - DNA, 120 bp, Artificial Sequence
  ENSG00000261578_18 (sequence is synthesized)
ctcaggaacaattttctactagctgagcctcagaagcagcaacttttccaaagtgaagtgatgaatggaggcgccagccctcctcctcaggttaagaaaggcaaagagccctgcttttgg

SEQ ID NO: 815354 - DNA, 120 bp, Artificial Sequence
  ENSG00000261578_19 (sequence is synthesized)
ctgtaaaaagccaggttccctaatcaggtgaaggcctgaggcagggactccttagggcagtgtaactagtagccaaggcacaggctccaaagggaggttgcctgggctcaagcccggctc

SEQ ID NO: 815355 - DNA, 120 bp, Artificial Sequence
  ENSG00000261578_20 (sequence is synthesized)
tgccactcacagctgggtgtcccggggtgagcctctcagcccctcgttcagcctcagttccacatgtgtaaatggaggtctagtagctacctcacagggcagttgttgaaaataagctaa

SEQ ID NO: 815356 - DNA, 120 bp, Artificial Sequence
  ENSG00000261578_21 (sequence is synthesized)
tgctcctaaaaccctgagaacagtgctctgtgtatgataagtgttcatagacgtcacattatttatttattttgaaaattcttcttttagtcaaacttataagttttctgtggctcaaaa

SEQ ID NO: 815357 - DNA, 120 bp, Artificial Sequence
  ENSG00000261578_22 (sequence is synthesized)
tattctcaaccagggtttctttagtggccatcagctcccagggggtgatatcatggaagctgttatgcttaggaatttgtttaaaaagacgtcctgccctgtgccccagtacatttcaac

SEQ ID NO: 815358 - DNA, 120 bp, Artificial Sequence
  ENSG00000261578_23 (sequence is synthesized)
accacccagccacacagccgccttctggcccaacactcttaaagacacagtgcttgggaaatgtcctcatgcccctttcctgaggcaggtttgccactgtttccccaggcctggcagtca

SEQ ID NO: 815359 - DNA, 120 bp, Artificial Sequence
  ENSG00000261578_24 (sequence is synthesized)
cagatggcagtcactgacctgctgtgatttgagagatggagagaaaaccttccactcttcttattctccctaatagcctcagtctctgccttcagttccacatttccctttggcgtaagc

SEQ ID NO: 815360 - DNA, 120 bp, Artificial Sequence
  ENSG00000261578_25 (sequence is synthesized)
tatgattgtcgtccaaggcccctcctagataggcaaggactcatgataccaagagtgtgatcaggggatagagatgagatgtctgggttggatgcgggagtggggtattttctaactaat

SEQ ID NO: 815361 - DNA, 120 bp, Artificial Sequence
  ENSG00000261578_26 (sequence is synthesized)
ggggtgcaaggggtacctgagcatgctctcaaaatgtgttataccctaaaaaatgtttttaaggtagtgtgttgatataacagttgttaagaccatgatgctagaggcaagatcgtgaga

SEQ ID NO: 815362 - DNA, 120 bp, Artificial Sequence
  ENSG00000261578_27 (sequence is synthesized)
tccatagagaaggtagttgaagggtagggccttttattcacatatatgctgccttctccaccaactgatgtgatatccttttatattcgtgactccagtgaacccacgcctctgaggatt

SEQ ID NO: 815363 - DNA, 120 bp, Artificial Sequence
  ENSG00000261578_28 (sequence is synthesized)
tacacccttgtatttgtactcctcttgagtctgggctggcctgtgactttaatcagtgcaatgcagaagtggttcagtgccagttctaagactacaaagagaaagaaaagttcaaccttc

SEQ ID NO: 815364 - DNA, 120 bp, Artificial Sequence
  ENSG00000261578_29 (sequence is synthesized)
caatatcccagcagacatcaggccccagctgtgtcaccagcttcacgcccacgagtgaccacaacaaacccagcagaaccaaccagcgcatcccagccctggttgcagaatcatgagtaa

SEQ ID NO: 815365 - DNA, 120 bp, Artificial Sequence
  ENSG00000261578_30 (sequence is synthesized)
ataaaatggttgctgttctaagccatcgtgctttggagtggtttcttatatgtcagtagatgactgaaacaaccaaagccacagcctccgcctcccccagccccattcccccactcctcc

SEQ ID NO: 815366 - DNA, 120 bp, Artificial Sequence
  ENSG00000261578_31 (sequence is synthesized)
ccacttgctaacctccatgaagccctgggacttgggcagctgaaggtgcagaaaagatgccaaatgaaaaagccaccctccttgacaacaacccagctgaggggagcaggcagagagggg

SEQ ID NO: 815367 - DNA, 120 bp, Artificial Sequence
  ENSG00000261578_32 (sequence is synthesized)
cggttgaaggaagcacgctgcctggtgtttgaaagcatatgaggggctgccctgagcgcatctccttacattcttgtctcaagaccacccagcaggcatggcccctccaggtaaccttgc

SEQ ID NO: 815368 - DNA, 120 bp, Artificial Sequence
  ENSG00000261578_33 (sequence is synthesized)
actctcctcccggacccctccccagtccccagacaaacccacctctccctcctggactctccatgggtcccttctccccacctgccactgggatcaggaagaataaagacctgaactcac

SEQ ID NO: 815369 - DNA, 120 bp, Artificial Sequence
  ENSG00000235288_0 (sequence is synthesized)
aaagtaagcactttcagagcccgacccttcaaggagctgctgctgcagaagggagattcttcaagcaatcactatgtcaacagacacaggtgtttcccttccttcatatgaggaagatca

SEQ ID NO: 815370 - DNA, 120 bp, Artificial Sequence
  ENSG00000235288_1 (sequence is synthesized)
gggatcaaaactcattcgaaaagctaaagaggcaccattcgtacccgttggaatagcgggttttgcagcaattgttgcatatggattatataaactgaagagcaggggaaatactaaaat

SEQ ID NO: 815371 - DNA, 120 bp, Artificial Sequence
  ENSG00000235288_2 (sequence is synthesized)
ctgttggtatgggctattccatgtatcgggaattctgggcaaaacctaagccttagaagaagagatgctgtcttggtcttgttggaggagcttgctttagttagatgtcttattattaaa

SEQ ID NO: 815372 - DNA, 120 bp, Artificial Sequence
  ENSG00000235288_3 (sequence is synthesized)
gttacctattattgttggaaataaactaatttgtatgggtttagatggtaacatggcattttgaatattggcttcctttcttgcaggcttgatttgcttggtgaccgaattactagtgac

SEQ ID NO: 815373 - DNA, 120 bp, Artificial Sequence
  ENSG00000235288_4 (sequence is synthesized)
aaagtaagcactttcagagcccgacccttcaaggagctgctgctgcagaagggtgcttctatgatgctccttcacccaactgtaccccatagtaagatgcccaggctcgggtgggcagaa

SEQ ID NO: 815374 - DNA, 120 bp, Artificial Sequence
  ENSG00000235288_5 (sequence is synthesized)
ggaggaaggagggacctgggaaccacgagtcacccatttcagtggaggttgaatacgcagaatcaggaagcacagaaatccacacccatatcataatgaaattgcagcacaccaaaggca

SEQ ID NO: 815375 - DNA, 120 bp, Artificial Sequence
  ENSG00000235288_6 (sequence is synthesized)
aagagaagatctttaatgcagccaaggaaaaagcacagattacagagagcagacgctgagactgagagtagacttcgtagtggccacagtgggagccggaagccatgggatacagtgagt

SEQ ID NO: 815376 - DNA, 120 bp, Artificial Sequence
  ENSG00000235288_7 (sequence is synthesized)
gatggttgttcaagaatctgctcacggtaaagggcatttccagatgggaaacagaatttatcacaacacgaaactcaggagagtgagactcaaggaactcactgaagaacgtacttccag

SEQ ID NO: 815377 - DNA, 120 bp, Artificial Sequence
  ENSG00000235288_8 (sequence is synthesized)
cagaaggagagtggtcctggagaaagggtgtgattctgagataggcagatgaacagagcagtcagtgaagacgtgagcaacggaaagcaacgtggactctaaagctctgttaactgggtg

SEQ ID NO: 815378 - DNA, 120 bp, Artificial Sequence
  ENSG00000235288_9 (sequence is synthesized)
accctggttatctgggttgcggggagaaaaattagagccctcaccaacaccacacagcaaataagctctgaatgttttaaagcctagaagatgctatgggagagcatcttcatgggctct

SEQ ID NO: 815379 - DNA, 120 bp, Artificial Sequence
  ENSG00000235288_10 (sequence is synthesized)
caaaaagtaagcactttcagagcccgacccttcaaggagctgctgctgcagaaggagccctgtccccggaagctcgctgtcacgaggggcctctgacatctccttcttgagagaaaggtc

SEQ ID NO: 815380 - DNA, 120 bp, Artificial Sequence
  ENSG00000235288_11 (sequence is synthesized)
gcctggcctgggtgaggtcgtagttcccgcgaccccgtgcttgcaagtactggctgcctcctactatagtgtaagctccaggaaggatcccgcgggggacctgacagctcacggtcctgg

SEQ ID NO: 815381 - DNA, 120 bp, Artificial Sequence
  ENSG00000235288_12 (sequence is synthesized)
ccgacaaccgccctgggagcggaatggatggagcccgcagtcgtcccggcgcactgggcaagctctgctcccactgtggcaggccagatctccattagcaaccagagcagctctcaccaa

SEQ ID NO: 815382 - DNA, 120 bp, Artificial Sequence
  ENSG00000235288_13 (sequence is synthesized)
taaacattggagaaactggtgccttaggagaaaggctagaatgtaaagacaagtccattaggatcccgcctgagctttttcaacccctagagtttaattaaaataatggagttgttcttg

SEQ ID NO: 815383 - DNA, 120 bp, Artificial Sequence
  ENSG00000235288_14 (sequence is synthesized)
cacaccttgtaccaggacccactttagattatttccaaggctctgaagcaattgtctagacacctgaccctattaccgttaaagattggcttgagtgaaacactttggctttcgacttgt

SEQ ID NO: 815384 - DNA, 120 bp, Artificial Sequence
  ENSG00000235288_15 (sequence is synthesized)
aaatgcactgaatgtatttaagcactagaaaaacttgtattaataattttgagttggtctggtgagttactccgaccttctccctgtaacctgttgcagaaataaactccgttctttccc

SEQ ID NO: 815385 - DNA, 120 bp, Artificial Sequence
  ENSG00000269386_0 (sequence is synthesized)
gcgcgtcctaggtcccccaggtctctccgggcctccggctccgtatagccgcgcatcctagcccgaagctgatgctgcccggtcggctccggccttcccggctgcctgacccgccgggcc

SEQ ID NO: 815386 - DNA, 120 bp, Artificial Sequence
  ENSG00000269386_1 (sequence is synthesized)
ccaagccccgggctccggcctgggcccagcggcctggagcgcggccttggcccgtctgcccgccgcctcgccgccacgacttcgcccgtctgtgccccaccggccgcacctttgaatagg

SEQ ID NO: 815387 - DNA, 120 bp, Artificial Sequence
  ENSG00000269386_2 (sequence is synthesized)
tagtcgtactcgtcgtcccgggtccccattgtcctggcgcttccggcgggatcggcgactccgcagccccaccacaaacacccgacgggggcggagccggcgccgcgcagagcggcggtt

SEQ ID NO: 815388 - DNA, 120 bp, Artificial Sequence
  ENSG00000269386_3 (sequence is synthesized)
gaatggcctatcagcggcgagtggagtagcgacgggcacccagcgaagccaatcagagatggaagtagtgctctgagggtgggcgccgcttggtaccaccctcctcgccctcggtgtcct

SEQ ID NO: 815389 - DNA, 120 bp, Artificial Sequence
  ENSG00000269386_4 (sequence is synthesized)
atcaggggcgagctcaagagggcggggcggaagactgcaggaatgaaatggattgacagaccaaataactaatgagaggcttgattgagaacctacccgactatcagaggacctgtccgg

SEQ ID NO: 815390 - DNA, 90 bp, Artificial Sequence
  ENSG00000269386_5 (sequence is synthesized)
ttgattgagaacctacccgactatcagaggacctgtccgggaagagaaatggggctacgtccagacagaatctcactgtatccggaattg

SEQ ID NO: 815391 - DNA, 120 bp, Artificial Sequence
  ENSG00000269386_6 (sequence is synthesized)
ggtctcgaactgctgacctcaagtgacctgcctgtctcggcctcacaaatggctgggattacaggcacgagacaccgtgcctggccctgggaacatgtttacatggactttgttcacttt

SEQ ID NO: 815392 - DNA, 120 bp, Artificial Sequence
  ENSG00000269386_7 (sequence is synthesized)
ctggccctgggaacatgtttacatggactttgttcactttttaaaacaaactgagggtaacttactagatctgtgaactaaagaaagagaaaaaaaagaaagaaaacaaacaagaacaaa

SEQ ID NO: 815393 - DNA, 120 bp, Artificial Sequence
  ENSG00000269387_0 (sequence is synthesized)
ttcagcctggcctggttgccctctgggtaataacgtcccagaaaaagtgtgtgaggtgacaagatggagaactgggggctctggctctctgggggaaaataaatgtaaattgtaattaaa

SEQ ID NO: 815394 - DNA, 69 bp, Artificial Sequence
  ENSG00000265801_0 (sequence is synthesized)
agtagtgtgttttaactgagcaaactgtctttccaaataatgaagcctccggataattgtaagaatgaa

SEQ ID NO: 815395 - DNA, 88 bp, Artificial Sequence
  ENSG00000265801_1 (sequence is synthesized)
tataatcccagcactttgggaggcagagacggacgtatcggacatactgagactctgtcttgtataattaaattaaaatttaaaaaaa

SEQ ID NO: 815396 - DNA, 120 bp, Artificial Sequence
  ENSG00000260848_0 (sequence is synthesized)
agagggagaaaggtacaagagagagaagggaagagagagagggagatagagcgaaaaaggagggtccccgacttcctcacaggtaattaaaaggactgttttcaaggttgcatgggcaaa

SEQ ID NO: 815397 - DNA, 120 bp, Artificial Sequence
  ENSG00000260848_1 (sequence is synthesized)
gacaattcggccctaatgaagcatcgatcgactgcagtaatgtagaaaggagctgacattcattcaaagacctcggaatgggaaggactgagtttcatcttcagcccgttggtggtcata

SEQ ID NO: 815398 - DNA, 120 bp, Artificial Sequence
  ENSG00000260848_2 (sequence is synthesized)
ttttcctgcggtggctgacacactcaggaggcgtgggatagaaggtgacagcttctgctactcggtgtccctgcagttgccagcctcccagggactctgctcacctaggaagaagatgga

SEQ ID NO: 815399 - DNA, 120 bp, Artificial Sequence
  ENSG00000260848_3 (sequence is synthesized)
gaacaatggtcactgtcatccccagaagagctcctcatctcccttagttgggacatcctgccagtgctttctctaccaggataacaccagccctcttcaactgcatttttctctacacac

SEQ ID NO: 815400 - DNA, 120 bp, Artificial Sequence
  ENSG00000260848_4 (sequence is synthesized)
aacattctcgtttgccaaggtcattccatggaaccaatgtccagcgtcttctctttccttagatcccacagtccatactcaacctccatgtgaagacagagaatatccttttgagttgga

SEQ ID NO: 815401 - DNA, 120 bp, Artificial Sequence
  ENSG00000260848_5 (sequence is synthesized)
agggatgttgactgacttcatccatttattttgttctcattccgagtctggatttgcctgcgtcccttgtagcttaagagcccttttaattaagacatgactcacagatcatcttcatgt

SEQ ID NO: 815402 - DNA, 120 bp, Artificial Sequence
  ENSG00000260848_6 (sequence is synthesized)
caacaggcaacaatattgtataccttcgaatttttcaataacgagccttgaacagaacaaactctttgtttcagtgaaaaatgctaattgaaagatttttttttctcaaaaggacattga

SEQ ID NO: 815403 - DNA, 120 bp, Artificial Sequence
  ENSG00000260848_7 (sequence is synthesized)
acgtaaaccaatgtactaagcaaaatgtagatgatgcctctccttttatctgctgttccttcaaacagaaaacaaagtaccaccccaaccaaccaactcttctggcaggaaaaagaaaga

SEQ ID NO: 815404 - DNA, 120 bp, Artificial Sequence
  ENSG00000260848_8 (sequence is synthesized)
tccttctcccccgtctccctttgtttttaagttactaaattcctttacgtttgttttcttaggaaagtgacattataggtcattaagcaactattaaaaacacaagtgagaaaacccaaa

SEQ ID NO: 815405 - DNA, 120 bp, Artificial Sequence
  ENSG00000260848_9 (sequence is synthesized)
gcgtgggtctttttcctctgatattcttttccctggttttcagaaaacagttttaagagttggaatatttttgttaatgtctttgtgggcatttccgtcatctttccatttgtaacagcc

SEQ ID NO: 815406 - DNA, 120 bp, Artificial Sequence
  ENSG00000260848_10 (sequence is synthesized)
cctaaataaggcagctaggggaaacctgccttgtcttagcacacctgctatgccaaaacaggaacatgcattcccccacaatgggatgggtgatttgccaaacagaccagagctcccaaa

SEQ ID NO: 815407 - DNA, 120 bp, Artificial Sequence
  ENSG00000260848_11 (sequence is synthesized)
ttacctgcctttttgcagtgctacacccaaaaatcaacccgttgactgatgaaatcaacccgtgtggaacttgattttcgacgtcctctcttcctcccacagttggacaagaaaggggaa

SEQ ID NO: 815408 - DNA, 120 bp, Artificial Sequence
  ENSG00000260848_12 (sequence is synthesized)
ggaaagagaaaagggagaaaagccctcttcccaccgggtaagtccaggtgagtcccattcaccaccgtcattgccattgtgcgaggctgcagcatggagctggcccccctctagccacag

SEQ ID NO: 815409 - DNA, 120 bp, Artificial Sequence
  ENSG00000260848_13 (sequence is synthesized)
gatcgagctggcttcagagcttccggggtctcatcctcttgcaaatttctttggtggtgaaatctatcaaaggaatctcaaaacagattacatggtaaattatcgtctccattctgggcc

SEQ ID NO: 815410 - DNA, 120 bp, Artificial Sequence
  ENSG00000260848_14 (sequence is synthesized)
actctccatgccccgctgtccggctccgacagacagccgtgggtgagctgccggtggaaagcctccgagataagaagattacagaatgtcatgtgcctccggcgactcaacttcacagct

SEQ ID NO: 815411 - DNA, 120 bp, Artificial Sequence
  ENSG00000260848_15 (sequence is synthesized)
aaacttctccagcccaggcagttcatctgattcgcatgggtcacaggctgtttcaattaatgcctctctaatgattcaagtgtgtgccctaatgtggaaggggaatagagagaagtcaag

SEQ ID NO: 815412 - DNA, 120 bp, Artificial Sequence
  ENSG00000260848_16 (sequence is synthesized)
ccagggaccttagcatgtctgtcctctccaccctctatctcagaatgctctttcccaagctgacttataagaaaggagaaaatgggatgggaaggaatatagaattcctttcagacagaa

SEQ ID NO: 815413 - DNA, 120 bp, Artificial Sequence
  ENSG00000260848_17 (sequence is synthesized)
acaagagagagaagggaagagagagagggagatagagcgaaaaaggagggtccccgacttcctcacagagaacatctgatgaaagccactgaggtacttgaattgcttctaaagacctcg

SEQ ID NO: 815414 - DNA, 120 bp, Artificial Sequence
  ENSG00000260848_18 (sequence is synthesized)
gttttttcaagagagaaagaaagaaaacagatcccctataaatgaggacaactttgactcgtaaacagttcatgcgctcagagaggaaaggcacctggtactttctaaaggaaagcacct

SEQ ID NO: 815415 - DNA, 120 bp, Artificial Sequence
  ENSG00000260848_19 (sequence is synthesized)
ccaaataccagcaccatgtggtgggagggcaatgctttgccttatcaaatggtactgaagcttgaggtctgtttctaccaccacgcctggagtaactgtcagggcctcttatttctcata

SEQ ID NO: 815416 - DNA, 120 bp, Artificial Sequence
  ENSG00000260848_20 (sequence is synthesized)
agaaaggtacaagagagagaagggaagagagagagggagatagagcgaaaaaggagggtccccgacttcctcacaggtttctgggaagctgcgttggaggctgtaggaccggatcccaca

SEQ ID NO: 815417 - DNA, 120 bp, Artificial Sequence
  ENSG00000234481_0 (sequence is synthesized)
tgaggcatactgcaacctgagcgtgggctaagcacttcttttccccaaccctctcatgcctcatctgttaaagggggctgatgggaccagcaacgatccagatggtggctgtgctctgtc

SEQ ID NO: 815418 - DNA, 120 bp, Artificial Sequence
  ENSG00000234481_1 (sequence is synthesized)
tgcgtgggtcccagagtgagaagctgaggtgccggccttgttgaacagggagggctgctctctgctctggagatggcactgtgctctcatgtccacattgtggaaggcggaagggcgaga

SEQ ID NO: 815419 - DNA, 120 bp, Artificial Sequence
  ENSG00000234481_2 (sequence is synthesized)
gaggctgggtgacacctcttctgtaaggagcttaacgagggctctgccctcagtacttaatcatctttctaaaggccccacctcttaacactatcacactggtgattacgtttcaacaca

SEQ ID NO: 815420 - DNA, 120 bp, Artificial Sequence
  ENSG00000234481_3 (sequence is synthesized)
caccttctggggctgtgggatgccaactccggggtcgctggatctcacagcaggctccagttgtctttcagtgccttagaaacacgagcgagtggttctgaacagccgcggtcttgcatg

SEQ ID NO: 815421 - DNA, 120 bp, Artificial Sequence
  ENSG00000234481_4 (sequence is synthesized)
cctgcccctcagcaacggccctgctccaaaccggtgttacagtgatctgattattgtaattgatgacattaggaataaggaatccacacagaataatacaggtgcctgtcatgccagagt

SEQ ID NO: 815422 - DNA, 120 bp, Artificial Sequence
  ENSG00000234481_5 (sequence is synthesized)
ggttttattcattgttagagaagttcataaagttgaaagaaagcatctacatgggctagaacagcaaaaagcatgttttagtcctttcttaatttgtgaataaaatgatgaattccagaa

SEQ ID NO: 815423 - DNA, 120 bp, Artificial Sequence
  ENSG00000234484_0 (sequence is synthesized)
tccaaatgcggtgttgaaagtcaccaactccggcttttcagggacattaaactgaggctcagagtacaggtggtactacaacaaatggataggagaaaaccagtaaaaccttatttgttg

SEQ ID NO: 815424 - DNA, 120 bp, Artificial Sequence
  ENSG00000234484_1 (sequence is synthesized)
aagaaatgactcataaaaaccctctaagttggtaacagatttggctatggtcaactgcagggaatctcctaggaagcggataaatctggcaattggaagtaaatttctaaggaaaatgtg

SEQ ID NO: 815425 - DNA, 120 bp, Artificial Sequence
  ENSG00000234484_2 (sequence is synthesized)
tctcagttaagagccaaatacccccccataaaccccaaagtccgtaagctttttttaaatttaatttaattttatttttctgagacggagcctcgctctatcacccaggctggagtgcag

SEQ ID NO: 815426 - DNA, 74 bp, Artificial Sequence
  ENSG00000234484_3 (sequence is synthesized)
gcagtggcatgatttcggctcactgcaatctccacctcctgagttcaagcgagaggctgaggcaggagaatggg

SEQ ID NO: 815427 - DNA, 120 bp, Artificial Sequence
  ENSG00000269967_0 (sequence is synthesized)
agtatcataaaaaaagcttgaggatagatgaatagtgttgaagctttgtaggcctagctacttacctatatatttcagtttcttcctgaaaatggttccgtagtcattatctttcatacc

SEQ ID NO: 815428 - DNA, 120 bp, Artificial Sequence
  ENSG00000269967_1 (sequence is synthesized)
tatttctgtctggttacagctattttttagagacttctaaataagcctttattggtaacttagggaaaaggcaagtgaaagaacttaagctttgtccctttttccagaggaatttatgat

SEQ ID NO: 815429 - DNA, 120 bp, Artificial Sequence
  ENSG00000269967_2 (sequence is synthesized)
gtagggattaatgtttggggagaagtgtgtgtgaatcagtgaccttcaaataattttgtattcttgaggcaattattatgtgacaaataataaaaaggtaaactgaaatagaaaggagag

SEQ ID NO: 815430 - DNA, 120 bp, Artificial Sequence
  ENSG00000168746_0 (sequence is synthesized)
gaccactcgtgtgtggatgagagcccctactgtgtgcaaagaaatgaactgagctctctggcctcacaccctaagcccaaccctgatccactaagcactggcagcttcaggcccaccact

SEQ ID NO: 815431 - DNA, 120 bp, Artificial Sequence
  ENSG00000168746_1 (sequence is synthesized)
gctggcctcccatctctttctccaagcaacggggttcccggcacagggctctgcccatcaacatttgtcatgagatgagctttccaccattcacactacttctgtgcccaccacgcagtg

SEQ ID NO: 815432 - DNA, 120 bp, Artificial Sequence
  ENSG00000168746_2 (sequence is synthesized)
tcagcggccacaccaggtatggattggtgaccagctgtgtgtggaccttgggcaagtcccttcctctctcctcctgagcctgtttcctctttgttgttgttgttgttgtggcagggtctc

SEQ ID NO: 815433 - DNA, 120 bp, Artificial Sequence
  ENSG00000168746_3 (sequence is synthesized)
gctagcacaccaacaccatccccccagatgcttcagttgttggcttcgaatggcttactatttccatttctacggagaactgccatctcaggaatcacctcaccctggagtttattcccc

SEQ ID NO: 815434 - DNA, 120 bp, Artificial Sequence
  ENSG00000168746_4 (sequence is synthesized)
atgaagatttgaacccacgtatgtctcactggacgtatgcccaggaactgattgggaaagtgaggcccaggggtgcaaaccagtccaatattagcggcagagctcttccctagacccgtc

SEQ ID NO: 815435 - DNA, 120 bp, Artificial Sequence
  ENSG00000168746_5 (sequence is synthesized)
ttgaagctgctgccccatcatttcctccaggtagctggtggatactgtttatctggtgctcactatgccctaggtaacactgtaagtgattttcattaaatttaatctcattcaatctta

SEQ ID NO: 815436 - DNA, 120 bp, Artificial Sequence
  ENSG00000168746_6 (sequence is synthesized)
catgatggaccacatttctgtgcagatgctgagtacacaccgtctcccactcccacggctgctttgcaaggacagtgttaatgatcctcactttgtaaacaaggaaaactgaagctcaga

SEQ ID NO: 815437 - DNA, 120 bp, Artificial Sequence
  ENSG00000168746_7 (sequence is synthesized)
aaggagggatggagggcggtaaggttgggcatcctacacatatggtgatatcattgaacattttgtgttgaagaatgatggagtgttgaacacagaatcagagaattttactttatttta

SEQ ID NO: 815438 - DNA, 120 bp, Artificial Sequence
  ENSG00000168746_8 (sequence is synthesized)
gcctgggcccacaccaccctcctgcctgtcttcagcctttgctagtggatccttttcccacttcgaagactccccttacatcctcctccatgttgtcctccaaatgtgctggctgagagc

SEQ ID NO: 815439 - DNA, 120 bp, Artificial Sequence
  ENSG00000168746_9 (sequence is synthesized)
ccagcgcctgaatcagagggacctgggtttgaatcccacctctgccattgaacaccagctgtctgaccttgactgcgttcctttgcttctctgggcttcagattccccatctgaataata

SEQ ID NO: 815440 - DNA, 120 bp, Artificial Sequence
  ENSG00000168746_10 (sequence is synthesized)
atagaagctaccttgggattgcctcaaggatcaaatgcgagagagttcaccttaaacaatgagtggagggcctggtgtgtaataaagcactcaataaatgttaactattattgatcttca

SEQ ID NO: 815441 - DNA, 120 bp, Artificial Sequence
  ENSG00000262006_0 (sequence is synthesized)
acgccacggggccaggcagttgagggcagctagggtgtcagacttgcccagagggacgtgggctgcagcaagtggaaagagaatcatagcagccactggctttgcagccacacggaccaa

SEQ ID NO: 815442 - DNA, 120 bp, Artificial Sequence
  ENSG00000262006_1 (sequence is synthesized)
agttcaaatcccagtaactcacgctctggcagtgtgatcttgagtatcacgaacacctctgagcctcggtgtcctcatgaaatggggagaagagttgaggttctcgtagtgatcagcgag

SEQ ID NO: 815443 - DNA, 120 bp, Artificial Sequence
  ENSG00000262006_2 (sequence is synthesized)
caggcctagcacagggactggcacacagggactctgatcaggggagggaaagcagtgagagagcatagcttcccagagagctctgaaggggtcgggggaccaaaggggaaagaaaatcac

SEQ ID NO: 815444 - DNA, 120 bp, Artificial Sequence
  ENSG00000262006_3 (sequence is synthesized)
aagctctctttgggactacctgtagggtgagccaggtttcatgagcaaggaaaacctccacttcatttccagtctctccataaagcctgatgttcctccttttgtgttcctctgggttat

SEQ ID NO: 815445 - DNA, 120 bp, Artificial Sequence
  ENSG00000265055_0 (sequence is synthesized)
cggagcgggcaccggcactgagggaaggtgtgagctgccgccgagggtcccaggcggaacgcgggaagggagcaggcaaggagcaaagtggcggcgggagcggcagctgtgacccctgga

SEQ ID NO: 815446 - DNA, 120 bp, Artificial Sequence
  ENSG00000265055_1 (sequence is synthesized)
ggggtttagtgtccggtccactcaagggagagttttagaccaagcagggccgactgcatttattagacgcccacagcatgcagggcgctccaagaggctggggcgaggaaaattagaacc

SEQ ID NO: 815447 - DNA, 120 bp, Artificial Sequence
  ENSG00000265055_2 (sequence is synthesized)
aagtctgctacccgccgggaacttgtcgtatttctggcgagggaagagacagcattcccacgccgatggttccagcaaagccccaggagtgctgttcctggtcttgtagttgacgcctcc

SEQ ID NO: 815448 - DNA, 120 bp, Artificial Sequence
  ENSG00000265055_3 (sequence is synthesized)
atccgggactcacctggtggagaaaatcgggttacctgcagagtcccgctcttttcaggtgcagccaaggatagggagatgatacgtcttaaagaattaacaagataaaccttggagtaa

SEQ ID NO: 815449 - DNA, 120 bp, Artificial Sequence
  ENSG00000265055_4 (sequence is synthesized)
cgtatgaagagttgttcatacactactgtatttatctcaggagcagaaagataacaactttctaaagatgtaccatatcctttgaccttgtaactatactgctaaaatttttttttttaa

SEQ ID NO: 815450 - DNA, 120 bp, Artificial Sequence
  ENSG00000265055_5 (sequence is synthesized)
ctcagatgatcctcccacctgagcctctgcagtagctgagatcacagtatgcaccactacaccccactaattcttttatttttggtaaagacacgtttaggagggacatttaggtttctc

SEQ ID NO: 815451 - DNA, 120 bp, Artificial Sequence
  ENSG00000265055_6 (sequence is synthesized)
ctgacttcaagaatgaagccacagaccctggtggtttatttaacaatgtgaagtagtcctgggaagttgtactttgagcaaggtccgcaagcagtattcctgcacttctccagtcatgcc

SEQ ID NO: 815452 - DNA, 120 bp, Artificial Sequence
  ENSG00000265055_7 (sequence is synthesized)
cttctccagtcatgccccagcgccaggtcggaagctgtccacatgcggggatggagcctggcgtcctgggcccacaaggacagggccctgaatatggacttagcagaacaaagttgggaa

SEQ ID NO: 815453 - DNA, 120 bp, Artificial Sequence
  ENSG00000265055_8 (sequence is synthesized)
ggcaactgcactcaccccttgtgcctcctgtggtacctgcccttcacggttcctggtggggacactcaggcaccagcttcatggctggactcagatgacacaacgccaggaaaaaaagta

SEQ ID NO: 815454 - DNA, 120 bp, Artificial Sequence
  ENSG00000265055_9 (sequence is synthesized)
aaagccccattaccctttccaatgcctagataaaatagatgtctaataaaaacctgctaataatcatttattgtttgtttatatacaattaaaacaaacattaaaacaatcatttaaaaa

SEQ ID NO: 815455 - DNA, 89 bp, Artificial Sequence
  ENSG00000265055_10 (sequence is synthesized)
agatgcccggagcgggcaccggcactgagggaaggtgtgagctgccgccgagggtcccaggcggaacgcgggaagggagcaggttggtc

SEQ ID NO: 815456 - DNA, 120 bp, Artificial Sequence
  ENSG00000262001_0 (sequence is synthesized)
tctttcaggatgaatgccatccacacaaaagagctcctgttgacatctcatttacaatctcccccaggacacagacaagaccctttcaataaatccagctcagaaacacctattgttcaa

SEQ ID NO: 815457 - DNA, 120 bp, Artificial Sequence
  ENSG00000262001_1 (sequence is synthesized)
aatcttcaactcgccacaggctaccaccactccctatggctttgcaaaattaaagatttagaagaaggatggggcggtggaagctatgaaaagaggcaggaaaaaagttcctttgacccg

SEQ ID NO: 815458 - DNA, 120 bp, Artificial Sequence
  ENSG00000262001_2 (sequence is synthesized)
atgctgtcagagagcgtgcatgaagaagaaagttaatggtatttccatttatataagaagcgcctaagaaatgcctgtgacgttcgtgaactagtgattgtgaattccaaatttgatgcc

SEQ ID NO: 815459 - DNA, 120 bp, Artificial Sequence
  ENSG00000262001_3 (sequence is synthesized)
aactttatgtgtaaagaagctaactcctgccaacatcgtggctgaatgaacagctgggactatgcttaacccattcccagcttataaaagccccatggcagctgcagtgaagcatcagaa

SEQ ID NO: 815460 - DNA, 120 bp, Artificial Sequence
  ENSG00000262001_4 (sequence is synthesized)
aagtatagtaagaagaaactgaatttgaagtggattcttacaaaggaaaaagaaaatcactattgtaactataccaaattactatgtatgtgagctcccagctttgacatcaagtcgtta

SEQ ID NO: 815461 - DNA, 120 bp, Artificial Sequence
  ENSG00000262001_5 (sequence is synthesized)
cagccacgtaatgggattacgggtgatttttactttattctttgggcttctctgaattttcctatattttgaaaaagcacctgcattattttgtaattataaaaaagtataaataagaat

SEQ ID NO: 815462 - DNA, 120 bp, Artificial Sequence
  ENSG00000262001_6 (sequence is synthesized)
aagtataaataagaattatacacactattatttcttcactgctatgacatgactagattacaatttttttctttttgagatgactttcggtcttgtttcccaggctggagtgcagtggca

SEQ ID NO: 815463 - DNA, 88 bp, Artificial Sequence
  ENSG00000262001_7 (sequence is synthesized)
gaggcatgagccatcgcgcctggcctagattatggaatttttgtattaccatgtatgttgccgtgtaatttttgttttgaaccttttt

SEQ ID NO: 815464 - DNA, 120 bp, Artificial Sequence
  ENSG00000262001_8 (sequence is synthesized)
aggtgattttcccgcctcagcctccagagtagctggactacaggccggtgccaccacacccagataatattttatattttttgtagaaatggggttttgttttgttgcccaggctggtct

SEQ ID NO: 815465 - DNA, 90 bp, Artificial Sequence
  ENSG00000262001_9 (sequence is synthesized)
caaaataggccttgagcatttgttttttgaaggaaattttatatgattaccacataaaaaaggaatactaaaaatctaacattatttgat

SEQ ID NO: 815466 - DNA, 120 bp, Artificial Sequence
  ENSG00000262001_10 (sequence is synthesized)
cacataaaaaaggaatactaaaaatctaacattatttgatatctcactgtctttgaaaacttaaggaacatggacccatacaaggcagccaaatattggccggtaactcctttacaactg

SEQ ID NO: 815467 - DNA, 120 bp, Artificial Sequence
  ENSG00000262001_11 (sequence is synthesized)
ggctgcagcatattttattaccttctcctgacaatttcttatctggctgcttatcatttccagaacataccatccttttgcatgcctttacgccagtggcaaacatggttgtttgcctcc

SEQ ID NO: 815468 - DNA, 120 bp, Artificial Sequence
  ENSG00000262001_12 (sequence is synthesized)
tcataaccattctctctatcctgcttgctaatgagaccccagtactgttgatcttttccacacagctgtgagttttaggggtggctaagcccctccctacacgtggaggctgaatcttca

SEQ ID NO: 815469 - DNA, 120 bp, Artificial Sequence
  ENSG00000262001_13 (sequence is synthesized)
ccagactaccagacaaagagatgagaagggaggttggatgggaatgttctgggaaagtttacctcactatttaaagccacccaagtcagggacatcctttttcttcctctggactttgtc

SEQ ID NO: 815470 - DNA, 120 bp, Artificial Sequence
  ENSG00000262001_14 (sequence is synthesized)
atctgcaagggatgctggaactgtggctgccatcgggggaccacagaaagtactggcctaagaagaccagctcagctgggcgtggtggcctgtaatcccagcattttgggaggatgcggg

SEQ ID NO: 815471 - DNA, 120 bp, Artificial Sequence
  ENSG00000262001_15 (sequence is synthesized)
tggggaggctgaggcaggagaattgcctgaatccgagaggtggaggttacagtgagcggagagggcgccactgcactcccgtctgggccaatgagagtgaaactccatctcaaaaaaaaa

SEQ ID NO: 815472 - DNA, 120 bp, Artificial Sequence
  ENSG00000262001_16 (sequence is synthesized)
gagaacacaagaggacagagctaaggtgtaggaatgcggaagaacttgcagaaactagagctagtcttcggattgaaatgaattaccaataaagggttgggaaatggatcaaggagaggg

SEQ ID NO: 815473 - DNA, 120 bp, Artificial Sequence
  ENSG00000262001_17 (sequence is synthesized)
aagcgttttgatggtccctgctccgaggttcagcccatttgcagttgctgataaccttgtcaggtcaccagataaaggcaagtcttgtcaccctcaggcacctggctgcgaagtaataaa

SEQ ID NO: 815474 - DNA, 120 bp, Artificial Sequence
  ENSG00000262001_18 (sequence is synthesized)
acggttgccttatcatctaaaggtggagtgagtcaaacctcagcccagggtaattatagtaaactgaaattgcctgtcctttacaaaaaaaaaggcggagggagagagaaaggaaaaggg

SEQ ID NO: 815475 - DNA, 120 bp, Artificial Sequence
  ENSG00000262001_19 (sequence is synthesized)
cttaaggcaggaaattgtgtttgtctttctccttggatttaaaaaagaaacgagcaaaacagcaaaaagttttccagggagtgagaaaagcagcccggctagactcccctcaccctgggt

SEQ ID NO: 815476 - DNA, 120 bp, Artificial Sequence
  ENSG00000262001_20 (sequence is synthesized)
taacaggattgccgacagatcaggcccacgtgatggtcaagaaaagaggctcaagctgatgaaaatccaagaaatcttcttaggagccttcctttctaaatgtaaatgactgagtcattg

SEQ ID NO: 815477 - DNA, 120 bp, Artificial Sequence
  ENSG00000262001_21 (sequence is synthesized)
ctttccaagtggagtcttgtgcctaagtgctagagcccactccttcctccccactgattcccttctttccatttctgccatttcccttcttcttttaataaaacttggacattttctgga

SEQ ID NO: 815478 - DNA, 81 bp, Artificial Sequence
  ENSG00000262003_0 (sequence is synthesized)
tcccgagtatttttttatttttagtagagacggctttcaccatgttagccaggagggtctggatctcctgacctcgtgatc

SEQ ID NO: 815479 - DNA, 120 bp, Artificial Sequence
  ENSG00000262003_1 (sequence is synthesized)
tcgtgatccacccacctcggcctcccacagtgctgggatgatgggcctgagccaccgcgcccggccggaaatgagtcttaagcaactgctggtagtgatgcctctgaagtggactaacgg

SEQ ID NO: 815480 - DNA, 120 bp, Artificial Sequence
  ENSG00000262003_2 (sequence is synthesized)
cctctgaagtggactaacggaaaacagcgcgtgacagaggacaacgtcttaaaaaacgctgattcttcaagtaactgtactccttggaatggtcaacccagtcccatctgtccttgatta

SEQ ID NO: 815481 - DNA, 120 bp, Artificial Sequence
  ENSG00000262003_3 (sequence is synthesized)
ccttctcacacagggatgtaacaggcggcagaaagaaggaattccctccccgcgagaaggcttgggaaggacagtctccatgttccgggagactctggactttaaggaagattccttcct

SEQ ID NO: 815482 - DNA, 120 bp, Artificial Sequence
  ENSG00000262003_4 (sequence is synthesized)
gctctagcttatcttttttagcttttttttaaagtattttttttgctgattaactccactctgccaatagtgtgtcctctcaaaggactccaagttcccacagtgcatatgtatccaatt

SEQ ID NO: 815483 - DNA, 120 bp, Artificial Sequence
  ENSG00000262003_5 (sequence is synthesized)
ttattgctttgcacttgatatacggctttgtaactgctcaaggcatatttttgtgaacattatgtttctgtctcccatactctaccctaagcttcttaacaataaaaatcatgccctgcc

SEQ ID NO: 815484 - DNA, 120 bp, Artificial Sequence; identical to SEQ ID NO: 807646
  ENSG00000260845_0 (sequence is synthesized)

SEQ ID NO: 815485 - DNA, 120 bp, Artificial Sequence; identical to SEQ ID NO: 807647
  ENSG00000260845_1 (sequence is synthesized)

SEQ ID NO: 815486 - DNA, 120 bp, Artificial Sequence; identical to SEQ ID NO: 807648
  ENSG00000260845_2 (sequence is synthesized)

SEQ ID NO: 815487 - DNA, 120 bp, Artificial Sequence; identical to SEQ ID NO: 807649
  ENSG00000260845_3 (sequence is synthesized)

SEQ ID NO: 815488 - DNA, 120 bp, Artificial Sequence; identical to SEQ ID NO: 807650
  ENSG00000260845_4 (sequence is synthesized)

SEQ ID NO: 815489 - DNA, 120 bp, Artificial Sequence; identical to SEQ ID NO: 807651
  ENSG00000260845_5 (sequence is synthesized)

SEQ ID NO: 815490 - DNA, 120 bp, Artificial Sequence; identical to SEQ ID NO: 807652
  ENSG00000260845_6 (sequence is synthesized)

SEQ ID NO: 815491 - DNA, 120 bp, Artificial Sequence
  ENSG00000260719_0 (sequence is synthesized)
gagcccaggagtttgaagctgcagtgaccccagattgcaccactgtcctccagcctgggcaatagagcaagaccctttctcaaaaatgaaaaagaacattctggagagacagagaagcaa

SEQ ID NO: 815492 - DNA, 80 bp, Artificial Sequence
  ENSG00000260719_1 (sequence is synthesized)
ttctcaaaaatgaaaaagaacattctggagagacagagaagcaagagggaccagaaaggagatgggctcttagatcctcc

SEQ ID NO: 815493 - DNA, 120 bp, Artificial Sequence
  ENSG00000260719_2 (sequence is synthesized)
taccacactggcccctgcctcatacttttaattaacataagtctctctctcttcagaccatttagcccccattttggttggaaaatatcagtgaggtgaggcttgggtaacaaaaatgtc

SEQ ID NO: 815494 - DNA, 120 bp, Artificial Sequence
  ENSG00000260719_3 (sequence is synthesized)
aagcctctgagaggagtccagggtataaaaacaggcgtgggcctgtttccaaaaccctgaccatcctcatgtctgtccctctttcctgctgctgagggtgggaggagcctggagcagagt

SEQ ID NO: 815495 - DNA, 120 bp, Artificial Sequence
  ENSG00000260719_4 (sequence is synthesized)
gtgacaagatgtcatcaggctctggagtccaggtgactttctgagattctctagtttgactcatccacagatgacaaaagtaaggcttaaagaaaagagatttcatgaccaaagtcgcat

SEQ ID NO: 815496 - DNA, 120 bp, Artificial Sequence
  ENSG00000260719_5 (sequence is synthesized)
aaaagagatttcatgaccaaagtcgcatgaccaatgtatgtgtgggtgagcatgtagtggccagggtggtggaagaatagatagaaatccctgggctgggcgaggtggctcatgcctgta

SEQ ID NO: 815497 - DNA, 74 bp, Artificial Sequence
  ENSG00000260719_6 (sequence is synthesized)
gtggtgccgcacgcctatgacgcagtgagccgagatcgtgccattccactccagcctgggcaacagagcgagac

SEQ ID NO: 815498 - DNA, 120 bp, Artificial Sequence
  ENSG00000260719_7 (sequence is synthesized)
aaaataaataaattaaataaataaatgaatgaaaagacagtctccgtcagactgccccatcctggtggttttgagccctgctgggaggagctggagatggagagtccgggggaaaccgcc

SEQ ID NO: 815499 - DNA, 120 bp, Artificial Sequence
  ENSG00000260719_8 (sequence is synthesized)
ggagatggagagtccgggggaaaccgcctttgcaaagaaagagatctaacttaactgactccaccttgcttctaacctccaagctgtctttgtttattcctgggcgtaggctgaactaac

SEQ ID NO: 815500 - DNA, 67 bp, Artificial Sequence
  ENSG00000260719_9 (sequence is synthesized)
ttagtttcttgcctggggactagactaacactagccataggattagaaattatggtttaggagtcat

SEQ ID NO: 815501 - DNA, 120 bp, Artificial Sequence
  ENSG00000260719_10 (sequence is synthesized)
cccccacccagaactgactctgcaagaagacagctctgactcctgatgatttcatctctgaccaatctgcactcccagatcccagcactttgggaggaccagacaggcagatcacaaggt

SEQ ID NO: 815502 - DNA, 89 bp, Artificial Sequence
  ENSG00000260719_11 (sequence is synthesized)
aggcagatcacaaggtcaggatcactctgggcgcctcctcggcctccacgccaactctccctgcgcttgaggagcccttcagcccgccg

SEQ ID NO: 815503 - DNA, 120 bp, Artificial Sequence
  ENSG00000260715_0 (sequence is synthesized)
gaataaagaaactataattcaaaactaaaaaataattgaaattgatttaaaaaagggagaaggagagtctccaaaagcaactgagaaggaatagaaagatctttaggaagagatcaaggg

SEQ ID NO: 815504 - DNA, 120 bp, Artificial Sequence
  ENSG00000260715_1 (sequence is synthesized)
gagaagtacgccaaatctggacttactgagaaggatcagtaagtttatagggagtagagcattctttagttgcaactaatatttagctttaaattcatggtgatgatgttgttgtgaaaa

SEQ ID NO: 815505 - DNA, 120 bp, Artificial Sequence
  ENSG00000260715_2 (sequence is synthesized)
aaaaatcattcatatttggaaaatccaattcaatgagctttatagagcatatccttagcttgtaccaaggtctgagacatacagacactaataggcacaatctcagtctaataattttct

SEQ ID NO: 815506 - DNA, 120 bp, Artificial Sequence
  ENSG00000260715_3 (sequence is synthesized)
agtttagccaggaagatatgttagcattgaaacaactaagttagagtgagaatgagatagtccctaggataagtgtgcaatcagacaagggaggggaaaatccccactggaaactaagag

SEQ ID NO: 815507 - DNA, 120 bp, Artificial Sequence
  ENSG00000260715_4 (sequence is synthesized)
gaaatgcttttggatgcaaataaagagcatcttgaagaatgaccacaatttcagtggtcagttgaaatggaaagcacaaaactcttccaattcctgaggtgcctggatgtatgtagattt

SEQ ID NO: 815508 - DNA, 120 bp, Artificial Sequence
  ENSG00000260715_5 (sequence is synthesized)
ctaagagttgagaaaaaatgaaacctaaaaattattgcaataatatttgctgatataacttctgcctggtcatggcaagcatgactgcaaatgttcaagattcagagtcagaggggaaat

SEQ ID NO: 815509 - DNA, 120 bp, Artificial Sequence
  ENSG00000260715_6 (sequence is synthesized)
aagaactaagacaatactgaatgtttcagtggatatttagaatctctttaattagatgaatgtcattgtgcaggtggtctactggaagaagggaaataaaagtttgttaatacagacatc

SEQ ID NO: 815510 - DNA, 120 bp, Artificial Sequence
  ENSG00000260715_7 (sequence is synthesized)
tgtgaggaacactgactgttctttgagggagtaacctggaaaatttgaaaatgaaacccctcccagtagcctggtctcggctctatgaagactgatttaccaacatgtacagtggacctc

SEQ ID NO: 815511 - DNA, 120 bp, Artificial Sequence
  ENSG00000260715_8 (sequence is synthesized)
tgaggaaagaagcagccatttcagagcccttaatgtgaatgcataggctgtgattattaggaagtgttaaaagcactggctggcagcttagataaacaagaatttgaaccatcacaaata

SEQ ID NO: 815512 - DNA, 120 bp, Artificial Sequence
  ENSG00000260715_9 (sequence is synthesized)
accagggggaagtggcatttgttagtattctggaagatgttaaatccatagcaaatgaaagtcttagcattgactgtttcaggcaacttagccgtaacctcaatgctaaaaaacagaaca

SEQ ID NO: 815513 - DNA, 120 bp, Artificial Sequence
  ENSG00000260715_10 (sequence is synthesized)
catagaggagcgttaccaatatttatcaagcttcccctttatgtctgacattttcaagtggattgactcattttatcatatgaagtagttgtattaaagcattcttcagccccaccccgc

SEQ ID NO: 815514 - DNA, 120 bp, Artificial Sequence
  ENSG00000260710_0 (sequence is synthesized)
ctgagtgaacccctgagtgaacatctgtggcttcctcccacctcgtctctggatgcactcctgttcgaatgggtgtctgtacatgcttgtcccctccccacggtggcgtgctcaatggtg

SEQ ID NO: 815515 - DNA, 120 bp, Artificial Sequence
  ENSG00000260710_1 (sequence is synthesized)
gctgagaggagatcatccagatgtcttagaggataaaaatgagcgggcagatgaagagatactcagggtgaggtttggaaggtgcaccaggcccaccccatggatgtggctcagagagcc

SEQ ID NO: 815516 - DNA, 120 bp, Artificial Sequence
  ENSG00000260711_0 (sequence is synthesized)
acctcccaccaggccccacctccaacattagagattacaattcaacatgagatttgggcggggacacagatccaatccatatcaggcatctaactcccacacctgtggctggagcccatg

SEQ ID NO: 815517 - DNA, 120 bp, Artificial Sequence
  ENSG00000260711_1 (sequence is synthesized)
actcccacacctgtggctggagcccatgccactcacctctcctactcaaaactagattgcaaattcccatccagagactctccaaatcagtgactgcaacccatgcttgttggcaggttc

SEQ ID NO: 815518 - DNA, 120 bp, Artificial Sequence
  ENSG00000260711_2 (sequence is synthesized)
ttatacaacccactatgagttagcatcaaaaatggctttctcctatcagcacccatgtttgggagtgtgtgtggggtacttcccagtgccgttccttctcatggtctcctgactgctccc

SEQ ID NO: 815519 - DNA, 120 bp, Artificial Sequence
  ENSG00000260711_3 (sequence is synthesized)
tgagtcagatcagggcttggtaaagtcaagaagctcctccatggcctggattgcctggctgtccagtgggaatgtgtatcacagagacagtttctccccgtctcacacactgaggattca

SEQ ID NO: 815520 - DNA, 120 bp, Artificial Sequence
  ENSG00000260711_4 (sequence is synthesized)
ctcacagtttcccaccagatccaccccgcaggctgctgcttgccttatttttcagagtatccaaagtttctttcacttttatgttgaactcccgtgttctttcttggataaaatttcaca

SEQ ID NO: 815521 - DNA, 120 bp, Artificial Sequence
  ENSG00000260711_5 (sequence is synthesized)
gtatgaatctctacacattattttgccttttccaaatgcatgaggcaagctggcaaagccactattctgctatgttggggagaaaaacagaaatggttgtcttaatagatacatgcttta

SEQ ID NO: 815522 - DNA, 120 bp, Artificial Sequence
  ENSG00000260711_6 (sequence is synthesized)
aaattaatctaagctagatgtagttttcaatgaactaatgtatattgagtgtctattatatatggaatccagagaagactgtttctttgtatttttttttgttttatagtactatgattc

SEQ ID NO: 815523 - DNA, 120 bp, Artificial Sequence
  ENSG00000260711_7 (sequence is synthesized)
atttgaaacctattatcagccttatgaccataccaagttgtgccagtcatttaaaatttttagtttttcattattcaacatacattgatatacagccttacatgcatgtctatgagaaag

SEQ ID NO: 815524 - DNA, 120 bp, Artificial Sequence
  ENSG00000260711_8 (sequence is synthesized)
tggtaggagaaagctctcagctgatttttgtgcaactgaatgaccattaatgcttggcaatcttcccaactgaatctgactcaagtagaaatagttaacattaatcaaaagagattaatt

SEQ ID NO: 815525 - DNA, 120 bp, Artificial Sequence
  ENSG00000260711_9 (sequence is synthesized)
acctgccaccagtcttttgaaacagtctgtcctgagaaaaagagaattcgatgatatgtaaatccatgttctttgggaatgcttatttctccttttcttgggatacagaagaagagacag

SEQ ID NO: 815526 - DNA, 120 bp, Artificial Sequence
  ENSG00000260711_10 (sequence is synthesized)
actcagatacaaacctcaatacctgaaatcattagctttggtcttggtgggatcaaaaccaaaaaataaaagctattaatatgtgattgaatacacaaacacacgtgcgtgcacacacac

SEQ ID NO: 815527 - DNA, 120 bp, Artificial Sequence
  ENSG00000260711_11 (sequence is synthesized)
acacacacatttattataaggaattggcatatgtgattatggcaactgggaagtccaagaatctgcaatgtggtctggcaggctcaagacccaagagagctgatggtgcagttccagtct

SEQ ID NO: 815528 - DNA, 120 bp, Artificial Sequence
  ENSG00000260711_12 (sequence is synthesized)
cacagaagtctgctggagaatttcctctggcttggagaaggtggtcttttcattctactcaggtcttctattgattggataaagtgcacatacatcatggagggcaatcttctttactca

SEQ ID NO: 815529 - DNA, 120 bp, Artificial Sequence
  ENSG00000260711_13 (sequence is synthesized)
gaggacatcagtgtcaatgttattcccatccagaaacaccttccaagttgacacataaaattaacaatacacttttcctcatctcacccaaatttaggttaagagttctggatacctgaa

SEQ ID NO: 815530 - DNA, 120 bp, Artificial Sequence
  ENSG00000260711_14 (sequence is synthesized)
ttaatattgccattggaatgccacttttacttttggagaaaaattagaaataacattttataaaattaaaaaactgtaggctaggcacactggtttacacctataatcccagcacttttg

SEQ ID NO: 815531 - DNA, 120 bp, Artificial Sequence
  ENSG00000260711_15 (sequence is synthesized)
ggaggatcccttgagcccaggagttcaagtctagcctgggcaacataaggagatcctgtctctacaaaaaaaaaaaaacaaaaaaactgtagctaggcatggtggcatgtgcttgtagtc

SEQ ID NO: 815532 - DNA, 74 bp, Artificial Sequence
  ENSG00000260711_16 (sequence is synthesized)
aaaaaaaaaacaaaaaaactgtagctaggcatggtggcatgtgcttgtagtctcagatactcagaaggctgagg

SEQ ID NO: 815533 - DNA, 120 bp, Artificial Sequence
  ENSG00000260711_17 (sequence is synthesized)
ctttatctcaaaaagaaaaaaaaatactgtgtttctggtttgcaattatactgagtattccagatatgaagtgaccagctcatagcacttgcaacaagattattctcttctgtagtctgg

SEQ ID NO: 815534 - DNA, 120 bp, Artificial Sequence
  ENSG00000260711_18 (sequence is synthesized)
ttgctatatttctaataatgtgactcaagatttcattcattttacctctggacttatcactctttgaactttacggtttatcactaggtctttttctctaaatgagctattgttaggcca

SEQ ID NO: 815535 - DNA, 120 bp, Artificial Sequence
  ENSG00000260711_19 (sequence is synthesized)
gttttcttcttcctcttgcaatcctgtttttcagtggttgatggcatttaacctaacgtggattttcacataacaattgctattttaaaatgttattagttacttaacccatatgattta

SEQ ID NO: 815536 - DNA, 120 bp, Artificial Sequence
  ENSG00000260711_20 (sequence is synthesized)
tcttagaaccacagaacctcagagctaaaatgaacattttataataacaaaccgggtccaaaataaatgacttacatagatttataaggtaattaatgacagagctgagtcaaggattca

SEQ ID NO: 815537 - DNA, 120 bp, Artificial Sequence
  ENSG00000260711_21 (sequence is synthesized)
tgtttcttgatgcctagtttagtagtctttgatgcaacagacatcaagtacatattatatctagaagtaatgtattaaagataatcttttggcttaaatcattttagaatgtgtaacatc

SEQ ID NO: 815538 - DNA, 120 bp, Artificial Sequence
  ENSG00000260711_22 (sequence is synthesized)
cttgtaatacaagtcattacccatttcaactagagaagaagatatatagaaatatcaaatgttaacaaggtaataggccattgcttttgtgtaattcaaaatttgataatgattttgttc

SEQ ID NO: 815539 - DNA, 120 bp, Artificial Sequence
  ENSG00000260711_23 (sequence is synthesized)
tttgccctagttattgataaaattcttaaagtgaacattgccctactgcctatttctaggtgctgttccctttaataagtatattttgaacatcatttgtttaaccctgttttaaccaat

SEQ ID NO: 815540 - DNA, 120 bp, Artificial Sequence
  ENSG00000260711_24 (sequence is synthesized)
tagaaatctatctacttgaattatgttcattctcttccctatgtattctttttgagtaacaaaatgagattattttaatatgactagaaaggaaatatatcttaatatgagggtgtacaa

SEQ ID NO: 815541 - DNA, 120 bp, Artificial Sequence
  ENSG00000260711_25 (sequence is synthesized)
acttttgttgtcttaaataaagattgacatgtcaaatctgtaaagaataaaagtagacctcatttttaggtttattattttttaaataccacaaatgacagtaaagttgccttcatttaa

SEQ ID NO: 815542 - DNA, 120 bp, Artificial Sequence
  ENSG00000260711_26 (sequence is synthesized)
attggtaccttcagttacccaccacccccaaccacttcaatagttaaatgcatcttacttaaacatattggaaaatttggagtagaatcttaattaatgttaatttcatgtctttgatga

SEQ ID NO: 815543 - DNA, 120 bp, Artificial Sequence
  ENSG00000260711_27 (sequence is synthesized)
tatacaatgtccctgcaagattaaaacatgataatgggagtaacaaaaaatcactgttatttagttttttaaattttgcatttagtgactttgaacagtacaaatcaacttaaaatgtat

SEQ ID NO: 815544 - DNA, 120 bp, Artificial Sequence
  ENSG00000260711_28 (sequence is synthesized)
atgtattgatctggcagttgacagcaggttgtcaaagtgccttatggtggaagttgtaatagatgatatctacgtcctcctctaatgagtgagtctaccaaagaccatggagaggaaaat

SEQ ID NO: 815545 - DNA, 120 bp, Artificial Sequence
  ENSG00000260711_29 (sequence is synthesized)
gtgcctcttattgcctgactcctgatgaataagacttcagtgaagtgcagaaaacaggcctctgctaggtctatccatgacaggcaagttacccaaatgaaaaccttgggctctgtctca

SEQ ID NO: 815546 - DNA, 120 bp, Artificial Sequence
  ENSG00000260711_30 (sequence is synthesized)
gctgtcaccctaactttcaagtgacagcagctagcctttcaaagttctaagcacctttgaagagtttctgataacacatttaaaagtattatcacagatgaaagagaattcattatgtca

SEQ ID NO: 815547 - DNA, 120 bp, Artificial Sequence
  ENSG00000260711_31 (sequence is synthesized)
gacctacctcaaaagttttaagtttgttcttaagtcctttcagagaaattaacaatccaggaataaatcttttaatttaccctacctattgtggttactagtacaaggcacctttctgat

SEQ ID NO: 815548 - DNA, 120 bp, Artificial Sequence
  ENSG00000260711_32 (sequence is synthesized)
aatgaaacagaaatcctttcattcctggaatttcctgttgggagtgtagagttttctgagcaatatgtaacgttggttagttacgcaatatgttggattttactgccagctttgtttaaa

SEQ ID NO: 815549 - DNA, 120 bp, Artificial Sequence
  ENSG00000260711_33 (sequence is synthesized)
aagggtgtgagaggctttgaccaacaggaatgtgaagtcaaagttaagtatggcatcatcttaccacctgtcacatgaataaacccggattcataagcaaatatgttatacatttaagtg

SEQ ID NO: 815550 - DNA, 120 bp, Artificial Sequence
  ENSG00000260711_34 (sequence is synthesized)
tttttattaactcagataagctaactataaaatagttttatctttacctgtatataatttggagaaactatctttttccctccaggaaaatgttagtggagaaaaattggtccccaaagt

SEQ ID NO: 815551 - DNA, 120 bp, Artificial Sequence
  ENSG00000260711_35 (sequence is synthesized)
tgcatacaaaagttattaaacatgtgagggaggttgtcttcagtgattgcaggggagatggatggatctggagatatgctcataatatatttaaatcccagtacatgggtgagagtcaag

SEQ ID NO: 815552 - DNA, 120 bp, Artificial Sequence
  ENSG00000260711_36 (sequence is synthesized)
tcttcagcactatggcaaacctgctaagattcaggcccctgctctctcctctgtctctagctacttggataggtgcttagttctcccacataacatttcaagatctgtttagaataaccc

SEQ ID NO: 815553 - DNA, 120 bp, Artificial Sequence
  ENSG00000260711_37 (sequence is synthesized)
ctcccaatcttatgcagaaaagcatccatatgctgtttttaaggatatagagactatgttgtagtctccttcaataatacattacctatttttaataactttaagcctcagaaatttctt

SEQ ID NO: 815554 - DNA, 120 bp, Artificial Sequence
  ENSG00000260711_38 (sequence is synthesized)
aggttaatatctaatctaattttctctgtaaggcagttctcaaccttagcactattgacattctgggctggataatcctttgctggtggggagcaggggggacttgcctgtgcattatga

SEQ ID NO: 815555 - DNA, 120 bp, Artificial Sequence
  ENSG00000260711_39 (sequence is synthesized)
gatagatgtttggcagcatgcctgggctctactcactagatgccagtagcaccctgctcccggttatgattgccaaaaatgtctccaaacattgtcacatgttccataggggtcaaaatt

SEQ ID NO: 815556 - DNA, 120 bp, Artificial Sequence
  ENSG00000260711_40 (sequence is synthesized)
gcccctgtttgagaaccactgctctaagacagcatagaatgttagataactgtccagtttttattttctcttttccacttggctgtgatttacttgagatctcacttaagaggtgagact

SEQ ID NO: 815557 - DNA, 120 bp, Artificial Sequence
  ENSG00000260711_41 (sequence is synthesized)
ggaacctgggtttcctaacttcactgttagtttttttcctaacacaccatgctttcttggtttaagatgctctgataccctacttatgggcttgtccagctatgagttctgttacagtat

SEQ ID NO: 815558 - DNA, 120 bp, Artificial Sequence
  ENSG00000260711_42 (sequence is synthesized)
agctaaccatttagtaacctactccacattatgcacataaaatctgtagttctccttaatatccacttgtacatattgttttggcttgtttctcccagaagcaatcctgaaatgggaatt

SEQ ID NO: 815559 - DNA, 120 bp, Artificial Sequence
  ENSG00000260711_43 (sequence is synthesized)
tgtgtaaaagcggcttattaggaggtgttctcaggaaaaattggtagaggagtggggaagtggccagggaagagaaggaaacaaaacaatggtacaatgtcaggcaaacttccaagcaag

SEQ ID NO: 815560 - DNA, 120 bp, Artificial Sequence
  ENSG00000260711_44 (sequence is synthesized)
taattttagctcagtccccctggagagccctggagacagtgtagatcatatctcagaactgttccaatcaggtacaagagaaaaaaactacagtgtgcatacttccctgcccatcagtca

SEQ ID NO: 815561 - DNA, 120 bp, Artificial Sequence
  ENSG00000260711_45 (sequence is synthesized)
aaactacagtgtgcatacttccctgcccatcagtcattgtttgaggtggagtttcttagccttgatactattgacattttgggggtaattctttggttttttttgtttttgtttttgttt

SEQ ID NO: 815562 - DNA, 120 bp, Artificial Sequence
  ENSG00000260711_46 (sequence is synthesized)
cattgtaggctgtctggctacaatctctggcttctatgtgttagatgccagtagcctcccagccacctttcccggcccggttatgacaaccaaaagtatctctagacactttgactcctg

SEQ ID NO: 815563 - DNA, 120 bp, Artificial Sequence
  ENSG00000260711_47 (sequence is synthesized)
gagctcaaagtcacgtcctcattcagaaccactggtttaagtgtccctggggagatgtaaatttccaggaaatttactcaggcaaaatggtctttggcagcttaagagcagccctctgac

SEQ ID NO: 815564 - DNA, 120 bp, Artificial Sequence
  ENSG00000260711_48 (sequence is synthesized)
tgacactggcattggctgtgggggtgaaagcacaccaggagccatgtgcgtgaaaaggttaatgaattccagtagctatggttggagtgctgatatcatgtgctacctgtatattgactt

SEQ ID NO: 815565 - DNA, 120 bp, Artificial Sequence
  ENSG00000260711_49 (sequence is synthesized)
attaaatttctccttttcagccatgtgagcatatttgatataaaggcacagttttctttgaagggcttttggtggactgagtcaacccagtgtgccacatgttatagtcagtgccactag

SEQ ID NO: 815566 - DNA, 120 bp, Artificial Sequence
  ENSG00000260711_50 (sequence is synthesized)
agcagtatctgactcatcctactgttgccattatacaccataaatacctctccactgaggctaattttaagctctgtggaattagtttgatcagaaacctgaatcaagaaagaatttcat

SEQ ID NO: 815567 - DNA, 120 bp, Artificial Sequence
  ENSG00000260711_51 (sequence is synthesized)
aagttggaaccattcctgctagactagacttactgatttttgtttcactctaatgacagaaaatcaatgtgttttggctgtgtttttctaatcttgaatctatttttgttgtacctgctg

SEQ ID NO: 815568 - DNA, 120 bp, Artificial Sequence
  ENSG00000260711_52 (sequence is synthesized)
tgcccaatttaccattcattcattcaaaaagtgtttactgagtgcctaatatgtgcccagcgctttgcttggtaataggaatacaataggagacaaaagagagatggttgctgtattaat

SEQ ID NO: 815569 - DNA, 120 bp, Artificial Sequence
  ENSG00000260711_53 (sequence is synthesized)
ggaacttccagtctagtaagggagaaagacaagaaattagttacagttcaaggagcaggattgtctgaaaatagccttgaattctcactctaggtttcctggactgtgagaacgggggag

SEQ ID NO: 815570 - DNA, 120 bp, Artificial Sequence
  ENSG00000260711_54 (sequence is synthesized)
ttctcttctatgtcatgggaggggctgtgctcaaatcttatgagactggtggctttgtcttcccagcagaggtgatttcaactttgcaggaaagctggcattcttaaacaactccagtaa

SEQ ID NO: 815571 - DNA, 120 bp, Artificial Sequence
  ENSG00000260711_55 (sequence is synthesized)
gcagcctgctgggctgtcaaagtcagactgcctggcaccaagtgtattcctccaatgttaaggctgtataaacagggagaatagcagagaggccattgtctctctaactagaagcaaatc

SEQ ID NO: 815572 - DNA, 120 bp, Artificial Sequence
  ENSG00000260711_56 (sequence is synthesized)
cccatagtattggttcttgtaggaggagaatgagatacccatatcttttgttctctcactaaccgtggcattttacttgtaagttttctctttccccaataaagtatatctttaacccat

SEQ ID NO: 815573 - DNA, 120 bp, Artificial Sequence
  ENSG00000251002_0 (sequence is synthesized)
gagaatcatgatgaggcattaaagaagaggaggagtgtctcaagggaggtgagctggaggtgatgcaagcctcagactcagggctgggacccttgggactcaaaagagagaaaaggtgga

SEQ ID NO: 815574 - DNA, 120 bp, Artificial Sequence
  ENSG00000251002_1 (sequence is synthesized)
gaaaagagaaagctactattttcttcattttgcccctgctaacatccaatgcacttaggagcctcgatgtctgctctccaagagtggagagaggatgccagacagatatttgagcagaac

SEQ ID NO: 815575 - DNA, 120 bp, Artificial Sequence
  ENSG00000251002_2 (sequence is synthesized)
aaagagagccaacaggatgaaggcattccctggctggttggacaagcaactgaagaacaggaacagaagtgaatgaaaagagaagatgctgtgtttgtgttttctcttggttagaatgct

SEQ ID NO: 815576 - DNA, 120 bp, Artificial Sequence
  ENSG00000251002_3 (sequence is synthesized)
gtgagtcaggaccttagctgctgggtgtcctgggactgccttcgatgaagaacctgaggctcaccttgcttaagtgacttgagcagcttcacgcatcttagaaaactgcaaattggaaca

SEQ ID NO: 815577 - DNA, 120 bp, Artificial Sequence
  ENSG00000251002_4 (sequence is synthesized)
gcagagctgtgcctctggccatttcctggaactacagaggagcaacttgccccggtttccagtgggtgatgttcctcttctgccacagtccctggcgatgttgatgtgattgccatcaga

SEQ ID NO: 815578 - DNA, 120 bp, Artificial Sequence
  ENSG00000251002_5 (sequence is synthesized)
gctcagaagcacagagcagaatcatcccctggaggaggattcccttcagtgtaagaagttcttacagaattaatcctcaaagactgtgggtggactctgccaggtttttccccgggtgta

SEQ ID NO: 815579 - DNA, 120 bp, Artificial Sequence
  ENSG00000251002_6 (sequence is synthesized)
ccagaagagaggaagagccctcaaatacaggaaagtgctcttttcagtgacagtagttcttttgggccctgtggctaagtgtgctcccaccccagcagtaagatcacagctaatcctgag

SEQ ID NO: 815580 - DNA, 120 bp, Artificial Sequence
  ENSG00000251002_7 (sequence is synthesized)
aggcaagagctcacaccaggctactgaaagaaaaagtgtcctttgtggattgcaagaggaactgggacacactgctggaaatgaagtggcaggtcataaactatcataaactcaggagga

SEQ ID NO: 815581 - DNA, 120 bp, Artificial Sequence
  ENSG00000251002_8 (sequence is synthesized)
gaggtgttcctttttgagacactcatcacaactagagagaatgcagctaagaaaatgcagtctttagggggacctggactgttgaagtatttgagctattcggaggaaatagaaacttgg

SEQ ID NO: 815582 - DNA, 120 bp, Artificial Sequence
  ENSG00000251002_9 (sequence is synthesized)
gaatgagttgactgggcaccactgggaaatgtgggcagctccaggctgaactagagaaggggcatgtcaaaggtcacttatttgtggcttgaccctttggaggccagatgtaagaatcaa

SEQ ID NO: 815583 - DNA, 120 bp, Artificial Sequence
  ENSG00000251002_10 (sequence is synthesized)
tttctcacaggtcccatgctaacgcttttcatatttatttccatctgagactcacttaggctaggcaaatatcccatgggtctgtacctctccagtgctttcttgctcatgtaaaattag

SEQ ID NO: 815584 - DNA, 120 bp, Artificial Sequence
  ENSG00000251002_11 (sequence is synthesized)
ctcattggaatgaataaagagaatggtattactttggctcgaacacgaatgagcactttcactttgtcatagtgtaaatattaaagttgtaagagacagcccagggaccaactatttttt

SEQ ID NO: 815585 - DNA, 120 bp, Artificial Sequence
  ENSG00000251002_12 (sequence is synthesized)
ttttaaagatccaagtgcttgcatagtttctaaaattctacaccggggaactatatcctcattcagcactgagactccttggttccctaaaaccaaagtctccaggtgccttcaggggcc

SEQ ID NO: 815586 - DNA, 120 bp, Artificial Sequence
  ENSG00000251002_13 (sequence is synthesized)
aaccaagatggagctccttatagacccatgcaatgtcagaactggaaaacttagaaatctttcagtccacccatcattttatgggtggcaaactgagatccagagaatgctcaaatctca

SEQ ID NO: 815587 - DNA, 120 bp, Artificial Sequence
  ENSG00000251002_14 (sequence is synthesized)
taattagctatgaaaggttatgattaaaatgcaaatttggggcctccaatttggtcctcttttcactctccttcttgctggggaaagaacagtgattccttgattggcagagcagaaaat

SEQ ID NO: 815588 - DNA, 120 bp, Artificial Sequence
  ENSG00000251002_15 (sequence is synthesized)
atcttcagtttttaggatgactttattcccctaaagagtatctttgtcacatctcctccttgtccatttttagagactctacagtgtttagctactggtagatttgttctagtggatctg

SEQ ID NO: 815589 - DNA, 120 bp, Artificial Sequence
  ENSG00000251002_16 (sequence is synthesized)
gtacaaatcttatagaaatatctacaattattccatgttattctgaaattattcatacagcatttcttctgttttattagccatttttaagggagaaggaacctaagattaattgctatg

SEQ ID NO: 815590 - DNA, 120 bp, Artificial Sequence
  ENSG00000251002_17 (sequence is synthesized)
gctacatgtcatgctcaccaatgaactcacctcattttaatcctcatgatctattatagtaggaatgcttgttgtacataagtattcaggattactgaatccacttgaattttttgagga

SEQ ID NO: 815591 - DNA, 120 bp, Artificial Sequence
  ENSG00000251002_18 (sequence is synthesized)
cagtggccaaatacaattctgtggtcaatttaggctgctcctactgttccctgatgttaggcattttcttccactaggtcctctggaaggatgaaaaacaaggcattattatacttttga

SEQ ID NO: 815592 - DNA, 120 bp, Artificial Sequence
  ENSG00000251002_19 (sequence is synthesized)
gcagatatcctgaactatctttcctcatcagaacatgcatttctggcaagacagtggctctcattccctggcttttccccccagtttccctagatcaggtccctataattctttagtgga

SEQ ID NO: 815593 - DNA, 120 bp, Artificial Sequence
  ENSG00000251002_20 (sequence is synthesized)
agaagccaaagaacaggaattaggctatttatccttggaattcatttagaaaaacttggtttttcttggccaagcactacagtgaaaactaacttcatgtagacagcatgggccaaatga

SEQ ID NO: 815594 - DNA, 120 bp, Artificial Sequence
  ENSG00000251002_21 (sequence is synthesized)
gatgtctgatctgaaagcatgttgtggtccgctacacacaagagcaaaagaagagcaggaaggagctcagtgccaagaccatagccacaggaagaaaaccagctcttagggctgcagctc

SEQ ID NO: 815595 - DNA, 120 bp, Artificial Sequence
  ENSG00000251002_22 (sequence is synthesized)
taaagacaggccaggtcattacaggaacgtctgctcccttagccttgccagacagaggagggttaagaaaggaactgctgaccctgatatgcaaactgccacgagtgcttcctgcctttc

SEQ ID NO: 815596 - DNA, 120 bp, Artificial Sequence
  ENSG00000251002_23 (sequence is synthesized)
tatcagcatcagatggctagcgatggatggctgtaagattgatgtaattaacattttattttcagggccacagtgctggttgggtgcaccagacaaatcaaccaacagattaaagagtga

SEQ ID NO: 815597 - DNA, 120 bp, Artificial Sequence
  ENSG00000251002_24 (sequence is synthesized)
ctcgtcccctgcagtcctcaggcagcaggctgcccttctgcaatcagtttacttctggaagctgctgtagatactcagcctaattggattttccgtgtgtaaagatatgaagaacctgag

SEQ ID NO: 815598 - DNA, 120 bp, Artificial Sequence
  ENSG00000251002_25 (sequence is synthesized)
tccccgataacctcaaggagagagttgcttttcctgttcttcaaatgagttccttgaattcacactctatttctttgaatttgcacagactgttgaggaacaggcggcagggtcactcta

SEQ ID NO: 815599 - DNA, 120 bp, Artificial Sequence
  ENSG00000251002_26 (sequence is synthesized)
acagttgataatagctctatgtgctacctctccaagaaacaaatttgcattttaacctgccccttcaatggctgaacttcaaagggtcactgatgaatgccacagcagagaaaactgcaa

SEQ ID NO: 815600 - DNA, 120 bp, Artificial Sequence
  ENSG00000251002_27 (sequence is synthesized)
agaactctacttgaagtctgaaacaaattcaggaaaaaattaaaggcagttttattttacatagtagggagtagattttaggaactccttgctcctggggtagagcatatgaatgtgtat

SEQ ID NO: 815601 - DNA, 120 bp, Artificial Sequence
  ENSG00000251002_28 (sequence is synthesized)
tctagagagattcagacaaattcacttatgttagacaaatgactttaagggaaactaggaatgttttcagggcacataaccttgtatttaaaagatactgttattagatcattttttctc

SEQ ID NO: 815602 - DNA, 120 bp, Artificial Sequence
  ENSG00000251002_29 (sequence is synthesized)
taagtagtagagacagagtcaaaaccagatcttcctgccctctctatcatataaaccacttacactgaattacaaagtgaaactgatctatggtgaattgtactaatgttctgcttctgc

SEQ ID NO: 815603 - DNA, 120 bp, Artificial Sequence
  ENSG00000251002_30 (sequence is synthesized)
catgggcaccagaggagatacctttctttgttgacactaatctcaaaggctaaattagatcccccaaactcatttccattaataacatgtcaaaggcttgtgtcatgcgttaatttatcc

SEQ ID NO: 815604 - DNA, 120 bp, Artificial Sequence
  ENSG00000251002_31 (sequence is synthesized)
tagctgctgggtgtcctgggactgccttcgggtcacttctgctctgcatttgggaaggggcttacccatgtctttgaaactgtgcacacactcaaaaagagataataaagcacaaggtgg

SEQ ID NO: 815605 - DNA, 120 bp, Artificial Sequence
  ENSG00000251002_32 (sequence is synthesized)
caaaaagaatgaacataaattccttatacaactcaatgacaacctcgctcaccctggaaggagcttggatttgcagctgtaacagctccctcttgtgactgtatatgtgaactcctttac

SEQ ID NO: 815606 - DNA, 120 bp, Artificial Sequence
  ENSG00000251002_33 (sequence is synthesized)
atagaactaggaaccaagtcagttagcaatctttcagggtttgtgtttcaggtctaaagatagattattttggatgtgctacctccctctagtgacaaggctcagcaaagagcttcctac

SEQ ID NO: 815607 - DNA, 120 bp, Artificial Sequence
  ENSG00000251002_34 (sequence is synthesized)
cataattctctaagaaagatcaaattattttcagtcactttggggttttagaattatttcctaaaattcataaggaaacaaaaaagagcccacattgccaaagcaagactaaccaaaaaa

SEQ ID NO: 815608 - DNA, 88 bp, Artificial Sequence
  ENSG00000251002_35 (sequence is synthesized)
aaaaagagcccacattgccaaagcaagactaaccaaaaaagaacaaatctggaagcatcacattacccaacttcaggctatgctctaa

SEQ ID NO: 815609 - DNA, 120 bp, Artificial Sequence
  ENSG00000251002_36 (sequence is synthesized)
gccagaaatgaagccaaattcttacagccaactgatctttgacaaaccaaacaaaaacataatgtggggaagggacaccctattcaataaatggttgtgggataattggctagccacatg

SEQ ID NO: 815610 - DNA, 72 bp, Artificial Sequence
  ENSG00000251002_37 (sequence is synthesized)
tattcaataaatggttgtgggataattggctagccacatgtagaagaataatcaaggacttaaatctaagac

SEQ ID NO: 815611 - DNA, 63 bp, Artificial Sequence
  ENSG00000251002_38 (sequence is synthesized)
gaagataccatcgcaaatgtaacaagaacaaagatatatagatgggacctaattaaactaaaa

SEQ ID NO: 815612 - DNA, 79 bp, Artificial Sequence
  ENSG00000251002_39 (sequence is synthesized)
gagaatctaactcaatgactcaaatcagcaagaaaaaacaaacaatcccatcaaaaagtgagctaaggacatgactaga

SEQ ID NO: 815613 - DNA, 120 bp, Artificial Sequence
  ENSG00000251002_40 (sequence is synthesized)
aaacaatcccatcaaaaagtgagctaaggacatgactagacaattctcagaaaagatataccaatggcccacaagcatctggaaatgctcaacctcattatttatcagggaaatgcaaat

SEQ ID NO: 815614 - DNA, 120 bp, Artificial Sequence
  ENSG00000251002_41 (sequence is synthesized)
caatgtgataccacctcactcctgcaataatggtcataataaaaaaatttaaaaaaatacccattggtttggatgcagtgaaaagggaacacttttacactgttgatgggaatgtaatct

SEQ ID NO: 815615 - DNA, 82 bp, Artificial Sequence
  ENSG00000251002_42 (sequence is synthesized)
tccttaaagaactaaaagtagatctactgtttgatccagcaatcccactactaggtatttacccagaggaaaagaagtcatt

SEQ ID NO: 815616 - DNA, 70 bp, Artificial Sequence
  ENSG00000251002_43 (sequence is synthesized)
cacaacagaataaagaaaatgtggtatatatataccatggaatacaacccagccataaaaaagaacaaaa

SEQ ID NO: 815617 - DNA, 120 bp, Artificial Sequence
  ENSG00000251002_44 (sequence is synthesized)
tataccatggaatacaacccagccataaaaaagaacaaaataatggcatttgcagcaacgtagatggaaatggagattattattctaagtgaagtgtattcatctgttttcacggtgctg

SEQ ID NO: 815618 - DNA, 120 bp, Artificial Sequence
  ENSG00000251002_45 (sequence is synthesized)
ataaagacacacccgagactgggcaatttacaaagaaagaggtttaattggacttatagttccatatggctgggaaagcctctcaatcatggcgtaaggcaagaaagagcaagtcatgtc

SEQ ID NO: 815619 - DNA, 84 bp, Artificial Sequence
  ENSG00000251002_46 (sequence is synthesized)
catggcgtaaggcaagaaagagcaagtcatgtcttacatggatagtggcaagcaaaaaatgagagagagcttgtgcaggggaat

SEQ ID NO: 815620 - DNA, 74 bp, Artificial Sequence
  ENSG00000251002_47 (sequence is synthesized)
cttccaccccgacccttcccaaatatcacttccttgcatttcaaaactaatcataccttcccaacagtccccca

SEQ ID NO: 815621 - DNA, 60 bp, Artificial Sequence
  ENSG00000251002_48 (sequence is synthesized)
catatacttccaccccgacccttcccaaatatcacttccttgcatttcaaaactaatcat

SEQ ID NO: 815622 - DNA, 68 bp, Artificial Sequence
  ENSG00000251002_49 (sequence is synthesized)
aagtctcatcctgttacttcctagatacagtgagggtacagacattgggtaaatacagccattccaaa

SEQ ID NO: 815623 - DNA, 120 bp, Artificial Sequence
  ENSG00000251002_50 (sequence is synthesized)
ccatgcgagtccaaaatccagcggtgcagtcaaatcataaagctccaaaatgatctcgcttgactccatgtctcacatccaagtcacactgatgtaagaggtgggctcccatggtcttag

SEQ ID NO: 815624 - DNA, 120 bp, Artificial Sequence
  ENSG00000251002_51 (sequence is synthesized)
ctgtggctttgcagggtacagcctccctactggctgctttcataggctggcattgagtatctgtagcttttctaagtgtgtggtgtaaactgtcagtggatgtaccattctggggtctgg

SEQ ID NO: 815625 - DNA, 120 bp, Artificial Sequence
  ENSG00000251002_52 (sequence is synthesized)
tctggggtctggaggatgttggccctcttctaactgctccactaggcagtgctccagtagaagctctgtgtgggggtccaatcccacatttcccttcaacactgccctagcagaagttct

SEQ ID NO: 815626 - DNA, 63 bp, Artificial Sequence
  ENSG00000251002_53 (sequence is synthesized)
cccagaatgcagagcaccaagttcctaagctgcacacagcatgaggaccctgggcccagccca

SEQ ID NO: 815627 - DNA, 120 bp, Artificial Sequence
  ENSG00000251002_54 (sequence is synthesized)
agccagaatgcagagcaccaagttcctaagctgcacacagcatgaggaccctgggcccagcccatgaaaccacgttttcctctgaggccttcaggcctgtgatgggaggggctgctgtga

SEQ ID NO: 815628 - DNA, 88 bp, Artificial Sequence
  ENSG00000251002_55 (sequence is synthesized)
ggaggggctgctgtgaagacctctggcataacctggagacgttttccccatttgtcttgaggattaacatttggatcttcattacctt

SEQ ID NO: 815629 - DNA, 120 bp, Artificial Sequence
  ENSG00000251002_56 (sequence is synthesized)
taaaactgaatgcttttaacagcacccaggtcacctcttgaatgctttggtgcttaggaatttcttctgccagatactgtaaatcatctctctcaagttcaatgttccacaaatctccag

SEQ ID NO: 815630 - DNA, 120 bp, Artificial Sequence
  ENSG00000251002_57 (sequence is synthesized)
ttccacaaatctccagggcaggggcaaaatgccaacagtctctttgctaaaacatgacaaagtcacctttgctctagttccaagcaagttccttatctccacctgagaccaccttatcct

SEQ ID NO: 815631 - DNA, 90 bp, Artificial Sequence
  ENSG00000251002_58 (sequence is synthesized)
caagcaagttccttatctccacctgagaccaccttatcctggaagatgatattgtttacatcactatcagcatgtttctccaaactttcc

SEQ ID NO: 815632 - DNA, 120 bp, Artificial Sequence
  ENSG00000251002_59 (sequence is synthesized)
agcctgcacctgttacccagttccaaggtcacttccacattttcaagcatcttttcttcaatgctccactctgctggtaccaatatgctatgttagcccattttcatgctgctgataaag

SEQ ID NO: 815633 - DNA, 76 bp, Artificial Sequence
  ENSG00000251002_60 (sequence is synthesized)
aattggacttacagtttcacctggctggggaaggcatggatggtggcaggcaaaaaatgagacagcttgtgcaggg

SEQ ID NO: 815634 - DNA, 120 bp, Artificial Sequence
  ENSG00000251002_61 (sequence is synthesized)
tggatggtggcaggcaaaaaatgagacagcttgtgcaggggaacaccttttaaaaccatcagatcttatgagacttatttactatcatgagaacagcatgggaaagccctgcccgcatca

SEQ ID NO: 815635 - DNA, 120 bp, Artificial Sequence
  ENSG00000251002_62 (sequence is synthesized)
ttcaattacctcccaccaggtctctcccacaagacatggaaattcaaaatgagaatttgatggggacacagccaaaccatatcatgaagtagctcaggaatggaaaaccaagcatcgtac

SEQ ID NO: 815636 - DNA, 120 bp, Artificial Sequence
  ENSG00000251002_63 (sequence is synthesized)
aagcctggaaaagaaaaattttacatagaagactgagctggaagaggcctgggaacttgggaattcccacttccacactgcccactctagttctcaagaggcggcagctatgctgcagta

SEQ ID NO: 815637 - DNA, 120 bp, Artificial Sequence
  ENSG00000251002_64 (sequence is synthesized)
cagaccactgaatttagattcaggaatctgggtttatatctcactcctcctcttacttgcaagtcacttaccacaccaggcctcggtttcctggacaataaaatggggataacgttgccc

SEQ ID NO: 815638 - DNA, 120 bp, Artificial Sequence
  ENSG00000251002_65 (sequence is synthesized)
caaatcacaagaagctttcaggtctggaggctgacatttctcaagacagatgcaaaaacccaggcccagagagatgaagaaacctggctaagctccttgaagctagaaatggcctacctg

SEQ ID NO: 815639 - DNA, 120 bp, Artificial Sequence
  ENSG00000251002_66 (sequence is synthesized)
aacatgtcactgaatttgaatcttcatatttaccaagcttgacagcattgtacttcccactgggagagatgacaatagcaggatcaaactctgttatcttcttggatgacacgagattta

SEQ ID NO: 815640 - DNA, 120 bp, Artificial Sequence
  ENSG00000251002_67 (sequence is synthesized)
ttcttatatccttggggtagaattccttcaccagacaagcgacatttgttccatttttcatgacaaaaacggatggtttggtatgaggctgacttcctgcaaatataatcaacttattag

SEQ ID NO: 815641 - DNA, 120 bp, Artificial Sequence
  ENSG00000251002_68 (sequence is synthesized)
gtgtgtgtatgtgtgtgtgtgtgttaaatcctaccacataagtcactaacctatgggtaaggccagtcttgacctaaaatgaggaattctgtaaaatttcaaatgcaaatcacattttat

SEQ ID NO: 815642 - DNA, 120 bp, Artificial Sequence
  ENSG00000251002_69 (sequence is synthesized)
tttgcagaagggtcctgggggtcaatatagtcacgattgctcaactcttcattaagctacaggtttataggttatttgataataagtccagaatgcagctgctgtaggagcttctaatgc

SEQ ID NO: 815643 - DNA, 120 bp, Artificial Sequence
  ENSG00000251002_70 (sequence is synthesized)
acttctctattacttcaagaacactgtgtataataataaactctacagaaataaaccaaatcacaagaagctttcaggtctggaggctgacatttctcaagacagatgaagaacctgagg

SEQ ID NO: 815644 - DNA, 120 bp, Artificial Sequence
  ENSG00000251003_0 (sequence is synthesized)
tcactccatcctgccaccctgtgaagaggtgcctgtttctcttttgccttctgtcatgattattctcactgtgttacctaggctgcagtgcagtggtgcgatctcaactcactgcaacct

SEQ ID NO: 815645 - DNA, 120 bp, Artificial Sequence
  ENSG00000251003_1 (sequence is synthesized)
cagcctcccaagtagctgggattacagagctcatggtttttaaacaacttgtggtaaaaatctggtggaaaagataacaacagtatatgatatggcagagttgcacagaagaatcagaac

SEQ ID NO: 815646 - DNA, 120 bp, Artificial Sequence
  ENSG00000251003_2 (sequence is synthesized)
aacgttgggcaattaattaagccagctgattaagttttaaagaagctaaaccatatcatgtcgaaatcagaggagcgatgaaagtgtgagtggtggtatttctgctgttctcccccctga

SEQ ID NO: 815647 - DNA, 120 bp, Artificial Sequence
  ENSG00000251003_3 (sequence is synthesized)
aggcttctgcgattagcttctatgccttccttcccttatgggcattcagatccaaactacttgcaactgtagacaaggaggaagatggaacttggagaagacatacaggctgaagaaaaa

SEQ ID NO: 815648 - DNA, 120 bp, Artificial Sequence
  ENSG00000251003_4 (sequence is synthesized)
aaaatattttggaagtgatcagcacattctaattgaccatggatgctctctgcattcatgtggtaacccagggagagtatggagtgaaaagaggatcaccaaagaaacttggggtatctc

SEQ ID NO: 815649 - DNA, 72 bp, Artificial Sequence
  ENSG00000251003_5 (sequence is synthesized)
actggagtttgccccatgaaaaaggaattgtggatctgaagcctaaataacttcagcaatccacatgctttt

SEQ ID NO: 815650 - DNA, 120 bp, Artificial Sequence
  ENSG00000251003_6 (sequence is synthesized)
gatctgaagcctaaataacttcagcaatccacatgctttttcatttacacaacgaaaggcccaagaccctacttttacagatgcagcaaggtggatgccaaaacaatgggactgttctag

SEQ ID NO: 815651 - DNA, 120 bp, Artificial Sequence
  ENSG00000251003_7 (sequence is synthesized)
gctgaggtttatttcatccaggtgatagagctattgacagagtcttgctctagatgtctccaagactggagtgcaacggcatgatcgtagctcactgcaacctcaaactcctggggtcaa

SEQ ID NO: 815652 - DNA, 120 bp, Artificial Sequence
  ENSG00000251003_8 (sequence is synthesized)
gcaatcctcccacatgttaggatcctgaaagttatcgcctccagcactaaaggtcagagaggtgaagaaaaagggaggcagaaaagatcatactgaatccaaaaggaaacaggaacagag

SEQ ID NO: 815653 - DNA, 120 bp, Artificial Sequence
  ENSG00000251003_9 (sequence is synthesized)
tacagtatgtagtacgcattctaccttttcctacaatgaatccaccagcagaaattcctgtacacatcttatcaacaaagaatttgaacctcaaagagttctggtgctggtgattattaa

SEQ ID NO: 815654 - DNA, 120 bp, Artificial Sequence
  ENSG00000251003_10 (sequence is synthesized)
aagtgtgcagagaagatgagatcattaaaatgtaccaagaggttatatttaaatgttagagggaaatcaaaagaatggcaccacaaaaatcaagggttggacttctttataattgtttgg

SEQ ID NO: 815655 - DNA, 120 bp, Artificial Sequence
  ENSG00000251003_11 (sequence is synthesized)
ctgagtttttagatggtgaacttagaacgtacaacttgagggagtcatttataggaagtgataacccaaatattgtaacgtaacttcaattactgatgctaataaaattttcagagtgtg

SEQ ID NO: 815656 - DNA, 120 bp, Artificial Sequence
  ENSG00000251003_12 (sequence is synthesized)
aatgaatccaccagcagaaattcctgtacacatcttatcaacaaagaatttgaacctcaaagagtggctcaaagaggtcaggaggcaccttcaacacttttattggagatctccttgtct

SEQ ID NO: 815657 - DNA, 120 bp, Artificial Sequence
  ENSG00000251003_13 (sequence is synthesized)
agtggttgaaatgggattggaatctggtcttaatcactcttccataatgcctccatggcaagggtggcagagaggaagaattatgctgaggaagtagaactgactagaagtcatgaacaa

SEQ ID NO: 815658 - DNA, 120 bp, Artificial Sequence
  ENSG00000251003_14 (sequence is synthesized)
tgcttggtgattagattctagaatggacgaataaggctctgctttgctcccaagcttctgtgtcagtaatggcttcattcatctacacagggaacagaggatggagaggtgatgtcttca

SEQ ID NO: 815659 - DNA, 120 bp, Artificial Sequence
  ENSG00000251003_15 (sequence is synthesized)
cctcaatgcaaagatgaactatgaagagcactttattgcgtttgaagaatataggaatgatgagtgaaatggtgaaggaagtggataaacaatgatgtaacgactgagcgtcatcttgca

SEQ ID NO: 815660 - DNA, 120 bp, Artificial Sequence
  ENSG00000251003_16 (sequence is synthesized)
actgaataagccagtgaggaacttggtaaatttgttgattatatttagttttacaatgtttaattctttattattttgaagtgatttattttattattaggaatgatcaatagtaatgca

SEQ ID NO: 815661 - DNA, 120 bp, Artificial Sequence
  ENSG00000251003_17 (sequence is synthesized)
tcttccaaaactgtggaaagatcatattgcgcaaactagagcaaaaaatcacattcctcttgcatgggcatgaaatctttatcaaatgacatcaggcactgaagcagctatctgatacct

SEQ ID NO: 815662 - DNA, 71 bp, Artificial Sequence
  ENSG00000251003_18 (sequence is synthesized)
tttagtagaaacaggtttcttgcctcagcctcccaaagtgctgcagttacaggtgtaagccactgcctggc

SEQ ID NO: 815663 - DNA, 120 bp, Artificial Sequence
  ENSG00000251003_19 (sequence is synthesized)
cccaaagtgctgcagttacaggtgtaagccactgcctggcctaagatatttattttaaattgtatttatggttagaaaaaatattcatttatagtgatgtaaattatctgattgattaaa

SEQ ID NO: 815664 - DNA, 120 bp, Artificial Sequence
  ENSG00000251003_20 (sequence is synthesized)
acatccgttttccttacagtatgtagtacgcattctaccttttcctacaatgaatccaccagcagaaattcctgtacacatcttatcaacaaagaatttgaacctcaaagagactagcaa

SEQ ID NO: 815665 - DNA, 120 bp, Artificial Sequence
  ENSG00000215206_0 (sequence is synthesized)
tgaatcctcctagttttctatttccatgccctgcttccctcaacatccagagctggaaacacctccatcattcctcttcatgccatggcctccctgctcctcttctgtgtggccttttgt

SEQ ID NO: 815666 - DNA, 120 bp, Artificial Sequence
  ENSG00000215206_1 (sequence is synthesized)
attatgctggcatgttctcagactaagggtcatgatggaatgtactggtatcgacaagacccaggactggggctacggttgatctattgctcctttgatgtcaaaatatataaacaaaag

SEQ ID NO: 815667 - DNA, 120 bp, Artificial Sequence
  ENSG00000215206_2 (sequence is synthesized)
agagatctctgatggatacagtgtctcttgacaggaacaggctaaattctccctgtccctagagcctgccacccccaaccagacagcttctaggttacttcagtgccaccagtgatttcc

SEQ ID NO: 815668 - DNA, 120 bp, Artificial Sequence
  ENSG00000226193_0 (sequence is synthesized)
tatcctcatatggtggtctcttcctttcttttcctctcctggttcatatttgggccagagtgacctctggcatttacctccaactaactttgaggtgcaggaccccacaagccatcattt

SEQ ID NO: 815669 - DNA, 120 bp, Artificial Sequence
  ENSG00000226193_1 (sequence is synthesized)
tagccagcctgtctgtcacttttaggattctttgggggatagagatcagactcccatgcctgccaaatgcaggggacaaatatcctgttcttcaggtggcactgccggaacccttctgcc

SEQ ID NO: 815670 - DNA, 120 bp, Artificial Sequence
  ENSG00000226193_2 (sequence is synthesized)
ttgagtaacataaagaagaggaaagaagatcaaagaattatgaaacaaatgagatgcttgtaaacttcattagttatatgaaaccacaaaggggcatttaataaactattcctctcaaaa

SEQ ID NO: 815671 - DNA, 120 bp, Artificial Sequence
  ENSG00000251009_0 (sequence is synthesized)
agtgacacgggcactagtccttgagcaaaattaccagaatccaaactggctctgccacctcctggctgtgggcctgggatctttcctacgtctctgtttcttcatttgtaaaatgaggct

SEQ ID NO: 815672 - DNA, 120 bp, Artificial Sequence
  ENSG00000251009_1 (sequence is synthesized)
gatggtagtaacagtgtctacctctccgggttgccaagagaattacatgaatgaaggcctcaaagtaatacttgataagaactcaaaaagaaacctctccgtgaaaagctgtagaggatg

SEQ ID NO: 815673 - DNA, 120 bp, Artificial Sequence
  ENSG00000251009_2 (sequence is synthesized)
aagcagttaatcccaccacctctagctcaggatgagagagcaactcacacatccctcttagaagaccaaactctggccggttttctgcatgcctggtgctccttgcagaaacagagcctt

SEQ ID NO: 815674 - DNA, 120 bp, Artificial Sequence
  ENSG00000251009_3 (sequence is synthesized)
tccacagtaggaacacaataggagatgagtgagtaggggagaagtgagcagttggatatggcaagttagaaacagtccagcctccagtggggcactctgcttacctacacttaggtaaac

SEQ ID NO: 815675 - DNA, 120 bp, Artificial Sequence
  ENSG00000251009_4 (sequence is synthesized)
ccaaatcctcaaagctcacaaggccttgaaaactcccaattccatgaatcctgattacaaacaaccccgaggaaccatttagctccccgaagaccaacagaatctgtgtacaatgtggga

SEQ ID NO: 815676 - DNA, 120 bp, Artificial Sequence
  ENSG00000251009_5 (sequence is synthesized)
ggagagaaactccggagcgtggcccaggaagacaggtggcaaccctagaaatgctgcaatgcctgttgaagccccttccccctgaactggccgacaattttccttccatatacattaaaa

SEQ ID NO: 815677 - DNA, 120 bp, Artificial Sequence
  ENSG00000226194_0 (sequence is synthesized)
aagagcaaaatgctgtctgtgtctcactcaatgtggtggctgctacaggaggatcttcccaggccttctcagggaattcccatcaggatcacaggaatggtacctggcagacacaaccca

SEQ ID NO: 815678 - DNA, 120 bp, Artificial Sequence
  ENSG00000226194_1 (sequence is synthesized)
gtctgcaccttccatgggccacagctgatggtacgaggagaggtgtgacatctgcctgacctcagctctgggggttcctgtgggtggacagaaggagccctggaggcccggccaggatgc

SEQ ID NO: 815679 - DNA, 120 bp, Artificial Sequence
  ENSG00000226194_2 (sequence is synthesized)
ctgacccgggccccagccaagttctgctgctgcctcagggggacagaggcagggcctcactgtctgatgatccagccctgcagggggcccgctgcacctgcaggtgtgagagccgccgct

SEQ ID NO: 815680 - DNA, 120 bp, Artificial Sequence
  ENSG00000226194_3 (sequence is synthesized)
gaattaaggtgactggaaggtttcagggcatgggagggaggtagatcatttggggctgagaagcacttttgcatctctttcctgcccagaagcgaccagagaggccaggcattgtcacct

SEQ ID NO: 815681 - DNA, 120 bp, Artificial Sequence
  ENSG00000226194_4 (sequence is synthesized)
gtttttggagagaaaagaaaaataaagttcagaggcaaaacttggtagaaattctgaagcctggatgacagtgatgactccgcgcagcaggaacgtcgcgggccttgcctggccacgtcc

SEQ ID NO: 815682 - DNA, 120 bp, Artificial Sequence
  ENSG00000226194_5 (sequence is synthesized)
tcttggctggaggcatgagtgtttatgccaggctgaagaagtcacttgaactcatgtcctttgactgaacattttttatgagacctgcataaatcatttctttaaaaatggcatcctggg

SEQ ID NO: 815683 - DNA, 120 bp, Artificial Sequence
  ENSG00000226194_6 (sequence is synthesized)
catggaggcagtctgctttttgcaagaattcttatgggcaaagtctcttcagatgagaatgattctgctttaattccctctgccttctgcccttgggtaagctcactgtgtctccttaaa

SEQ ID NO: 815684 - DNA, 120 bp, Artificial Sequence
  ENSG00000226194_7 (sequence is synthesized)
cactctggctttaaccagtttctgcgtatcattcagaccaacattcctctcagttatcagtcaactgagagactgagaaataaagtcaatagaatgaaaagaaaatagtcatatacagta

SEQ ID NO: 815685 - DNA, 120 bp, Artificial Sequence
  ENSG00000226194_8 (sequence is synthesized)
agctcgattttcttcctaccgcttcctcatatctttgccaagtcaaaccaaactacctccttctagaaatttgtcttataaattatcttcatgaccttcaggaagctaatatattttaag

SEQ ID NO: 815686 - DNA, 120 bp, Artificial Sequence
  ENSG00000226194_9 (sequence is synthesized)
gtgtacaaagcactaaaaatactgattaaaagatcaattggacttcagcagaatttagaacttctgttcatcagatgacaaccttaagaaagtgaaaagataagtgctttcattagttcc

SEQ ID NO: 815687 - DNA, 120 bp, Artificial Sequence
  ENSG00000226194_10 (sequence is synthesized)
cacaacacaggaggaagccctagaaaatcaatcagaaaaacacaatccaatttaaaagctgagcaatagcctgtgtgggcacttcacaaaacgggatatcccaatggccagggagctatg

SEQ ID NO: 815688 - DNA, 120 bp, Artificial Sequence
  ENSG00000226194_11 (sequence is synthesized)
gaggtgatcaagatcatttgttttcaagaaaatgaaaattaaatccacagtgagggagaattgcacactcaccaggatgcgtaaggctaaagagactgaaaatgccaacttctggggagg

SEQ ID NO: 815689 - DNA, 120 bp, Artificial Sequence
  ENSG00000226194_12 (sequence is synthesized)
acttggtgatgagaactcacctattgctctgggaatataaagtggttccaccattctggaaaaattcttcagcaatatttactaaatttaaagatatgcctatcctatgacccgaaatcc

SEQ ID NO: 815690 - DNA, 120 bp, Artificial Sequence
  ENSG00000226194_13 (sequence is synthesized)
tgctcctagctctaactatgggaaatgagtggcgcagtccacaaaaggacatgtgcaagaacatccatagcagctttatgcacagtaaatccaaactggacacaacccaaatgctcagaa

SEQ ID NO: 815691 - DNA, 120 bp, Artificial Sequence
  ENSG00000226194_14 (sequence is synthesized)
caagagaagaaataaatacatttttatagccttgcaatggaaaactatagtgtgataaaacaataaaccacgagtgtaccaagaatattgatgtttgtttcacaacaaacatgtgcgtga

SEQ ID NO: 815692 - DNA, 120 bp, Artificial Sequence
  ENSG00000226194_15 (sequence is synthesized)
aagaagccagacacagaagagttcccactgtctggttccatttccacaaagtccaaaacagacacaactaactgataatgacaaaaatcagaagactggtgatctccagacggaggtata

SEQ ID NO: 815693 - DNA, 120 bp, Artificial Sequence
  ENSG00000226194_16 (sequence is synthesized)
gacttaaaaggggccaagggaaaataaggggaatatgaaccccactcaaaggtttcacacacaaagaggcagagtagatacagagtgaataaatacattattttcatgtgcatacaatag

SEQ ID NO: 815694 - DNA, 120 bp, Artificial Sequence
  ENSG00000226194_17 (sequence is synthesized)
atcaagtaataaaattctgagagccgcacatatgttatttagttcatacaaaaaccctgggtttattctgaacccacctatgagatcacatggagagactggctccacctgtgagatcac

SEQ ID NO: 815695 - DNA, 120 bp, Artificial Sequence
  ENSG00000226194_18 (sequence is synthesized)
atggagagactggctccacctgtgagatcacatggagagactggctccacctgtgagatcacatggagagactggctccacctgtgagatcacatggagagactggatcctgaaacacaa

SEQ ID NO: 815696 - DNA, 120 bp, Artificial Sequence
  ENSG00000226194_19 (sequence is synthesized)
gggtgtgctgcatttctggataccatcgcagacctttgcaagcagttccatgaaacaagaaaggagcattaggatcaatggcatgagatttaattaaatttgcattggtttttctacgtt

SEQ ID NO: 815697 - DNA, 120 bp, Artificial Sequence
  ENSG00000226194_20 (sequence is synthesized)
gactttcactttgcaaccaaagaacaccattctccctggcattgtggtaatttaaaagtgccggggaggtgtggctcactaagctaaactcaacctcatcagataaaataattagttttg

SEQ ID NO: 815698 - DNA, 120 bp, Artificial Sequence
  ENSG00000226272_0 (sequence is synthesized)
gtacgatgtgagcgggcaaggaaacacaagctggcttacaggtggaatacctgagagtctccagagaggacccatgacagacagctgagacatggatggacacgagccccagagagactt

SEQ ID NO: 815699 - DNA, 120 bp, Artificial Sequence
  ENSG00000226272_1 (sequence is synthesized)
caggtaattcttctcttcaagtaatgcctccccaactagtacattctataaggatgaggatcatatcccttcatgctcaccactctatccccaaagcccaacactctactgcttgactga

SEQ ID NO: 815700 - DNA, 120 bp, Artificial Sequence
  ENSG00000226272_2 (sequence is synthesized)
gagcaggtattgcagaaagaacaaagagagaggaagttgggcactccataagtccattagccttcatcagaggtgaacctcccaactcaatgtttgacatgtgaaaaaaaaagcagatct

SEQ ID NO: 815701 - DNA, 120 bp, Artificial Sequence
  ENSG00000226272_3 (sequence is synthesized)
attcagaaaacctcttatctcccccaggcggatgatgtgcccaccgaccacatcagccacgtgagatccagtgcgacagtggagcatgtgtgcgcagaggagacaggaacaacaaccggg

SEQ ID NO: 815702 - DNA, 120 bp, Artificial Sequence
  ENSG00000226272_4 (sequence is synthesized)
atgtcatgcgggcgcactggggctccttgtggccccagtgcacagaattctggtggacccaccatgtgtgggagctcagtgagactcaaagtaagtgcaaggccctcctcacacatcgta

SEQ ID NO: 815703 - DNA, 120 bp, Artificial Sequence
  ENSG00000226272_5 (sequence is synthesized)
cgctgaaggtggagcacactgggaaaatgtgcatgcatcaagaagaaaaatgaaaactgattttgtgcaacatttccactgttcttggaagaatgaaataaatgcatatgagctatgaaa

SEQ ID NO: 815704 - DNA, 120 bp, Artificial Sequence
  ENSG00000226272_6 (sequence is synthesized)
cccacagaagaggcagctggagagccaagcactcttggactacagtcctaggctggagctgccaatacaggctctgcccagctaatcttctctgagcctgcaaatattaaacctgacata

SEQ ID NO: 815705 - DNA, 120 bp, Artificial Sequence
  ENSG00000226272_7 (sequence is synthesized)
cagactcaagtgaatccagaaaacaggctcacagggcagctgaaaattccaagtgcctaagtgagatccagtgcgacagtggagcatgtgtgcgcagaggagacaggaacaacaaccggg

SEQ ID NO: 815706 - DNA, 120 bp, Artificial Sequence
  ENSG00000226277_0 (sequence is synthesized)
acgtgggttttgctgtgaagaggtctgtccagaagcgggggtagagaaagggtgatttttatcgcagaacaagtcatgttgttttaatctcaccagaagtttcatctaatttgaaataga

SEQ ID NO: 815707 - DNA, 120 bp, Artificial Sequence
  ENSG00000226277_1 (sequence is synthesized)
aaaagaccaagcactacagattgaagctgggtgcctgatggacacctgctcgtgtgcttctctgtaagtatttgcattgtcgcagctgcaagcacccatttcgctgagaatcactgttgc

SEQ ID NO: 815708 - DNA, 120 bp, Artificial Sequence
  ENSG00000226277_2 (sequence is synthesized)
ctccatggggtcctgtcctatggacgacccctgtctagttgggaacttggtgccaggagctcaacttgctccaatgcttcccatcctactaagttctacgctgactacagtggtaggtaa

SEQ ID NO: 815709 - DNA, 120 bp, Artificial Sequence
  ENSG00000226277_3 (sequence is synthesized)
cgtctgttttcctgcagtgcttaaatattgtttctacctccaccttcggcagctatgtggcagacatttaatcattgttaggcaaaaaagacctaaacgtactctgttagctactgcacc

SEQ ID NO: 815710 - DNA, 120 bp, Artificial Sequence
  ENSG00000226277_4 (sequence is synthesized)
ctgcctggattccccaggccacatgtcttagttagccccacacagcttcagatattgttattgcttctatccattctgctaaactgagccatggttaataaaagatgagaattggcaatt

SEQ ID NO: 815711 - DNA, 120 bp, Artificial Sequence
  ENSG00000226277_5 (sequence is synthesized)
tccaagtttctaagagtttaaagttataggaaataaaagacatgatgtattcctcagagtaggctcactattgtaacaacgcctccgaattttagtagcttaccaaaataagaacgtatt

SEQ ID NO: 815712 - DNA, 120 bp, Artificial Sequence
  ENSG00000226277_6 (sequence is synthesized)
gttcacttgcatgactgtcaaacctaggccagatgagggctgtgctccacaacaccgcccaggaatctgggatcctcccctgggctccagtagctccatggacatctgcaggtagaatat

SEQ ID NO: 815713 - DNA, 120 bp, Artificial Sequence
  ENSG00000226277_7 (sequence is synthesized)
aaacaaggaagctgggaggaactggtgagatttcagaggaggcctagaggtggtggccatcactctccctcccagtctcctggccaggacttggtcacacagctgcacctcacagcgagg

SEQ ID NO: 815714 - DNA, 120 bp, Artificial Sequence
  ENSG00000226277_8 (sequence is synthesized)
ggctggggaacgcggcctcaccccgtgtccaggaagaggagtgacctgccatggtgagaatctccgctcctgaagagcacatgattagtcatttacacgtcctgatgttgttgctcaggg

SEQ ID NO: 815715 - DNA, 120 bp, Artificial Sequence
  ENSG00000226277_9 (sequence is synthesized)
ggctggtctgtgggtcacattgctcatcttcatggggacagcggccactcttcaccatgcttcctgttgctggattgcaatgggagccatgccatcgatgctttgggcaaaatagctcat

SEQ ID NO: 815716 - DNA, 120 bp, Artificial Sequence
  ENSG00000226277_10 (sequence is synthesized)
gtatggctcctcgtcagctgcatgcagtggcacagatgcaccatgaagcttgcagttgggtgtctgcacctctcaaaaccatttccagctggacaagcaggcctcttggtgctaatgcac

SEQ ID NO: 815717 - DNA, 120 bp, Artificial Sequence
  ENSG00000226277_11 (sequence is synthesized)
ctgtgaaaggcaaagaccctctcatcattccatgagccatatgctggctctatgtttttatgcctgtctcccataacaggtgacattgttgagaatgagtagcggggggtgtccgatagc

SEQ ID NO: 815718 - DNA, 120 bp, Artificial Sequence
  ENSG00000226277_12 (sequence is synthesized)
tgttactttgaagtaaaaggaattcactgatccagctgcagtgggtccctaaagcaagggctgcttaacacgtatactcaggttgcatgatggccgtggagtacactggactcagcacca

SEQ ID NO: 815719 - DNA, 120 bp, Artificial Sequence
  ENSG00000226277_13 (sequence is synthesized)
ggaccccatctctcatcaccagctgtgtgtacgccttggtgagctccttaaatctaaacacgtgagtatccttatttgtcaaaagaggattcaaattttaaccctgcataaccaaaaata

SEQ ID NO: 815720 - DNA, 120 bp, Artificial Sequence
  ENSG00000226277_14 (sequence is synthesized)
caggaattacttaatgaaggggttcttgagaagcgataaactgaaaggtaagtcaaagccccatggcaaatgcaaatggcttgaaaatgcaggaaatgctttcatcctggaacatttgct

SEQ ID NO: 815721 - DNA, 120 bp, Artificial Sequence
  ENSG00000226277_15 (sequence is synthesized)
gttctacccaagtcaggtctgtgtctctggaggtgcacacggagctgtccctggtggcagcctctgccaaggactgtgtggccccgggggcagcctctgctgagtattgtgtgttcctgg

SEQ ID NO: 815722 - DNA, 120 bp, Artificial Sequence
  ENSG00000226277_16 (sequence is synthesized)
tggcagcctctgctgagtgttgtgtgttcctggtggcagcctctgccaaggactgtgtggccgcgggggcagcttctgccgagtgttgtgtgttcctggtggcagcctctgctgagtgtt

SEQ ID NO: 815723 - DNA, 120 bp, Artificial Sequence
  ENSG00000226277_17 (sequence is synthesized)
gtattgctggtggcagcttctgccgacggctgcgtggcccaagtgtgcgtcctgccttttcctgacttcctctctctacttcccactctcacccggcacatgataaaatgtaatctacat

SEQ ID NO: 815724 - DNA, 120 bp, Artificial Sequence
  ENSG00000226277_18 (sequence is synthesized)
gaatattaggatttggatttctatctggacacgtgatttacctattaatcagacaccaaccacatgaatgattattagaggaatatttaacaaaagctacataaaaacagtttttgaaac

SEQ ID NO: 815725 - DNA, 120 bp, Artificial Sequence
  ENSG00000226276_0 (sequence is synthesized)
tgatcaggagataggacacagccaccttaataaaaggaagaagatactaaaaatctgtcaaacccagcagtactcaaggcctagagctccatttgttttttatctgcctacttcacacac

SEQ ID NO: 815726 - DNA, 120 bp, Artificial Sequence
  ENSG00000226276_1 (sequence is synthesized)
tcttattattggaatattgttgtgtctgcctaagaatgaaactttcactgccatttttatttcaatatttgtggctgagaacagaaaggaggacttatttgggattacaggaagcaaagg

SEQ ID NO: 815727 - DNA, 120 bp, Artificial Sequence
  ENSG00000226276_2 (sequence is synthesized)
tagaatttctggccaataacaattgtacgtttagaagaatttggggcaacacttgctttcattgtaacacgccacctggtcacaagattatggggaaataaatatatcgtcttcacttta

SEQ ID NO: 815728 - DNA, 120 bp, Artificial Sequence
  ENSG00000266654_0 (sequence is synthesized)
tgggcagatgggaaatctggaatactttgtttctagagagatgttctgcgttagagaagaagcagaggctgcagggaaggcgtggtttatgtatttacaatgcgagaggacatgtggaag

SEQ ID NO: 815729 - DNA, 120 bp, Artificial Sequence
  ENSG00000266654_1 (sequence is synthesized)
gcaacaggagacatgatcaacaggactggatcaaaactggaaacattcggtgtccttcaaaggacaccatcaggaaagtgaaaagacaggccaggtgcagtggctcatacctgtaatctc

SEQ ID NO: 815730 - DNA, 81 bp, Artificial Sequence
  ENSG00000266651_0 (sequence is synthesized)
aagacctaattagaggtaatttttctaagtttttgtaaattattgaggactacaaatcttaattagcttctcagtaggttg

SEQ ID NO: 815731 - DNA, 120 bp, Artificial Sequence
  ENSG00000266651_1 (sequence is synthesized)
gattacaggccactgtgcccagcctcaggggagttgtaatctccatttcagtcatatcaatttaaacttcacaaagctaagattacttttccttttcacatctgaggaaaactacatctc

SEQ ID NO: 815732 - DNA, 120 bp, Artificial Sequence
  ENSG00000245748_0 (sequence is synthesized)
aacgcaacgaggttctgccagggagatggcagcacgaccaaatactggtgcctcaccactccgggggggtgggtggtcacgggccagtgcaccccctgagtcctggttgcaatgcaggct

SEQ ID NO: 815733 - DNA, 120 bp, Artificial Sequence
  ENSG00000245748_1 (sequence is synthesized)
ctcaggcctcaccgtaacctcgcgctggtgcaacgggagaacgccctgaccgcagcctggccaggctcgctgtgcaccaagtcccagccccattctcttcctgtcctggctctgcctcct

SEQ ID NO: 815734 - DNA, 120 bp, Artificial Sequence
  ENSG00000245748_2 (sequence is synthesized)
ctaccagctgagtcagaatctgcattttcaccagctccccaggtgctctgtgtgcacattcgttcggaaagtattgttttagaagaggcctctccacttctagcctggtttcttccaaaa

SEQ ID NO: 815735 - DNA, 120 bp, Artificial Sequence
  ENSG00000245748_3 (sequence is synthesized)
ccacatagatgtttttgttccccaggtcttgtgttctgtgtattttccacagtgccgcagggaaggcagtgcagacagtgaagttaagagtacaggctctgaagtcaaactggtccgtcc

SEQ ID NO: 815736 - DNA, 120 bp, Artificial Sequence
  ENSG00000245748_4 (sequence is synthesized)
aaagccaactgccaagggctgtcgggaaaatgtcctgagatacgcacagatatgccaccaaggctctgcgcctccttagcagctaacgtagagagttctccgccactgtagaatccgcac

SEQ ID NO: 815737 - DNA, 120 bp, Artificial Sequence
  ENSG00000245748_5 (sequence is synthesized)
agaacacatgctcagtgcatatccacaaacagcatggaaggacaaggtgggacggagtttctgaaaaatggagatcccagtgctggtggccattagtttctaccagcagctccagagcag

SEQ ID NO: 815738 - DNA, 120 bp, Artificial Sequence
  ENSG00000245748_6 (sequence is synthesized)
gctccagagcagggcaagaagctggaggaacaacgtttgaggataaactttgtgaggttctggagtccagagtgatgcttctgagttgacaaaaacagggtttcaccatgttggccagga

SEQ ID NO: 815739 - DNA, 87 bp, Artificial Sequence
  ENSG00000245748_7 (sequence is synthesized)
gtgtctcatctttgaaatggggcaatagccctgtcatccgcagagcagctgcagagatgactcacaggcagcactcggcccagcgcc

SEQ ID NO: 815740 - DNA, 120 bp, Artificial Sequence
  ENSG00000245748_8 (sequence is synthesized)
gctgcagagatgactcacaggcagcactcggcccagcgcctggcgtggctgtgactgctgccaccatcacgcctgtggcccgtcctctcaccatggcctgcagagaacgcataggagata

SEQ ID NO: 815741 - DNA, 120 bp, Artificial Sequence
  ENSG00000245748_9 (sequence is synthesized)
acagtggcccacagaggagagcagccactgagggagaggcgggagagcgggcagccgcacctgctctggggagagtgctatggagcacacagaaggattgtcctgggagcaaggggccag

SEQ ID NO: 815742 - DNA, 120 bp, Artificial Sequence
  ENSG00000245748_10 (sequence is synthesized)
aagagaaagctgccctaggttctgccccgccagccgggagcctcctgcctcgggaagcggagcgatgcccacccacacggcgggccctgtgttacccagttctcagtggcttcgcggagc

SEQ ID NO: 815743 - DNA, 120 bp, Artificial Sequence
  ENSG00000245748_11 (sequence is synthesized)
cttccaccacacagccacggcctcctgagaagacaccactgacccccacctcatgccaccccactgcctgctggggagacagacctcagtgcctgattcatgggcttctgagaaggttct

SEQ ID NO: 815744 - DNA, 120 bp, Artificial Sequence
  ENSG00000245748_12 (sequence is synthesized)
gaagggaacatggagagcccctggtcctgtggctggcacagagtaagcaccagctgcacgccaggaagggtgctgcaggaccaggaaggagcagtgggtaggggctagctcgagaggggg

SEQ ID NO: 815745 - DNA, 120 bp, Artificial Sequence
  ENSG00000245748_13 (sequence is synthesized)
tacaagggtgcgactccctccaacctgcaaggggcacactcaactctcgaatcccttcactcaactaccactgcaccatcctgttattaaccagtctgataaatggatcttaagatattc

SEQ ID NO: 815746 - DNA, 120 bp, Artificial Sequence
  ENSG00000245748_14 (sequence is synthesized)
aaacagcatcatgctcaaagtgagaacttcaactttaaacaaacgatggtgaacataagtaacaattttacattgacttttatttaataaaaccacctatttacaattcaaaaaagtcct

SEQ ID NO: 815747 - DNA, 120 bp, Artificial Sequence
  ENSG00000245748_15 (sequence is synthesized)
actttgatacactttactaaataaaattaaaggttaactgtacaagcaattaaaacatgatatgtagcaagtgttatcaggagttttcagcaaactatttaaaatagtcaaaaactgagc

SEQ ID NO: 815748 - DNA, 120 bp, Artificial Sequence
  ENSG00000245748_16 (sequence is synthesized)
agttaaaaagtaccttctgaagtgaatgccgtttctaaatgggatcccaatgcctggcgggagaggcagcctcactctactgtgcaggctggacaaaggtcccggccctgaagtcttaga

SEQ ID NO: 815749 - DNA, 120 bp, Artificial Sequence
  ENSG00000245748_17 (sequence is synthesized)
gcctctacacttgccaacagcctctgtgccgaggtgttaagggaccctggccggggactcagaacttagaactttctggcctctgaagaggacccaggaaactggcgagacctcatgtga

SEQ ID NO: 815750 - DNA, 120 bp, Artificial Sequence
  ENSG00000245748_18 (sequence is synthesized)
cccctgaacaggtcatacaagccacttctgaactaagattgggaaggtgttccacactggcatgggatcctgttcagaagcggaatacatcgtagtgctatctggagagactgatgtgaa

SEQ ID NO: 815751 - DNA, 120 bp, Artificial Sequence
  ENSG00000245748_19 (sequence is synthesized)
actgcttcaccaggaacacgcagggctgggcgctgaagacacagaagatccccaggggcaatctgaacacactgcacgaggccctttgccgcgccaccttctgtacgacttaaggaacat

SEQ ID NO: 815752 - DNA, 120 bp, Artificial Sequence
  ENSG00000245748_20 (sequence is synthesized)
ctttatgtacagtaagaaaatatatacatctttaaggaacggaacgcccgtaacatgaacaaaaataagtacatctgcgaggacaacagcgcacaggcctcaggcggcccctcccacagg

SEQ ID NO: 815753 - DNA, 120 bp, Artificial Sequence
  ENSG00000245748_21 (sequence is synthesized)
cccagctcagaccagattacattcaacatcttgatgtcaggaaatggctacgtctggaggccaccgggacccccccgtgaagacaggacgcctcctccgagaggaggtgagtcagcattt

SEQ ID NO: 815754 - DNA, 120 bp, Artificial Sequence
  ENSG00000245748_22 (sequence is synthesized)
aaaggccgaggcagaaagtggtctccacgatgctctgcagcctccctggagattcagctgagatgtaggggcagagtccgggaaacgtgacacatgatagtgctgggaaggagggcacgg

SEQ ID NO: 815755 - DNA, 120 bp, Artificial Sequence
  ENSG00000245748_23 (sequence is synthesized)
ggcagccactggctcagcaacctgctcctgcacctcgaggagcattagcgggtatggcaggcataaaaagtccagagaacgaatgccagctcggctttccttccccagcccctagcccaa

SEQ ID NO: 815756 - DNA, 120 bp, Artificial Sequence
  ENSG00000245748_24 (sequence is synthesized)
ggctcctgttacaagctatacagacagagccaaacagccctcaacatcagaaatgagatcagcctgggggcaccccctggggtgggaagtgtggctgagaagggccgtggagtgcagagc

SEQ ID NO: 815757 - DNA, 120 bp, Artificial Sequence
  ENSG00000245748_25 (sequence is synthesized)
accccaaggcacacatgtacgcatgactaaccaagcccgtgaccgggtccgcagaatgctccccaggaccagcctgccagcggaccgccacgtgggccctgcttccagacactggcctgc

SEQ ID NO: 815758 - DNA, 120 bp, Artificial Sequence
  ENSG00000245748_26 (sequence is synthesized)
cctttagactgcgcagctgcaaaacggttcatttctgtgattttggataaccaaagtcctcacacaaagttctacaattagtcaaggaaaagacagaacaaaaaatttgccaacgaccct

SEQ ID NO: 815759 - DNA, 120 bp, Artificial Sequence
  ENSG00000245748_27 (sequence is synthesized)
gggaaagtcagctaaaatggggaggctgatggtccagtatgagcatctgacgagattgtctaggctgttagacgtgtgttgctcgctcctccgtctgtacaacgggtcatgaagcacacg

SEQ ID NO: 815760 - DNA, 120 bp, Artificial Sequence
  ENSG00000245748_28 (sequence is synthesized)
ttctaaagtcaaatgtgtgagggactcactggcacttaggatgggtccagctgtgcagggctcaaaggcagagaggagccactgctggcacaaggggccacctcccccacatgtgctgtt

SEQ ID NO: 815761 - DNA, 120 bp, Artificial Sequence
  ENSG00000245748_29 (sequence is synthesized)
ctgggctgctgccctggcctccactgaacaggcaggtgggagagggcccagccacacatctctttctctacccttttacttacagggggctgattccactctgtgttctctccgctttta

SEQ ID NO: 815762 - DNA, 120 bp, Artificial Sequence
  ENSG00000245748_30 (sequence is synthesized)
agcctatctctattgccacagggcttcctcgcaaatagctcctcctctcgaactttccacctccgcaggaccgatgccagggagcagtctcccagagcgcagtcccactggagcccacgt

SEQ ID NO: 815763 - DNA, 120 bp, Artificial Sequence
  ENSG00000245748_31 (sequence is synthesized)
gtgcacctgcagcctctacactgtgactgtgtcaaggcaacatggcccagagctcacctgcaggctgggtcgatgcccaggtatccacaaacacacatcagtggccatcctcagagagcc

SEQ ID NO: 815764 - DNA, 120 bp, Artificial Sequence
  ENSG00000245748_32 (sequence is synthesized)
cctgttcctttaatgctatctttcgtaggtgagttttagaaacgtgacctccagctctggaaaaactatctcaataactcaatcagcgatccctttcttatcgaaaacatgtaaatatca

SEQ ID NO: 815765 - DNA, 120 bp, Artificial Sequence
  ENSG00000245748_33 (sequence is synthesized)
gccaaagcatctcaagtctcccaaataacatctctcatgcatcctggctaagactgtaacatacttcccagtagttgacatagaaacattacaatttaattagcttttgctgaaataaag

SEQ ID NO: 815766 - DNA, 120 bp, Artificial Sequence
  ENSG00000245748_34 (sequence is synthesized)
gagtgggggtgagccactgcccatcgttcaactgtgcagcagatgcagtggctggctgtggtccgcagcagctcatccttccactgagctgcttaaggctaagccttggtttaattcttt

SEQ ID NO: 815767 - DNA, 84 bp, Artificial Sequence
  ENSG00000214559_0 (sequence is synthesized)
ctgcagcacgccgagaaagaaaaaaatgtcaggcgatgacggcggaggaaggatgacttacccatgttgctccccgagatggtg

SEQ ID NO: 815768 - DNA, 120 bp, Artificial Sequence
  ENSG00000250754_0 (sequence is synthesized)
taagagtactcgggtgtcctccagctacttttcctttctaaccgtcgctctggcaacccttcaacctggattcgagcccccaatggatggacaccacttgctgagaccagctcggtcagg

SEQ ID NO: 815769 - DNA, 120 bp, Artificial Sequence
  ENSG00000250754_1 (sequence is synthesized)
ctagaggaattaaagacacacacacataaatatagagtaacatagaatgttgattgtcctgagttccagagcctcaaagagcacccagcataactgtgggagaatagtaagcattggaca

SEQ ID NO: 815770 - DNA, 120 bp, Artificial Sequence
  ENSG00000250754_2 (sequence is synthesized)
gcacccagcataactgtgggagaatagtaagcattggacacaaaatggtttaggcaaataatgatgaacaaaaatggtcagtctgtgttcctgctgacccagcacagtggggacgctgtg

SEQ ID NO: 815771 - DNA, 120 bp, Artificial Sequence
  ENSG00000250754_3 (sequence is synthesized)
taggacatgacctttgggggaaaggacacaagaactcagcgtgggggatccagaaaagaagtcgcacgtattgaagccagtaacgccaagccagtgaattctccttgacgagaaagaccc

SEQ ID NO: 815772 - DNA, 120 bp, Artificial Sequence
  ENSG00000250754_4 (sequence is synthesized)
acttactctgcagaagagatatatgacagctgacaatccctggaggagaatctttctactaaattggtaagggatgctaagcaaatgatgtggactcaggaaacaacgcatttcatgata

SEQ ID NO: 815773 - DNA, 120 bp, Artificial Sequence
  ENSG00000250754_5 (sequence is synthesized)
tcaaggtgaattcgagacccctcttgaattacaaagagagtgaagaaaaggagtaaacgtaaagatctaccccaatgtattttacaaaaacatctacttggaaataccgtggtttattat

SEQ ID NO: 815774 - DNA, 120 bp, Artificial Sequence
  ENSG00000250754_6 (sequence is synthesized)
tcctggcgacacaacttggcatttttttcccctttctgttgtgcttcattttattgcgcttcacagatactgagtttttactttttttcttttctagtgtttctttgttatttcttcagc

SEQ ID NO: 815775 - DNA, 120 bp, Artificial Sequence
  ENSG00000250754_7 (sequence is synthesized)
ctttattttaagttcctactcacttgcaaatttttttacagagtacgaatgaatgcctgaaagtcaaagtatatgtaccccggaacaacttgtcatttaacaacaaaaacaaaactttga

SEQ ID NO: 815776 - DNA, 120 bp, Artificial Sequence
  ENSG00000250754_8 (sequence is synthesized)
cattcaggccttcatttgtactctgtaaaaaatccgcaaatgaatattttctgaagggaaggaaagaagcacctttaccattttgttattctcttgttatctgtgaagtttgatttattg

SEQ ID NO: 815777 - DNA, 120 bp, Artificial Sequence
  ENSG00000250754_9 (sequence is synthesized)
gaaactaccaagaaagaaattagcagaaatcatcacagcaagactctttaaggaatggatggaatttagaaaggaattagctggaaaaaaatgcaaaatttttaagtgccaattttccat

SEQ ID NO: 815778 - DNA, 120 bp, Artificial Sequence
  ENSG00000250754_10 (sequence is synthesized)
ttaattttcaccagcaatccccatttcacgaatgctgtttctgagcttgaaatgtcaaaataatcaaaaataaacatagctcacgtactgaattttatcattaaaatactttgttttcca

SEQ ID NO: 815779 - DNA, 120 bp, Artificial Sequence
  ENSG00000250754_11 (sequence is synthesized)
ctcatatgacacaagaacaatctctgagcttctttgaggatgtccagatgactgctgactgcactaattgcatcaatcgtgtatccatacaggttctttctataaaatagtggtcgctag

SEQ ID NO: 815780 - DNA, 120 bp, Artificial Sequence
  ENSG00000250754_12 (sequence is synthesized)
ttatgaggcgttaagccttcatggatataaacagactattccacctaagtgatctggcagaagcttagttttctaccacaacatccaccgtcctccctccctcccttcctagctggtcag

SEQ ID NO: 815781 - DNA, 120 bp, Artificial Sequence
  ENSG00000250754_13 (sequence is synthesized)
aaaagctactcagaataaagactacatttcccagccatctttgcagctaggtttatccacctgactaaattccaccgtaactccaggttgaagaacttctacttataggcatctattcaa

SEQ ID NO: 815782 - DNA, 120 bp, Artificial Sequence
  ENSG00000250754_14 (sequence is synthesized)
cgaagacgaatcctggaatggggatggaaatgatggctcatgtcttagcaaactaccaaactgatccgagaggacagggaagtcagtgtgggcggctctaaggagcctccctctctacag

SEQ ID NO: 815783 - DNA, 120 bp, Artificial Sequence
  ENSG00000250754_15 (sequence is synthesized)
ctgcggctcagaggattacggcgcttcatccacaaggcaacattgcacaagtagcttttgaacaaaagtcatggatactattaatgatatgacacagtgaaactcagtttctgcagaatt

SEQ ID NO: 815784 - DNA, 120 bp, Artificial Sequence
  ENSG00000250754_16 (sequence is synthesized)
ttttgatcctgagcagatgttctccctagattgcttcacctgaggttgattgacttttggaaacgagatttgttcccagtgctttgtgagtctcttgttggaaggactgtctttaaatta

SEQ ID NO: 815785 - DNA, 120 bp, Artificial Sequence
  ENSG00000250754_17 (sequence is synthesized)
aagcaattagagttactttataagatttacccaaatataagagctgaagagaataattcaaattgatcagaagaaaatactcaattactgacaaatgtcaattacatcaatagcctaggc

SEQ ID NO: 815786 - DNA, 89 bp, Artificial Sequence
  ENSG00000250754_18 (sequence is synthesized)
accaccatgcccagcctcagaaattttttaaatgacagctcatacagttttcttttataaaggaggagaaaatgtgtaattgtaagcag

SEQ ID NO: 815787 - DNA, 120 bp, Artificial Sequence
  ENSG00000250754_19 (sequence is synthesized)
ttcttttataaaggaggagaaaatgtgtaattgtaagcagctgaactaaaatatctctgtgacattttgctggtgactccagccctgtgagatctgagtggctcaggaatcaaattctcc

SEQ ID NO: 815788 - DNA, 120 bp, Artificial Sequence
  ENSG00000250754_20 (sequence is synthesized)
cacaaacctgaggaagccttttattcttaatgccaacaggatgccccatgcccagaatgtcaaatctgaacaccaatggaatgcattttataaacaaattgaaaaaggacaatctttaac

SEQ ID NO: 815789 - DNA, 120 bp, Artificial Sequence
  ENSG00000250754_21 (sequence is synthesized)
agaattgttgttctctaggcagattagttgtgcttcaaatacaaaatgaaatattagagaacaaaattatttttaaacagctaatactagtagaaaataaaaggctgaaaagtgctataa

SEQ ID NO: 815790 - DNA, 120 bp, Artificial Sequence
  ENSG00000250754_22 (sequence is synthesized)
gattgtcctgagttccagagcctcaaagagcacccagcataactgtgggagaatagtaagcattggacacaaaatggaaaagctgaccttctggtacggaagagcatgagcagtgagtga

SEQ ID NO: 815791 - DNA, 120 bp, Artificial Sequence
  ENSG00000250754_23 (sequence is synthesized)
gcagtgcccatgcgttgtgaggcggcctccatggtataaggcatctattcaacgaagacgaatcctggaatggggatggaaatgatggctcatgtcttagcaaactaccagtacgtctac

SEQ ID NO: 815792 - DNA, 120 bp, Artificial Sequence
  ENSG00000250754_24 (sequence is synthesized)
cacacaaaggtttagtgcaactagggactaaacaccagtcatctccaggacttgacttcatcatttgcctgttcaccattgtatccctagaatctgtaacaacaaccagaagacacagtg

SEQ ID NO: 815793 - DNA, 120 bp, Artificial Sequence
  ENSG00000250754_25 (sequence is synthesized)
gcctgccacaagaatacgaaggccagagctccagcagctgttggagccacgatgtgaccctgaaggcaggaaactcagctttggaaggcaggaccttgctctgtcacccaggctgtagtg

SEQ ID NO: 815794 - DNA, 120 bp, Artificial Sequence
  ENSG00000250754_26 (sequence is synthesized)
tgatatggtaatccttaatcgagctacctcccagtagtgattatactgacatgggaagaatatctaagtcgtggaggcagcccacaacaacactgtgtcattgttcaccccgggctcgac

SEQ ID NO: 815795 - DNA, 120 bp, Artificial Sequence
  ENSG00000250754_27 (sequence is synthesized)
caggactaacttttaccagcatctctaacgtcacctttcccctgatgcctccccacaacccctggccccagctcccattcccgccccatcatagcaaaaaagtagcaaagaaaaccctga

SEQ ID NO: 815796 - DNA, 120 bp, Artificial Sequence
  ENSG00000250754_28 (sequence is synthesized)
atgaaaatatatactgggaaaatgtagacgttttaaatgttattcctcgaatttctcctttcggataagaaaactgtataaacacagaagagaaggcagtactctgaagttttcagcaaa

SEQ ID NO: 815797 - DNA, 120 bp, Artificial Sequence
  ENSG00000250754_29 (sequence is synthesized)
tttaattgcaagagtccagtcatcttattgtagctccctctgcagccaattgtgtgattccttccctcctttttgttgtctttccctttctacagacatttattgagcacttgctaggtt

SEQ ID NO: 815798 - DNA, 120 bp, Artificial Sequence
  ENSG00000250754_30 (sequence is synthesized)
attgccaaatgtgccctgtgggctaaatgtcccccaggtgagaacaactgttttaagaaaacaaatttctagatcatcagctcatatacatattctttcctaaaattaacctgcgcccat

SEQ ID NO: 815799 - DNA, 120 bp, Artificial Sequence
  ENSG00000250754_31 (sequence is synthesized)
tatgttaaaattaacaagatttcattaggctggatctcctcttcctgtctcttcttttacaagcaaccttctcctactttacaaaaggccccctctttcccatccagaatcttactgcag

SEQ ID NO: 815800 - DNA, 120 bp, Artificial Sequence
  ENSG00000250754_32 (sequence is synthesized)
tgcactgcctgggagtgtaagaatcctgggccccaaacagtgaaaacttctaaccccctaagctgactcattcaggaatgcatttccaattaatttcactttttgttataactatttatc

SEQ ID NO: 815801 - DNA, 120 bp, Artificial Sequence
  ENSG00000250754_33 (sequence is synthesized)
aaaagtaatacgtttatggtgttggataactgtatgttagtaaaattttgacgttcaacacctttggtcacgagaaataaaaaataaagtatctatatacatactcttgttgcagagaag

SEQ ID NO: 815802 - DNA, 120 bp, Artificial Sequence
  ENSG00000250754_34 (sequence is synthesized)
tacaatagggtgatcacagctttttgattatgaaatattttatattagtataaaattctgtagaggagataaaatggaaaatgagattcaaggaaaaaaggagtaatataaagcatccaa

SEQ ID NO: 815803 - DNA, 120 bp, Artificial Sequence
  ENSG00000250754_35 (sequence is synthesized)
aggcgtgagccaccgcgccgagcctaagcagaagtgtttgcaagtgccctgagaatcgtgcttaaagggaacagactcagctagaaagaagccctttccaccattccaccttttcccctt

SEQ ID NO: 815804 - DNA, 120 bp, Artificial Sequence
  ENSG00000250754_36 (sequence is synthesized)
cttcaggcctgccacaagaatacgaaggccagagctccagcagctgttggagccacgatgtgaccctgaaggcaggaaactcagctttggaaggcatctattcaacgaagacgaatcctg

SEQ ID NO: 815805 - DNA, 120 bp, Artificial Sequence
  ENSG00000250754_37 (sequence is synthesized)
tttagtgtcgtctcaaaattcacgctgtcaactgtctctaggaatcatttccatctgagaacagaccacacaaaggttagttcggtgggtctcagtgaagatgttttaattgtctgacaa

SEQ ID NO: 815806 - DNA, 120 bp, Artificial Sequence
  ENSG00000250754_38 (sequence is synthesized)
tagattcttccatcatttgacttgcaaatactgtcctcttgctctcagataacatgttcagaattagaccatttgtcaataaatttcccaaaactccttaattatgatactgaaatacaa

SEQ ID NO: 815807 - DNA, 120 bp, Artificial Sequence
  ENSG00000250754_39 (sequence is synthesized)
caatccctggaggagaatctttctactaaattgacacagtgaaactcagtttctgcagaatttgatttcatttgagttactggggaacaaagcaattagacaatgaataatagctcaaga

SEQ ID NO: 815808 - DNA, 120 bp, Artificial Sequence
  ENSG00000250754_40 (sequence is synthesized)
ctgcctcccgggttgaagcaattctcctgtctcagctctcgagtagctgggattacaggaaaagctgaccttctggtacggaagagcatgagcagtgagtgagcagtgcccatgcgttgt

SEQ ID NO: 815809 - DNA, 120 bp, Artificial Sequence
  ENSG00000250754_41 (sequence is synthesized)
gaggcactctgggaaggcaacctaggaagggtggggccctggggccttttgaggagctaagtggccaaggagaggtgcgtttagttatctcagaagtccgttgccctcgtggtgtccatt

SEQ ID NO: 815810 - DNA, 120 bp, Artificial Sequence
  ENSG00000250754_42 (sequence is synthesized)
ctgtaactgttctcacaagacaagacagcctgagttgtttacagccagcaactcttcctgtctgagagcggtgtctcccgttgggtttccctagtgcctcaccttggtccagatggccga

SEQ ID NO: 815811 - DNA, 120 bp, Artificial Sequence
  ENSG00000250754_43 (sequence is synthesized)
aggggaccgtttcctgtggcctcttcgcactgttctaggtgttaacgatcccccccgccccgcccctactgacttcctcatcctagccttttacttcttttctgcctggcctctgatttt

SEQ ID NO: 815812 - DNA, 120 bp, Artificial Sequence
  ENSG00000250754_44 (sequence is synthesized)
acaatatactatggggagaaatgtctctgaagttttacttcagcctgaaatgtataagacaagccctcaagagtttccaaaatcataaatacgttgctttgtgagtctcttgttggaagg

SEQ ID NO: 815813 - DNA, 120 bp, Artificial Sequence
  ENSG00000250754_45 (sequence is synthesized)
ataaagccatcaacctcccacttcctccaaggcagcagatcctgcttcccacagcagaggctgtggaaacgcctggcactctccttcccagtgttccttccaactccgggcatatggcaa

SEQ ID NO: 815814 - DNA, 120 bp, Artificial Sequence
  ENSG00000250754_46 (sequence is synthesized)
gcccctttcccctgcctgctgatgaggctgcctgctgaagggatgcctggagcagctgcagcttcccccaggcctgggggctgagccggaccatgagaagccagcatgctgaggatggtg

SEQ ID NO: 815815 - DNA, 120 bp, Artificial Sequence
  ENSG00000250754_47 (sequence is synthesized)
gagcacggggcagctggaggctgggtgcttggtggccttttggagttgccaaaccaaccctggagcctggagccccagcactgttgtcatttgagatgatcagtgtcttcattgtttaag

SEQ ID NO: 815816 - DNA, 120 bp, Artificial Sequence
  ENSG00000250754_48 (sequence is synthesized)
acacttttagttggatattgtcacttgcagccaagaatctttaaacttacacattgtggaaggaatgcctaaagaaggactgaagcaattttctttcaatcaccgatatctgaaaataga

SEQ ID NO: 815817 - DNA, 120 bp, Artificial Sequence
  ENSG00000250754_49 (sequence is synthesized)
gctttactgagaaaaaggaaaagattcagactcctttatctgccccttgagtatacaagcacctaagcctcgggactcatacatgttggattctctcgcacagtaaagaaaataacactc

SEQ ID NO: 815818 - DNA, 120 bp, Artificial Sequence
  ENSG00000250754_50 (sequence is synthesized)
ggatactattaatgatatgttcccacacacatttagtgtcgtctcaaaattcacgctgtcaactgtctctaggaatcatttccatctgagaacagaccacacaaaggtttagtgcaacta

SEQ ID NO: 815819 - DNA, 120 bp, Artificial Sequence
  ENSG00000250754_51 (sequence is synthesized)
gcaagaagcccattgccagatgctggtgccttgacactggacttctcagcctccagaactgtgagccaacaaatgtctatttgttgtaagaaatcttactagataagggccgggcgcggt

SEQ ID NO: 815820 - DNA, 120 bp, Artificial Sequence
  ENSG00000250754_52 (sequence is synthesized)
ggcagccccgtcttccaaaggctgcttctcaagtccacacacacactttggaaggagaatcctgctcttggacgtggtattcttggtgggacagctacctataaaatgaatgaggcaaaa

SEQ ID NO: 815821 - DNA, 120 bp, Artificial Sequence
  ENSG00000250754_53 (sequence is synthesized)
aaggaataataatgagattgggtatgtaaaatatcgataagtagaggcatttgttaatgttaacaatgaaattacaatctgtcattttatgtgttgagtaaataatataaagaattcaaa

SEQ ID NO: 815822 - DNA, 120 bp, Artificial Sequence
  ENSG00000250754_54 (sequence is synthesized)
tttgacaagactcaattacaatccagcagggaaaatcttatggctcactaaactgtgggactccccgaaaggccaaacttaatttactcatagatgagtccccttaacataaggaaagtg

SEQ ID NO: 815823 - DNA, 120 bp, Artificial Sequence
  ENSG00000250754_55 (sequence is synthesized)
accttcataaagacagaatatatctatgatttttatgtaattatatgtgtgggataaacatgttcaaatgacttgtggtaaatgtactaatgaagctaaagaaactataccctaactacc

SEQ ID NO: 815824 - DNA, 120 bp, Artificial Sequence
  ENSG00000258569_0 (sequence is synthesized)
gtcccaagttaccccaaggacgccggtgggcattcgctccctcctcacccagctgtcagggcgccgcgaagccggtgcgaagctgcggaggacgttttcaacgtgccagagggagcgcaa

SEQ ID NO: 815825 - DNA, 120 bp, Artificial Sequence
  ENSG00000258569_1 (sequence is synthesized)
actccatggagattcctagcgcagaaggaattcctgcggtcgggaatttcttgaaaaagattcttcgcaggggccctgagccgataatgctgaaattaacatctttggatatacaattct

SEQ ID NO: 815826 - DNA, 120 bp, Artificial Sequence
  ENSG00000258569_2 (sequence is synthesized)
aacagcaggtctcaaatttttggtctcaggacccctttatgctcttaaaaatgattgacagcctccaagagcttttgttcatgctttggtaaggctgtgagagcacagagctgaattagg

SEQ ID NO: 815827 - DNA, 120 bp, Artificial Sequence
  ENSG00000258569_3 (sequence is synthesized)
gatcttggacttcaagttactgactagccccagcactcgccaagctcacaaagaagacagaaacgaggtaaacatccaaccatgtttatggaagagttcatctctctgtcagcattacgt

SEQ ID NO: 815828 - DNA, 120 bp, Artificial Sequence
  ENSG00000258560_0 (sequence is synthesized)
cattctgctcttgccacagacttcttgccctccttcttgccctcctcgcctcctgtgtgaaacttctcccttggctgccatgacaccgcatggcttggctcttctctggactgccccttt

SEQ ID NO: 815829 - DNA, 120 bp, Artificial Sequence
  ENSG00000258560_1 (sequence is synthesized)
tctgaccactgtctttcccaaggtggagaggggcagacagagagagagtactttagagaaagtctggctggctggtgcccaccaggaagcagtgctgtgctgggaagcaaggctgggtac

SEQ ID NO: 815830 - DNA, 120 bp, Artificial Sequence
  ENSG00000258560_2 (sequence is synthesized)
cagctctgccccaggtctggctctattgtttgccagcaacaagacttcagggaggtgagtgcactgcaagaaggtggccatctgcaagccaggaagagggcccttgccagaaactgaact

SEQ ID NO: 815831 - DNA, 90 bp, Artificial Sequence
  ENSG00000258560_3 (sequence is synthesized)
gcctggcgtcttgatctcataaatgtcttgtttaaaccacctagtctatggtattttgctacagcagcccaagcagactaatacacatac

SEQ ID NO: 815832 - DNA, 120 bp, Artificial Sequence
  ENSG00000258561_0 (sequence is synthesized)
gccttaggctggctctcgccggcgggccggctttctacgcgggggcagcgaggctggctcagcaccccgggcctcctcttgcaaccctcgggaatggccggccgccccactgaaagcgct

SEQ ID NO: 815833 - DNA, 120 bp, Artificial Sequence
  ENSG00000258561_1 (sequence is synthesized)
ggggaaccgagaggtgtcttagaaagctgcatgagtggcagaacggtggctactatgacagagaggccgccgtgggcgaagagggaggtatcctgtcctgcctcgtgctagccgctggct

SEQ ID NO: 815834 - DNA, 120 bp, Artificial Sequence
  ENSG00000258561_2 (sequence is synthesized)
tcctcagtgggctctccctgaaggaggatttccgcttcacctatgctttaggattccatctccagtcagtgcctgcaagacgatcctcacgtgcgaaactgaggagtctgaggcagggca

SEQ ID NO: 815835 - DNA, 120 bp, Artificial Sequence
  ENSG00000258561_3 (sequence is synthesized)
agcgctgcttttagatgaaaagcatcaatctccttagcgaacgagaacgtgttccacctgaaccacagtccattgccgcggcgattttcatttcagtattcgtgggatgtgagattacca

SEQ ID NO: 815836 - DNA, 120 bp, Artificial Sequence
  ENSG00000258561_4 (sequence is synthesized)
tgaaatgtgacattcttcagaattcatcctggaatcaatattatgccaaagaaaattttctgaaagctacacagatcataccactgcaactcagccaaccagcacatcggacagtgggag

SEQ ID NO: 815837 - DNA, 120 bp, Artificial Sequence
  ENSG00000258561_5 (sequence is synthesized)
catcggacagtgggaggaggaattcttggctaagagtactgagagatggggtttcaccatgttaaccaggattgtctcaatctcctgaccgcgtgatccacctgcctcagcctcccaaag

SEQ ID NO: 815838 - DNA, 120 bp, Artificial Sequence
  ENSG00000258561_6 (sequence is synthesized)
gtgagccaccatgcctggccaaaattctgtatgtctttctaatctcacttcctaatggagataaaatagatctcaggcttatgtatttttctagaacattaaaatcttgttttttgtgta

SEQ ID NO: 815839 - DNA, 120 bp, Artificial Sequence
  ENSG00000258561_7 (sequence is synthesized)
ggacgctctaccggggtgggggttcccagaaaggagggggagaggagcccgagtaggggaatcctgccctctcaagtaaaaagctggatccccggcagcaggctgcagcccgtcctcgct

SEQ ID NO: 815840 - DNA, 120 bp, Artificial Sequence
  ENSG00000258561_8 (sequence is synthesized)
aaggaaacgacgaggcagacagagggccttttgcgcggaaaggcagaaggcagacactttccgaggtccggacgcaagccgatcccccatcccccgagggaggcgaagggtgccccatgg

SEQ ID NO: 815841 - DNA, 79 bp, Artificial Sequence
  ENSG00000258561_9 (sequence is synthesized)
gtgtgacattcttcagaattcatcctggaatcaatattatgccaaagaaaattttctgaaagtcttgctgtgtcagttc

SEQ ID NO: 815842 - DNA, 120 bp, Artificial Sequence
  ENSG00000258561_10 (sequence is synthesized)
gagtagctgggattacagctacacagatcataccactgcaactcagccaaccagcacatcggacagtgggaggaggaattcttggctaagagtactgaggtaaactcttcatctacttgg

SEQ ID NO: 815843 - DNA, 120 bp, Artificial Sequence
  ENSG00000258561_11 (sequence is synthesized)
ttagaacagaaaagcctgtaccctgatttactgagaggaaaagttggctgactcttggtctgaattgaaatattcctcctttgaccaataccatgaataaaaaaagaaccagaccaagga

SEQ ID NO: 815844 - DNA, 120 bp, Artificial Sequence
  ENSG00000258561_12 (sequence is synthesized)
cattactgtgagttttcagaacatcagagataaagagaaaaacctgagattccacagagaaacgaaggtcattttacaaaggatcagaaatgagaatgggattgaacttctcaaaaccag

SEQ ID NO: 815845 - DNA, 120 bp, Artificial Sequence
  ENSG00000258561_13 (sequence is synthesized)
cagtggagagtacaagaaagtagagcattgccctcaatatactgcagggaaaacaactttcaacgtggaatttaatccagtgtaaggatagaatagagtgtttttagacagccatgtctc

SEQ ID NO: 815846 - DNA, 120 bp, Artificial Sequence
  ENSG00000258561_14 (sequence is synthesized)
aaaaattgtactttttgtcttctgcagaggagatgattcagtgcaataaggaaataaaccaagacatgaaagatatggaggactgtgggcaggacagtgacaggagatcctagaaagaca

SEQ ID NO: 815847 - DNA, 120 bp, Artificial Sequence
  ENSG00000258561_15 (sequence is synthesized)
gctgggctccaggcccagagagcaactggtccaggttggagcagaactgagttggccagggctgaggtctccagggaaaaaaaaagaaccaatggtttatctatgtgctggacccagtgg

SEQ ID NO: 815848 - DNA, 120 bp, Artificial Sequence
  ENSG00000258561_16 (sequence is synthesized)
ctgcaactcagccaaccagcacatcggacagtgggaggaggaattcttggctaagagtactgagattatttacccctcaaaacaacccccaaggtgtctacaaccagttccacaagtctt

SEQ ID NO: 815849 - DNA, 120 bp, Artificial Sequence
  ENSG00000258561_17 (sequence is synthesized)
cccattcccgtggccccacccagaagtgattcagcttacaggaggacagcttcagcttcccatgattttgtctatgccccaaccaatcaatagcaagcatagccacagccacccctttcc

SEQ ID NO: 815850 - DNA, 120 bp, Artificial Sequence
  ENSG00000258561_18 (sequence is synthesized)
caaactgcctttgagaaacccctaacctatgaactttggacgagaatgatttgagaattaactccatctcccacctggcgtggctggccttgtgtctattaaactctttctctactataa

SEQ ID NO: 815851 - DNA, 120 bp, Artificial Sequence
  ENSG00000258561_19 (sequence is synthesized)
caaaattctgaaaccagatgtgataagcttgacagagcctgcaattccatctaacaccttgacaccttctcctccttcagaacccccctccctggcagcagccagaaacctccccaaaga

SEQ ID NO: 815852 - DNA, 120 bp, Artificial Sequence
  ENSG00000258561_20 (sequence is synthesized)
gggtggatgctccgcaagtgagaaagggaaggagggcatgagaactcctggtctaaggggaaagataccaaggaggaaagagaaagtcaaaccacagacaaaataatccacaaaaagcag

SEQ ID NO: 815853 - DNA, 120 bp, Artificial Sequence
  ENSG00000258561_21 (sequence is synthesized)
caaatgtacatatatttggggactacagtaaaactccatgataatgtgtcatgtgagtctataatttaaatctaggtttcaatcatttttcactgtgtgccatagtaaaaaataagtttt

SEQ ID NO: 815854 - DNA, 120 bp, Artificial Sequence
  ENSG00000258561_22 (sequence is synthesized)
atattgtgactcagtacatatacacggttttacaaaacaaccttcacccttactacatgggatacattctgacattttcttccatcctatccaaccctactccattttatcctaccttac

SEQ ID NO: 815855 - DNA, 120 bp, Artificial Sequence
  ENSG00000258561_23 (sequence is synthesized)
attaccttaatctattccaaccttttctgctctgcttcatttttaaaaaaaggaaatgttggctactcactaaattaatttcatgacccactaataaagcataactggcaacttaaaaat

SEQ ID NO: 815856 - DNA, 120 bp, Artificial Sequence
  ENSG00000258561_24 (sequence is synthesized)
agtagtttgttaaaattcatagatgtgcagacttctgattcacagacttttggaactgtagatcatctgtttctagtgtaacctcattttccaggtgaagataccgagccctaaagaggt

SEQ ID NO: 815857 - DNA, 120 bp, Artificial Sequence
  ENSG00000258561_25 (sequence is synthesized)
tgtaattcatcctcaattgtgtgcctggttgatggcacgaccaatgttctttcttggatttacatggtgatgcaagagggagtgtggtgtagggcagagcctgggttgacattggtagac

SEQ ID NO: 815858 - DNA, 120 bp, Artificial Sequence
  ENSG00000258561_26 (sequence is synthesized)
acattctgtttagagctctgtgaccttaagcaaatcacttaaaccatttggcctcagtttcctggaaaatgaggtgtggtgaggatcaattaagtaagacataggagaggctttgcaagc

SEQ ID NO: 815859 - DNA, 120 bp, Artificial Sequence
  ENSG00000258561_27 (sequence is synthesized)
agtgaagtccaaaggtgaaaaattattacttctcttttctccctatgatagtctgtgatgcaggcattatttgtattttttgtcagcagttctacaacagagaccctggctttggaacag

SEQ ID NO: 815860 - DNA, 120 bp, Artificial Sequence
  ENSG00000258561_28 (sequence is synthesized)
aaaagaaaaaaaaaatctatgcagtaatcagcctctttctcatctttcagagacccccaaaccctctaatttatcctctactttatcctctcctctttgtttttctaatttgttttttac

SEQ ID NO: 815861 - DNA, 120 bp, Artificial Sequence
  ENSG00000258561_29 (sequence is synthesized)
ttcttgattcatcttatcatttcctgcctcttcttaaagtagtcaaggtcaatgcatggtcagaaataaagagcccatatagagatgataaacatattcagaagtgtctgtacaggtctg

SEQ ID NO: 815862 - DNA, 120 bp, Artificial Sequence
  ENSG00000258561_30 (sequence is synthesized)
tagcaacatatatacccaagtctatctccatgcgggagtggcaaggggtagactagccatctggaaatttatctaagatgttcatctgtgtcttaagaggatgatgacattccacaaaca

SEQ ID NO: 815863 - DNA, 120 bp, Artificial Sequence
  ENSG00000258561_31 (sequence is synthesized)
gaatcagtaggtgtgagtaagacacgtggatcctgtcctcagttggttctagggaagaaccatgttgcctctggagcatccagatgcatgagattttctctgatatgtaaacatgtctga

SEQ ID NO: 815864 - DNA, 120 bp, Artificial Sequence
  ENSG00000258561_32 (sequence is synthesized)
atggtctcgtgccaggagaacccattagttcatgtgatgacttcagatggcatctgaaagatagtcttgctcacaggtggctttgtccagatgaagattcagttgacatcagtggcatgg

SEQ ID NO: 815865 - DNA, 120 bp, Artificial Sequence
  ENSG00000258561_33 (sequence is synthesized)
ttgtggctctcctgacagctcttcagacttggtttaccctgtccaagggctttcaaaaggaaagttaagcttgatgtggcctcttggtcactctggagccatttctctgctctgcatcag

SEQ ID NO: 815866 - DNA, 120 bp, Artificial Sequence
  ENSG00000258561_34 (sequence is synthesized)
aagaggtccaaggaactggagtctacctctctaaggatcttgatatatcttagaaccataggaaaagtttagctggaaaacatttaaataaatccatctgcacatccctatctcatattt

SEQ ID NO: 815867 - DNA, 120 bp, Artificial Sequence
  ENSG00000258561_35 (sequence is synthesized)
gaaagatatagcaagggtaaggctcattttgtgttttctcctatcaacataaattctgctcaaatatctggttcagttttcttagtaatttatgcgttttcagctcagtgattttctgca

SEQ ID NO: 815868 - DNA, 120 bp, Artificial Sequence
  ENSG00000258561_36 (sequence is synthesized)
gaaccagccttttatgagaaactaaaattttcccagggagaaaattgccttctctgtcacagtagtctatatttagtgcataaccacctgtgtgacatgacctgagttcccccatctaaa

SEQ ID NO: 815869 - DNA, 120 bp, Artificial Sequence
  ENSG00000258561_37 (sequence is synthesized)
atgaagctgtacctagagaggacatcgctttatggtggtggagagcacagatttgggagccagactgtctgggtttgatccctacttttctgcttatcagtgatgtgaccttgagaaaat

SEQ ID NO: 815870 - DNA, 120 bp, Artificial Sequence
  ENSG00000258561_38 (sequence is synthesized)
tactaaacccatttttgtttcaatttttttcatctgcaaatcaatgatgataataatagtatctatgtcatgaaaattatgagttaatgcagtgcccagttacagtaactgctaaagatt

SEQ ID NO: 815871 - DNA, 120 bp, Artificial Sequence
  ENSG00000258561_39 (sequence is synthesized)
tagtatttttcttactgaaatgatctgtgagttcccctatggttttaaaagtaaatgataacattataataatgatattttacgttggcatatctttgtattatttgtaatacttgtcct

SEQ ID NO: 815872 - DNA, 120 bp, Artificial Sequence
  ENSG00000258561_40 (sequence is synthesized)
catatattatccctcagatgaggaaattgaggctgaaaagttaagtgacttttttgaggatatattttttaaggggagtagctgagtctagcagtaagctttcttattcccagtttgcgg

SEQ ID NO: 815873 - DNA, 120 bp, Artificial Sequence
  ENSG00000258561_41 (sequence is synthesized)
cactcccctcacacgatgatgctttcagctgggaatagatacctccctcctagatggccctcctcctgatacttttcattatttgaaaatagtgccaccattctccaaattgctggatgc

SEQ ID NO: 815874 - DNA, 120 bp, Artificial Sequence
  ENSG00000258561_42 (sequence is synthesized)
ccccatagactaaaaagtgtttataacttttcatgtccatgtctgttttaataatgataacaatagttgctataactagtaaacccaaaaatcttagtggcttaccacaatagtgattta

SEQ ID NO: 815875 - DNA, 120 bp, Artificial Sequence
  ENSG00000258561_43 (sequence is synthesized)
tgtcttgtaaaccaaaaataaaactctaagcctcctaaccaattgagtggaccccgtcttgccaagggcactccagagtaaatctgaaaaactagttcaggccatgatgggaaatgaggt

SEQ ID NO: 815876 - DNA, 120 bp, Artificial Sequence
  ENSG00000258561_44 (sequence is synthesized)
ttggacatgcctcattataccctcctctctttggaattcagggacaactgaccagcattaacatcaaaacagagatcttaagactgaccaaacagactctctgtagtaataaaatacatc

SEQ ID NO: 815877 - DNA, 120 bp, Artificial Sequence
  ENSG00000258561_45 (sequence is synthesized)
actaaatgacagatagcaggccctgacagaaataaaaatattttaccctgaaatatatttctttgatgtattttaaaatggccctgcagagatgtctcttgtgggggaaatctacatact

SEQ ID NO: 815878 - DNA, 120 bp, Artificial Sequence
  ENSG00000258561_46 (sequence is synthesized)
gagatgtctcttgtgggggaaatctacatactgtagagaatgtcctcccctttctaggtcttttcctgatcctagagagataaagagtctggtacctttttaagtctgataagaaacatt

SEQ ID NO: 815879 - DNA, 120 bp, Artificial Sequence
  ENSG00000258561_47 (sequence is synthesized)
tccacaaccccttatcttaacccagacattccttttcattgactcctggtctttagataataacttaagtctttcaaccaatcaccaataagaaaatctttgaatccacctatgacctgg

SEQ ID NO: 815880 - DNA, 120 bp, Artificial Sequence
  ENSG00000258561_48 (sequence is synthesized)
taagaaaatctttgaatccacctatgacctggaggtcaccctgcccccaccatttgagttgttctatctttatggaccaaaccaatgtataccttacatgtattaattgatgtgtgcttg

SEQ ID NO: 815881 - DNA, 120 bp, Artificial Sequence
  ENSG00000258561_49 (sequence is synthesized)
tgactcctgtccctgctaaaatgtataaaatcaagctgtaacccaactacctttgatacatgttttcaggacctcctaaagctgtgtacatgcttgtccttaaccttggcaaaataaact

SEQ ID NO: 815882 - DNA, 120 bp, Artificial Sequence
  ENSG00000263069_0 (sequence is synthesized)
tggagacgcttgcgctttcccgggccgcacttcccacccgggtcttcagaagcccgtggccgctgggtgagcccctgcgtgaacgcacacgcacgcacacggcttcaggttgccccgcgg

SEQ ID NO: 815883 - DNA, 120 bp, Artificial Sequence
  ENSG00000263069_1 (sequence is synthesized)
cgccgcgcgcgatatcggctcggatcccgggaggccgtccgcccctttttcagcggatagctgaggccagatcacacctggctgtaggcccaaagcgaacctatcactggcacagaagct

SEQ ID NO: 815884 - DNA, 120 bp, Artificial Sequence
  ENSG00000263069_2 (sequence is synthesized)
tggacctggaaggggactcatggaggagtccgctgtcttttagagatgggaaaactgggcccaaataaccaagtcactggtttcttaggctttcaggcaggaggtctgagagtctgtctt

SEQ ID NO: 815885 - DNA, 120 bp, Artificial Sequence
  ENSG00000263069_3 (sequence is synthesized)
aaagagaccctctgtctggggcccagagcacccctccttcctcaatacacggccacatccaagataatcaaggttagtctcatgggtgacagaaaaataaccatggcagtgaatatactg

SEQ ID NO: 815886 - DNA, 120 bp, Artificial Sequence
  ENSG00000263069_4 (sequence is synthesized)
ctgggtcctggttttgctgttaccattcttcaaacagcaggactgggaaaatcccgcctgtcccctgcctgctctgcacgtcattttaacttcatgactgaaaacagcagccctttctag

SEQ ID NO: 815887 - DNA, 120 bp, Artificial Sequence
  ENSG00000263069_5 (sequence is synthesized)
ggttatcaacatgaatgtcggtaaatgttctactctaagaacagatgttttactttttttaagtttttagtatgaaaaactgtaaacacgaaattagaggaagagtccagcacctgccat

SEQ ID NO: 815888 - DNA, 120 bp, Artificial Sequence
  ENSG00000263069_6 (sequence is synthesized)
ttggccactgtccagacctactgtgtgcttcttggggaaaaactttacagctttgaatggctgagaggtttggaaagaaacagctcagtccccatggcccggatggagagaggatccctg

SEQ ID NO: 815889 - DNA, 120 bp, Artificial Sequence
  ENSG00000263069_7 (sequence is synthesized)
caggcaggtccccatgctgccaccagattggagccactccttgcttcctttagtcacagtacctgaatgtgcccgcctcctggagagcgtcctggttgcaggcttcccttgccaaccact

SEQ ID NO: 815890 - DNA, 120 bp, Artificial Sequence
  ENSG00000263069_8 (sequence is synthesized)
ccagagggtgaaactggctctcttcttgcttctttaaaaagacactgaggcgcatcttggatacccgcaagaaagaggctgtacaaaggcagaaacagacgttcagcatggccgtggctg

SEQ ID NO: 815891 - DNA, 120 bp, Artificial Sequence
  ENSG00000263069_9 (sequence is synthesized)
agctgttggctccggagtgcttctgtcccacctcccccaggaagggaagtccgttggccaggccaattctagagcaaaatctgagagatgctcttagattcccactgtgtcactgcttct

SEQ ID NO: 815892 - DNA, 120 bp, Artificial Sequence
  ENSG00000263069_10 (sequence is synthesized)
gctgagccatggaaacctgagagggtgtcccccaacacacagtgaaatgatgcccactcctcaggaagagcccacgtgggggcaggggcaagaggggtggggaggctcataccgtggcac

SEQ ID NO: 815893 - DNA, 120 bp, Artificial Sequence
  ENSG00000263069_11 (sequence is synthesized)
gcgtcatcctcattcaagaggcccaggaggagcaccaccctccgcatattgcgcgtgcagctctcgttctggtctctgagcatgcccacggcgctctgcacacagcttctcagcagcctg

SEQ ID NO: 815894 - DNA, 120 bp, Artificial Sequence
  ENSG00000263069_12 (sequence is synthesized)
gtggtgtccaggatcgacacctgttggtggagacggttgggtcatccgtttctgccactgacacagtgggcaaaagccaaaccgcccgtatgcgatgagggtctcaatgcagcaaacagc

SEQ ID NO: 815895 - DNA, 120 bp, Artificial Sequence
  ENSG00000263069_13 (sequence is synthesized)
acagggcggcggtcctcacggacaaagaagagacgccgacctccgccctgcaccccccaaactgccggtgcagatgcccttgacccccagtaaccagcaacaagaccgtcactgtgtgag

SEQ ID NO: 815896 - DNA, 120 bp, Artificial Sequence
  ENSG00000263069_14 (sequence is synthesized)
gaaagtggggcgccatcctcacccctgcacagcggcggcgactcctctagctcccaatgcaaaagcgtttaaagatgcagctcagaagcatcaccagcagcacaaggggaggtcccaaga

SEQ ID NO: 815897 - DNA, 120 bp, Artificial Sequence
  ENSG00000263069_15 (sequence is synthesized)
ctcagaactttctgtttccatggcctcctctgccacctctgccacctcccctgatgtgctggcctccgtctccatcgcctcctcatggccgtcttccgcccggtgttccaagcccactgc

SEQ ID NO: 815898 - DNA, 120 bp, Artificial Sequence
  ENSG00000263069_16 (sequence is synthesized)
agtcgaagcaaacgtgattgcgttaccactcagaaggtggcacagggactggcagcggtgccatctgggagtctgtgtgctcagcctccgagtgcaggcttccccggcccctgctgtggt

SEQ ID NO: 815899 - DNA, 120 bp, Artificial Sequence
  ENSG00000263069_17 (sequence is synthesized)
gctaggtccccagatgagagatcacggtcatgaagatcagcccccaaggcagccccttccttccagcctgggctctggcgtgttctaggtgctcacttccatggctggcctgctcacaga

SEQ ID NO: 815900 - DNA, 120 bp, Artificial Sequence
  ENSG00000263069_18 (sequence is synthesized)
gctctacctcagcctgtggtaagcgcacctgctcggccctggtgctctatgatgagccaccagtcagttctgcagatgtgtccccgagctcctgccgagggacgaaacacggtggccctg

SEQ ID NO: 815901 - DNA, 120 bp, Artificial Sequence
  ENSG00000263069_19 (sequence is synthesized)
ctcctagtgccatgtgcacgccacgctccacacctgccatctgcccttccaccacctgctcccccaggggctccgcctcgtgactcacgctcaggcaagtctccgggcgcgaacagctgg

SEQ ID NO: 815902 - DNA, 120 bp, Artificial Sequence
  ENSG00000263069_20 (sequence is synthesized)
ctgatggtgacatgctgcagcctggtcacatcagaaaccatgagggtggatctccggaggtcatcgatgtggacagactgccacagccctgtgaagagtgaagccacccacaactgtctt

SEQ ID NO: 815903 - DNA, 120 bp, Artificial Sequence
  ENSG00000263069_21 (sequence is synthesized)
tgtgtctttcccggctgctgctcagccctaagcagggacattgcacaccctggcttgtcattatcttgctgcgcaatgaatgactggcaccctgaagccgaaaccctggaatgggcctgc

SEQ ID NO: 815904 - DNA, 120 bp, Artificial Sequence
  ENSG00000263069_22 (sequence is synthesized)
gcagaaaccacccaacccgatactatacacgacccgattctatgcccatcgacagcttcaccataagcagcaacggtaagacctgcaatggccagcgtgggaaggacgcatggataaggc

SEQ ID NO: 815905 - DNA, 120 bp, Artificial Sequence
  ENSG00000263069_23 (sequence is synthesized)
ctgtggttctttcacccatgcattgttgtatttgctgtatcacagttagtgaggggtgggggacactggcaaggtctgccttccattctccacgaaattattcaagtaaacttactttcc

SEQ ID NO: 815906 - DNA, 120 bp, Artificial Sequence
  ENSG00000263069_24 (sequence is synthesized)
tgtttctggaataccaacttttctatgtcataaatagctggtgaccattccttggaaaaaaagagatctgaagatagtccgacccccgccactctccctccccgccaaacaggcgtatcg

SEQ ID NO: 815907 - DNA, 120 bp, Artificial Sequence
  ENSG00000263069_25 (sequence is synthesized)
gtgcgttcctgacagtgtctgtcgggagtcgggagtctccacgccgtgtgacctacatgctaagaggtgaggagcttgcctagagtcagtccaggagaggtgcacgcagcctcccatccc

SEQ ID NO: 815908 - DNA, 120 bp, Artificial Sequence
  ENSG00000263069_26 (sequence is synthesized)
aggattcatgttttcatggtaatcagtggtaagaaatctaattgcatctggaaagaatcctcttgaggttaacaataatattctaatttcagactgtacaacacagaaccaaatgagaaa

SEQ ID NO: 815909 - DNA, 71 bp, Artificial Sequence
  ENSG00000263069_27 (sequence is synthesized)
ttctaatttcagactgtacaacacagaaccaaatgagaaacagttccaacatgacttaaataaatacactg

SEQ ID NO: 815910 - DNA, 71 bp, Artificial Sequence
  ENSG00000263069_28 (sequence is synthesized)
gctggggcgagcggatcatgaggtcaacggattgagaccatctaggccaacgtggtgaaaccccgtcagcc

SEQ ID NO: 815911 - DNA, 120 bp, Artificial Sequence
  ENSG00000263069_29 (sequence is synthesized)
agctatgtcaaggaaattggaggtcttctcatgttcacagaaagctccgtgttttaggagcccctgggcggtggactgagggtgtagcactgaatattgagaggagactgggcgacccct

SEQ ID NO: 815912 - DNA, 120 bp, Artificial Sequence
  ENSG00000263069_30 (sequence is synthesized)
tcacccaccggcacccttcgctgaccatgttctgttcccagacttcacagcaccagctccaggcagctgaggaaacgtctccgtgtctgcatccagtccccatcatgcaagctctacacc

SEQ ID NO: 815913 - DNA, 120 bp, Artificial Sequence
  ENSG00000263069_31 (sequence is synthesized)
tgacccttagccagtatctaaacatctacctttaattcctcctccgttgacacacgcatggtcaagagaatgaaatccttcaagtaacactgaagaagttcctgctgcggctctccatgg

SEQ ID NO: 815914 - DNA, 120 bp, Artificial Sequence
  ENSG00000263069_32 (sequence is synthesized)
agctgggcaagaaacctgcccagaggagtctgctgaaagatgtccacgaacttcttgggcagtcctgcagagaggaaaccaaggagcggcctggagtgcgtctaagtcatggcgctcccc

SEQ ID NO: 815915 - DNA, 120 bp, Artificial Sequence
  ENSG00000263069_33 (sequence is synthesized)
tgcctccagggggctccggagtgaaggggaatggggacgccttgttgaatgggagctcgtagacaaaggggtaccaactgcctgattttgtagggaattgaaggaatagtcactgtctag

SEQ ID NO: 815916 - DNA, 83 bp, Artificial Sequence
  ENSG00000263069_34 (sequence is synthesized)
cctgattttgtagggaattgaaggaatagtcactgtctagacatttaggatatttttctttttccttttttttgggtgggtag

SEQ ID NO: 815917 - DNA, 120 bp, Artificial Sequence
  ENSG00000263069_35 (sequence is synthesized)
ggtgatctgccggccttggcctcccaaggtgttgtgaaccactgcgcctggcctaggatatttttccagtggaataaaataaaggaaggcggaaacagtgtcaaatttaggtcagaaaca

SEQ ID NO: 815918 - DNA, 120 bp, Artificial Sequence
  ENSG00000263069_36 (sequence is synthesized)
atttaggtcagaaacagccaagctagccccaaagagaaacatctagataagactgagttgtatgttgcatggctacattgtatgttgcatggctacaggtcacagcatgcttcaggaacc

SEQ ID NO: 815919 - DNA, 120 bp, Artificial Sequence
  ENSG00000263069_37 (sequence is synthesized)
gctgctcttcaggggctgggggtcacagagcatgcaagccagaaagatctggcttctagtgggcggggtgcagcccctaattcgcatgctgtcatagaaaagcagggtcagttggggtat

SEQ ID NO: 815920 - DNA, 120 bp, Artificial Sequence
  ENSG00000263069_38 (sequence is synthesized)
tgtcctgagaaaggaatatgctcatgaggagagagactgctttgagaaaaagtggcagaatggtaacctagaaaagaaggccaccctgagtcttccaaatggtacgataagtaaacgtgg

SEQ ID NO: 815921 - DNA, 120 bp, Artificial Sequence
  ENSG00000263069_39 (sequence is synthesized)
aaaagactattgcatgtatgaaagatggcttttgtaaaagtgttgcgttgtcgttggtttttctggactagggcaaatcttctggcatctggcagcagagctcagcactgtgtctgggct

SEQ ID NO: 815922 - DNA, 120 bp, Artificial Sequence
  ENSG00000263069_40 (sequence is synthesized)
gtgactcgggagacacagctgggaggtgcctcctgatggggcacctgggagtaggggatgctccaggcgctcgtgccttctgagaacgcctctcctgggggcatcttccgagtccagtgc

SEQ ID NO: 815923 - DNA, 120 bp, Artificial Sequence
  ENSG00000263069_41 (sequence is synthesized)
cccagtctgagaaggcccagaatgggaatgaccagctgatagaggcgacagtcctcctcttgccagaacacaccccatttcgccatatccctggccatcacggcactaaaaaccatctca

SEQ ID NO: 815924 - DNA, 120 bp, Artificial Sequence
  ENSG00000263069_42 (sequence is synthesized)
caggctcctgctgccataggatcgaaaggtttctggtcccgccggggcctctcactccttcagcagaaactttaaaatgacgcggtgacgtaaattggacgcttactgcacaaacaaagt

SEQ ID NO: 815925 - DNA, 120 bp, Artificial Sequence
  ENSG00000263069_43 (sequence is synthesized)
gtgaaaactaaaaactccaaaattcaccttgcaattctagccacccatctgcttttcactgtcaggcaatccctttgtgattcacctgtgctgaatctgacctgtcttgaggtagcctca

SEQ ID NO: 815926 - DNA, 120 bp, Artificial Sequence
  ENSG00000263069_44 (sequence is synthesized)
ccttctgcgtctgtgatgtactgagcctggacccacagctcctccagatagtccttgattttccagctgaaagggacgttgttggaagcgttctcggaaaggttcatgtggttctgcacc

SEQ ID NO: 815927 - DNA, 120 bp, Artificial Sequence
  ENSG00000263069_45 (sequence is synthesized)
acgatgtaggccatctcacctttatgtctgcaataaggtgagggatgataagaagagggtttgtgagacgtcactcaaaacacaagataagatctgccactgatgccagctcttctcaga

SEQ ID NO: 815928 - DNA, 120 bp, Artificial Sequence
  ENSG00000263069_46 (sequence is synthesized)
cctcaaaaacaaaggggccaacaggccaggcagacggcgctgatctgtttcacagtacagggtttctgttatgacagaactagggaactgtcttatgcaatctttgtttcacaggcaaaa

SEQ ID NO: 815929 - DNA, 120 bp, Artificial Sequence
  ENSG00000263069_47 (sequence is synthesized)
caaaaacaaaccaaggctgacaggggtcaagtgtgttgcccaaaatctcgggcagaaccaagtcttctggttcctgaacctgtctggctttgataacttgtaacacagagcacaacttgt

SEQ ID NO: 815930 - DNA, 120 bp, Artificial Sequence
  ENSG00000263069_48 (sequence is synthesized)
tagagtctttgcttcatgaacatcagcagcgccttgtcttttaaataagtgtttccactggcaattcaaattccatttctttctttctctcactctttctttctttactttctttctctc

SEQ ID NO: 815931 - DNA, 120 bp, Artificial Sequence
  ENSG00000263069_49 (sequence is synthesized)
tctactcccagatgtggaccagagacacagagtgttaatttgaagtggattctgtataatctggggagtagttccccccataccatcatacgccacagggggaaacatgaagatgtataa

SEQ ID NO: 815932 - DNA, 120 bp, Artificial Sequence
  ENSG00000263069_50 (sequence is synthesized)
cttgtatattactttgtagactaattatctccaaaacgcatagatggcagctaggactcaagacaaaaggactccctgggaagaagcgaaagcaggttcttaactgagcccattgtttgg

SEQ ID NO: 815933 - DNA, 120 bp, Artificial Sequence
  ENSG00000263065_0 (sequence is synthesized)
tttttagctgctgagtttggcatgttttgttatgtagcaatagctaacaaatacaattatcctccattcaggcttgctgttaggagaaaaggggttagcacatgcaaggcagggcaatag

SEQ ID NO: 815934 - DNA, 120 bp, Artificial Sequence
  ENSG00000263065_1 (sequence is synthesized)
aacagagtgggctcactgtgttccagtcccaatcccagctgtgtggccttgatcagatgaccaaccctctccaagcccccgtctcatcatctgtcccagcagggacacatatccctggat

SEQ ID NO: 815935 - DNA, 120 bp, Artificial Sequence
  ENSG00000263065_2 (sequence is synthesized)
accagcatctgctgggccatcttcttcctttcagcctgtagctgctggcccctgtcttcctcctcctccaggcgggcctccatctcatgcagtatctcctccagctcctgcttcttggcc

SEQ ID NO: 815936 - DNA, 120 bp, Artificial Sequence
  ENSG00000263065_3 (sequence is synthesized)
gccagccgcacccgcatctcctcagcctctgcatacagctctgtctctgcctgcagctgttcctgtagcaggttcttctcctcggtacctgcgagtgcttctgttccagctccttaagct

SEQ ID NO: 815937 - DNA, 120 bp, Artificial Sequence
  ENSG00000263063_0 (sequence is synthesized)
ggggtgcacgtgcaacggagacaccgcccctaaacctggggccctgaggctaacagctaacagtggccctgccgttacggccagtgtcaggtgccagctgggctggaccaggaattccca

SEQ ID NO: 815938 - DNA, 120 bp, Artificial Sequence
  ENSG00000263063_1 (sequence is synthesized)
gaaacctggcaaggcatgatttggggtgggtcgtgctgagggccacaccatccgcttccccgcttctgaggccttccgacctgggctgagcccggctacccgagtcccggggtctccggc

SEQ ID NO: 815939 - DNA, 120 bp, Artificial Sequence
  ENSG00000263063_2 (sequence is synthesized)
tcacagacttctcggcctccgtaattgcaaacgccagctcccccagtccatctcctgtcctggatctacgtctatatcctactggatccgtctctctggagaaccctaatacagctgtca

SEQ ID NO: 815940 - DNA, 120 bp, Artificial Sequence
  ENSG00000263063_3 (sequence is synthesized)
aggtttcagccttcagcaaaggatggttcatagaaaccgttcgcatagtcggccctccacggactgcaaccctagttaatattacctacagtaaacaaaaaattcaagtatagattttag

SEQ ID NO: 815941 - DNA, 120 bp, Artificial Sequence
  ENSG00000263063_4 (sequence is synthesized)
aaaaaattcaagtatagattttagtctaaagcaaataggaaatgtcgcttccctggacgttgggagaagcaaacacgaatcctctcctgaggccggaagcggtggctcacgcctgtaatc

SEQ ID NO: 815942 - DNA, 120 bp, Artificial Sequence
  ENSG00000263063_5 (sequence is synthesized)
ggcggatcattttataactatctattaaatgtttaagttttcagtccatttttcctgtctacatggaattgccgactgcacaaagaacacatgagggctctctcaaggccatcatttccg

SEQ ID NO: 815943 - DNA, 120 bp, Artificial Sequence
  ENSG00000263063_6 (sequence is synthesized)
cggagtcccatttcctgactcaaatgacaagctctcaactttctactcaagatcattgaaacatctgtgttgattatttgtaaccgggatatgctttatttattagataagagactaacc

SEQ ID NO: 815944 - DNA, 69 bp, Artificial Sequence
  ENSG00000258698_0 (sequence is synthesized)
gacagggtcttgctctattgtccaggctggattcaaccttgtgggctcaagtgatcctcctgcctcagc

SEQ ID NO: 815945 - DNA, 120 bp, Artificial Sequence
  ENSG00000258699_0 (sequence is synthesized)
atggatgagcccaagtttcttttaaaattaaaaaccacctgggggaataaaaatcaactctctattaaaaataaaaaatcaatgcacaaaaagaaaagcaaacaagagcccatattgtag

SEQ ID NO: 815946 - DNA, 120 bp, Artificial Sequence
  ENSG00000258699_1 (sequence is synthesized)
tccagcctgggcggcagagcgagactcgatctcaaaaaaatatataataataataattaaattaaattaaattaaaacaacacagaaagtttacattttataacaaccttattatgcaga

SEQ ID NO: 815947 - DNA, 120 bp, Artificial Sequence
  ENSG00000258699_2 (sequence is synthesized)
gtttacattttataacaaccttattatgcagatgatatttacacttcagaaatatttaagacaattgtaaccctgtaaagctgatgagatattaaaacaagacaaaaactgaaaacgaaa

SEQ ID NO: 815948 - DNA, 120 bp, Artificial Sequence
  ENSG00000267520_0 (sequence is synthesized)
gcggtgtaagcagaattaaggttctgctacctctgtgtgtagaatattcccaatggatttttcatttttcaggtgctattttttgaccctgtatagactttaatttaaaatgaatttggt

SEQ ID NO: 815949 - DNA, 120 bp, Artificial Sequence
  ENSG00000267520_1 (sequence is synthesized)
aacgtttctcctctgtctctacatatattcatgctttcacctgctcttttaacacctgcttttagtatctgaggcactttttctgaactctacttgtgcactggatccctcctcctttct

SEQ ID NO: 815950 - DNA, 120 bp, Artificial Sequence
  ENSG00000267520_2 (sequence is synthesized)
ctgccaggctgtgtttactttatccttacatcaccacttagtgattcctttctttgtataaacatggtaaatgtcttcattagcctaaaaggaaagaccaaataaaacctttcctaccac

SEQ ID NO: 815951 - DNA, 120 bp, Artificial Sequence
  ENSG00000267520_3 (sequence is synthesized)
ttggatgcatttgcatcctgacttctgaaatgcctccagcctccattttctcccttcccagttattccttagcccagccatctctgtctttagctcctacaattttcttaggatattctg

SEQ ID NO: 815952 - DNA, 120 bp, Artificial Sequence
  ENSG00000267520_4 (sequence is synthesized)
ggaaagatgagcggagactgcccgccttgtcaaatctagtgtctttttttcagtcctcacactgcttgacctatgtataacctcctatacttccctctttgcatactcctctgggttttc

SEQ ID NO: 815953 - DNA, 120 bp, Artificial Sequence
  ENSG00000267520_5 (sequence is synthesized)
tgtggtagtcaagattcctccctgagatttatttcccatgagtcttgacccctcccctcagttggtgctatttccccctacccgccctccgatgatcttatcagagcccacaggttcagt

SEQ ID NO: 815954 - DNA, 120 bp, Artificial Sequence
  ENSG00000267520_6 (sequence is synthesized)
tttctttcatgctacctgaatgtcctgataaactggctcgctctcttctttaccttccataatggcattaccatttaccacgccacccaagatacttactaggaacctcaaagtattgta

SEQ ID NO: 815955 - DNA, 120 bp, Artificial Sequence
  ENSG00000267520_7 (sequence is synthesized)
ttctttttctccatcacactcatacttaatcatcaagtccttttgagcttgtctcctcttgaatatgtcccttcttaattcctgctgccttcttagtaaaggccttcattcttttttccc

SEQ ID NO: 815956 - DNA, 120 bp, Artificial Sequence
  ENSG00000267520_8 (sequence is synthesized)
tagtaataatcttttccatatgttccagttaaaataccatgttctccctattccttattacatagctagcattccttgaaaaaaaacaattctctcaggcctccatacctttagcatgtt

SEQ ID NO: 815957 - DNA, 120 bp, Artificial Sequence
  ENSG00000267520_9 (sequence is synthesized)
acccactctgcctctgctcttctggaactagaacactcatccttgaaggctgggcttctgtatgaaggttggtcctgcctccttacttgaggtgaagctttgtacatgcctgtattacgg

SEQ ID NO: 815958 - DNA, 120 bp, Artificial Sequence
  ENSG00000267520_10 (sequence is synthesized)
acatcctcttatttaagtgtttgtctctttcgtcattgggactccagcacccagcatagtccctagtatactagttggtgctgaataaatagtagctattattagaaaaggaagggtgaa

SEQ ID NO: 815959 - DNA, 120 bp, Artificial Sequence
  ENSG00000267520_11 (sequence is synthesized)
attgacatgggagttagtaaaatgtatatggaaatgatttttaaagggaaaggtaatgattttctggcaggaaaagcagcaatgacaagattacttaagtcttgtgaaataacacttctc

SEQ ID NO: 815960 - DNA, 120 bp, Artificial Sequence
  ENSG00000267520_12 (sequence is synthesized)
ttccttgacctgctgcttcccttttttaccacacacacacgcacacataccacagccctttgagactgaaagcagctctattgagaatagtagtgtcaactgtattatgtagaaattcta

SEQ ID NO: 815961 - DNA, 120 bp, Artificial Sequence
  ENSG00000267520_13 (sequence is synthesized)
aagtttttgggattatttcatagccctgaccttgctacttctctccactttatgtggcaggtttaatctcaggtctccctcatacacttctcagcctcagcacctaaccctcacacaaca

SEQ ID NO: 815962 - DNA, 120 bp, Artificial Sequence
  ENSG00000267520_14 (sequence is synthesized)
ctccagtattgatgcagtcaatcttgtataacattttttgaatgtccaatgtgcaaagcacgatgttggaaattatacagaggtgaataagacaaaaactcttgctctcaaagatgtcag

SEQ ID NO: 815963 - DNA, 120 bp, Artificial Sequence
  ENSG00000267520_15 (sequence is synthesized)
tctttttctttgcaaggataacacatgtagagtaaaatgcataaaggggactaattttaaatgtacagcttaattaatttttatgtatgttaacacccatgtcaccaccatgtttaggac

SEQ ID NO: 815964 - DNA, 120 bp, Artificial Sequence
  ENSG00000267520_16 (sequence is synthesized)
atttccagcacccctgaaatttccttcatgccccttcccagtctgtacctacacctctaaatctattttcaatcttaatggccttttaaataactgggcttctcacaaccatagtgaaca

SEQ ID NO: 815965 - DNA, 120 bp, Artificial Sequence
  ENSG00000267520_17 (sequence is synthesized)
gaaacagctgggttgtcaacgtctaacctaatacttcaggaaaactcatgatggtttccatgttaagagagacatggagcagggcactggcatggtggatggatcacgcctgtaatccca

SEQ ID NO: 815966 - DNA, 81 bp, Artificial Sequence
  ENSG00000267520_18 (sequence is synthesized)
tgagcccaggagttcaagactagcctgggtaatataaggaaaacctgtctctgcaaaaaaaaaaaaaaaaagaggatacaa

SEQ ID NO: 815967 - DNA, 120 bp, Artificial Sequence; identical to SEQ ID NO: 491563
  ENSG00000267520_19 (sequence is synthesized)

SEQ ID NO: 815968 - DNA, 90 bp, Artificial Sequence; identical to SEQ ID NO: 491564
  ENSG00000267520_20 (sequence is synthesized)

SEQ ID NO: 815969 - DNA, 120 bp, Artificial Sequence; identical to SEQ ID NO: 491565
  ENSG00000267520_21 (sequence is synthesized)

SEQ ID NO: 815970 - DNA, 120 bp, Artificial Sequence; identical to SEQ ID NO: 491566
  ENSG00000267520_22 (sequence is synthesized)

SEQ ID NO: 815971 - DNA, 120 bp, Artificial Sequence; identical to SEQ ID NO: 491567
  ENSG00000267520_23 (sequence is synthesized)

SEQ ID NO: 815972 - DNA, 120 bp, Artificial Sequence; identical to SEQ ID NO: 491568
  ENSG00000267520_24 (sequence is synthesized)

SEQ ID NO: 815973 - DNA, 120 bp, Artificial Sequence; identical to SEQ ID NO: 491569
  ENSG00000267520_25 (sequence is synthesized)

SEQ ID NO: 815974 - DNA, 120 bp, Artificial Sequence; identical to SEQ ID NO: 491570
  ENSG00000267520_26 (sequence is synthesized)

SEQ ID NO: 815975 - DNA, 120 bp, Artificial Sequence; identical to SEQ ID NO: 491571
  ENSG00000267520_27 (sequence is synthesized)

SEQ ID NO: 815976 - DNA, 120 bp, Artificial Sequence; identical to SEQ ID NO: 491572
  ENSG00000267520_28 (sequence is synthesized)

SEQ ID NO: 815977 - DNA, 120 bp, Artificial Sequence; identical to SEQ ID NO: 491573
  ENSG00000267520_29 (sequence is synthesized)

SEQ ID NO: 815978 - DNA, 120 bp, Artificial Sequence; identical to SEQ ID NO: 491574
  ENSG00000267520_30 (sequence is synthesized)

SEQ ID NO: 815979 - DNA, 120 bp, Artificial Sequence; identical to SEQ ID NO: 491575
  ENSG00000267520_31 (sequence is synthesized)

SEQ ID NO: 815980 - DNA, 120 bp, Artificial Sequence; identical to SEQ ID NO: 491576
  ENSG00000267520_32 (sequence is synthesized)

SEQ ID NO: 815981 - DNA, 120 bp, Artificial Sequence; identical to SEQ ID NO: 491577
  ENSG00000267520_33 (sequence is synthesized)

SEQ ID NO: 815982 - DNA, 120 bp, Artificial Sequence
  ENSG00000267521_0 (sequence is synthesized)
gcagaatcaacctgaaaagtcaggcttggggaccacccccttctcctgctgtaagcgcctggattctgcaccccaggtgccctgaagggatttcttccctgtgtgtccccgggtcctctt

SEQ ID NO: 815983 - DNA, 120 bp, Artificial Sequence
  ENSG00000267521_1 (sequence is synthesized)
ctgataaggacaccagtcattggacttaaggcctctgctaatccagtctggcctcatctcaaattgaagaacatctgcacacaccctatttccaagtaagatcctattcacaggcaccag

SEQ ID NO: 815984 - DNA, 120 bp, Artificial Sequence
  ENSG00000267521_2 (sequence is synthesized)
gggtgccttcaatgcatcttttggggggaacacaattcaacccacagcatcttctgtgttgttctgcccaaggacagccaccccccagcagccgcggtgagaagttcccccaggtttggg

SEQ ID NO: 815985 - DNA, 120 bp, Artificial Sequence
  ENSG00000267521_3 (sequence is synthesized)
ttccaatcttgggtggcggcaggctgggagccagggaccgcttgagccttactgtgctctcctgctaggaggggcggcagctccttgcccctggagacagcgcggctccccagagcagct

SEQ ID NO: 815986 - DNA, 120 bp, Artificial Sequence
  ENSG00000267521_4 (sequence is synthesized)
gagtgtcttgcagtcatcaacagccacctcatctcagaggcagcacctggaatcttacctgcctcacctcctttagtcctcaaaacacctgtgtcccaggattatgtcccttattctaca

SEQ ID NO: 815987 - DNA, 120 bp, Artificial Sequence
  ENSG00000267521_5 (sequence is synthesized)
gaggaggaagctgaagtgcaaactaagaggaagttccgaagcagcaggttggggtgccaggtgccagcctggtgaggagctcggggctctcgcgaggaccgtgacggggctttcacccca

SEQ ID NO: 815988 - DNA, 120 bp, Artificial Sequence
  ENSG00000267522_0 (sequence is synthesized)
cgcaggcactgctgacggtgggaccggccacttccacatcggggtcccgcctgtgggctgtagggtgttcagtgacgtccctgcttttacctgccaggtgccttccctcccgcagttgtg

SEQ ID NO: 815989 - DNA, 120 bp, Artificial Sequence
  ENSG00000267522_1 (sequence is synthesized)
acaaccaagaaagtcttcagacacagccggatgttacccggggcaccagcctgagacccgctggtccacgggaagcagggagccctccctcaccagcacacccagcggcctccccttccc

SEQ ID NO: 815990 - DNA, 120 bp, Artificial Sequence
  ENSG00000267522_2 (sequence is synthesized)
ctcgccggacgcgactggctcacaggaaatccgtgtcagccctgctcagaaggaccacgacttcatttcacagacactgcagttctcaagaatccaggtggtggcagcagagagctgaga

SEQ ID NO: 815991 - DNA, 120 bp, Artificial Sequence
  ENSG00000267522_3 (sequence is synthesized)
gaaaccagcacttccctaccggccctaaggaaggtccggaataagaatattgaccttgcccagttgcagtgagcatttctgtattgcaccagtcacagtggcgaatgcagctaaggagag

SEQ ID NO: 815992 - DNA, 120 bp, Artificial Sequence
  ENSG00000267522_4 (sequence is synthesized)
gcaggtagatggagccacagaaccagatgtggtctgggcagtgtttcatcccaccaggaatgacagtgcatctgcagctcccagagggctctctgacaccctacctccaactgtgagcaa

SEQ ID NO: 815993 - DNA, 120 bp, Artificial Sequence
  ENSG00000267522_5 (sequence is synthesized)
tcatctttacctcctcatccagaggaaggaggccagcgggatgcagagcctcagcagcttcagcccaggctcagggctgaagtggagaagcatccaggccagttctggcattggtggaac

SEQ ID NO: 815994 - DNA, 120 bp, Artificial Sequence
  ENSG00000267522_6 (sequence is synthesized)
ttactttccggctccctgaaagctgggcatggccatgtgccttgctgtgggggatgaacccagagcagaagaagtgtgtgtcgcttctggctggagacttcaagagcagtacacgatttg

SEQ ID NO: 815995 - DNA, 120 bp, Artificial Sequence
  ENSG00000267522_7 (sequence is synthesized)
ccaagtctctctgcctggccacggcaaatgatcttgcaccacatggtcgcgctggagtctctgtgaatcggctgtgattctgggggctgcgtgattcgcgaatcattcattgctccatta

SEQ ID NO: 815996 - DNA, 120 bp, Artificial Sequence
  ENSG00000267522_8 (sequence is synthesized)
tttaattcggctgaagtttttcttttatcagagaggagacatgtgagacatgttccttctctctctgcccaattttcctgttttccttcccaggaggacacagggagaaggccaccgtcc

SEQ ID NO: 815997 - DNA, 120 bp, Artificial Sequence
  ENSG00000267522_9 (sequence is synthesized)
aggccaccgtccgcacgctgggaagcagccctcaccagacaccagacatgccagcaccctgatcttggacttccatcctccagaactgtgagaaattagtgtctgttgtttaagacacac

SEQ ID NO: 815998 - DNA, 120 bp, Artificial Sequence
  ENSG00000267522_10 (sequence is synthesized)
acactacgtattctcttagagcagcctgaacagactaagcaggggtgtccaaggtagagaatacagtcataggttctcagtttctgtttgcggttggaccagtaaagacccttcctcatc

SEQ ID NO: 815999 - DNA, 120 bp, Artificial Sequence
  ENSG00000267522_11 (sequence is synthesized)
cctcttttccacttatcactagagacagaaactaaaatccatgatttcaggctgctaaaagcctaaaacagaacagcaacaaaataaggtgggttggacgagcttggtctacagcagtat

SEQ ID NO: 816000 - DNA, 120 bp, Artificial Sequence
  ENSG00000267522_12 (sequence is synthesized)
gttttatttggttctcatggaggtattccactgtttttctttcaacatactgttgctggcttgaatcatggagatattaaggaagaaagtctaataattatgatgttacatgttactaaa

SEQ ID NO: 816001 - DNA, 120 bp, Artificial Sequence
  ENSG00000267523_0 (sequence is synthesized)
aaagtaaaatacaacaaaatgtttaatgagcaaattcgtcttagcaaatatgaaactgccacagagaggaggagggggggaaggaacagtggaatatgggtgggggtgtagaagtcaata

SEQ ID NO: 816002 - DNA, 120 bp, Artificial Sequence
  ENSG00000267523_1 (sequence is synthesized)
gtaagaacagaagcaagagagaaaatggggaggaagcagtagcaagagacggccaagggcaggcgatggacaggcgttgggggacagccacaggggccccaaaaaatcaggggaaaggag

SEQ ID NO: 816003 - DNA, 120 bp, Artificial Sequence
  ENSG00000267523_2 (sequence is synthesized)
atgaagagacagagcacacaggaagggccacccagtggagacagacagaaaagtggcaggaaagtagaaaggaagtggcaggcaggggcagagacgagcaaaggacagaaagggagagca

SEQ ID NO: 816004 - DNA, 120 bp, Artificial Sequence
  ENSG00000267523_3 (sequence is synthesized)
ggacagagacgagcgaggaggaggaagtcaagagtgcaggggcaggagaggaggagtgtagggaggaggggcagggacgggaggggaggagaaaagagtgatgtggaggaatctggccct

SEQ ID NO: 816005 - DNA, 120 bp, Artificial Sequence
  ENSG00000267523_4 (sequence is synthesized)
aaaatacaacaaaatgtttaatgagcaaattcgtcttagcaaatatgaaactgccacagagaggatgaggggagggaggagggggggaaggaacagtggaatatgggtgggggtgtagaa

SEQ ID NO: 816006 - DNA, 120 bp, Artificial Sequence
  ENSG00000258690_0 (sequence is synthesized)
atctttgatttcacaaccagctaaggcatgtgtctgtacacatgtttacggttctggtggaaatctttggattctgatgatattgaaagtctgtgctttgctgttatctatctgtcttct

SEQ ID NO: 816007 - DNA, 120 bp, Artificial Sequence
  ENSG00000258690_1 (sequence is synthesized)
ccttcctaagagaacctcatcttccagggaactaaacttgtcttactggtttggccctcatgaaaactaaagaggaaacttgctgcaacatcattaaaaagcccaggcaggccatggctg

SEQ ID NO: 816008 - DNA, 120 bp, Artificial Sequence
  ENSG00000258690_2 (sequence is synthesized)
cttgtcatcaccacataaaaacaagggagcactcgagggaggtccagtgggtaccaggaagggcctctttgctaaaacaaaaagaaggggagtgaaggcagtcaaggcaccactcacgga

SEQ ID NO: 816009 - DNA, 120 bp, Artificial Sequence
  ENSG00000258690_3 (sequence is synthesized)
actcatcacagaagtcacagtgcacatttggtgcctaccataaaaggaacttgggcaaaccaggcttacaaactcaatcaacacccaataatcgacacaaaatgaatctgcatggcagat

SEQ ID NO: 816010 - DNA, 120 bp, Artificial Sequence
  ENSG00000258693_0 (sequence is synthesized)
gacagagtctcgctctgtcacccaagatggagtacaatggcaagatctcagcttactgcaacagagtgagactccatctaaaaaataaaaataaaaaataaattaaatttctattcagga

SEQ ID NO: 816011 - DNA, 120 bp, Artificial Sequence
  ENSG00000258693_1 (sequence is synthesized)
tatcaaataaataaggaaatcaagacaggagaaaggaaccatggaaaggagataaaagtacctgccccccaaatcttttgttttaatgacctgagctaaactgctatttttttcaattaa

SEQ ID NO: 816012 - DNA, 120 bp, Artificial Sequence
  ENSG00000258693_2 (sequence is synthesized)
ttatttattaagaggagttaaagacttattcttaaagttatcttgattccaaaagcatttcacaaactggcagagataatctaatacaattaggacagaacacaagaaaataggtgtcac

SEQ ID NO: 816013 - DNA, 120 bp, Artificial Sequence
  ENSG00000258694_0 (sequence is synthesized)
agcatctgagtagctgggacaacaggcgccacaccaccacacccggcattgataaaccttggctgttgcttcaaatataaatgattctagaacatcagaataactagtaacagtaagatt

SEQ ID NO: 816014 - DNA, 120 bp, Artificial Sequence
  ENSG00000258694_1 (sequence is synthesized)
gactgaaggtcgggggcctgtagatagccccttctcctatacctcgacctatacatctcttccatgtttctttcatctgtatgctttgtaacattctttataataaacaagtaagtgtaa

SEQ ID NO: 816015 - DNA, 120 bp, Artificial Sequence
  ENSG00000258695_0 (sequence is synthesized)
ctgtactggctataaggaatgctgggcaggcctcgctgccacaccacctcctgagagaagagacagggtcttactatgttgtccaggctggtttcaaactcctggaatcaagcgatcttc

SEQ ID NO: 816016 - DNA, 120 bp, Artificial Sequence
  ENSG00000258695_1 (sequence is synthesized)
ctgccttggcctccagaaatgctgggactgcgcctggaatagatacgggtaaagaaccttttacatcagactcttgtgtcctactcccagaatgctgattcagtagcctgcaagtgaggc

SEQ ID NO: 816017 - DNA, 120 bp, Artificial Sequence
  ENSG00000258695_2 (sequence is synthesized)
acaatacatttaaagaaagcacagcccaaagggtgtcagtggggtgtatgaaggaagcctggttagtggggagagtgggattagggaacagctgcttaacctggcttgtttcaagtcccc

SEQ ID NO: 816018 - DNA, 120 bp, Artificial Sequence
  ENSG00000258695_3 (sequence is synthesized)
ctttctccctttttgccctcaaaaagttcccctcattttttcccctctactttctaatttctcaccatgcactcacacagctatacagctgtctccagagattactctggaaactctgct

SEQ ID NO: 816019 - DNA, 120 bp, Artificial Sequence
  ENSG00000258696_0 (sequence is synthesized)
gaaactgaggctcaaagtcatattaacaagtggtgcagcaaaagcagacaccttggtcctctggtttccagtctcaggtggccctcacccaggatgtgattccagcagcatggattattg

SEQ ID NO: 816020 - DNA, 120 bp, Artificial Sequence
  ENSG00000258696_1 (sequence is synthesized)
aatcaagatgcagacaaaatggcaaatctgagaagagatggacaggcaaaatggagcacaacggagtcactactgctacgtcagtgtggagtcgcaccttgagccatagtgttacttaac

SEQ ID NO: 816021 - DNA, 120 bp, Artificial Sequence
  ENSG00000258696_2 (sequence is synthesized)
gagccatagtgttacttaaccatgttccttgatggcacacagaatgttatactgtaatatagatgtaaatattaatataatatagaagcatatagtatatatatcatactgtaatataga

SEQ ID NO: 816022 - DNA, 120 bp, Artificial Sequence
  ENSG00000282906_0 (sequence is synthesized)
gacacttgaagacacacacagagggaagaaagcaatgcgaagatagaggcagagactgaggtgacatggctagaagccaaaagaatgccaagaatcacaggaaaccaccagaagagtgca

SEQ ID NO: 816023 - DNA, 120 bp, Artificial Sequence
  ENSG00000282906_1 (sequence is synthesized)
agatcaaggcaccagcagattcggagtttgatgagagactacttcctggttcatagatggtgccttctcactgtgtcctcacatggcggaaggggcaaacaagatttctgaagtctcttc

SEQ ID NO: 816024 - DNA, 120 bp, Artificial Sequence
  ENSG00000282906_2 (sequence is synthesized)
aagaacagtaattccattcatgagagctctgcccacatgacctagtcacctcccaaaggccctatctcccagtagggagttaggatttcagtgtacatatattgggtgaacaaaatcatt

SEQ ID NO: 816025 - DNA, 120 bp, Artificial Sequence
  ENSG00000282906_3 (sequence is synthesized)
ttctgtggcctatgatatgtttcatcctcatgaatgttctaagtgaacactaaagaagacatataaagcatgaacaactatatgaaaagatgttcatcattattaattataaaggaaatg

SEQ ID NO: 816026 - DNA, 120 bp, Artificial Sequence
  ENSG00000282906_4 (sequence is synthesized)
caaatcagaactacaataagataacacttcacatctcaagctattattaaaaaatcaaaagatagcaggtgttggtgagaatgcagagaaattgaaacccttgttccccattggtgggaa

SEQ ID NO: 816027 - DNA, 120 bp, Artificial Sequence
  ENSG00000282906_5 (sequence is synthesized)
tgcaaattgatgcaaactttctggaaaacagtatgcatgttgctttaaaaataaaaaataaaactatcatataatcgaggaatattacttctggatgtatatcgaagagaattaagatca

SEQ ID NO: 816028 - DNA, 120 bp, Artificial Sequence
  ENSG00000282906_6 (sequence is synthesized)
gaaatttgaagcaatatctgcactctcatgttcattgcagcattattcccaatagccaaaattggaaacagcccagtgtccattggcaaataaatagataaataaaatatggtatatata

SEQ ID NO: 816029 - DNA, 120 bp, Artificial Sequence
  ENSG00000282906_7 (sequence is synthesized)
caggcatgagccaccgtgcccggccaacgaaacctatttctgatatagttgttgcattgattccaaataattttgaagaaaactagtgactgtggaaatatttgctgtgttatgagctta

SEQ ID NO: 816030 - DNA, 120 bp, Artificial Sequence
  ENSG00000282904_0 (sequence is synthesized)
cgaactaccgctttccccgtaaccagggagactgcagtttgcagtgatgtggctaagatacccttgtgctattaaaggcacatttacgtatctttcaacgcagtttgtacctttgtttag

SEQ ID NO: 816031 - DNA, 120 bp, Artificial Sequence
  ENSG00000282904_1 (sequence is synthesized)
ggttctattgaactttctctgtgctctttagaaaaccgtcgaataaaggtaaccatctttttgggtgcctgggcatggtcattgtcccagagttttaacagaagtctctactaaagtatc

SEQ ID NO: 816032 - DNA, 120 bp, Artificial Sequence
  ENSG00000282904_2 (sequence is synthesized)
ctgatttgcaagggaggtcatggaccaagtacaaagcggcaaaaggatggaattaaggtacctgacattgttgaacccatgcctgatgccacattagctcaggactacctacatggacat

SEQ ID NO: 816033 - DNA, 120 bp, Artificial Sequence
  ENSG00000282904_3 (sequence is synthesized)
ctgtgcagaaaaaaaaactatgtttctttgattctccattttactagatgccatacctttgcaattacttcatgtggagtcttgaccaagattcaggaaatactagaactttcagtccca

SEQ ID NO: 816034 - DNA, 120 bp, Artificial Sequence
  ENSG00000282904_4 (sequence is synthesized)
gaaggttactctgggcattactagtccccatcattatgagttgagttttactagttaatttcagacgaaaaatatttgtttttccccaaattctggggttacgtacttttactacctatg

SEQ ID NO: 816035 - DNA, 120 bp, Artificial Sequence
  ENSG00000282904_5 (sequence is synthesized)
aactgacaactgtatcttcagtaattacaatttccaacaaaatgttataggaataaagaaaagatgttagttcattattcagagtttatgtttattcctttaataaaaagaaatggtctg

SEQ ID NO: 816036 - DNA, 120 bp, Artificial Sequence
  ENSG00000282904_6 (sequence is synthesized)
gggcccagctcggccggcagcttctgcagccgccacaagggcgtcccctcttccggctccatccctgcgcgaagctggggcttgggtcacgtgtcaaggctggccgcttgtctaaagcta

SEQ ID NO: 816037 - DNA, 120 bp, Artificial Sequence
  ENSG00000282904_7 (sequence is synthesized)
tctggaattggttgcatatgaaagaggaagaatatgaaggatcacggagggagtttttacgtgccagacctagatataatgtgtatcattcctacctgcatttcatcacctggaaaccaa

SEQ ID NO: 816038 - DNA, 120 bp, Artificial Sequence
  ENSG00000203897_0 (sequence is synthesized)
aggccagtccctgagtaggaatggacaacaaggtggtcaccatgctgacagctattccctgtgtgatttactttattatgaagtctaaatttgatgctgaagtgctagcctaagctcact

SEQ ID NO: 816039 - DNA, 120 bp, Artificial Sequence
  ENSG00000203897_1 (sequence is synthesized)
ccaaagatggtcagcgaattgttgtttccggctgttggaagttgactgcagttgaataacagaacaaaaacggagcttcaaaatcatggcgtgcctgcttcttctgggttcttttaactg

SEQ ID NO: 816040 - DNA, 90 bp, Artificial Sequence
  ENSG00000203897_2 (sequence is synthesized)
aaatcatggcgtgcctgcttcttctgggttcttttaactgcaagcaatcagctttgaagagcacgtagggaacttctgatgtgatacaaa

SEQ ID NO: 816041 - DNA, 120 bp, Artificial Sequence
  ENSG00000203897_3 (sequence is synthesized)
atgaaagaaaataggagatggctcagaataatatgtccaaggccacgcccaggcgtcagggattcatgaattttgtatacagtgtatgatgtttctagattaaaatattttcaaaggtaa

SEQ ID NO: 816042 - DNA, 120 bp, Artificial Sequence
  ENSG00000279607_0 (sequence is synthesized)
attcgtcggctttgcacaccggccggaggcgctgtccagaaaggggcggacccgggatttctgagaattacctccagcgcgattggcctggcttcctgcagtggccagagggctaaggac

SEQ ID NO: 816043 - DNA, 120 bp, Artificial Sequence
  ENSG00000279607_1 (sequence is synthesized)
ccccttccctgctgtccagctggggcgccaagcagcagggccctccgaataggcgagctgtgcttggatctcagagacgggcaccgactgccgagccccagacgaagtgccccagggtcg

SEQ ID NO: 816044 - DNA, 120 bp, Artificial Sequence
  ENSG00000279607_2 (sequence is synthesized)
atgagtcctggcccccttgcaggggttggggagctggggatcccagatctgcctattgcgcccgatgccccgaggctctctcttggactctggccctgagttcttctgcgcgatccttcg

SEQ ID NO: 816045 - DNA, 120 bp, Artificial Sequence
  ENSG00000279607_3 (sequence is synthesized)
gagacgtctggaggcctgctttatgcatctctcttggacctcagtttccccacacgtgggaggaggcagctggacgattcctgaaaggactttcccttgcttcctcatcacgtggaagag

SEQ ID NO: 816046 - DNA, 120 bp, Artificial Sequence
  ENSG00000262823_0 (sequence is synthesized)
agaaaggtccacatggaggctggggctgctgggacccccacagttaggtccaggtaggctggccccttcctcctctcccaggaaccccaacctgctgggcccagctcagtcactgctgcc

SEQ ID NO: 816047 - DNA, 120 bp, Artificial Sequence
  ENSG00000262823_1 (sequence is synthesized)
agtggcgagagagaaaccccccgagaggcaggggctgcccgaggtatgcagaacgagctccccattggaggcgtatgtcaacaaggggatggctagaatttggcaaagcatttatggact

SEQ ID NO: 816048 - DNA, 120 bp, Artificial Sequence
  ENSG00000262823_2 (sequence is synthesized)
tggaccccagcacggacccactgaatcagactcagaggacacagggcctggaatctgggtttgtcacaagctccctcaaatctgactctcatgcacaatgacgtctccaagccaccggac

SEQ ID NO: 816049 - DNA, 120 bp, Artificial Sequence
  ENSG00000262823_3 (sequence is synthesized)
caccggaccggagagcccctgaggtcccttctccagagataacctggattctccccattgtggagatggcatcaaagagaacagtgtcctggacaggcgcagtggctcacacctataatc

SEQ ID NO: 816050 - DNA, 120 bp, Artificial Sequence
  ENSG00000262823_4 (sequence is synthesized)
aattatgtgattactcactggtggctctgggaaggcaggtgaggcttcctggagggaggaacctgaatgttcagaaaggtccacatggaggctggggctgctgggacccccacagttagg

SEQ ID NO: 816051 - DNA, 120 bp, Artificial Sequence
  ENSG00000262823_5 (sequence is synthesized)
caccccacacacgcagacacgtcttacaagtcctgtgagataggggctgccagcgtctcccaggatgtggcccaccgtgatctgaagtgcctctgccgtcccccggcatctgggcaccac

SEQ ID NO: 816052 - DNA, 120 bp, Artificial Sequence
  ENSG00000256341_0 (sequence is synthesized)
acacggtctacttactcaaggatttctaggagaaagcaacactttcacaattctattgttcaggaaatggagcctgaaaaccttccatcgggtcgccagcgagtggccagtggcgggaga

SEQ ID NO: 816053 - DNA, 120 bp, Artificial Sequence
  ENSG00000256341_1 (sequence is synthesized)
gctgcgtgggagctttgagagccggctgcttctccctggcggttcctttgtgatggccttgaacagagcatgaggtgtccacagatgttgtacaggtagtatccttccagttcagggggg

SEQ ID NO: 816054 - DNA, 120 bp, Artificial Sequence
  ENSG00000256341_2 (sequence is synthesized)
atgtcgaattccccctcctgccttctattcttttaaaaaaaattgtcactgttgtgttctacaaaatcgtcagccctccccaaactttgctttctgcggaggaaagtcacccatggaatt

SEQ ID NO: 816055 - DNA, 120 bp, Artificial Sequence
  ENSG00000256341_3 (sequence is synthesized)
tctcttccttgctctcttggattgcagcaggctgggcaaagccacatggccacgccagggcagctggggctgaggcggggcagcccgggtgggcgggcatcatgtgtaggagtagtctat

SEQ ID NO: 816056 - DNA, 120 bp, Artificial Sequence
  ENSG00000256343_0 (sequence is synthesized)
gaggaggctgtcaacatctcggagttcttcccatgtgcaaggcagggtgctgagcctgtgatgcgtatgtatgaagccgtgtcatgctcaccactcccctattgagcagtgtgcgatccc

SEQ ID NO: 816057 - DNA, 120 bp, Artificial Sequence
  ENSG00000256343_1 (sequence is synthesized)
caacctctgatgttacacggaaccagctacccaacgagttgttttttacatttcccttttggtgttctatttatctggccttaaacaggcctggctgagaatatttaaaatcagagaacg

SEQ ID NO: 816058 - DNA, 120 bp, Artificial Sequence
  ENSG00000256343_2 (sequence is synthesized)
cacggctggacacaaggcaaaccgtattccacacgcgcatttgcttaggagcagagttcagcaacgtgacgctgcctcccaagggcttgggttgttcccccatcctctctccacgactcc

SEQ ID NO: 816059 - DNA, 120 bp, Artificial Sequence
  ENSG00000256343_3 (sequence is synthesized)
gtcccaccttcccagtacttaaaagacgacggcagtaaccaacaatgaatgccccagctcaggagagcagctttgtgaccggaaggccacggcttccaggagcctgaggagggaaggtca

SEQ ID NO: 816060 - DNA, 120 bp, Artificial Sequence
  ENSG00000256343_4 (sequence is synthesized)
gccctgaggagggaacagcacaagccaggctcgcgtgttgacatgaagggttctctgagcccagcctgagcaaatactaacacacaccgcctgtgctggctactgtctagcagccactgg

SEQ ID NO: 816061 - DNA, 120 bp, Artificial Sequence
  ENSG00000256343_5 (sequence is synthesized)
tcccgaaactccacacagtcaggccatctctgaagccgccaacacgcacctaccttctgggcaagaacacgaatctgtcatttgcactcgtgtatttgcaatcggtgcgaacactcacag

SEQ ID NO: 816062 - DNA, 120 bp, Artificial Sequence
  ENSG00000256343_6 (sequence is synthesized)
tctctatgctgcatgtggggaacacgcagccatttcaactatgaaaaaaaagaagacggcagacaacagtttaaaaaaaggagaccaggagcatcatatttcactgagtaaattgacaaa

SEQ ID NO: 816063 - DNA, 120 bp, Artificial Sequence
  ENSG00000256343_7 (sequence is synthesized)
tgcttggtctgaaagctaaactgccacttaaatattcataggcaagcgcggtagctgcagcctccggttgccctgagtccacagaggagcaaggctggggccattttatgagaaaaaaca

SEQ ID NO: 816064 - DNA, 120 bp, Artificial Sequence
  ENSG00000256343_8 (sequence is synthesized)
agctccctcccgagccgggttctgggcaggagaggactctgctcctgcaaccagcccgcacccgctgagccttcgttgctgtgtcctgtatcccagaagaatggtcactctgtcaccatg

SEQ ID NO: 816065 - DNA, 84 bp, Artificial Sequence
  ENSG00000256343_9 (sequence is synthesized)
tcactctgtcaccatggctggagtttaggctcaagcagtccacctgcctcagccttccaaagtgctgtgattacaggcgtgagc

SEQ ID NO: 816066 - DNA, 120 bp, Artificial Sequence
  ENSG00000256343_10 (sequence is synthesized)
ttcttttactacgtcttcaaaaatcttaacatgacacatttctgttcagtcaagccacagttccagagctcgatggccacaggtggctcctgtgtctacgagacaggcagagggccaggc

SEQ ID NO: 816067 - DNA, 120 bp, Artificial Sequence
  ENSG00000256343_11 (sequence is synthesized)
tagtgctgcaccatgcattcaggaagggagcaggaacctcctctcttcattctctacccttctctctggaatctcatgggaatctcctctcggtgactgttcttattgccacgtgaacaa

SEQ ID NO: 816068 - DNA, 120 bp, Artificial Sequence
  ENSG00000256343_12 (sequence is synthesized)
cggaccaaggaggatggaggtctctgaggaggggcaggattctggtgggaaccgtatgaggggaaactgggagacaggcatggcctgaaatggggtcgtgaatatggagaaatctggacg

SEQ ID NO: 816069 - DNA, 120 bp, Artificial Sequence
  ENSG00000256343_13 (sequence is synthesized)
aagctggagcctcagggttggaagagttgcggtctctgggctggtgagcacagactccagctgccttgaactctggggcccatgacagaaactactctcctgccccatgctggaggctgc

SEQ ID NO: 816070 - DNA, 120 bp, Artificial Sequence
  ENSG00000256343_14 (sequence is synthesized)
gagaagagagaagccaggacccctggtgaggggatcatgctgagcccctacacagctgcaggcggaggactggtcgtgaaggaaaggtggaccttgtttgcacccagttgttcagaagca

SEQ ID NO: 816071 - DNA, 120 bp, Artificial Sequence
  ENSG00000256343_15 (sequence is synthesized)
caagtggcccgaaaccgctgcaatccctgaaaccacctccctggagcttgtaactggtgtctgcagtgtgggggcctcaggtggaccatgcccttaacctgcgaaacccgacccaatgct

SEQ ID NO: 816072 - DNA, 120 bp, Artificial Sequence
  ENSG00000256343_16 (sequence is synthesized)
aattgcattgagagcaagttcaaagcgaaggtgacgatacagggcctgtggctgagagatatggacctgggacgggaggctgcacagaacgtctgcagagtgcacagaagaaacatcggg

SEQ ID NO: 816073 - DNA, 120 bp, Artificial Sequence
  ENSG00000256343_17 (sequence is synthesized)
cagcctgcgcgcctcctgcacctgaggagctgcgagggcaatggaggcagcatgtgtgggatgagatggtcagatggtcagatcctggggtccaggtccagcccatgctgagagaccagc

SEQ ID NO: 816074 - DNA, 120 bp, Artificial Sequence
  ENSG00000256343_18 (sequence is synthesized)
gggaagagaattctgcacagggaacagcccaaaccagggcacaggggtgagaggggacacgggactgtggtgagacagacatggctggagcagcaggactcacgcctgggctggtggggc

SEQ ID NO: 816075 - DNA, 120 bp, Artificial Sequence
  ENSG00000256343_19 (sequence is synthesized)
gcacagggaggcgggtggcaatagaccaggcggagatgcaagtgcacaacgtgagaaaaaatgctgaaactctcggctctaaaccatgctcttggcatcctcacctcactcaatctccct

SEQ ID NO: 816076 - DNA, 120 bp, Artificial Sequence
  ENSG00000256343_20 (sequence is synthesized)
tcctccaccatgccaacctcccttcctccaccatgccaacctcccttcctccaccatgccagcctccctccctccaccatgccagcacagggactccccgtaaatcatcttcatccccct

SEQ ID NO: 816077 - DNA, 120 bp, Artificial Sequence
  ENSG00000256343_21 (sequence is synthesized)
ttgtggaaagactgaagatctgtatatgacaaggtcaagagtgggctcacccagtgctatccaagagaaacaccgtgtcagccacctgcataactttacactgtctagtggtcaccttaa

SEQ ID NO: 816078 - DNA, 120 bp, Artificial Sequence
  ENSG00000256343_22 (sequence is synthesized)
aaaaagtggaaagtaacagataaaactaattttcatattttatttcactcaatgtatccgaaatattaccatttcaacatggaatgaataattaaaattattaatgtcggccgggtgcgg

SEQ ID NO: 816079 - DNA, 120 bp, Artificial Sequence
  ENSG00000256343_23 (sequence is synthesized)
tgaagagcatgaatagaggaattgtttacagagttgtcacaggatacaggaatcaaaaagacagtgatgtttccacaggctggcaaaatctggaagcccacccttgtgagaagagagaag

SEQ ID NO: 816080 - DNA, 120 bp, Artificial Sequence
  ENSG00000256343_24 (sequence is synthesized)
ccaggacccctggtgaggggatcatgctgagcccctacacagctgcaggcggaggactggtcgtgaaggaaaggtggaccttgtgattagaggtttggggcttggagccaggtgatatca

SEQ ID NO: 816081 - DNA, 120 bp, Artificial Sequence
  ENSG00000256343_25 (sequence is synthesized)
gcctgacccccagggagggcgggggctggagctggagtttgatcacctggcaatgactcccatcaatcacacccatggaatgaagccccagtaagaactctggccaccgaggctcaagga

SEQ ID NO: 816082 - DNA, 120 bp, Artificial Sequence
  ENSG00000254854_0 (sequence is synthesized)
ggctagcagcgtgggagctggcagggcttctgcaagccctctgctcccaccctggccccatttcacagacgaggaaacaaaggcccaaagaagagttccgcccgggacggaacgtggcat

SEQ ID NO: 816083 - DNA, 120 bp, Artificial Sequence
  ENSG00000254854_1 (sequence is synthesized)
agctcgcaacagaacccagtctccggagatccctctcctctgcaccacttggacgttccacggagaggcagcggtgcgcggggcgacggggagctgccagagaagcagtggggagccatg

SEQ ID NO: 816084 - DNA, 120 bp, Artificial Sequence
  ENSG00000254854_2 (sequence is synthesized)
ctatgcttcaggagatgaatctggcaacaacgtgggttaatattaatgccctgtacatcctgagtacatgtttccagaaagaggtgatccaggaggctgccaagtggcctgcaggtgaca

SEQ ID NO: 816085 - DNA, 120 bp, Artificial Sequence
  ENSG00000254854_3 (sequence is synthesized)
tccagagggcagaaaatgcccatgcaggtccacgtgtgggtccttaagccccttgaggaaaagggaggagaaaaggacaaagaaggctctccctttcccttggatccccttctactccca

SEQ ID NO: 816086 - DNA, 120 bp, Artificial Sequence
  ENSG00000254855_0 (sequence is synthesized)
ttgactgtggggctgtggatgggacagtctcaaactccatgttcccccagacccagggcccatcctggcacccagcccacagtgggccctgaggaagcatggacctccggggtagccaga

SEQ ID NO: 816087 - DNA, 120 bp, Artificial Sequence
  ENSG00000254855_1 (sequence is synthesized)
ccaaaagctgggagacccagagccagagaattaggctgagaattgggagacagagccttcttgggacaggtgacctgccttgtaccagctgccgtattccccatagggggcgctgtcccg

SEQ ID NO: 816088 - DNA, 120 bp, Artificial Sequence
  ENSG00000254855_2 (sequence is synthesized)
gcgcttatcctggaggaaagaatggtcacaagaaagatgagcagaacagacccttgcacctcaggccacagcccaagacatgtgctaggcctgaatgatgggccaggctccgagggactc

SEQ ID NO: 816089 - DNA, 120 bp, Artificial Sequence
  ENSG00000254859_0 (sequence is synthesized)
gatgtgcagtgcgctgcccttccgaacaccggtgtgcacagcaggcggtttaggtgactctgcttcccgccaagaaaggcagattgccacatgcagcgcctcatttggatgtgtctggaa

SEQ ID NO: 816090 - DNA, 120 bp, Artificial Sequence
  ENSG00000254859_1 (sequence is synthesized)
tcttgactaccctaccttctcctacaaatggaccttgagagcttgtttggaggttctaccagggaagcccagctcttctattgggtatggtcgttctcttcgactgagctgcagcttcgg

SEQ ID NO: 816091 - DNA, 120 bp, Artificial Sequence
  ENSG00000254859_2 (sequence is synthesized)
agtgaggaaggaaggggacacccgcctagccagccagatcagccgaatcaaccctggcgatcaatgggatgacaggtgtcgcagccagatcgccctcatatccggtagttctacttttaa

SEQ ID NO: 816092 - DNA, 120 bp, Artificial Sequence
  ENSG00000254859_3 (sequence is synthesized)
ccttttgtggaatctccatagttttctgcggtgctgcgccatttacattcccaccaacagcgcacagaggtttacacttgtacatgtttccaatgacgaactaaaaactttcatgttttc

SEQ ID NO: 816093 - DNA, 120 bp, Artificial Sequence
  ENSG00000228363_0 (sequence is synthesized)
aatttttattttaccaaggagcaaaactgagtaagtttcctgacgaaaataatgagtgtctactgttctagggcctttaacaacaacaacaacaaatttacattaacgcacattatgtgc

SEQ ID NO: 816094 - DNA, 120 bp, Artificial Sequence
  ENSG00000228363_1 (sequence is synthesized)
caggaattgcaagatgcataagattagtttttaaaatgtgcctgctagagctgaacagggaggacggagaacagacggctcctccggcagacgcgacccggcccgctccaaacaacgctt

SEQ ID NO: 816095 - DNA, 120 bp, Artificial Sequence
  ENSG00000228363_2 (sequence is synthesized)
cgggcaggagaagatccacccgcttatctgccgccgccgtagcccttaccagttctttgggcggcttctcctgggtctttccaaacagccccatgacgaactgaacccgtcttgcccctt

SEQ ID NO: 816096 - DNA, 120 bp, Artificial Sequence
  ENSG00000228363_3 (sequence is synthesized)
gtgtccagtaggcaactcacaggccatcgccctttccagcgtgggcgattcctgcctagcatttgtccatgtgtgtcccgtcctacacgccacactgaccgtgagcttaatcacactctc

SEQ ID NO: 816097 - DNA, 120 bp, Artificial Sequence
  ENSG00000228363_4 (sequence is synthesized)
aaaggaatctgactaaagagaactagacacattttagcacggacagttcctgattaggcctatacgagactatacgtaacatggacctggaaaagcttaaaaatatgaagaggattgaac

SEQ ID NO: 816098 - DNA, 120 bp, Artificial Sequence
  ENSG00000228363_5 (sequence is synthesized)
tggctgccatctgtgcatcttcatttatgaaaacactcctcatagacttaaaacaaatgacagagaacaaattagtcagcttcttctaaaatacagtggtctccccttaccctcagtttc

SEQ ID NO: 816099 - DNA, 120 bp, Artificial Sequence
  ENSG00000228363_6 (sequence is synthesized)
attgcaagatgcataagattagtttttaaaatgtgcctgctagagctgaacaggtaacgagagttcgaagccgggtccagagctatcttctgtaacattcttctgggtcgagtccctgcc

SEQ ID NO: 816100 - DNA, 120 bp, Artificial Sequence
  ENSG00000228363_7 (sequence is synthesized)
attttcagtatcttgagacccctccgacatttcctcttcagactggactccaagacatttaaatcgccacattgcattataaatggttttgatccgagaagctgcatgagcagttatcca

SEQ ID NO: 816101 - DNA, 120 bp, Artificial Sequence
  ENSG00000228363_8 (sequence is synthesized)
tttaaaaatgtgctctacttcaatcttgcgtccactgtattctttaagcatgactttcccttttgaagtacttgtttgtggaacagacataatgagtgtggatcggacccagcctcttct

SEQ ID NO: 816102 - DNA, 120 bp, Artificial Sequence
  ENSG00000228363_9 (sequence is synthesized)
ttctatttttattagttgttgttgttactgtgcctaacttacacattaaactttatcacaggtatgtatgtataggaaaaaacatagactatataggatttggtactatccacggtttca

SEQ ID NO: 816103 - DNA, 120 bp, Artificial Sequence
  ENSG00000228363_10 (sequence is synthesized)
ggcatccactgggggtcttggaacgcatccccctcagataaggggggactactgtaaacagaaaataacaacaattcaaattgttaaaaacaattcttgaaagttatcctttacaataga

SEQ ID NO: 816104 - DNA, 120 bp, Artificial Sequence
  ENSG00000228363_11 (sequence is synthesized)
ttaatatatatgatctgagctgaaagaatggcaagcaatggagacaatatttctcttctgtttctagtagatattttcaattttaagcatagttttaaaaagtacaaccctcttttaagg

SEQ ID NO: 816105 - DNA, 120 bp, Artificial Sequence
  ENSG00000228363_12 (sequence is synthesized)
gcttaaaccaaggtggctgtgctgattggcttagctggctagttcacagtgccaaggacagggtttcaatctcattcttctcagttgtcctgccagagattgttctttcagaccaggcca

SEQ ID NO: 816106 - DNA, 120 bp, Artificial Sequence
  ENSG00000228363_13 (sequence is synthesized)
gccatttgacagatgtaagccactggcctcaaggaacacaagccagacagtggtggtcaatgcaaaccttgagcatcactggaaaaattaagcaggtgtcctactgcattatttccatac

SEQ ID NO: 816107 - DNA, 120 bp, Artificial Sequence
  ENSG00000228363_14 (sequence is synthesized)
atccattttcaaaattctctaggcaaacaacacattcagtacagtgcagcatatcagcaggccaagttaaccaatcaggttccatatcttcattagtgttatatgatccatatgacctcc

SEQ ID NO: 816108 - DNA, 120 bp, Artificial Sequence
  ENSG00000228363_15 (sequence is synthesized)
ccttcctttcacatgggctggtctgacaatatttattggcacatgaacaagcctcagcatcacagtgacttgctgttcctggagaattgtgaagtacgctttgcttatcttcaaatactt

SEQ ID NO: 816109 - DNA, 120 bp, Artificial Sequence
  ENSG00000228363_16 (sequence is synthesized)
ccttctcactactcaaagtgtctgtgttctcactttccgagtcattttcagtatcttgagacccctccgacatttcctcttcagactggactccaagacatttaaatcgccacattgaga

SEQ ID NO: 816110 - DNA, 120 bp, Artificial Sequence
  ENSG00000228363_17 (sequence is synthesized)
ataatgctaccatttactatcattatttgtccttcacttcatttgtcaccttaccagagaattccttgccactctcatctccttaatctgcttatttttcttcttactactttccactaa

SEQ ID NO: 816111 - DNA, 120 bp, Artificial Sequence
  ENSG00000228363_18 (sequence is synthesized)
ctgatgttatattaaatatttatttatttggtgtctgcctctcccaactagaatgtgagctgcctgacagagcaaggccttagcttggtgtgtgtttctggtatatcttcagggcccaga

SEQ ID NO: 816112 - DNA, 120 bp, Artificial Sequence
  ENSG00000228363_19 (sequence is synthesized)
acagggcctggcacacccacaactgaataaacttttgatgaattctgtcacatatttattacaggagcttaattcatggatatctttaacaggacatcaaaaacagtagatcatttacaa

SEQ ID NO: 816113 - DNA, 120 bp, Artificial Sequence
  ENSG00000228363_20 (sequence is synthesized)
gccaagaacatactgctaactattgaaccagaatgtatttgttgtctataggcagcagcctatatagcaaaagaactcaagacttttgacatagcccttccaagtttcaaaggtgtgcaa

SEQ ID NO: 816114 - DNA, 120 bp, Artificial Sequence
  ENSG00000228363_21 (sequence is synthesized)
catcttcaccatttatttccatgggatcattcaatgtgggtgacatttagacactgaaagcagggcagtgggactggctattcaattcatcctcagtaataaaatctaaaattatcaaaa

SEQ ID NO: 816115 - DNA, 120 bp, Artificial Sequence
  ENSG00000238121_0 (sequence is synthesized)
caaatgggggatctcagaagtcttaatgaagtaactatccctgaacactgggatcaatactcagcatccagctgtcaaatcaacaccaagccgcctcctggagcagattgttaagctgat

SEQ ID NO: 816116 - DNA, 83 bp, Artificial Sequence
  ENSG00000238121_1 (sequence is synthesized)
tccccgtcgcgatcacaagttaaacaaacacagttctttacatcaatgcttccgtccctggccatctggtctcctgtcccctc

SEQ ID NO: 816117 - DNA, 120 bp, Artificial Sequence
  ENSG00000238121_2 (sequence is synthesized)
caatgcttccgtccctggccatctggtctcctgtcccctccagacccaaaaccatgggctgggctgcagcaaaatgagggtgtactcagtgcactgaggcccatgtaccatgagagatgg

SEQ ID NO: 816118 - DNA, 120 bp, Artificial Sequence
  ENSG00000238121_3 (sequence is synthesized)
agtttctttttctattaaatggaagtagtgcttatacccatgcttatactcaatacgatcatgcaagcaaaagcgctttgtaaatgacaaaaagcctcgataagcggatcactcctatcg

SEQ ID NO: 816119 - DNA, 120 bp, Artificial Sequence
  ENSG00000238121_4 (sequence is synthesized)
acggcctgatttatagaaactgagcgagactccggaccacctgatgcagagaaacctgtgacctgaaaaagtctatttgtgtttcctctaggaatctcggccaagaagacagggacaagc

SEQ ID NO: 816120 - DNA, 120 bp, Artificial Sequence
  ENSG00000238121_5 (sequence is synthesized)
tcccaactctgactaccccttttacagggaaaaaaaaaaaatcccgtgccttctttgcagcaagtgacaaatccttgtcatatcgagatggcttttcctcctcctcttcaaacatctttt

SEQ ID NO: 816121 - DNA, 120 bp, Artificial Sequence
  ENSG00000238121_6 (sequence is synthesized)
agcagcaacagcagctcaagtaactggaattatttcagagttaaaatgcaggctttgtagaccctcttagacagacagattcaatttcaaaggaaacttctttggctgggtactcagtga

SEQ ID NO: 816122 - DNA, 120 bp, Artificial Sequence
  ENSG00000238121_7 (sequence is synthesized)
gtgttacacagggatttggggagttaatattcactgtttctgttgttggagaaaaggaaagcagagttgctctttctcattactctccccaacgcacatctgtttcctctcgtatcttgg

SEQ ID NO: 816123 - DNA, 120 bp, Artificial Sequence
  ENSG00000238121_8 (sequence is synthesized)
gcagttgatcacggttttaaagatcccagcatagactttctgcagcctcccttgttagccactatcagcgcttaacattctgtcatctgaataactccttaaaaatgatagcaatggtag

SEQ ID NO: 816124 - DNA, 120 bp, Artificial Sequence
  ENSG00000238121_9 (sequence is synthesized)
tagaaatttaaaaggaacctcccaaaaaacatgcaaaagcttaccaccccagtaaatcacccgcaacaatgtcgcaacagtttaaatttactgcagagagagctgaagtttaggagacac

SEQ ID NO: 816125 - DNA, 120 bp, Artificial Sequence
  ENSG00000238121_10 (sequence is synthesized)
agctttataatatttttgagagatagttgagtgcaaatgagtcctgttcctcttgcatcagggcctgctccactgagtcatcctgccttcagaagcttccagctaagtggcaggccccgg

SEQ ID NO: 816126 - DNA, 120 bp, Artificial Sequence
  ENSG00000238121_11 (sequence is synthesized)
ccataggctccctgtgtccccagcctccagagaacacacaatgttctcatcgcccttagctccattccagaaggggcctgcagttctgcagcttatcaggggtctactgggaagtgagat

SEQ ID NO: 816127 - DNA, 120 bp, Artificial Sequence
  ENSG00000238121_12 (sequence is synthesized)
gtcactgtccctttctggccctgcattgtctgtgagtggctctcctggattaagagttggcaaagtatggccagtggccaggactggcctgctgcctgtttttgtttaacccgtgagcta

SEQ ID NO: 816128 - DNA, 120 bp, Artificial Sequence
  ENSG00000238121_13 (sequence is synthesized)
agaatagtttttacctattttaagtagttgaaaaaaaaatcaagagaagaatactatttcgtgatatgtgaaaaatcacatgaaattcaaatgtaagtgtccataaataaagtcttactg

SEQ ID NO: 816129 - DNA, 120 bp, Artificial Sequence
  ENSG00000238121_14 (sequence is synthesized)
agtcttaatgaagtaactatccctgaacactgggatcaatactcagcatccagctgtcaaatcaacaccaagcgtttcactcgtcgcccagcctagagtgcaatggcgctatttcggctc

SEQ ID NO: 816130 - DNA, 84 bp, Artificial Sequence
  ENSG00000238121_15 (sequence is synthesized)
attattcagcgtcccaagtagctgggattacagccgcctcctggagcagattgttaagctgatgcgagtctgggctctgcctca

SEQ ID NO: 816131 - DNA, 120 bp, Artificial Sequence
  ENSG00000238121_16 (sequence is synthesized)
ctacagagtgggtctaggtccaggtacagtctcagaaccacactgcaaaactggcttagtcaggtagctgctgtatctgctgcttccactgtgaactcaaaaaccacattgcctgtgctg

SEQ ID NO: 816132 - DNA, 120 bp, Artificial Sequence
  ENSG00000238121_17 (sequence is synthesized)
caggccggaaagctgctgaaccaggaagctgtgctgatgctgctgactgcccctgaggttagagattgactagacatagtgccactgtcatccctgctggagaaggtccgaagcacctcc

SEQ ID NO: 816133 - DNA, 120 bp, Artificial Sequence
  ENSG00000238121_18 (sequence is synthesized)
acctctgtgcttccagaggggcactgtggtggccacttaaaatgctcaggctataccatgcactagagcatctacctgggcaagggatatgctgtatgacactctcctgatgctgggcat

SEQ ID NO: 816134 - DNA, 120 bp, Artificial Sequence
  ENSG00000238121_19 (sequence is synthesized)
ggctgtgagccaaagcacccaggcagccctgccatcagaagggtaaaccacggacacctgatgccttcctgaaggaagagcactacgcctgccaaaccatcaagcgttgatgctccagcg

SEQ ID NO: 816135 - DNA, 120 bp, Artificial Sequence
  ENSG00000238121_20 (sequence is synthesized)
actcggccatgaaagtctttgaaggtggggaaggggtgaagatggtgaggggattccacggctgggagaggtacactccctacacgttctaaccaactggccgtggggaggaagctggag

SEQ ID NO: 816136 - DNA, 120 bp, Artificial Sequence
  ENSG00000238121_21 (sequence is synthesized)
ctcccgggttcaagcaattcttctgcttcagcgtcccaagtagctgggattacaggccttcagttgcaaagttctccattgtcagattacgctgcctgatgggcatgaaaagtccacaaa

SEQ ID NO: 816137 - DNA, 120 bp, Artificial Sequence
  ENSG00000238121_22 (sequence is synthesized)
aaagtccacaaaagagaattttctgatgtgagaatggagggtgttgcctgcaactaccccagatccctgcggtggcagtttaagccgcctcctggagcagattgttaagctgatgcgagt

SEQ ID NO: 816138 - DNA, 120 bp, Artificial Sequence
  ENSG00000238121_23 (sequence is synthesized)
agtttacgtagctgtgaaaatggatgaataatgcctgcttgtgctgttgttagggaggggacgcctgcttggaggcgagtatgcagtaggtgctcagtgagtggtgatgagataaaaagc

SEQ ID NO: 816139 - DNA, 120 bp, Artificial Sequence
  ENSG00000238121_24 (sequence is synthesized)
aatgctgctcattttctatatttctcttttcatacttattgagattacaatggagagaagggacaccagcttaaaagaaaacatttgcaaatctgtttctgataaatggaaatgagagca

SEQ ID NO: 816140 - DNA, 64 bp, Artificial Sequence
  ENSG00000238121_25 (sequence is synthesized)
cactgaggcccatgtaccatgagagatggtgagagaaagccttggccggagtttaaggatttgg

SEQ ID NO: 816141 - DNA, 120 bp, Artificial Sequence
  ENSG00000238121_26 (sequence is synthesized)
tagcatccccatcacccagcaattaattttagttcaatgcttcaaacgctcttcaggcgcagtgtgcgttcagctgtgtcagctaatggcactggagacacagaaatgaaagagacaacg

SEQ ID NO: 816142 - DNA, 120 bp, Artificial Sequence
  ENSG00000238121_27 (sequence is synthesized)
atggtcacaattcggccatgctgtctttgaactcaacaccaccaaaatcataggatattcctagtaatgttgatttccactagattacttttgttaccagagttttaagggcagaagtct

SEQ ID NO: 816143 - DNA, 120 bp, Artificial Sequence
  ENSG00000238121_28 (sequence is synthesized)
ttgtccctttttttctctaacaggaagccattctgggccatttatttgccgttaacttacacagcccactggagagtggaggggtgtgaatgtgggagcctgggtgagggctgcaccgga

SEQ ID NO: 816144 - DNA, 120 bp, Artificial Sequence
  ENSG00000238121_29 (sequence is synthesized)
ctgtcaccaggacagtcctcaatgctgcctgacttagccacattgccaaaaacatacacccataggttatgaaatattcaatactgtattgtatgggagaaatacaaagaggagaaagaa

SEQ ID NO: 816145 - DNA, 120 bp, Artificial Sequence
  ENSG00000238121_30 (sequence is synthesized)
aaagccaaagctcctgccaaagaaatgtgtggagcagaaaagaaaacccagagcagaatgtcaagagcaaggatgtgttgggacaggaaatgaagacgagattgggagaggtcatgcaga

SEQ ID NO: 816146 - DNA, 120 bp, Artificial Sequence
  ENSG00000238121_31 (sequence is synthesized)
atcaggtcacattctggagggaagaaggagcaaaggcacatgatgagagagtgctaattaaggtggccaaagagaacagtgtggtgctgtaaatgccggcagagcaaggagccctgctgc

SEQ ID NO: 816147 - DNA, 120 bp, Artificial Sequence
  ENSG00000238121_32 (sequence is synthesized)
cagagagacagagagagcttcagcttggtttcaaaacaaggatggaaatacagaacaacttaagttaccagcacacttcataacaattaaaaatcatctcgcttcttccttctgccagca

SEQ ID NO: 816148 - DNA, 120 bp, Artificial Sequence
  ENSG00000238121_33 (sequence is synthesized)
taattttgggctcacaggtggattgacctgacctccaagaaatgtgtgacaaggactcgccccttacctcctcagttacagcacgtttggtgtttatgtgaagctggtggctttcagtat

SEQ ID NO: 816149 - DNA, 120 bp, Artificial Sequence
  ENSG00000238121_34 (sequence is synthesized)
catggtgaaaattttcttttaggtcataattgcttaactacaatgaaaagtattgattttggaaaaggctcatcttcccaaagaggttcacttcaggaggtgaattaatgtgctccaggg

SEQ ID NO: 816150 - DNA, 120 bp, Artificial Sequence
  ENSG00000228361_0 (sequence is synthesized)
ctcgggcactgattctcaaccctggctaaccactaaaaatttactcaaggagcttttaaaaagtatcagtgcctaggacacaacacaggttaattgaataagaacttcgggaggagactc

SEQ ID NO: 816151 - DNA, 120 bp, Artificial Sequence
  ENSG00000228361_1 (sequence is synthesized)
ttggaacaggaaaagaagagctcttttgacaaagcaaaggaggatcacagagttccagccctgggggctgcgtctgggggtttcctggcattagaggagctgatggtgaattttccctca

SEQ ID NO: 816152 - DNA, 120 bp, Artificial Sequence
  ENSG00000228361_2 (sequence is synthesized)
accatcaccggaaatgtgaaactcagtggagctccctgttcccacagggtcacattcaagcacaattcaaatatgaatacagtaaaatcatgagatcccagctactctcaacaaggctta

SEQ ID NO: 816153 - DNA, 120 bp, Artificial Sequence
  ENSG00000239268_0 (sequence is synthesized)
gtttaagtacatcgcatttagttgaagctgcaggggagtgagggagaggaggataggaagcaggaaagcgggagagctcgagggacaagggggctcggtgtgtttacaccaggcacgggc

SEQ ID NO: 816154 - DNA, 120 bp, Artificial Sequence
  ENSG00000239268_1 (sequence is synthesized)
tacgagcgtccatcccggcccctggcttgcgctcccgaagaggagagcaaggctgttctgggatccggccgtcgtgcggcaagaggcttgtctgtccgggttgccggaaccaggagaacc

SEQ ID NO: 816155 - DNA, 120 bp, Artificial Sequence
  ENSG00000239268_2 (sequence is synthesized)
gcgcgagggagcatcgagcgcagcggagacatgaggacctactggctgcacagcgtctgggtgctgggctttttcctgtccctcttctcattgcaagaaaatattttattcccctacctt

SEQ ID NO: 816156 - DNA, 120 bp, Artificial Sequence
  ENSG00000239268_3 (sequence is synthesized)
cctgaaggaggtgtacattccatccacatatgacttggagtgggctcaaagtttgttaaataatgacttggggtgagtgaggaggggcagctgtcaagggaacagatcaattagccaatt

SEQ ID NO: 816157 - DNA, 120 bp, Artificial Sequence
  ENSG00000239268_4 (sequence is synthesized)
gaccaattatgtatatttgattataaatcgcaatattgtatcttcactttttattcttcaggcttcaaataataatattagaaccagtttctgatgaaatatgttttctctcatatatga

SEQ ID NO: 816158 - DNA, 120 bp, Artificial Sequence
  ENSG00000239268_5 (sequence is synthesized)
ttttcactaaggccagagtagaatctgcattttattattatttttagtttcagtacaaaatgggtatgaatagttcataaattacaagtgtataagtaactatcacccagatcaacaaat

SEQ ID NO: 816159 - DNA, 120 bp, Artificial Sequence
  ENSG00000239268_6 (sequence is synthesized)
gggacaatatcatttcccagaagttaccctatgccactgtacccccacagacaccaagaataagcactctgtagcagcatggatttgttttgtctgcttcaaaaatttatatacgtgaga

SEQ ID NO: 816160 - DNA, 120 bp, Artificial Sequence
  ENSG00000239268_7 (sequence is synthesized)
ttatatgatataaactctttgtttctggattcttttgctaaatatttcgttggtaggaataattaatccagttgtatatatcattgttcaatagtatttcattgtagaagtatactatat

SEQ ID NO: 816161 - DNA, 120 bp, Artificial Sequence
  ENSG00000228365_0 (sequence is synthesized)
ccagggatggcattagcaaaagagactcaatgaggatgagaaaacagagatgacagagacccaaataacatttgaattggactctacctgcaagtggagctttaccatccaggttcttct

SEQ ID NO: 816162 - DNA, 120 bp, Artificial Sequence
  ENSG00000228365_1 (sequence is synthesized)
tggtactccactcccatttgcacattaaagattgtaagagagttggaactttggacatggatggacctctcccagtaaatctagaaggcattcattccaacagcatacaaaacaatactg

SEQ ID NO: 816163 - DNA, 120 bp, Artificial Sequence
  ENSG00000228365_2 (sequence is synthesized)
gtgcccacgccacaacactatggcaccataaatatactgctataggaaaagtttgatttccagccattgaacttgacattgaaattccagcctgggtgcagtagggtgagcctgtagtcc

SEQ ID NO: 816164 - DNA, 120 bp, Artificial Sequence
  ENSG00000228365_3 (sequence is synthesized)
cagctactctggagactgaggcaggaagagcacttgagtccaggagttcaaatccagtctgagcagtataatgagacccccttctctaaaaaacaaataaatacatacattggcatcaaa

SEQ ID NO: 816165 - DNA, 120 bp, Artificial Sequence
  ENSG00000239265_0 (sequence is synthesized)
agctcagctggagtgcaagctgggaatgcagtcaaggcttcatccaccccaggcagctttcctgagccttgggagactggctctcaatgaatccaagctgcttttatcctttgctgccta

SEQ ID NO: 816166 - DNA, 120 bp, Artificial Sequence
  ENSG00000239265_1 (sequence is synthesized)
tctagtcttgttaacaacaaagaagaggagaatggagattgagcaaccaggaagcagtctcagccacaccatcatatggagaagtgcctgtttcccattctgcccgattttaagtttcct

SEQ ID NO: 816167 - DNA, 120 bp, Artificial Sequence
  ENSG00000239265_2 (sequence is synthesized)
gaggcacccccagccatgcagaactctctggtgcctggcccacaggaagttttcactaaatattgaaataaactgaacttagattaaactttggtgtctaacttaggaaaaacaacaaga

SEQ ID NO: 816168 - DNA, 120 bp, Artificial Sequence
  ENSG00000239265_3 (sequence is synthesized)
gttctacaaaactatttcttcacaggaaagtctgaagccaggcctgcttagcagaggtctccgtatagtagggatctcactctttcaagatgtaggatctcaactggttagccagccctc

SEQ ID NO: 816169 - DNA, 120 bp, Artificial Sequence
  ENSG00000239265_4 (sequence is synthesized)
tgagtgaagctggtcagttggggctgtgacaacatagcacactcaaaggggcagacccttctcagctccaacagattggtgtcattggaaaaggtggacccagtgtaggcagactttcct

SEQ ID NO: 816170 - DNA, 120 bp, Artificial Sequence
  ENSG00000239265_5 (sequence is synthesized)
agagagtccagaagtgactgtgcaagcccaaagcaatccaaacaaatatttgtggaccaccaagaacctctggtatgaagtaaataataaaggcattgaacaataataacctgtctgtat

SEQ ID NO: 816171 - DNA, 120 bp, Artificial Sequence
  ENSG00000239265_6 (sequence is synthesized)
atccaccaatgggaccgatgggccacagtgtgacatctatcctattcatgtcataagggagatgaattctactgtgggacagtctgtgtgactgctcgtaggagattatccaattccttt

SEQ ID NO: 816172 - DNA, 120 bp, Artificial Sequence
  ENSG00000239265_7 (sequence is synthesized)
tgctctaatttcatggtcaccaaatttctgcttgctaactttgttttacaacaaactttagaaaggaggtgatctgaataagaggatatatgtttttcagtctctggaaaggggtatttc

SEQ ID NO: 816173 - DNA, 120 bp, Artificial Sequence
  ENSG00000239265_8 (sequence is synthesized)
tttgtattgagaagccagaactcttgagtgtgttgagccttgtagagattgaaccactctgggtcagctgacaaaataagattctggtgctgaaaagctgagtatgtgaccatgatatta

SEQ ID NO: 816174 - DNA, 120 bp, Artificial Sequence
  ENSG00000239265_9 (sequence is synthesized)
tgtaaatgtagcagacaccattttgctagtgaatgaggttaaatctttagccttgtcattggttcggctttgtaatttaaaactctcttattttaccctctgattttaaatccccagatt

SEQ ID NO: 816175 - DNA, 120 bp, Artificial Sequence
  ENSG00000239265_10 (sequence is synthesized)
ttcctttctgtgtcctttgccccctgaagtttccatctgtctagcaactaagcactgtttgggtatctactgtcttccccaagttgcctttacttttcttctttacctttctcttgtttt

SEQ ID NO: 816176 - DNA, 84 bp, Artificial Sequence
  ENSG00000239265_11 (sequence is synthesized)
aagttgcctttacttttcttctttacctttctcttgttttatttatttctttcgggaatgcagtggcgcaatctcggctcattg

SEQ ID NO: 816177 - DNA, 74 bp, Artificial Sequence
  ENSG00000239265_12 (sequence is synthesized)
ggttcaagcagttctcctgcctcagcctaatgagtagctggaattacaggtgtgcacccccatacctgactaag

SEQ ID NO: 816178 - DNA, 120 bp, Artificial Sequence
  ENSG00000239265_13 (sequence is synthesized)
acaggcatgagccaccacacacagcctctcttgttttacttctgtcattactttttgttcttttaatttggaaacccacctgcttcctcagtgtcattattaaaaacccacatgttacag

SEQ ID NO: 816179 - DNA, 120 bp, Artificial Sequence
  ENSG00000239265_14 (sequence is synthesized)
tcctcagtgtcattattaaaaacccacatgttacaggttcattaggactgaaacattccttcagagctgagctgaccaacatgttagccactagccacatgtgactattgcatacatgaa

SEQ ID NO: 816180 - DNA, 120 bp, Artificial Sequence
  ENSG00000239265_15 (sequence is synthesized)
atgcaaaatgtggctggtctgaaatgatggtataggtatgaaattcacacaagatttagaatactgaagataaaaaagaatgtaaagtatctcattaatactttttttggtattgatcac

SEQ ID NO: 816181 - DNA, 120 bp, Artificial Sequence
  ENSG00000239265_16 (sequence is synthesized)
ctattgaaatggtaatatttggttatactggcttaagcaaatgtacattaaaattaatttcatctatttctttttacttctttaataccagaaaatgtaaaagtacctatctggcaagca

SEQ ID NO: 816182 - DNA, 120 bp, Artificial Sequence
  ENSG00000239265_17 (sequence is synthesized)
atataaaactattggtcagtgctacttgagagtcttaatgtctgtattttttatatctctgtaagcataaatgctgtattaaaaacccaatttgaataaacacccccaaattactcttcc

SEQ ID NO: 816183 - DNA, 120 bp, Artificial Sequence
  ENSG00000239265_18 (sequence is synthesized)
aaaaaatgattttcttctgttggcttggcatgatgagaaacggcttctgtgagggcgaggttcaaaaacaagacctttgtgagcaatgggaagggactgcctctttgactgcatttatta

SEQ ID NO: 816184 - DNA, 120 bp, Artificial Sequence
  ENSG00000239265_19 (sequence is synthesized)
cggaagctgaacggacagctcccagctgaaaaggcaacttcaccatcgacggttctcgccaggttaaatgtcagtagatgaaggcctcatcatcactcatacttggcttttctccttttc

SEQ ID NO: 816185 - DNA, 120 bp, Artificial Sequence
  ENSG00000239265_20 (sequence is synthesized)
tgctgcttcttctccctaattggaaatctttggactaagaatctgtaaaacaagtctttcaaactgccttcaagtatctcctctgtgtcacttggtaacaaaggtcgaagataacagatg

SEQ ID NO: 816186 - DNA, 120 bp, Artificial Sequence
  ENSG00000239265_21 (sequence is synthesized)
gagtcctcagtgtaacttgataaatgtttcccttcctcagccttttgtctgattggacatctggaaggaggcagttgttggctttgttacagtggttcaagaatgtcagaattgcagtca

SEQ ID NO: 816187 - DNA, 120 bp, Artificial Sequence
  ENSG00000239265_22 (sequence is synthesized)
ctacaattctcctggcttttctctcatggtccccaaatgactgctggagtttcagccatcatatcagtgatcaaggcagctggatccaggcagtaatccagacacttggaagtcccaccc

SEQ ID NO: 816188 - DNA, 120 bp, Artificial Sequence
  ENSG00000239265_23 (sequence is synthesized)
ttgtagcagggagaccctcaagggcgtctacaatatcaccacaactctcatagagctgcctgtgaaggatgacaagaaggaagtaggctgagacccaagttctgggtcaggggactaatg

SEQ ID NO: 816189 - DNA, 120 bp, Artificial Sequence
  ENSG00000228369_0 (sequence is synthesized)
tttctcctttaaactttagaggagtttctgcactgagagactggaatggccatcgtccggaaacatctgggaagaaatccatctcattaagactttcagcaaccattgcctcagggtact

SEQ ID NO: 816190 - DNA, 120 bp, Artificial Sequence
  ENSG00000228369_1 (sequence is synthesized)
aggtgacaaaaatgccatgcatttccaccttgttctcttatggcacgcactcttggaatccagcctcccataaagctactgtgaggaaacccataggagcccatgcggaaagatcacatg

SEQ ID NO: 816191 - DNA, 120 bp, Artificial Sequence
  ENSG00000228369_2 (sequence is synthesized)
gagaggtaaccagcttagccaaggccccagtcatcatagaacagggacaagcctttcccagtgtgccttgtttgaattccttactcacacaattgtgagcataataaaatgatttcttca

SEQ ID NO: 816192 - DNA, 120 bp, Artificial Sequence
  ENSG00000228368_0 (sequence is synthesized)
tgcctctgggacactgacctgcacaagctgcctgaccaaattcactccttaatgtccacaataggaactggtaaggcagggagaggggacagcagtcctaagcaccaggagccagaagtg

SEQ ID NO: 816193 - DNA, 120 bp, Artificial Sequence
  ENSG00000228368_1 (sequence is synthesized)
tatattttatttctaggtcatgtttatttctagaaagttagttgggtatgaaccaatggccaggtgggcatgaaccaatgaaccacgttcaagacatgataggggaaaatctcttgcctg

SEQ ID NO: 816194 - DNA, 120 bp, Artificial Sequence
  ENSG00000228368_2 (sequence is synthesized)
tgaccactactatacaactacatttcccctgctagatccaacctgctcatcactacacttataaatatcatttcagttttctctttggactgagcaataataaatctttgtttcatctta

SEQ ID NO: 816195 - DNA, 120 bp, Artificial Sequence
  ENSG00000232243_0 (sequence is synthesized)
aagtccctggagctctcattttcaggagcggcccaattgctaattctattcaataactaattccatgaaaagccatgcatggtcgctgtctaccctggaaatgtgacaggaaccttccag

SEQ ID NO: 816196 - DNA, 120 bp, Artificial Sequence
  ENSG00000232243_1 (sequence is synthesized)
ttcaatcatgtgatttcactcatgaacatagaagagcaaactgaggctttcttggacagcattgcagccaggagcttaaaagatgccgcaggagtttcaagacagtatagctagagagct

SEQ ID NO: 816197 - DNA, 120 bp, Artificial Sequence
  ENSG00000232243_2 (sequence is synthesized)
actaaaagcttcagagaaatctcaagaagtctgtgtatcctttttcctctggctctacactttcttcacttctaccgtccctatggacctgccagccagcacactgaaactgttctcaga

SEQ ID NO: 816198 - DNA, 120 bp, Artificial Sequence
  ENSG00000232243_3 (sequence is synthesized)
atttaaggccaagagacagactccaggctcatctagtaacactcaggctactccagttcaaaggcagccacgtgacaggttgtagcatgcaatgttgaggggtggactgtatcatcttcg

SEQ ID NO: 816199 - DNA, 120 bp, Artificial Sequence
  ENSG00000232243_4 (sequence is synthesized)
tcatgtaatttcggtgcttgtcctagttcctgaacatatggttgttgaataaatgaatgaaaaatgagaaaaccaggagctctgatacttaaccacaatgatgctgctgaatttgaattg

SEQ ID NO: 816200 - DNA, 120 bp, Artificial Sequence
  ENSG00000232243_5 (sequence is synthesized)
ggatcgtatgtagttcctcatctaggaactagtgatgagtcaaatataaattaagatatagtttggaaatattaagaaatatgtattgattttaaccagaaatatatgatctgaaagaca

SEQ ID NO: 816201 - DNA, 120 bp, Artificial Sequence
  ENSG00000232243_6 (sequence is synthesized)
acgtattttttattcttatgaacactgatgaagttctcaactcatgttactgacttacacttagttaactatggaatatttgagataagtaattccttctttttttttttccagatgctg

SEQ ID NO: 816202 - DNA, 120 bp, Artificial Sequence
  ENSG00000284994_0 (sequence is synthesized)
gtccactgggcaatgatcagcaattctgacttcaagatccaatcacccagtgaaagctacaagagaactcagtacaaggctttcttggttgtgctgtctttctgaggcaacgtggagtct

SEQ ID NO: 816203 - DNA, 120 bp, Artificial Sequence
  ENSG00000284994_1 (sequence is synthesized)
aacatgtcccccaacaatgtgctgagttttttactcggtagacaactggggaggcacagaaatgatgtggatctgacaaagtggttgtggatgctgacacgagcaatgccagggtggagc

SEQ ID NO: 816204 - DNA, 120 bp, Artificial Sequence
  ENSG00000284994_2 (sequence is synthesized)
tggcctttgccaaaaaaaatcacgtgacttacaagcacatgcctacacagaatcttggaaaataattttttttaaaaagtattagaataaaattcttccctagcttcagctattgaaata

SEQ ID NO: 816205 - DNA, 120 bp, Artificial Sequence
  ENSG00000284999_0 (sequence is synthesized)
agtggctgtgcctgtggcctttgacgctcatcctgactcctgactgatgaattatttggtcgactgaggcagaatcacctttactggagcataatctgttggaggcagcatctcctgaag

SEQ ID NO: 816206 - DNA, 120 bp, Artificial Sequence
  ENSG00000284999_1 (sequence is synthesized)
tctccatgagttgctggaatgaagaaatgtgtcatatgtgaaccaaaacacatgtaaaaattgttgacaatagcaccatttgtaaaagactaaaactggaaaccaccaaatgatcagcaa

SEQ ID NO: 816207 - DNA, 120 bp, Artificial Sequence
  ENSG00000284999_2 (sequence is synthesized)
gaatgaatgaacagcagctacacacaaccggtatggatgaatctcatgaacacaatgtgaagggaaagaaggcagaaacatacttatcacaccctccatttatataaaactcagagacaa

SEQ ID NO: 816208 - DNA, 120 bp, Artificial Sequence
  ENSG00000284999_3 (sequence is synthesized)
aacaaatttatggtgttaggagtcaggttcctttggggaagagagagggagtagtacctgaatggagggggcatggagggggcttcgggcatgctggtaagatttttgttttgtttttaa

SEQ ID NO: 816209 - DNA, 120 bp, Artificial Sequence
  ENSG00000284999_4 (sequence is synthesized)
tctgagtgatataggtggtagttactttttgatgttacatcgagctgtacacttatgatctgttcatgtttctgtatgtattttatacttcaataaaacattagtgatttgtgaatactc

SEQ ID NO: 816210 - DNA, 120 bp, Artificial Sequence
  ENSG00000284999_5 (sequence is synthesized)
aatttggagatgttgcttgaaagtttaaagtattggtgttaccgaaccattagaatattacatatggacaacgcccatccattagaatattacgtatggacaacatggtggaacatttcg

SEQ ID NO: 816211 - DNA, 120 bp, Artificial Sequence
  ENSG00000284999_6 (sequence is synthesized)
aataaggttgattcttctatgtcttggttggaataaaaggaagatatgtgcattactagaagcaacgtacaacgagagagcaaaggaaagtagctcagacccaaggaagatcaaattaag

SEQ ID NO: 816212 - DNA, 81 bp, Artificial Sequence
  ENSG00000246465_0 (sequence is synthesized)
ttcggatatgcatttcattcatccatgcgtccgcctgcctgcctgcgcttccatccatccatccatatttccagcgagacg

SEQ ID NO: 816213 - DNA, 120 bp, Artificial Sequence
  ENSG00000246465_1 (sequence is synthesized)
tcagagaactcacagtcttcttggggaagaggtcataaacttgggcctgggtggttgccctatccaactgaggtcgcctttgcgatccctgctgcaaataggcagtgactagtccaggag

SEQ ID NO: 816214 - DNA, 120 bp, Artificial Sequence
  ENSG00000246465_2 (sequence is synthesized)
tgcaaataggcagtgactagtccaggagtgcagctgggaggaactgctcgccggatagaagggaagaaaggagattctaggcagaggctggaatgcaatgatgcgatctcggctcactgc

SEQ ID NO: 816215 - DNA, 120 bp, Artificial Sequence
  ENSG00000246465_3 (sequence is synthesized)
ctcctgcctcagcctcccgggtagctggtactacaggctcctgccaccacgcccagcaatttttgtatttttagtagcgacagggttgtaccatgttggccatcctgacctcaggtgatc

SEQ ID NO: 816216 - DNA, 120 bp, Artificial Sequence
  ENSG00000246465_4 (sequence is synthesized)
ctgggattacaggcatgagccactgtgttcagttggccatactgatagactccaggctttgggaaactgatggcatttggggatttccccagcatgtcctgtgatgctcttgattccttg

SEQ ID NO: 816217 - DNA, 120 bp, Artificial Sequence
  ENSG00000246465_5 (sequence is synthesized)
tcctgtgatgctcttgattccttgtgtctccagtcatgacagagagaaggcattcctggcttgttggtccacatttatgatttgttgatgttgttgttgagatggagtctcaccttgtcg

SEQ ID NO: 816218 - DNA, 83 bp, Artificial Sequence
  ENSG00000246465_6 (sequence is synthesized)
ttgatgttgttgttgagatggagtctcacctaacctccatctcttgggttcaagtgattcctctgcctcagcctcccaagtag

SEQ ID NO: 816219 - DNA, 120 bp, Artificial Sequence
  ENSG00000246465_7 (sequence is synthesized)
actgtgcctggcctgtgatttttttattttttcagaaggggtctcgctctattgcccaggttggttctgaactcctgggctcaagagatcctcccgcctcagcatcctgagtagctggga

SEQ ID NO: 816220 - DNA, 120 bp, Artificial Sequence
  ENSG00000246465_8 (sequence is synthesized)
ctacaagtgtgagccactgtgccaggcacaatggtcttttgtagtggagaacctcctccctgggaccactggaagacacaggccaagttattgctgataggaaaaccaagaggtccaaca

SEQ ID NO: 816221 - DNA, 120 bp, Artificial Sequence
  ENSG00000246465_9 (sequence is synthesized)
ctccatccctttttggagtgtacattctgcagtgagaaacagtgccccagcacaagtactgatgagctctccactgccgaaatacaactctgtgaccatggccagcaggaagccactgat

SEQ ID NO: 816222 - DNA, 120 bp, Artificial Sequence
  ENSG00000246465_10 (sequence is synthesized)
gaggggaaacacagtgtgacggtgcccagggaaagaacctgcttctttgtgacatcacggagctgctgagccgcttgaacttggagccactttgagttgggaattctggcttttttgcag

SEQ ID NO: 816223 - DNA, 120 bp, Artificial Sequence
  ENSG00000246465_11 (sequence is synthesized)
ctgaaagtgtgccaaccccgtacaagaagaacagctgcaggtctgcatgtggcggctcgcgccaacactttgggaggctgagacaggagcatctgcttgagcccaggagttcgataccag

SEQ ID NO: 816224 - DNA, 120 bp, Artificial Sequence
  ENSG00000246465_12 (sequence is synthesized)
cctgggcaacatagtgggatcctgtctctacaaaaaataaaagtgatgagaagaatagccctaaaatcatgagagtggttgcccctcgggacggcaccaaggaaataggactggtgcggg

SEQ ID NO: 816225 - DNA, 87 bp, Artificial Sequence
  ENSG00000246465_13 (sequence is synthesized)
gcccctcgggacggcaccaaggaaataggactggtgcggggagtataataggaattcatctttatctgttatcctttgtctttttac

SEQ ID NO: 816226 - DNA, 75 bp, Artificial Sequence
  ENSG00000246465_14 (sequence is synthesized)
taccaagcccggccctatcttttttaaaattaaaaatatctgacacacgagccaggtgctgtggctcacacctgt

SEQ ID NO: 816227 - DNA, 120 bp, Artificial Sequence
  ENSG00000246465_15 (sequence is synthesized)
ccagcactttgggagactgaggagggagaatcacttgaggccaggaattccagatcagcatgggcaacatggtaagacctccgcctctacgacaaatagccagatgtggtggcacacacc

SEQ ID NO: 816228 - DNA, 87 bp, Artificial Sequence
  ENSG00000246465_16 (sequence is synthesized)
ccgcctctacgacaaatagccagaagtaggctgaggcagaaggattgctggggcccacaaagtcaaggctgcagtgagctgtgatca

SEQ ID NO: 816229 - DNA, 79 bp, Artificial Sequence
  ENSG00000246465_17 (sequence is synthesized)
gaaaagaaaaactctgacataaatgtgataaaatgttgacactgtttctattatagctgtaggtgtgtgcacagtttac

SEQ ID NO: 816230 - DNA, 120 bp, Artificial Sequence
  ENSG00000247934_0 (sequence is synthesized)
gcccgggtcggggccccatgttcagagccctgccaccccagcttgagcgtggtctttggagcgttgccctgtgaaaaggggtgactttgccatgctccttcccagtctacctcctgttag

SEQ ID NO: 816231 - DNA, 120 bp, Artificial Sequence
  ENSG00000247934_1 (sequence is synthesized)
ttacagtttctcattcctcttgagtagcaggccctgtttctccacctaatccctgcaagtaaaccgtcccccaaatcaaaatgagttccatctggaactttgtaggattggtcctaagaa

SEQ ID NO: 816232 - DNA, 120 bp, Artificial Sequence
  ENSG00000247934_2 (sequence is synthesized)
gatcccgccgaatctcttcaccacttcctagcagagcacagtaaaaccggggactaagcaaagtggctgacatgtagtaagtgctcaagaaatggatgttgactagatgctacctctcat

SEQ ID NO: 816233 - DNA, 88 bp, Artificial Sequence
  ENSG00000247934_3 (sequence is synthesized)
ctggcataatcatggttcactgcaaccttgaactcctgggcttgagagatctatatgaattttaaggcacagtctcactctcttaccc

SEQ ID NO: 816234 - DNA, 82 bp, Artificial Sequence
  ENSG00000247934_4 (sequence is synthesized)
atcatggttcactgcaaccttgaactcctgggcttgagagatctatatgaattttaaggcacagtctcactctcttacccaa

SEQ ID NO: 816235 - DNA, 120 bp, Artificial Sequence
  ENSG00000247934_5 (sequence is synthesized)
agctcgtccgcgctcctcccccggtggggcgctctccgctcgcctcgcgcggccccgaccccaagacccaggccccggaaggcgagcgttcacttacctgctcccctctctcgctctccg

SEQ ID NO: 816236 - DNA, 120 bp, Artificial Sequence
  ENSG00000247934_6 (sequence is synthesized)
ctgccgccgctgcgccgctcacccacgctgcccggtgagccacccccagcacacagacccctacgcgtacacccgaggcacggccccaggcccttgaggggagaccgcggcccagccaca

SEQ ID NO: 816237 - DNA, 120 bp, Artificial Sequence
  ENSG00000247934_7 (sequence is synthesized)
caggttggggtagcccacgcaccacccggcttcgaacacctctgcccccggaagttgatttccgccaaggcccgcccaacacagcgcccgtcactcaacgtaaacacgcgcgtcacgtgg

SEQ ID NO: 816238 - DNA, 120 bp, Artificial Sequence
  ENSG00000247934_8 (sequence is synthesized)
ttgtcttcaactccagatcacagcaattcatacgtgccatctctgttgcagagttttcttgcaaagcctttcttaaaagctttctgtcaaatagcttgtcctgaagcaataggaaaagaa

SEQ ID NO: 816239 - DNA, 120 bp, Artificial Sequence
  ENSG00000247934_9 (sequence is synthesized)
tagcgtaattcacagattatttatttgaaaggaaggaatgattatatagatgtctttgtccatttcagactgtcaatagcgatgagagaaacagtcaactagcagtccactcgtgaatgt

SEQ ID NO: 816240 - DNA, 120 bp, Artificial Sequence
  ENSG00000247934_10 (sequence is synthesized)
ttcttctgtttttgccatggaaggattttgaagaacattcattcaacaaatttttattgattgtataccacatacctagtcctgggccaagttttgacaattcaagagtgagcaaggtaa

SEQ ID NO: 816241 - DNA, 120 bp, Artificial Sequence
  ENSG00000247934_11 (sequence is synthesized)
tatttgtcttcaagaagcttacagtctagtgagaaagaaagacactaacctggggactttgagcataaatctctggaatattcacattccttgtataacaagtattctttcatccttgga

SEQ ID NO: 816242 - DNA, 120 bp, Artificial Sequence
  ENSG00000247934_12 (sequence is synthesized)
cactgggtttctcatctgttgaacaaaattggcttaaacctgtaatctctgttctgtactggaagtggaaaatattagcaaggcatcctgacaagtctgccataagtgctggcctaagta

SEQ ID NO: 816243 - DNA, 120 bp, Artificial Sequence
  ENSG00000247934_13 (sequence is synthesized)
gttaatgagcagtttcagtattgagcaagtcaccttgactacattctttttccagcccacccccttctttatgcatacaaaaaacatttctattgtaagaaatgtaatgctttcttacac

SEQ ID NO: 816244 - DNA, 120 bp, Artificial Sequence
  ENSG00000247934_14 (sequence is synthesized)
atatttttttatctgtctactagactaccaagtcaaggaccacttctcacttgtatatccagcaatctactcacttctcatttgtctttgtgtatccagcagtctagcaaagtgtctagt

SEQ ID NO: 816245 - DNA, 120 bp, Artificial Sequence
  ENSG00000247934_15 (sequence is synthesized)
agttagaaaaaaggtattcataaatatttcttaaacttagtaaggttacctttatattattttgtctctcatatctctttctgctggaaaccagattagtttctgggagttccttcccat

SEQ ID NO: 816246 - DNA, 120 bp, Artificial Sequence
  ENSG00000247934_16 (sequence is synthesized)
tgatgtacttacatgttcactctgtcccgatattcaatactaaactgtattccatactaaacagatttataataagtaactaatatttattattaatatttgctatgtgcctggcattag

SEQ ID NO: 816247 - DNA, 120 bp, Artificial Sequence
  ENSG00000247934_17 (sequence is synthesized)
attaaatattttaaatcccatatataacttaccacaataattttacaaagtaggtatattaatatatttacactttagatgaggttacagatttaggaagtgtaaattgaccaagtggat

SEQ ID NO: 816248 - DNA, 120 bp, Artificial Sequence
  ENSG00000247934_18 (sequence is synthesized)
ttaaagccagatctgcccaacagaagggcttgtttattcactatagcacatcactttgctttttatatcacttatttatcagtgaattcaaatcctaccaactccatgaaatctttcttc

SEQ ID NO: 816249 - DNA, 120 bp, Artificial Sequence
  ENSG00000247934_19 (sequence is synthesized)
cttccccacagtaatctttttctttataaacaattcagtgattttagtatattcacagagttatgcatgctttaccacattcgattttagagtattttcacagccccaaaaagaaacccc

SEQ ID NO: 816250 - DNA, 120 bp, Artificial Sequence
  ENSG00000247934_20 (sequence is synthesized)
ataccctttggccccaacttctccctcctctccccagccctaggcaaccagtaatccactttccgtctgtatgcatttgtctatcttgaacatttcatataaatggaatcatgcaatgtg

SEQ ID NO: 816251 - DNA, 120 bp, Artificial Sequence
  ENSG00000287957_0 (sequence is synthesized)
ttttttttttttttttttttttagaactcctaattaatacaagtccctgttttcagaaaatccttcatgtgagctatttcttttcactttttcttattgggtgcatgacattttagaatt

SEQ ID NO: 816252 - DNA, 120 bp, Artificial Sequence
  ENSG00000287957_1 (sequence is synthesized)
cattttagaattcttggtttcagcagcaacccaaaaaggcgtaattgcaaacttacacatcaaaaatgaaaaaataaaagcatcatgatttgaaacaaaaactaaaacaggctaaaacaa

SEQ ID NO: 816253 - DNA, 120 bp, Artificial Sequence
  ENSG00000287957_2 (sequence is synthesized)
aaatacaagcagcagcaaaatcactgaatctaactcacagcatctttttgaagacagggaggttagttggttaattattacagtgctctggtagttactatcttagctttgagagtttaa

SEQ ID NO: 816254 - DNA, 120 bp, Artificial Sequence
  ENSG00000287957_3 (sequence is synthesized)
atgtttaggaatgcacatccagaagcggcacatgtagaaaaaccatggtagccaagagctatctgaactactgctgcctgggccaccctattccaatcaacatggatttccagagttgct

SEQ ID NO: 816255 - DNA, 120 bp, Artificial Sequence
  ENSG00000287957_4 (sequence is synthesized)
gttctatggtaactctcagtgagagagacaaagaaatagaccatttttagaaaccaagcaaaaaatggatgggaatacaatacctggaaagtttatcaagcatgttgacaagtttcatgg

SEQ ID NO: 816256 - DNA, 120 bp, Artificial Sequence
  ENSG00000287957_5 (sequence is synthesized)
cttcatattctttttgttcttctgtcatttcatctatggggtttggcattggttcctctaaatgaccagtgataagattaatgctacaaaaagaaaaaaaagttatgctgtatgttttaa

SEQ ID NO: 816257 - DNA, 120 bp, Artificial Sequence
  ENSG00000287957_6 (sequence is synthesized)
aattatgctctttctatacttttctggtccaacttttaagtgataataagaaagagtataatagccaaaaaattggcaataatttcaattttatggtatagaactgatataggaattttt

SEQ ID NO: 816258 - DNA, 120 bp, Artificial Sequence
  ENSG00000287957_7 (sequence is synthesized)
aaaactggacttttccactaatttgctttgggaaatgggctatactttttttaaaaaacgaaaactgtcttgccaactttttttttttttagaggcatggttgctttttaaaaatacaaa

SEQ ID NO: 816259 - DNA, 120 bp, Artificial Sequence
  ENSG00000287957_8 (sequence is synthesized)
atttgattagtgccgttaggatatccgtggatgcacagcttatccattaattctaaggggacacatgatttcagggaagaagaaatgaggaaatccattttgtgatacagcataaaacaa

SEQ ID NO: 816260 - DNA, 120 bp, Artificial Sequence
  ENSG00000287957_9 (sequence is synthesized)
acatcaaaaaaaattggaaaaatgatgacagagaggctacaatctggaaatgaaagcatgccaatttataatctcaggaaattagtccattagtgagaccacagagggcaatgagtgttt

SEQ ID NO: 816261 - DNA, 120 bp, Artificial Sequence
  ENSG00000287957_10 (sequence is synthesized)
aaataataaaagataaagcagaagaacaattttaattaggtttgatctggcctagacaaaaaaagggatgaaatctagcctaccaagagacaggtatatcatcctggctatctggaaata

SEQ ID NO: 816262 - DNA, 120 bp, Artificial Sequence
  ENSG00000287957_11 (sequence is synthesized)
gatttaatacagtacttaaaatgaatactttgcataaactttgtatgaggttataataccaaacaaactattctcttagagaaaagccatacttttttttttttttttgaggacaggaaa

SEQ ID NO: 816263 - DNA, 120 bp, Artificial Sequence
  ENSG00000287957_12 (sequence is synthesized)
taaaagataactctttcaatggctcctaaatatccacaacaaacatttttctggagaagcagacaagagatcacagtatcttgtaccagccaagtacatactgtttttttgtttttgttt

SEQ ID NO: 816264 - DNA, 87 bp, Artificial Sequence
  ENSG00000287957_13 (sequence is synthesized)
ttgtaccagccaagtacatactgtttttttgtttttgtttgtttgttttgacggagtctcgctctgtcacccacgttggagtgcagt

SEQ ID NO: 816265 - DNA, 120 bp, Artificial Sequence
  ENSG00000287957_14 (sequence is synthesized)
cagctcctgaagtgctgggattagagccataagccatggcgcctagcagatagtttgtttttaatgatcaaattaaatatccctgcaaatagcaattgctaataaattgctttctagggt

SEQ ID NO: 816266 - DNA, 120 bp, Artificial Sequence
  ENSG00000287957_15 (sequence is synthesized)
agataagcaagtgagtgagagggtcaaatatacacaatgtggagtgttgggagattgagatcaactggaaaacggtgcccagtttaaattaaaaaaaaaaaaagatactggccaagacaa

SEQ ID NO: 816267 - DNA, 120 bp, Artificial Sequence
  ENSG00000287957_16 (sequence is synthesized)
agacacagtgattaattaaatcttctggtagccagcttgcaacccgtctttgagactttcggttgggcaagttctttactgactagggcttttctcatctggggtaaaggcttgcttact

SEQ ID NO: 816268 - DNA, 120 bp, Artificial Sequence
  ENSG00000287957_17 (sequence is synthesized)
acgtactgttatctattactattagatttacttttcttttctaccttcctcagaggctgcatgacataccaattcttatggaaggactcagtgctcaccatcctcgaaaacctgattcaa

SEQ ID NO: 816269 - DNA, 120 bp, Artificial Sequence
  ENSG00000287957_18 (sequence is synthesized)
aacctatcttgccattcttgcgtgctcctaaaagaagagaaaaaggcctccagttagaggccatcaacaaaaatgctgaatgggtcatcgtatttcctaaaagtcaagaacaaagaagac

SEQ ID NO: 816270 - DNA, 120 bp, Artificial Sequence
  ENSG00000287957_19 (sequence is synthesized)
ccagacaaggcttctgagaactatggagacgtatccagatgccacactgaaaatacaattccaccacccatccattatttgctcaggcatataacaagacatctcttttcactggtttct

SEQ ID NO: 816271 - DNA, 120 bp, Artificial Sequence
  ENSG00000287957_20 (sequence is synthesized)
cttctgccacctgttaaattagaaaaacaactagtcttataaatgaataaaggtgcttattatagatacataccacttcccaagcaaagaaaatcaggccttagaagaaagtataaggga

SEQ ID NO: 816272 - DNA, 120 bp, Artificial Sequence
  ENSG00000287957_21 (sequence is synthesized)
aggtagatgtattaactatgtagatcatgcttatttgcctcttgagagatggcttctctcctcaaattcaatggagctgtaatttgaaaaatcaggcctgtaggcacttttaggatataa

SEQ ID NO: 816273 - DNA, 120 bp, Artificial Sequence
  ENSG00000287957_22 (sequence is synthesized)
tgacatttgcacacatgatcacatgcttcagggaaaaaaatgaaatcaggaggacacactggtaagctgtgggcttattgtgggcaccacagcatacaaagtcactatatgaattcccag

SEQ ID NO: 816274 - DNA, 120 bp, Artificial Sequence
  ENSG00000287957_23 (sequence is synthesized)
attaggacacagtttgatggttttcttggttctcttaagagcttggtggaaattaagtctgttttacataaggtaacctcaagtcccctggctgctaaaatgatataatggtttgctctg

SEQ ID NO: 816275 - DNA, 120 bp, Artificial Sequence
  ENSG00000287957_24 (sequence is synthesized)
aaattagctactaaagtaacacaattcttgctatctgagtataaaagcagaaggcagaaattcattcttacagagtaagaactcattttttgccatagagtaaaacattccaaccctcca

SEQ ID NO: 816276 - DNA, 120 bp, Artificial Sequence
  ENSG00000287957_25 (sequence is synthesized)
aagtcagtctagggatttgggtttcattttttcctttaaaaagacatttttcccctggatattcggaagaatgtaaacaaaagccacagaaaacacaagttagggcactgaagtatagcg

SEQ ID NO: 816277 - DNA, 120 bp, Artificial Sequence
  ENSG00000287957_26 (sequence is synthesized)
tagcactctcttatgggaaaaatgccagtgtgctgtggcagaaggcagatgaacactgtctcttctcccgctccccacttcaaaccagagtctcatgtagtttccctacccagaaaggaa

SEQ ID NO: 816278 - DNA, 120 bp, Artificial Sequence
  ENSG00000287957_27 (sequence is synthesized)
gagaaaacaaataatagccattgtgacaacaaagacgtgagatttcataaaatagattacttttggtggaacaaatacctgacacctttcaacctcaaatagtacagtctgagacgccac

SEQ ID NO: 816279 - DNA, 120 bp, Artificial Sequence
  ENSG00000287957_28 (sequence is synthesized)
agtccaggtttcaatcttaacgctatgaaattctggagttagttttatttcattccaaaacttggagtcttaagatgctttaagaacactaattgtggtggacattttattgggtaatta

SEQ ID NO: 816280 - DNA, 120 bp, Artificial Sequence
  ENSG00000287957_29 (sequence is synthesized)
tatttatcatgatctcctccaccttgtctctgctcctctgtcccattttgtagcactccaatcttgtgacttccaattaggtgacaagaagtgtctaaattcttatctgtggtatttcat

SEQ ID NO: 816281 - DNA, 120 bp, Artificial Sequence
  ENSG00000287957_30 (sequence is synthesized)
cataaattttgtataagactattatatgaactgacaacagctatgggcctggagacaaaaggattaagacacactaaaaaggtatggacaaatgaacacaggtataaaacctgaactgta

SEQ ID NO: 816282 - DNA, 90 bp, Artificial Sequence
  ENSG00000261039_0 (sequence is synthesized)
atggttttatgaagggtttctacagccacataagaagtgcctttcacctctcatcatgattctgtggcctccccagccatgtggaacttt

SEQ ID NO: 816283 - DNA, 120 bp, Artificial Sequence
  ENSG00000261039_1 (sequence is synthesized)
tcatcatgattctgtggcctccccagccatgtggaacttttttctcttgctgctaccatgtaagaagtgcctttcacctcgtgccatgattatgagacttccccagccatgtggaactgt

SEQ ID NO: 816284 - DNA, 120 bp, Artificial Sequence
  ENSG00000261039_2 (sequence is synthesized)
aaggattttaaaggacaactccttggggccgtccaacactgaaaccgcctgaccgctgctgtctttgtgcttgcagaaaatcacggtgggcacaaaattttggacacgatttcgagagcg

SEQ ID NO: 816285 - DNA, 120 bp, Artificial Sequence
  ENSG00000261039_3 (sequence is synthesized)
tgagagctactgttcacgaatccagggccagcctcgtgtctgtcttcctttaaagcacctggcttggtacctaaaatgttccttttttttttttttttgaaattcaataacttcagaaca

SEQ ID NO: 816286 - DNA, 120 bp, Artificial Sequence
  ENSG00000261039_4 (sequence is synthesized)
ggcgttgatgtagacagatctccatctttttggttttttgagtgagtttttgctctgtaggctgaattctttggaatttagttctgaaatcaccctattgttgagtattcgtttcctagc

SEQ ID NO: 816287 - DNA, 120 bp, Artificial Sequence
  ENSG00000234161_0 (sequence is synthesized)
caggcaggctgcaggcagcggataggacacagagacagacagacagacacacgcgcgggggatcgaagaccgcccagatacccaagatgcccactggatagagtgattaaccatccctgt

SEQ ID NO: 816288 - DNA, 120 bp, Artificial Sequence
  ENSG00000234161_1 (sequence is synthesized)
tggctggcaaaatgtaataatgtgaaagaagaaaactctaggaagaaacttcaacagtaaaatgaaataaaatactaagaggattttcaggaaacgctgtttggaaggcagaagggagac

SEQ ID NO: 816289 - DNA, 120 bp, Artificial Sequence
  ENSG00000234161_2 (sequence is synthesized)
gggacaaatagcaagattttaaagtgaagaggccggcccaatataggccctcgggagctggaaaggaaggccacctagtggcgtttgagcgaaggtcagttatatctactcagtcaataa

SEQ ID NO: 816290 - DNA, 120 bp, Artificial Sequence
  ENSG00000261035_0 (sequence is synthesized)
gtctttcaccattgagcacgatattcgctgtgggctttccacataaggctttattatgttgaggtagtttcctcctattcctagtttactgagtgcttgcatcatgaaatagcattgaag

SEQ ID NO: 816291 - DNA, 120 bp, Artificial Sequence
  ENSG00000261035_1 (sequence is synthesized)
tttgtcaaatccttctctgtacccattgcagtgatcaggttgcctttttcccttcattctgttaatgtgatgtattacactgatccattttcgaatgctgaaccatcttgcactgttttg

SEQ ID NO: 816292 - DNA, 120 bp, Artificial Sequence
  ENSG00000261035_2 (sequence is synthesized)
gtttgctatttgtttgtgtgttcgtttttcattgaagccaaaaagccatcataatttcagagtttcacgaagtatggagtggtgtttttgttgatgttgggactggggactggctagcac

SEQ ID NO: 816293 - DNA, 120 bp, Artificial Sequence
  ENSG00000261035_3 (sequence is synthesized)
catctcgttgaaggagaggggtcatctctttgcttctttttcaagtctcctgaagagttgaggagaaagcctcacccctgttgttatcctgtcttcagcaaccctcttgcctactaatct

SEQ ID NO: 816294 - DNA, 120 bp, Artificial Sequence
  ENSG00000261035_4 (sequence is synthesized)
tcctaaagaaagagagaagggctgcaggctcaggtcctcggcaggcgctagtataaagcaagacttttcaaggaacatttctttgtcttcactgttttaaattatatggtaaccttctta

SEQ ID NO: 816295 - DNA, 120 bp, Artificial Sequence
  ENSG00000261035_5 (sequence is synthesized)
ctgtgaatggtaatggttttgcattcacactaaatatatgcattgtgcttctgaagcaaattttataagtgataaggggaactttatcaattagagttaattaaatatatggtttgtggg

SEQ ID NO: 816296 - DNA, 120 bp, Artificial Sequence
  ENSG00000261035_6 (sequence is synthesized)
tatgattggcaaatatctgacatggatgccgtcttcccatcacttccagttttgtttcaatcctaattccaggaacggtccccagactcaatgttggagacaggtgtcctcattcagggc

SEQ ID NO: 816297 - DNA, 120 bp, Artificial Sequence
  ENSG00000261035_7 (sequence is synthesized)
tctaggaaatgacttcaggtgactgggtggctccatcctctaggagaattccttggcagagctggtagttctgacccatggccagaagcctgcagtcgaggtgggcagggccaggcaaag

SEQ ID NO: 816298 - DNA, 120 bp, Artificial Sequence
  ENSG00000261035_8 (sequence is synthesized)
agtgggtcaacagaggcccaggcaaagagtgggggcggtgctgtctccactgaaagcaaagcagttggaggcctaaatgccagttgcctagggaaagccctggagtcttctggagagacc

SEQ ID NO: 816299 - DNA, 120 bp, Artificial Sequence
  ENSG00000261035_9 (sequence is synthesized)
aactgaaaggcaaatccgtggaaatgcctcattagtaatataaatatcagctttctttaattttgaatgataaatatcaaaatatcacacattgcattattatctaaactgaaaatgtac

SEQ ID NO: 816300 - DNA, 89 bp, Artificial Sequence
  ENSG00000261035_10 (sequence is synthesized)
attaagtcgcagaagagtgagtgaatcagaggaaccaagacctaggggaacatgaggaccaatgggagaggagccctgagcaggtgcag

SEQ ID NO: 816301 - DNA, 120 bp, Artificial Sequence
  ENSG00000261035_11 (sequence is synthesized)
acatgaggaccaatgggagaggagccctgagcaggtgcaggcatgattccagtgagctgcacatttccccttgtgcaaaatcctcatgcctttccactctcgtggaaagcttccaaaaat

SEQ ID NO: 816302 - DNA, 120 bp, Artificial Sequence
  ENSG00000261035_12 (sequence is synthesized)
gctaagctgcttgctttctctcatgcgtggctgaaggcagtgtagtggacaatacttgacattatttgtcaacagccctaaagcattcaaaccacttgatgtaacattttcatttctagg

SEQ ID NO: 816303 - DNA, 120 bp, Artificial Sequence
  ENSG00000261035_13 (sequence is synthesized)
gagttttctgtttgggaatcatcaattaagtatataaaaatacaggtagaaatatgttacagcatttttataacaggaaaaaataaggacattgtcaataagtgtgttaagagggaaatt

SEQ ID NO: 816304 - DNA, 120 bp, Artificial Sequence
  ENSG00000261035_14 (sequence is synthesized)
gctgaataagtcatgtctcagtattctatactttgatcacttgaggtaccatctttatcatttttgtcaaatctgagaacctcctgaattattattcactcaaattttttttaacttaaa

SEQ ID NO: 816305 - DNA, 120 bp, Artificial Sequence
  ENSG00000261035_15 (sequence is synthesized)
tagtgcttaggctgaatttaaaaaaatgtgcaatcatggggctgataggctgcttacataatttttcaagtgcaaattataaaggcatttttatccatgtgccacctaagattcttagtg

SEQ ID NO: 816306 - DNA, 120 bp, Artificial Sequence
  ENSG00000261035_16 (sequence is synthesized)
gtaaaatatcaccctttgggaactaccgaattataatatcatccaatgtgcaattgctgacgtgagactgtggttccatgtttgtttacagggacaggtttgctctacagatatcactca

SEQ ID NO: 816307 - DNA, 120 bp, Artificial Sequence
  ENSG00000261035_17 (sequence is synthesized)
ggactcactacatgccagtgccgtgctttgctctggaaacacagcaacatgtaagacatggcctttattttgaaaagaaccttgtctaataaaaaaaaactgattagaaaacaacgaaca

SEQ ID NO: 816308 - DNA, 120 bp, Artificial Sequence
  ENSG00000261037_0 (sequence is synthesized)
atattttcagcatcacattttaagaataatatgtgaaatacaatatgttttattagtcacctttggaaaatacagtcttccacaatctggaaccacctctttggttcaaaatgtgccatt

SEQ ID NO: 816309 - DNA, 120 bp, Artificial Sequence
  ENSG00000261037_1 (sequence is synthesized)
cttctgtaatgtgtgtgataaacttaaaaaaaatctgtatcctttatcctaatcatcttacttgaacatcatcctgaaacaaatgacaaaaacattcacagttttatatacaaagttatt

SEQ ID NO: 816310 - DNA, 120 bp, Artificial Sequence
  ENSG00000261037_2 (sequence is synthesized)
ggtaacaatgttcttaatagaattcaattagaaaacatataaaggcaaaggtagagttatttgatgttatggtttgaaaggattcccacactctcatgaatattctttattatgccagag

SEQ ID NO: 816311 - DNA, 120 bp, Artificial Sequence
  ENSG00000261037_3 (sequence is synthesized)
ggaccctaattcccctgcctttgagtgtgggatggcattgatgagttacttgtaccacatataataagcaggaagtgatggcacgtgacattggaaacaacttcgtaaaagtcaccgaga

SEQ ID NO: 816312 - DNA, 120 bp, Artificial Sequence
  ENSG00000261037_4 (sequence is synthesized)
ctcactccttgctttctcctatgtctcccacctggcaggaagccatttgccatcatgtaaggcgagttcttcttagtgaggcattgacatctccagccagcagtgccgtgagggaggtgg

SEQ ID NO: 816313 - DNA, 120 bp, Artificial Sequence
  ENSG00000261037_5 (sequence is synthesized)
gcagctcaagcctcagtcaaaccctgagatgaccatggtcccactcaacatctcagctgtgaccatgtgggagaatccaagcctgagccaatcagcctagctgctcccagagtcctgact

SEQ ID NO: 816314 - DNA, 120 bp, Artificial Sequence
  ENSG00000261037_6 (sequence is synthesized)
ctcagaaaccatgccagattatacatatctgcagctttaagcttctgagattttggaatgactgatgacagagcaataaataactaatacatttcaccacatatcacttagcagaatgcc

SEQ ID NO: 816315 - DNA, 120 bp, Artificial Sequence
  ENSG00000261037_7 (sequence is synthesized)
atggagctattaaacacaatattttatgaagattagtctatgatatggagatatactcacaatgttattagcaacacaactagaccaactgagtataggtagtataatctcaatttgttc

SEQ ID NO: 816316 - DNA, 120 bp, Artificial Sequence
  ENSG00000261037_8 (sequence is synthesized)
taaaaatataaatctgtacaaagatagaaagaccagaagaaaaaaaccatttaatacttgatagataattacaatggtaaagaatttagccttgatcacttgatttgagatggaatctaa

SEQ ID NO: 816317 - DNA, 120 bp, Artificial Sequence
  ENSG00000261037_9 (sequence is synthesized)
cttgctagctgtatacccatagttgtggatgtgtaaccaatgatttgtaaactaattctcagtttactcgtctatataaaagagctagtaatattacctatttcatgcggcttgggagaa

SEQ ID NO: 816318 - DNA, 120 bp, Artificial Sequence
  ENSG00000261037_10 (sequence is synthesized)
atgaatcaataatatatagaagggcttagttctcatattgtggcaagtacttcacaaatgataatttttactattacaatttttataaggctttctgtaattcacaaattttctaatatc

SEQ ID NO: 816319 - DNA, 120 bp, Artificial Sequence
  ENSG00000261037_11 (sequence is synthesized)
tattttatgacttttgaaataattcttacaatatcccttttagtaacctttattacaaaatctattgtaatctcttaaaataatattcctttttgtttttctccgagatagtctatctaa

SEQ ID NO: 816320 - DNA, 120 bp, Artificial Sequence
  ENSG00000261037_12 (sequence is synthesized)
tgatgttacaatagagttaccaacaaatgccatatttcattcctgagcgtctatattcttgagttcctagcaacagagaacaaagtagcaaccatttcttaagaaaatgctgagatggac

SEQ ID NO: 816321 - DNA, 120 bp, Artificial Sequence
  ENSG00000261037_13 (sequence is synthesized)
aattttcatccagaaggtcacatgttaggagtaaaagctatatggaatcttgaacaagcatagcatctaatagccttatttgattaaaaaaatgaatacacacaaaaattttttgaagac

SEQ ID NO: 816322 - DNA, 120 bp, Artificial Sequence
  ENSG00000261037_14 (sequence is synthesized)
taactaccccttagaaatgttcgttaacttggtcagtaatataagcctacctcccatttattcaatagatcaggtaactcccctctttgttatgagcctagttttctagaggtggaccag

SEQ ID NO: 816323 - DNA, 120 bp, Artificial Sequence
  ENSG00000261037_15 (sequence is synthesized)
attccatcatatgtacatcactcagctagttgagctctctaaatgaaaacttcagccgtagccactggatagaagaatacaagaaggaatgccgacttgaggagcaagttgtgttgagtt

SEQ ID NO: 816324 - DNA, 120 bp, Artificial Sequence
  ENSG00000261037_16 (sequence is synthesized)
caggcattgctttggagaatctgcttcttcacctgctggcttaaagggttggatgacctgaggcagcagcagaagtttagacaattatggttggatgattcttaactgtcctaatcccaa

SEQ ID NO: 816325 - DNA, 120 bp, Artificial Sequence
  ENSG00000261037_17 (sequence is synthesized)
gtcctcaatttataagtgaggaactggaaaatcattcacacagctagctgcaagcaatgacagccttggagagaaatcaacctgtgtacagctcagtcccatctgagttctttggagaac

SEQ ID NO: 816326 - DNA, 120 bp, Artificial Sequence
  ENSG00000261037_18 (sequence is synthesized)
aaactccagcagctacttctagaaaatatagacagcatattcagccaatctcctgagctggtgggacatttttacatgaacaaggcctccctccacatgaattgcaaagattcagtggac

SEQ ID NO: 816327 - DNA, 120 bp, Artificial Sequence
  ENSG00000261037_19 (sequence is synthesized)
tttgcatgattattcttctaatcttacattaagctttattttggattttaaaaaaatctgccacgtgtaagggcaccaatgtccaccaatattgttatataaaataacattattaatcct

SEQ ID NO: 816328 - DNA, 120 bp, Artificial Sequence
  ENSG00000261037_20 (sequence is synthesized)
tcctgtttatcttttaatcagaactaagagggatggtggatgatgaatgcatgagtcatacttacttcatgattctataaatcctaattttcactttttttaaataaaaattgcacgcaa

SEQ ID NO: 816329 - DNA, 120 bp, Artificial Sequence
  ENSG00000261037_21 (sequence is synthesized)
accaaaaagaagctgcctaaaacagacgtggagatactctacttaggtttcccagggaaagacaattttaaaaaacaattttagcaacaaaaatacatgggcagggaatacacgcattta

SEQ ID NO: 816330 - DNA, 120 bp, Artificial Sequence
  ENSG00000261037_22 (sequence is synthesized)
ttatcatttttcctcttaaagcagctatgatgagacacgtccaaaacacctgctcttgtgtactgcccagtttcacgtgagttctgtgggataacactgaatccactcttcagctacagt

SEQ ID NO: 816331 - DNA, 120 bp, Artificial Sequence
  ENSG00000261037_23 (sequence is synthesized)
gaggaagtgatagaactgcttctggcacaccaaagaacagcacagaggtccaaatacatcttccttaggtgcccatgaatttaaatttatttctgctttatcctttaaaaaaaaatctaa

SEQ ID NO: 816332 - DNA, 120 bp, Artificial Sequence
  ENSG00000261037_24 (sequence is synthesized)
tgatttcaaatgccttgctgaaatcaacaccctctgcaacagccctctcaggatagttcatcctagtaggtctgtcaaaactgaaacaccaacatgtgagttcctcctctgggttttaaa

SEQ ID NO: 816333 - DNA, 120 bp, Artificial Sequence
  ENSG00000261037_25 (sequence is synthesized)
tgttagtactgtgactacttctttgtttgttttcacttttaattgacaaataataactgtatatgttatacagtaaatctgacattttgatataaaatgataactagtgactatttattg

SEQ ID NO: 816334 - DNA, 120 bp, Artificial Sequence
  ENSG00000261037_26 (sequence is synthesized)
ctgtgatgttgtccccgcttgtttattggctctgatggaacttttcaggggaatggttataactgaaaaatctgtaatgctaggaatttaacttttctacataaaatgcattttttctta

SEQ ID NO: 816335 - DNA, 120 bp, Artificial Sequence
  ENSG00000234162_0 (sequence is synthesized)
aacggaccgggggttgtggtgactgaagggcccaggcaggactctggaagcactggtaacagtttgtcacttgatctggatgaacaccagcgtgttccgttttggaaatcctttcagctg

SEQ ID NO: 816336 - DNA, 120 bp, Artificial Sequence
  ENSG00000234162_1 (sequence is synthesized)
tacttaccctaagttttcaaaagcctcttggtttccagtaggttgtacctgcctttgcggatctcacagaatccgcccatttgttcagtttctaggatcagggaacacttgccttccatt

SEQ ID NO: 816337 - DNA, 120 bp, Artificial Sequence
  ENSG00000234162_2 (sequence is synthesized)
tttattatttcaggcctcacacatgcaaatctaactggccaggactgacccagaaggagggagagctctggtccatgggtctcccctccccaactggcaggctttggtcaacagcgctca

SEQ ID NO: 816338 - DNA, 120 bp, Artificial Sequence
  ENSG00000234162_3 (sequence is synthesized)
gaatgaaaggaaggtggtggtgctggctttcaagtctcctccaaatgcaactgacccaggtctgcctgtcctccattagcttttgctcgttggagagggataacacaccgctaagaaaaa

SEQ ID NO: 816339 - DNA, 120 bp, Artificial Sequence
  ENSG00000234162_4 (sequence is synthesized)
gactgcccccggattttgtaaccagttgcaaccacctgaaagcagctctggggaagaggtcattgaagagtctttccaggccaagtggacagtgttgataaagtctatagtagtctacag

SEQ ID NO: 816340 - DNA, 89 bp, Artificial Sequence
  ENSG00000234162_5 (sequence is synthesized)
aaatttccacttttccaaatttgggtaaactggactccgtgcacgtcacctgtgggttaagatgaagagatgttgtaacagatgacttt

SEQ ID NO: 816341 - DNA, 120 bp, Artificial Sequence
  ENSG00000234162_6 (sequence is synthesized)
ctgtgggttaagatgaagagatgttgtaacagatgactttaaaacatgctctgcctgtcatcttccagctggagttcgggagatttaagctgaagcgtcaaacaaacttggtactttgga

SEQ ID NO: 816342 - DNA, 120 bp, Artificial Sequence
  ENSG00000234162_7 (sequence is synthesized)
aacatattcaagccaattcgtttagacgcggtgtgctcaagttttgggggctctatggcaaaatcatttaatttttgctactgatcagatgtgtaacataaaccaaatttaatcagaaaa

SEQ ID NO: 816343 - DNA, 120 bp, Artificial Sequence
  ENSG00000234162_8 (sequence is synthesized)
gaagagtctttccaggtggaaagcgaagtaaatgaactctggggtggtgtctcccaactctcacttccagctctcctgtgtttgtagactctgtgttcctaaacaagggaaaatacagcc

SEQ ID NO: 816344 - DNA, 120 bp, Artificial Sequence
  ENSG00000234162_9 (sequence is synthesized)
acaacctccaaaggacaagtgcttattcattcctttaatttatctttattgaggatgttccatgtacagtggaagaaaaattgaaagtgaataaaggaagctgaagatgtttaaagatat

SEQ ID NO: 816345 - DNA, 120 bp, Artificial Sequence
  ENSG00000261033_0 (sequence is synthesized)
ggcggccgggggccccctctctcccagctctcagtgtctcatctccctatctgctcatcctctggtcgcacataatcgatgtttgggcgtcccaagccagatgtggaccccatttccgca

SEQ ID NO: 816346 - DNA, 120 bp, Artificial Sequence
  ENSG00000261033_1 (sequence is synthesized)
ctctacactggaggttttctaagggtggtgcccggaccagcagcttcagcctcatctgggaacttgagaaaatgcagattctccgtcccacccagcctattcggtttttcctgcactaaa

SEQ ID NO: 816347 - DNA, 120 bp, Artificial Sequence
  ENSG00000261033_2 (sequence is synthesized)
accatgaaggtggggcccagcagtccacattctcgcaagcccgtcaagtgattctgaggcgccctccagtttgagagctatgctcacggcctcacctccgccccgcaaggagcccggtct

SEQ ID NO: 816348 - DNA, 120 bp, Artificial Sequence
  ENSG00000261033_3 (sequence is synthesized)
tgcctgtggcgctagccgcacacggacacctcatcctgcggggcccgcccccccgctgcaccctcaccgcccaacgcctcctccgggatgcagcggaggcgcctggaagtcggcaaggtc

SEQ ID NO: 816349 - DNA, 120 bp, Artificial Sequence
  ENSG00000261033_4 (sequence is synthesized)
ctaagaccttaatgaaaactgcaggagtggaatgacagaacctttggtcatacttgagggcgtgaagctcaaatgaggaggaaggaaaggatccagggagaataaccaaccctggcaagt

SEQ ID NO: 816350 - DNA, 120 bp, Artificial Sequence
  ENSG00000261033_5 (sequence is synthesized)
tgtggcgcccaggtagaggggcgagcctaggctagcggttctcgaccagggccggtgttgcccctcctcgccgccccgcgtacatttggggaggtctggagacatttttggttgtcatga

SEQ ID NO: 816351 - DNA, 120 bp, Artificial Sequence
  ENSG00000261033_6 (sequence is synthesized)
tgcgggagttgctactgttgcctaagtgggtagacacgagggtgctcctcaacatcctacctgaaggacaggactgccccacaaggaagaatgatccggccccaaataagaaaccctggg

SEQ ID NO: 816352 - DNA, 120 bp, Artificial Sequence
  ENSG00000261033_7 (sequence is synthesized)
ctggtcagcaacaacccctttgttctgagaagagaggaggaaagaataaaagaagtggggtgaagttttggtttggtagaggaaacttgaagacattttcactggaaaggaagagaggaa

SEQ ID NO: 816353 - DNA, 120 bp, Artificial Sequence
  ENSG00000261033_8 (sequence is synthesized)
gaggagggagatgtctgtaaggacgagcaaaccgggtgacagctgatttcctcatattgaagtaatgagtcctagttataataaattcctaataaaaacccagtttatccctgcaataaa

SEQ ID NO: 816354 - DNA, 88 bp, Artificial Sequence
  ENSG00000287951_0 (sequence is synthesized)
atatacttttaaaacaagagcttaaaaatttggggatggaaataaacaagagaatgagatagaaaaggccggaagagataggaaatgc

SEQ ID NO: 816355 - DNA, 120 bp, Artificial Sequence
  ENSG00000287951_1 (sequence is synthesized)
agagaatgagatagaaaaggccggaagagataggaaatgctgtaggaacacttaaggattgtggctaaaaaagctgtgatatgaagtcagggcgtcagttcacttgagggaggaactttt

SEQ ID NO: 816356 - DNA, 120 bp, Artificial Sequence
  ENSG00000287951_2 (sequence is synthesized)
tgtgtgtaactcccagccctgccacttgctgccatgtgcctaccatgatgggttgtgtgggtgaacttaggtagcacatggcattggcgacacccagccacacagatctaggagctgcca

SEQ ID NO: 816357 - DNA, 120 bp, Artificial Sequence
  ENSG00000287951_3 (sequence is synthesized)
ttcacgtcctcatcgctgcaaatgcagtgtgcaccctgtgcaggacaccttgcagcccaggatgacacaaagtggatgctagataaacattagcggcaatcagtgacactgtatgaaact

SEQ ID NO: 816358 - DNA, 120 bp, Artificial Sequence
  ENSG00000287951_4 (sequence is synthesized)
ccccatcatggtggaaacttgtactgagaaaagatggccacttctcagggtcattgtagcaaacagcaaaggtagaggcttgaatgtgatgtccttggagtggccatcccatgataactt

SEQ ID NO: 816359 - DNA, 120 bp, Artificial Sequence
  ENSG00000287951_5 (sequence is synthesized)
ataaatcttttattttatcactgttattaccccttctaccatattccctatttctaactcattgtcccttctttctttcctgttaaaacctttctgcccttgagcaaagcaaaggtaagt

SEQ ID NO: 816360 - DNA, 120 bp, Artificial Sequence
  ENSG00000287951_6 (sequence is synthesized)
agacctgtttgtttctgccagtaagttacttcctagggcctgtgaaataacgtggactttgagtgtggctcttttgacagagcaatagcaccacctgctaccacctactagaaatgtcgt

SEQ ID NO: 816361 - DNA, 120 bp, Artificial Sequence
  ENSG00000287951_7 (sequence is synthesized)
cttgtagaacaaagaaatacgcacgccctgctgttctgcaatcaggctctgacagaagctttcaggtgtggtgcttacaagatcagactcattgactcactcacttctccctgctccgtc

SEQ ID NO: 816362 - DNA, 120 bp, Artificial Sequence
  ENSG00000287951_8 (sequence is synthesized)
actacactcccaggacaagatattttgcttaacaaataatgactacatccaaccagataaggatacaaacaagcacattcttccactatcagtcctcaccagaggactctgtggccataa

SEQ ID NO: 816363 - DNA, 120 bp, Artificial Sequence
  ENSG00000287951_9 (sequence is synthesized)
aaagagtaaggcttcagcagctcaacacaactgacgcagtcctgctatcagttgcgataagcacctggcatctgcctacaaaggctctgcccacatcaaagactcttccttgcgagactg

SEQ ID NO: 816364 - DNA, 120 bp, Artificial Sequence
  ENSG00000287951_10 (sequence is synthesized)
agggactgcccaggccaagccaggagattctttttgtcttcgttgttctccctgcaatggttcattaactcttttttctctcccttttctcttgatgttaaatgttactttgtgagctgt

SEQ ID NO: 816365 - DNA, 120 bp, Artificial Sequence
  ENSG00000287951_11 (sequence is synthesized)
ggaatgtttaacatgtatatagtgaccacgtattctattacatatggttttcagtattaactgacttgtggagtggcttgagcctgtgtgcccgctattctcactaccgagtgaatggga

SEQ ID NO: 816366 - DNA, 120 bp, Artificial Sequence
  ENSG00000255060_0 (sequence is synthesized)
aatctcaggccatgtaactgggttctgccacagggcctccacccagctgggccttcctctcgactatccacattcaacatctagcaaggggagtgcctggcactcgagtggattccattt

SEQ ID NO: 816367 - DNA, 120 bp, Artificial Sequence
  ENSG00000255060_1 (sequence is synthesized)
agccaatgttggtgtgtgtgggtgtgatgagacccgcgagaagtccccagatggagattgaagaagtggaaattcggtgctaatgctaattcttcatttagcactgtttcagccatagtt

SEQ ID NO: 816368 - DNA, 120 bp, Artificial Sequence
  ENSG00000255060_2 (sequence is synthesized)
aaagcgtgcattggggccttaaaaaggttatgtttataaggaagaaggaagacagtccatgtctgacttgctgaacatgcaaaacgaaaacaacaacaaataaagtaaccctggaactcc

SEQ ID NO: 816369 - DNA, 120 bp, Artificial Sequence
  ENSG00000255062_0 (sequence is synthesized)
gcttcccgcatcccacctcagggttgcctcctggtaccttcccgtgtaggaaaatgattttgtcccgcgcagactccctcagcaccttctgcagtctgaagccggagaacggaatacagt

SEQ ID NO: 816370 - DNA, 120 bp, Artificial Sequence
  ENSG00000255062_1 (sequence is synthesized)
gtgaaagtatcagctttagccagaccactgatgaagctcccagatgtcacagcatccatgggcttgtgatctcaggtgaaggcattgaaccctgagccctggattcccatctcttcactt

SEQ ID NO: 816371 - DNA, 120 bp, Artificial Sequence
  ENSG00000255062_2 (sequence is synthesized)
gctccctccaccaccccacccccatattcagaatggcctctaggcttctaggtttgtgtctttaatggcacctaggcaataaataaaaaatacagtgcagtgctgactgcatcttcccta

SEQ ID NO: 816372 - DNA, 120 bp, Artificial Sequence
  ENSG00000255062_3 (sequence is synthesized)
tttaaatagaaaaaagaattggatctttgactaaagaacaacaaaaacccaaacaaaaaatccaggtggattaaagacctaaatatgaaaagaaatacagaagaaaacagatgtagggga

SEQ ID NO: 816373 - DNA, 120 bp, Artificial Sequence
  ENSG00000255062_4 (sequence is synthesized)
ggacttcctgagtaaaacacaaaaagcacaaagtaaaagttcaacaacaaacttactgagaacagatgaatgaaaccttgcctgtcctataaggaatacagtcatctgccagaagaaaaa

SEQ ID NO: 816374 - DNA, 84 bp, Artificial Sequence
  ENSG00000255067_0 (sequence is synthesized)
gtagtcctaaccaggagtgcagtggcactgtctgggctcactgcaacctccgcctctcggattcaagcgattctcctgcctcag

SEQ ID NO: 816375 - DNA, 120 bp, Artificial Sequence
  ENSG00000255067_1 (sequence is synthesized)
tgggattacaggcttgagccaccgttccctgcaaaagcccaactttctatagcctcccaccatctctaaactccgcaatagtgtttcatttagcttattccctgaatttcaatttcttca

SEQ ID NO: 816376 - DNA, 120 bp, Artificial Sequence
  ENSG00000249635_0 (sequence is synthesized)
agaacagagacctggaaggaagtggcctcccaacacaggacagcctacctcttaacttctcttacatgcaacaaaaataacctgctgtattgttgaagccactgctttttcttgtcaact

SEQ ID NO: 816377 - DNA, 120 bp, Artificial Sequence
  ENSG00000249635_1 (sequence is synthesized)
gaagaacaacgaagttacaaatttggaaaggagagctttatttctcataaagcgttgcagcctgcaggcagccattctgataagctggcaagcgtcacctccagtcagaagccagaaata

SEQ ID NO: 816378 - DNA, 120 bp, Artificial Sequence
  ENSG00000249635_2 (sequence is synthesized)
ggctcttgagagtgggaagaataagacagagatatacgctgagcagggtggccaaatatatatatttgacagttataggaggagctatgaatattcacaaaggggaggcatgggcatgtg

SEQ ID NO: 816379 - DNA, 120 bp, Artificial Sequence
  ENSG00000249635_3 (sequence is synthesized)
tagaggactaacatgaatacaacatgtgtcccatgttcactttggggtggaaacctaatgtttaaatgtattacaattaggccctatacatccaagggtgaaacagagcacacaaaggcc

SEQ ID NO: 816380 - DNA, 120 bp, Artificial Sequence
  ENSG00000249635_4 (sequence is synthesized)
ctctgcacagcatccatagatggccagaaccactttgtggttggcggtctcttatcaggaaagaatgctgatcatttgttgtgtcaaaaccacaaaagggaggttggttgaatttagcag

SEQ ID NO: 816381 - DNA, 120 bp, Artificial Sequence
  ENSG00000249635_5 (sequence is synthesized)
tggaacaagtccttccaaagggctggtttttgtttaatgcttaagaaagaaagcctaatagtggttaatgagggagggggtataacaaggcatgtccaaccttctgtaccatcatggcca

SEQ ID NO: 816382 - DNA, 120 bp, Artificial Sequence
  ENSG00000249635_6 (sequence is synthesized)
gtttttaaggtttttctggggtccccttggccaagtggggaaggatccagtcagttggtatggcatttaggattttatttttatttatcaatctcattttgtttttccattaaatgcagc

SEQ ID NO: 816383 - DNA, 120 bp, Artificial Sequence
  ENSG00000249635_7 (sequence is synthesized)
caaacctaatttgaacgatatacttaacgaagaagaagagagcagaactcagggttttcttgacttatagtcaagaaaaacaatgtggctcagtcgatacttcttatttctaccaaacaa

SEQ ID NO: 816384 - DNA, 120 bp, Artificial Sequence
  ENSG00000249635_8 (sequence is synthesized)
gtgttcatttttattatgaacattttataatacctattttactctcctaaaatgaaaatcacagacactattgcctataggtataaataattgtaaataattgaacacacacaaacacat

SEQ ID NO: 816385 - DNA, 120 bp, Artificial Sequence
  ENSG00000249635_9 (sequence is synthesized)
tgctttaacaataggaaagaggataaataaaaggaaagtaagtcagcataaaatgacatataatttaacatgtaaatactggagtatgagcatcccaggagacttaaagaagttgtcagg

SEQ ID NO: 816386 - DNA, 120 bp, Artificial Sequence
  ENSG00000249635_10 (sequence is synthesized)
agctagcactttcatatcgtgaataggcttgcatttaagggaagtaagaaagcacatttaagaatgtcaggtaggacacacaaagaatgtggagtgggaaactggactgtctcacatatt

SEQ ID NO: 816387 - DNA, 120 bp, Artificial Sequence
  ENSG00000249635_11 (sequence is synthesized)
acaggacatatggcattgctgtccattaagtgccagtagaacctcccaatcactgtcacaacaaaaattgccccacagatttccagactgaagccagtagcccgtcttatttgaagcctc

SEQ ID NO: 816388 - DNA, 120 bp, Artificial Sequence
  ENSG00000249635_12 (sequence is synthesized)
tggtctaagtgggctagaaacacctgggctctctccttggcacagagccttgagggtggccccttccttcctgaggccaaggcccggcctgcctgtcttaacagctcttagttttctctc

SEQ ID NO: 816389 - DNA, 120 bp, Artificial Sequence
  ENSG00000249635_13 (sequence is synthesized)
tttctgctctaatctccacttaggaatgccagatttagcaataaaattcgagaattcctggttaaatttgaatttcagattaaactatgaataatcgtttaagtaagtcccaaatcttgc

SEQ ID NO: 816390 - DNA, 120 bp, Artificial Sequence
  ENSG00000249635_14 (sequence is synthesized)
aaatttgaatttagctggaacaccctgtattttacttgacaaccttactcccagtacacattgttcccctcagaacctcaagaaaacctatcttaagggtatcaattcagccgggagact

SEQ ID NO: 816391 - DNA, 120 bp, Artificial Sequence
  ENSG00000249635_15 (sequence is synthesized)
ttaagacctacgggcataatgtagaatttcccaaaatgggttccacggagtacttccatgaagtgctcagtaggaaaaaagagacagcctaccttaactcctcttagagattcgtaatac

SEQ ID NO: 816392 - DNA, 120 bp, Artificial Sequence
  ENSG00000249635_16 (sequence is synthesized)
tgtacatatctcctaggaaagcttaagcaggtcctgcccttacatttaatacttaacctggtatttcccaaaccatttcatctagcacctgctaactgtcccagacaccagtggtccagg

SEQ ID NO: 816393 - DNA, 120 bp, Artificial Sequence
  ENSG00000249635_17 (sequence is synthesized)
gaacacaccgtaggaggcaggtttgaggaaactatttctggagccccaaactaatcccacatggccacactcctgctgtggttactatgactctctaggcctcagtttctcatcagcaga

SEQ ID NO: 816394 - DNA, 120 bp, Artificial Sequence
  ENSG00000249635_18 (sequence is synthesized)
agggtggagtcgaatgcaattagcttgaaggtccctggagtttatgaaatctggagattccactttcatacactgcctttcctcagagctctgtcccattattaccaagagccacctcaa

SEQ ID NO: 816395 - DNA, 120 bp, Artificial Sequence
  ENSG00000249635_19 (sequence is synthesized)
gccaaactcaaaagttggggcaaaccaaaggttcaaagctcacacagtgcatgaactgtctccaggagcctgaattctccatcctatttttagctctgacccatctcaggcccagcagat

SEQ ID NO: 816396 - DNA, 120 bp, Artificial Sequence
  ENSG00000249635_20 (sequence is synthesized)
gccatagtgatgatcactgtaatttcatgggaaagatacaggaaacccaacaataacagcaataattcagcagcctagcagatgccagatctcatttgtgcttcacccttagcatgactg

SEQ ID NO: 816397 - DNA, 120 bp, Artificial Sequence
  ENSG00000249635_21 (sequence is synthesized)
atgatacacactatcagagcaaaagaatgttcatctgtggcaaaagacctttagcacatttcctgtaacctccaatttgcaacaagttgagttccagttggtgggttgctgatgtggcca

SEQ ID NO: 816398 - DNA, 120 bp, Artificial Sequence
  ENSG00000249635_22 (sequence is synthesized)
ctagaaaaaggtgacccctccattccttggcatggacatttagactctcaagaataccactgaagccatgcagaggatagaggcaaagggagataacacaaacactcagaggaaaagatg

SEQ ID NO: 816399 - DNA, 120 bp, Artificial Sequence
  ENSG00000249635_23 (sequence is synthesized)
atgtgaaaacagaggcagagattaaagtgcagtgacctcaagtccaagagtgccgaaaaagccaccagaagctggaagagttacagcagcctctgaggtggtggagggtggcagcaggac

SEQ ID NO: 816400 - DNA, 120 bp, Artificial Sequence
  ENSG00000249635_24 (sequence is synthesized)
agtgagctgacggccaacccctgtgcccaagtgtgctgctccgctcaactccatgtgcaccagggaacagccattctctgcaggctgatttgatctggaaccacaattgagtctagttct

SEQ ID NO: 816401 - DNA, 120 bp, Artificial Sequence
  ENSG00000249635_25 (sequence is synthesized)
ggaatctcagacacatggagaactacaccttgtctccagttgctacaagtcaagtccacctgcatgcagacagctacaattgtcttgtaaaattagaaaacagaacagggacaacagtat

SEQ ID NO: 816402 - DNA, 120 bp, Artificial Sequence
  ENSG00000249635_26 (sequence is synthesized)
ttgactatagattaattattcatttgcattctttgtcttttgtacttataaatatgaaatttgtatataaacgtgtgttttacaacataagatacagatctatatatatgtacctttgaa

SEQ ID NO: 816403 - DNA, 120 bp, Artificial Sequence
  ENSG00000249635_27 (sequence is synthesized)
cctttgaaagattattctctctgctctttggcctaaatttccaaatggaatcatcctgtgtacagtaacctgtgtctgaaaatttctgtccacttagagtaatgaaggcatggggtcata

SEQ ID NO: 816404 - DNA, 120 bp, Artificial Sequence
  ENSG00000249635_28 (sequence is synthesized)
atgagagcaacaaaaaagttacactttatactgtgaaagaccgtcaccttattgttcatttacttaagtttttcattttgtttttatattttgaaatgttgaataaaaaactcaaggcac

SEQ ID NO: 816405 - DNA, 120 bp, Artificial Sequence
  ENSG00000227911_0 (sequence is synthesized)
ctctagcgcattacagctaagtgttagtctatgaatgtaatataacagtggtttaaaatcaacagattgtaacaaaagtccctcacaggagacaaagctggtgccgtgatctctattgca

SEQ ID NO: 816406 - DNA, 120 bp, Artificial Sequence
  ENSG00000227911_1 (sequence is synthesized)
ttaatgagacaaatgaggataggaaacatcatgtggcttcccagggctccatggcaggggcgtggcaggggggatttgagtccaggctcctactccagtgctgacctttcccgtcacttt

SEQ ID NO: 816407 - DNA, 120 bp, Artificial Sequence
  ENSG00000227911_2 (sequence is synthesized)
attagagcacatggatgtcttatagatgatcttgtccaagtcattcattttagaagagctgatggaacttcagagaggttaaattcacctgttgcaggtcacctatctccttagtgacaa

SEQ ID NO: 816408 - DNA, 120 bp, Artificial Sequence
  ENSG00000227911_3 (sequence is synthesized)
gtttgagattacagcccaacttcaagtcacactgactcttgtgattataagtgaaatcatacttggccactcattcctgagcaagatgcctgtttctgaaattagtctctagagtaccaa

SEQ ID NO: 816409 - DNA, 120 bp, Artificial Sequence
  ENSG00000227911_4 (sequence is synthesized)
cttttcaggagaaaagatggtaccttacttaccttcaagagcaaagcctttcccatgtttcataagtgtttcttggcagcctaactgactcagtgactgattaaaggaaagactgaagga

SEQ ID NO: 816410 - DNA, 120 bp, Artificial Sequence
  ENSG00000227912_0 (sequence is synthesized)
tttggacaggaaagttccaggcttcagctcccagaaaccaccttccttcatgtggagggacgcagcctcataagggctggagtgctgtggtgccatcatggttcactgcagccttgacct

SEQ ID NO: 816411 - DNA, 86 bp, Artificial Sequence
  ENSG00000227912_1 (sequence is synthesized)
aagaaacttttccattaaaacacaatgctccgaaaggtttgttgcaggtaacgcgttccttgtattcagcaagggcggtatatctg

SEQ ID NO: 816412 - DNA, 120 bp, Artificial Sequence
  ENSG00000227912_2 (sequence is synthesized)
ggtaacgcgttccttgtattcagcaagggcggtatatctgcagtgtcttcttcctgggcctacactctgtgaaggtcaatctcatactcaacccagtgtgctgagaaacaggagagtgac

SEQ ID NO: 816413 - DNA, 120 bp, Artificial Sequence
  ENSG00000227912_3 (sequence is synthesized)
tgatacaaacaacttatttgagcatatttacctgaaacagtatttaaaaaactgagcatatcttatgacaagaatctcatgctttaaaactctaaactatatccctatgcaaattactga

SEQ ID NO: 816414 - DNA, 120 bp, Artificial Sequence
  ENSG00000227912_4 (sequence is synthesized)
caatatacgttttaacatcagcattgtacttttaaccttaggtctagggttaccaagtgctgtggcactgctttgataccttatagtttccagttctagtttacaaacataacatgcctt

SEQ ID NO: 816415 - DNA, 120 bp, Artificial Sequence
  ENSG00000227912_5 (sequence is synthesized)
tatagttctcagcgctccttaaatatgtggattggaattctaattcctttaaatttcatgttgagttctcagtttctctgcagctactatagctgctctgagttgatgtaattcaaagtc

SEQ ID NO: 816416 - DNA, 120 bp, Artificial Sequence
  ENSG00000227912_6 (sequence is synthesized)
tctttaaaagaagctagggcatttctctgttatgcaattccttctgttgcattggagaaacaccgagtaatgcagccacgttgggaaatgctgtcattcccaaatctaagtatcctttaa

SEQ ID NO: 816417 - DNA, 120 bp, Artificial Sequence
  ENSG00000227912_7 (sequence is synthesized)
tgggacctactgaaaaaagaagaagaagaagaagaaatgccagtacctttcttccactgaattgctttggacacatgctgctgctgttgttgaactcactgcttttgtatacgaataata

SEQ ID NO: 816418 - DNA, 120 bp, Artificial Sequence
  ENSG00000227912_8 (sequence is synthesized)
agtttccaagctgtggggaggaagacccccctgatgacttacaacccctctcagatcccatgaccctactgcctccaccatcagatcccacagcagcggacttcggggatgccgtgagat

SEQ ID NO: 816419 - DNA, 120 bp, Artificial Sequence
  ENSG00000227912_9 (sequence is synthesized)
tgcccagccctgcggcccacgcgtgtgcgtgtagcacagtttgttcttctaaggacacgttccagaattactggagtctcctgaatgctgagatgaatagactgggtgagctttaggtgc

SEQ ID NO: 816420 - DNA, 120 bp, Artificial Sequence
  ENSG00000227912_10 (sequence is synthesized)
tgcacctgtccttcaaaatgaaactgaacggaggcccgcagagtctccccgggaaatagggactgaggatgcgttccatctgggttatgctttcatccctgcagcccctggtctgccccc

SEQ ID NO: 816421 - DNA, 120 bp, Artificial Sequence
  ENSG00000227912_11 (sequence is synthesized)
ctgtcctcagaaacagctcagtcctttcggtgaaatcggtgaaatcggtggttctcatcttctgtttcttgaacacacgtcttgttcccacccatcggttatggttggagaagcatttca

SEQ ID NO: 816422 - DNA, 120 bp, Artificial Sequence
  ENSG00000227912_12 (sequence is synthesized)
agaaaacacctgttagggctttttgtgtgtgttaagccgctgtgctggtgtgctttagaatcatccggaaggtttgttaaaaccagagtgctgggtctcttccctggagtttctgagtgt

SEQ ID NO: 816423 - DNA, 120 bp, Artificial Sequence
  ENSG00000227912_13 (sequence is synthesized)
gcaggtgtggaatagagctcaagatctgcgtttctaacatgttctgagctgctggtcccagtactacgctcagccaaccagccctccagacttatatgcaatgagccctgtggctttaca

SEQ ID NO: 816424 - DNA, 120 bp, Artificial Sequence
  ENSG00000227912_14 (sequence is synthesized)
cggtatcttgatgaagaaaatgttatgtaaatcatgctctaaaacaacgattggatttcagtgcaattacagaaaaccttttcatcaagatgtctatgaatgaaatactgattttaacag

SEQ ID NO: 816425 - DNA, 120 bp, Artificial Sequence
  ENSG00000227912_15 (sequence is synthesized)
gctgcccattttcaacagcataaaatcacgcattcaaaaccatgatgagccccttaaattttaggattgagtttcacttcctcactgacattttgtgaaaaataacacccgcaagaggcc

SEQ ID NO: 816426 - DNA, 120 bp, Artificial Sequence
  ENSG00000227912_16 (sequence is synthesized)
taaacagggcgatcggaaccaagaaaacttaaggaagtatttgcacgttttgatgtgtttatttatttgggatgcgcggaggctctgaatggagaaagtcgtcgatgcctgcactggtct

SEQ ID NO: 816427 - DNA, 120 bp, Artificial Sequence
  ENSG00000227912_17 (sequence is synthesized)
tggcctgttctttatgttccgcgcggtgacagctttaagatgaaggaggaacataaagggtttcatcacaggaaatagaactattgctttattcaaacatttaaaaaataaatacaataa

SEQ ID NO: 816428 - DNA, 120 bp, Artificial Sequence
  ENSG00000227912_18 (sequence is synthesized)
atcagggatttttcccctttccgagtattaaatacagatgtactgtatgcatatgaaatttttgattaaaatgtctttcaccagtctgtctctttaattaaataaagcctgtttggtatt

SEQ ID NO: 816429 - DNA, 120 bp, Artificial Sequence
  ENSG00000227912_19 (sequence is synthesized)
gcagcagacagagggcccctctacacacttgcaccgtccttcctggctactacgatccaccctgcttcaaggtcttaacttctctccaagcacggtgctgctgcatgcatactattcaca

SEQ ID NO: 816430 - DNA, 120 bp, Artificial Sequence
  ENSG00000227914_0 (sequence is synthesized)
gtctcttaggaggatcttctctgcatttcgtgtacagatttctcccgaatctcacagaagcaatattggaacagaaagtgaaactatattgcttctgacaagcctgcccgctgcgtggct

SEQ ID NO: 816431 - DNA, 120 bp, Artificial Sequence
  ENSG00000227914_1 (sequence is synthesized)
gataggatggctccaatctccctgatgaaggggtaatcacctgactttctcttggaaacagaggcactggttcaggtccacaacattgaacttggagagcaataacctctgtgtgcacag

SEQ ID NO: 816432 - DNA, 87 bp, Artificial Sequence
  ENSG00000227914_2 (sequence is synthesized)
gctatgttccccacacctcctcggccttccaaagtgttgggattacacgtctgcgccaccccatctggcctaaaatgttttgaatta

SEQ ID NO: 816433 - DNA, 120 bp, Artificial Sequence
  ENSG00000227914_3 (sequence is synthesized)
cgtctgcgccaccccatctggcctaaaatgttttgaattaatgaaaacagtactgtaccaatcaagagaagtaggatggaggatctggtgaaaaagagattgcttctgacaagcctgccc

SEQ ID NO: 816434 - DNA, 120 bp, Artificial Sequence
  ENSG00000227914_4 (sequence is synthesized)
cttttaagaataggagtgaatgtctatacatttctgacaaacgcagttttatttaaacaaaaaaaaaagtggagactgggaagaccagagagggaggggcaaatgaaggggcaaaggaaa

SEQ ID NO: 816435 - DNA, 120 bp, Artificial Sequence
  ENSG00000227914_5 (sequence is synthesized)
gaagcccagtttctggaattattcaactaagtatgcttttaaaagctaacaaccacaaaaccctaagccaaaccctgtttactggccccttgctagccttgtgtgtttgcactcttgctc

SEQ ID NO: 816436 - DNA, 120 bp, Artificial Sequence
  ENSG00000227914_6 (sequence is synthesized)
cataacggcttgtaaataccaccatgtaaaaccttgaaggcaaacagaagacaagaagggacaagctgcatgtgctaggggtgaatgaagtatgtgtcaaggtatttggatggagatgtg

SEQ ID NO: 816437 - DNA, 120 bp, Artificial Sequence
  ENSG00000227914_7 (sequence is synthesized)
cccagaatcttcctagtcaagcttaataaactttggcccaaggtcctctcctgttattgaaactctttcatctggcagaagatctttttctcagatccaaattggtgcctcccacccttc

SEQ ID NO: 816438 - DNA, 120 bp, Artificial Sequence
  ENSG00000227914_8 (sequence is synthesized)
cacccttccccaaactgaacaataaaaccaaaataaggaggaagcctaaaattaggaactgtaagcatatcactggtaaaataacaagacactgttggccgggcacggtggctcacgcct

SEQ ID NO: 816439 - DNA, 120 bp, Artificial Sequence
  ENSG00000227917_0 (sequence is synthesized)
ctgagtgccacgtgctgacatcactaagatcaatacagcaaactctgaaagatggacggagagacaggagatggtcctttataatgcagtgtgatctgtgctgcaatagagttttggaag

SEQ ID NO: 816440 - DNA, 120 bp, Artificial Sequence
  ENSG00000227917_1 (sequence is synthesized)
ctagaagttcaaaacgaggtgttggcagcaccatgctctctctgaagatgctaggaagaatctgctccatgcctttccattcgcttctggggtttcctgcaagccctgacattccttggc

SEQ ID NO: 816441 - DNA, 120 bp, Artificial Sequence
  ENSG00000227917_2 (sequence is synthesized)
caccccagtttccgcccccatcatcacatggcctcctctctgtgtgtgcctctgcgttccctctattcttcttctaaggacaccgacaccagtcatagtggattaagggtccactcctaa

SEQ ID NO: 816442 - DNA, 120 bp, Artificial Sequence
  ENSG00000227917_3 (sequence is synthesized)
ccaattacatctgcaacaaccctatttccaaataaagtcacattctaagattcctagggagaacaggaatttttgggggtgtgtggatactgttcaacctgggacatggagtaaataaat

SEQ ID NO: 816443 - DNA, 120 bp, Artificial Sequence
  ENSG00000227917_4 (sequence is synthesized)
ggcaaggaagattacagatgactttaagctaaagagggagatagggttaaatgtaggactttttttttttccaggacgggagaggtttaaacatgttactacattgaataaatgaaataa

SEQ ID NO: 816444 - DNA, 120 bp, Artificial Sequence
  ENSG00000227917_5 (sequence is synthesized)
gcctcccaaagtgctgggattgcaggtgcgagccaccgggtccagcctctcaggcgattttcatacctgcatactctgatcactacgctgttaaacagtcaaggagggtaagtattatct

SEQ ID NO: 816445 - DNA, 120 bp, Artificial Sequence
  ENSG00000227917_6 (sequence is synthesized)
tattatcttcagatttccagagctctgtctctgtacagccctctcctcctcaatattctgccctatgaattctagccacattggccttcccagactcacagttctgtcttctcaactcag

SEQ ID NO: 816446 - DNA, 120 bp, Artificial Sequence
  ENSG00000227917_7 (sequence is synthesized)
gaagatctctgagctccatctgcattctttcttcctgtgctgtggcttggaaagttttctaaggtgtttgggaggtcaattgtggggctagcctcatttgtttctcatctcttgaggatc

SEQ ID NO: 816447 - DNA, 120 bp, Artificial Sequence
  ENSG00000227917_8 (sequence is synthesized)
actgccctttgatgcttgattccagtgattgattccctttgttgcttgagggccatagtttcatatattttgtccagtatttttgttgttttaggtcagaaagtaattttggtctctgtt

SEQ ID NO: 816448 - DNA, 120 bp, Artificial Sequence
  ENSG00000227917_9 (sequence is synthesized)
actccatcttggccagaagtgtaagacctaagcatttacacatcaaaatactgcacacataattttagtttaagctacttttaaaaaaatctgcttcattttccattaagcattctattt

SEQ ID NO: 816449 - DNA, 120 bp, Artificial Sequence
  ENSG00000227917_10 (sequence is synthesized)
caatcccatttaaagatagtgcatagggtattctaaaatagctgttaagcaaagagaaaattgggcctgatagggtgagaatcacagctctaatacctagagtgaccttataatgtattg

SEQ ID NO: 816450 - DNA, 120 bp, Artificial Sequence
  ENSG00000227917_11 (sequence is synthesized)
tccaaaggagatatttttgacagtgaaagagggtgttgttagtaattatatcaggaccatggcctaaaccaggactatcccaggcagcctgggacatatttgtaccccatctctatttaa

SEQ ID NO: 816451 - DNA, 120 bp, Artificial Sequence
  ENSG00000227917_12 (sequence is synthesized)
ggcaaacaacttaacctctccaagcctcaatttccccatctatataatggtgatatttataagtttcaccttatagggccacggtggggattccatgaaatagtgtatgtgaagtgctta

SEQ ID NO: 816452 - DNA, 120 bp, Artificial Sequence
  ENSG00000227917_13 (sequence is synthesized)
gcacagtgcctggcacatactcaatgctctatgcatgtcagctagtacttaatgatgctaataaacatgttatgtccctaagcacgggtgggatcttgcctgacgtccttctctctgcgt

SEQ ID NO: 816453 - DNA, 120 bp, Artificial Sequence
  ENSG00000227917_14 (sequence is synthesized)
cctggtcagtcttcacatggtgggcatcctttatttccggtcacacacgggtggtacacagagcatgctgtttctttcgtgccagaaggttcccgctgcagctctcctgctagtttagct

SEQ ID NO: 816454 - DNA, 120 bp, Artificial Sequence
  ENSG00000227917_15 (sequence is synthesized)
tagccttctggtttgagggatgagtcacatgtaccatcacttcccaggaccaacaggacctttcaggaaagctatcccctgcttacacagagaattgcccttgcctaacactgaagcctg

SEQ ID NO: 816455 - DNA, 120 bp, Artificial Sequence
  ENSG00000227917_16 (sequence is synthesized)
agcccttaccttcaggtcgtggagtccggatacagactggaggcagaggcagctgtaagatgtgtgacaaatgctgcgctggatcagcccatggtattaggagagcagctgagtgccacg

SEQ ID NO: 816456 - DNA, 120 bp, Artificial Sequence
  ENSG00000225203_0 (sequence is synthesized)
agctgtcattcacatagagctccagctttcataaaaagcttttcttcgttgaagagctctgatgtattgccttgtctcgaatgcataattgatcattatgaaaagaatacaggttgttcc

SEQ ID NO: 816457 - DNA, 120 bp, Artificial Sequence
  ENSG00000225203_1 (sequence is synthesized)
caagactacatttcctagcttctcttgttgctaggagtgcacctgcttctggccactggggtttgcaactattttaaaccatggagttgaggtccccaagacagagaaacaagatagaag

SEQ ID NO: 816458 - DNA, 120 bp, Artificial Sequence
  ENSG00000225203_2 (sequence is synthesized)
gcacctgcacctttgatatttaatgacaagcgatgaagtaccatgatgaaaacagccccaaacccctaactacactttcatgtttcatgtgacagggaaataaacttctgttttgtgtaa

SEQ ID NO: 816459 - DNA, 120 bp, Artificial Sequence
  ENSG00000276174_0 (sequence is synthesized)
agactttgtatagttcaaagtgaattttgaatgtggttcagtgcaggaaatatattccaatgtttttagtttaaaaaatgcctcgactgtcatgaagacttgtccattgtatattttgag

SEQ ID NO: 816460 - DNA, 120 bp, Artificial Sequence
  ENSG00000276174_1 (sequence is synthesized)
caagtaacatttttcttattctgcaaaatacaatacctttgttttctgtactcctttgccagcccaagcaggtttagagtctaagattctgctttagattaaagtggttttgaatttcaa

SEQ ID NO: 816461 - DNA, 120 bp, Artificial Sequence
  ENSG00000276170_0 (sequence is synthesized)
agcagatgcagctccccttccctcccattccaccatccactgtccccagcaagaacctgcgggagggtggcccaatggggagaaaactaaggattcggtgttgggaccactcctgccctg

SEQ ID NO: 816462 - DNA, 120 bp, Artificial Sequence
  ENSG00000276170_1 (sequence is synthesized)
acctgccctgtgactccgtcatactctccaaaggccagaccctcctagaccagctggaaccaccatcaagatgtccccagccatgtcagactctggggccccaggcggagggcaaccaga

SEQ ID NO: 816463 - DNA, 120 bp, Artificial Sequence
  ENSG00000276170_2 (sequence is synthesized)
cctctaacctggcaggggagcaaggcccagccaaggagttacagaaactgaggcttggccaggcgtggtggctcacacctgcaatctcagcactgggaggccaaggtgggcagatcgctt

SEQ ID NO: 816464 - DNA, 90 bp, Artificial Sequence
  ENSG00000276170_3 (sequence is synthesized)
accccatctctacaaaaaatacagaaattagccaagtgtggtggcacgtgtctgtagtttcagctactcaggaggcttagaggttgcaat

SEQ ID NO: 816465 - DNA, 120 bp, Artificial Sequence
  ENSG00000276170_4 (sequence is synthesized)
atcacctgagcctgggaggtagaggttgcaatgagcagagattgctctccagccagggagacagagtgagaccctgtcccaaaataaataaataaataagaataaaatttaaaaaagaaa

SEQ ID NO: 816466 - DNA, 120 bp, Artificial Sequence
  ENSG00000276170_5 (sequence is synthesized)
ataagggttggacctttttgaggcagctaccagaagggagcaccaagcagatgcagctccccttccctcccattccaccatccactgtccccagcaagaacctgcgggagggtggcccaa

SEQ ID NO: 816467 - DNA, 120 bp, Artificial Sequence
  ENSG00000276170_6 (sequence is synthesized)
gatggccaacaggtgctgctgtgtgcccagatcaagaatccacctctgcggaattcaaaaccgctgagggttctgggacagcagggaggagagaggtggagacgcaacatgggttttctg

SEQ ID NO: 816468 - DNA, 120 bp, Artificial Sequence
  ENSG00000276170_7 (sequence is synthesized)
tgttcagactgcagagaccttggaaaggatcaaccatatacaatgtccatttcctgccctctaacctggcaggggagcaaggcccagccaaggaggtaacagattcctccaacacaaacc

SEQ ID NO: 816469 - DNA, 120 bp, Artificial Sequence
  ENSG00000276170_8 (sequence is synthesized)
acaccttccttccccacccccaccacctccacacccagctgcctctgtggggacttcagggggagagtgcacacagtggggcctcaaaggttatgtagcttgaataaatgatcctccagg

SEQ ID NO: 816470 - DNA, 120 bp, Artificial Sequence
  ENSG00000276170_9 (sequence is synthesized)
gaggctgccacgagctgagtcaggagagcttagggggagagcgggaaaggactgcagccggggagagcaggacgcgccatctccattggcaccctctcccgccccacttccatcgctaga

SEQ ID NO: 816471 - DNA, 120 bp, Artificial Sequence
  ENSG00000276170_10 (sequence is synthesized)
cagctccaagtctggcctctcctcccagcaagcagccattacagaaactgaggcttggccaggcgtggtggctcacacctgcaatctcagcactgggaggccaaggtgggcagatcgctt

SEQ ID NO: 816472 - DNA, 120 bp, Artificial Sequence
  ENSG00000225209_0 (sequence is synthesized)
gctgctctgtgcagttacgatgctgcactgccacagtaaccttctccctctgtggtgatccaatattctaccatatgtcagcaaaactattccagcccggccctttcaactctcccgaat

SEQ ID NO: 816473 - DNA, 120 bp, Artificial Sequence
  ENSG00000225209_1 (sequence is synthesized)
ctaagccaacagtcaaggtactatgaagacgtcaggcgtatggaaataacagatgggaaaggcgagcagagatcattactctgaactgtcttggatgtccctgggcaatgctaagctaac

SEQ ID NO: 816474 - DNA, 120 bp, Artificial Sequence
  ENSG00000225209_2 (sequence is synthesized)
catgttgaaagaatggagcggtgattcccttggaaggatgtgaaaagctttccaatctcgaggtgatatcagagctctttcccattgaaacacttggatgctctttctccagctatcatg

SEQ ID NO: 816475 - DNA, 120 bp, Artificial Sequence
  ENSG00000225209_3 (sequence is synthesized)
ctctcttttttccactcaagaaaagaagagaatgcaggttcccacagatactgcaagccccctcaagcttaggcagtggccctaacttagatctctcttccttctagatcaacacagctg

SEQ ID NO: 816476 - DNA, 120 bp, Artificial Sequence
  ENSG00000225209_4 (sequence is synthesized)
gataaggcctcaggaatggcccaggttgtccctgcttggagcttcagatgtggtttgaacccaggtctgcatgattctcaagtcatacttcaacaaacacaataaaactcatatcaaatg

SEQ ID NO: 816477 - DNA, 120 bp, Artificial Sequence
  ENSG00000225208_0 (sequence is synthesized)
tctttcttttcctccttcacaccctcctcttctgtctctctgcaacccctcctggtgatctctgagtctctgagcacctccgccttcctctcccactgcctctttctccccctcatcctc

SEQ ID NO: 816478 - DNA, 120 bp, Artificial Sequence
  ENSG00000225208_1 (sequence is synthesized)
ctaatggcagggatttgctgtgccccatggctcagttaagttctgctccccagctctgccatcatctgcctttgcctgaaggtaccaggatggctctctgcaaggattcccaccaggaat

SEQ ID NO: 816479 - DNA, 120 bp, Artificial Sequence
  ENSG00000225208_2 (sequence is synthesized)
gccaaagccagagacttagggaccaaaggacccagaagggagatctgaaaaattcctgcttaggggcgggtcctggaggctctgatttttctgggtattgagggacccaaactcaaccag

SEQ ID NO: 816480 - DNA, 120 bp, Artificial Sequence
  ENSG00000282121_0 (sequence is synthesized)
gacatttcccatccttctcaaaaggtagcacaggctgcagaaaagttccttccccacacaggcaaactcttaccctctttctggacgcaagcttcactggccaagagattgcaaaagtgt

SEQ ID NO: 816481 - DNA, 120 bp, Artificial Sequence
  ENSG00000282121_1 (sequence is synthesized)
acatgttgtgttttctcaaaggcaattgaggaattatacatctttccccactcagagttcgaagattttcaaaatttcaggcccccaaaaaaatctttttaaaaaaccccacttaattga

SEQ ID NO: 816482 - DNA, 120 bp, Artificial Sequence
  ENSG00000282121_2 (sequence is synthesized)
gatccttttgaccacttcgcagacatccttttaaagctccttctgattggattaaaaactcctctggcaagcctctagcaggacagaatggtgacataaatgcaagcccctgagttattt

SEQ ID NO: 816483 - DNA, 120 bp, Artificial Sequence
  ENSG00000282121_3 (sequence is synthesized)
gtatgtaaatatgaggactgctccggtgtagactttcggtaatttgataccaatgcgcgttgcctagtcgggtaaccaagacagccttcatgtagggagagagcgaagtgctacatttaa

SEQ ID NO: 816484 - DNA, 120 bp, Artificial Sequence
  ENSG00000286639_0 (sequence is synthesized)
gcataacgggtgttatttagctaagtggtgcctgcccagtaggtgctcaggatccagggagagaggcagactcaacatgcaaacaactcttctatgagggtttttgcctacattctagac

SEQ ID NO: 816485 - DNA, 120 bp, Artificial Sequence
  ENSG00000286639_1 (sequence is synthesized)
taaccctgtttatccccgtgaaccaaccagtgatctctggctgtatctcagaagaaacagacagatgggtaatataaagatctagatcaatagtctagttctggacaattatcctgcaaa

SEQ ID NO: 816486 - DNA, 120 bp, Artificial Sequence
  ENSG00000286639_2 (sequence is synthesized)
gcctgcaaggtgatctgccctagtacgtcactgaagagagactaaagaaaaaattgtctaatttcataggacattatagatcctgtgagtcttctaaggtacctccctgcttgctagggc

SEQ ID NO: 816487 - DNA, 120 bp, Artificial Sequence
  ENSG00000286639_3 (sequence is synthesized)
aaatcatttccttctcaagtggctttctggcctccctggagctcaacacagtttttagggctcaaggtccctctttctatttattttctgctcccatcatttctttatttttccttcctg

SEQ ID NO: 816488 - DNA, 120 bp, Artificial Sequence
  ENSG00000286639_4 (sequence is synthesized)
accaagatgtttttttttttcttttttattacaggaacaaaaagacatattattttctgcctgttccttgtgggaaaaaattcaaattttctaaattttataagggctgcaatttccgaa

SEQ ID NO: 816489 - DNA, 120 bp, Artificial Sequence
  ENSG00000286639_5 (sequence is synthesized)
atattcttccattcattcaggaagtacttgaatatctactaaatgccaaccactcttttctggatgtttagcagtaagcaaaaacaaagttatgcttgtggaaagaaacaaaaaaaataa

SEQ ID NO: 816490 - DNA, 120 bp, Artificial Sequence
  ENSG00000286638_0 (sequence is synthesized)
aagacgagagctgggtacaacggaagtgaaacctgggtggaggtcatctccaaatcacagtggaaggacgatgtcagggatttgtcccaacactcttttgatgaaagaatttgattagtg

SEQ ID NO: 816491 - DNA, 120 bp, Artificial Sequence
  ENSG00000286638_1 (sequence is synthesized)
gactattgcactcttaaaggcaaagaaaacaaagcacggcagtgccccgctcggtcgggattcaaaagcagtgaaagctgccttgctctgtttaaagcgacaggactgctctgctattca

SEQ ID NO: 816492 - DNA, 120 bp, Artificial Sequence
  ENSG00000286638_2 (sequence is synthesized)
ggaaagactaaggaggcagcggtatctgcgaagtcctgcgagctcccggcgacaggagtagcgcgagcagctgacgggggaaatccactggcagcgagtcggatgagtcagcgctgagtc

SEQ ID NO: 816493 - DNA, 120 bp, Artificial Sequence
  ENSG00000286638_3 (sequence is synthesized)
acgctcggcgctacgtgccggcctgggcggccgcagcccggggcccgcagccgcggagtcagcagagatccgccgcttcctggaagaccctccctgcgcctgagggagggggcggcgtcg

SEQ ID NO: 816494 - DNA, 120 bp, Artificial Sequence
  ENSG00000286638_4 (sequence is synthesized)
cctcctcgcgccgccaaggccccctgcagtcacacactcgcccgcacgcacgacctcctcgctccatcctggggacatccaggattcacccccgaggggaagagtcccatgtgacaaatg

SEQ ID NO: 816495 - DNA, 120 bp, Artificial Sequence
  ENSG00000286638_5 (sequence is synthesized)
tccagcgctcttgctcttttcgtgttgttgttaggtttttaacttttttttcccgtttcctggcagaggattaacacgctgatctttttatagtttccaatattttaaatgaagcacaag

SEQ ID NO: 816496 - DNA, 120 bp, Artificial Sequence
  ENSG00000286638_6 (sequence is synthesized)
aagaatggattaataaaacgtgttgaaacttaagcatcaaatcgtcacactgctctgggttctaaaatgactagaaagtgactgcactagaagctttgaatgttgggtaactgggaagga

SEQ ID NO: 816497 - DNA, 120 bp, Artificial Sequence
  ENSG00000286638_7 (sequence is synthesized)
ttaactcggttctgatgtgccctttgttaatgaaaatcaaatctttgctatttgtccaaccacccttataataactaaatttgtctaaagactggagacatgtgtggtaataattagata

SEQ ID NO: 816498 - DNA, 120 bp, Artificial Sequence
  ENSG00000286638_8 (sequence is synthesized)
tggagtcaccaaagaacagggtagccatgcctttgtgttttctgtgccttaactaacattctgttgtcctaatgtgcaaatgatacattgttggttttaaaaaatattatggcaatgttt

SEQ ID NO: 816499 - DNA, 120 bp, Artificial Sequence
  ENSG00000286638_9 (sequence is synthesized)
atatccatgctgagagttaatagcaggtattgtgtcatgaagtgcagctagtcagtgagatagtcctgatacaggtggggtaattattatttagggacaatttgcggctgtttttcaaga

SEQ ID NO: 816500 - DNA, 120 bp, Artificial Sequence
  ENSG00000286638_10 (sequence is synthesized)
cagactgggtctttagaagttgtgccagctgttaccggtggttctgcttcattgggagaattatttccctccttatccctgtgtacgtgtgaaatgatgcaaaacaatagagtgttcgtg

SEQ ID NO: 816501 - DNA, 120 bp, Artificial Sequence
  ENSG00000286635_0 (sequence is synthesized)
cagagaaaatggacaacttatggtctagagatggcagcacagaaaggaaggaattaaaaagcatccctcaaattgacaagaaaattggataataaattaaccatttacagtttggtaaat

SEQ ID NO: 816502 - DNA, 120 bp, Artificial Sequence
  ENSG00000286635_1 (sequence is synthesized)
atatgcacaactgaagttccacgtcatgggccatatttttatcagacgcaacaccagatgaaggataaaccatatgacccaccctcttctgccatgaatgaacaatggactgaagtcttt

SEQ ID NO: 816503 - DNA, 120 bp, Artificial Sequence
  ENSG00000286635_2 (sequence is synthesized)
cataattgcttgtttcaagatgctcactaaatcagacaaggaactcctgtcttgtgtctttaagggaggttgaacaataggctgggacactggagtaaatggggcactctgccatactta

SEQ ID NO: 816504 - DNA, 120 bp, Artificial Sequence
  ENSG00000286635_3 (sequence is synthesized)
cactttcctttgaaatttgtgtttgggaggctttaactatgagtatattttgcagccaaatgcagttagctttttgactaatggagctggtgtgaattttacccctccatctgtagatgc

SEQ ID NO: 816505 - DNA, 120 bp, Artificial Sequence
  ENSG00000286635_4 (sequence is synthesized)
tgaaatgtcacattatttcatttttctaaaacaaattaaatgactctgagcatccagtcattagggttttaagaaactcaatcacaactatgagtatagggaatggggatgaacagtatc

SEQ ID NO: 816506 - DNA, 120 bp, Artificial Sequence
  ENSG00000286635_5 (sequence is synthesized)
cctttcccatatgctagatagacagtcacctgtggagcttagcagtgcttcggatacagggaaggacagctggtctttgagatattgtgggcatttgggtgttaggattcttattactta

SEQ ID NO: 816507 - DNA, 120 bp, Artificial Sequence
  ENSG00000286635_6 (sequence is synthesized)
aacctgcccagtccctataaaaagggaccgctttgcaaattctgatccatgcatggaacaggaaatctttcttaatatttagctgcttcatgcattcaaatccttgaagaccccccacat

SEQ ID NO: 816508 - DNA, 120 bp, Artificial Sequence
  ENSG00000286635_7 (sequence is synthesized)
gccctgcacccttctcagttccctttcaatcttggggtatctcccctttctgagaattcactgctgttgctgacctcctcccactcatttccttccatcttctcttactttcttaatacc

SEQ ID NO: 816509 - DNA, 120 bp, Artificial Sequence
  ENSG00000286635_8 (sequence is synthesized)
ccacattatctctgctgactgtgtctttagacacacaacacttttctttaaggaaaggcaaggctgtgtgttccttacctcatcatgttatgttagaggtccaaatgttttatgggtgac

SEQ ID NO: 816510 - DNA, 120 bp, Artificial Sequence
  ENSG00000286635_9 (sequence is synthesized)
caattaattcatcatgtcatctggatgactgttgaaagcaaaagcgggatcattgtaagaactgtgtcaggaaaccagcaaaaccagccctgtcccaggcaaactgggaattatgatctc

SEQ ID NO: 816511 - DNA, 120 bp, Artificial Sequence
  ENSG00000286635_10 (sequence is synthesized)
tctctggaaggaaagaagaagaaaagtgggagaggtaggctgttctttttccaacaagaatcttggaaggcgttttcattttggaaactgtttagaagactatactaaattgttactcct

SEQ ID NO: 816512 - DNA, 120 bp, Artificial Sequence
  ENSG00000286635_11 (sequence is synthesized)
gccagccctgaatgcaaaaatatgggatcctgagttcaaatcgggctcagaagttgacatattgtttgaccttgagcaatctgcttaatttcatagtgtttgtttgctcatctgaaaaca

SEQ ID NO: 816513 - DNA, 120 bp, Artificial Sequence
  ENSG00000286635_12 (sequence is synthesized)
aaagggataatgctgatcgaggcatattgtggagattaattagtttctgaagtgctgagatccacagatgaaaggctttaagtggaaattattttgtttttaaaggaataatcgatgcat

SEQ ID NO: 816514 - DNA, 120 bp, Artificial Sequence
  ENSG00000286635_13 (sequence is synthesized)
gtgaataaaagagaactaactgaactgaattacaggcacttggctgctggtgggagtgggggaagaaagaatattgcttcttgcaaagaaccttaaatttaccccccagaatagcagtgg

SEQ ID NO: 816515 - DNA, 120 bp, Artificial Sequence
  ENSG00000286635_14 (sequence is synthesized)
gaaaattgctttttttttgtgattctgaaaggatgagaaattatgcaaaagaaacgagctagaataagaggagaatatatgcagttaagacatatttcaaagtaactttcctggataaac

SEQ ID NO: 816516 - DNA, 120 bp, Artificial Sequence
  ENSG00000286635_15 (sequence is synthesized)
tatatattatgtgtattagatatatatatgatatatatgatatattaatgtattagataatgtgtgtgtgtgtaagtatgtatatactccaccagtcctctgtgattaggttcttagcca

SEQ ID NO: 816517 - DNA, 120 bp, Artificial Sequence
  ENSG00000286635_16 (sequence is synthesized)
attaggttcttagccaaatgcttgtctaccaaaacagctcagccacgatccccaaggagccttaatgacccctaagtccttggtgaaaagatcagtttgggaaggagaaactaactgttt

SEQ ID NO: 816518 - DNA, 120 bp, Artificial Sequence
  ENSG00000286635_17 (sequence is synthesized)
aaaaatctcacagctgtgtatcgtggtgagaaaactagcactattaagcgtgttactgtttaaaaccacttttgctcttgttacatttggtcttctctccaataaatattattattgccc

SEQ ID NO: 816519 - DNA, 120 bp, Artificial Sequence
  ENSG00000286635_18 (sequence is synthesized)
ttgatgtacagataggaaaatgataatcagggaaattaaatggctggccaatggccatttgtttggttaggtggtataggcaatattctgacctcaacattatgactcacaagactctga

SEQ ID NO: 816520 - DNA, 120 bp, Artificial Sequence
  ENSG00000286635_19 (sequence is synthesized)
ccatgtcactgtcaccgaagggtttgctaaagatatggtgacattcagctggcatgtggaaatgaattattgtctaaggactacagaagaattggaatgaagacaggattttttttgtca

SEQ ID NO: 816521 - DNA, 120 bp, Artificial Sequence
  ENSG00000286635_20 (sequence is synthesized)
aagaaaataaaaagttctgaccattaaacgaatgcgtttttgtcatagacgtggtggaaaatgccaacaaagtcagatttcaaaattggctcaaagtctcctgagtcaaatgaaaactct

SEQ ID NO: 816522 - DNA, 120 bp, Artificial Sequence
  ENSG00000286635_21 (sequence is synthesized)
gtcaaagccatgttatacttcttcttagtcttttatccatgcattttaataatatagttatggtcatgttatcccaaattcttttcaaatgttgttttaatggctctgtaactttctacc

SEQ ID NO: 816523 - DNA, 120 bp, Artificial Sequence
  ENSG00000286635_22 (sequence is synthesized)
ttgtgactattgcatggttgttttgacctttttctcattttttgtagatatttaagttcttactttttttttacttttataattagctctgtaatgagctttttgtgtgaaaaaacatat

SEQ ID NO: 816524 - DNA, 120 bp, Artificial Sequence
  ENSG00000286637_0 (sequence is synthesized)
actgcagctgaggcaggctctgaaggagctgatagctttagattgtttgctaactgcactacctgaagttgtacaggaagtctttccttgaagactgagagatgcttctccaagatttta

SEQ ID NO: 816525 - DNA, 120 bp, Artificial Sequence
  ENSG00000286637_1 (sequence is synthesized)
ttagataaaggatgttatgtcaagagaactcctaagatcttgtttgcatctgtgaaattctgaacaattgataagataatatttccagaagacatcaatgacaatttagctaagagagga

SEQ ID NO: 816526 - DNA, 120 bp, Artificial Sequence
  ENSG00000286637_2 (sequence is synthesized)
aaggccatgtaagaacacagcaagaaaatggtcaaactagcaagagaggcctcaccagataccaacactgacagcactttgatcttggacttctaacctccagagctattttgggctggg

SEQ ID NO: 816527 - DNA, 120 bp, Artificial Sequence
  ENSG00000286637_3 (sequence is synthesized)
gcatcagcttcttcctgccttccaactccaactgtggcatcagctcttcttgaatctcaagactgccagccttcaaactgaaactatacattgactctcttggttctcaggcctttggac

SEQ ID NO: 816528 - DNA, 120 bp, Artificial Sequence
  ENSG00000286637_4 (sequence is synthesized)
aggcagaaggaacttgcttgtctcagatgagactttgaacttggacttcaagttaatactggaatgaattaacgctctggagaattgttgggaaggtatgattgtgttttgaaatgtgag

SEQ ID NO: 816529 - DNA, 120 bp, Artificial Sequence
  ENSG00000286637_5 (sequence is synthesized)
agggacatgagacttgggaaggtctgtggcagaataatatggtttgtctccatgtccccactcaaatctcatgttgaattgtaattcccagtgtttgaggaggggcccggtgggatgtga

SEQ ID NO: 816530 - DNA, 120 bp, Artificial Sequence
  ENSG00000286637_6 (sequence is synthesized)
ttgaatcatgggggcaaacctccccctcgctgttcgcgtgatagagttctcatgagatctggtggtttgaaaatgtgtagcacctccccgttctctctcttcctcctgctctgaccatgt

SEQ ID NO: 816531 - DNA, 80 bp, Artificial Sequence
  ENSG00000286637_7 (sequence is synthesized)
cacctccccgttctctctcttcctcctgctctgaccatgtgaagaccatgtctgtttcttcttcaacttccaacctgtac

SEQ ID NO: 816532 - DNA, 88 bp, Artificial Sequence
  ENSG00000286637_8 (sequence is synthesized)
gtgagctgcttagttatgtctttactgcagtgtgggaatggactaatacagcatgcatatgaatagtttccaaaattcctcttgttat

SEQ ID NO: 816533 - DNA, 120 bp, Artificial Sequence
  ENSG00000286637_9 (sequence is synthesized)
agattgtttgctaactgcactacctgaagttgtacaggaagtctttccttgaagactgagagatgcttctccaagatattctctgaaacatcctgtgcagaggttcacttttttcttttg

SEQ ID NO: 816534 - DNA, 120 bp, Artificial Sequence
  ENSG00000286637_10 (sequence is synthesized)
agtatatgcctgcctaagaagacaggcacaatcaaaagaaaaaacaaaacaaaacaagaaactgaacccttaagcattcaaaattcaagcctattttagagtttttgactggatttgctt

SEQ ID NO: 816535 - DNA, 120 bp, Artificial Sequence
  ENSG00000286637_11 (sequence is synthesized)
tttgttatggcagcagaccaaactactagaatgtgttttccaagttgttgaattcaagggaagtttggagacactaaaaacagtgtgcatcccattagcataaaatgaaactttttaatg

SEQ ID NO: 816536 - DNA, 120 bp, Artificial Sequence
  ENSG00000286637_12 (sequence is synthesized)
tattttttatttttaattgataaaaaataatcatatactcttgtggggtacactgtttatttttaatatgtaataccttacagaatgattaaatcaagctaattaacatgcccaccacct

SEQ ID NO: 816537 - DNA, 120 bp, Artificial Sequence
  ENSG00000286637_13 (sequence is synthesized)
cacatagttatcatattttaatggtatgaacatttgaaactactgccttagcaagtttgaaatatatattacattataattaactgtagtcagtatactgtgtaatagatctcaaaaaca

SEQ ID NO: 816538 - DNA, 120 bp, Artificial Sequence
  ENSG00000286637_14 (sequence is synthesized)
tattcttcctttctaactgaaatcttgtaccctttgaccaacatctccccatctccctccacccccaagcttatggtagccaatattctactggctaattcggtgagttcaacattagat

SEQ ID NO: 816539 - DNA, 120 bp, Artificial Sequence
  ENSG00000286637_15 (sequence is synthesized)
ttcacatataataaaatcatgcatgttttttgtgtctagcttatttcactcagcataatgtcccctaagttcatgacctaagttgtaaaaaatgatagaaattcattcttttttagactg

SEQ ID NO: 816540 - DNA, 120 bp, Artificial Sequence
  ENSG00000286637_16 (sequence is synthesized)
ataaacattaggtttgcatgaaacataactctacttatgtagtttaatttcttcaggtgagcattcagtcaaatcaatatttttcccatgcacatttgccatttttgttactttggttat

SEQ ID NO: 816541 - DNA, 120 bp, Artificial Sequence
  ENSG00000286637_17 (sequence is synthesized)
tttgttttgttttattttgtttgtttgtttgtttgttttggttgccttttagttccatagatgatgggtgggggtgagggttgtagtgtcacagcatttgattgtgggaaatcaagtttc

SEQ ID NO: 816542 - DNA, 120 bp, Artificial Sequence
  ENSG00000286637_18 (sequence is synthesized)
caagtttctaaccttggaggggttctgggcaacactcatttgctgaagtgtcattatcatatctgatattggccatacagcctacactgacttttaacatcggtgcccttcagccaaaat

SEQ ID NO: 816543 - DNA, 120 bp, Artificial Sequence
  ENSG00000286637_19 (sequence is synthesized)
tatgagattctctttagttaagacctttggttttatttagctaatagccacatctaaccaggtggaaaaatcaagatgcttctccagaacaggtgagatgtggtgcgcttgatgagatta

SEQ ID NO: 816544 - DNA, 120 bp, Artificial Sequence
  ENSG00000286637_20 (sequence is synthesized)
cacaggtctctctcctgctgccactttgtgggcctctctttctactgctctttcacaatggcagcaaagctcatgtctaactgaagcaaagctcatgtctaattgaagaaaatcatttcc

SEQ ID NO: 816545 - DNA, 120 bp, Artificial Sequence
  ENSG00000286637_21 (sequence is synthesized)
tgctactctgccattgctctgttggcttcatctgcagtcggctaacacttttaagaatttacctgcacacaacaattaggtatgttgggaaaatttagattttgatgtaataggtctagg

SEQ ID NO: 816546 - DNA, 120 bp, Artificial Sequence
  ENSG00000286637_22 (sequence is synthesized)
cagggatgatgtcttcaccaaaaacattaagctacattctactgaagaagttatttaaaaaagaagggccctatatactatgatcattaataaaagctcttttaggccagaaacaaggtg

SEQ ID NO: 816547 - DNA, 120 bp, Artificial Sequence
  ENSG00000286637_23 (sequence is synthesized)
gtaagactctgtgtttattattgtataaattcaacgtcagtcgtctaatatctttattttgacttaaaggatttgaatttatgtgagaagcaaatttcacactataatttataaaaaaca

SEQ ID NO: 816548 - DNA, 120 bp, Artificial Sequence
  ENSG00000286637_24 (sequence is synthesized)
attttgaaaacaatggtaatgttgatataaagtttattcttgtagtcttttaatttcattaatttttctgatatttactaatcctgtacaattttctgtgaccttataaattcattatca

SEQ ID NO: 816549 - DNA, 120 bp, Artificial Sequence
  ENSG00000286637_25 (sequence is synthesized)
agtgctgagatcttggcatcttagtcaacaaaacatctggcatatgcttgctcccttctcaacttatccacttgatcttctcccataaatttggagttcatttgcatagtgcaattgaat

SEQ ID NO: 816550 - DNA, 120 bp, Artificial Sequence
  ENSG00000286636_0 (sequence is synthesized)
tcagagcagaggagggggcaagtcagatgtgtgtttgagatgctctcttggcagccaggatggagacaagaaaagggtgaatttgagagttgaggatttatcaaacttccagcagttaag

SEQ ID NO: 816551 - DNA, 120 bp, Artificial Sequence
  ENSG00000286636_1 (sequence is synthesized)
tccctgggaaacagcaccaaaagagagataataaaggaaccaaaagaagaaaccacacaggagcagatggaggcaccaactgcataaagaatggtgactgcacacaggcaagatgcgcac

SEQ ID NO: 816552 - DNA, 120 bp, Artificial Sequence
  ENSG00000286636_2 (sequence is synthesized)
agcaggtgggaaacttctgtaacaagtatgtccacaggcagatcacctttacctgtgaggagcttgtgtgcacgagggcaacctcgcagcagcgacgcccaccacagaatgctgatggct

SEQ ID NO: 816553 - DNA, 120 bp, Artificial Sequence
  ENSG00000286636_3 (sequence is synthesized)
caatcccagcagaagtttatttagggcacagaaagctggaaacaagggcttgactggaggcagctctgcagcaggtggagatttggacagcgagggctgtcctggaggaagtcccaaggt

SEQ ID NO: 816554 - DNA, 120 bp, Artificial Sequence
  ENSG00000286636_4 (sequence is synthesized)
acggagggggcacacagaggtcttagggtctggcctcaggtgatgtccatcacatctctttctgttggtgagagctagttacctgggcccccagggtgcaaggccgagctggcatggcat

SEQ ID NO: 816555 - DNA, 120 bp, Artificial Sequence
  ENSG00000286636_5 (sequence is synthesized)
gcagaccaactagtaggatcttcttgccagctcaggggacaatgcacacatggagaagtgcagttggataccaggcatctgggaaaatgcacatgctcactctttttcaaagaaatgcag

SEQ ID NO: 816556 - DNA, 120 bp, Artificial Sequence
  ENSG00000286636_6 (sequence is synthesized)
gttccaaaaccaaacaccattagaaaatagacaccagccaacacaatcaagattagaaggtctatggtgagaccactgatggagcgtgaagctggccaaactctggagagtggttgatga

SEQ ID NO: 816557 - DNA, 85 bp, Artificial Sequence
  ENSG00000286636_7 (sequence is synthesized)
ggagcgtgaagctggccaaactctggagagtggttgatgatacgtatcaagaatccaaaatccaaggaattcgagaccagcctgg

SEQ ID NO: 816558 - DNA, 120 bp, Artificial Sequence
  ENSG00000286631_0 (sequence is synthesized)
aggagcccagctgacttcccccagtggatcgttttagggctgcaggcggagctgcccaccactcctatactgtggcgaggggcagggagcatctgtcggggagcccaagcctcaggcagg

SEQ ID NO: 816559 - DNA, 90 bp, Artificial Sequence
  ENSG00000286631_1 (sequence is synthesized)
ttatcataggagatgacagctccatgcctgtttgtgcccgtgaagacctcaataatattgatgatcctgacctgtgtaaaggccaagcct

SEQ ID NO: 816560 - DNA, 120 bp, Artificial Sequence
  ENSG00000286631_2 (sequence is synthesized)
tgatgatcctgacctgtgtaaaggccaagcctacacagcgttaactgcagtggaagattgtgcttttatcagaagcagctgaacacctgaggacaggaacatggctgaagcaattcattt

SEQ ID NO: 816561 - DNA, 120 bp, Artificial Sequence
  ENSG00000286631_3 (sequence is synthesized)
gcaggcgatactacaatatagataaaaccattgctccctgcctgctccggatgagtttgcaaagaggtatggtatagaagaaacactttgtgctttgaagcaagacaaaactgagttaaa

SEQ ID NO: 816562 - DNA, 83 bp, Artificial Sequence
  ENSG00000286631_4 (sequence is synthesized)
tctgctgtagtcccagctactcggtaggctaaggcaggagaatcgtccgaacttgggaaattgaggctacagtgagccatgat

SEQ ID NO: 816563 - DNA, 63 bp, Artificial Sequence
  ENSG00000286631_5 (sequence is synthesized)
tctgtagtcccagctactcggtaggctaaggcaggagaatcgtccgaacttgggaaattgagg

SEQ ID NO: 816564 - DNA, 120 bp, Artificial Sequence
  ENSG00000286630_0 (sequence is synthesized)
ggagtcatttggaataaactttccctgactcacaaggatcctcagaaattaggagctgttgggagaatgaggaatgacctggatgctgaagaggcacccacagatatctaagagagaggg

SEQ ID NO: 816565 - DNA, 120 bp, Artificial Sequence
  ENSG00000286630_1 (sequence is synthesized)
ggaagaggtcatttggacacagagtcgtggacatagagaggagagcaacctgtgatgatgggagcagagattgcagtggtgcgcctgcaaccaaggaacaccacggactgcccacaacta

SEQ ID NO: 816566 - DNA, 120 bp, Artificial Sequence
  ENSG00000286630_2 (sequence is synthesized)
ggactgcccacaactaccagaagcttggaagaggcaagggaggattcttccccagagtcttcaggtggtgcacagtcctgctgacaccttgttcttggacttccagcctccagaactgtg

SEQ ID NO: 816567 - DNA, 120 bp, Artificial Sequence
  ENSG00000286630_3 (sequence is synthesized)
ttgttttaagctgcccagtttgtggtcatttgtcatggcggccctacggaactagtacagcctggacaagctctaagatcttcttccaggcagagcaagacctatatcctctcccgcctt

SEQ ID NO: 816568 - DNA, 120 bp, Artificial Sequence
  ENSG00000286630_4 (sequence is synthesized)
gactctgcagataaacacatgtcctcagccaaccagatggactcaaggtgacctcacaagtgcctccctctcctgctaaggccacctgccagggtcactgtgtcactcagattcccaacc

SEQ ID NO: 816569 - DNA, 120 bp, Artificial Sequence
  ENSG00000286630_5 (sequence is synthesized)
agacaccataatttaattagaaaaggggagatttaagatagaaaaacaatacaggacatgggttttctgagcatgaaatagctcctgaacccaagaaaaatttcatgttccagtagaagg

SEQ ID NO: 816570 - DNA, 120 bp, Artificial Sequence
  ENSG00000286630_6 (sequence is synthesized)
gcattgatgacaaagcctgcttctgccgtttacttgctggggctttggataagacacttgagtgctgtgaatatcaagctggtcatctttaaaatgggtctatcattcctgcctggccaa

SEQ ID NO: 816571 - DNA, 120 bp, Artificial Sequence
  ENSG00000286630_7 (sequence is synthesized)
ttgcttagggttgtttggggaacaattgagagagaccgtgagtgaaccaggttgaaatggaaattgcatatgagtctgaggcattgatttttattagggaggctacaaaacccagttttt

SEQ ID NO: 816572 - DNA, 120 bp, Artificial Sequence
  ENSG00000286630_8 (sequence is synthesized)
agtgagagagggagaaagtatgagagggagatgctactggaatttaatactagtgagtttctcaggcagagctcaggatgaagaaatttatttgctcaaggtcaaccagcaaaaactgga

SEQ ID NO: 816573 - DNA, 120 bp, Artificial Sequence
  ENSG00000286630_9 (sequence is synthesized)
aaagacctacaactagaatttggggtataaaattgtatacttgctcctgttctaccttctcactgaccccttccctccaacctgctctatgtattttctttttgagacagagtcttgctc

SEQ ID NO: 816574 - DNA, 120 bp, Artificial Sequence
  ENSG00000286633_0 (sequence is synthesized)
tcagagagtggtctgattaaatagcactccatctctgggtttttttttttttcctttttcttccagagaggtgagcatctgcagaatgctgtctggcacactgtgttcattagaataagc

SEQ ID NO: 816575 - DNA, 120 bp, Artificial Sequence
  ENSG00000286633_1 (sequence is synthesized)
aaaaatagcatcccacctactgaacagctgtcattgatgttcagattgctgttttgcttttttcttttctttgtttttaaaacatcattaaataagcatggatctccccaaagaagctct

SEQ ID NO: 816576 - DNA, 120 bp, Artificial Sequence
  ENSG00000286633_2 (sequence is synthesized)
aacgtttgattggataattctcaggatgtattttctgaaagatgagggaactgaaatccgtgagctttaaaccgcttgcttgaagacacggctgacatttgtggctgaatcctaatgtag

SEQ ID NO: 816577 - DNA, 120 bp, Artificial Sequence
  ENSG00000286633_3 (sequence is synthesized)
gagtcttcgaaaccttttgtgtgaatccaggagggaaaattgtctggcaaagtctgataagcatcgtgtcaagagcacatttgtactctggatgggaggtgaagggaagagcagcatcat

SEQ ID NO: 816578 - DNA, 120 bp, Artificial Sequence
  ENSG00000286633_4 (sequence is synthesized)
ctgtgcagcctggtgaaacggtgtttacgacagtctacacggcactactgggtatgctgtctccttggattgtgtcatatttttaacccagtgggaaattcataggatcctcttgactct

SEQ ID NO: 816579 - DNA, 120 bp, Artificial Sequence
  ENSG00000286633_5 (sequence is synthesized)
gtaaaaactgtgggacaattcagtcacttttaccaaatcctcatttccttttcaaaccctgtttactaactgatgccaaatagtattatagtaattgggaaataaaggaagtccctctcc

SEQ ID NO: 816580 - DNA, 120 bp, Artificial Sequence
  ENSG00000268560_0 (sequence is synthesized)
ataactaaaataaacaagcccttcggtactccgtattggtttcttcattcctcaatttaccacaacatttttggtgaccacgaagggaccagagagggcaggcttactgtctcctttgcc

SEQ ID NO: 816581 - DNA, 120 bp, Artificial Sequence
  ENSG00000268560_1 (sequence is synthesized)
tctggggactggagcgtgagcctcgggaaacctgtggccccaggtgccactgggagaacttcagcccggaggggagatcagctgtcttttcacccagtgccccctacccagcagtgcaat

SEQ ID NO: 816582 - DNA, 120 bp, Artificial Sequence
  ENSG00000268560_2 (sequence is synthesized)
ttcagaaacagcgtgcttcaggaagcacgtttcaggtgctgtgtcttggatccaccacagtcggctaaaaccggcagctcaggacaagtgaaccagccagcaggacccagatcatccaac

SEQ ID NO: 816583 - DNA, 120 bp, Artificial Sequence
  ENSG00000268560_3 (sequence is synthesized)
ctggctgatcctgaggcgagaccaagctgctgctgaggacaacagccctgctctggtcactccagaggctgaccagtctatgcatggctgaagcttgaggaaacaacaagccctgctcta

SEQ ID NO: 816584 - DNA, 120 bp, Artificial Sequence
  ENSG00000268560_4 (sequence is synthesized)
gtcacacaccagaagctgactagtctatgcacggccaaagcttgaggactcatcaagcaagtaaatgcagttagaaatcttaggactagtagttttactgtatactaactgtttgactgt

SEQ ID NO: 816585 - DNA, 120 bp, Artificial Sequence
  ENSG00000268565_0 (sequence is synthesized)
tttggtttgtttcctttaattaaatctcaaatttacaagagtccagactgtctggacagcccaacagggacacagagagttttacacactgatgtctcaacagcacagggttccatcggg

SEQ ID NO: 816586 - DNA, 120 bp, Artificial Sequence
  ENSG00000268565_1 (sequence is synthesized)
cttgaagagctgtctctcggcctaagataagtggagaaggttgccttggaagcgtggggtagaggtaggaacagctggctctctggccaaggcctttggctttttcgcggaagcaaaaac

SEQ ID NO: 816587 - DNA, 120 bp, Artificial Sequence
  ENSG00000268565_2 (sequence is synthesized)
cgaaccacgggaaggctgctccgagtctggggtcagaatttcctatcagtgagtgcagcagacaaattccaaatgtctcaaatactgaatggagccagctagacctaccttctcaccaag

SEQ ID NO: 816588 - DNA, 120 bp, Artificial Sequence
  ENSG00000268564_0 (sequence is synthesized)
cccaactccagctgcctcacagccctacacatccaaggcttgctttaaatctcctaagtcctgaagaaaatgaagacagaaagaacagcacctactttcaaggaaaaggaggccacgccc

SEQ ID NO: 816589 - DNA, 120 bp, Artificial Sequence
  ENSG00000268564_1 (sequence is synthesized)
gcggggccgtaccagagcaagaccatgtctcacaaaataataataatacttaaaaaatggtaaattttatgttatgtatattttccacactataaataaatatttgtgcatgtatatata

SEQ ID NO: 816590 - DNA, 120 bp, Artificial Sequence
  ENSG00000268566_0 (sequence is synthesized)
atagccttaagcttattatgaagcagtgggaaaatcacctgagagcaggaagtcctgcgtagctaaaaactgaatgtagatgtagggaattgccctcctacgaactaagtaaaaacagat

SEQ ID NO: 816591 - DNA, 120 bp, Artificial Sequence
  ENSG00000268566_1 (sequence is synthesized)
tcgaaactttatcctaattggaattaaactactgcattttaagtcaaaggtgtggaggtaaatgaacaaccaaatgagaccaaggaaaggctattattcagagcttgcgatagcaaagga

SEQ ID NO: 816592 - DNA, 120 bp, Artificial Sequence
  ENSG00000268566_2 (sequence is synthesized)
actagcattttgacggaaacataaagattctgtggatgaataattcagaaacgttccagttggatggactgattcagggtctctcatgatgctgcagccaagaaaaataaagagatagaa

SEQ ID NO: 816593 - DNA, 120 bp, Artificial Sequence
  ENSG00000268566_3 (sequence is synthesized)
tatggacacttgggaaataataagaaaagtgagacagcactgctactgatttaaagtcagaaaaagaccactcctgggagaaacacaagttacatggtattgctcttctcacatgaacca

SEQ ID NO: 816594 - DNA, 120 bp, Artificial Sequence
  ENSG00000268566_4 (sequence is synthesized)
tctccacaaccaacgtgccctgaatcccagtgcttggccaaccccatcactagtaatcaaccatcatcccaagaagcgaacataatcagaagctaaatcaaataaatatgtcttactctc

SEQ ID NO: 816595 - DNA, 120 bp, Artificial Sequence
  ENSG00000268566_5 (sequence is synthesized)
gactgattcagggtctctcatgatgctgcagccaaggtttctattacatgaagtaaagcatctgtaacctagaaatgatgggtaacgttcaaagctgatatcccagatgattctgctatg

SEQ ID NO: 816596 - DNA, 120 bp, Artificial Sequence
  ENSG00000268566_6 (sequence is synthesized)
acaaacaatctttaggaagctaaactaaggtataaccattttccaaaattcccgatttcatctattttagaaaaagaccactcctgggagaaacacaagttacatggtattgctcttctc

SEQ ID NO: 816597 - DNA, 120 bp, Artificial Sequence
  ENSG00000268566_7 (sequence is synthesized)
gtggacaaagggaagggttcagatatgctctgactgaaagctaaaaataaagagatagaatatggacacttgggaaataataagaaaagtgagacagcactgctactgatttaaagtcag

SEQ ID NO: 816598 - DNA, 120 bp, Artificial Sequence
  ENSG00000245888_0 (sequence is synthesized)
tccaggcatgtgtgggccattgcagcctgaattaatcaggagggaagaagaagtgcgacgataactggccagtgatacacagtgggagacagactgcggaactgcccatgaggccaagca

SEQ ID NO: 816599 - DNA, 120 bp, Artificial Sequence
  ENSG00000245888_1 (sequence is synthesized)
gacccggctactttctttcaacagttacccactgtaaatttccgaatactttcagctactaatcccagtgtacccaattaaaaatggctttcctaataaaggcatttcagatcgaattta

SEQ ID NO: 816600 - DNA, 120 bp, Artificial Sequence
  ENSG00000245888_2 (sequence is synthesized)
ccggttctccgtttgcgccattgccctggtggttccgcctcgtgggttagatcccaaattacgcccgctctcgatccttaataatgggaaggggcttccacttgtcgccctccgcctcct

SEQ ID NO: 816601 - DNA, 120 bp, Artificial Sequence
  ENSG00000245888_3 (sequence is synthesized)
gcacctcagtgacttccctgaccaaggaggaagaattggcgtgcagcctgggcttccctcaatggccaccattccgctggcacaatgtagtgccctgccccgggcctcagtttccccatc

SEQ ID NO: 816602 - DNA, 120 bp, Artificial Sequence
  ENSG00000245888_4 (sequence is synthesized)
cgggcctcagtttccccatctgtggaactgagtgtggcctcgacgtcaaaaatgtggactctggtccggtcgcggtggctcacgcctgtaagtaatcccagcactttgggagaccaaggc

SEQ ID NO: 816603 - DNA, 120 bp, Artificial Sequence
  ENSG00000245888_5 (sequence is synthesized)
cccgagaggcagaggttgcagtgagccagatcgtaccacagcactcgagcctgggtgacagagctcaaaaaaaaagaaaagaaaaatgtggactctgtggtcatagagcctgatctagaa

SEQ ID NO: 816604 - DNA, 120 bp, Artificial Sequence
  ENSG00000245888_6 (sequence is synthesized)
ggtgagatttacaagagataataacacctatatcaggtgcttagcatggccattgaaaagtgtcacatgggagtgctgattatatgttaactgttatcttacctagggattgtgagaaag

SEQ ID NO: 816605 - DNA, 120 bp, Artificial Sequence
  ENSG00000245888_7 (sequence is synthesized)
caagtgaaattactcgtggaagtgaatggactgctttgagtcttcaaggcgttaattttccaaacgtttgaattctatccctggtctgagagctagggatgcagcctagcaagggaaaca

SEQ ID NO: 816606 - DNA, 120 bp, Artificial Sequence
  ENSG00000245888_8 (sequence is synthesized)
ggtaactaatatagaacagcagtacctgcaaatatctgtctctgtgaggatagatcaaatccaggcttggtcactcaccacccctgtgatcttggacaacctcttaacctctctgggctt

SEQ ID NO: 816607 - DNA, 120 bp, Artificial Sequence
  ENSG00000245888_9 (sequence is synthesized)
cagtttcatctgctaagtgggaaagcagtggtgtgtggtgattaaaagcttcagctttggagctggatggtcaacatggaatcctgggccttaaactcagtgtctctgagacataggaca

SEQ ID NO: 816608 - DNA, 120 bp, Artificial Sequence
  ENSG00000245888_10 (sequence is synthesized)
aagtacagtcagctgtccatgtttacaggttccccatctacggattgaagcaactgtgggtggttaatatttgtgggggaaaacagtaaaaaataacagttcaacaataaaaataataca

SEQ ID NO: 816609 - DNA, 120 bp, Artificial Sequence
  ENSG00000245888_11 (sequence is synthesized)
gcagcctcagcaccccctgggagctcgagacatctaaggagttgactgaggcccctccctgacatactgaagcggaatctgcattttagcaagatctgcaggtagtggaatctaccacat

SEQ ID NO: 816610 - DNA, 120 bp, Artificial Sequence
  ENSG00000245888_12 (sequence is synthesized)
attgtaagtaatttaaagatgattttcaatatactggaggatttgtgtaggttaaatgcaagtattctcgcattttgtaagcacccaatggttctccttgcctgcttcctagacagaacc

SEQ ID NO: 816611 - DNA, 89 bp, Artificial Sequence
  ENSG00000245888_13 (sequence is synthesized)
aagacaggggaattgcaatagagaaagtttaattcacacagagctggctgaacaggagaccacgaaattcagggttttcaaggataatt

SEQ ID NO: 816612 - DNA, 120 bp, Artificial Sequence
  ENSG00000245888_14 (sequence is synthesized)
ggataatttggtggctggaggtgctggggattagagagtgttgataggttggatcagagaggaaaggagtcaaagctgtcctcttgcactgagtcagatcctgggttaggaccataggac

SEQ ID NO: 816613 - DNA, 90 bp, Artificial Sequence
  ENSG00000245888_15 (sequence is synthesized)
gctggtgcattagaacacgggttctgcaaaatatctcaagcactgattttaggttttagaacagtgatgttactcccggaagcaatctgt

SEQ ID NO: 816614 - DNA, 120 bp, Artificial Sequence
  ENSG00000245888_16 (sequence is synthesized)
tttgttagtctacaaaggcagacccgttcctaggcaaggaggggatttgttttgggaaagggctattattgcctttgtttcaaagttaaactataaactaagttctttccaacattaatt

SEQ ID NO: 816615 - DNA, 120 bp, Artificial Sequence
  ENSG00000245888_17 (sequence is synthesized)
ccacctatgtccaggaatgatcaaggacagcttggaagttagaagcaagatggagtcaggccagatctctttcactatcataattttctcagttatgctttttacaaaggtggttttgat

SEQ ID NO: 816616 - DNA, 120 bp, Artificial Sequence
  ENSG00000245888_18 (sequence is synthesized)
tttacataagggacttgagcatcgagaattttggtatccatggggactaaggtaccaatccctcacagatactaagggatgactgagctcaagttttcagcttcagtttgctcatctata

SEQ ID NO: 816617 - DNA, 120 bp, Artificial Sequence
  ENSG00000245888_19 (sequence is synthesized)
aagcaggtttaataataacactttgttgataatgttattctgaagattaaaggaagagtaaacgtaaactacttagaagagtgtctctggcacattgtaagccctcaataagtgtgaact

SEQ ID NO: 816618 - DNA, 120 bp, Artificial Sequence
  ENSG00000245888_20 (sequence is synthesized)
aacaccactaataagttctttataaactgcctaataggtagtcaaataagaggggaaataaagccctaaggagtaatatttgtgttttgtttgccctacatggttttgtgaaattttcta

SEQ ID NO: 816619 - DNA, 120 bp, Artificial Sequence
  ENSG00000245888_21 (sequence is synthesized)
ttcattatcaatatttaaagttggggttttcaatctttgactgggcatgatggctcattcctgtaattccaacactttgggaggcccagctgggaggatggcttgagctcagaagtttga

SEQ ID NO: 816620 - DNA, 120 bp, Artificial Sequence
  ENSG00000245888_22 (sequence is synthesized)
gaggcccagctgggaggatggcttgagctcagaagtttgagatcagccatggccaacatggtgaggcccccatctctacaaaaaaaatatatacgcgcgcgcgcacacacacacacacac

SEQ ID NO: 816621 - DNA, 75 bp, Artificial Sequence
  ENSG00000245888_23 (sequence is synthesized)
agcttgagccaaggaggtgtgacagagccagactctgtctcaaaaataaataaataaacttgggacatttcacat

SEQ ID NO: 816622 - DNA, 120 bp, Artificial Sequence
  ENSG00000245888_24 (sequence is synthesized)
tgtctcaaaaataaataaataaacttgggacatttcacataaaaccctactgtagctgactgctctggaaaagtggggaagtctgacgacagtgggccagccttcccccatggcagcact

SEQ ID NO: 816623 - DNA, 120 bp, Artificial Sequence
  ENSG00000245888_25 (sequence is synthesized)
tgttcagaacttgggagagaccgtccccttttgtgaagcatgtgcttccctggtgtgtggagagataaaagaatagaaaacgctgggaacaccagcatttcaagatcaaagcgtcaagaa

SEQ ID NO: 816624 - DNA, 120 bp, Artificial Sequence
  ENSG00000245888_26 (sequence is synthesized)
cctcggggctgtaacataagcggctgcggacttgtacaaacagcctcagcaccccctgggagctcgagacatctaaggagttgactgaggcccctccctgacatactgaagcggaatctg

SEQ ID NO: 816625 - DNA, 120 bp, Artificial Sequence
  ENSG00000245888_27 (sequence is synthesized)
cattttagcaagatctgcaggcatgtgtgggccattgcagcctgaattaatcaggagggaagaagaagtgcgacgataactggccagtgatacacagtgggaggtctggaagaatgcaca

SEQ ID NO: 816626 - DNA, 120 bp, Artificial Sequence
  ENSG00000245888_28 (sequence is synthesized)
ccaatgctcacagaggttccatctgggaaatcggattggacagggccagaatagatccggggaaacattcactgaatatatatacttatgtattgtggaagctttgatggtggtcatgta

SEQ ID NO: 816627 - DNA, 120 bp, Artificial Sequence
  ENSG00000204011_0 (sequence is synthesized)
tctcttctctccagcgcttctcccctggcaggtgccctccccaccccacgaccaccattaatgctgaaatccaagaccctgggctcgaggacgcagaacgactcgtggtttgcaaagtgt

SEQ ID NO: 816628 - DNA, 120 bp, Artificial Sequence
  ENSG00000204011_1 (sequence is synthesized)
ggcacccccagacgctccagcatccgcgtggtctgggaactgacttcgttagaaatgcagtttcctgggcccacccaaggcctcctgagtcagaaacaatctgtgccttaagagaggcct

SEQ ID NO: 816629 - DNA, 120 bp, Artificial Sequence
  ENSG00000204011_2 (sequence is synthesized)
ctccctcctgtctgacaatgagccatgagaagaccatgggaaaaaaaagaggccaccagaaaccctattgccgaggtcctggcaaggaagaaaaggacagaagagctaatttccctacaa

SEQ ID NO: 816630 - DNA, 120 bp, Artificial Sequence
  ENSG00000204011_3 (sequence is synthesized)
gaacacgggtctaggaaacagaaaataaaggaagcttccatttcatgggcagagacatctcggcaaataggctgagcccatgtccccagagctctgagtaattaaattttgagaaaagtg

SEQ ID NO: 816631 - DNA, 120 bp, Artificial Sequence
  ENSG00000231651_0 (sequence is synthesized)
cacagggcctaggtgtcccaggagcccaggcgctgcagccctaggggacaaaggggaggaggaggcgaaagaagtcgggaatgattctcctatcctaccaacccgtgtgatggaccctgg

SEQ ID NO: 816632 - DNA, 120 bp, Artificial Sequence
  ENSG00000231651_1 (sequence is synthesized)
gtgcacacttacttcacagacactcttctgcagtctcaaaatctcacccatcaactatgacccctcctacctgctgccccaacaacatatttaatcagcagctaacactatgtagcccca

SEQ ID NO: 816633 - DNA, 120 bp, Artificial Sequence
  ENSG00000231651_2 (sequence is synthesized)
gggggttgcagcgcctgggttcttagggggatcccaggtccccaaaaggagtttagaatccaaactgaagagagcagacaagcacatgagaaatgcgaataaaactaaccacatctaagg

SEQ ID NO: 816634 - DNA, 120 bp, Artificial Sequence
  ENSG00000231651_3 (sequence is synthesized)
atcttgaggcactgaaggagcatggggggaggggaacggaaaggacaaagattctcctatcctaccaacccgtgtgatggaccctggaccacaagaagaggaagcagttaggggcagtgg

SEQ ID NO: 816635 - DNA, 120 bp, Artificial Sequence
  ENSG00000284601_0 (sequence is synthesized)
gctccagggcgggcttggaaatggagacaaactcctccgagccgttaaggctcagccggacagggcttaggagtcccgagcccagtcctgttcacccccattttatagaaagggaaactg

SEQ ID NO: 816636 - DNA, 120 bp, Artificial Sequence
  ENSG00000284601_1 (sequence is synthesized)
aggcccagacaggggaaagtcacttgccgaggtgtttgctgcagactgcgttgaccgaacctgctttttcacagcagtcagacagcaagccctcccgtccctccaggaccctagttcctg

SEQ ID NO: 816637 - DNA, 120 bp, Artificial Sequence
  ENSG00000284601_2 (sequence is synthesized)
gggaggaaggcgttctcagcgataatgaccagcattaaagtgctccccgttaccggcgtcactgccccagccagtggaggccccggagagggactgaagatgtgtcacctaacttctctg

SEQ ID NO: 816638 - DNA, 120 bp, Artificial Sequence
  ENSG00000284601_3 (sequence is synthesized)
aaccttcctccctcaaggagaactgataatccctaactcacagttctgtgaggattgaatgccttaagcatgcaggttaagtggctactgaaggcagtttttgtggacagaaactggtcc

SEQ ID NO: 816639 - DNA, 120 bp, Artificial Sequence
  ENSG00000284601_4 (sequence is synthesized)
tggccatcagcttctgcctcaagcgggtgctgtggcaaggaagacagagcatgtgtgttgtgaacactcattagaggatcatccctgctgtgccaggtgccatggcgctggatgcagaaa

SEQ ID NO: 816640 - DNA, 120 bp, Artificial Sequence
  ENSG00000284601_5 (sequence is synthesized)
gcaggacacatggaaagatggtgtgttcacaaagaatttggaagaaagccagatggtgacaagagtgtgtctctgaatgccccttttgggggtcactaaaaatgccccagggtttttagt

SEQ ID NO: 816641 - DNA, 120 bp, Artificial Sequence
  ENSG00000284601_6 (sequence is synthesized)
tagaccaaaaaggaggcttcaaagagatgacttctgagccgggttgtgatacatctaggatgtcaacaggcagagaaagggcagggactgggagtaaggaaagaacatctgttcaaggca

SEQ ID NO: 816642 - DNA, 120 bp, Artificial Sequence
  ENSG00000284601_7 (sequence is synthesized)
aaacactgattaccaaagtttctatcatccttatgttgacaacggacataattttaaccttttgtataagccagactgtaaaggattattagcagaataaaagcatctattgggcctggt

SEQ ID NO: 816643 - DNA, 120 bp, Artificial Sequence
  ENSG00000284601_8 (sequence is synthesized)
gaaaactggccatcagcttctgcctcaagcggtgaaaagaaattgctggacattgcagaaaaatcagaaaatgtcagtaagttaaaagaaatcaggccaggcacagtggctcaagcctgt

SEQ ID NO: 816644 - DNA, 120 bp, Artificial Sequence
  ENSG00000284601_9 (sequence is synthesized)
tttgggagcctggaggaagggttacgtgcgcgcgcgtgtgtgcgtgtgtgtgtgcgtgtgtgtaagaatctttccgtgagaggacatctgaggtgccttaggagagtaggagtggacaac

SEQ ID NO: 816645 - DNA, 120 bp, Artificial Sequence
  ENSG00000284601_10 (sequence is synthesized)
agcatccaggcagaaggagcagcatcccaaggatagaaggtggagcagcctggccggcagggatctgaagcccagagagaggaagccactggctccaagtcacagagcagaaactggtcc

SEQ ID NO: 816646 - DNA, 120 bp, Artificial Sequence
  ENSG00000255933_0 (sequence is synthesized)
ccagcttgttccagcctcctgcctgcccctctgtggctgacagtcgactcccctggagtcactgccctgagtctcaagggtacttctctgcaagctccaggccaccaatgccaccagaaa

SEQ ID NO: 816647 - DNA, 120 bp, Artificial Sequence
  ENSG00000255933_1 (sequence is synthesized)
tctctgaagtcgctccagtggcttaaccgcatcacaaagtcaccagactggataaagttattccgctgacctaaagcctgtcagatgtgctggcccctccccgacagggtgcaccggggc

SEQ ID NO: 816648 - DNA, 120 bp, Artificial Sequence
  ENSG00000255933_2 (sequence is synthesized)
acggggccgggcagctcgcaccacggggctcctgcctagggctgcacccctgcctcagagcttcccgttcctctcgcaacaccagctgaacgcctctactccacagaacctccctcccgc

SEQ ID NO: 816649 - DNA, 120 bp, Artificial Sequence
  ENSG00000255933_3 (sequence is synthesized)
ggggggagcccactgctgctccacgaggttcctggctaagggcctgctctggcctttgcttctgtctgctttttaattacactgactttgtatttttacatgcctgtctgtcctgtgaca

SEQ ID NO: 816650 - DNA, 120 bp, Artificial Sequence
  ENSG00000255933_4 (sequence is synthesized)
tcaaagtcttgctccaagaacataacaaagtaactgaaatcgagtgagtgaagtattgcctggtagagattctcaaggaatctgctttgacaaattaataaatgaatttcactggtacaa

SEQ ID NO: 816651 - DNA, 120 bp, Artificial Sequence
  ENSG00000255931_0 (sequence is synthesized)
agtctcctctctgaccatctggagggccacccattcctgaggaactgttccccgaacaagcaagtatgcaagggcagaggatgaatcagacccagcaggtcccactgagggcccccgttg

SEQ ID NO: 816652 - DNA, 120 bp, Artificial Sequence
  ENSG00000255931_1 (sequence is synthesized)
aagatcagaggggtctggcagggcctgtgggacatcccgccatgcctcgcttcctccccacactgctgcagacaggctctgcccaggacctttgtgatgggcaggtcaacctgaccagag

SEQ ID NO: 816653 - DNA, 120 bp, Artificial Sequence
  ENSG00000255931_2 (sequence is synthesized)
tagagtgacttgtgggaggcctgttacatcctcaggccacacctggtaagggaagcgcaggtgggtcccacctgccctggtgcccccctcaggatacctgggggtatatactttttctca

SEQ ID NO: 816654 - DNA, 120 bp, Artificial Sequence
  ENSG00000255931_3 (sequence is synthesized)
tgccacccccaggctctgcccagatggggctgacgactggtttttgggctggcatccgtgtttccgggcgctgcttgcccgttctctcccacctgccggttgaaccttaatctccttttg

SEQ ID NO: 816655 - DNA, 120 bp, Artificial Sequence
  ENSG00000255931_4 (sequence is synthesized)
ttacacacctagggagtttgctgttggcctgcgaagaccctttatgggacatggatcaaaagtgctgttcctcgagatacttacctccagtataggatcctggtgtcaaaaggaatcaga

SEQ ID NO: 816656 - DNA, 120 bp, Artificial Sequence
  ENSG00000255931_5 (sequence is synthesized)
tacggctccattgtacatggcatgacttgtatagccagacagagcaggtgtggaaacttctggatgcctgctcttgtgagttcacctctatgtctactctactgaggcctctccatacag

SEQ ID NO: 816657 - DNA, 120 bp, Artificial Sequence
  ENSG00000255931_6 (sequence is synthesized)
gtctcagtttcctgccttcctgggaagtggggaaaggctgagaggccccgtgctgggggtgaagctaattcattagttacgcctcaacaaggaccgggtgcctgcagtgccagcgtgatt

SEQ ID NO: 816658 - DNA, 120 bp, Artificial Sequence
  ENSG00000255931_7 (sequence is synthesized)
catcatgatgattgccccactgccagcctgcgtgggcctggaacgccagcacattttacctttacccactgagaagggcctggtgggaggtgaaggtacaggatctgccgagagcaagaa

SEQ ID NO: 816659 - DNA, 120 bp, Artificial Sequence
  ENSG00000255931_8 (sequence is synthesized)
ggaagctctgccaggctggtgccggggtggagaggctcatgtgggctcatgtggtgctgcctgtgctgatggagcccaagagggcagcctggcgctgggtgccagcctgagcatgtggcg

SEQ ID NO: 816660 - DNA, 120 bp, Artificial Sequence
  ENSG00000255931_9 (sequence is synthesized)
aggctgggctgctgagcctcctcctccacagccaatgttccctcaaactgcttgggggtggggggagggactcatcctcatcccattagcctggctgggtattccctacctttctggtct

SEQ ID NO: 816661 - DNA, 120 bp, Artificial Sequence
  ENSG00000255931_10 (sequence is synthesized)
ctgagagacttacctcttccaagaagtcctcccgaatgagtagaagggagagagctggattggaacttaagtgacatctgggaggagcctgaagcccctccggttggggctgagactcct

SEQ ID NO: 816662 - DNA, 120 bp, Artificial Sequence
  ENSG00000255931_11 (sequence is synthesized)
ataccctaggtctggtgtctgggttccacctgggtcctctaccttggcctggattcctgctttcgttttgccagtctctcccaggatgggggtgcatggctggttcgtggctcagagcaa

SEQ ID NO: 816663 - DNA, 120 bp, Artificial Sequence
  ENSG00000255931_12 (sequence is synthesized)
catctgcctctgtgtccccccatcatctgtccgccccctaacacctcttgccatattagaattgctattgctctgtcctttcattcatgtatccaacaaatatatattatctgaaaaaaa

SEQ ID NO: 816664 - DNA, 120 bp, Artificial Sequence
  ENSG00000255931_13 (sequence is synthesized)
cggctccattgtacatggcatgacttgtatagccagacagagcaggtatatgtgtggaaacttctggatgcctgctcttgtgagttcacctctatgtctactctactgaggcctctccat

SEQ ID NO: 816665 - DNA, 120 bp, Artificial Sequence
  ENSG00000279317_0 (sequence is synthesized)
ttcccacccctgctttgctatttttgtacctccgtgacagaaaaacaaaaccctgaggaaaagtcaggcgacttcattccctgccgtccgcgccggggcctcgactactgctggcgtccg

SEQ ID NO: 816666 - DNA, 120 bp, Artificial Sequence
  ENSG00000279317_1 (sequence is synthesized)
cggctttcgcccgccgctccacaggtggataaaaccttgtatgcatcaactacctctctttcaagatggaattttcagaacacatggtctgggattggagctggagcttggaaatattga

SEQ ID NO: 816667 - DNA, 120 bp, Artificial Sequence
  ENSG00000279317_2 (sequence is synthesized)
gtgggtgagaaagacttcattgttttgtgacaggttattgtgaaaacagcccacttctgcctgaagatccaagcccaaggccttcctggccccagggattttgggattcttaagagcaaa

SEQ ID NO: 816668 - DNA, 120 bp, Artificial Sequence
  ENSG00000279317_3 (sequence is synthesized)
agaaggaaagaaaacatgagagactttggtactgggtacgagcatgaaaagagaaggattggtaaaaaatatctcttgggagctcctgctgtgatgcgagggttagtcctgccatcccag

SEQ ID NO: 816669 - DNA, 120 bp, Artificial Sequence
  ENSG00000279317_4 (sequence is synthesized)
ggcaaacttcataaaagaggtcagatccaaagattgcagaagccagaagagacactgcatccttcctggttaggcctggttatgccagcttcctggactctgctggctggttgcctcaat

SEQ ID NO: 816670 - DNA, 120 bp, Artificial Sequence
  ENSG00000279317_5 (sequence is synthesized)
ccatgcctcagattgggtggagtctacagattgagggcaaatcccacctcctcccaacccccaccactaggcctatctggaagacagaaaagagcagcaagaaatctcagggattttctt

SEQ ID NO: 816671 - DNA, 120 bp, Artificial Sequence
  ENSG00000279317_6 (sequence is synthesized)
tgattactcagagggaaatagttttcatactcagagactgataggcagtcaataacatttgctttgtgaattttcacccagctacttctggatgagataatcacctttgctgctaaagaa

SEQ ID NO: 816672 - DNA, 120 bp, Artificial Sequence
  ENSG00000279317_7 (sequence is synthesized)
aatcttagctcattttcttcttggggtgatggtataagagttgataaacaatttgtaagtatttatcatctggcatatttaacaaaatatctttgtgatccataaagcaaggcataaatt

SEQ ID NO: 816673 - DNA, 120 bp, Artificial Sequence
  ENSG00000279317_8 (sequence is synthesized)
acatttgaaagtgcattccattaaacaagaacattagagagaaagagagagagagagacactttggaccttgatctgttccaatgacatagaaacttgctttacagattggctttctcct

SEQ ID NO: 816674 - DNA, 120 bp, Artificial Sequence
  ENSG00000279317_9 (sequence is synthesized)
agtgcactattgcaaaattagagctatactagaaacatccttagagtttgataattgaattacagtggagaaaaataaggtttatatttcttaactatacctttgaatttcttactacta

SEQ ID NO: 816675 - DNA, 120 bp, Artificial Sequence
  ENSG00000279317_10 (sequence is synthesized)
cagaggataattttcctggtccctggggttagtggtgaaaaactaattgttttattaaattcatgcctcattcttgtgaccccagattttcgaatttgaataggaatgcagtcaaggggt

SEQ ID NO: 816676 - DNA, 120 bp, Artificial Sequence
  ENSG00000279317_11 (sequence is synthesized)
gaattctgacatcttcattctttacttagctcttaaaagccaagatactttatattacttgtttatactaatctttgatcacaatatatttacattgctggcaagtaaagtctcttaata

SEQ ID NO: 816677 - DNA, 120 bp, Artificial Sequence
  ENSG00000279317_12 (sequence is synthesized)
atatagcagcaaatattagctcttcattcaaaattgttattattcgggagtactatacatggtctcttacattaggatttatgaaagtaggaattaattatgtttatttaattcaaacaa

SEQ ID NO: 816678 - DNA, 120 bp, Artificial Sequence
  ENSG00000279317_13 (sequence is synthesized)
gtgtttttctcaaagtaatgagtgttatgaagggaacttatttgaccacatacaaccctgagattcttatctttttggcaaatagcactaactgtggaaaagcttaagatcagtggggtt

SEQ ID NO: 816679 - DNA, 120 bp, Artificial Sequence
  ENSG00000279317_14 (sequence is synthesized)
gtcggtttccccacacgttgagttgatgataggttataataaaaatatcagaccaaattctgccacttatataggcatgtattaaacatgtatttgtaagcaagtatacaacagttcata

SEQ ID NO: 816680 - DNA, 120 bp, Artificial Sequence
  ENSG00000279317_15 (sequence is synthesized)
gaaatccaatggatggacactggattctttgaggatcaagcttgaggtgccaagcatgggatgcatttctgaaatatttgagtttaatcgtatatcttgaataccacttattattccagt

SEQ ID NO: 816681 - DNA, 120 bp, Artificial Sequence
  ENSG00000279317_16 (sequence is synthesized)
gagatctgattgatgattaacttattgaacaagtcactaattttaccaatgaaaatatatttctgatgtttactttgctaattagcaagacatctgggtttggtatacacatctggtgag

SEQ ID NO: 816682 - DNA, 120 bp, Artificial Sequence
  ENSG00000279317_17 (sequence is synthesized)
agatgaagggcagaaattgaggcacagaaacaataagtggtttcccttaagatcagatagctagtaagtgtctcagcttgtttgtgcatcccacagtgaggagcctgtgtttttttaaat

SEQ ID NO: 816683 - DNA, 120 bp, Artificial Sequence
  ENSG00000279317_18 (sequence is synthesized)
ctctctggattagttgtgctggtaagttctctagaagcaacttgactccactgttttgagggcagaaataaaatgaacaggctataattgaggttgtagaagagataaaagaaaatctgt

SEQ ID NO: 816684 - DNA, 120 bp, Artificial Sequence
  ENSG00000279317_19 (sequence is synthesized)
gatgcaagtaactacacagagtcctgtctgtgaaatgcaggaggctgtccataactaaaggcatctacctttagaaaggcagtatcagattgtcacttatcttgatggtcatgagatagg

SEQ ID NO: 816685 - DNA, 120 bp, Artificial Sequence
  ENSG00000279317_20 (sequence is synthesized)
gatgttctggttaataaaatattctagttagtagagattctcagtagactctatactctaatttctcatttaaaagaaattggactcttacaaaataaacatgatatgaacccagaattt

SEQ ID NO: 816686 - DNA, 120 bp, Artificial Sequence
  ENSG00000279317_21 (sequence is synthesized)
aacttactattttcttactgttatcccaaagacattacatgatattgaacactttgaggtaattatggtactgggggagcataattgttcctactaatagaaacaaaatactaaggattt

SEQ ID NO: 816687 - DNA, 120 bp, Artificial Sequence
  ENSG00000279317_22 (sequence is synthesized)
ttctagaaactcttaagagccatttacctggctaaggatttttctagaaactgtcctttcaagagccatttacctggaataaaagtgatgtgtatgataaacagttggctatacagaccc

SEQ ID NO: 816688 - DNA, 120 bp, Artificial Sequence
  ENSG00000279317_23 (sequence is synthesized)
aagatgaaattcaaaatatgacttctgaaaattctgaattcaaaatcaagtttttgatactttaggatcagctagatgatcatcataaatttgtctcctttccacttcaattttttttca

SEQ ID NO: 816689 - DNA, 120 bp, Artificial Sequence
  ENSG00000279317_24 (sequence is synthesized)
tcttcaccaatctacactatattcaagccaacttaccatttcccttactccgttttccctgcaacttccctaagctgttagtgttattgtactactcttctttatgccacttaggcttga

SEQ ID NO: 816690 - DNA, 120 bp, Artificial Sequence
  ENSG00000279317_25 (sequence is synthesized)
attcttggcccaatttctctcacttctgcatgaagtcaccaaatgccagtgattctgcttctaacatatttcagacatcatttctgtccattcccactaccagaaagaaactctgtgtta

SEQ ID NO: 816691 - DNA, 120 bp, Artificial Sequence
  ENSG00000279317_26 (sequence is synthesized)
gtttttcttttacctttattgactttttataatagcatttatggcgtgttgaattgtggccccccaaaaatatgtccaagtcttaaccctggtgcctataaatgtgaccttatttgggaa

SEQ ID NO: 816692 - DNA, 120 bp, Artificial Sequence
  ENSG00000279317_27 (sequence is synthesized)
aagagtctcacagatgaaattaagttaaagatcttaccctggattaaccaggtagatgctaaatcgaataaaaaagtgtctgtacaggaagagaagaggagaatcacagagaagaaagcc

SEQ ID NO: 816693 - DNA, 120 bp, Artificial Sequence
  ENSG00000279317_28 (sequence is synthesized)
atgtgaagatggtaacagacactggagtctgtaaccccaagtgtaatgcgacgggttctccaccaggttacttaagggtgtatgtccactgcttgagccctgaagactgggtggtgagcc

SEQ ID NO: 816694 - DNA, 120 bp, Artificial Sequence
  ENSG00000279317_29 (sequence is synthesized)
aaggtcatggtgctcagccaaggaacaccatgtgctgtgttccctgagaacacaaacatttgggagagtacctggggacataccaagaaaaacactcatcacacacagagaagaaaagcc

SEQ ID NO: 816695 - DNA, 120 bp, Artificial Sequence
  ENSG00000279317_30 (sequence is synthesized)
agaaaattagcttaaaagcagcttgaagatgggtggggtaagggggtgtgtggggcaaatctccagagttgtcctgctaccacctaggaatgccctgtatgttaagtcctaataaactca

SEQ ID NO: 816696 - DNA, 120 bp, Artificial Sequence
  ENSG00000279317_31 (sequence is synthesized)
ccatgtccgaaacacaggggcggcggggcgacggaggcgactctgcggctactcggcgactcggggcagggtccccgggagggaggacgatcagctgaggcgtccacctgtggtgtcctc

SEQ ID NO: 816697 - DNA, 120 bp, Artificial Sequence
  ENSG00000279317_32 (sequence is synthesized)
ccaaaaaagcgctcgcgcgcgcccttccggagccccaaccacgccacaggctggtcgcgagggaatacgcccgtcttggctgtcagcaataggattttacagcgaaactgctgcctttgc

SEQ ID NO: 816698 - DNA, 120 bp, Artificial Sequence
  ENSG00000279317_33 (sequence is synthesized)
ttgcagcattctttcttgtttatcgaagcagctctgagcctttttagcgtcctgaagcgctttgagtaacggatgaaagctatggagcccccaaatacgcgcaaatacctaaccataaaa

SEQ ID NO: 816699 - DNA, 120 bp, Artificial Sequence
  ENSG00000279317_34 (sequence is synthesized)
aagcggctcggagtgttctggaagtggcaggagcacgactcccttaactctggtgcagggtttacctcggctccctcgggacgggttccgtgcagctcctgcttcctcccttctctttcc

SEQ ID NO: 816700 - DNA, 120 bp, Artificial Sequence
  ENSG00000279317_35 (sequence is synthesized)
caaagcgctaggattacaggtggataaaaccttgtatgcatcaactacctctctttcaagatggaattttcagaacacatggtctgggattggagctggagcttggaaatattgagtggg

SEQ ID NO: 816701 - DNA, 120 bp, Artificial Sequence
  ENSG00000245598_0 (sequence is synthesized)
tccaccctcttgcgggcgagcgctggctaccattggactgtccggcgcgaggggaagggtgatctataaatagggaatgggtacacgtgacagtttggcagctgctcctacccctccacc

SEQ ID NO: 816702 - DNA, 120 bp, Artificial Sequence
  ENSG00000245598_1 (sequence is synthesized)
ccgcccaaccttcagcttctgaggctgcgcagggggagaaaagggttagggggtcgagccctgacttcgcctcctcttccaagaagccttcccagacactcagctgtaaaaccagacgga

SEQ ID NO: 816703 - DNA, 120 bp, Artificial Sequence
  ENSG00000245598_2 (sequence is synthesized)
cgtcctccgatgaaattgtttctacttagggccggcttcaccggcttggaatccacttagaagggtcttcgcgcttggttgaatgttctgcaatttctgtcttgaaatttttagtttttg

SEQ ID NO: 816704 - DNA, 120 bp, Artificial Sequence
  ENSG00000245598_3 (sequence is synthesized)
agcaaggggccccttattttcactttgcactaggccaaatatgtagccggtcttgctgctaagagtctaagatcgattgcattccaaattctggaattataagaccctgggtggaagatt

SEQ ID NO: 816705 - DNA, 120 bp, Artificial Sequence
  ENSG00000245598_4 (sequence is synthesized)
ctatgctttgaccagaagagagtctaagcagcttttgtctcccaggtgctaggaggatgtgtgctcatcattcttccattccaggggcctttgttctacgttctaaggggctttgttctc

SEQ ID NO: 816706 - DNA, 120 bp, Artificial Sequence
  ENSG00000245598_5 (sequence is synthesized)
gctggggcaccctcaggcggccaatctgtatcactacgccgagcctgcctctaccaacttccaagacctagctctaatattcatactcatctctcagacagaccttggctccctaaaagc

SEQ ID NO: 816707 - DNA, 120 bp, Artificial Sequence
  ENSG00000245598_6 (sequence is synthesized)
caaggcccagaagatcatacaagaaattccctcttttatgattccccgtgcacgaagtgaccttctggtggtgagatggagagaaattgatagtggcgatagacagcaaagtctccagga

SEQ ID NO: 816708 - DNA, 120 bp, Artificial Sequence
  ENSG00000245598_7 (sequence is synthesized)
gccagacttcctcgggaaacttggggcacgtgtggagtgtgagtgagtgagctgctggaatgaactgaccagacaggacatcatctatgtatgggattagaatggaattacaggagaaaa

SEQ ID NO: 816709 - DNA, 120 bp, Artificial Sequence
  ENSG00000245598_8 (sequence is synthesized)
ccaaatccctcaaattagcattcaggatcggaaaaaaaatgtcaagtccaatgtcccttttctttacagtatatacaagtgtctctatcaacattaggttttgaggttgagtgcagtggc

SEQ ID NO: 816710 - DNA, 120 bp, Artificial Sequence
  ENSG00000245598_9 (sequence is synthesized)
ccacacctgtaatcccagcacttttgagaggtggaggatcgttcaaccccaggagttcaagaccagcctcggcaacatagtgagaccccatctctataacaaataaaaaacatgcccggg

SEQ ID NO: 816711 - DNA, 120 bp, Artificial Sequence
  ENSG00000245598_10 (sequence is synthesized)
gctccacctgctccatgaagccgcaccctccagagaggacccttcccctttccacccttcgcggaccactcaatgagctaccctgcacctgaccccttctgtccaagtcatcacagtatt

SEQ ID NO: 816712 - DNA, 120 bp, Artificial Sequence
  ENSG00000245598_11 (sequence is synthesized)
cccagagctggaacagtcaatgcctggcacatcgtgggcactcaacatgttgaatcaatggttacaaatacatgaatgtacttgttgaataaatggttataaataaatgaatgaatgatc

SEQ ID NO: 816713 - DNA, 120 bp, Artificial Sequence
  ENSG00000245598_12 (sequence is synthesized)
gagcctgacattcgtttccaaggcttcctgctgtctctccaggctccgcaagcagggctggggcaccctcaggtatgtctctctactggcagggcagtccttggctgtctcagtcaccac

SEQ ID NO: 816714 - DNA, 120 bp, Artificial Sequence
  ENSG00000245598_13 (sequence is synthesized)
tgtgtccccagcatcacccagctcagtgacacaaaggaatgagtgaatatatacttctctatttcatagatagagaagtcatcacatcaacataaaataaaatactgaatgttacgtatc

SEQ ID NO: 816715 - DNA, 120 bp, Artificial Sequence
  ENSG00000254081_0 (sequence is synthesized)
atttgctactgggaccatgttcagaatctgaccagggatggcccctttcccatccttctctggtcccagcctttgcagaggagagcatctgtgaagtcgagataatgccaccattgtgta

SEQ ID NO: 816716 - DNA, 120 bp, Artificial Sequence
  ENSG00000254081_1 (sequence is synthesized)
ttgtgcattgtgaacacccttctcttcccacagaaccatctaaattacaaccaaaggtctgatcaaaggatggcacccagtacatgtgctgaatgactgaataggggcagagtcccttcc

SEQ ID NO: 816717 - DNA, 120 bp, Artificial Sequence
  ENSG00000254081_2 (sequence is synthesized)
ataggggcagagtcccttcctggtcctgaaacgtggaaattgattatagcaccatgcaggagtttccccacccagtgagctggggcagaagagggtctcactttgtcacccaggctggaa

SEQ ID NO: 816718 - DNA, 66 bp, Artificial Sequence
  ENSG00000254081_3 (sequence is synthesized)
gtggcacaatgtcggttcacttcaaaattacaggagcctaccaccacgtctggctaatttttgtat

SEQ ID NO: 816719 - DNA, 79 bp, Artificial Sequence
  ENSG00000254081_4 (sequence is synthesized)
aaaaggcgtgagccaccgcgcctggcctgatgcctgtgtgtcattctcttcttttcttttatagtcatgttaacaaaag

SEQ ID NO: 816720 - DNA, 120 bp, Artificial Sequence
  ENSG00000254081_5 (sequence is synthesized)
gtcattctcttcttttcttttatagtcatgttaacaaaaggagatgcacagaatagcaactttcagtgagactctaccgaattgttgtagggcttggtaaaaagtcccatgtgggagaac

SEQ ID NO: 816721 - DNA, 120 bp, Artificial Sequence
  ENSG00000254081_6 (sequence is synthesized)
cttgagtgtccagtgagatgaaacacagattactgaaccagtaatctgtgttttttattgggcaatactagtacagacttaacctagacacaagactgttataattctataaatttacag

SEQ ID NO: 816722 - DNA, 120 bp, Artificial Sequence
  ENSG00000254081_7 (sequence is synthesized)
tatgattgatataatagcaggtagaaaccacgttccttggcgctagtatcgagtacagttgaataactttaaagtgaaagttaacatttccaatctagattttgttatcatggggaaaat

SEQ ID NO: 816723 - DNA, 120 bp, Artificial Sequence
  ENSG00000254081_8 (sequence is synthesized)
aatgattgtgattgaacaaatcaatgctcgcatgcaaaattttaggtggacttttctgagatcttgtagaaaaaaaataaattgggtttttattgtctaaccacagatagagtagagttt

SEQ ID NO: 816724 - DNA, 120 bp, Artificial Sequence
  ENSG00000254081_9 (sequence is synthesized)
tgttttctggatctgtctagtagattactaagcttccttgtccagtgtgaataaataagtttgtgggggcatgggtgatgcagacagttttagcaggacttgtgtattttactgggtatg

SEQ ID NO: 816725 - DNA, 120 bp, Artificial Sequence
  ENSG00000254081_10 (sequence is synthesized)
agagtagacttagcataaagtgcttgcaatttctctccacaattgctgtgctgactgattcatattctgggaattaatttactactgaattcctggttggtgttaagagaatggcttaac

SEQ ID NO: 816726 - DNA, 120 bp, Artificial Sequence
  ENSG00000254081_11 (sequence is synthesized)
ttctaatgataaagctgagaaaataaggactttcttaactgaaatgtgtcctcctcagtcttgttcttgtactgtgctctgtctctccatccatcctaagctctctctagtcacaacact

SEQ ID NO: 816727 - DNA, 120 bp, Artificial Sequence
  ENSG00000254081_12 (sequence is synthesized)
gtgcccaaaaggggacagacaaaagaagcatggcaacatgtcttacagattagctttctcttttcttcctctgtcttcttttttctgcaattctcaactacttccctggcttcaggaata

SEQ ID NO: 816728 - DNA, 120 bp, Artificial Sequence
  ENSG00000254081_13 (sequence is synthesized)
atctcttatgatgatcattctcaaatcagtttctccagcctctacctttcttttacatttcagttctcaattctcattttgtaggtatctcaaacacaacatatctaaaatcaattttat

SEQ ID NO: 816729 - DNA, 120 bp, Artificial Sequence
  ENSG00000254081_14 (sequence is synthesized)
tccctgctattcccctgctcctccacctttcaatccctctcccaccctgctcccactcctgaaattccattttcatgtaaaggcttcaccacccgcctcctcactctactcaaccttttg

SEQ ID NO: 816730 - DNA, 120 bp, Artificial Sequence
  ENSG00000254081_15 (sequence is synthesized)
taaaacctctctcatctccatttccagttagtttccaagtccagtcaattttacatgatatcctacatggactcgttcactgagcttaattattattagcaaacattaacgcatattgtg

SEQ ID NO: 816731 - DNA, 120 bp, Artificial Sequence
  ENSG00000254081_16 (sequence is synthesized)
ttatttctacagaaatcagcaaaaggtcctggggtatcctctgtgtggaaaataaccatgatgcatcttcagtgttgtagtctgactctatcacccaggctggagtgcagtgtggctgga

SEQ ID NO: 816732 - DNA, 120 bp, Artificial Sequence
  ENSG00000254081_17 (sequence is synthesized)
ggtgaagttcagagatacggtgtctttcctgagttgtgcagctcacgcatggagggatcaggatgggaactgaagcctgcatggctcaaagtctttgctttgaagtgctgcaaatatggc

SEQ ID NO: 816733 - DNA, 120 bp, Artificial Sequence
  ENSG00000254081_18 (sequence is synthesized)
ttcctgaggaggactgccctggactgcaaatttgtattacacagacaataccttttcccagtgccttcttctggacttatgtctatgtatttagtaaataacttatgagtttgtttttaa

SEQ ID NO: 816734 - DNA, 120 bp, Artificial Sequence
  ENSG00000254081_19 (sequence is synthesized)
tttacagggagaggaataggagattaaggggaaatgctacttgctggaggccagtggagaggtaaagaggttggttacaatggctcagcaacctcacttggtttgcctggcctgcaatta

SEQ ID NO: 816735 - DNA, 120 bp, Artificial Sequence
  ENSG00000254081_20 (sequence is synthesized)
ctgggaacatagaatgaggtaactcatcatagaggacaactgttaaatggacaaggatgaggggaaaacatctgttgtacaaaattacttgttgtgaaatacttgtaataaactacttgt

SEQ ID NO: 816736 - DNA, 120 bp, Artificial Sequence
  ENSG00000254080_0 (sequence is synthesized)
cagcactttgggaggctgaggtaggaagatcgctggaacccaggagttcaagaccatcctgggtaagataacagcacctcagagaagatttggaaaataaatgagctgatgagagcaatt

SEQ ID NO: 816737 - DNA, 120 bp, Artificial Sequence
  ENSG00000254080_1 (sequence is synthesized)
ataaatgagctgatgagagcaattttctgcttcctgggccaccacagtcttctttgctgtttttgattgcaaccattttcagagaagaatcaacaccaaagattacatgtatataaatta

SEQ ID NO: 816738 - DNA, 120 bp, Artificial Sequence
  ENSG00000254080_2 (sequence is synthesized)
tctcaacccaagctaaggtagttggtgccatacatttcccacaggactactattttccaatatcaacatctttaatttatttatttatttttgttttagtgcactagctggaagtttcga

SEQ ID NO: 816739 - DNA, 120 bp, Artificial Sequence
  ENSG00000254080_3 (sequence is synthesized)
tataatgttaaatacaaaggatgagagtaaatattcttacatttttcctggtcttatgaagaaagaattttctttcaccattaagtattatgttgtctgtaggtttttcacatatgttca

SEQ ID NO: 816740 - DNA, 120 bp, Artificial Sequence
  ENSG00000254080_4 (sequence is synthesized)
aggtttttcacatatgttcatagtgggttgaagcactctctttttagtcctagctgagagttttaggttaagaataagtattatttattattattattatttatttattattataaataa

SEQ ID NO: 816741 - DNA, 120 bp, Artificial Sequence
  ENSG00000254083_0 (sequence is synthesized)
ggccttagagtgtggtttgaaatcaggtctctgcatttgtccgcgttcttcactgtcatgtggctcctcccgatgtgatagcaaagatgcccgtggacaaaccaggcttgggtccatcat

SEQ ID NO: 816742 - DNA, 120 bp, Artificial Sequence
  ENSG00000254083_1 (sequence is synthesized)
gttggcaatctggaggaagccgagcactttttctccaactgactcagtcccaggactggctctcatttgcccagcttgtgcagaatctcattgtcctaatgttaaatatatatcatcagt

SEQ ID NO: 816743 - DNA, 120 bp, Artificial Sequence
  ENSG00000254083_2 (sequence is synthesized)
gctcaatgttacagcttcaaacatagaagatacaagaagtaaatgctgagatttcgctatttgttaacctatcatgtgatgaacctatacaaattgtgtaaagcaaatgttttcaggcat

SEQ ID NO: 816744 - DNA, 120 bp, Artificial Sequence
  ENSG00000254083_3 (sequence is synthesized)
ctatcaacctgaaggaaagagaatcacacaagatgagcctcatatttatcctggctttccgcttcggagcactctctcaacttcaacacagagaagtgaaacccaagtgaaagagtattg

SEQ ID NO: 816745 - DNA, 120 bp, Artificial Sequence
  ENSG00000254083_4 (sequence is synthesized)
ctaaaccaaggaggcagacctcatgtttgttcaagagtacccaagagataggatctgtaagaggcacacaggaccacatttgttctaccacgctatgctgaatatgaggcaaaagttaac

SEQ ID NO: 816746 - DNA, 120 bp, Artificial Sequence
  ENSG00000254083_5 (sequence is synthesized)
acctggaaattttgctatcctgaaatgaggcagtgcattgtggagaaaaaaagaatggactcttctattaaatgaacgtaagtgagcaagctgtttataaactataaaagtgacaaatat

SEQ ID NO: 816747 - DNA, 120 bp, Artificial Sequence
  ENSG00000254083_6 (sequence is synthesized)
gtataattatatttaaatgttatcattacaaattgttaaggcagtattgcaccctacgggctttggaaaccgtgaccatttgcattcattatcgatcattgcataaaaataatcacaaaa

SEQ ID NO: 816748 - DNA, 120 bp, Artificial Sequence
  ENSG00000254083_7 (sequence is synthesized)
cttccttctctccccccaagcctccatatttatttccttcctactaaaattttcttccacattccctctcatccagtcctcaatgaatcctgaggacagctatcagtggtcactctcttg

SEQ ID NO: 816749 - DNA, 120 bp, Artificial Sequence
  ENSG00000254083_8 (sequence is synthesized)
ggcttgaaatggaacagatcttcttgttccatctctttctgatagcgccagttcctgctgaggacagaacattgtcttcttttctccctgcctcaggcagatggcagggagtgttgtgtg

SEQ ID NO: 816750 - DNA, 120 bp, Artificial Sequence
  ENSG00000254083_9 (sequence is synthesized)
ttcccacaaaggagcgtgctgtccccgctcccgagtctctcagcgagccctgtcatggaaggcatccaggagaatgtggaactccgcacccgctttctcagaacagaggagcatccatga

SEQ ID NO: 816751 - DNA, 120 bp, Artificial Sequence
  ENSG00000254083_10 (sequence is synthesized)
gcgagccctgtcatggaaggcatccaggagaatgtggaactccgcacccgctttctcagaacagaggagcatccatgaccctcagaatcacagcattgagaggtaccacaggatgggccc

SEQ ID NO: 816752 - DNA, 120 bp, Artificial Sequence
  ENSG00000254084_0 (sequence is synthesized)
gcattttctctccctcacacacatacacacactcctactctctcttgtctgcacatgcatgctcctggcaagcctgtggctattatacctgcccagttctctttctgggcccagccccag

SEQ ID NO: 816753 - DNA, 120 bp, Artificial Sequence
  ENSG00000254084_1 (sequence is synthesized)
cctgtgcatcctcaggcctggctcaccgggctgccatgctgtcttcacctttccctcagagcctggtcacactgtcctgcacttcaaatgatgactgtgtgagagacccgaagccactgc

SEQ ID NO: 816754 - DNA, 120 bp, Artificial Sequence
  ENSG00000254084_2 (sequence is synthesized)
cagatacaaaggagtaacagagacagccctttccagaagagattgctctggggagtttgcccagtttgcgacaccctcttaacttcccaccctacattcattcacaagaagtgggctcct

SEQ ID NO: 816755 - DNA, 120 bp, Artificial Sequence
  ENSG00000254084_3 (sequence is synthesized)
ggcagtcatgctcatcaaccgcatggcagaggcagtcatgaccctgcaccctgggcctggtcgactggactacagatgtccatttgacccacagagaatcaatcagagcctattcccagg

SEQ ID NO: 816756 - DNA, 120 bp, Artificial Sequence
  ENSG00000254086_0 (sequence is synthesized)
gacaaattgctggaggctcagtgtggacaaatctgagagttaaaaactctgggagttcagaagttctgagggtcttgtggttttttctcatcatcatcctcccctggttcttctgtttca

SEQ ID NO: 816757 - DNA, 120 bp, Artificial Sequence
  ENSG00000254086_1 (sequence is synthesized)
tttgaagaggagatgatatgattgaatggaacacaaggaagtaaagtgatcttcctcgtttgtttttcaaaaagctgatgcctcagaggaaaaagaaagcaaagccctgtaccctgactc

SEQ ID NO: 816758 - DNA, 120 bp, Artificial Sequence
  ENSG00000254086_2 (sequence is synthesized)
gtcagagacctccatgctttaacctggctcacaagtagagccaccagaaccaaagtagctgtggtgacagagacagagacagtcttcatgaacagatgaccaagaaccagacaagaagtg

SEQ ID NO: 816759 - DNA, 120 bp, Artificial Sequence
  ENSG00000254086_3 (sequence is synthesized)
gatactccagaggacacctgcagaggcaagacatcagggaccacagcgctgcccaccccctctcatatggtccccatgtaagcccctggaactgggtaccatcccaaaggtaatagcaac

SEQ ID NO: 816760 - DNA, 120 bp, Artificial Sequence
  ENSG00000254089_0 (sequence is synthesized)
ttatttgcaggagcagcatgggaaggagacttcaggattagatacagcatagcttaatttggaccagccacacatttgaagtgctcaatactcacatttagctgatggctaccatattgg

SEQ ID NO: 816761 - DNA, 120 bp, Artificial Sequence
  ENSG00000254089_1 (sequence is synthesized)
acaaaacagatttagagcatcttgaaatgaattaaatttggaacaaatgctatacagtcttttcatctgtaactcagctgtgaaaatagcaatatctcacaattgagtataaatttttag

SEQ ID NO: 816762 - DNA, 120 bp, Artificial Sequence
  ENSG00000254089_2 (sequence is synthesized)
acaagaggtggaaaatgactgacatttgtattgttactgccactcaactttttactgtaacaacagcagatgttactcctagatctcaacacattttcctactaagtctgcaggcagcca

SEQ ID NO: 816763 - DNA, 120 bp, Artificial Sequence
  ENSG00000254089_3 (sequence is synthesized)
ttgtgaaagaattgaatctgccatataagctaacacaagaagactatgatttggaagttgcaatggagatattagaagaaacacctagatacttcactagaagtgctgcaaaaatgacag

SEQ ID NO: 816764 - DNA, 120 bp, Artificial Sequence
  ENSG00000254089_4 (sequence is synthesized)
ccctccaactcccccccaccgcaaaaaaaaactacaagcatttaacggccttatgagtatgtatgtgacatgtgtattttattagaggcagttctcagtttccctcatccaagctgttaa

SEQ ID NO: 816765 - DNA, 120 bp, Artificial Sequence
  ENSG00000254089_5 (sequence is synthesized)
gatcgtataagactaagtcaaagctgatcctccttctaaacccgcctctccccacagcccaaaatgtgcactctgtgaacataattgcccaaggaaaacggaagcttgagctctccgagc

SEQ ID NO: 816766 - DNA, 120 bp, Artificial Sequence
  ENSG00000254089_6 (sequence is synthesized)
atccgtattcatgggagcagcacttttgtactttgcaagaccagaatgggctccccacctgtattggtgacccatttaaccggactgattttactgctttgtcaaacttattgggcatga

SEQ ID NO: 816767 - DNA, 120 bp, Artificial Sequence
  ENSG00000254089_7 (sequence is synthesized)
aaataaagtctgctctatagaagtaaacaaagagcctggaaacagtttgaagcctgcctgctaatgaaggcccttggtcacttcctccttgaaaatcaaggcttcctgcaaaaagaataa

SEQ ID NO: 816768 - DNA, 120 bp, Artificial Sequence
  ENSG00000254089_8 (sequence is synthesized)
actgccctccatgacagagaatcaagtaaccaggtatttacatttagacaagattcagtctcgtctggcagcctagaaaaacgcacagctgtcaagaatcaaataaaggctttcaaaaaa

SEQ ID NO: 816769 - DNA, 120 bp, Artificial Sequence
  ENSG00000254089_9 (sequence is synthesized)
aaaaggaaaagaaaataaagcattgtaatataaacaaaggcagtctgtactaagacaagcacaggccatggcagctgtgcagatgaaggctgactgcaagctaacacaagaagactatga

SEQ ID NO: 816770 - DNA, 120 bp, Artificial Sequence
  ENSG00000253196_0 (sequence is synthesized)
tctgaattatctagcattaaaaaacctcctctttttacatcgaaacctctcattcagttggcatgcctttggctgtagcgagagaggtgatgatccagccttatcctgttctctccacag

SEQ ID NO: 816771 - DNA, 120 bp, Artificial Sequence
  ENSG00000253196_1 (sequence is synthesized)
tgctccacggcggctgccagtgagccctgtccctctcctgcagatctgagaagtgctccattgtcacctcaattcttgagcttatctgggtatctccagcgcaccctgtttatgtcttct

SEQ ID NO: 816772 - DNA, 120 bp, Artificial Sequence
  ENSG00000253196_2 (sequence is synthesized)
tccttgtggagcagcttaacaattgcatcagctttctcctgtgctgattcttcatgagaacgttgccaaggcgctgtggagacaccgtttctctagttgtgcagctgcaaggtcacagac

SEQ ID NO: 816773 - DNA, 120 bp, Artificial Sequence
  ENSG00000253196_3 (sequence is synthesized)
agagaaactcaagtcgtaaaacatgtttttccttcaaaaggaagaaatgatgtaaggaatgtctcaattcattgaatcactgtctttgtttctcgcttctgtaacatgcttccccctgca

SEQ ID NO: 816774 - DNA, 120 bp, Artificial Sequence
  ENSG00000253196_4 (sequence is synthesized)
ccgatctccccccaccccgcgaaatgcttaaaaggtaacttaactctttgttcagagctcagtcctttggatgttaacccgactgggctggtgcacctaaataataaatatcctcctcaa

SEQ ID NO: 816775 - DNA, 120 bp, Artificial Sequence
  ENSG00000253197_0 (sequence is synthesized)
ttggagcaattctaataaaagaaggcagtgctgctaagggagaagtggtaggaatctcccagagaagccccagcctcctttgatgttagttgtggacacatcacttattttcaaccaaca

SEQ ID NO: 816776 - DNA, 120 bp, Artificial Sequence
  ENSG00000253197_1 (sequence is synthesized)
gaatcatcacttgacaatggtgacctctactcccttgaaaatacttgaaaaaaatatttcctatgggctaaagaataagtgagaggtatgtgaacaatggaagaatagtttccatttaag

SEQ ID NO: 816777 - DNA, 120 bp, Artificial Sequence
  ENSG00000253197_2 (sequence is synthesized)
ggcatctggacacatgacacacttgaaaacaacacattaaatttatactgcctggaatagacaaaaagctgccttgctgaagtccagtggcgtgatcttggctcacttcaacctccgcct

SEQ ID NO: 816778 - DNA, 120 bp, Artificial Sequence
  ENSG00000253197_3 (sequence is synthesized)
attggagcaattctaataaaagaaggcagtgctgctaagggagaagtggtaggaatctcccagagaagccccagaaactgttttgtactggcaagtcccaatgaaatggcaaatacacca

SEQ ID NO: 816779 - DNA, 120 bp, Artificial Sequence
  ENSG00000253197_4 (sequence is synthesized)
gtggcctcctttgatgttagttgtggacacatcacttattttcaaccaacagaatgtatgtgaacaatggaagaatagtttccatttaagatggcttcaggaaagtggtgcttgtaagaa

SEQ ID NO: 816780 - DNA, 120 bp, Artificial Sequence
  ENSG00000253197_5 (sequence is synthesized)
atcaagttccaattaatgtcaagagtcatccacgcggacaccaacatctgatggattcaggaatacaccaagctccaagaaaaatacccccgccccacaacctcaccaccaccgataaag

SEQ ID NO: 816781 - DNA, 120 bp, Artificial Sequence
  ENSG00000253197_6 (sequence is synthesized)
ccacctaatcctgtctgaatctcttctctgcaaatgttttggtatgcaaatactcgttcattaataagaggaagcaggaaaaagagtgaagaggagtaccatgggaaagggggccccaaa

SEQ ID NO: 816782 - DNA, 120 bp, Artificial Sequence
  ENSG00000253197_7 (sequence is synthesized)
agggaacggcagaacccagagagctgcactgacaagtaagcgaccgcgagtaatcggtcagcacaaaggagccaatcccgagccgcgtggaagaccttgggaggtgggcgggactaacgt

SEQ ID NO: 816783 - DNA, 120 bp, Artificial Sequence
  ENSG00000253194_0 (sequence is synthesized)
cagctcccgtgcctgtccggtcccggagttgaatagtttttgaagtaatgagacgggaacgagacttgggacgaactggagaaaaacataaccgcgaaaggaggaggcggctatcactta

SEQ ID NO: 816784 - DNA, 120 bp, Artificial Sequence
  ENSG00000253194_1 (sequence is synthesized)
ctggctgtgtcagaagtcgccgggaacgcgttgctcccgaggccgaagggcccagagagctccagccaggcagcgggttcgtctccggcgcaagaaggctggctgtctttagtcaagtca

SEQ ID NO: 816785 - DNA, 120 bp, Artificial Sequence
  ENSG00000253194_2 (sequence is synthesized)
agctcattctgaagcctttcctgggagtcctgaagactagcaataagtccttctgcagagccaagaccttgttcacttttccttaccatatcttggaggtggccaatcttgtgacgacac

SEQ ID NO: 816786 - DNA, 120 bp, Artificial Sequence
  ENSG00000253194_3 (sequence is synthesized)
atcaagaaggtgaccacctgcaagccaggaacagagcgctcactgtggaactgaattggctgctaccttgatcttggacttcccagctcccagactggaggatagggagaagatgtgcct

SEQ ID NO: 816787 - DNA, 120 bp, Artificial Sequence
  ENSG00000253194_4 (sequence is synthesized)
cgctattgaagatccaatgctccagtggaagaagatcgtcgtcagaaaatattagtctagtatggaagaagatgggatgactccactgacaactctctagagagaaatgatcctacattt

SEQ ID NO: 816788 - DNA, 120 bp, Artificial Sequence
  ENSG00000253194_5 (sequence is synthesized)
ctgtagttgtctgaatttaatgaatatttggaaaacagatgggttgggcagtgtgaggatgaacatttaggtaacaacctaaaccaacctgccttccactttgttggttaccactaagat

SEQ ID NO: 816789 - DNA, 120 bp, Artificial Sequence
  ENSG00000253194_6 (sequence is synthesized)
ggctgctgtttgtgttttctttttccctttcagagcccactttctttcttttgtttgtttctatttttctttaacctttttccagctttaccgatgtatgacaaatacaaatagtatata

SEQ ID NO: 816790 - DNA, 120 bp, Artificial Sequence
  ENSG00000253194_7 (sequence is synthesized)
cagtgtgatgttttgatatacactacttctgtggatatacaccatcttctgtggtggatatacatcatcttctgatgtggatacacatcatcttctgtggatatacaccaagaattagga

SEQ ID NO: 816791 - DNA, 120 bp, Artificial Sequence
  ENSG00000253194_8 (sequence is synthesized)
tggatcatatggtagctctatttttaattttttgagaaacctccatactgttttccataatggctatatcaattttcattgccaccaacagtgtacaaaggttccctttattctgcatcc

SEQ ID NO: 816792 - DNA, 120 bp, Artificial Sequence
  ENSG00000253194_9 (sequence is synthesized)
atcctcactaagactgattacctcttgaatttttgataatagccatttaaaaaggtatgaggtgatatctcactgtggttctaatctgcatttccctgatgatttgtgatgttgagcatc

SEQ ID NO: 816793 - DNA, 120 bp, Artificial Sequence
  ENSG00000253194_10 (sequence is synthesized)
ttttcactactggccatctgtacgtcttctttggaaaaatgtctcttcaggtcctttgcctattttgaaatcaggttgtttttctgctactgaattgtaagttccttatatattttggat

SEQ ID NO: 816794 - DNA, 120 bp, Artificial Sequence
  ENSG00000253194_11 (sequence is synthesized)
attaaccccttatcagatatatggtttgcacacatttttgttgtgtttttagttgattgtttcctttgctgtaaggaaactttttagtttgatgtagtttcatgtgtttatgtttgcttt

SEQ ID NO: 816795 - DNA, 120 bp, Artificial Sequence
  ENSG00000253194_12 (sequence is synthesized)
tgttgcctgtgtttttgggtcgaatccaaaaaatcattgccaagctcaatgtcaaggagcttttcccctgttgttttctcctaggagttttatggtttcaggtcttacatttaagtcttt

SEQ ID NO: 816796 - DNA, 120 bp, Artificial Sequence
  ENSG00000253194_13 (sequence is synthesized)
aattcattttgagttgtttttttttttgtgctgtttatattttgaaattacatttgttgctctgctagttaccaggcatattcatctctaggaaagttattttctgccatcacatcctac

SEQ ID NO: 816797 - DNA, 120 bp, Artificial Sequence
  ENSG00000253194_14 (sequence is synthesized)
taatcctattaattatatggtcaaataaaaatttccatcgtacaaaaattgccatctgcaatctggttctcatttattgactgtagacaaaaataataaagtttaagactaaaaccctaa

SEQ ID NO: 816798 - DNA, 120 bp, Artificial Sequence
  ENSG00000253190_0 (sequence is synthesized)
agtgcaatcttcggttgcctggactagcgctccggtttttctgtgctgaacctcaggggacgccgacacacgtacacgtcccttcgatagctcagctggtagagcggaggactgtagcta

SEQ ID NO: 816799 - DNA, 120 bp, Artificial Sequence
  ENSG00000253190_1 (sequence is synthesized)
cttcctcagcaggagacatccttaggtcgctggttcgattccggctcgaaggagacaagtgcggtttttttctccagctcccgatgacttatggcactttccttgggtgccttcagtgac

SEQ ID NO: 816800 - DNA, 120 bp, Artificial Sequence
  ENSG00000253190_2 (sequence is synthesized)
acattgcattccaacgagcagtttgaaagtctagcgctttctccccattttgggcctcccagcctgcacgggactcatctgaggctaagctgcccatagttcggggagacccacagggaa

SEQ ID NO: 816801 - DNA, 120 bp, Artificial Sequence
  ENSG00000253190_3 (sequence is synthesized)
ctctgggcagatccgaggtggataggacaaggcaaaaggtagccctggagaggtgagtggataaagtccctggacacaggggctgccgttggaggaggttgtaatgtcattgtcctcctg

SEQ ID NO: 816802 - DNA, 120 bp, Artificial Sequence
  ENSG00000253190_4 (sequence is synthesized)
tggaagttaactgtggagaattaactagagaccagcgctgagagagaattaattggataaaagttctatctaggacagtccttgagcgtaattttgtgaagcaaacacaagacaacaaca

SEQ ID NO: 816803 - DNA, 120 bp, Artificial Sequence
  ENSG00000253190_5 (sequence is synthesized)
aaacgagtaaaacctaaacacacatccacacactcactgaaagattcagagattgcacagaacacaaagacttttctggtaataaaatctccctatcctaattttctagaaaaaaagctg

SEQ ID NO: 816804 - DNA, 120 bp, Artificial Sequence
  ENSG00000253190_6 (sequence is synthesized)
ttgaagccaccgcgcagttcttacaagacataacacaaatcttccacacaaaggcagaaatacagtatcaacctttgtgaggagtacagcaaataaatgatgtttctttagggtcctagg

SEQ ID NO: 816805 - DNA, 120 bp, Artificial Sequence
  ENSG00000253190_7 (sequence is synthesized)
accccgcgggagttggaccggtggcgctggtaaggcctcccgggctcaaagtgcaacggacactgcagaaatccaaactgctggcattcgcggtttggggacgccagaggaggtaatgat

SEQ ID NO: 816806 - DNA, 120 bp, Artificial Sequence
  ENSG00000253190_8 (sequence is synthesized)
ttctggtttgttaacctcaagtgacaataatgccgagccaggcaggagctggacctacaatcttctgatgcgtggtcagacacgttatcccttgcgccactggcctaccacgctactcct

SEQ ID NO: 816807 - DNA, 120 bp, Artificial Sequence
  ENSG00000253190_9 (sequence is synthesized)
tcagtcgccgttggattactgtgtgttgagaacacactcggcaaccactttaaaggacaacgcaggctggtaaaggaaaaggactcatctgaggctaagctgcccatagttcggggagac

SEQ ID NO: 816808 - DNA, 120 bp, Artificial Sequence
  ENSG00000253190_10 (sequence is synthesized)
gtctccatttttacctcgttttattattttcaatagtcttttagttgaatgtattgtaaattacttgaaatataacatcaggatgttcataaaaacaaattcacaaagtaagaaaaagaa

SEQ ID NO: 816809 - DNA, 120 bp, Artificial Sequence
  ENSG00000253190_11 (sequence is synthesized)
ggcaaaaggtagccctggagagctgtactctccatctaaccataagttctttgttctgtttgatgaacaaatggctccttaaactaagcctggattattttcaagtacctggacttgcaa

SEQ ID NO: 816810 - DNA, 120 bp, Artificial Sequence
  ENSG00000253190_12 (sequence is synthesized)
ttacctgcaccaaagagacaaaagagaacatgggtggatacctttatggtgaagggatttgaatttagcttttaaattggaatttttcaaagaccacaaccccagctgacaaagatgaaa

SEQ ID NO: 816811 - DNA, 120 bp, Artificial Sequence
  ENSG00000253190_13 (sequence is synthesized)
gtttcagagctgcactgtgcacattccaagtactcaagaaccacaagtgactagagattggacactacagatatagaacatttccatcattagcggaaattcttatggacagtgcccttc

SEQ ID NO: 816812 - DNA, 120 bp, Artificial Sequence
  ENSG00000253190_14 (sequence is synthesized)
taaagcatgggtgtggtgcagcttagtgggtgaggtcatgggctctgtgctcaaaagatgtgtctctcagtgtgcatcacagttcagcagccacgtgactcagggcaactacttaacttg

SEQ ID NO: 816813 - DNA, 120 bp, Artificial Sequence
  ENSG00000253190_15 (sequence is synthesized)
ctcagccacagttgactcagtggagataataatacctgagacagggagctgtgacatgaagtaatgggtattcagtacatatttatcatatttgttgtagtggtataatagtaaaaataa

SEQ ID NO: 816814 - DNA, 120 bp, Artificial Sequence
  ENSG00000253190_16 (sequence is synthesized)
ctgcaccaaagagacaaaagagaacatggatgaaaaacacactgagctcttactatataataaagaacttagctggtctttgtcccaagtccctgagtgggagcctctaaatccttagaa

SEQ ID NO: 816815 - DNA, 120 bp, Artificial Sequence
  ENSG00000253190_17 (sequence is synthesized)
tttcccgagtgacagacatgcctttgttattcatcgtgggccctgctagtttatgctaatgagataactatggacggggaaggggggttggggctagccatgtcagaaagaccaaccatg

SEQ ID NO: 816816 - DNA, 120 bp, Artificial Sequence
  ENSG00000253190_18 (sequence is synthesized)
agatgagaatcttggggctttaagccatgtgatgtcagcccaacctccagggaggcaaggagaagctgaagattgagatcagtcacaaagctaatgattccatcaatcatgcctgcataa

SEQ ID NO: 816817 - DNA, 120 bp, Artificial Sequence
  ENSG00000253190_19 (sequence is synthesized)
tgaaacccccataagaactctggacacagaagctcgggtgaccttccctggttaacagcactctgtgtgcattgttacacattcgtgtgccaggagggtgatgcatcctgactccactgg

SEQ ID NO: 816818 - DNA, 120 bp, Artificial Sequence
  ENSG00000253190_20 (sequence is synthesized)
gagaggacatggaagttcacatttgggacaccctgcaaccttgccctatgcatttcttcttttggccggtcttaatttgtattctttttggctctaataaaactgtaatcataaatataa

SEQ ID NO: 816819 - DNA, 120 bp, Artificial Sequence
  ENSG00000253190_21 (sequence is synthesized)
tctgatgtcttagtagatgcggtggaaccagctctgtctacagaaccccgggcttcagtggcgtcttcctaacccggcttgcctgccgggggcgttccgagaccctcggggccttccctt

SEQ ID NO: 816820 - DNA, 120 bp, Artificial Sequence
  ENSG00000253190_22 (sequence is synthesized)
gcgctttctccccattttgggcctcccagcctgcacgatgtctgcatttccagggactcatctgaggctaagctgcccatagttcggggagacccacagggaaaacaaaacaagaaacag

SEQ ID NO: 816821 - DNA, 120 bp, Artificial Sequence
  ENSG00000253191_0 (sequence is synthesized)
atggacatgagggtccctgctcagctcctggggctcctgctgctctgactctcagtgacatgcagatgacccagtctccatcctcgctgtcttcctgtctaggtgagagtcaccatcaca

SEQ ID NO: 816822 - DNA, 120 bp, Artificial Sequence
  ENSG00000253191_1 (sequence is synthesized)
gatctacgatgcatccaatttgcaaacctgggtcccattgcagttatgtggcattggatccaggacagatttgattctcaccattagcatcctccagtctgaagttgctgcaacttctta

SEQ ID NO: 816823 - DNA, 120 bp, Artificial Sequence
  ENSG00000253199_0 (sequence is synthesized)
gtgcctgtgaggcaggacttaaaggaggcgctggccctcaggggcatgcgagggcaggccttcctctttatataggcttagagagccactactcgaagccaagccttacgtcaggcagca

SEQ ID NO: 816824 - DNA, 120 bp, Artificial Sequence
  ENSG00000253199_1 (sequence is synthesized)
gagataccaagatgaggttgaagaaaacacacggctttctccactcatggactccaatgaggatggcaacaacatggtaattagaagtcattagcagattgctctcagcaagtggaaagc

SEQ ID NO: 816825 - DNA, 120 bp, Artificial Sequence
  ENSG00000253199_2 (sequence is synthesized)
acatctaaactggaactccactgcctctaggctgagacttgaccttgtgactccagcctaggattatataaggatgtgactgaccttagaggatttcacgggaacttagctgtacacgtg

SEQ ID NO: 816826 - DNA, 120 bp, Artificial Sequence
  ENSG00000253199_3 (sequence is synthesized)
gaacccatttatttgctgacacttctcatttcctttcagaacaaacctacattcccagacctataattttcttgagaaaatgggtttattataagtcactcaataaaacaccctaccatg

SEQ ID NO: 816827 - DNA, 120 bp, Artificial Sequence
  ENSG00000253199_4 (sequence is synthesized)
gggcaggtagcccgaggggatgtgaatgggacaccgacagcatctgctagctttggcagatgggagctagggccactccatgctaagggacagcatgaacaaaatgaaggagaagatggg

SEQ ID NO: 816828 - DNA, 120 bp, Artificial Sequence
  ENSG00000253199_5 (sequence is synthesized)
ttgagtgaggagctcgccaagctttgctccagagggagagagtatttgaaattgggactatctgcaaaaatcaccaaatatatgaagggcagcaaggaaactctaagaggggaaaatggg

SEQ ID NO: 816829 - DNA, 120 bp, Artificial Sequence
  ENSG00000253199_6 (sequence is synthesized)
cagcagtgtggagctgctgcacaccactgatgatgggaggtgttagagagggaaatgcctcttgttctggggtgatgatgatcttgcagcaccggcctgggccggcagttggacaatggt

SEQ ID NO: 816830 - DNA, 120 bp, Artificial Sequence
  ENSG00000253199_7 (sequence is synthesized)
gaccggatgagtggccagtcatggttccactcaatgctggtgaatgaactatcccctggcagtttgcaaagctcaggtccacagctgactgtggaactggaagtgccacagcacccaccc

SEQ ID NO: 816831 - DNA, 120 bp, Artificial Sequence
  ENSG00000253199_8 (sequence is synthesized)
ctgccgccaagccgtgccccacttctgctgctaaatggagaaaggatggagcctacattagaaaccagagacctggcaaagtgggtgggacaggaggttcctggcaagcgacagacagaa

SEQ ID NO: 816832 - DNA, 120 bp, Artificial Sequence
  ENSG00000253199_9 (sequence is synthesized)
ctacagaatgccgtaagagaaaggaaggtggttggtctttcagtcagaagtgctggctggacatggagcactgctacggtgaccagcgcagccaccactaggaacagcgactctcccaga

SEQ ID NO: 816833 - DNA, 120 bp, Artificial Sequence
  ENSG00000253199_10 (sequence is synthesized)
ccctccctcacctgccacccatcgtagtggctgctcctcttgaacggctggggcgagagggatactgcatgcgatggaactgataaaccagttcaaatagcattagactcactcaccgat

SEQ ID NO: 816834 - DNA, 120 bp, Artificial Sequence
  ENSG00000253199_11 (sequence is synthesized)
acacagtcattattttccagatgaggcctgctcaagagcatttggctgatgggggctgaaacctctcactgcaaccaggttcatttggctccaagtcctgtgtgctctttatgaagtcat

SEQ ID NO: 816835 - DNA, 120 bp, Artificial Sequence
  ENSG00000253199_12 (sequence is synthesized)
agcaaggcctggactagggtgagaaaggacaggtgcctgtgaggcaggacttaaaggaggcgctggccctcaggggcatgcgagggcagggtgagcacctgagagtgagggcctccttaa

SEQ ID NO: 816836 - DNA, 120 bp, Artificial Sequence
  ENSG00000253199_13 (sequence is synthesized)
agtctgtggtccagggtcctttggtcccctaatcccagagcagaaaagaaagccttcaaatccagctgctgcctgaagagcctcagactcactcccctggggcagcaaagtgcatttctt

SEQ ID NO: 816837 - DNA, 120 bp, Artificial Sequence
  ENSG00000253199_14 (sequence is synthesized)
tacccacaaggccctgtagtgctgactggaagatggggctgtcagggactcatgggaaagaatggcacattggatacaaactcattcggcttagttttaccctgtggctgcccctgtagt

SEQ ID NO: 816838 - DNA, 120 bp, Artificial Sequence
  ENSG00000253199_15 (sequence is synthesized)
gtcatttgtgacaccaggaatatgttccataccaaccgaatagcttctcttcctattcgtgccagtgcatggaactatataatcattcatctattcattaattcatttatttgtagcctt

SEQ ID NO: 816839 - DNA, 120 bp, Artificial Sequence
  ENSG00000253199_16 (sequence is synthesized)
gagatgggagcagccagcaccgtggaatgaggcaaggtttggaggggaagagctcacgacatgcttctaaacacttagctatgtgaccatgaggaactcaccacccctccagcttcatcc

SEQ ID NO: 816840 - DNA, 120 bp, Artificial Sequence
  ENSG00000253199_17 (sequence is synthesized)
acctcacttttcacatgagaaaagtaacaaacttgtgctttgttggaatcaaaggcggtagcaagtaaatgtaataatgcttttaaactgtcaagtcctattcagatgaaaagatacacc

SEQ ID NO: 816841 - DNA, 120 bp, Artificial Sequence
  ENSG00000253199_18 (sequence is synthesized)
attgcctttctcctaagcagggcattgtgcctccatgaatacctacaatcaaggtgttcccaggccccatgtatacactgccagtgccagtgctgggggattccaaaggagcagaagttg

SEQ ID NO: 816842 - DNA, 120 bp, Artificial Sequence
  ENSG00000253199_19 (sequence is synthesized)
tcagggaagtccctctaaggaagtgacatctaaactggaactccactgcctctagtatgtctactctggagttcccacctttaagggtttctgggaacattaatatatatagtgtgagtg

SEQ ID NO: 816843 - DNA, 120 bp, Artificial Sequence
  ENSG00000253199_20 (sequence is synthesized)
actttcacctgagatttattgtcaggtgaaaaaaatagcctctattttgttaagctactgctgttttctttctgttatttgcagctaaactcagtcctaacagatacataaatcctgttc

SEQ ID NO: 816844 - DNA, 120 bp, Artificial Sequence
  ENSG00000253199_21 (sequence is synthesized)
atttttccaaagggtcttcagaaatactgccttgggtgtctaactattactgactgaattgtgcccctttagaattcatatgttgaagtcctaacccctcataagggaatgtgaccatgt

SEQ ID NO: 816845 - DNA, 120 bp, Artificial Sequence
  ENSG00000253199_22 (sequence is synthesized)
ttggagatagggtctttaaaaaggaaattacattgaaatgagctcatgagggtggttcctaatccagtgtgattggtgtccttataaaatgaggaaattgggacacagacacaaccacag

SEQ ID NO: 816846 - DNA, 120 bp, Artificial Sequence
  ENSG00000253199_23 (sequence is synthesized)
agggaaaatgatataaagagacacagggagaagatagtcatctgtaagccaaggaaagaggcctggaacagatcctgaccttacggccctcagaagaaaccaacgctgccaacaccttga

SEQ ID NO: 816847 - DNA, 120 bp, Artificial Sequence
  ENSG00000253199_24 (sequence is synthesized)
tctctgacttccagcctccagaatcacaaggaagatgtaagaaaactctgaaaaatgaagaaaagaaggaaactggctagggacttcagaacctaaggaacaacatgaggaacgtgcaga

SEQ ID NO: 816848 - DNA, 120 bp, Artificial Sequence
  ENSG00000253199_25 (sequence is synthesized)
tgggacagagaatcactggtggagactgatcccaaagtggccagagtgcaaggtgctttatggcactgcaccagttccctatgaaaccatacacatctcattgagtaaggaaggaagctg

SEQ ID NO: 816849 - DNA, 120 bp, Artificial Sequence
  ENSG00000253199_26 (sequence is synthesized)
cctgtgactgagactctgaaatggaccagggaggaaactgagtcttgaagagattgtgtaactttgcagtgagtgcaaaccgtagtaattacaaagtgtgaattaaaaacccaaaatgct

SEQ ID NO: 816850 - DNA, 120 bp, Artificial Sequence
  ENSG00000253440_0 (sequence is synthesized)
ttcactgttgctgttttaaaaggtgtctagtgagaggtacagctcgtggagtccggagaggacccaagacaacctgggggatccttgagactctcctgtgcagactctggattaaccttc

SEQ ID NO: 816851 - DNA, 120 bp, Artificial Sequence
  ENSG00000253440_1 (sequence is synthesized)
agatatgttatgcccaatctgtgaagagcaaattcaccatctccaaagaaaatgccaagaactcactgtatttgcaaatgaacagtctgagagcagagggcacagctgtgtgttactgta

SEQ ID NO: 816852 - DNA, 90 bp, Artificial Sequence
  ENSG00000253441_0 (sequence is synthesized)
taaaacggtatccagtgtgagacaaagcctgcgtggtccccgagactctcctgtgcagcctctcaattcaccttcagtagctactacatg

SEQ ID NO: 816853 - DNA, 120 bp, Artificial Sequence
  ENSG00000253441_1 (sequence is synthesized)
atacctcatagactccggtaaggaccgattcaatacctccagagataacgccaagaacacacttcatctgcaaatgaacagcctgaaaaccgaggacacggccctgtattagtgtaccag

SEQ ID NO: 816854 - DNA, 120 bp, Artificial Sequence
  ENSG00000253444_0 (sequence is synthesized)
gttagagtgaattctagttgcctatctcagatgttgtaatgtggttcaagaaaggacctgaagaaaagacgccgagattgtcttctgtacttcgaaaaatggtataagcaggggaagctg

SEQ ID NO: 816855 - DNA, 120 bp, Artificial Sequence
  ENSG00000253444_1 (sequence is synthesized)
gtgagagagaatttgaaaataaatagctggatgtacctgctgctgggtgacacctcagtgatgtgtgcagcacctgttacctctggactggctttatggtgatataaaatcctgttctgt

SEQ ID NO: 816856 - DNA, 120 bp, Artificial Sequence
  ENSG00000253444_2 (sequence is synthesized)
ctttggggaagctttcctttgctggggaccaaatagaagatatttggccttctccaaggccatcctgccgacatacatggtagcaaacactcagcaaaaagatatttatttggttgtttt

SEQ ID NO: 816857 - DNA, 120 bp, Artificial Sequence
  ENSG00000253444_3 (sequence is synthesized)
ttgctttctatgtttttcaaaattgcaaggagaagaagaaaatacacaaacacaggtctctgccttgaggtcctaaaagctgcaaatgagacctgtcttacaaggaaataaaaaagagac

SEQ ID NO: 816858 - DNA, 120 bp, Artificial Sequence
  ENSG00000253447_0 (sequence is synthesized)
acctgttgagaggaaaggagccaacctggcctggtgaccttctctgtgcaagcagggagcaggcacacaccaccaatgagtgaagaaggctgctgtggcatgctcgggacctagagggaa

SEQ ID NO: 816859 - DNA, 120 bp, Artificial Sequence
  ENSG00000253447_1 (sequence is synthesized)
cctgcctcattgacaggggacagcagctgcacagctccagacaatcgttgtcaaggacgggaatgagattctaacatggctgatctgatttttcaagaaagaaatgacttctggcaactg

SEQ ID NO: 816860 - DNA, 120 bp, Artificial Sequence
  ENSG00000253447_2 (sequence is synthesized)
acaggctccacgttgagtgttcacactgtgcccaattctgccctgagcactttgcttggtttctccacaacaatattgtgatcagtataattactgttattcccattttatagatgagaa

SEQ ID NO: 816861 - DNA, 120 bp, Artificial Sequence
  ENSG00000253447_3 (sequence is synthesized)
gaggcaggtgaaagacccaaattcatggaagagaagtgagtcacacagggagccagtggcagagccacaccccacagagcaatcaacatgctctactctgcagacctgcaacagggaggg

SEQ ID NO: 816862 - DNA, 120 bp, Artificial Sequence
  ENSG00000253447_4 (sequence is synthesized)
aagccagactctgatgcaagaaggaaagaccatgtgctggctcagtgtgtgcagcctggactgagctactgaactctaaatccaaggatgactaatgtaagcctaaagggtaatctgcaa

SEQ ID NO: 816863 - DNA, 120 bp, Artificial Sequence
  ENSG00000253447_5 (sequence is synthesized)
atactgctccattaatattcaatgataaatgatattgctttagaatcaaattcacataaacagaagcttcagctgtatgtccgcaccctgggaacattaaattgtaagccacgtcttgta

SEQ ID NO: 816864 - DNA, 120 bp, Artificial Sequence
  ENSG00000253447_6 (sequence is synthesized)
actaataggcagaatgacattaataccagacctgatgaagacagcacaaaaagtaaatctcaacacaacctcacaatattaataaagcaaaaattttaaatacagtaatgtattagcaaa

SEQ ID NO: 816865 - DNA, 120 bp, Artificial Sequence
  ENSG00000253448_0 (sequence is synthesized)
ctatgagcttacacagccaccctcagtgtcagtgtcaccaggacaggcagccatgatcacctgctcttgagataacctcaaagatgagtatgtttactggttctggcagaagccagacca

SEQ ID NO: 816866 - DNA, 120 bp, Artificial Sequence
  ENSG00000253448_1 (sequence is synthesized)
ggtgatatatgaaggcagcaagcggccctcaggaatttctgattttctgagtccagctcagggaacatggccaccctgaccatcagcagggctcagactgaggacgaggctgactattac

SEQ ID NO: 816867 - DNA, 120 bp, Artificial Sequence
  ENSG00000253449_0 (sequence is synthesized)
gattccccctctcatatcttctaccctccaggccaatctatatgtgtcctctgcagaatggaaagatttaaaaacagctactccatcttgctgtacaaccttagccaaggcatgtaacct

SEQ ID NO: 816868 - DNA, 120 bp, Artificial Sequence
  ENSG00000253449_1 (sequence is synthesized)
ctgtctctgttcccttgcccatgtgaaattgttgtaaggataatgataaagaagaggaagtcaacagtggctaacatttatcccttgctcacaatgaaccagacaccaagctatgtgact

SEQ ID NO: 816869 - DNA, 120 bp, Artificial Sequence
  ENSG00000253449_2 (sequence is synthesized)
ttgctcacaatgaaccagacaccaagctatgtgactttacctgaatggtctcaatcagtcttcacacaagcctgcaagatgtgacttgctccttcttgccttccgccatgattgtgaggc

SEQ ID NO: 816870 - DNA, 120 bp, Artificial Sequence
  ENSG00000253449_3 (sequence is synthesized)
cacccaggagagttggtgcagaaaaggaattctggccaacctaatttgtatttgaaaataccccataggccaacggaacaagattcagatgaatttcacaggcagctgagggctacacaa

SEQ ID NO: 816871 - DNA, 120 bp, Artificial Sequence
  ENSG00000253449_4 (sequence is synthesized)
ggaaaataatgatgtgaactcatacttatcagctatctgataccctgagccagaccccggtgtattcctcacaacaccccaaaagttctggagatgagaagtccaaaatgagtcttaaga

SEQ ID NO: 816872 - DNA, 120 bp, Artificial Sequence
  ENSG00000253449_5 (sequence is synthesized)
ggataaaatcaaagtattgacagggctagttccttctgaaggttccatggcagaatccattccttgcctcttccagattctagaagctgcaggcatttctgagcttggactgcatcattc

SEQ ID NO: 816873 - DNA, 120 bp, Artificial Sequence
  ENSG00000205054_0 (sequence is synthesized)
tggaaatgctgggcccttcgaggttagcttaaactgaagagaggaacttggttagaatacagacatctctgatgctgtgtcccggatgttgagcttccagctctgatggcacgttctgtc

SEQ ID NO: 816874 - DNA, 120 bp, Artificial Sequence
  ENSG00000205054_1 (sequence is synthesized)
aactcagctctgttttgagtggaactgaacactcagtgatggctaaaaacagcagttgactaaactaattaagctacatgtagacggtgacggaggcggaaagataggccgagacaggcc

SEQ ID NO: 816875 - DNA, 120 bp, Artificial Sequence
  ENSG00000205054_2 (sequence is synthesized)
ctttggaaattatcctgagcattcttcttttacagaagaacagtaaaacagacttgttattggcagcccattagtgctcaggagaggcggtctccagcatgacatcagccggcggctcga

SEQ ID NO: 816876 - DNA, 120 bp, Artificial Sequence
  ENSG00000205054_3 (sequence is synthesized)
cccaaatctagtatttcaccagagagcctaacgctgctggctttccaactgtgtggaagacaaaatagcgaacagctattacatatctggactcggtctgcgcaaaccacttcaagccac

SEQ ID NO: 816877 - DNA, 120 bp, Artificial Sequence
  ENSG00000205054_4 (sequence is synthesized)
cttccagccttgagcctgtagaaggttcatgaatggaaacctggatggatgggttgtggtcttggccgctccacttctgcctgcagcccaggaggggggccctgtgtctcctgctcaggc

SEQ ID NO: 816878 - DNA, 120 bp, Artificial Sequence
  ENSG00000205054_5 (sequence is synthesized)
ctgcacaggatacaggcgtaacaaagacaaggatgaaataagtcctgtgatggagagacaagcaaaattctacctgacttcacaggaggaagaagtgtgctgtgccagggggaacaggag

SEQ ID NO: 816879 - DNA, 120 bp, Artificial Sequence
  ENSG00000205054_6 (sequence is synthesized)
aaagcttcatggaagaggtcacaggaaatgggtagctatccagctaaatagatttcatgcttgacttcagtggaatagctcaaatgatgatctgtttgggagagtaaattaaagagtttc

SEQ ID NO: 816880 - DNA, 120 bp, Artificial Sequence
  ENSG00000205054_7 (sequence is synthesized)
catccgaggttggttgaatccacagatacggaacccacagatatagagggccaaccatactgagtcctgacttcacccattccttctacccccatctctcctaatccttaaacttccttg

SEQ ID NO: 816881 - DNA, 120 bp, Artificial Sequence
  ENSG00000205054_8 (sequence is synthesized)
caattcctggagcagaatactcgtgtaggagtcaggggttgtcttcccttcctagaagcaatgcttctatgttctcatttgatgttgaataaaacattaaacagaaaagctttgataaca

SEQ ID NO: 816882 - DNA, 120 bp, Artificial Sequence
  ENSG00000205054_9 (sequence is synthesized)
agtcaagtgcttaggtaactcacatttgcgacttgcacggtgtgaattgtgggtgtcctcacctgtcctgagactagccagctgactgttgcccagagctagcaggcatagccagctgaa

SEQ ID NO: 816883 - DNA, 120 bp, Artificial Sequence
  ENSG00000205054_10 (sequence is synthesized)
attctgaaagtggattatgcatggagtaatgctgttctcaggaaatcagtgatttattttataatctaaaatttaaacgttttaatatacctcccaagaagatacccagttcagaaaact

SEQ ID NO: 816884 - DNA, 120 bp, Artificial Sequence
  ENSG00000205054_11 (sequence is synthesized)
gcagaggagccatggaactcagcagaaggccagctccctctctgggaggccgccttcaggaaaccaatcgtccccccacctgattccaaaggaattacagaaaaatggaaagccaggaac

SEQ ID NO: 816885 - DNA, 120 bp, Artificial Sequence
  ENSG00000205054_12 (sequence is synthesized)
aaaaatcataaatcatattttcaatatgaccttgtaacgttatccatggatgttacctcagacttcgtgataagctgaggccctgacaccatgttcctgtcaccttcctgttgtggccat

SEQ ID NO: 816886 - DNA, 120 bp, Artificial Sequence
  ENSG00000205054_13 (sequence is synthesized)
gaacgatgccttgagctcagctgtacctggatgcttggactcagctgctgcagctcagaggctctggacgagcccttcatcatcaggccatctcttctgagattctgctcaggacttggg

SEQ ID NO: 816887 - DNA, 120 bp, Artificial Sequence
  ENSG00000205054_14 (sequence is synthesized)
actggagactttttgatgtgtttagcacatttttgtgatttcctttaatacgataggccttgcataatctcccattaggagaacaaaagacaagcctgagatgggatggagaatgggtgg

SEQ ID NO: 816888 - DNA, 120 bp, Artificial Sequence
  ENSG00000205054_15 (sequence is synthesized)
agagggggatccattccataaaaagttcactttgagtaattagcatttttaatccaaatacttaaaaggggaggcgaattgggaagagaagaatgaatacagccgagtgactgcagatat

SEQ ID NO: 816889 - DNA, 120 bp, Artificial Sequence
  ENSG00000205054_16 (sequence is synthesized)
aaaaagtcccttcattaattcggttgttttttaattcctaattgaacttaaataaagaggacctagaggcagctgtttctaatatcgagtccccaccgcacatgaaagacgcatttattc

SEQ ID NO: 816890 - DNA, 120 bp, Artificial Sequence
  ENSG00000205054_17 (sequence is synthesized)
ctgcagcagcctccctacccttgggtgttatcagctgaacatgttttgaacctacctaatgcatttgaggtagcttgggtttatttttctttcaataaaataaatggttttgtaattaaa

SEQ ID NO: 816891 - DNA, 120 bp, Artificial Sequence
  ENSG00000205054_18 (sequence is synthesized)
atctgctgagcttcagtctctgccctgctcccctcatggaggacctgattcatctggagcctcggactccctatgtagtggtccctgggatcagagcagcactcttggaagaacagtaaa

SEQ ID NO: 816892 - DNA, 120 bp, Artificial Sequence
  ENSG00000205054_19 (sequence is synthesized)
agtgccgaggcgcggaagcgcgaactgcccggagcgacctggcttggcgcacagactcattaaccaagcccgagaggaggcagcaatgcgtgtgcgggaaagggagcggttctcaaaata

SEQ ID NO: 816893 - DNA, 120 bp, Artificial Sequence
  ENSG00000205054_20 (sequence is synthesized)
caaagtgataaaacagcttccagttatattgaaaaacgatgcaaaccctcaattccttttttttttttttggacctggccggacctggaaatgccggttataaacaagaataaaaacttg

SEQ ID NO: 816894 - DNA, 120 bp, Artificial Sequence
  ENSG00000205054_21 (sequence is synthesized)
aatttattggtggaagtcctgttaaaagagctcaacacaagcatatgagacaaactgcaagaagcaaacagtctccattcagagagcaggaccacactctgggttcttgtttaagcgttt

SEQ ID NO: 816895 - DNA, 120 bp, Artificial Sequence
  ENSG00000205054_22 (sequence is synthesized)
gacgtgcacatgagacacctaacaaagcctgaaactaaatttatttttcactacatctctctggtatcaaacttttggaagtaaagcatgtatttatcaataaaacagatgtttgcccag

SEQ ID NO: 816896 - DNA, 120 bp, Artificial Sequence
  ENSG00000205054_23 (sequence is synthesized)
taaaaattgtatctggggaatgatgagtggtcccaaatgaatggaggagaaagttaagcacctgtggggtgtgtgtggggtgtgtatgtgtttgtgtgagtgtgttggtgggagtggaaa

SEQ ID NO: 816897 - DNA, 120 bp, Artificial Sequence
  ENSG00000205054_24 (sequence is synthesized)
gtggaattaggagttttgagatgctttgttttgcaaaccgcagataacccttaaaggtgttggagacttgtggatggagtgagtggtgatgcaacccaacctatatattcataattgacc

SEQ ID NO: 816898 - DNA, 120 bp, Artificial Sequence
  ENSG00000205054_25 (sequence is synthesized)
ctgtaagccataaaaaggacaagctgagaagggatgatattagaggcaggaggaccagaggctacttcagtagcccaggtcagagaggaggaggactggcaaggcagaggcagtgttcct

SEQ ID NO: 816899 - DNA, 120 bp, Artificial Sequence
  ENSG00000205054_26 (sequence is synthesized)
ggagggaggggatagatgctggggaccctgcagaggtcaggggcagccagtcaggtgtggtgggaggaagggaagtgctctcttcggggtgcctgagaaggtgaccatgggcaggacaga

SEQ ID NO: 816900 - DNA, 120 bp, Artificial Sequence
  ENSG00000205054_27 (sequence is synthesized)
gactggcaactctgagagagaaatggatttggggaaagagaaaagaaaacactagttacaattggatacatggagttggagttgttggtggtgactgtcatgaaggagtacccagggaag

SEQ ID NO: 816901 - DNA, 120 bp, Artificial Sequence
  ENSG00000205054_28 (sequence is synthesized)
agtaaacagatagatggaacaaaacaggaggaaggcagaactctgaggaatgcccacatctaggggagccagtgcaacagacaacatggaacggcagggttagtaggagacgggccatga

SEQ ID NO: 816902 - DNA, 120 bp, Artificial Sequence
  ENSG00000205054_29 (sequence is synthesized)
gaaggggagatggtgaggcagttgggttgggcaataaagaagttgagcagggtgtgggaagtagaggcagaaagattttgcacctggctttaaagaagtttcaccatgatgactgcatgg

SEQ ID NO: 816903 - DNA, 120 bp, Artificial Sequence
  ENSG00000205054_30 (sequence is synthesized)
aaagttttttttgggtgatgggcccttgagcaatattcaaggataaataataaggagggagagattgaaaggcacccaagaggggactctgatggagcaggatcatgggaggggcaggaa

SEQ ID NO: 816904 - DNA, 120 bp, Artificial Sequence
  ENSG00000205054_31 (sequence is synthesized)
ggggtggagcaggtgggcttgcaaagcagcaggaagaaggtgcgatagaccagagaacagttaaggtaaagacaagggggagcgagggtgcaggcagcctgccggggaaggaaacaatga

SEQ ID NO: 816905 - DNA, 120 bp, Artificial Sequence
  ENSG00000205054_32 (sequence is synthesized)
gatcctatgctgagagtgagggctggggatgaaggtgatgggaagagagaagtggcttggaaatttgaggcagggaggacacggaacagaaagtcaggcaggaatgaataatagggcatt

SEQ ID NO: 816906 - DNA, 120 bp, Artificial Sequence
  ENSG00000205054_33 (sequence is synthesized)
gagaagctgaagatggaagcccggctctgcaacatcctcgtctgcacagtcatgacatttgctccagcctttctgggcagtctggaagcagaagcagaagcaaagaacccagtggcggga

SEQ ID NO: 816907 - DNA, 120 bp, Artificial Sequence
  ENSG00000205054_34 (sequence is synthesized)
atcctccagctatggccagcactgcagccacagtggacagccagagacacaggaccttagcggatgatcggagagaattttacagcaggaagcctttttgttgatatgggtgaccttcac

SEQ ID NO: 816908 - DNA, 120 bp, Artificial Sequence
  ENSG00000205054_35 (sequence is synthesized)
tatgggtgaccttcacctccaagaccggtacagccttgtcttgggttaaatttggagaccaaatgtgaaaaagttttacataaaaaatatataccggccaggcacggtggctcacacctg

SEQ ID NO: 816909 - DNA, 120 bp, Artificial Sequence
  ENSG00000249830_0 (sequence is synthesized)
aaggaactttagaagttttccagcgtgttcccctcagacccacagcctcccgagcctcagccatcaccatgtaaatgctaatgaatgacaagcgccacagaggactttcatcttaccatt

SEQ ID NO: 816910 - DNA, 120 bp, Artificial Sequence
  ENSG00000249830_1 (sequence is synthesized)
tgaagaggaagttggctctggacatggaacaaggatggtttctgccttgctttgacacaactaatggaggccactgaaataatctttcccactaggaaggctgtcacaaggaaagaaaga

SEQ ID NO: 816911 - DNA, 120 bp, Artificial Sequence
  ENSG00000249830_2 (sequence is synthesized)
ggaagctgtcagagagcttctcagctgtgaagattctatgaggtcccaaaggttaatgatgccagttacagaagcttgacagagcaaaaggggaaggatgtgtcacttggctgtgtggct

SEQ ID NO: 816912 - DNA, 120 bp, Artificial Sequence
  ENSG00000249830_3 (sequence is synthesized)
ggctgatcttagggaatgagaaagcaaatgtgatggaggtgaccaaggggtgacaatgcttcaccaccatcatgaagagcatacaggggactgggggtcagagggaagtgaggataggga

SEQ ID NO: 816913 - DNA, 120 bp, Artificial Sequence
  ENSG00000205056_0 (sequence is synthesized)
attatgtagaaccattccaatcctgagtgacaggatttgcaaagacagctgttgggctccacaaacatttggaggaggggaaaatgtgaggttggttgctacattctcctacttcttttt

SEQ ID NO: 816914 - DNA, 120 bp, Artificial Sequence
  ENSG00000205056_1 (sequence is synthesized)
actgaaaggaacagctgcgatcttcacatgtaagatgaagtaaacaaaagctgacaatgcccagcaccattcagcagtaagcattcaaatggatttttcctcaccgcgtttgcaggcccg

SEQ ID NO: 816915 - DNA, 120 bp, Artificial Sequence
  ENSG00000205056_2 (sequence is synthesized)
gcacagtctcagttccccacagcacagagaggaagcaaggtctttgcatgccctgttcacttggccaaacattgccctagatgtgcaattcaacccatataaagcaagcgtaattcaaga

SEQ ID NO: 816916 - DNA, 120 bp, Artificial Sequence
  ENSG00000205056_3 (sequence is synthesized)
gccctgactctttcaccatttcatgatggcttattactcgcacacggcattgtcaggttccagcaactctgtgtgcagcaggcagaaatgcagtgtttatctctgacaggcaaacattct

SEQ ID NO: 816917 - DNA, 120 bp, Artificial Sequence
  ENSG00000205056_4 (sequence is synthesized)
taggctcatcggcatgagtatccacgctgaactggctatcggggaagtagatccctgcatgggaaagtcaagtatccccactgtgtagagctggtccacaatggagaggaggaaaagttt

SEQ ID NO: 816918 - DNA, 120 bp, Artificial Sequence
  ENSG00000205056_5 (sequence is synthesized)
tgcattggaccaaatcactgccttagaaggaaagagattgcaatcccattcatttttaagatctgcaatgggttgggatgatacccatttaaaaaagaaaaaaaaagaggttacctcttt

SEQ ID NO: 816919 - DNA, 120 bp, Artificial Sequence
  ENSG00000205056_6 (sequence is synthesized)
ggcctctttggcaaaggatatgaactagtaataaagcctcagcatcaaggcttgggagtctggctcaaagtggctaagactagaagcatcttctaacataaatatggcagcattaggaaa

SEQ ID NO: 816920 - DNA, 120 bp, Artificial Sequence
  ENSG00000205056_7 (sequence is synthesized)
atagcttggcctttagagagacccagattatcttcaccttaaaaactaccaagaccctggtccagcaagaccaccatcacagcagtaaatacatagccaccaacttcacagaaggttttc

SEQ ID NO: 816921 - DNA, 120 bp, Artificial Sequence
  ENSG00000205056_8 (sequence is synthesized)
cactgagacattgtgaaaaccacaatccattaccggtggatgagtcccagctctcttactacctggagcttccaagcaagacttacctgtcctttgttccagattggttcctgggatcct

SEQ ID NO: 816922 - DNA, 120 bp, Artificial Sequence
  ENSG00000205056_9 (sequence is synthesized)
ggaccaacacaaagagaagaggaaagcctcaagggaaataaaagtgaaggtttcagtgatagtttaaatatatatttttaaatgttagcttttttttaaatacttcacagtgatggatgg

SEQ ID NO: 816923 - DNA, 120 bp, Artificial Sequence
  ENSG00000205056_10 (sequence is synthesized)
agtatttcaaccacaatggcaaagaatgaattaccggcagtgtcagagtttcttgttgctgtgggaagacagctgccatgttgagaggtgccttgtggagaggctcatgtggcgaggaac

SEQ ID NO: 816924 - DNA, 120 bp, Artificial Sequence
  ENSG00000205056_11 (sequence is synthesized)
tgagactggcttctatccaacaaccagtgaggaactaaggccctaaagtcctatagtccacaaggaactaaatcctaccaacaactacatgagtgagcctggaatctgattttccccagt

SEQ ID NO: 816925 - DNA, 120 bp, Artificial Sequence
  ENSG00000205056_12 (sequence is synthesized)
ggggacttaaggtacctacaacctggctgttatgggctaaactgcatcctgcccaaatttatatgtttgagtcttaactcccagcacttcagaacatggttttgtttggagacatagtca

SEQ ID NO: 816926 - DNA, 120 bp, Artificial Sequence
  ENSG00000205056_13 (sequence is synthesized)
ttaaagaggtaatgaagttaaaatgaggtcattaggatgagtcctaatccaataggactggtgttcttatatgaagaggaaatttgaacacagacacatatacaggaaagaccatgcgaa

SEQ ID NO: 816927 - DNA, 120 bp, Artificial Sequence
  ENSG00000205056_14 (sequence is synthesized)
gaagacacagagaggaaacggccatctacaatccaaggagagaggcctcagaacaagccaaccctgcagataccttgatctaggcatccagaattgtatgaaaatacatttttgttattt

SEQ ID NO: 816928 - DNA, 120 bp, Artificial Sequence
  ENSG00000205056_15 (sequence is synthesized)
aagctacccagtctgtggtgctttgttatggcaatcccagaaaactaattaactaattgactgcagccttgcaagggaccctgaaccagaggacccagttaagccatgtgcagattcctg

SEQ ID NO: 816929 - DNA, 120 bp, Artificial Sequence
  ENSG00000205056_16 (sequence is synthesized)
actcacagaactaggagataacaaatgtttgttgttctaaggtgctaaatgttgggaaaatatgttatgtggctatgttgttttgcacatgtgccacataatgatgttttggtcaacaac

SEQ ID NO: 816930 - DNA, 120 bp, Artificial Sequence
  ENSG00000205056_17 (sequence is synthesized)
agaccacacatatgatggtgggcccataagattgtaatactgtgtttctattatgcattctctatttatagatacacaaatacttgccactgtgttacaattgcctactgtcttcagtac

SEQ ID NO: 816931 - DNA, 120 bp, Artificial Sequence
  ENSG00000205056_18 (sequence is synthesized)
tgtaacatgctgtacaggtttgtagcccagaagcaatagactataccatacagtctgggtgtgtagtaggctataccatctatgtttgtgaagtacactctatgatgttcacataattat

SEQ ID NO: 816932 - DNA, 120 bp, Artificial Sequence
  ENSG00000205056_19 (sequence is synthesized)
gaagttgcctagtgatgcatttctcagaatgcatgcccgacattaagtgacacttggctttatgtctatcatgcatttaagatattgcaatatagttaacttatgttttaatacacctct

SEQ ID NO: 816933 - DNA, 120 bp, Artificial Sequence
  ENSG00000205056_20 (sequence is synthesized)
taattctgttttgatcccacaccaaccaagatgcaaaactaattttttcgcccatttccataaaaaacacaattacaatgggcctaatgtggtttatgtcattttccctgaagatttgtg

SEQ ID NO: 816934 - DNA, 120 bp, Artificial Sequence
  ENSG00000205056_21 (sequence is synthesized)
gtggtataggaagcagtcacagcaccctgtataaagctcttccatggcctgcccccttttcgcagtcacctctattatttgaaggaatggtccaaccaacctcaaagctctggaaatttg

SEQ ID NO: 816935 - DNA, 120 bp, Artificial Sequence
  ENSG00000205056_22 (sequence is synthesized)
ccccaaaataattttaccctgaagccattgaagcttaagtttcagaccccagtttcacattcctgtgagttctgcaagtcactgggagctatagagtcttctacgtagatttgggaaaca

SEQ ID NO: 816936 - DNA, 120 bp, Artificial Sequence
  ENSG00000205056_23 (sequence is synthesized)
aggtgaaaatacctcaagaaatctcagaagccaggggcctgcatctccaagcctctggcaattttcttgtggtttctatcctcactctagatatttgcttttgagactgattttgaattc

SEQ ID NO: 816937 - DNA, 120 bp, Artificial Sequence
  ENSG00000205056_24 (sequence is synthesized)
agaattttatattctctcaaaaagagaattctccaaattctataagcttcaggctctacaaaacttgtctattctgcctaactagatttatcatagcacgtaccaaagatggccctgcct

SEQ ID NO: 816938 - DNA, 120 bp, Artificial Sequence
  ENSG00000205056_25 (sequence is synthesized)
catgaggacttttcatatcagacccttagataataatattccctcatgtaagtaataatatttccgcatgtagttatgtatgaataattttcattcatctatatcatgttggccatagtc

SEQ ID NO: 816939 - DNA, 120 bp, Artificial Sequence
  ENSG00000205056_26 (sequence is synthesized)
agtgtccatgtccaatttattttttgtgtccttggtgctcagaaagttaccagatgttcagtcagaattttatttaaaatattttgatgaactagatttaaagatagattaaattaattc

SEQ ID NO: 816940 - DNA, 120 bp, Artificial Sequence
  ENSG00000205056_27 (sequence is synthesized)
ctacacatgatttaatttaatggataaaataagggactgagcattagcctgaactgtgtacttgcattagccctgatgttccccagagggaataatatgtgaagaatactgcataggctg

SEQ ID NO: 816941 - DNA, 120 bp, Artificial Sequence
  ENSG00000205056_28 (sequence is synthesized)
aaaaacaagagttcccagcagaccaatattctttctttctgcaagctgtgagacacctggggaaagttctccacatttggtttttcagctactccacccatgactagaaggaagatttta

SEQ ID NO: 816942 - DNA, 120 bp, Artificial Sequence
  ENSG00000205056_29 (sequence is synthesized)
ttttattattttattttattgtattttttaacagtaaaagaaaaattattgttattttaatgaaaaagaaccacctggaaagtctagtgacatttttgaaggcagggaccactttttcca

SEQ ID NO: 816943 - DNA, 120 bp, Artificial Sequence
  ENSG00000205056_30 (sequence is synthesized)
gggatttgtttccctatgctagtgctccattcacccttgcaccacttcagcaaagcacatagtaggtgtagcagggagatgttaagatggaaacttggccctgaccataggccaagccag

SEQ ID NO: 816944 - DNA, 120 bp, Artificial Sequence
  ENSG00000205056_31 (sequence is synthesized)
ggtgtctagtcgggatttatccataaacatcaatatttatcactagatgatatattgatttcttatctgcctcctatacctattgatctatttttcacagcttatagtggggagggtcat

SEQ ID NO: 816945 - DNA, 120 bp, Artificial Sequence
  ENSG00000205056_32 (sequence is synthesized)
gttcagttattatccttaaaccaaaacaatctcttcttgaaaaataggatgctatgctctgatgtttgcagaggccaggaaattcttgctctgagagttccagaaaaaaagatttgtcca

SEQ ID NO: 816946 - DNA, 120 bp, Artificial Sequence
  ENSG00000205056_33 (sequence is synthesized)
gatttgaactaatttcagaaaaacaaaacaaaaacaaaaaaccatccaaggttaagaggtgacttctgactcacagaatgaacaagaaggcaggggaaaaaataagtcccccaagattca

SEQ ID NO: 816947 - DNA, 120 bp, Artificial Sequence
  ENSG00000205056_34 (sequence is synthesized)
ggtcaaaggaaatgaacagaaggatgatggagtggcccagaggaggatcacgtgacagaaaagtcaagataaattagtggcaggacagaggaaaagaactaaagacctgcaggatcctga

SEQ ID NO: 816948 - DNA, 120 bp, Artificial Sequence
  ENSG00000205056_35 (sequence is synthesized)
aagaaagaatgaaaggaagcagatgaagattctagagcccagctgaatagccaggccgcctgagggtaaagagggagagaaagaggaagcagtgaatcaaatcaaaaaaggatagaaaaa

SEQ ID NO: 816949 - DNA, 88 bp, Artificial Sequence
  ENSG00000205056_36 (sequence is synthesized)
cacctgtaatcccagcactttgggatgacaaggaaggcggatcacatgaggccaggaatttgagaccacggaaaaatatggaggaatg

SEQ ID NO: 816950 - DNA, 120 bp, Artificial Sequence
  ENSG00000205056_37 (sequence is synthesized)
ccctgtctctactagaaaaatatggaggaatgtttgagagattgtgcactgccaggggtgaggacataaatttatttgctatgtgaatgttttttgagactcatctagttcctttacaat

SEQ ID NO: 816951 - DNA, 120 bp, Artificial Sequence
  ENSG00000205056_38 (sequence is synthesized)
tttaatttagaatttctttagctccaaatcaggatcattagctgggagttcttataaatcaaaagcaaaacaaagctattgcaaacaagtgggagttctcataaccttaatcagaaaggc

SEQ ID NO: 816952 - DNA, 120 bp, Artificial Sequence
  ENSG00000205056_39 (sequence is synthesized)
ttgagttgcatttccaaatcctgtctctagagaccatgagtttttaatgatagtatttccatgaaagcccaattgaatacaatcaccacccagaccaaagtgtaggggaaatcataaagc

SEQ ID NO: 816953 - DNA, 120 bp, Artificial Sequence
  ENSG00000205056_40 (sequence is synthesized)
tactttcaaatccgagtcttctttgaaatttaaaattatattccatgataatggttctcataaaccttaatgcaagggaaaaaaaaaaaactacagcagaataaagaagatttaaaaaga

SEQ ID NO: 816954 - DNA, 120 bp, Artificial Sequence
  ENSG00000205056_41 (sequence is synthesized)
agcaggataggaaaaaagacaagccagaggctagctatatcttttcataaagcacacctggtctcataagcacatgagagctaggcccagaagtttcgagccttggagactcacttcaaa

SEQ ID NO: 816955 - DNA, 120 bp, Artificial Sequence
  ENSG00000205056_42 (sequence is synthesized)
caaattccagggaaagacactcaattaagtgttcaggacaattgtatatccccagtgcactcatgtactggaagtgcttaaactctgccctcagtggtcaataaaatggtattaagtcac

SEQ ID NO: 816956 - DNA, 120 bp, Artificial Sequence
  ENSG00000205056_43 (sequence is synthesized)
agacaacccattgccattggtattggctgatgtctctggtagtttatgtgatgacaaacattagccttaacagcagagccttcctttctttgatttccgtgtgaaattctgtggctggga

SEQ ID NO: 816957 - DNA, 120 bp, Artificial Sequence
  ENSG00000205056_44 (sequence is synthesized)
agcaaattccatctttttaaatagaaaaaaaaaacagcagcaaaatgaaattaatgcctttggctcattgtgttgtaaaattatccttgaagttatttcacactgccctaaaaaatcatt

SEQ ID NO: 816958 - DNA, 120 bp, Artificial Sequence
  ENSG00000205056_45 (sequence is synthesized)
gaattcagattataacacagctcttatgaagctgttaggcagttgcatctttaatgaggctgagtaggtaagaggaacagatactctagattgaaagccatcgcaaaaaatgtgaaacaa

SEQ ID NO: 816959 - DNA, 120 bp, Artificial Sequence
  ENSG00000205056_46 (sequence is synthesized)
ctgtattaaatttaatttaatttaaccaatgggtgtatttattccctgccttcttccagaaaggatttagggagcttaggtaatgtggaggtctgaaggtgtagatactcatgaaagcct

SEQ ID NO: 816960 - DNA, 120 bp, Artificial Sequence
  ENSG00000205056_47 (sequence is synthesized)
cagattaatatctagaacatataatgtgtccagatagttttcaattatcaatgcattaatctaagcttggaaaggacttttaaactgcaatgaaacctcaactagtttcaaacctgcatt

SEQ ID NO: 816961 - DNA, 120 bp, Artificial Sequence
  ENSG00000205056_48 (sequence is synthesized)
ttttagtaagctattttgtcatttggagacccacacaaaaaacctattgttcctttaaaaaggagagagagaaaaaaagaaaaacaacctgctggtgttgctttgttcatcttatcacct

SEQ ID NO: 816962 - DNA, 120 bp, Artificial Sequence
  ENSG00000205056_49 (sequence is synthesized)
tatcattcagcagcctattcaggatcaaatgtgggaaagtctgtgtgtgagattaagccctatactcagcacaggaatttcttggataaatgtctttcttaaatggatagctatgtaaaa

SEQ ID NO: 816963 - DNA, 120 bp, Artificial Sequence
  ENSG00000205056_50 (sequence is synthesized)
aacagaagagaaactctattattacaatgcagttgggtttttttgtttggtatgtttcaaatctaatatttaaaattaagaaaattcaaagcaaaccatctgtgtggatgttttcatact

SEQ ID NO: 816964 - DNA, 120 bp, Artificial Sequence
  ENSG00000205056_51 (sequence is synthesized)
ccatttttgtgacaatagcttgcttaaccgagattattagtggattctttcaataagaggaagagagtaccatcattaagatggtatgcctccactagcctttatttttgagattaaaga

SEQ ID NO: 816965 - DNA, 120 bp, Artificial Sequence
  ENSG00000205056_52 (sequence is synthesized)
cctccactagcctttatttttgagattaaagaatgacaaaaatatttatatatattttttcattattaagacggagtctcactctatcgccaaggctggagtgcagtggcgccatcttgg

SEQ ID NO: 816966 - DNA, 88 bp, Artificial Sequence
  ENSG00000205056_53 (sequence is synthesized)
tagccaaaaaatatatattttctttaaaaaaaagttattttctgcctaattacttcaatatttcatgaacattgtgggggaaagaata

SEQ ID NO: 816967 - DNA, 120 bp, Artificial Sequence
  ENSG00000205056_54 (sequence is synthesized)
attacttcaatatttcatgaacattgtgggggaaagaatattcatacagttctctaaatatatcagtgagttgaggtaccaaatacagaattctattgaattctaattgcaacactgaag

SEQ ID NO: 816968 - DNA, 120 bp, Artificial Sequence
  ENSG00000205056_55 (sequence is synthesized)
cagacttactctaagatcctgctacctggactaaccacagactatacccagattccatctgcaagatgtagtggagccaaacatcacatcactgaggaatatttattatatatctttctg

SEQ ID NO: 816969 - DNA, 120 bp, Artificial Sequence
  ENSG00000205056_56 (sequence is synthesized)
tagaggtgagagagtatttatagatataacaaacaattggtcagatactactggagatttggaagcttcactaggtttttcactaaatttgttgatagccaactctaaagctcattctac

SEQ ID NO: 816970 - DNA, 120 bp, Artificial Sequence
  ENSG00000205056_57 (sequence is synthesized)
tactactagccatcttcccttggacaatttcatgggcatcgcttcactgaaaagaaaaatgagtaagtataatctcactagtacatgaataactattataaacacaatactttctacaag

SEQ ID NO: 816971 - DNA, 120 bp, Artificial Sequence
  ENSG00000205056_58 (sequence is synthesized)
gtttattactaatctatgtcatttaagttctagattttacagtattttggagtgatgaataaatagcatgctgttcttctatagctagcaaacaagactcagctttggagacaagaagaa

SEQ ID NO: 816972 - DNA, 120 bp, Artificial Sequence
  ENSG00000205056_59 (sequence is synthesized)
ggaatacaggagatgtttccttgaatgagtcttcttcctaaactctgctagaagtatgtcagaaagcgaaggttacctcagtctccaagtcatgaaaacatgaggtctttctgttttcta

SEQ ID NO: 816973 - DNA, 120 bp, Artificial Sequence
  ENSG00000205056_60 (sequence is synthesized)
gggaaagtatttcatcatttcctagtgtggctttttgcacaccccagaaggaggaagacaagccatcgtgtcacctttacatggtagttgagatgcttcacatttgtacataacatctta

SEQ ID NO: 816974 - DNA, 120 bp, Artificial Sequence
  ENSG00000205056_61 (sequence is synthesized)
tatgatcgaaagaggaactcaaactcgacaggggagaataaggaaatacatctaaaactgacaattatgttaatccctcaattccctgggcccccaaaatagtctcctctatttgccatt

SEQ ID NO: 816975 - DNA, 120 bp, Artificial Sequence
  ENSG00000205056_62 (sequence is synthesized)
tcaaaatagctaatgagagggtaattggacatgtagacactgaatttccactgctcatggtttccttccctgggctcccagtcacccggaaggccccggattacctcaaatgtcataacg

SEQ ID NO: 816976 - DNA, 120 bp, Artificial Sequence
  ENSG00000205056_63 (sequence is synthesized)
ggttcatcgcattacgaattacctccttctgccaataaactacaagttctttgaggacagaaactgtgatttatgggcatttgtatccccagagattcaaagagtgcctgatacagagtg

SEQ ID NO: 816977 - DNA, 120 bp, Artificial Sequence
  ENSG00000205056_64 (sequence is synthesized)
gtgatagatgattttatcatcttatcatcatcatcctcatcatcgttgtacctaaatagaggttacttcctgtttcttttatttaacaataacctattataatatatactatgcattttt

SEQ ID NO: 816978 - DNA, 120 bp, Artificial Sequence
  ENSG00000205056_65 (sequence is synthesized)
aatgcactttacaaatattgtcctcatttaatccctgtaaggtgaatactattattggctccattttgcagataagacactgagtcgtgaaaaggctaagtacctcacacaagatcacac

SEQ ID NO: 816979 - DNA, 120 bp, Artificial Sequence
  ENSG00000205056_66 (sequence is synthesized)
agccagtgacagaactaggatttggctggactcttaaagactctggtttgccatttaaaggtacgctgagctccacaacactgccttagaacttgctcagagcaattgtcatattactat

SEQ ID NO: 816980 - DNA, 120 bp, Artificial Sequence
  ENSG00000205056_67 (sequence is synthesized)
ggtaggtttccctgtctcccttaagacttaaagcttctggagatcagaaactgtattgtttacttgcaaaatcatgggcttaggagccagaaagatctcgatctaagtcctgcctcatct

SEQ ID NO: 816981 - DNA, 120 bp, Artificial Sequence
  ENSG00000205056_68 (sequence is synthesized)
gcttcttcttcatgggattagtagactgattttccccttgcttagccatgcagtttgaatggaattcaccccattctcagctacaaccacggatcttgtttgctttaaaccaatcatcac

SEQ ID NO: 816982 - DNA, 120 bp, Artificial Sequence
  ENSG00000205056_69 (sequence is synthesized)
tgcccaattttctggcctttgattgatttaaaggtgaacacatgaccgctttggaccaatgaggctcaggtggtattttgtgagggtctctggaatagaaaatcatttctcttctgacag

SEQ ID NO: 816983 - DNA, 120 bp, Artificial Sequence
  ENSG00000205056_70 (sequence is synthesized)
aactacaaggcaaggcgcaatcactgatggtgaaagataaagatcattatattaggaactgttggctgtcatactgctaatgtgaggtgagttagccttagaaagaggatgctaccttga

SEQ ID NO: 816984 - DNA, 120 bp, Artificial Sequence
  ENSG00000205056_71 (sequence is synthesized)
aaggcagggcagatctatggaaataaactgagtttgtggtgacattgatagccactttagttcatcagctgaatcccaatctacttggttttttcagctctgtaagccaacaaataccct

SEQ ID NO: 816985 - DNA, 120 bp, Artificial Sequence
  ENSG00000205056_72 (sequence is synthesized)
gctagtgttttagcctatgccagttgttttttctgctgcttgttaataagacacatacagtcttggacaaattatataaaaatatgaatctttggccaggcatggaggctcacgcctgta

SEQ ID NO: 816986 - DNA, 120 bp, Artificial Sequence
  ENSG00000205056_73 (sequence is synthesized)
gacactcggtctcaaaaaaaaaaaaaaattctgaatctttgaatgttatcgtatagctttttaaaagactagattaagctatggatgtaagcaccaatgcatttttttaaaagtatattg

SEQ ID NO: 816987 - DNA, 120 bp, Artificial Sequence
  ENSG00000205056_74 (sequence is synthesized)
gatgaatgagttaaagtctaagtgaattcagcaagtttgtaacccttgagctcttgtgagctcaatctgccctcaatcatctgagaatgaacaaaacagactcaaccattttgtgtcatc

SEQ ID NO: 816988 - DNA, 120 bp, Artificial Sequence
  ENSG00000205056_75 (sequence is synthesized)
cagatgaatagaaagggcctgaatatattctttttttatattttttgtcataggccctagcgttttcatctgctcagtttttgagtgtgcttgttagggctttaatgctaaactcaatgt

SEQ ID NO: 816989 - DNA, 120 bp, Artificial Sequence
  ENSG00000205056_76 (sequence is synthesized)
aagctgggtttatgtaatttagtggtttctagacttaggcttcctaaatgttccattagacaagaagacaaaatatgaaacaaaataacatcaaactaccattaacaattagcattgtca

SEQ ID NO: 816990 - DNA, 120 bp, Artificial Sequence
  ENSG00000205056_77 (sequence is synthesized)
gagtcagtaaaaactgttttgaaataaagcagcttttcaggccagtatttgagaactaatgatagagtttttttgtaggcaatgaatgaagtgttgtggaacaaatgtggatttggactt

SEQ ID NO: 816991 - DNA, 120 bp, Artificial Sequence
  ENSG00000205056_78 (sequence is synthesized)
tcaagaccaacttgaaccagagtcttgaatctgcaactttactagctgtggcttctttttaattgattaactttctttttctgtaaaatgggaataatgattcctacctcttacaagcgt

SEQ ID NO: 816992 - DNA, 120 bp, Artificial Sequence
  ENSG00000205056_79 (sequence is synthesized)
tgtggtaggaggtattccaaatgagataaatatgtgaaatcactaaaacttccagaatacatggaaataatatatgtctgtattggcaaattatgagtgtagtaatgagggatttacatg

SEQ ID NO: 816993 - DNA, 120 bp, Artificial Sequence
  ENSG00000205056_80 (sequence is synthesized)
gacacatttacattctttagttcagactccctttgacgacacataacaaacacacacaagaatatttgccctgtgtccagcactcttttgagaatttctctcttctcctccttctgatat

SEQ ID NO: 816994 - DNA, 120 bp, Artificial Sequence
  ENSG00000205056_81 (sequence is synthesized)
cccaaccaaccaaccagtaggaatgtgccctagaaactatgttttacagctcagtccacatcttttcaccttacaaattacttattgttagtttcttgggaaagtaaaattgagatatta

SEQ ID NO: 816995 - DNA, 120 bp, Artificial Sequence
  ENSG00000205056_82 (sequence is synthesized)
agattctatgaaattggttggtggtattgaagactgtgctgctgctgctgctactgctccagaactctagtggagatattacaaatgggagcagaaaaagtgagaaggtggtctgtagag

SEQ ID NO: 816996 - DNA, 120 bp, Artificial Sequence
  ENSG00000205056_83 (sequence is synthesized)
acagagcacagcacagaggtagaaaggttgagataaagaaacaatgcagtgagagaaggagagaacacagacatagaaacagagacataaaggcaccagacacgagagcagagataattt

SEQ ID NO: 816997 - DNA, 120 bp, Artificial Sequence
  ENSG00000205056_84 (sequence is synthesized)
aataaggccgtagtttctcttggatttccagttccttcttttagtcaattctgatatttagcacactgcactgcaccagatatcttgtcgccttcaaataaagtatttttcccccttaaa

SEQ ID NO: 816998 - DNA, 120 bp, Artificial Sequence
  ENSG00000257579_0 (sequence is synthesized)
tgacatgacgtgccctgagcaaaaccgaccaagagtgatgtctctctgtgagtttaaagctggccaggagcaggtaaaataaagcattctgagtggatgtgcactgcatggagttggctg

SEQ ID NO: 816999 - DNA, 120 bp, Artificial Sequence
  ENSG00000257579_1 (sequence is synthesized)
tcagctggcaggggtgatgcacatggaggaggtggggagcctgttcagaccctcggaccctgtacctgttcgctcatggtgttgatcccatcgggccccagcagagacactgcctgcttc

SEQ ID NO: 817000 - DNA, 120 bp, Artificial Sequence
  ENSG00000257579_2 (sequence is synthesized)
atccggaaacccaggtcctgcttaaacttggcttcgatggccaccgcatccagctttcgagatgcacaaaagcagtcgtcggccctaaggaagggaagagacatcatgcgggtacagcgg

SEQ ID NO: 817001 - DNA, 120 bp, Artificial Sequence
  ENSG00000257579_3 (sequence is synthesized)
cttcccagaggggcacaggagcaaactccgcaggaagcaccctgggacattgcatttgcttttcatgtaaattgcctgttcctaggctccaattaaaatgatggcctccggatgtctctt

SEQ ID NO: 817002 - DNA, 120 bp, Artificial Sequence
  ENSG00000276997_0 (sequence is synthesized)
aagattcccttgagaacaagtactgtcctgcggtttcatggcctttcttccatttgtggttcttgcgaagtggaatttaaatgacatcttatcaagatggataaaccctagtttcccagt

SEQ ID NO: 817003 - DNA, 61 bp, Artificial Sequence
  ENSG00000276997_1 (sequence is synthesized)
gatgggggtctcaccctgtcacccaggcttgagtacagtagtgctatcacagctcactgca

SEQ ID NO: 817004 - DNA, 120 bp, Artificial Sequence
  ENSG00000276993_0 (sequence is synthesized)
tggtgaaccctgggagtggcccacacagcaccttcttcgcaaggcacttcctatggcctcccttcctccagtgaccttccagactggtgaatgttattgatgaagtcattacgtagccca

SEQ ID NO: 817005 - DNA, 120 bp, Artificial Sequence
  ENSG00000276993_1 (sequence is synthesized)
gaaagccagtcgataattcccagggatgttggtgatcagagggtggcctgggagaggacaatgagaggcttccactgactgctgacctggagaagtggtcctggagttccaggagcccag

SEQ ID NO: 817006 - DNA, 120 bp, Artificial Sequence
  ENSG00000276993_2 (sequence is synthesized)
agggcatttggagtcagtgaagcaggatcccagaaactgaccggcacagtggaaggcgttcacgctgcacctcagtgcctgggagtaggcaccccacaaatactccttgaaaaaataaaa

SEQ ID NO: 817007 - DNA, 120 bp, Artificial Sequence
  ENSG00000276993_3 (sequence is synthesized)
cttcgatatgtggtcaaatgtagggtctgtattgccctgcctggctctagatacaacttcttcttcttacgtagtctgtttgcatgcaccagctataaataaacattttccttggtcccc

SEQ ID NO: 817008 - DNA, 120 bp, Artificial Sequence
  ENSG00000273312_0 (sequence is synthesized)
ggggccaggaatccaaagagaaagtagtgcaaggccccgaaggctgcctccagcagggtccggaggaggaggtggatgatgtagccggccgaaaagtcgggcacctggaggccgccgcgc

SEQ ID NO: 817009 - DNA, 120 bp, Artificial Sequence
  ENSG00000273312_1 (sequence is synthesized)
tccccgaatggccgcgggcagcgtctctgcccggaggccggctcccgggggtcggggcagcggcgggggcccagcgcggcgagcgtggctcctcggtgcaggacatagacgctgaagacg

SEQ ID NO: 817010 - DNA, 120 bp, Artificial Sequence
  ENSG00000273312_2 (sequence is synthesized)
gcggaggggaggaggacgcacacgccctggatcagccagaaccgcagccacaccagggttgcacacaaacacccctccacctgctttggtctttggagtcagcaccccagtgtcagcaca

SEQ ID NO: 817011 - DNA, 120 bp, Artificial Sequence
  ENSG00000273312_3 (sequence is synthesized)
ggatgatctgtgagagaacaatgtcaaacgcaagactcccttacatgacggaggaaccgcggaaccattcaaagaaactagaagcctcagctctcttccctccagaaaggcacagccctt

SEQ ID NO: 817012 - DNA, 120 bp, Artificial Sequence
  ENSG00000273312_4 (sequence is synthesized)
tcttttgggagtgggtggactttcagcttggtgcttgcacactgaaaatgagtaaatacctggaccctttaaggactcaattccaccatggcagtggaaataaaaacagcgcaggagttt

SEQ ID NO: 817013 - DNA, 120 bp, Artificial Sequence
  ENSG00000273312_5 (sequence is synthesized)
ggagatggtcccaatactcacccaccatggtcacgttgcagtttaatgtgatgatgagaaaccctagcaagtccacgccttccatgcttccagaatgtcccaggctccaggctgcaggag

SEQ ID NO: 817014 - DNA, 120 bp, Artificial Sequence
  ENSG00000273312_6 (sequence is synthesized)
acactggagggctgtgttctccaaggaggcggataaatgtcctttaactacataagacttaaaggtgtgagctggagataagaaagcaaaggtctgagccaggagtaggaggtgggtttt

SEQ ID NO: 817015 - DNA, 120 bp, Artificial Sequence
  ENSG00000273312_7 (sequence is synthesized)
gtcatctcttattgtgggctattcttactcgcctgggatattcccggcctgtggcagcgctcatatgtccccaccaggacagccagatgcttcaggatataatagcagcaactactttta

SEQ ID NO: 817016 - DNA, 120 bp, Artificial Sequence
  ENSG00000273312_8 (sequence is synthesized)
acccaagaaagaaaacttctgctaactagccaagtaaatttctctattaaaaaggcatttcctccttgaaaacatttccacaaccacttcacttgtgcaagaagcccttaaagtgttcac

SEQ ID NO: 817017 - DNA, 120 bp, Artificial Sequence
  ENSG00000273312_9 (sequence is synthesized)
gttttgtcttctcaatcaagcatgaatcgccatgccaccatcacacgaacccacaaggatctcgcccttattctgaattcctgtgtcattggtgcaggcagaaatctgaaactcagttgg

SEQ ID NO: 817018 - DNA, 120 bp, Artificial Sequence
  ENSG00000273312_10 (sequence is synthesized)
gtgtcccaactttagaccgtgacttggttattctcctgctgcttcctgtgcagtgagtgacaactcttcgcttggagacaaaagcctgggtgcaaagcccggggcagccccctactcact

SEQ ID NO: 817019 - DNA, 120 bp, Artificial Sequence
  ENSG00000273312_11 (sequence is synthesized)
ggggaagtcattggatccttccagatagcctcatcttgcaataaggagaatcatgccattccacttgccatttgtgggaggcttatgtgaaatgatggtgtagaataagagcaactggtg

SEQ ID NO: 817020 - DNA, 120 bp, Artificial Sequence
  ENSG00000273312_12 (sequence is synthesized)
tgaagtgggtgtacgacaacccatatccgtgggatttcaatccctaattggcctctacgaccttcacagattacatcttccctttgtatctcccagccccatctagcctggagctgttcc

SEQ ID NO: 817021 - DNA, 120 bp, Artificial Sequence
  ENSG00000273312_13 (sequence is synthesized)
cattgaatctacttaataaatgtctgttaaatctgtcatgaaatatcacggtctggacctgctgacatcaatcacagttgcgtcaaaatcctatcgctgcagccaccttcatatctggga

SEQ ID NO: 817022 - DNA, 120 bp, Artificial Sequence
  ENSG00000273312_14 (sequence is synthesized)
cgaggcccagcagaaaagacagcgcgctgaccgcccagaggaacagcatcagcagggacttctctgtgggccgcgacacgtagcagtccaccacgcccgtgcacggagggcgcgtgcaag

SEQ ID NO: 817023 - DNA, 120 bp, Artificial Sequence
  ENSG00000273312_15 (sequence is synthesized)
agacaaacctctcctgctcgtcctggtagacgggtcgccccgccaagacaatcaccagcatccgcagcagcatcgtgaggacgaaccagagctttcctggaagagaggaagcgggcatgg

SEQ ID NO: 817024 - DNA, 120 bp, Artificial Sequence
  ENSG00000273312_16 (sequence is synthesized)
cctcatcaccccgaatacactgccctgagtaacagctttaaagtgtctattggggctgagattgggaaattgaaacgtcaataagcatgtctttagttttctgtttgtttgtgttgtcgt

SEQ ID NO: 817025 - DNA, 76 bp, Artificial Sequence
  ENSG00000273312_17 (sequence is synthesized)
ataagcatgtctttagttttctgtttgtttgtgttgtcgttgttgttgttgttggacacagggtcctcctgccgcc

SEQ ID NO: 817026 - DNA, 120 bp, Artificial Sequence
  ENSG00000273312_18 (sequence is synthesized)
acacctgtcagcttgtctttactcacagcatcaggtagttcatttgacaaatatttactgagcactgaacatccttgtttgtaagatgcttcaagatgagtagatttttaaaaagcatta

SEQ ID NO: 817027 - DNA, 120 bp, Artificial Sequence
  ENSG00000273312_19 (sequence is synthesized)
aattttcttcttaggagaataagccttttaaaagaggttggtgtatttctgtaactgccaattcgagctgctgatttcagtaaatcttacttatgacaacagtccagggatctctattta

SEQ ID NO: 817028 - DNA, 120 bp, Artificial Sequence
  ENSG00000273312_20 (sequence is synthesized)
atcacagggcttgtatttaatgttagtctacggcccttgaaattgaatttctttatgaacattccatttttcagattttttaatcattcagaattcctcttccccttttccagttattag

SEQ ID NO: 817029 - DNA, 120 bp, Artificial Sequence
  ENSG00000273312_21 (sequence is synthesized)
gaatgaatggggcttgtctttcttcaatgtatcgtgaaggaatgacaccaagctagaaaaccaaaataactgtcaagccctattttcatggcaccggccaactgtttcgaaacatgttta

SEQ ID NO: 817030 - DNA, 120 bp, Artificial Sequence
  ENSG00000273312_22 (sequence is synthesized)
aaactcagccaaaataacttgtgaatattgtgttttgtgatgagagaaacatcgcctgacatcataaaaacaaaacaaaaataaatatgtaaagacagtcaaacaaagaataatatcatt

SEQ ID NO: 817031 - DNA, 120 bp, Artificial Sequence
  ENSG00000273312_23 (sequence is synthesized)
atgtgatgagtcattgagttgaacttttaacatcaagttggttttgtctaaatctacaaaataatgagccagaaaagtatcaactgcatctccggcatatattcatccttttctgacccc

SEQ ID NO: 817032 - DNA, 120 bp, Artificial Sequence
  ENSG00000273312_24 (sequence is synthesized)
catacctctctgaaaatgtgagtcgtctgcattaaacaaaaatctattattttctttgttaaaaaaaataactaaacttgggatttggtttaaagtgcacaagagaaatggctactcctt

SEQ ID NO: 817033 - DNA, 72 bp, Artificial Sequence
  ENSG00000273312_25 (sequence is synthesized)
ggatttggtttaaagtgcacaagagaaatggctactccttaaaaattaagcttccaggccaggcgtgctcac

SEQ ID NO: 817034 - DNA, 120 bp, Artificial Sequence
  ENSG00000273313_0 (sequence is synthesized)
gtccgagctccagggcagctctggggcagaactgtccggatctaacaatccctggggagccggagaccggtgactgccgccctgcccgcaggccatgtggcccccgctgttgctgctgct

SEQ ID NO: 817035 - DNA, 120 bp, Artificial Sequence
  ENSG00000273313_1 (sequence is synthesized)
gctgctgctcccggccgccccggtccccaccgccaaagccgctccccacccggatgctaacacccaggaaggccttcagaacctgctccaaggagtcggggctggcggagacggagagct

SEQ ID NO: 817036 - DNA, 120 bp, Artificial Sequence
  ENSG00000273313_2 (sequence is synthesized)
tgtattgatggggctgtggtggccacgcgaccagaaagccggggaggaagacctgcggttccgtgagaggcgtccagggctgcaggccacggcgacaggctccggggaacatggggcttt

SEQ ID NO: 817037 - DNA, 120 bp, Artificial Sequence
  ENSG00000273313_3 (sequence is synthesized)
ccctgtccactcccaaggagtgtgggcctcaacgcattggcaggggacggccgtgtgccctctccagaccccacccccagatgcatttattagaaataataaagttctttcttagctaga

SEQ ID NO: 817038 - DNA, 120 bp, Artificial Sequence
  ENSG00000273311_0 (sequence is synthesized)
tttgcttcctcagtggtgaggactcaggagagtttatggagcatcgcgcagcagcaatggcagcgtttgtcacagagatgtctcagagactttgatgccactactctagtgggcgtgtct

SEQ ID NO: 817039 - DNA, 120 bp, Artificial Sequence
  ENSG00000273311_1 (sequence is synthesized)
gacacgacccctccagctgcctccttcccattctggggtgacaggcagcattcacaaatgaacttgaactcaagtgtggctgtttgttcacaagtcaccactgacagcttcaaacttgtc

SEQ ID NO: 817040 - DNA, 90 bp, Artificial Sequence
  ENSG00000273311_2 (sequence is synthesized)
tgtttgttcacaagtcaccactgacagcttcaaacttgtcttcaaacttacgcctccagggtttaagccgaactacaggcgcatgccacc

SEQ ID NO: 817041 - DNA, 120 bp, Artificial Sequence
  ENSG00000273311_3 (sequence is synthesized)
atgtccacattggagctcttcctgttctctagtatgatgatatggagggtagtgacagttgtcattgcttacagtcatccatttttaccttagaatcttcgagaaaaagatgaagtatta

SEQ ID NO: 817042 - DNA, 120 bp, Artificial Sequence
  ENSG00000273311_4 (sequence is synthesized)
ttctcagtttcgagatcagactcctcaccaccaggcgggggctttaaggtagacactacagggaatctgatctcagggtgatcctctcccttccacttgcaaaaagagaggagcaggtgg

SEQ ID NO: 817043 - DNA, 120 bp, Artificial Sequence
  ENSG00000273311_5 (sequence is synthesized)
gccactgctctctgagatgttaacacccctcacactccacgggcatgctttgtcattctgcacaccggtgtagctgcagctctgtgtgaattcagatctcaagagaaatgtaaatcaaaa

SEQ ID NO: 817044 - DNA, 120 bp, Artificial Sequence
  ENSG00000273311_6 (sequence is synthesized)
gtatgagtttctttctttcttgggtgccacagtaggaatgaaatgatggggacttttggaagcccctggacttgtggcccctgtagaagagcagcttgggcagggtgtgatggccatctc

SEQ ID NO: 817045 - DNA, 120 bp, Artificial Sequence
  ENSG00000273311_7 (sequence is synthesized)
tgtctctaggggccctgtggaggagaggctgcagctagaggctgggccacaacagtgaaagctgcccctgagtggaatgttgtcagtgtccctccacactggggggctgctgggtgggag

SEQ ID NO: 817046 - DNA, 120 bp, Artificial Sequence
  ENSG00000273311_8 (sequence is synthesized)
ggcatgtaccatcagacatgtgcagttgactgtggtgagcacaaggctacatttgcagccaagcccaccagaggacccagagctagagggtgatgcttggaccccattctgcagggcagt

SEQ ID NO: 817047 - DNA, 120 bp, Artificial Sequence
  ENSG00000273311_9 (sequence is synthesized)
ttctcctcgtatagggtgcatgtctgtttagggccatgagaagcactggttgagtgcttatcaagttccctgtgcccggccacataactttaaacccccagcttagtgactggctacaag

SEQ ID NO: 817048 - DNA, 120 bp, Artificial Sequence
  ENSG00000273311_10 (sequence is synthesized)
agtcaaactctgttcacaagccatgctacctggactcctggttccatttctcaggagtctaccagtgctgccttgccactctgtccaagctttgtaagaatgcccagatgtgtacaagga

SEQ ID NO: 817049 - DNA, 120 bp, Artificial Sequence
  ENSG00000273311_11 (sequence is synthesized)
tgacccatttgtgggcatgtatggcctaaagagcctgcccagccccaaggacttcttagcagagcagggcccttagtgcatctgggtgggcccagagcagctgcagccctctctcctgca

SEQ ID NO: 817050 - DNA, 120 bp, Artificial Sequence
  ENSG00000273311_12 (sequence is synthesized)
cggccagagcgacttagctgggccctgctctgcctgccctgtggccatgcttccatgggctcctgactctcctagggccttcttctggaaagtgctcaagaaccgagacactatcaccaa

SEQ ID NO: 817051 - DNA, 120 bp, Artificial Sequence
  ENSG00000273311_13 (sequence is synthesized)
aactggagactctgggaataggatgtcatgtgttaagcatcagaatgtcccctccaacaagctaagagtgtctactcttgccaccctgtcatcattgtgcttgaggtcaaagccagtgcc

SEQ ID NO: 817052 - DNA, 120 bp, Artificial Sequence
  ENSG00000273311_14 (sequence is synthesized)
agaaggcaagaagaaatgaaaaaccatccaggccagaggggaagaaatgaaaccatctccctttgcagatcacatgattgcatagaaaatcctagggaatctacaggaaagttattagaa

SEQ ID NO: 817053 - DNA, 120 bp, Artificial Sequence
  ENSG00000273311_15 (sequence is synthesized)
ctaataagtgtgtttaagcaaggtctccagatataaggtcaacgtaacaaaaattcatcatatttatataatctatctgtaacagttgaaaattgaaaattttgagaaaagtgccattaa

SEQ ID NO: 817054 - DNA, 120 bp, Artificial Sequence
  ENSG00000273311_16 (sequence is synthesized)
taatagcaccaaaaaaaatgaaatacccaattataaataatataaaatatgtgcacattctgtttgctgcaaactgtaaaaccatgatgacaaaaaggcttaaataaaaggaaagatacc

SEQ ID NO: 817055 - DNA, 80 bp, Artificial Sequence
  ENSG00000273314_0 (sequence is synthesized)
cgctgccggcggccccgggggcgccccttccgcggccgaggcccccgctcgcgtggggaagcttctacctgcgagcctgc

SEQ ID NO: 817056 - DNA, 120 bp, Artificial Sequence
  ENSG00000273314_1 (sequence is synthesized)
ctacctgcgagcctgcggcccctgcccccggcacccgagacatccccgacccggcgcgccggattctctgccaggttttacagcctccctcgccttgggaccgccgcggaggacccgttc

SEQ ID NO: 817057 - DNA, 120 bp, Artificial Sequence
  ENSG00000273314_2 (sequence is synthesized)
ccgccacttcggacctcgcgagcggggctgagctgcttgggtcggggacaccaccagcctctggagaaacggcccgaagcaccccgaagaagagggggtcccagtcccctgcccctccct

SEQ ID NO: 817058 - DNA, 120 bp, Artificial Sequence
  ENSG00000273314_3 (sequence is synthesized)
tgtgcgcacccccacccccagcttgcctggaacctgactccacacctttgtcgaccgggacagggactgggggttgcaccccagatcagaaagtcagaggtggccctccgaatcggcgcg

SEQ ID NO: 817059 - DNA, 120 bp, Artificial Sequence
  ENSG00000273314_4 (sequence is synthesized)
gacttccgaggaacctcagccaattctcgacccccttaccacctgcaaggccttaggaatcggctccagaaagctcgagcttatctgcgtgtttcgttttaaaaatcacttctaagataa

SEQ ID NO: 817060 - DNA, 120 bp, Artificial Sequence
  ENSG00000273314_5 (sequence is synthesized)
aacctaactaggctttccccttcagactttcagtaactcctgtttggcaaattttgacattcactctatccttcgtctttgtaaggacatatcaagacttagaaggctttgattacacat

SEQ ID NO: 817061 - DNA, 120 bp, Artificial Sequence
  ENSG00000273314_6 (sequence is synthesized)
acggatggcatgagtcgtgatataaaatagtattgttttcacgtgtacttcgaagtcatctcatttgaaattaactgtcataattgactatttggaatattcaacctaaatactacccgc

SEQ ID NO: 817062 - DNA, 120 bp, Artificial Sequence
  ENSG00000273314_7 (sequence is synthesized)
tgctgtggtgacggggggtggaggaagcgtggtggaaccccaacacctagtgaggggtggctgattaataccacggctcacaacataacagagcggctcattccatgaacaaccccgggg

SEQ ID NO: 817063 - DNA, 120 bp, Artificial Sequence
  ENSG00000273314_8 (sequence is synthesized)
ggatttcgaattctatcatctgggcaaaagatgtgatgagtgtaacttcctgttttctccaaactaaaacactacgcagattcctgtaccgctctgggacagaaatcctcagccagagca

SEQ ID NO: 817064 - DNA, 120 bp, Artificial Sequence
  ENSG00000273314_9 (sequence is synthesized)
gtgggttatctcagaagaaacatcccactggtctgtgtgatccttctattgaaatgtggtcttttatctacatctaagtatctctagaagtaatgcgtttgtatgtacttgtcactcaga

SEQ ID NO: 817065 - DNA, 120 bp, Artificial Sequence
  ENSG00000273314_10 (sequence is synthesized)
tatgtaatcccttaatttgtgcggggttttggggtgtgaaaaattcttggtttatatcctacacttttaaataacctcgtcaaaacttacatgtatttaacacctttttttgtgagcaca

SEQ ID NO: 817066 - DNA, 120 bp, Artificial Sequence
  ENSG00000273314_11 (sequence is synthesized)
tggtaaggttggaagtaaaaatggaaggtttatccctgtggcccatgttttccagtgtacctatgtggggttttaaaaaaatgtcccaatttcttccttttactggagactgcgtttttt

SEQ ID NO: 817067 - DNA, 120 bp, Artificial Sequence
  ENSG00000273314_12 (sequence is synthesized)
agacaacagcttatcttcctattccctaaccagtcttctccaatcttaccattcaatatagcctccttttctgtgacttcctccagctgaatagaagggctgagtgggtcaaccttccct

SEQ ID NO: 817068 - DNA, 120 bp, Artificial Sequence
  ENSG00000273314_13 (sequence is synthesized)
gtattgtttgtttcctccaccctctctttttccttaatagcagtatttggtccacccacaccaccctctctcttctcactgcctccattcctggttcttaactcctttctattctttact

SEQ ID NO: 817069 - DNA, 120 bp, Artificial Sequence
  ENSG00000273314_14 (sequence is synthesized)
ctccacctgcctacacgatcattcttagcagcaaatttattccatcgacttttacgtccacttaacatccagattgcatttactttgcgcagataaccttgccgcctacctcacaagtca

SEQ ID NO: 817070 - DNA, 120 bp, Artificial Sequence
  ENSG00000273314_15 (sequence is synthesized)
aggccacctgctgctctctttctactttaaaacatccttcctccatctttaccccccaactcagcaaaattgatgtctctctcggatgacccaaagtttggagggataattaatttgata

SEQ ID NO: 817071 - DNA, 120 bp, Artificial Sequence
  ENSG00000273314_16 (sequence is synthesized)
gatgtcagaatcaaagttcaaaacagtctcaacaggctacaacattaggccaaaagcaatgaaataaaatataactttcaaatctaaatatgatgtactagctggaaaagcccaagtttt

SEQ ID NO: 817072 - DNA, 120 bp, Artificial Sequence
  ENSG00000273314_17 (sequence is synthesized)
agattttagaccttggtttgtatctagttacccaaatttgagtcatatccagtaactcaaattactatcttttgctctagtaaggtcaactgttaatttgagataaaaatacctacttca

SEQ ID NO: 817073 - DNA, 120 bp, Artificial Sequence
  ENSG00000273319_0 (sequence is synthesized)
atctcataaattcaatttctccatctagtggccttcccctcacccaggccctccccacctccctcctggaccacaacagcagctctaaaaggcttcccagctctggctatttcacagtcc

SEQ ID NO: 817074 - DNA, 120 bp, Artificial Sequence
  ENSG00000273319_1 (sequence is synthesized)
agaggcacccacatgctgatccccgcaaggcctcttcaggatggggactctagccactcaaattcttccattgctccccagtaacttaagtttaaatcatttagtcacgtgccattcaag

SEQ ID NO: 817075 - DNA, 120 bp, Artificial Sequence
  ENSG00000273319_2 (sequence is synthesized)
gccctctgggttctggcctccaaggacctttgctacctgatcttctccttagtggtttacacacatcattgcccagcaactacaaatcgattcctgcccactctgcaccccggcatttcc

SEQ ID NO: 817076 - DNA, 120 bp, Artificial Sequence
  ENSG00000273319_3 (sequence is synthesized)
catccctacctatgcctttgctcatgtttccttcaacgaggatactccaagacctcaagtccaacattacctttctttcaatgtctggctcaaaggctctttatccatgaagcatttctt

SEQ ID NO: 817077 - DNA, 120 bp, Artificial Sequence
  ENSG00000273319_4 (sequence is synthesized)
gatcatcccagccacagataaacacacaacctttcttttctatgaacttgtggtatgtttatctctctaccttttatacatttctctttctctctgcatttattctttgtttttcttttt

SEQ ID NO: 817078 - DNA, 120 bp, Artificial Sequence
  ENSG00000273319_5 (sequence is synthesized)
tctaagacatcttgttatagcatctctgcatttattctaattttatctgtgcacagaaccttagcttcaagctccttgaagggtagcatcgtgtcccagcctacactgtcacactcagga

SEQ ID NO: 817079 - DNA, 120 bp, Artificial Sequence
  ENSG00000273319_6 (sequence is synthesized)
gaagcacccagtagatggtggctctgtatctacctacagagtgccactgaggagcacaggccttcaggtctgtagcccatcagctgagccttcgcatcagctcctagaacagtgcctggc

SEQ ID NO: 817080 - DNA, 120 bp, Artificial Sequence
  ENSG00000273319_7 (sequence is synthesized)
atagagcaacacccagaaatcattgttaaatgaaattatccacaagggagtcacctagtgtctacatgatagaaattctttccctgtagaatataacatgaaagggggtgtgaagaagcc

SEQ ID NO: 817081 - DNA, 120 bp, Artificial Sequence
  ENSG00000273319_8 (sequence is synthesized)
ttctctctccccatacttccagatgcaagaaagcttcacgttaactgtctcccacaagctatatagctactctcggcaataaacatgacatataatactttggtgcatttggcgtgtcaa

SEQ ID NO: 817082 - DNA, 120 bp, Artificial Sequence
  ENSG00000273319_9 (sequence is synthesized)
aaatattcaattttaacatgtcagaaagaatcatttttcaaaaacagtctcctttggagaagagagttattcaaacaatatccaaaacctttttggatctcacattttgaagaggtccaa

SEQ ID NO: 817083 - DNA, 120 bp, Artificial Sequence
  ENSG00000273319_10 (sequence is synthesized)
cttccgttggttaaaaaaaaaagtctattatataatgaaagccttacaactgactgagaattatagaatttcagaaataaatcccagtctgttcatccttaaaataagaagctatttttc

SEQ ID NO: 817084 - DNA, 120 bp, Artificial Sequence
  ENSG00000273319_11 (sequence is synthesized)
agggctttcatgtccaaaattatattatgtaagccacttcataaatcatgtacacaacaattctcatttttccattaaatctctattttgaaatttaattcactcatccattttttcaga

SEQ ID NO: 817085 - DNA, 120 bp, Artificial Sequence
  ENSG00000273319_12 (sequence is synthesized)
cactcatccattttttcagagatgggatcttgttctgtcgctcaggctagagtgcagtggtgtgatcatagctcactatagccttcaactccagggctcaagggatcctcctgcctcagc

SEQ ID NO: 817086 - DNA, 120 bp, Artificial Sequence
  ENSG00000273319_13 (sequence is synthesized)
cacctcagcctcctaaagtgctgggatcacaggtatgagccaccgtgccctgtctttttattttgaccccctcttggctctaacagcacacgtgtacctctgttacaggacatcagtcta

SEQ ID NO: 817087 - DNA, 120 bp, Artificial Sequence
  ENSG00000273319_14 (sequence is synthesized)
agcacacgtgtacctctgttacaggacatcagtctacagtgctacctctttttatagtcatttatctcactaacctgtgtctttctgaaatgccagacccatgttcacttttgaatctac

SEQ ID NO: 817088 - DNA, 120 bp, Artificial Sequence
  ENSG00000273319_15 (sequence is synthesized)
agtaccttctactgaaatgtagtagctggctcagtccatgtttataacatgaaacaatgacttgaatcagtggtttgatcacctaccatattcatgagacctaactattggctccctcct

SEQ ID NO: 817089 - DNA, 120 bp, Artificial Sequence
  ENSG00000273319_16 (sequence is synthesized)
accctcaaaggacagagatttcccaccgctgtggatagtcaaaagaagatagaaagttcttaagtgcttcatttaatgtgtttatttagtccccttgaaataaatactgatgggtaaaac

SEQ ID NO: 817090 - DNA, 120 bp, Artificial Sequence
  ENSG00000273319_17 (sequence is synthesized)
caaattaaatcacatgctaaaaaggatagccagtcaagtacctagctgagtatctaaaattagtacacacacacaccaaaaacaaaaacaaaagcacggaaaaagccaaaaagccctgcc

SEQ ID NO: 817091 - DNA, 120 bp, Artificial Sequence
  ENSG00000273319_18 (sequence is synthesized)
tattcagccctgtgtacccttcactgactaggaagtgacccacttttcaggtatcatccaatcatacaaactgggcatcagtgtcgtcagaagcccacacatgttcatctcaagactcaa

SEQ ID NO: 817092 - DNA, 120 bp, Artificial Sequence
  ENSG00000273319_19 (sequence is synthesized)
caacataaacacgtctatgtttccaagaaagctcgttgcaagttggtgacaaatttggaaaaaaaaaaaaaaaaaaaagctctaaataaaattacagacatgactttcacatttgagctc

SEQ ID NO: 817093 - DNA, 120 bp, Artificial Sequence
  ENSG00000273319_20 (sequence is synthesized)
tccaaatatattgttatgggtttaagaaataccacacttctgtgtcacaaagagagttctaaaaaccagtatgttctgagaagtccatacctgctacttgggaactaaacaaggcttgta

SEQ ID NO: 817094 - DNA, 120 bp, Artificial Sequence
  ENSG00000273319_21 (sequence is synthesized)
acaactgaatctctttagaagactgttaacaccttgcttaagtgtgtaaaaattgaaaataaacataactgaagatttgagaatttttcagttataacacagttcttatgaaagatggaa

SEQ ID NO: 817095 - DNA, 120 bp, Artificial Sequence
  ENSG00000273319_22 (sequence is synthesized)
aatatttcatattctcttatatatttataaaaacagcagatatttcttctatttacagaggtggaaacgaaggcaagcaaatgcagtcattttgttggaggactattctacatttccaaa

SEQ ID NO: 817096 - DNA, 120 bp, Artificial Sequence
  ENSG00000273319_23 (sequence is synthesized)
gcaatgaagacatgaccccaaactaaactctcctgcaacgtattcttacaagaaaaaggctaaaagccttattgcttaacaaaagctaaacaatgtgaattatttcaataactggtccaa

SEQ ID NO: 817097 - DNA, 120 bp, Artificial Sequence
  ENSG00000273319_24 (sequence is synthesized)
aaagctgcagcaggccactgagtaacttggacatctgttgccatgcttgttcatgctttcccctgagatgacatatatgtatcatcattaataggtgtccttgattttgataagaacaat

SEQ ID NO: 817098 - DNA, 120 bp, Artificial Sequence
  ENSG00000273319_25 (sequence is synthesized)
attcctgtacatccccacatctcctgtacatagccatgtgctgccatcttctgattatgcccagtggagtgtaaacattttttcatgaaaaagcaaaatcaataaaagtaaaactcccca

SEQ ID NO: 817099 - DNA, 120 bp, Artificial Sequence
  ENSG00000256628_0 (sequence is synthesized)
cctggcagcagctccgccgcccagaggcgtccgagaccctccgactcgtgggtacgcataggcctcgccagcgagccttgcccaggcaacgagtcgccagcccgccccctcgccgcgggc

SEQ ID NO: 817100 - DNA, 120 bp, Artificial Sequence
  ENSG00000256628_1 (sequence is synthesized)
taggtctcacctcgccaccagtacgtcttggacaagtagtgccaggtctgatgccgggtgtggtgagtgccgccgggacccaggtgcgccgcctcgatgaggtcccggcgtcgctccggc

SEQ ID NO: 817101 - DNA, 120 bp, Artificial Sequence
  ENSG00000256628_2 (sequence is synthesized)
tgcagcaccacctccagctccgcgaaggtcttgcggtgccgctgccgccgctggtaatacagagtcccgccgcgcaccacgtagcaggcggcagcttttcggattttacgcttgacattg

SEQ ID NO: 817102 - DNA, 120 bp, Artificial Sequence
  ENSG00000256628_3 (sequence is synthesized)
ccctcggtgcccggcgcatacggctcgcgctcgttcgtcaggtaacgcaggatggcccggtagctttcctcgcttgacatcgcggaccgcggctccctgagggcgcctgtcagggacagg

SEQ ID NO: 817103 - DNA, 120 bp, Artificial Sequence
  ENSG00000256628_4 (sequence is synthesized)
tgaggaaaacggcccgctacctacgggcggctgcaggaggagcggcggcaccgtagggagaaacggctgcgcctttggcgagcgctcttcgacggctcccttagtccgaaggaaaagcgg

SEQ ID NO: 817104 - DNA, 120 bp, Artificial Sequence
  ENSG00000256628_5 (sequence is synthesized)
gcgagttggtaaccagggggaactgcacttctccagcgcgcgggatccgctggcgactgacaaaatggctgctgcaccaccggaagtgacgcaaggcaagggcggggactgagccctgat

SEQ ID NO: 817105 - DNA, 120 bp, Artificial Sequence
  ENSG00000256628_6 (sequence is synthesized)
tggagcgcactctcgttttctggcttgatggagccgatccagtgacgtcaggaatgcgggtggacattttggaagcgggtaggacccttcactgcagttcgagggagtctttaagcagac

SEQ ID NO: 817106 - DNA, 120 bp, Artificial Sequence
  ENSG00000256628_7 (sequence is synthesized)
atcttaagtcctggcagtttctcttttcatttttcccttttccacgctttctaaggagccacgtgtagggggagctggtggacagttgagagttcagccgaaacatccagagggttagga

SEQ ID NO: 817107 - DNA, 120 bp, Artificial Sequence
  ENSG00000256628_8 (sequence is synthesized)
gtccgtttttacgtttgagactcccaacatcataaaagcatattttcaggcttctggaaaaatattagtctcttgacacgggaccagagacagcccatttacatggaaatttagattcca

SEQ ID NO: 817108 - DNA, 120 bp, Artificial Sequence
  ENSG00000256628_9 (sequence is synthesized)
gttaacagttataaaattttcagtgcctccctcagtgatgagttattgtttctaaacttgcacctgctagctccagactactcaaggaagagtcgagattcttttggaattatcagcatt

SEQ ID NO: 817109 - DNA, 120 bp, Artificial Sequence
  ENSG00000256628_10 (sequence is synthesized)
tatagtcaatgttattgcgagtggaaaagggggtcggtaacactattttaaggctttatttacatatatttttacacaaacgtaggggaaaaggttctccattttgcaccaaatatatat

SEQ ID NO: 817110 - DNA, 120 bp, Artificial Sequence
  ENSG00000256628_11 (sequence is synthesized)
accctttcctgggacgaatctgcagcgctcacaggggcccagggctgacatccctcctcggggactggggttggacactgtcgccgctttgctaaagccagaacatttcaggccgagggc

SEQ ID NO: 817111 - DNA, 120 bp, Artificial Sequence
  ENSG00000256628_12 (sequence is synthesized)
tccagctgcagacacggcctagtacacttctccaccggagggtctgtagtctctgggtgaggccctttgacgctcctagaagtagctgacgggcagacaggtgaatacagtaggctcgaa

SEQ ID NO: 817112 - DNA, 120 bp, Artificial Sequence
  ENSG00000256628_13 (sequence is synthesized)
aacagaatcatacagccagcctctggtgttaggggcgtgtttttgtgtgtgtgcacacgcagtaattcccggatggcccggacatccttgaaagattccaggtgcggggacatgagctct

SEQ ID NO: 817113 - DNA, 120 bp, Artificial Sequence
  ENSG00000256628_14 (sequence is synthesized)
caaggcccagaagaaaaaagaaactaccaggcttgggatctacttagttgctgagtttgccactatagctcaaaggaggaatttaaaaatggagatgcacctctttcccccatggggtcg

SEQ ID NO: 817114 - DNA, 120 bp, Artificial Sequence
  ENSG00000256628_15 (sequence is synthesized)
ggcagtgagagcagaagaccaaatgcaccctctgcgaacccaggaggctggtctacgtgtcaggccaaccccactctcctgtcatactgtctttaaatattttggccgggcgcggtgact

SEQ ID NO: 817115 - DNA, 64 bp, Artificial Sequence
  ENSG00000256628_16 (sequence is synthesized)
tggtgaaaccctgtctctactggagcagaggttgtagcgagccgagattgtgccactgcattcc

SEQ ID NO: 817116 - DNA, 120 bp, Artificial Sequence
  ENSG00000256628_17 (sequence is synthesized)
aaaaactaaacattttaagttaattgatatttaatattaaatatttaatatattaagtgaatacattcaaatctgcaaacaatacagctaggttgtagaagagttaaaaaaatccctcca

SEQ ID NO: 817117 - DNA, 120 bp, Artificial Sequence
  ENSG00000256628_18 (sequence is synthesized)
ctcagtttttgccaaaacaccacctgtaagcactgagaagcctactgatgcacgcattatcctttgggccaatagaaacaaacgttttaataaaatgctttcccagtggtcaaattgtct

SEQ ID NO: 817118 - DNA, 120 bp, Artificial Sequence
  ENSG00000256628_19 (sequence is synthesized)
tcctgagtaaagctaaacttgctgtagtgagaacaggtagtgtttatttctagcttcttctgggtcccaggttacctaagacccaagggtaatgacaatgggcagctccactttattaaa

SEQ ID NO: 817119 - DNA, 120 bp, Artificial Sequence
  ENSG00000256628_20 (sequence is synthesized)
agccaacatttagcccagacattttattctccaaaaatcagcaagcatagctttacattcaagttgggtataatgactttattttcccagtaattccctaaataaaactattacaaaaaa

SEQ ID NO: 817120 - DNA, 120 bp, Artificial Sequence
  ENSG00000204832_0 (sequence is synthesized)
acctccctctttctgatctctttttcatgctcctccttgctccaaagaaaagccggatggcaaaagagcccagaacctattggaactgacaaaatcaagtcacggcgcctacaaagatga

SEQ ID NO: 817121 - DNA, 120 bp, Artificial Sequence
  ENSG00000204832_1 (sequence is synthesized)
tctgtgccagagaatgtcttccaggagttctgctacagagaagagagtaacccccatccatcatggccaaagcacccagtcaggctccgctctggatccagcccgacaaatgcaaccctt

SEQ ID NO: 817122 - DNA, 120 bp, Artificial Sequence
  ENSG00000204832_2 (sequence is synthesized)
gaatagggtttgtgcaagcaaactggatgacgaccgaagaaaccctgtcgcttctgagaagacacccaatccaagaatgtgagttctggaaatgtcattaaatgtcagttatatacatgc

SEQ ID NO: 817123 - DNA, 120 bp, Artificial Sequence
  ENSG00000204832_3 (sequence is synthesized)
aagacacccaatccaagaatgaaagcatcaggttcaatacctaggaactcctgtagagggtgttgtggaatcttctttaaaagaacaaaacaaggcaaaacaaagtttaatagggtagag

SEQ ID NO: 817124 - DNA, 120 bp, Artificial Sequence
  ENSG00000204832_4 (sequence is synthesized)
agagcagccaggtgtggtgggtcatgcctgtaatctcagcaatttgggaggccaaggcaggatctcagcaatttgggaggcgaaggcaggcagatcacttgagcctaggagttcaagacc

SEQ ID NO: 817125 - DNA, 120 bp, Artificial Sequence
  ENSG00000204832_5 (sequence is synthesized)
tgggcaacatagcaagaccctgcctataccaaaaaaaaaaagtgaacctaggagtatgaggctgcagtaagctgtggttgtaccagtgcactttgggaggccaaggtaggcgggtcttct

SEQ ID NO: 817126 - DNA, 78 bp, Artificial Sequence
  ENSG00000204832_6 (sequence is synthesized)
acaaacaaacaaacaataaacaaaaaccatagagtgatttctggccaacagagcaagaaagaagtgaaccaatgaaaa

SEQ ID NO: 817127 - DNA, 120 bp, Artificial Sequence
  ENSG00000204832_7 (sequence is synthesized)
ttctggccaacagagcaagaaagaagtgaaccaatgaaaaccggtccaagtctgggagtcaatatggaaaagctgcctaattaatgtggaagccccagggaaatgatataccatgaaaac

SEQ ID NO: 817128 - DNA, 120 bp, Artificial Sequence
  ENSG00000204832_8 (sequence is synthesized)
ctaacactacaaaaactagttgtcagacacatgtgagcagtgaacagaatcctaatatgctggtttaacattcaaaactggagagtgtttgtgtatcttctaaagactgtttggggttta

SEQ ID NO: 817129 - DNA, 120 bp, Artificial Sequence
  ENSG00000204832_9 (sequence is synthesized)
tttgtggagttcagctgagtgtcatcagaacaaagattagtgcaaaaaatctttcagaaatcatgcccaaacatttgcatgcaccttaaataagaaatgaaatagcaagaagagtatgtc

SEQ ID NO: 817130 - DNA, 120 bp, Artificial Sequence
  ENSG00000204832_10 (sequence is synthesized)
acaataaagtataaatagcaagtgatatgtctcatcgtactgagacagttttataaatgaggcaaaggccttgtcaaaaaataatgatgattttcaaaattctgaaacgcaaaggaggaa

SEQ ID NO: 817131 - DNA, 120 bp, Artificial Sequence
  ENSG00000204832_11 (sequence is synthesized)
aactacttcattcagttaacaggaagcacacaagaatctccccatcaaccaagattttttttttctataacccacgctttgtaagacaataatagcaaaaactataaactagaatttgtt

SEQ ID NO: 817132 - DNA, 120 bp, Artificial Sequence
  ENSG00000204832_12 (sequence is synthesized)
gaaagaacaacttctagaatttgccctttatgtgctgttttaccattgtcatgtctgtctctggtatgacttcctcatctattagtagcctcctaataaatttgaacaaatgaatgaatg

SEQ ID NO: 817133 - DNA, 120 bp, Artificial Sequence
  ENSG00000204832_13 (sequence is synthesized)
ctggagtgcagtggcgcaatcacagctcaatgcagccttgaactcctggactcaagcaattcttctgcctcaacctgccaagtagttgggactacacatgtgccatcacactcagctttt

SEQ ID NO: 817134 - DNA, 120 bp, Artificial Sequence
  ENSG00000204832_14 (sequence is synthesized)
ttctgtgtatagtgtaagggaaaccacctttgctttgacatatgtgtgtaaacggtattgtctgtcgaacgttgcctcgtgagtcataaaaagaaacatcccagcctctttgttaagaga

SEQ ID NO: 817135 - DNA, 120 bp, Artificial Sequence
  ENSG00000204832_15 (sequence is synthesized)
agtgctgtcaaactatttacattcttacgaacagacacaagtctacacaaaatgacaagcgcacatttcggtggcaacagatcagctgcttcagaaatttatctggcttggggaagagat

SEQ ID NO: 817136 - DNA, 120 bp, Artificial Sequence
  ENSG00000204832_16 (sequence is synthesized)
attattaacaaaagcaaatatggaaccactctgaggaattaccagcagctgatgtaaattttcacctcagaaacagaccaggtccagggagaaaaaaactagagaggttttgattctcct

SEQ ID NO: 817137 - DNA, 120 bp, Artificial Sequence
  ENSG00000204832_17 (sequence is synthesized)
cccaccgtctgcctttcttttccaaagaatagagagcctgccccaactggaaaatcaggtagcttctcccacacaggaagggatctgctgcctgaggcagaaagggctgcttgggtgcct

SEQ ID NO: 817138 - DNA, 120 bp, Artificial Sequence
  ENSG00000204832_18 (sequence is synthesized)
ctgtccccagtgccccttcatttctgtcttcctacatcctcttgagattacatgttgattacattatattctattgtatcgtactacataatacagcaacactgaaagaatgaaaggaaa

SEQ ID NO: 817139 - DNA, 120 bp, Artificial Sequence
  ENSG00000204832_19 (sequence is synthesized)
tatcacattctcattctgcttgagcaattcaagatataagaaaaacagactgtctacatttcttcagagttcctccaactattggcttaaaattcctgaaattaaaattatagttctttg

SEQ ID NO: 817140 - DNA, 120 bp, Artificial Sequence
  ENSG00000231496_0 (sequence is synthesized)
aggcatccgctcattacagctggtgagctttctgttaacagtgctgcaagaacaaaggtggaggcattgaagcaacttgtgcttctctcctcattgcaacccacccttgtggcaggaaaa

SEQ ID NO: 817141 - DNA, 120 bp, Artificial Sequence
  ENSG00000231496_1 (sequence is synthesized)
gtcttcttgatcattcaaaccacttgaagacagcattcttcttcaggaattgaactgaatgtgctgccatcctaggcaaaaactcccaactgactgatttgcaaaggatttgtagctgat

SEQ ID NO: 817142 - DNA, 120 bp, Artificial Sequence
  ENSG00000231496_2 (sequence is synthesized)
gctgagcaggtgtttcatgtcgagaaagagaagaatatctggggatagggcattaaatgatgagaggaccaggataaggaaaccagaggctggcctgaatcactacaatcctggtcttgt

SEQ ID NO: 817143 - DNA, 120 bp, Artificial Sequence
  ENSG00000231496_3 (sequence is synthesized)
agaaatccttgactcacctcttcattccaaattagcaaaatgagcaacatgtaattttttttatctacaggatttgggtttgttctgacttgtctaattacactcttcaattcaccaaaa

SEQ ID NO: 817144 - DNA, 68 bp, Artificial Sequence
  ENSG00000274847_0 (sequence is synthesized)
ccggaagtgcggatcccagcggcggtcgtgtagctgagcagccctggggcttggttctatgtccctgt

SEQ ID NO: 817145 - DNA, 120 bp, Artificial Sequence
  ENSG00000274847_1 (sequence is synthesized)
aaatctctgccccgcagcgcctccaccccagagacccggaccaagttcacacaggacaatctgtgccacgcccagcgcgagcgcctggactcggccaacctgtgggtgctggtggactgc

SEQ ID NO: 817146 - DNA, 120 bp, Artificial Sequence
  ENSG00000274847_2 (sequence is synthesized)
atccttcgcgacacctccgaggacctgggactccagtgtgacgccgtgaacctggccttcgggcgccgctgtgaggaactggaggacgcgcggcacaagctgcagcaccacctgcacaag

SEQ ID NO: 817147 - DNA, 120 bp, Artificial Sequence
  ENSG00000274847_3 (sequence is synthesized)
atgctgcgggaaatcacagatcaggaacacaacgtggtggcactgaaggaggccatcaaggacaaggaggaacctctgcacatagcccagacccggctgtagctgctctcacaccggccc

SEQ ID NO: 817148 - DNA, 120 bp, Artificial Sequence
  ENSG00000274847_4 (sequence is synthesized)
aacatgcagctgtgccgcgatgcagcccagttcaggtactgcctgggcctctgaggcagtcccaggtgcccccgtccacctcctcgctgcgaccctctccaataaacactccaatctcca

SEQ ID NO: 817149 - DNA, 120 bp, Artificial Sequence
  ENSG00000274847_5 (sequence is synthesized)
cacacacatcccccacaggtgctgagaggggagggagactctgcggccacacacaacatgcaagcacgccttaaacacacagatatagacatgacactgggcaggtcatgggtcgggggc

SEQ ID NO: 817150 - DNA, 120 bp, Artificial Sequence
  ENSG00000274847_6 (sequence is synthesized)
caccctgtgctacctcatcttcccgggaggaagctccttcagacaaggtgagctcctggaggccacggggccagagaggccagagagggccattccctgctgccctgagggtgctgtccc

SEQ ID NO: 817151 - DNA, 120 bp, Artificial Sequence
  ENSG00000274847_7 (sequence is synthesized)
cacctctggtggaaagtatgacctacgcctgggctacaggcatagatgggccgtccttttgtttcccttgttaacggatgcctggtggccccttctgagcctaagtacctttcttccttc

SEQ ID NO: 817152 - DNA, 120 bp, Artificial Sequence
  ENSG00000274847_8 (sequence is synthesized)
cctgcccctcagttccttcaaggaactgggtgcctccttccgtcaaatatcaggaatggaaagaactgagcctggtcggctgaggccagtcctgtcctgtcagggtcgagattgcacgcg

SEQ ID NO: 817153 - DNA, 120 bp, Artificial Sequence
  ENSG00000274847_9 (sequence is synthesized)
ggtcactcattcccactcaggtccgcgctccctgggaggaccctcgtaatttatgctctgccctagagccgctttcctggtaggatcctttcatggcgtcttcccaggacctcctgccag

SEQ ID NO: 817154 - DNA, 120 bp, Artificial Sequence
  ENSG00000274847_10 (sequence is synthesized)
ctcccattgggagttttgggtcccctccaccccagtaggtgcatacttctgccctccccagccccagctcacaccccccaacacccccaagctggtgagtgaggtggaggagctgtacaa

SEQ ID NO: 817155 - DNA, 120 bp, Artificial Sequence
  ENSG00000274847_11 (sequence is synthesized)
gtccatcacagcgctgcgggagaagcttctacaagcggagcagtccctgcgcaacctcaaggacatccacatgagcctggagaaggacgtcaccgccatgaccaacagtgtcttcatcga

SEQ ID NO: 817156 - DNA, 120 bp, Artificial Sequence
  ENSG00000274847_12 (sequence is synthesized)
ccgccagaagtgcatggcccatcgtacttgctaccccaccattctgcagctggctggctaccagtgagcagcggcacggtgcttccccccaatcccccaaataaacagtgcgttagcttt

SEQ ID NO: 817157 - DNA, 120 bp, Artificial Sequence
  ENSG00000274840_0 (sequence is synthesized)
gaagatcactttgattgccatgtggagagtgaactgtgggaggaccccagtggaggcaggaagactaaaccagaagacagtcacagtagtccagataagagatgcatatgttatcaatcg

SEQ ID NO: 817158 - DNA, 120 bp, Artificial Sequence
  ENSG00000274840_1 (sequence is synthesized)
cagccatgcttcctgtactgcagaactgtcttcgattagatattacttcttctgaacaatcttccttgatgacccagctactttacatctctggatggaatcctcctctttgctctaatg

SEQ ID NO: 817159 - DNA, 120 bp, Artificial Sequence
  ENSG00000274849_0 (sequence is synthesized)
agctacacctgtgtcccgagcattggactggatgctgccatatagcagctcatttaacctttgtcccatctgcagatgaaagaacaggggcccagaatggctactggtggagccaggatt

SEQ ID NO: 817160 - DNA, 120 bp, Artificial Sequence
  ENSG00000274849_1 (sequence is synthesized)
acagctttcccacccttttgtttttcctgcaaaattaaccattggaccaaaagccaaagcatcttcttctccaatagctacttggccctccagaagactgtggcacagtgtgagatgctc

SEQ ID NO: 817161 - DNA, 120 bp, Artificial Sequence
  ENSG00000274849_2 (sequence is synthesized)
cccagcagcttccaggtctcacctgtggccttgatgcctgggtgaacaaaagcctttcttttggtttggtacctttgtatttctgaatctttagtaaaagcgaacattgttttaaaagta

SEQ ID NO: 817162 - DNA, 120 bp, Artificial Sequence
  ENSG00000237899_0 (sequence is synthesized)
ctcttgttgccggggctgcagtgcaatggtgcaatctcggttcactgcgacctccgcctctcggatgagaaaatttaaagaagacgtgtaatttctccaaagtcgcccagctcagaaatg

SEQ ID NO: 817163 - DNA, 120 bp, Artificial Sequence
  ENSG00000237899_1 (sequence is synthesized)
tttgttcctggaatggactctgagagtgcatgatgcagcttggaggacgtctcctctgggatccctccccactgcccccaccgcttcctggggtgaatgagtcctctgtagccatcagga

SEQ ID NO: 817164 - DNA, 120 bp, Artificial Sequence
  ENSG00000237899_2 (sequence is synthesized)
ttcgctgtatcaggagtgttcctctgctgtcacctctgatgactattttcctcaattcagaatccccagcacctgcaaaaggcctggataaagaaggggctgagcaggaacagaggattg

SEQ ID NO: 817165 - DNA, 120 bp, Artificial Sequence
  ENSG00000237892_0 (sequence is synthesized)
ggagtgcatgactcatctcctggcccctccaggaaaccggagaaggcagaaaagggcaagaatgttgtgttgtctttgggctgtggagttcatgattatggacactttctgaattattgg

SEQ ID NO: 817166 - DNA, 120 bp, Artificial Sequence
  ENSG00000237892_1 (sequence is synthesized)
cactaagggcacatcctgcttagcatggaggctggacagctctgggaaagcagagattctttttagggagtccagagcatttttttcttctttcttatcccctctttccaatagagatgt

SEQ ID NO: 817167 - DNA, 120 bp, Artificial Sequence
  ENSG00000237892_2 (sequence is synthesized)
ttgtctactcagagtgattaccaaggtggagctcattatgttacctggcacctgcaactacttgcctcatgttggactaaagtggaaagactcctattgggaattcactcagggaggcac

SEQ ID NO: 817168 - DNA, 120 bp, Artificial Sequence
  ENSG00000237892_3 (sequence is synthesized)
caggcattgttagaaaagcagtatcgcagagcacttaagagctgagccttgtgatcgggtggacttgggtttatgtcctcgcactgtcgcttcctagatttatgacctcagtttcctcat

SEQ ID NO: 817169 - DNA, 120 bp, Artificial Sequence
  ENSG00000237892_4 (sequence is synthesized)
ttctaaagtagagacagggatggagggtggggagaatatgaattaatttggattaaatggatgagaatcagaagtatttatttggaattggtgtgaattggagcacatggggaactgaaa

SEQ ID NO: 817170 - DNA, 120 bp, Artificial Sequence
  ENSG00000231729_0 (sequence is synthesized)
gttctttgtgatatttcagcgacttgctttttgtatgtagtaaagagtttatatttaaataagacagtgagactaccttggggaggtcatccaaatcccagtcaggtggtgggtgagtgc

SEQ ID NO: 817171 - DNA, 120 bp, Artificial Sequence
  ENSG00000231729_1 (sequence is synthesized)
atgctccatggcttgatgatggttaggattggtggcccaatttcacaggttccctggtataggttctttgtgcattccacctgcccaagaagttgcagcaaaagcatctacttaaaagct

SEQ ID NO: 817172 - DNA, 120 bp, Artificial Sequence
  ENSG00000231729_2 (sequence is synthesized)
aaagtggcttgatgaggcatactcctgggacaagaagatcaaatgtagggctagatggatttgttactcctctgccttcctgtcagtaggcagcattgaaaataaactagttaaaaagta

SEQ ID NO: 817173 - DNA, 120 bp, Artificial Sequence
  ENSG00000231728_0 (sequence is synthesized)
ctttcctgttaagtgggcacactgctacctccttcacagggctgctgagaagaaaggagacaggcgcatccgcacacagaaagcactcagtaaatgctgtttccccccttccccctatac

SEQ ID NO: 817174 - DNA, 120 bp, Artificial Sequence
  ENSG00000231728_1 (sequence is synthesized)
aaagagactgaaagcaaccgcggctgcccggaggtccgaactggagggtggccgcagccgtgacttccttgggaaccgcgctgcctcgactcggctacctctctgcgaagcactcgctaa

SEQ ID NO: 817175 - DNA, 120 bp, Artificial Sequence
  ENSG00000231728_2 (sequence is synthesized)
gccgggcagccccggggtcgcttagcggcccaggaggcgccagcgatcctgttcccctgcagagctatggggaccggaaggcgaaacagagctgtcgacgcgggagcatacgctgcccac

SEQ ID NO: 817176 - DNA, 120 bp, Artificial Sequence
  ENSG00000231728_3 (sequence is synthesized)
cagtggagcgcaggtcatcaaagccgaatccgaatttgaattctgtgcggctgattgcagagctgtcttgaggccctgaggactgggatctgcgacccccagtggacaaaagtcgactct

SEQ ID NO: 817177 - DNA, 120 bp, Artificial Sequence
  ENSG00000231728_4 (sequence is synthesized)
accccagaggctaattttctcaaggcaggcacctgttgagaggctgcaagtaaaatacaggggaacgctagtttccgagctcatgtaagaatctgagaaataacgggggtaaactttgac

SEQ ID NO: 817178 - DNA, 120 bp, Artificial Sequence
  ENSG00000231728_5 (sequence is synthesized)
gggttcttattacctcttgcggggggaggtagtaaaggggaggggcaggtggcctgtggcgtcctgaagatttttcatgcattctttttccgagaactaaacattgtcaactctaatata

SEQ ID NO: 817179 - DNA, 120 bp, Artificial Sequence
  ENSG00000231728_6 (sequence is synthesized)
tctatagcgcaacttgcttcaaggacagtaataattttcatttaataattttccatttaatccctttactacatggtcatttctgtctcttatattcctaggtttccctttataaggatt

SEQ ID NO: 817180 - DNA, 120 bp, Artificial Sequence
  ENSG00000231728_7 (sequence is synthesized)
tccctttataaggattagtcagatcaacattatatctctaacaatgttccttagctttttcactctcattatacctagagaatttaatggaataaaccagattttatatatatatatata

SEQ ID NO: 817181 - DNA, 120 bp, Artificial Sequence
  ENSG00000231728_8 (sequence is synthesized)
tatataaatgtgtgtgtgtgtgcgtgtgtgtgtgtataaaattactcaacattcaagtagtcttgaaaaaagatgggtaggagtcaccttctttcccttcatcagttaccagtgttctct

SEQ ID NO: 817182 - DNA, 120 bp, Artificial Sequence
  ENSG00000231728_9 (sequence is synthesized)
taacataatggaagaggcaggaggtattcccacctacaactcaggattcctatgtcctatgggttcagttgtgtccccccccccaaaaaaaaacaccaaatacatctattggactcctga

SEQ ID NO: 817183 - DNA, 120 bp, Artificial Sequence
  ENSG00000231728_10 (sequence is synthesized)
acagctgaaagtgagatgatttctctactccacagttgggaagggggattagacaacagagaagatggagaagacaaaagggcttgtggaaaactgcaagtcaacatttctttggtaagg

SEQ ID NO: 817184 - DNA, 120 bp, Artificial Sequence
  ENSG00000231728_11 (sequence is synthesized)
cagttaccacacatgagcactggctgccaagcaaagactatggttcactgaagagaacctgacaggagtagccacccctctgtttcaggcagtaattgccatgtgagactgtgatggttg

SEQ ID NO: 817185 - DNA, 120 bp, Artificial Sequence
  ENSG00000231728_12 (sequence is synthesized)
tccagatcttctgattattcaagtaaagctggaaatttagatttgtatttgatccctcacatctttaaatgcaggcaactaattaaaattaaaagaaaaccttctgtccaacattttgca

SEQ ID NO: 817186 - DNA, 120 bp, Artificial Sequence
  ENSG00000231728_13 (sequence is synthesized)
ttttctgattataaaaacacacgttcatttttaaacttacctgtattcacactaccccaagaaaccatttttaaacttttgatgtttttccttgttgtttttctacttactgggaggatg

SEQ ID NO: 817187 - DNA, 120 bp, Artificial Sequence
  ENSG00000231728_14 (sequence is synthesized)
ccatatgcacatcccaatagacagaaaatttcacatttttaatgtgaaaattttacaatagttgtttactcacattagtagttatgcatctacattattatttttaatagctacatggta

SEQ ID NO: 817188 - DNA, 120 bp, Artificial Sequence
  ENSG00000231728_15 (sequence is synthesized)
ttccattgtgtggttgacacattattaatccaattctctattgatggatatttaggtgtttataatttttcattattacaaacaatactggaatacacattcataaccacttttaaaaac

SEQ ID NO: 817189 - DNA, 120 bp, Artificial Sequence
  ENSG00000231728_16 (sequence is synthesized)
atgttcactatataagatggagggagaaattttatcatagaagttttgtttttcagagtaggaaaacctgggattcagtactaggatccatcttagttcatacttttataaaaggcgtgg

SEQ ID NO: 817190 - DNA, 120 bp, Artificial Sequence
  ENSG00000231728_17 (sequence is synthesized)
aagacagagaacataccaattttgcagtagatttattcaagtaaactatgacaagtcagcagtgaaaaattgcagaaacaagcaatgagtggtcaagaaagtgtaagatgaacctcaatg

SEQ ID NO: 817191 - DNA, 120 bp, Artificial Sequence
  ENSG00000231728_18 (sequence is synthesized)
tggaaaagtatagtaatacatttagagaaacacatgccaaactatataaagagtattatcagattattacatagcactgcttgctgccacaccagagaaatgattctgtctcgatgggtc

SEQ ID NO: 817192 - DNA, 120 bp, Artificial Sequence
  ENSG00000231728_19 (sequence is synthesized)
aattcttagatcatttaattatctgtcatcgaaaatgtagcaaacttgacagcagtaatatatactataaacgtgcaatagcaagagcattgagcgctgaactagaaatcacatctgaat

SEQ ID NO: 817193 - DNA, 120 bp, Artificial Sequence
  ENSG00000231728_20 (sequence is synthesized)
ttagactgagctcagctgcttactgtgattttgagaaaattgattagcccctctgtgtctcagttttcatatctgtttaatactttattgtcatggtgattatgaagacccaataaacta

SEQ ID NO: 817194 - DNA, 120 bp, Artificial Sequence
  ENSG00000231728_21 (sequence is synthesized)
aacagagctgtcgacgcgggagcatacgctgcccaccagtggagcgcaggtaaagaaagagcgcgcgatttcccggcgcggagaggggtgggggaagccccaccaggactgggcggcgcc

SEQ ID NO: 817195 - DNA, 120 bp, Artificial Sequence
  ENSG00000259035_0 (sequence is synthesized)
ggcatgacatcacaaagctgtccttgtttgaagacacttgggaatttcaggtgttgccgtaagtctactgagctctctgggtgtctaaccttgccttcttgtcatcagctattaaaacta

SEQ ID NO: 817196 - DNA, 120 bp, Artificial Sequence
  ENSG00000259035_1 (sequence is synthesized)
ctaaaacagaagaatgcttaaccactacagctgttaaaacattagtacgtgctttgtctcatgaggccaacacagtacttcaaaaccaaacacttaggaatttcttctcaaccatcattg

SEQ ID NO: 817197 - DNA, 120 bp, Artificial Sequence
  ENSG00000259035_2 (sequence is synthesized)
ctgcagccccagggaaaatcaagacagctgtgagtggtcatggaagctcacagatcataaatttgcacttcgggtttcaggatcgagaacatcctggaaataagagcggaagcagaaaag

SEQ ID NO: 817198 - DNA, 120 bp, Artificial Sequence
  ENSG00000259035_3 (sequence is synthesized)
ccagcagagcaggccatcacaatagacgtggcgtgagatgtcatggaactggagcagttaaacctcattctccagggtactggtgctactgccaagagcggaaaactttcatcttccaaa

SEQ ID NO: 817199 - DNA, 120 bp, Artificial Sequence
  ENSG00000259035_4 (sequence is synthesized)
acctcaatcagccagtttctcatctgcatcccataaatcatcaagaaagaacaagctcattatctcagcaccagggacaaaagtcttttacatgacactgaacttctgactactgcaaaa

SEQ ID NO: 817200 - DNA, 120 bp, Artificial Sequence
  ENSG00000259035_5 (sequence is synthesized)
gtctgaaatttcaattttgttacgtgttgtgacttgcactgggcccaaatccagaggtaattgggcctagtggtctgaagagttacttgggtgttctgtaattttagtagatttggagaa

SEQ ID NO: 817201 - DNA, 120 bp, Artificial Sequence
  ENSG00000259035_6 (sequence is synthesized)
agagaggtggggatgtctgtccctgaagatattttctcatagaagcaaggaattacaggaacttctctgttgtgttttgggtaagtgtttccatgctgctactctgaataatagggtaga

SEQ ID NO: 817202 - DNA, 120 bp, Artificial Sequence
  ENSG00000259035_7 (sequence is synthesized)
tatttccaggtacaggctgttaaaatttgctatattacctccattctgtatgtagttccttctctacataacagtgttggttaggtagtggaaccttctaaatgacgcactatgtgattc

SEQ ID NO: 817203 - DNA, 120 bp, Artificial Sequence
  ENSG00000259035_8 (sequence is synthesized)
ctgtgtcatatagaatgttctatgattcttagccagataatcatattcccagaaaaggcctctcaactttcacctgcctttctaaggactgaaatactctgagtgttgcataaagggtgt

SEQ ID NO: 817204 - DNA, 120 bp, Artificial Sequence
  ENSG00000259035_9 (sequence is synthesized)
tccaaatatgggcattcacctgtttcctgattaaaaaaagataatttggtatgaataaaaaaaaagggacgctttgtaatgggtttggtaaatctttcctgtaacaggttagataataaa

SEQ ID NO: 817205 - DNA, 120 bp, Artificial Sequence
  ENSG00000259035_10 (sequence is synthesized)
tattttaggcttttgggatatgtaatctttattttaactactcaaatgggcagcaaagcaaaagcagtatgtaaatgaatgagtattgctgtgttccaataaactttatggactctgaaa

SEQ ID NO: 817206 - DNA, 120 bp, Artificial Sequence
  ENSG00000259035_11 (sequence is synthesized)
acttcattccattgggcagtgagacctagatgggtttgtaagacattgagagatgttggtcttttggcagcttatttgtctctatggtgttgccgtaagtctactgagctctctgggtgt

SEQ ID NO: 817207 - DNA, 73 bp, Artificial Sequence
  ENSG00000259035_12 (sequence is synthesized)
cagggacgcaatcagacacctcctgagtaactggaactacagcacttcgggtttcaggatcgagaacatcctg

SEQ ID NO: 817208 - DNA, 120 bp, Artificial Sequence
  ENSG00000259035_13 (sequence is synthesized)
agccagcagagcaggccatcacaatagacgtggcgtgagatgactagagagcgagcctgaagagtcatctgcagccctgccagactgctgtaagaatgacagctttggctcgccactggg

SEQ ID NO: 817209 - DNA, 120 bp, Artificial Sequence
  ENSG00000259035_14 (sequence is synthesized)
agcaggataacatgagaggtgatgcaatcagtctgcaggggaaattggaactcagttgtccaggaagacttggactgaggacaaagcagggaagaatgagagaacattaagagaactgtg

SEQ ID NO: 817210 - DNA, 120 bp, Artificial Sequence
  ENSG00000259035_15 (sequence is synthesized)
ggaagccttgggttgtttaaggttaagtttgagatgcattcattcagtgattgtttgctctataggatgttttatgtaaggcatcatgcaaaataccaagagggaggcaatgatgaataa

SEQ ID NO: 817211 - DNA, 120 bp, Artificial Sequence
  ENSG00000259035_16 (sequence is synthesized)
gacctaactagttcctttcaccatgtgaggacacagcaagaaggcaccgttcatgaaccagaaaataagtctcaccagacatcttaatctgctggtgttgccgtaagtctactgagctct

SEQ ID NO: 817212 - DNA, 120 bp, Artificial Sequence
  ENSG00000259035_17 (sequence is synthesized)
caaagctggggcccagagaggtgaagtgattttttttgtggtcacacagccagtgtggtatggaactacaactgcatttcattttgtctgacctttggtcctgggccttttcatactact

SEQ ID NO: 817213 - DNA, 120 bp, Artificial Sequence
  ENSG00000259035_18 (sequence is synthesized)
tctcattgctgcctctagccaatgccagtttgggaaggaggcatccaggtgcctgagcagcaacatgcacttgcagggaagaggatagatgcagaatacactggagggctgaagacacaa

SEQ ID NO: 817214 - DNA, 120 bp, Artificial Sequence
  ENSG00000261101_0 (sequence is synthesized)
ctgcaaggcaactgttaaaataatttctcacaggagtagagttttctttctttcctaaaaatccaaagtgtttcctcagacatgatcacaccagcctccacaatatatttctagttgttt

SEQ ID NO: 817215 - DNA, 120 bp, Artificial Sequence
  ENSG00000261101_1 (sequence is synthesized)
gggggatgttatcctgctttatatatgaggccaggaaagggtaaaatcctctattcacttacctggttttatacccaggtttccctgtatgtactgtaatggggtgatggaaaagtgaac

SEQ ID NO: 817216 - DNA, 120 bp, Artificial Sequence
  ENSG00000261101_2 (sequence is synthesized)
gagtggggaggattaattcctttaaaataaattcagtttgatgtacctgcgtgacactcagatggggatatcctattgtcatttgaatgattgatctggtgctcagaggagatgaacagg

SEQ ID NO: 817217 - DNA, 120 bp, Artificial Sequence
  ENSG00000261101_3 (sequence is synthesized)
ctgcaaataaggatttgagagccattggaggatggatgataatggagcacatggaagcagatgtggcccttcagagagaaggtgcagagtcagagtgaagggttgcaaaagaactgtaag

SEQ ID NO: 817218 - DNA, 120 bp, Artificial Sequence
  ENSG00000261101_4 (sequence is synthesized)
ggactatgggcagctggggagagaagcacagaattgaaacaatgtatacccttccagacacttttactattcatatacttatatattctttacataaaattggatcatactattgaaaaa

SEQ ID NO: 817219 - DNA, 120 bp, Artificial Sequence
  ENSG00000231721_0 (sequence is synthesized)
ataaatagggcagcctctgatgatgtagcctcgttttgcagtgtgcgtgggaggtgagcacagaagagacaaaagggccaggggatggtgagaaggaatagcagaagggagggacacctg

SEQ ID NO: 817220 - DNA, 120 bp, Artificial Sequence
  ENSG00000231721_1 (sequence is synthesized)
ggtgccttcaccgtggatggcacagatcgcattttattaatgcttttacgagttagaagagttgggataatttgccatctggagtttctctgccttgctgatctgagctcagacctgcca

SEQ ID NO: 817221 - DNA, 120 bp, Artificial Sequence
  ENSG00000231721_2 (sequence is synthesized)
atttaccagagataattgataacaccctgtaacagctgagaggaaaatggaagaaacggagatacttttagtgaagcagaataaaccactgaacaggaaaaatgaggaagctgtgagtac

SEQ ID NO: 817222 - DNA, 120 bp, Artificial Sequence
  ENSG00000231721_3 (sequence is synthesized)
cagtggaaggaacgagccaggaagagggactggaaccatctcagaagccatgcccctcaggctggaacttgccctgtctcctcgcagatgaggtaggaggctcagcacgggctggtggga

SEQ ID NO: 817223 - DNA, 120 bp, Artificial Sequence
  ENSG00000231721_4 (sequence is synthesized)
gcagcccacagcagcagtgagggtcagtgggcctgtgagttaagaagaaggtggcacagagcgagggtctctggatcctgactgtttgacttttccatgattaggataagtagccagggc

SEQ ID NO: 817224 - DNA, 120 bp, Artificial Sequence
  ENSG00000231721_5 (sequence is synthesized)
ttggctagttggagagttactcgaacctcaggtgacagttgtaaggcagcacatagtgaaaaagagtcctagcctgggaaagtccaaaaccttaggtctggtttcagttcactcacctat

SEQ ID NO: 817225 - DNA, 120 bp, Artificial Sequence
  ENSG00000231721_6 (sequence is synthesized)
ctctgtgacatagcaaagtctgttaatttctctaattttctgattagtagtatagttgcaggaatgaaataaaaatggtcctgattactcagagattcatttactgattactctttttgt

SEQ ID NO: 817226 - DNA, 120 bp, Artificial Sequence
  ENSG00000231721_7 (sequence is synthesized)
gacctgaataaagagtacaacatctctcaaaaggtaacaatatgatgtttcaggaaattagagaagttaagagactttgctgtatttactatacagatagttgactgacagctgagcccg

SEQ ID NO: 817227 - DNA, 120 bp, Artificial Sequence
  ENSG00000231721_8 (sequence is synthesized)
tggctgagctaggtttgccatgaatcaatctgctgagtatatttcttggtaactagttcatctttccttaattcagtcaacaaatatgatatcaagtttagtaagatgatgacagttgtc

SEQ ID NO: 817228 - DNA, 120 bp, Artificial Sequence
  ENSG00000231721_9 (sequence is synthesized)
atgtaatactccatctggaagattgtatgcttctcagcttccctaacttttcttaatctaccttaagcttcctttctgaaaggtttctgtctttcctaacagtctcttctttccgccagc

SEQ ID NO: 817229 - DNA, 120 bp, Artificial Sequence
  ENSG00000231721_10 (sequence is synthesized)
tacctcttgtgtttaagaattaaaggaagatgagctaggaatcaagaaatacgcagaactgattcctgtcactggcgccaccctgccacttgcccagagctgtggtataaatttttttaa

SEQ ID NO: 817230 - DNA, 120 bp, Artificial Sequence
  ENSG00000231721_11 (sequence is synthesized)
taggctgaaataaaaatatgaatagcattttggtattaagcattaaattgataaaggctatgagatacacctgctctcaaccatgttaattttttattattggtattaataaattattac

SEQ ID NO: 817231 - DNA, 120 bp, Artificial Sequence
  ENSG00000231721_12 (sequence is synthesized)
ttactaacatattaacaagaattgcattgagaaacaaagcatccacaggccaaatcttctgaatttcaaatgtttatattaatgcgttgtattctagaaaagtagaattgtcttaagtag

SEQ ID NO: 817232 - DNA, 120 bp, Artificial Sequence
  ENSG00000231721_13 (sequence is synthesized)
ctttgtaatataaagtcatctatcagcccattacacctattagaatgttttaacctttatttcccacttttttgtttctagactgagtgtacttggtctggtatttgtggcataacttac

SEQ ID NO: 817233 - DNA, 120 bp, Artificial Sequence
  ENSG00000231721_14 (sequence is synthesized)
ggaacacataagaatgatacagatactatttaatgatgacctaatacaagcttagatagctaaggtgaaagcttctatggccttaacattttcctcttgaagaatgtattttctgtaata

SEQ ID NO: 817234 - DNA, 120 bp, Artificial Sequence
  ENSG00000231721_15 (sequence is synthesized)
aaatacagtggctacttgaaatctataaacttatgtgaggtctggataaatctgagcaactttcttctttgtgctccaggaacctacgcactatatatataaataaagcttaagtaaaca

SEQ ID NO: 817235 - DNA, 120 bp, Artificial Sequence
  ENSG00000231721_16 (sequence is synthesized)
cgcccaccgcgcggaggacaacttttagccggcagcccagaccagcgcggcacctgtctccggagtctccaccgctcctcccgattcatcccagggaaattctcaagaatacgctctaca

SEQ ID NO: 817236 - DNA, 120 bp, Artificial Sequence
  ENSG00000231721_17 (sequence is synthesized)
aattttgttgttgaataatgcaattattatgatattttgtgaatatttgtaaataatgggattctggaataaattaatccccgatgatagaaaagagttaatgaacactttctccataca

SEQ ID NO: 817237 - DNA, 89 bp, Artificial Sequence
  ENSG00000231721_18 (sequence is synthesized)
ccgatgatagaaaagagttaatgaacactttctccatacataacactttagcattcaagaaacataggacttaaatacatatattaaaa

SEQ ID NO: 817238 - DNA, 120 bp, Artificial Sequence
  ENSG00000231721_19 (sequence is synthesized)
gtgaaactgtgggcactgagtgagctctcaagagttttctttttcctctatcttcttcccaggttatgaactccaggcttattgtggggatagaggaaaatggaagaaacggagatactt

SEQ ID NO: 817239 - DNA, 120 bp, Artificial Sequence
  ENSG00000231721_20 (sequence is synthesized)
ataattgataacaccctgtaacagctgactttctgttcacgtgtctacatttgaagttactgcattcagaatgaaagccatacatctgacctcacaatgaggaaaatggaagaaacggag

SEQ ID NO: 817240 - DNA, 120 bp, Artificial Sequence
  ENSG00000231721_21 (sequence is synthesized)
agaataaaccactgaacagcgttggctgaaaaacataaggtctgtttcatcttcataaaaacgctgctttcagtgcactggatttattttacaacccactaatggattaccctacagttt

SEQ ID NO: 817241 - DNA, 120 bp, Artificial Sequence
  ENSG00000231721_22 (sequence is synthesized)
gaaaaacattgcgttagaccagtttgactgttgtcaagaaccaaaaaagatggagtctcactctgttgcccagactggaatgcagtggtgtgatctcaactgactgcaacctccgtatcc

SEQ ID NO: 817242 - DNA, 120 bp, Artificial Sequence
  ENSG00000231721_23 (sequence is synthesized)
atcttgtggttaatggagacagatggtcttcccttgatagatgcttctggaaagttaacattccagcagtgacggttacattcctgtcaggcaggacttcaggaagagaggaactccgca

SEQ ID NO: 817243 - DNA, 120 bp, Artificial Sequence
  ENSG00000231721_24 (sequence is synthesized)
actggaatcagcaactccctggaactcgggcctctggccccgtccctcttttctccggcagggacgcaggatgccttggtgcactctagagacggggaccggagggtgcagcgcgcctgg

SEQ ID NO: 817244 - DNA, 120 bp, Artificial Sequence
  ENSG00000231721_25 (sequence is synthesized)
gtggggcgaagggcgccggtctcctcacgccctctgactttaggataccagacagtgtctcttcaaccccaccccaggcgcaggtttccagaaggcggggtgggtggggcccccgatttc

SEQ ID NO: 817245 - DNA, 120 bp, Artificial Sequence
  ENSG00000231721_26 (sequence is synthesized)
cagaaggcgagttacctagcaggtgtgtggggtgggcattgctattcggagaaaaatcaagacgttcccttcagtcctccctcggtgttaacgtctgctccagctcgcagcccgctgctg

SEQ ID NO: 817246 - DNA, 120 bp, Artificial Sequence
  ENSG00000231721_27 (sequence is synthesized)
gggcacaggctcgggatccctcgcagcgctaggggccgcagccccggtcgccggggagtgccatggcagggaggcggcagccacgtgaggggtctgcggaagcgccggagctgaaagctg

SEQ ID NO: 817247 - DNA, 71 bp, Artificial Sequence
  ENSG00000231721_28 (sequence is synthesized)
gaaaatggaagaaacggagatacttttagtgaagcagaataaaccactgaacaggaaaaatgaggaagctg

SEQ ID NO: 817248 - DNA, 120 bp, Artificial Sequence
  ENSG00000231721_29 (sequence is synthesized)
ttacaggtgtgagccactgcacgtggccgataaagctactttttaaagtaaatgtgcactcaagtactccctttattgtttgtggtaatatttatttatttagataatccagttgtcctc

SEQ ID NO: 817249 - DNA, 120 bp, Artificial Sequence
  ENSG00000231721_30 (sequence is synthesized)
ctttggtgtccccagttcatacacacctaaacataacttaaaatttgtttggaatttgaaagtacagaattttcctgtaattgagactttttaaacttttgtggttggagaaggtattct

SEQ ID NO: 817250 - DNA, 120 bp, Artificial Sequence
  ENSG00000231721_31 (sequence is synthesized)
attttttgaaaatatctgtaagttttatctaagtagtaaactctaagtattcttcccctttacttacagccaccctgggaatctgagactagagaaaataaagtttgtctcttgttctaa

SEQ ID NO: 817251 - DNA, 120 bp, Artificial Sequence
  ENSG00000231721_32 (sequence is synthesized)
gaacttgccctgtctcctcgcagatgagacagacgtttaagtacgagaaagctaatggcgcagattctgctgactgtgtggctctcgtcttaatgcgttttccaaccttgaacctgagaa

SEQ ID NO: 817252 - DNA, 120 bp, Artificial Sequence
  ENSG00000231721_33 (sequence is synthesized)
tgccagaggattgagtctctggacgttcatctgagcagatatctgctggccgcctggttcctgagctaacaagtgggtgtcccgggcttgtgtgtgtagtcacaacagtggaggtgccac

SEQ ID NO: 817253 - DNA, 120 bp, Artificial Sequence
  ENSG00000231721_34 (sequence is synthesized)
gtggcacccagaggtcgactggggctaccgcggggcttcccgatcctcacaagtgtgtcttcagtgtctgacatgaactgggaacttggggcatctttagaagcacagacatttggagtt

SEQ ID NO: 817254 - DNA, 120 bp, Artificial Sequence
  ENSG00000231721_35 (sequence is synthesized)
ccacggcaaacctggatgtaagcactcacacagcttttaaagtgaaagcagggaccttgaggaaggaatcgccgtcatctcattgccgacctgcttactgtgctgggaaacaaagtaagt

SEQ ID NO: 817255 - DNA, 120 bp, Artificial Sequence
  ENSG00000231721_36 (sequence is synthesized)
tctgtttgtttctttgttagtctctcctgcgtgttttttcttgctaatgttattagacactcaatatccggcaaatgccaagttttttccccttcattgggaagtaggatatagtttatt

SEQ ID NO: 817256 - DNA, 120 bp, Artificial Sequence
  ENSG00000231721_37 (sequence is synthesized)
caatagctgattgcttcttttatcttttccctcttcccatatctagtgtgccggcttgctgtttagagataggaagagattgaaatttattatcaaggagaaaacaaaaagtgttttgtt

SEQ ID NO: 817257 - DNA, 120 bp, Artificial Sequence
  ENSG00000231721_38 (sequence is synthesized)
ttgtttctaaatggtccaagaactttgccattaggtaaatgactatgacacagacaaggcgttttgcatggtatgaccaggagcacctctagcaaaacagccccagttcgccgccctgat

SEQ ID NO: 817258 - DNA, 120 bp, Artificial Sequence
  ENSG00000231721_39 (sequence is synthesized)
ttccatttggaagcaggcacagtgggtttccccaggaccgatgttaacgcagagggtccttgtgcaggaattgtgcagaaactaggtgggaaggtgtcacagacaagaggctgcaattta

SEQ ID NO: 817259 - DNA, 120 bp, Artificial Sequence
  ENSG00000231721_40 (sequence is synthesized)
aaaacgcatcaggaaatggaaaagagctgcgagaatatcaattatttaatgatgttgataaaaacaaatttaatataaaaatgagatacaatgtatagagacctaaccctgtcaacagca

SEQ ID NO: 817260 - DNA, 120 bp, Artificial Sequence
  ENSG00000231721_41 (sequence is synthesized)
actaaactttactttcatgttagaaagttttgtgccatgtagatttatggaaaatgtgcttaattgcctctagaaaataatgaagaggcttcgtcacctccatagaagatcctgtgacac

SEQ ID NO: 817261 - DNA, 120 bp, Artificial Sequence
  ENSG00000231721_42 (sequence is synthesized)
ttttttatgctgatcctctctccagagatgtgatgtggattgattaacttgtaatataaagttctatggtttctgaaaatgcagagcaaatagagatgaagagtggtttgtgatttgtta

SEQ ID NO: 817262 - DNA, 80 bp, Artificial Sequence
  ENSG00000231721_43 (sequence is synthesized)
gcagagcaaatagagatgaagagtggtttgtgatttgttattaaatgatcttcccttctacatttaggactgatttttac

SEQ ID NO: 817263 - DNA, 120 bp, Artificial Sequence
  ENSG00000231721_44 (sequence is synthesized)
cgactggagtgtggaactggaaagcagaaaccaggggtgttacttctatgtctagtatggaatgttgtgaatttaagttagagcttctgtgtcctgggaattcatattttatctcaaagt

SEQ ID NO: 817264 - DNA, 120 bp, Artificial Sequence
  ENSG00000231721_45 (sequence is synthesized)
ggtgctgataggactggaggtagctgtatttcatttgaaacattccagcctctttataggaatatctgtgaatttttaattcagcaaacatctttaagtgtgtcatttatgtatagcgtt

SEQ ID NO: 817265 - DNA, 120 bp, Artificial Sequence
  ENSG00000231721_46 (sequence is synthesized)
gtagtcagagctgtaattgtttcaccattaaatttacggaaattcagtttgtaagtgaaaaattaagaacagtttgaaagaagggcgaatgagcagagcattgccatctaaacagtcttg

SEQ ID NO: 817266 - DNA, 120 bp, Artificial Sequence
  ENSG00000231721_47 (sequence is synthesized)
ttaaagatagtgccaagtgagcaggactgtcccttctaagctgcccctcctaattaaagggaaaggtggctgccatctgtcttctttcattcaaggcagtagggggtctagggtggaagg

SEQ ID NO: 817267 - DNA, 120 bp, Artificial Sequence
  ENSG00000231721_48 (sequence is synthesized)
aagcaacccccactttatttttctcccactcttttttatagtcagctttctccctagtcagtgacccagaaggtcattgatgatctgtctatctcagaatgaatagtagcataagcacgc

SEQ ID NO: 817268 - DNA, 120 bp, Artificial Sequence
  ENSG00000231721_49 (sequence is synthesized)
ttggcacttgcaaaaaaaagaaagtttataacatgcactgatccatttaaagttctgcttgaattatgtctgagagtattgtaatctctgtattggtgtctctgccctgtttgttaccaa

SEQ ID NO: 817269 - DNA, 120 bp, Artificial Sequence
  ENSG00000231721_50 (sequence is synthesized)
gggcactactggcaggaaaagtggggagttttacttttattgattttgctttttcatgaaaaaatgtttacactccactgggcataatcagaagatggcagcacatggctatgtacagga

SEQ ID NO: 817270 - DNA, 120 bp, Artificial Sequence
  ENSG00000231721_51 (sequence is synthesized)
gatgtggggatgtacaggaatattgttcttatcaaaatcaaggacacctattaatgatgatacatatatgtcatctcaggggaaagcatgaacaagcatggcaacagatgtccaagttac

SEQ ID NO: 817271 - DNA, 120 bp, Artificial Sequence
  ENSG00000231721_52 (sequence is synthesized)
tcagtggcctgctgcagctttttggaccagttattgaaataattcacattgtttagcttttgttaagcaataaggcttttagcctttttcttgtaagaatacgttgcaggagagtttagt

SEQ ID NO: 817272 - DNA, 120 bp, Artificial Sequence
  ENSG00000231721_53 (sequence is synthesized)
ttggggtcatgtcttcattgctttggaaatgtagaatagtcctccaacaaaatgactgcatttgcttgccttcgtttccacctctgtaaatagaagaaatatctgctgtttttataaata

SEQ ID NO: 817273 - DNA, 120 bp, Artificial Sequence
  ENSG00000231721_54 (sequence is synthesized)
tataagagaatatgaaatattttccatctttcataagaactgtgttataactgaaaaattctcaaatcttcagttatgtttattttcaatttttacacacttaagcaaggtgttaacagt

SEQ ID NO: 817274 - DNA, 120 bp, Artificial Sequence
  ENSG00000231721_55 (sequence is synthesized)
cttctaaagagattcagttgttacaagccttgtttagttcccaagtagcaggtatggacttctcagaacatactggtttttagaactctctttgtgacacagaagtgtggtatttcttaa

SEQ ID NO: 817275 - DNA, 120 bp, Artificial Sequence
  ENSG00000231721_56 (sequence is synthesized)
aaagcattaggggagcccacggctacaaaaacaagtgagtgagaagaggtgggaggaagagaaactacgccacctcccctgcagccgagtgcacgcagcagcctggcgtgacaagtgggc

SEQ ID NO: 817276 - DNA, 120 bp, Artificial Sequence
  ENSG00000231721_57 (sequence is synthesized)
agcgtgcgttcagccctggggagaaaaatcaagacgttcccttcagtcctccctcggtgttaacgtctgctccagctcgcagcccgctgctgggcattttattaatgcttttacgagtta

SEQ ID NO: 817277 - DNA, 120 bp, Artificial Sequence
  ENSG00000231721_58 (sequence is synthesized)
aagagtcctcccttggggtctggatcaggacccctttcccataacagtgtgagcagtggttattgtatgggttttggcttccagtgagatgaaaaagaattggtggattttaaggagaga

SEQ ID NO: 817278 - DNA, 120 bp, Artificial Sequence
  ENSG00000231721_59 (sequence is synthesized)
agcaacatgatctttctaatgaaggcaccctgaagataaagacacacccacctgcaaggataaaagaagcatggcggcggggtggggctggtatccagtctgcttcaaaacggaggaggg

SEQ ID NO: 817279 - DNA, 120 bp, Artificial Sequence
  ENSG00000231721_60 (sequence is synthesized)
agcggagccctccctgctcccgggcggctctggaggagctcggtgtttgcctctagcccttcgctaccggaggatcaggttcctcccctcctccccctccagctccggccgccgccgccg

SEQ ID NO: 817280 - DNA, 120 bp, Artificial Sequence
  ENSG00000231721_61 (sequence is synthesized)
ccgccgccgcctccttcttgcatgacacagcagaaccgcagctgctgcagcaatttcaagccatccgcccaggaagcgccgcaaccgggactcgggaggggtggagggggcgaggcagag

SEQ ID NO: 817281 - DNA, 120 bp, Artificial Sequence
  ENSG00000231721_62 (sequence is synthesized)
gccgcggccccaggggatccttggccccactgtgcaccacacactcctttcccagcccaggggcacgcgaacaaaatgaggctcaagctgaccaggccgagccggaggaacgctggggct

SEQ ID NO: 817282 - DNA, 120 bp, Artificial Sequence
  ENSG00000231721_63 (sequence is synthesized)
tggcagcagaagggatgggaccagagagaagggtgtggaggagaccccagtgagggccaggacatttcaggtaaagagaggtcatatctccgtacctcacttcctgacacaaacaagttt

SEQ ID NO: 817283 - DNA, 120 bp, Artificial Sequence
  ENSG00000231721_64 (sequence is synthesized)
tcactgttgtcagcaacaaagccctaatatagctgcggaagagaaaaactgcattgcattttgcctcctgcaagcatcatcaacagttactggaggaacgtaattccagaaagcttgaaa

SEQ ID NO: 817284 - DNA, 120 bp, Artificial Sequence
  ENSG00000231721_65 (sequence is synthesized)
gccgtggtgatggtaattatgtatcaaatgcctggttctatttctgttattattgttttgtcatttctgttttcccagcgatctgactgaactcgcagagggacaaatccagtttttctt

SEQ ID NO: 817285 - DNA, 120 bp, Artificial Sequence
  ENSG00000231721_66 (sequence is synthesized)
tttgacttttgtcaaactaaatcaggcctgatagaaaactcattgctctccggggaaacaaagtaggagccacgaaatgtcattttaacagagcgtgggtttggtgactgtaggaaagga

SEQ ID NO: 817286 - DNA, 120 bp, Artificial Sequence
  ENSG00000231721_67 (sequence is synthesized)
tttgaggacgctccttctgttcggcttcctatgtcatgagcacaggctccacgcacgcacagacaccacggctcccggatgctgtggctccccgatcggggctcctgcagcgccagaagc

SEQ ID NO: 817287 - DNA, 120 bp, Artificial Sequence
  ENSG00000231721_68 (sequence is synthesized)
ccctccgggatgcttcgaggggctcccggtgggtggaggtacggacgccgctgcggccgccgccgccagtcctgctgctgttgttgctgctgcagtcacgtgggagcccctttaagtttc

SEQ ID NO: 817288 - DNA, 120 bp, Artificial Sequence
  ENSG00000231721_69 (sequence is synthesized)
atctacgtgcgcatcattttcacctcgcgtcgcgcccgggaggaaggaacgaggcaaggagctaaagcagcgtgcgttcagccctggggaggaaaatggaagaaacggagatacttttag

SEQ ID NO: 817289 - DNA, 120 bp, Artificial Sequence
  ENSG00000231720_0 (sequence is synthesized)
agcaatattccgccagcttcatttcatgcagtgagtggaacaagagtcagaacaccagggcggctgagcctatcgatcaagcctccacctaatgacagacatacttgagtcccacagtca

SEQ ID NO: 817290 - DNA, 120 bp, Artificial Sequence
  ENSG00000231720_1 (sequence is synthesized)
taaggaggatgaagtctctctctggctggacctggactgcagtcacactctaagagctcctctttctacacctctgccagtgggcgttcggtcagagacaagctatggcaccggctcccg

SEQ ID NO: 817291 - DNA, 120 bp, Artificial Sequence
  ENSG00000231720_2 (sequence is synthesized)
ccaccctgagctcaggagcagagctgcctccatcgggtgtggagagacagagcctcctccccagccatgcctcctcatcggcccacgggagctgctgtgactctgacccctgtacctggc

SEQ ID NO: 817292 - DNA, 120 bp, Artificial Sequence
  ENSG00000231720_3 (sequence is synthesized)
tctgtcgaccggaatagtcagtgggcagccagcacacctttgggtgctctgtatgagtgggattttctcctgattagacattttaaaagattgtcaacaaaaagaacaaactctgtaaaa

SEQ ID NO: 817293 - DNA, 120 bp, Artificial Sequence
  ENSG00000231724_0 (sequence is synthesized)
aatgcttgtatattttattgtatgtaaattataccacaatacagttgataaaacaagatctatgaaaatagatggtatccatttgctacctgaaggaacagcacaaccacagagaggggg

SEQ ID NO: 817294 - DNA, 84 bp, Artificial Sequence
  ENSG00000231724_1 (sequence is synthesized)
gtggtgtccatgattccaagatcaggaatactgggaaatatcagtacctcacatctgtctagcactttacaaagctctaacata

SEQ ID NO: 817295 - DNA, 120 bp, Artificial Sequence
  ENSG00000231724_2 (sequence is synthesized)
cattcttacaccaccctacaatacctatcaacctttgggaattgttaagcataataaccctatacactgggcaaagcatacagggacctcagggccatgggtgagaggaaggacactggg

SEQ ID NO: 817296 - DNA, 120 bp, Artificial Sequence
  ENSG00000231724_3 (sequence is synthesized)
agccaatgagggatgtagagagagggcctttcagagataaccaggcagaagaggacattgtaccagatgatggagtcagctagggcttgggcagggaagagaagagcgtcactgatgggt

SEQ ID NO: 817297 - DNA, 120 bp, Artificial Sequence
  ENSG00000261105_0 (sequence is synthesized)
gcgcggcccgccgccctcacctgagccccggccagctgagcccgctacccgctctcccgccgcgatccggcccagccgccaggaaaggattaaagagtacaggactgactggcctggaga

SEQ ID NO: 817298 - DNA, 120 bp, Artificial Sequence
  ENSG00000261105_1 (sequence is synthesized)
taagagaccaagttgtattcctagatttaccattattgttaatctgggcctccattgtaagagcccagtgatcttaagcgaacctcaccctcacctctacacaatgtgaagaaaccttac

SEQ ID NO: 817299 - DNA, 120 bp, Artificial Sequence
  ENSG00000261105_2 (sequence is synthesized)
aaacagctatgaaatgaagttcttggctggtcttcacagcttcagcatggccttgaaatcttcgtgtgtaccaagacaggtctggtacttcctcaagagctgaaaataattataggagaa

SEQ ID NO: 817300 - DNA, 120 bp, Artificial Sequence
  ENSG00000261105_3 (sequence is synthesized)
aagggaagccttggagccagctccatcagaagattccctatgaaacaaggtaatggagtttccctgaacatgaagatcggttcagaatgctcataaggatcatgaacaacaccagatgat

SEQ ID NO: 817301 - DNA, 120 bp, Artificial Sequence
  ENSG00000261105_4 (sequence is synthesized)
ctctaaagtaaaccatcaaagtctctcccaagctcttggactaggaatgttctatccatgactctactataaatctctttggtcttcgtggacagaaatagaccagtgaagccaaactac

SEQ ID NO: 817302 - DNA, 120 bp, Artificial Sequence
  ENSG00000261105_5 (sequence is synthesized)
tccaaactcacgtaactgaaattccaaaaaagcaaatctgtgaccctaaggctttgtctggacagagggagaagacatctatctacagcttcatttatgcttactgagaaaatcaactgg

SEQ ID NO: 817303 - DNA, 120 bp, Artificial Sequence
  ENSG00000261105_6 (sequence is synthesized)
acacacacacacacatgcacacacacttgcatcttctgctggacctttacatactcaaagggctatcagcctctattatttaaagaagtgctgtcatagtctctatttgacttctgcgga

SEQ ID NO: 817304 - DNA, 120 bp, Artificial Sequence
  ENSG00000261105_7 (sequence is synthesized)
gacttctgcggagataggtctctgggcatggtctagataatcagaagaatatgagaagaaaggccagaaataatactgcataaatataaaaggctatttactgtggaaaagagaaattct

SEQ ID NO: 817305 - DNA, 120 bp, Artificial Sequence
  ENSG00000261105_8 (sequence is synthesized)
ttgctagacatatttgccttagagaaatgtctctgtcctttattatgtgtttagactgtccaatccttgagaataactgtttgaccttgggagatcttgtgtgaatgtgttttattcaaa

SEQ ID NO: 817306 - DNA, 120 bp, Artificial Sequence
  ENSG00000261105_9 (sequence is synthesized)
aggtactcagagaagaccaaaagaaatcaggaagaataaaaaaggccatgattacttcctactggctgagaaacctcaacacaggcagcatttctcatgccgaccaccatcctatattgt

SEQ ID NO: 817307 - DNA, 120 bp, Artificial Sequence
  ENSG00000261105_10 (sequence is synthesized)
gctatagatattcaccactgttcccatcacttctactacaactcagactctagaatatgtaatcctgtgtggatccttgtgtctaagagtgttgatatggttttgctgtgtctccaccca

SEQ ID NO: 817308 - DNA, 83 bp, Artificial Sequence
  ENSG00000261105_11 (sequence is synthesized)
gagtgggtctttcttgtgctgttcccgtgatagtaagtctcacaagatatgatggttttaaaaacgggagtttcctgcacaag

SEQ ID NO: 817309 - DNA, 120 bp, Artificial Sequence
  ENSG00000261105_12 (sequence is synthesized)
cccgtgatagtaagtctcacaagatatgatggttttaaaaacgggagtttcctgcacaagctctcttctcttgtctgatgccatgtgagacacatctttcaccttccaccatgattgtga

SEQ ID NO: 817310 - DNA, 120 bp, Artificial Sequence
  ENSG00000261105_13 (sequence is synthesized)
gcggccgcccggcccgcttgacataccagaaatagctgcacacaattgtacctttcccggccaagaaacctcccccgctggggagcgcggcccgccgccctcacctgagccccggccagc

SEQ ID NO: 817311 - DNA, 120 bp, Artificial Sequence
  ENSG00000261105_14 (sequence is synthesized)
aagagatctggagaagtaagatggccaaataaaagcctctaccaatcatcctccccacaggaacaccaaatttaagaactatctacacaaaaaagcaccttcataagaaccaaaaatcag

SEQ ID NO: 817312 - DNA, 120 bp, Artificial Sequence
  ENSG00000261105_15 (sequence is synthesized)
agagaacaaggataaagaagtatccaaatacaaagaaaatgttatgcaagtgacctttagagatgttttaaagatgacaaaatattgatgaagatgggccaacaagtgttactgttacct

SEQ ID NO: 817313 - DNA, 120 bp, Artificial Sequence
  ENSG00000261105_16 (sequence is synthesized)
aagtttcatcactagtttcaccatggttaattggaaatggcttccgcccatctgtggaaaacagacaaacaattgaatgcttagctgtttttacaggataatgtgctttcaacttccatt

SEQ ID NO: 817314 - DNA, 120 bp, Artificial Sequence
  ENSG00000248092_0 (sequence is synthesized)
cccgcggcgctgcgcctccaacccggaagaacagccccaactccgcggcggcgggcggccacgtgactgcagctccgctcccacctcggcccgcgccccttccccgccccagctttcttc

SEQ ID NO: 817315 - DNA, 120 bp, Artificial Sequence
  ENSG00000248092_1 (sequence is synthesized)
cgccccagctttcttcccgccaggccccctccacccgatcgccgcgcgctctccgaaccaaaaggcgacctcacgaaatgcccctttgagctcaaaggctagttacccccaggggccctt

SEQ ID NO: 817316 - DNA, 120 bp, Artificial Sequence
  ENSG00000248092_2 (sequence is synthesized)
cctggtgccaaacgcggcagctgaagttttcagggacacatttgcttctccccttgaagaaccagttacaaagcgtgatgtcctctctggggtcccatcagaacaaagaaacagggaagc

SEQ ID NO: 817317 - DNA, 120 bp, Artificial Sequence
  ENSG00000248092_3 (sequence is synthesized)
aagcagcggaatacaagagactgaactgtatctgcctctgtttccaaaagattcacgttcaactttcactcacacaaagccgggaaaattttacttttttttttttttttttagacagag

SEQ ID NO: 817318 - DNA, 63 bp, Artificial Sequence
  ENSG00000248092_4 (sequence is synthesized)
tcattttattagtctttaaaaaaaaaaaggaacctgaacttttctaacacagctggaacaatt

SEQ ID NO: 817319 - DNA, 120 bp, Artificial Sequence
  ENSG00000248092_5 (sequence is synthesized)
aaaaaggaacctgaacttttctaacacagctggaacaattcacagcagccgcggcagccgcagcagcagaagaaaaggtttaatttagttgattttctgtggttgttgattgttcgccag

SEQ ID NO: 817320 - DNA, 120 bp, Artificial Sequence
  ENSG00000248092_6 (sequence is synthesized)
gaatctagacagacaggcctttctaggatctgtgggaacatctaaagaccctgtaagaaacatagaaaaccctctccctccccctccccctccccctccccctctcccgagccgaagctg

SEQ ID NO: 817321 - DNA, 120 bp, Artificial Sequence
  ENSG00000248092_7 (sequence is synthesized)
ggtcccatcagaacaaagaaacaggctgtacaagaagcatgatgccagcatctgcttctggtgacaacctcaagaagtttacaattggccgcgtgcggtggctcatgcctgtaatgccag

SEQ ID NO: 817322 - DNA, 64 bp, Artificial Sequence
  ENSG00000248092_8 (sequence is synthesized)
caggaggctgaggcaagaggatcacttggaacttgggaggcatactctatctcaaaaaaaaaag

SEQ ID NO: 817323 - DNA, 120 bp, Artificial Sequence
  ENSG00000248092_9 (sequence is synthesized)
aagcttacaatcatggtggaaggcgaagaggaggagcaggcatatcacatggccaaaaagggagcaagagaaaggtgagaaagacactagactctttttaaaaccagctctcacatgagc

SEQ ID NO: 817324 - DNA, 120 bp, Artificial Sequence
  ENSG00000248092_10 (sequence is synthesized)
taatggaataagaactcactcattaccacaaggacagaacccagccattcatgagggacctgccaccatgacccaaaaacctcctacttgacccaacctccaacactggggataacattt

SEQ ID NO: 817325 - DNA, 120 bp, Artificial Sequence
  ENSG00000248092_11 (sequence is synthesized)
caacatgagatttgaagaggacaaatactcaaactatatcacttgttgtccatttttaatctttctctaacataccctaacttcttcttgaaaatgcttaattttctctgttttgagatg

SEQ ID NO: 817326 - DNA, 120 bp, Artificial Sequence
  ENSG00000248092_12 (sequence is synthesized)
taaatttgctatcctgtttttcttaaaacttggtaagatcttcagccatgaaggacagacaaactgtaacctttccatttacaaagctgcatttgaattcaactgtccttttaaactaag

SEQ ID NO: 817327 - DNA, 83 bp, Artificial Sequence
  ENSG00000248092_13 (sequence is synthesized)
acaaagctgcatttgaattcaactgtccttttaaactaaggagttttactggtctcgtggctaaaattttaaagatcactttt

SEQ ID NO: 817328 - DNA, 120 bp, Artificial Sequence
  ENSG00000248092_14 (sequence is synthesized)
tttatattttatggatacgtgtctatgtttatagattgcctgtatggtaccaacttgacataaataaattagtactcataaattaagtaaataagcccaaacgcttttcaagttcacagg

SEQ ID NO: 817329 - DNA, 120 bp, Artificial Sequence
  ENSG00000248092_15 (sequence is synthesized)
gcattagtaatctgtggtaaatgaagatagtttaaaatttggggtaaaataaaatagaaacattttctgaatttaatttagatatttttctgggtctatttgttagacaggtttacacta

SEQ ID NO: 817330 - DNA, 120 bp, Artificial Sequence
  ENSG00000248092_16 (sequence is synthesized)
tctctgctatttttttaaggacctaaaactgaatggacatagaaaattgaggaaagaaataaaaccgtaacaattataagaggttataaaaggttcatggaacctttttatgttttttct

SEQ ID NO: 817331 - DNA, 72 bp, Artificial Sequence
  ENSG00000248092_17 (sequence is synthesized)
aggttataaaaggttcatggaacctttttatgttttttcttgtgcagtcaaaaccaattgcaggctggatgc

SEQ ID NO: 817332 - DNA, 120 bp, Artificial Sequence
  ENSG00000248092_18 (sequence is synthesized)
atagtgaaactctctcactaccaaagtacaaaaggaattagctgggcatgatggtacacacttgtagtcccagctacttgggggactgagatgggaaaattgcttgagcccgggagtcaa

SEQ ID NO: 817333 - DNA, 120 bp, Artificial Sequence
  ENSG00000248092_19 (sequence is synthesized)
ggctttattaaaattagctttagcatttataatacactggcacaaagttagaatttggatttctcttttgaacaagatttttgtatacattaataagaaatagtaaaagatttttgttta

SEQ ID NO: 817334 - DNA, 120 bp, Artificial Sequence
  ENSG00000248092_20 (sequence is synthesized)
ccttttgagtaaactgcaaaaaatattagtaataagaggagagaatttccctaatgctgtttttattatgtcttttgattgtttggaaaactgaatctcccctctgtcaaagagtaaaat

SEQ ID NO: 817335 - DNA, 120 bp, Artificial Sequence
  ENSG00000248092_21 (sequence is synthesized)
ttttgctttttgaaatttttgaattatcagtttggctaaatgaataactattatcttacagtgacctgtaatcttattttgatcaagtgttttaaacctttgatatttgacaaacttccc

SEQ ID NO: 817336 - DNA, 120 bp, Artificial Sequence
  ENSG00000248092_22 (sequence is synthesized)
aaaatcaaatgtaaaattctaacttaaatgttttcgacctcaagctaacttttgggcattaaagcccttggaagtccaaatagggcccctggaagtccaaaagaaacatattaggctaat

SEQ ID NO: 817337 - DNA, 120 bp, Artificial Sequence
  ENSG00000248092_23 (sequence is synthesized)
ttggtatattaaaatcatacaggaagctgatcaaataaaaaatgttgtttaattttctttgagttgtatttgtataaatctgttattaatatgcatcccaaaattgtatcatattgctaa

SEQ ID NO: 817338 - DNA, 120 bp, Artificial Sequence
  ENSG00000248092_24 (sequence is synthesized)
aatgttgatagatcttgttatatgttattggtaataattgttatcctgttaaattattgtataccacagaaataatgaaatttctttgtcaattgcatcagtaatcatggctcttctaag

SEQ ID NO: 817339 - DNA, 120 bp, Artificial Sequence
  ENSG00000248092_25 (sequence is synthesized)
tcttttgtcattcacagatgattattgttttacttggattcttttcaaaagtggtttgtaattggctacagcctaaaatctgcttgttcaaaaaaaaaaaaaaaaaatccatggaaaggg

SEQ ID NO: 817340 - DNA, 120 bp, Artificial Sequence
  ENSG00000248092_26 (sequence is synthesized)
ccctgacagcacacacacttaaacacagttttctgataactttggaattcacaccgttggactagttaaaaacttctaaaataattttttaaaatctaataaattaatgaagattgctaa

SEQ ID NO: 817341 - DNA, 120 bp, Artificial Sequence
  ENSG00000248092_27 (sequence is synthesized)
tccaacatcaagcagaataagttaattacatggggctgaactgataaaatgccaaaataatattttcataacctttttttggtttgagacattgctgatactttttatgttttgttttcc

SEQ ID NO: 817342 - DNA, 120 bp, Artificial Sequence
  ENSG00000248092_28 (sequence is synthesized)
agagtcaagaaaattgtttttttcttttgagctgtacatagcttacagtaattagataaattacacttttgtgagaacaattgaaacactaacctttctctctacctgatgtctccagaa

SEQ ID NO: 817343 - DNA, 120 bp, Artificial Sequence
  ENSG00000248092_29 (sequence is synthesized)
tttggaaagtatttgtgagtattcttcacttttggcaatatagttatttgtacaaattcgataggaatctgttttcttttgtaacagaacacagttggatacactgattattttgccaag

SEQ ID NO: 817344 - DNA, 120 bp, Artificial Sequence
  ENSG00000248092_30 (sequence is synthesized)
gctttcattggaatggcataattttttaatgaccagactgctttgaggatttgaagttgactttatagagcctataaaaagcctgttggaaaaattagcctgataccttgtctacacagt

SEQ ID NO: 817345 - DNA, 120 bp, Artificial Sequence
  ENSG00000248092_31 (sequence is synthesized)
ttccttacaaggttcctgaccttgcggtagtaaagaatgtcactctctggcaggcccaggagcctcaggatattttgggaaccttgacaagagaggagtgtatccaatttatacaggaat

SEQ ID NO: 817346 - DNA, 120 bp, Artificial Sequence
  ENSG00000248092_32 (sequence is synthesized)
tacaagtgcagtctgattgtgaatccttgtcttggcttcttagccttgagagtttttaaaagttgaatgtgaaattccttatgaaaaagttccaacaaagccaaactttaaaagagccta

SEQ ID NO: 817347 - DNA, 120 bp, Artificial Sequence
  ENSG00000248092_33 (sequence is synthesized)
tatgtggtcaatcactatttttgctgtactttatgcaaataatcaggccaaatataataaaactaaaacttattttgcaaataaattggtcctgttatgatttgcctttaatagaaaagg

SEQ ID NO: 817348 - DNA, 120 bp, Artificial Sequence
  ENSG00000248092_34 (sequence is synthesized)
gggactggagagagaagaattatgtttcagaagaaaatgatagcatacctgttgttagattctagctttgtccattgtttttaagttgtaattatttgcctacatttgaactaaatcttg

SEQ ID NO: 817349 - DNA, 120 bp, Artificial Sequence
  ENSG00000248092_35 (sequence is synthesized)
aattctttcctggctacaagtctccaagctaacatttaaatttttttctcctatgtttctgacttggaataagtagaagttaaaactatgcttttcttgaagccctgcagactggagcaa

SEQ ID NO: 817350 - DNA, 120 bp, Artificial Sequence
  ENSG00000248092_36 (sequence is synthesized)
gacaacttgaataaactatgggaaaaatcactacagcaacttatatataaacagcttttatgctttgttgatgtatggaatactcagaaagttcactgcaacacctgatttaaactacaa

SEQ ID NO: 817351 - DNA, 120 bp, Artificial Sequence
  ENSG00000248092_37 (sequence is synthesized)
ccaggagactctgtcagattaacactacaatctgaagaactacagagactctcaaaaaactagtgtatagtctacagtagatattaacctttgtttttcttctgttttcatagaaacacc

SEQ ID NO: 817352 - DNA, 120 bp, Artificial Sequence
  ENSG00000248092_38 (sequence is synthesized)
ttttattaaaaatctgtttgccgcttcatatatagagtcctagtccatctgtaatgccaccccctggaatgagacatagctgtttaactgaactgatctattctcgggactaagagactg

SEQ ID NO: 817353 - DNA, 120 bp, Artificial Sequence
  ENSG00000237761_0 (sequence is synthesized)
agacacagaatttgctggcacctggattttggactttccagtcttatgaactgattagctcaaattcttcttggaagggcttgcaaggtttgcaggagggtgcacagtcgatctggggag

SEQ ID NO: 817354 - DNA, 120 bp, Artificial Sequence
  ENSG00000237761_1 (sequence is synthesized)
agaagtaaacacaagcaatgaagatagtggagtggcctggacgggaagcttcttttacaaaggaaggatgacaagagcccacagttcttattgtgtaggtaaaatgagccaggggccatg

SEQ ID NO: 817355 - DNA, 120 bp, Artificial Sequence
  ENSG00000237761_2 (sequence is synthesized)
ccaaccgcatcacatggattatcaccttggattttaacagtaagccaaagtaacagggaaccgttgaatggctctaagaagaggaacaacatgatttgacttaggtttttgagggatctc

SEQ ID NO: 817356 - DNA, 120 bp, Artificial Sequence
  ENSG00000237761_3 (sequence is synthesized)
tccagctacagattgaagaatgattgtaaagagggtgagtggaaacaggaggcctggttcatcctctcaactctctatttgtgtccagtcaaaattcgcaatgccaacacaatagtttct

SEQ ID NO: 817357 - DNA, 120 bp, Artificial Sequence
  ENSG00000237761_4 (sequence is synthesized)
atggtcgtgatatcaagagtgacaacctgggcaaaagagagccattgcaaagaagaaaggcctttagggaaatggagcagaaagaggaagcagtctctgtttaccctgcttctccagcct

SEQ ID NO: 817358 - DNA, 120 bp, Artificial Sequence
  ENSG00000237761_5 (sequence is synthesized)
gagttccttttttttctccattctgcttgttgaactcctgccaaactccgattttgacatcaaagcccaccttgaatgctgcttgtcgctaaagccatcgctggcatttccagacattgt

SEQ ID NO: 817359 - DNA, 120 bp, Artificial Sequence
  ENSG00000237761_6 (sequence is synthesized)
caatatctactggactaaagaaattctctactaatcagaaaaggaattggtctgtattgaagctggaaagaaaatcagaggagccaatgctgtcagagtgcatccaaggaccatttaaag

SEQ ID NO: 817360 - DNA, 120 bp, Artificial Sequence
  ENSG00000237761_7 (sequence is synthesized)
atgtcctggccggaggtctgggctgtcaggtcctgccagcagaatgaagaggacatggaggcattttcagatgaagagaaactaacaggatttttcagcagacttactctaaatgaatgg

SEQ ID NO: 817361 - DNA, 120 bp, Artificial Sequence
  ENSG00000237761_8 (sequence is synthesized)
ctacaggaaatactataaaaataaaggaaatgataaaagaagaaactttgtaacatcaagaaagaaggaagaaccaccagtaaacaaaaatatgggtaaataaaataaaattttttttaa

SEQ ID NO: 817362 - DNA, 120 bp, Artificial Sequence
  ENSG00000237761_9 (sequence is synthesized)
gagcacacagccatttttgaagcacagaacaagtcttcatcagacacagaatttgctggcacctggattttggactttccagtcttatgaactgtctctgtttaccctgcttctccagcc

SEQ ID NO: 817363 - DNA, 120 bp, Artificial Sequence
  ENSG00000237761_10 (sequence is synthesized)
acctgataccatcaaatcactttagtaggacaagtaactttccttattctcatttcatgcttgctagacaactgattatactttagttttggaagtaaatttcttacatgaaggaaataa

SEQ ID NO: 817364 - DNA, 120 bp, Artificial Sequence
  ENSG00000237760_0 (sequence is synthesized)
agaattatttcgtggcgtgtgtctctccagacttttgttatggtgtcactacttgcaagctgtgagtctgttttgagaactctctccatctctccaaataaaaacatatcagaacagtga

SEQ ID NO: 817365 - DNA, 120 bp, Artificial Sequence
  ENSG00000214797_0 (sequence is synthesized)
actggacatctgcagagaggacaagaaatggggcacccacacaatcaaaaccccaggggaaaaggcttgaaggttcagccaaaaatccagcccctctcaaaggacaaagatcaaccttcc

SEQ ID NO: 817366 - DNA, 120 bp, Artificial Sequence
  ENSG00000214797_1 (sequence is synthesized)
agaacaattagcaaacacttctcagagtcctccatgctgtgcagatggtaagcatctctgggagtctcgccagcactgtgagtaaggcagcctttttacccatttcacagaaggagaaac

SEQ ID NO: 817367 - DNA, 120 bp, Artificial Sequence
  ENSG00000214797_2 (sequence is synthesized)
taaggcttagtaaggtcaagtaactaattctgcctcccacacttcactccctagagttttatgtgtgcatctgttaaagttctccttttatcgccagcagtgtttatgtataattaaaat

SEQ ID NO: 817368 - DNA, 120 bp, Artificial Sequence
  ENSG00000214797_3 (sequence is synthesized)
agctcacatctgttgattaacagtcacattacaacctgcattaactcttccacttaatgcctgttaaaggattagcaaaccattttacagatgaggaaggcagggcacagagaattaatg

SEQ ID NO: 817369 - DNA, 120 bp, Artificial Sequence
  ENSG00000214797_4 (sequence is synthesized)
tccacaccatgcttatcagtgagtggagcagggattcaaacctagaccttctgggtctagagccctcctcagccatcacctctcattctccattagagttggttatcatgtgagttgagg

SEQ ID NO: 817370 - DNA, 120 bp, Artificial Sequence
  ENSG00000214797_5 (sequence is synthesized)
cccaaaggttaatggaagttattattcttcttcaccaccaattgaactttttatctttacctactgtcctcttcatccttttaatgctttgtaccctaaaatccgcttagatattaactt

SEQ ID NO: 817371 - DNA, 120 bp, Artificial Sequence
  ENSG00000214797_6 (sequence is synthesized)
tgccagttctttctttttggttacatgtgccaggtatactttgtcaaacttttaattttgggtgttttgctttgttttttgttggtgagacaagatctcactctgtcgcccaggctggag

SEQ ID NO: 817372 - DNA, 120 bp, Artificial Sequence
  ENSG00000214797_7 (sequence is synthesized)
gtggtgcaatctgggctcactgcaacccccgcctcctgggcataagcaatcttcctgccttggcctcccaagtagctgagaccacaggcacgagccaccacacccagctaactacttgta

SEQ ID NO: 817373 - DNA, 120 bp, Artificial Sequence
  ENSG00000214797_8 (sequence is synthesized)
agccaccacacccagctaactacttgtaatttttttgatagagacaggtcttgccatgtcactcagactgatctcaaaactcctgggctcaggcgacccacccaccttggcctcccaaag

SEQ ID NO: 817374 - DNA, 120 bp, Artificial Sequence
  ENSG00000214797_9 (sequence is synthesized)
ctgcacctgacccaatttgtaattttgaacctcttcttactatcctgtttcagttttttttttgtaaacaactatagctggattttgttttctaacccagtctaaagcagtctcagattt

SEQ ID NO: 817375 - DNA, 120 bp, Artificial Sequence
  ENSG00000214797_10 (sequence is synthesized)
tgttagaacaactgaaggatctgacatttgtatgtcactttattctatgtgaatggtttattttactcctttttccatagttttgatggtttgggcaaattactatttattctctttcta

SEQ ID NO: 817376 - DNA, 120 bp, Artificial Sequence
  ENSG00000214797_11 (sequence is synthesized)
tatagaaacagggtaagcacctgcctcccgctaggactctctctgcttccttccgccctacccaccccagtaagagctacccaagaaggctcctatccctgccaccttccactgatattt

SEQ ID NO: 817377 - DNA, 120 bp, Artificial Sequence
  ENSG00000214797_12 (sequence is synthesized)
tcctataaactgtgagactcaactaacaaggattccctctccttccaacttggggtccctattctgatcaactgccatttcattagggcctttcttgatgatttccttcatacgtaacac

SEQ ID NO: 817378 - DNA, 120 bp, Artificial Sequence
  ENSG00000214797_13 (sequence is synthesized)
aagcgggaatatcctctgaatttcgcttgctcgtctgcaaaatatatttcttagtctggtcagggaatggtattaatgctctggtgaggcttcctgggcccaggccagccagagtcctcc

SEQ ID NO: 817379 - DNA, 120 bp, Artificial Sequence
  ENSG00000214797_14 (sequence is synthesized)
ggttttcagtgctgcaaatgaggaatctgctgccaatgtgtttcttttcttcctcctttgtcaattatctatttattctgctgggaagcctctttgattttatctgtagctttcaagaat

SEQ ID NO: 817380 - DNA, 120 bp, Artificial Sequence
  ENSG00000214797_15 (sequence is synthesized)
gtcaccaggagatgccaagggtgtatctttttcttcaatgtaaccctgcctggaactctaacaaccttttcaatgtgcaaactcatgccctcttctgatcagggaaaatttctactatta

SEQ ID NO: 817381 - DNA, 120 bp, Artificial Sequence
  ENSG00000214797_16 (sequence is synthesized)
tttattgatcatatttgccatgtccagacctgcttcctcttctccttccacagcccctaacattcacaggtagatgaaaagacatccaccaaacctatattttctttcgtgacttccacc

SEQ ID NO: 817382 - DNA, 120 bp, Artificial Sequence
  ENSG00000214797_17 (sequence is synthesized)
tgtgtttctggttttctgggaggcctttgtttcccagaaacaggaaaaccatcctcttttccacttgatgttttgaattttctaaatttgaaaatcctagttctagaacctgttttcttg

SEQ ID NO: 817383 - DNA, 120 bp, Artificial Sequence
  ENSG00000214797_18 (sequence is synthesized)
ggcagtatctggatttccctgggtttttgaaacctaacacttgtccagtatgtgccgcttggctttccttttccctccagctgggggtccctcaaggctactccatgtccccagcagcca

SEQ ID NO: 817384 - DNA, 120 bp, Artificial Sequence
  ENSG00000214797_19 (sequence is synthesized)
ggtccagctgtggggtccccttccagtgggtgcacggttatgcctctggcccctgacctgccctggggcagcaatagctttcagcaacctctgggacagagggcaagggaagaatagagc

SEQ ID NO: 817385 - DNA, 120 bp, Artificial Sequence
  ENSG00000214797_20 (sequence is synthesized)
agaaagactctaacctcatctaagcccactcaggactccaaggacaggaatcgattcacactttctcttctgacttgtttttgtagagataaggttttgtcacgttgcccaggctgggtc

SEQ ID NO: 817386 - DNA, 76 bp, Artificial Sequence
  ENSG00000214797_21 (sequence is synthesized)
gtgcctttgtaagagaccttagcccccttgcctcttctgccatgtgaggacacagggaatcagaaagtgggtccct

SEQ ID NO: 817387 - DNA, 120 bp, Artificial Sequence
  ENSG00000214797_22 (sequence is synthesized)
ctgccatgtgaggacacagggaatcagaaagtgggtcccttaccagacacaaaatctgctggcaccttgatcttggactttgtctccagaattgtgagaataaatttctgtttataagcc

SEQ ID NO: 817388 - DNA, 120 bp, Artificial Sequence
  ENSG00000237768_0 (sequence is synthesized)
tttcttttcaaggcttcctgatccctgtgcataataagtttacttcactgcttacaaacactgagaagtcaccagatctttctcagtatggatcaaatcagtcatctgacctagaagggg

SEQ ID NO: 817389 - DNA, 120 bp, Artificial Sequence
  ENSG00000237768_1 (sequence is synthesized)
gaatgattgagactgtttcattctatgagacaatttaactggcatgaatcagatatgctggagactatcttttcttcctttttaccagataaaccaaaataaagccaaaaacttttctaa

SEQ ID NO: 817390 - DNA, 120 bp, Artificial Sequence
  ENSG00000272195_0 (sequence is synthesized)
attaaggaggcaaaatggtggccgcgaacgccatcaggctgcgccagcgcggggtttcggcgcaaacagaggatcccgtcagattcaggcggccagaactcctcctcacccaggccaccc

SEQ ID NO: 817391 - DNA, 120 bp, Artificial Sequence
  ENSG00000272195_1 (sequence is synthesized)
cccggggcccacagcctggacagctacgggcgtggcgcctgcggcaccgagaccccaggcgagagtgtggaggcggcggcggcttccccgcgaccgtgaacaacgacgccattatcagca

SEQ ID NO: 817392 - DNA, 120 bp, Artificial Sequence
  ENSG00000272195_2 (sequence is synthesized)
ccccctgccggcgcctccggcgcagcccgcgcaggatgcaaggcccggcctccgagggagggggaaggaggacggggcgggaggaggggaagagggtgaagagggcgggaggagaaagaa

SEQ ID NO: 817393 - DNA, 120 bp, Artificial Sequence
  ENSG00000272195_3 (sequence is synthesized)
agaaagaagaaggcgggaggaggggagagagaagagggagggaagaggggagagaggcggggcggggcgggggagagaggcggggcggggcggggcggagcggcgggccgggcgggctac

SEQ ID NO: 817394 - DNA, 120 bp, Artificial Sequence
  ENSG00000272195_4 (sequence is synthesized)
gggcagggcgactgctgctgccgggtggccccctcctcaggccgccctttccctgcgggtgggaactccagatggacgagggcccaccccacccggcgcttccccgtgcagcccggggtc

SEQ ID NO: 817395 - DNA, 120 bp, Artificial Sequence
  ENSG00000272195_5 (sequence is synthesized)
gcggcgggcggcgagggcagcggctccccggctcccctaccttaccttccctgtccttctcgtccgccatcttgctgcggagccggtcgcctgggagatgcctaacgataacctcggccg

SEQ ID NO: 817396 - DNA, 120 bp, Artificial Sequence
  ENSG00000272195_6 (sequence is synthesized)
acgataacctcggccgcggtgtcccggcctgctcagcgccccgcggcgagcctggcctggaggaggggccgctctgaatcccgggggaggaagacccttgggcggggcggggcggggagg

SEQ ID NO: 817397 - DNA, 120 bp, Artificial Sequence
  ENSG00000272195_7 (sequence is synthesized)
ccacccggcccccggccttgtccctccagacccgaggccggagccggacttgtcccgggcctagcatgttgcttcatcacacggtccccaacccctcctttcccttatttctcatccatt

SEQ ID NO: 817398 - DNA, 120 bp, Artificial Sequence
  ENSG00000272195_8 (sequence is synthesized)
tggggacagcacgcgcgcgcacacacccctcgccccctcctgtcctgtttgtgcgacgtggcgttgctcgatttttgttgttaactgcagattttgaaaagcgccggagagctaggtgaa

SEQ ID NO: 817399 - DNA, 120 bp, Artificial Sequence
  ENSG00000272195_9 (sequence is synthesized)
gagctgggctcccaagggggtgatagaaccagcccgcggcccggcctcctcctcccgcttcccattcgcagcccgcctcccgccgggaagcggcccggctgctgcagaacggccgcgcct

SEQ ID NO: 817400 - DNA, 120 bp, Artificial Sequence
  ENSG00000272195_10 (sequence is synthesized)
gccctcccggtttctcccgtccagtcttcaccgtcctttcccagagaaagcgacagcacagcctatgacaaccgaagctaaaacggaaaaactgggccgggcgcaagaggaaaccagagc

SEQ ID NO: 817401 - DNA, 120 bp, Artificial Sequence
  ENSG00000272195_11 (sequence is synthesized)
cattcgactattgctagaggagaggaatagctgcaggaaaacatgcgcaaaatagcacaaacattgcgtcgtcaaggctgcaatgtctaatacaaaatagaaggttctcatagcaacaaa

SEQ ID NO: 817402 - DNA, 120 bp, Artificial Sequence
  ENSG00000272195_12 (sequence is synthesized)
aacgtgcccatgttgtgctcagtattacatgcgttaaaatgttcttagttgtgaaatttgacatgaccgctagttaaagttacaatggaagttttaaatcccgctttccgaaaactttgc

SEQ ID NO: 817403 - DNA, 120 bp, Artificial Sequence
  ENSG00000272195_13 (sequence is synthesized)
agctatagcatgaagttaaatttttgtcttattttctggataagtttactatactggaacatagtaaagctctttttataaagagctttgaataaaatacctaatgatgtggttgaaacg

SEQ ID NO: 817404 - DNA, 120 bp, Artificial Sequence
  ENSG00000288011_0 (sequence is synthesized)
agtgcatatcttctattcctccatgaaaggtttctacttaaatgtaacaagcattggacccgaaatgagggagcccagctggggtctttgggtgaaaagtgtcctcaacctcttcaaaag

SEQ ID NO: 817405 - DNA, 120 bp, Artificial Sequence
  ENSG00000288011_1 (sequence is synthesized)
cagaggtgcaaatggtccccaggcagcgaggcaggcaaggcttctaggtgaagcccccggcccccagagaggggaacctcttcctgtgatgggtacaccgggatgtttaaccactggttt

SEQ ID NO: 817406 - DNA, 120 bp, Artificial Sequence
  ENSG00000288011_2 (sequence is synthesized)
tctgggaacgagatgcaaaccctggctcagcatagggccaaagacgctgacaagaggatttctcactgtgagagaagtgagccaccagatagagaggacactcaaacagccccatgcaga

SEQ ID NO: 817407 - DNA, 120 bp, Artificial Sequence
  ENSG00000288011_3 (sequence is synthesized)
ggccaatatagaaaggataaaatagccagcatcaacttaccggctttgtaagagagcctttataactgaatccactgccccggtcaagccttcagatgactgcagctctagcctacatct

SEQ ID NO: 817408 - DNA, 120 bp, Artificial Sequence
  ENSG00000288011_4 (sequence is synthesized)
ggctgcaatctcaggtgttcagatcaagggaaactactctaagaggctacacttgaggaacaacaaccaaggagcttcaactgcatctggatttcaggatccaagaaccctctattgggg

SEQ ID NO: 817409 - DNA, 120 bp, Artificial Sequence
  ENSG00000288011_5 (sequence is synthesized)
tctggattgggacccctttccaacatcttttgggaaaaccacaaagaggctatactgaggagacccctaacccagaggaaatagactgctgcgctgattggccaactttggagtctggaa

SEQ ID NO: 817410 - DNA, 120 bp, Artificial Sequence
  ENSG00000288011_6 (sequence is synthesized)
gccaactttggagtctggaaaacttttcttttgagctattgacagcctttaacaactgagtaaagtgtactcctgtgaacaaaattcagagcctgtttgtttctctctacctgatttctc

SEQ ID NO: 817411 - DNA, 120 bp, Artificial Sequence
  ENSG00000288011_7 (sequence is synthesized)
gacttatagagccaataaaagccccttggaaacactggccttatacattgtctacacagtctctgtgtagggttcctaacctgtgagtaaagaatgtcactttttaacagtcccaggagc

SEQ ID NO: 817412 - DNA, 120 bp, Artificial Sequence
  ENSG00000288011_8 (sequence is synthesized)
aatgtcactttttaacagtcccaggagcccccaagttatcttgggacctgaataggaaaggaatttacccaataatagatatttgagtgtacaaacccatggctgggctcagcttcagaa

SEQ ID NO: 817413 - DNA, 79 bp, Artificial Sequence
  ENSG00000288011_9 (sequence is synthesized)
ccaattttatgaataatcaggccaagtataataaagtaaatcagtcttacagtgatttgtctttagtaaaaatgggaaa

SEQ ID NO: 817414 - DNA, 120 bp, Artificial Sequence
  ENSG00000288011_10 (sequence is synthesized)
tggtacaactgttactagattctagtctcattcactgtttttgaatttttttctgcaatttagactgactcttcttatttctgttaaccaaccagtgatctctggctgctgctcagaaga

SEQ ID NO: 817415 - DNA, 120 bp, Artificial Sequence
  ENSG00000288011_11 (sequence is synthesized)
actaagaaggatgggtaatataaaatccagatcaatattcttattctgggcacatattggaatcagctaacaaccccatatcagtttggttccaacaattgcccagttcatggaaagcct

SEQ ID NO: 817416 - DNA, 120 bp, Artificial Sequence
  ENSG00000288011_12 (sequence is synthesized)
tcagtttggttccaacaattgcccagttcatggaaagcctctaattttgtttatttgggatgattttgcttattttgctttactattgtggaatatattgctgttgtactctttgtgtag

SEQ ID NO: 817417 - DNA, 120 bp, Artificial Sequence
  ENSG00000288011_13 (sequence is synthesized)
cccttattcctcttccaggtaccatcttttgttggaactcagttacaaataaccctcaccataccagcactttctgaatgagctcctctctaccctgaaggcaaaagacccaatagttag

SEQ ID NO: 817418 - DNA, 120 bp, Artificial Sequence
  ENSG00000288011_14 (sequence is synthesized)
gctggaatattatcacccctattcagcctgaagaagttacagaaaatggatcttcatctgtctacaacccttaggattaagtgttctcttataatagggaggggggaattgtcagaggca

SEQ ID NO: 817419 - DNA, 120 bp, Artificial Sequence
  ENSG00000288011_15 (sequence is synthesized)
tttgaatcaaagcaactccatttcacacaggggctaagtgaaataaggctaagacctactaggctgcattcccaggaggttaagacattctaagtcacaggatgagacaggagagcggca

SEQ ID NO: 817420 - DNA, 120 bp, Artificial Sequence
  ENSG00000288011_16 (sequence is synthesized)
taagatgcaggtcagaaagatcttgtggataaaacaggttgcagtaaagaagccagccaaaacatcaaaaccaagatggcgacaaaagtgacttctggtcgtctgcactgctacattccc

SEQ ID NO: 817421 - DNA, 90 bp, Artificial Sequence
  ENSG00000288011_17 (sequence is synthesized)
gacaaaagtgacttctggtcgtctgcactgctacattcccgccagcaccacggggttgccctacatgttctaaaatggggaggaaccctc

SEQ ID NO: 817422 - DNA, 120 bp, Artificial Sequence
  ENSG00000288011_18 (sequence is synthesized)
aataatccaccctttgtttagcatataaacaagaaataaccataaaaatgggcaactaggtgtgcaccactgctcttcttatggagtagccattctttcattcctttactttcataataa

SEQ ID NO: 817423 - DNA, 120 bp, Artificial Sequence
  ENSG00000288011_19 (sequence is synthesized)
tagggccaaagacgctgacaagagggcctctttatctggtaatgcctactcatccctcagagctcatcccaagtatgccctctctgaggaggtcttccctgacactcctggacaaggatt

SEQ ID NO: 817424 - DNA, 120 bp, Artificial Sequence
  ENSG00000288011_20 (sequence is synthesized)
atcatttttttccctgtcttcagacttgaactgaaacatcagcttttcttgagtctcaacctgctgttctttggactagaactgcaccattggctctcttgggtttccagcttaacaact

SEQ ID NO: 817425 - DNA, 120 bp, Artificial Sequence
  ENSG00000288011_21 (sequence is synthesized)
agcttaacaactgtagatcttggaacttggcagctttcataaatacatgagttaatttcttaaaataaatatattcatatgtatgtatataaaatacatatctatctatctatctatcta

SEQ ID NO: 817426 - DNA, 120 bp, Artificial Sequence
  ENSG00000248323_0 (sequence is synthesized)
atcaatgacgccaagtggcaaggaacatcaccatctttggagacctagtggtggagttaaactactacagggaaacaactttacgtatagaggagttgagcttcctagaggaaaagaagg

SEQ ID NO: 817427 - DNA, 120 bp, Artificial Sequence
  ENSG00000248323_1 (sequence is synthesized)
ctagaggaaaagaaggaaaatcattcctaatggaagatcaactattcaagaaagaaagaagagcaatgagaaagatggagtctcactctgtttctcaggctggagggcagtggcacgatc

SEQ ID NO: 817428 - DNA, 120 bp, Artificial Sequence
  ENSG00000248323_2 (sequence is synthesized)
ggcttccccctttgctgggcactcattcttctccttcttgttgccatgtgagaaaggaaatgtttgcttccctttctgccatgattgtaagtttctggaggcctccccagtcctgtggaa

SEQ ID NO: 817429 - DNA, 120 bp, Artificial Sequence
  ENSG00000248323_3 (sequence is synthesized)
aatcaacactccactcagacaatgcccagacctccagaaaccatgtgtcaagctcggattgccttagacagaagctcacccagctggaactcttatgggaccttggcaccagagaccaca

SEQ ID NO: 817430 - DNA, 120 bp, Artificial Sequence
  ENSG00000248323_4 (sequence is synthesized)
aattcctctttgaagttttctaacagcaacaatggagtttgtctagcagaggagtctgtcatgtaatcaggaaactccagtacacaacgtgatagctctaagacagagtttcgctctgtc

SEQ ID NO: 817431 - DNA, 120 bp, Artificial Sequence
  ENSG00000248323_5 (sequence is synthesized)
acccaggaatccaacttgctgtttgctatcacatgtgctatacatgctgttgatgaaactgctaaaggggctgaatgtgactgacgtctttggaaggatgagacttagcgtgcctgtaca

SEQ ID NO: 817432 - DNA, 120 bp, Artificial Sequence
  ENSG00000248323_6 (sequence is synthesized)
cagacatgccaagaagcaagccagggtcagtgagtgaagaggagggcaggcccatttgaagcaacacagtttatatacatgaaaagaaagaaggagagaaggaagaaaggagggcggaag

SEQ ID NO: 817433 - DNA, 120 bp, Artificial Sequence
  ENSG00000248323_7 (sequence is synthesized)
agaaggaagaaaggagggcggaaggaaaggaagaagggagagaagaagagaagaaagaagcagagaaaggaagagaaaagaaattacggccagtgcggtggctcacgcctgtaatcctag

SEQ ID NO: 817434 - DNA, 71 bp, Artificial Sequence
  ENSG00000248323_8 (sequence is synthesized)
ctacctgggaggctgaggtaggagaatcgctggaacccgagaggcggaggctgcagtgagttgagatcatg

SEQ ID NO: 817435 - DNA, 120 bp, Artificial Sequence
  ENSG00000248323_9 (sequence is synthesized)
atgaaaaggtattgtaaataaagagaaagatcagaggcttattttaaacactaaatatgagctaggagctgtcctagacactatgtaaaagttttatttagttctcactgtaatgttggc

SEQ ID NO: 817436 - DNA, 120 bp, Artificial Sequence
  ENSG00000248323_10 (sequence is synthesized)
cttatgttagcatcccatttttcagactgaggaaattatggctcagagaggttaagagacttattgaaggtcacacagctccacaaactttggtgtagattgaacgtgtacatgggtcta

SEQ ID NO: 817437 - DNA, 120 bp, Artificial Sequence
  ENSG00000248323_11 (sequence is synthesized)
tgtgactttgaatcttgcattctttacattattggaatatttcacagaaggaaaatgacatattaacatggcaataagatttctggttccagtctggttactggtcttccaagagtgtta

SEQ ID NO: 817438 - DNA, 120 bp, Artificial Sequence
  ENSG00000248323_12 (sequence is synthesized)
taggatgtatagcctgagctctgaagctttgttctgaagcatgctatcaatatgaacaaattggtatggaaggaagccacaaattatatactaaaatctagttcatcagaggaaaatata

SEQ ID NO: 817439 - DNA, 120 bp, Artificial Sequence
  ENSG00000248323_13 (sequence is synthesized)
gttaaatacatttacattcccagaactgttaatattgaagaataaaacacacagtgggaaagagacgaagagaaaatacgcctgtttttatgacttgttgatatctacagggtttttcct

SEQ ID NO: 817440 - DNA, 120 bp, Artificial Sequence
  ENSG00000248323_14 (sequence is synthesized)
cactggaaatgggtcagactccagttgagagaaccaggggcctgaatgaccccagcaaaatcactgtggcaattctttcaatcacctctgagaatatggccctgtgacgacataatgacg

SEQ ID NO: 817441 - DNA, 120 bp, Artificial Sequence
  ENSG00000248323_15 (sequence is synthesized)
tttggattaattccagtcggctgtgttttcccctcctttcttgcctccccgtagttgatttgccaaattttttttgtttgcttaaatacgcggaactaaacaggatacattatatgacag

SEQ ID NO: 817442 - DNA, 120 bp, Artificial Sequence
  ENSG00000248323_16 (sequence is synthesized)
tctgtgataaatttaccactgggaatagggaaaaagtatgggataaagaaataggtatttttcgcctctcacagctgtgattcagttctgactcaaaaggaagtgtgccacctactgaat

SEQ ID NO: 817443 - DNA, 120 bp, Artificial Sequence
  ENSG00000248323_17 (sequence is synthesized)
cacagaaaccacttcctgtggctgtttggtttattctggaggagcatcaggccaagtgctgccctgccctgaccctgactggctcttcagagccaaggcattcacagcttgaggtggttt

SEQ ID NO: 817444 - DNA, 120 bp, Artificial Sequence
  ENSG00000248323_18 (sequence is synthesized)
ggcctcagactcttgagaacattgcatattaaattacaagtgtttcgtttcctagcaaggagtctttagcaacatgaaaacgaacgtgtgttatttgcaaaccaagtatatcattactga

SEQ ID NO: 817445 - DNA, 120 bp, Artificial Sequence
  ENSG00000248323_19 (sequence is synthesized)
acctgaatatccttactttttcataaggtacgtattccggatgaccactcttaagatctgaatgtacactggttctgtttttcctgaggggaacttgggcagtctgcagggtggcattta

SEQ ID NO: 817446 - DNA, 120 bp, Artificial Sequence
  ENSG00000248323_20 (sequence is synthesized)
acttattgccatgtgctgtgctaggtaggggtagagggtacagtggtgaacaagaccccacagctcctgacctcatggctcatgtgttctacaccataagggaatcaagctgtgtctccc

SEQ ID NO: 817447 - DNA, 120 bp, Artificial Sequence
  ENSG00000248323_21 (sequence is synthesized)
ggggcaggggccttcctctgttcaccatgcagccccagcatctagcacctggcgttgcataaaggaggctctaaatcaagcttgtccaacccaaggcccacgggccacatgtggcccagg

SEQ ID NO: 817448 - DNA, 87 bp, Artificial Sequence
  ENSG00000248323_22 (sequence is synthesized)
gaatgcagccaaagatttgtgtgtatgtgttttagtccatcagctattgttagtgttcatgtattttatgtgtggcccaagacaatt

SEQ ID NO: 817449 - DNA, 120 bp, Artificial Sequence
  ENSG00000248323_23 (sequence is synthesized)
agacaattcttctatgtggcccaaggaaaccaaagattgaacactcctgctctaaatacttgtttgttgaatagatacatgaaaagaaagaaggagagaaggaagaaaggagggcggaag

SEQ ID NO: 817450 - DNA, 120 bp, Artificial Sequence
  ENSG00000248323_24 (sequence is synthesized)
aatcaacactccactcagacaatgcccagacctccagaaaccatgtgtcaagctcggattgccttagacagctcacccagctggaactcttatgggaccttggcaccagagaccacaaat

SEQ ID NO: 817451 - DNA, 120 bp, Artificial Sequence
  ENSG00000248323_25 (sequence is synthesized)
tcctctttgaagttttctaacagcaacaatggtatttctgacttggctttcttgtatttctctcacgttaacaaaattggttcagcatctaccatgggctacatgctgagctacagagtt

SEQ ID NO: 817452 - DNA, 120 bp, Artificial Sequence
  ENSG00000248323_26 (sequence is synthesized)
aatcccagctacctgggaggctgaggcccccaggttctgcctctgtcctgacatccagtgttggattcctcttcacatcaactcctctctagctgtggcaattccttgaaccacactgat

SEQ ID NO: 817453 - DNA, 120 bp, Artificial Sequence
  ENSG00000248323_27 (sequence is synthesized)
acactgattgctataaagtggaagaggaatagattgaattttggggagtcaactacaatgtgtactacaggaacaaaacccatcagaagatgtcagaagataaggatttttgtcctgatg

SEQ ID NO: 817454 - DNA, 120 bp, Artificial Sequence
  ENSG00000248323_28 (sequence is synthesized)
ctacacttaccagctgtccctcagtgttctacttcttaaaaaaagagagatggataaacagaggcaacccgaggataaaggccttgctcagtgtcacacatttcagtcactaaataagac

SEQ ID NO: 817455 - DNA, 120 bp, Artificial Sequence
  ENSG00000248323_29 (sequence is synthesized)
acaatggatgccagtattctcatcccctcacaaataaagagccttcaagctcttgcagtcaacaagaacttttggaatgatttcactgcctgaaaaggcagatacataggtgacacccac

SEQ ID NO: 817456 - DNA, 120 bp, Artificial Sequence
  ENSG00000248323_30 (sequence is synthesized)
aaataggaagaaaatcaacctgaacctgagtgtgtgggctcactgactctaagcagtagagacagaagaaaaagttttagcaaagaagggttctgaaagaaaataaatatagctcgttat

SEQ ID NO: 817457 - DNA, 120 bp, Artificial Sequence
  ENSG00000248323_31 (sequence is synthesized)
caagtgctgtttttacacagtaaaacatgggcaaaattactcttctttaagtagtaattcttatctcttgattaagtcacctactcattcatttaataaatacatactgattgttttcta

SEQ ID NO: 817458 - DNA, 120 bp, Artificial Sequence
  ENSG00000248323_32 (sequence is synthesized)
gcccagacctccagaaaccatgtgtcaagctcggattgccttagacaggtgcaatttaagaacagctttcatcctcttttctctcatattgtcacactatgtgttctgacttctggctcc

SEQ ID NO: 817459 - DNA, 120 bp, Artificial Sequence
  ENSG00000248323_33 (sequence is synthesized)
atagtaataacaataatagctaatatagcaggcactaataattatttgttgagtaatatgtcaaaattcagtgtgaacagcattctatttggggctgcatccactgactataacacagct

SEQ ID NO: 817460 - DNA, 120 bp, Artificial Sequence
  ENSG00000248323_34 (sequence is synthesized)
aatctatctgaaatgttccagctttgggcctctctaacagaagaagctgttgttgggcctgcctctagttggcgatgcatccaccaatgagaatgaatttatgatcgaccactcttcctg

SEQ ID NO: 817461 - DNA, 120 bp, Artificial Sequence
  ENSG00000248323_35 (sequence is synthesized)
taaaggccgctggaactgacagcattgtgattttcttttactgttagttttaaattactagaaccaactcaattactagaacgaactttacttctttgtttcctacttatcaaaacagta

SEQ ID NO: 817462 - DNA, 120 bp, Artificial Sequence
  ENSG00000248323_36 (sequence is synthesized)
aaaacaacaagtaaaagaaatgccatcttaatattgttttgatgacaaaacagtattccttttagttgtgcttcaaatggaataagatgcaaacaggcttggtatggtggctcacccctg

SEQ ID NO: 817463 - DNA, 90 bp, Artificial Sequence
  ENSG00000248323_37 (sequence is synthesized)
aaggattgcttgaggccatgagtttgagaccagcctgcgcaacatagcaagaccgtgtctctacaaaaaataaaaaattagctgagtgta

SEQ ID NO: 817464 - DNA, 120 bp, Artificial Sequence
  ENSG00000248323_38 (sequence is synthesized)
ggactacaggcgcccgccaccacacccaggaaaaacggagcccgagcagctaaggatcttgcccacggtcactgaattagcaatgcttgtgatgaacattcccaaagcttttatgagctc

SEQ ID NO: 817465 - DNA, 120 bp, Artificial Sequence
  ENSG00000248323_39 (sequence is synthesized)
cccaaagcttttatgagctctacgatctggaataggtctctttgtgatctgttctcctacttgctaaatatatgaaatattaaacttcataatcacaaagtttctgtatccatctaaaaa

SEQ ID NO: 817466 - DNA, 120 bp, Artificial Sequence
  ENSG00000248323_40 (sequence is synthesized)
agaaaggaacaatttgatttgctgtgtggagaaagtgtcctctggctctctaagagttaactgatctggctctacctgatctatctgtgaatttctataaatactttacaggtatgtgaa

SEQ ID NO: 817467 - DNA, 120 bp, Artificial Sequence
  ENSG00000248323_41 (sequence is synthesized)
tggcaatcagtgacgatgttatcttagctgtcttttttttttttgacagggtctcgctctgtcaccctgtctgaagtgcagtggtgtaatttcggctcactgcagcctcgacctcctggg

SEQ ID NO: 817468 - DNA, 67 bp, Artificial Sequence
  ENSG00000248323_42 (sequence is synthesized)
gtacagatggggtgtcgctatgttgtccaggctggtctttttttctttctctttctttctttctttc

SEQ ID NO: 817469 - DNA, 120 bp, Artificial Sequence
  ENSG00000248323_43 (sequence is synthesized)
agtttagttggagagacatttatatagacacttatgagacatgtaaaccactgacatagccacttgacatggctgaagttcaaatgtcaaaaggataagacatgaacagcaatgtatgcc

SEQ ID NO: 817470 - DNA, 120 bp, Artificial Sequence
  ENSG00000248323_44 (sequence is synthesized)
cacccagggaactgccacagccacctcaaccttcagcaaacaccaccctgaccagtgagtggcaatcaacattgaggcaagacctttcagcaaaaagattataattctctgaagactcag

SEQ ID NO: 817471 - DNA, 120 bp, Artificial Sequence
  ENSG00000248323_45 (sequence is synthesized)
atgatcattagcatttctagcaacaatgtatttttaaattaagatatttgatgtgattcaccagtacagccatatgaagatgatattttgattttaggaatgtttcattacaaatgcaat

SEQ ID NO: 817472 - DNA, 120 bp, Artificial Sequence
  ENSG00000248323_46 (sequence is synthesized)
tccttcaacagaggctttttcactcctcagaagaaaaagtggacactatatgccccaatgcagccgcattcctgctggtccccaaaagtatagtcacaaaattaaacaggagctgacata

SEQ ID NO: 817473 - DNA, 120 bp, Artificial Sequence
  ENSG00000248323_47 (sequence is synthesized)
ctgtgaggatgttcaggtagccctgtggagaatcccacattgggatgaactgagaccttctgccaacagtaatctgagtgagccctcttggaagcggatcctgtaggcatggtcaagcca

SEQ ID NO: 817474 - DNA, 120 bp, Artificial Sequence
  ENSG00000248323_48 (sequence is synthesized)
tcagatgatttctcatgtggttgcaaccttggctgacagtttgatccagctaagccattcccagattcctgaccctcagaaattatgtgaataataaatgtttgttgtttgaggctgcta

SEQ ID NO: 817475 - DNA, 120 bp, Artificial Sequence
  ENSG00000248323_49 (sequence is synthesized)
gtagatattgtctcactctgttggccagactggtcttgaaatcctgggctcgagcaattctcctgcctcggcctcgtaacgcgttaggattacaagcgtgaacaccgcacctggccagca

SEQ ID NO: 817476 - DNA, 120 bp, Artificial Sequence
  ENSG00000248323_50 (sequence is synthesized)
tgtggtctcttaaccagaggaggcctcttctgaactaggtagaggtcctgagaattgattctgagagtaaaaggctctttgttctcctcagagtagattagaatccctaatgatagagca

SEQ ID NO: 817477 - DNA, 120 bp, Artificial Sequence
  ENSG00000248323_51 (sequence is synthesized)
tctattattcctctagtggtccatgcccaacagattcatccaagaatagatgaagatctttgtaatgttgtgcaagtaatctaatcaccccacagaagagctgtgacttaaattatccca

SEQ ID NO: 817478 - DNA, 120 bp, Artificial Sequence
  ENSG00000248323_52 (sequence is synthesized)
gagtcggcccacctgttttcataaagatcaatgtaacttgtaaatttcttcagttctcctcacctatcatcatttgactaacaaaacccagaaaactaggctagttatggtggcctatgc

SEQ ID NO: 817479 - DNA, 120 bp, Artificial Sequence
  ENSG00000248323_53 (sequence is synthesized)
ctctgaggaatgcagagcatacttcaggctctcctgttgcacaacacccaagtgagcacccaagtggtggctctggaccaagaattggactgttacagctactgcctaccaacatagggt

SEQ ID NO: 817480 - DNA, 120 bp, Artificial Sequence
  ENSG00000248323_54 (sequence is synthesized)
gttctgagagacaggttacagctactgcctatcaacacagggtgttctgagaaacagcaaagacacttcgtttctgaaaatggcgatctgagaactttagaaatgaacttgagaggaaaa

SEQ ID NO: 817481 - DNA, 120 bp, Artificial Sequence
  ENSG00000248323_55 (sequence is synthesized)
tatctgtgttctccaatatggcagctaccaaacacatgtggctgttgagcacttaaaatgtggtgagggtgaatgataaactgactctttaatgttgcctaactttagtttaaatttaaa

SEQ ID NO: 817482 - DNA, 120 bp, Artificial Sequence
  ENSG00000248323_56 (sequence is synthesized)
tagccacatgcagctaatggttattgtattgaacagttcagatgtaaacaaatgctggactgagcaaccattcaaaaaaaattttaagattcatttctgaattcttgatcctaaaaaagt

SEQ ID NO: 817483 - DNA, 120 bp, Artificial Sequence
  ENSG00000248323_57 (sequence is synthesized)
ccctgtttccattgggcctgctgtgatgaaataagtctattttaagaactttggggatagagaaatcgtactagatttccaaaaaattaaggatactaaagatataggttgatttttaaa

SEQ ID NO: 817484 - DNA, 120 bp, Artificial Sequence
  ENSG00000248323_58 (sequence is synthesized)
gactgtacttgaacttattcattttataactcaaattttgtaccctttgatcaaaatccttcatttctttcacccccagcacctgacaaccacctttctactctgtttctgttactagtt

SEQ ID NO: 817485 - DNA, 120 bp, Artificial Sequence
  ENSG00000248323_59 (sequence is synthesized)
accacctttctactctgtttctgttactagttaataattctgtatataaaaatttctcattcaaactaaaaatatatatagtacttgaattgtgaatatttaccttaattttaacctaac

SEQ ID NO: 817486 - DNA, 120 bp, Artificial Sequence
  ENSG00000248323_60 (sequence is synthesized)
tcaaagagaaaataggagttttatctgtgcattaaggctgagttggatttgaatacagagacaggagaagggaagtcatcatgtgccttgaactagtgcaaaagtacagaggtaaagata

SEQ ID NO: 817487 - DNA, 120 bp, Artificial Sequence
  ENSG00000248323_61 (sequence is synthesized)
gtcaccgttaagcgtcccacgatttagtactgaaaattgcagagattactgaatgaatttattaaaggaaataattctgagtctgtcaatacagtcatgcattgcttaatgatggagata

SEQ ID NO: 817488 - DNA, 120 bp, Artificial Sequence
  ENSG00000248323_62 (sequence is synthesized)
cattctgagaaacaaatccataggtgatttcatcattgtgtgaacaccacagagtacacagacctagatggtatagcctactatacacctaggctatatagtatagctgtgaaaggaaaa

SEQ ID NO: 817489 - DNA, 120 bp, Artificial Sequence
  ENSG00000248323_63 (sequence is synthesized)
taaaatcttggaatactaaactcactatgccaaagggagaagttaagcttgggaaagaagtcatgcaaaaactgccttccttttgctcctaaacagctgcagcacagagggccacatagc

SEQ ID NO: 817490 - DNA, 120 bp, Artificial Sequence
  ENSG00000248323_64 (sequence is synthesized)
tccccacgtggcctccctcacaaactgctcacaatgaaattctttgtgggcccaagtctttatcctaaaacagagttctgtggaatcacatcctgataacgtaaattaacagtttacctt

SEQ ID NO: 817491 - DNA, 120 bp, Artificial Sequence
  ENSG00000248323_65 (sequence is synthesized)
tattcatgtttgacttctgatatggtctgtgtccccacccaaatttcatcatgaattcctacctgttctgggaagggccctgtaggaggtaattgaatcctgagggcgggtctttcccat

SEQ ID NO: 817492 - DNA, 78 bp, Artificial Sequence
  ENSG00000248323_66 (sequence is synthesized)
atagtgaataagtctcatgagatctgacagttttagaagagggaatttccctgcaaaagctccttttttccttccgct

SEQ ID NO: 817493 - DNA, 86 bp, Artificial Sequence
  ENSG00000248323_67 (sequence is synthesized)
atgtaagacatgacttgctcctcctttccttccgctatgattgtgaggcttctccagccattgtggaactgtaagtccattaaact

SEQ ID NO: 817494 - DNA, 120 bp, Artificial Sequence
  ENSG00000248323_68 (sequence is synthesized)
gactaatacaatttctttctctactctatgtttatactacataaaatgcagatttactttgtgagaggaatgtataattgactgttgctctttccccacctgcctgctctttctccttta

SEQ ID NO: 817495 - DNA, 120 bp, Artificial Sequence
  ENSG00000248323_69 (sequence is synthesized)
aaaactgaagtcctaaagactctttggaaaaaacacagtccacagattctagtgtaacttgtgtctctttttcctggtgtgtcctcagtctgagtaaaataagcctctaaattgatgaga

SEQ ID NO: 817496 - DNA, 120 bp, Artificial Sequence
  ENSG00000248323_70 (sequence is synthesized)
tttgtctcactttttggtttacatagcctattgctcctaggctacaaagctatacagcatgttactgtactgaatactataggcaattgtaacacagttgtgtttgtatctctaaacata

SEQ ID NO: 817497 - DNA, 120 bp, Artificial Sequence
  ENSG00000248323_71 (sequence is synthesized)
tctaaacatagaaaaggtaacacattgtgctacaaccttacaatgactatgatgtcactaaaaaattttcagctgcatcataatcttatggaaccatcatcatgtatggagtctgttgtt

SEQ ID NO: 817498 - DNA, 120 bp, Artificial Sequence
  ENSG00000248323_72 (sequence is synthesized)
tcatttacaaaggagttgtgttcttttggtggggggtaattttgaaacaaatatctttctctgttttttggggttttgggtattgttttgttttgttttgtcttgttttgagtcagggtc

SEQ ID NO: 817499 - DNA, 120 bp, Artificial Sequence
  ENSG00000248323_73 (sequence is synthesized)
ttactctgtcatccaggctggtgtgctgtggtgctatcatagctcactacagcctcaacctcctggccccaggagattctcctgccctggccttccaaagtgttaggattacaggcatga

SEQ ID NO: 817500 - DNA, 120 bp, Artificial Sequence
  ENSG00000248323_74 (sequence is synthesized)
gccaccgtggtagctgaaatccctttctttgaagcacattagagaatgaaaaagaaaagagagaaaaaaataagagaaagaataaaaagaaattgctgtgtcctgagtcatgtccctcct

SEQ ID NO: 817501 - DNA, 120 bp, Artificial Sequence
  ENSG00000248323_75 (sequence is synthesized)
ggtaaataaaatttatgggaagccattattttggactgaggtcccatagtagggcccaatagaccaaaccacataatcaagctaaaaccttaaggaagcagataaatccccaaacacacc

SEQ ID NO: 817502 - DNA, 120 bp, Artificial Sequence
  ENSG00000248323_76 (sequence is synthesized)
agtttttcttgaaaacaagaggttcactcacagccatcacttggaaaagacccagtcaacttgagtcaccctaataaggaagtccttctgctttaaaccttataagaaaagtaacctgaa

SEQ ID NO: 817503 - DNA, 120 bp, Artificial Sequence
  ENSG00000248323_77 (sequence is synthesized)
gtaacctgatgttaaccattctgcttttttctatatttgtttccttgttctcatataaaaactaactgttgcaatgagtgctgatcatgccactgtactccagcctggacaacagagtga

SEQ ID NO: 817504 - DNA, 89 bp, Artificial Sequence
  ENSG00000248323_78 (sequence is synthesized)
cctgaggggaacttgggcagtctgcagggtggcatttaccagctgaggtaggagaattgcttgaacctggcagggcagaggttgcagca

SEQ ID NO: 817505 - DNA, 120 bp, Artificial Sequence
  ENSG00000248323_79 (sequence is synthesized)
tgagcccagaaggtcgaagttgcagtgagccgtgatcgtgccattgctctccagcttggacaacaaagcaagaccctatgtcaaaaaataaataaataaaagacataaacatatctgaga

SEQ ID NO: 817506 - DNA, 120 bp, Artificial Sequence
  ENSG00000248323_80 (sequence is synthesized)
gattccaaattttcaatctggttttcttgagtagtgactgagtgccaaaaatgaagcaatgacacaacatcaccatcaagacactccccagcacgcacacacatgccagagtccaacacc

SEQ ID NO: 817507 - DNA, 120 bp, Artificial Sequence
  ENSG00000248323_81 (sequence is synthesized)
aagatactccccagcacgcacacacacgccagagtccaggccatattcgggtggcttgcaagcttcttccccccaagtatttactctcaaaataatggtttttgttttgttttggtttgg

SEQ ID NO: 817508 - DNA, 120 bp, Artificial Sequence
  ENSG00000248323_82 (sequence is synthesized)
tttggtttgtttttttccaaatacatttcttccctatatctttaaccaattctcataaaattttgtctaatacactggtcagtgtattccagaccctaaaagataacataatgaaactat

SEQ ID NO: 817509 - DNA, 120 bp, Artificial Sequence
  ENSG00000248323_83 (sequence is synthesized)
ctatgactaaaaggtaatcaggatcttctacttatccttttttcctccctcttaaactttaattttgatacatttgggagtgaaatgatgacaataaatgcaaagtaattattgaagaaa

SEQ ID NO: 817510 - DNA, 120 bp, Artificial Sequence
  ENSG00000248323_84 (sequence is synthesized)
gtgtcatatcagagattgccacagacacccagggcaatgtgatttgtcacttaaagaggacggcagatcaagagcatctcatcctccggctgctgagtcatcctgctctggcagttattt

SEQ ID NO: 817511 - DNA, 89 bp, Artificial Sequence
  ENSG00000248323_85 (sequence is synthesized)
tgcacccaaaaacaaacaaacgaacaaacctgatattttcaaaattgaggcaattataacagctatttagccaagcattatgatagcaa

SEQ ID NO: 817512 - DNA, 120 bp, Artificial Sequence
  ENSG00000248323_86 (sequence is synthesized)
attatgatagcaataatagcaagaaaataaattagttaacaaatgagtctcagaagcccaatgatttttattttatttttattttttgaacttttattttagaatcaggggatacatgtg

SEQ ID NO: 817513 - DNA, 120 bp, Artificial Sequence
  ENSG00000248323_87 (sequence is synthesized)
caggtttgttacccgggtatattgcatgatgctgagttttggagtatgcatgaatccaacctgtcatccaggtagtgagtatagtacccaacagatagtttttttaacatttacttcact

SEQ ID NO: 817514 - DNA, 120 bp, Artificial Sequence
  ENSG00000248323_88 (sequence is synthesized)
cccttccccaatcttgtattcccctgtgtctactgttcccatttttatgactgtgccaacaataattttttttcttttttctttaaatagagatgggggtctctatttaaagagcctccc

SEQ ID NO: 817515 - DNA, 120 bp, Artificial Sequence
  ENSG00000248323_89 (sequence is synthesized)
aaagtgctaggattacaggtgtgatccattgcacctggcccatgccaacaatatttgaaacccttatctgcgtgtacaagtttgctactggttttgttttgctcattaatacatcccaag

SEQ ID NO: 817516 - DNA, 120 bp, Artificial Sequence
  ENSG00000248323_90 (sequence is synthesized)
catctatacctggcttgtagtaccagcatgtagtaggtgcttaataaatatttattgaataaataaattagtttgacattagtttaacatctcaagtaaaacaaaataccattcaattaa

SEQ ID NO: 817517 - DNA, 120 bp, Artificial Sequence
  ENSG00000248323_91 (sequence is synthesized)
aaagaagagcaatgagaaagctcctttatattacccaccagagggatgaaagcgattgattctaccagaagctattgagaaatgtatatggcttttagtagtggtgatgatgatgatgat

SEQ ID NO: 817518 - DNA, 120 bp, Artificial Sequence
  ENSG00000248323_92 (sequence is synthesized)
gacgattgttttggcactttcagaattcagaagcaatttgctgcctcctgggcactctactcatgaccagttaactttaaagtggtcctatttgctttgtggtggtcggggctggcttag

SEQ ID NO: 817519 - DNA, 120 bp, Artificial Sequence
  ENSG00000248323_93 (sequence is synthesized)
caaaaattacaaaggaataaaaagctaaatttagtaagtctatctctactatgttgtgtctaatcttcttgtgctggtttcctagagtgccctctgctgggcccaaccaggtcttctgat

SEQ ID NO: 817520 - DNA, 120 bp, Artificial Sequence
  ENSG00000248323_94 (sequence is synthesized)
tcccatgaaacccatgcctcaattgtcatcaaaagcttactattttatgtcacatgccatcagaatcctagcatttgctttccagattgacaattaaccaaggtaaactaatccatgtta

SEQ ID NO: 817521 - DNA, 120 bp, Artificial Sequence
  ENSG00000248323_95 (sequence is synthesized)
atgtgtgaatgtgttttattgtataaatgggaaaaaacccaatgcccctctcaggtcatttaagtatacatttccgcaatgactttatggacgtactgcttctacttagtatctaactct

SEQ ID NO: 817522 - DNA, 120 bp, Artificial Sequence
  ENSG00000248323_96 (sequence is synthesized)
aggaatctggggaaggctatgctctgagaaatcaaaggggaatatgttttccaacagacagaaccttgtggctcccctcaaattacactgtgtgggcagctgtctactcaagctatctgt

SEQ ID NO: 817523 - DNA, 120 bp, Artificial Sequence
  ENSG00000248323_97 (sequence is synthesized)
atggccaagccccatggaggtaattttcaccctgtcagccagaaaagaatgaacatcattgtttacttttaagtttttatgaagaatgccttgagctctttagattgtgttatctaagtc

SEQ ID NO: 817524 - DNA, 120 bp, Artificial Sequence
  ENSG00000248323_98 (sequence is synthesized)
ttaatactaagtaagtatgtgccattgttttggggattaatttatccataaagatgtgtataggctgtacagtcattggcttgacctctgctgccctgtgtactttcttgtctactgaaa

SEQ ID NO: 817525 - DNA, 120 bp, Artificial Sequence
  ENSG00000248323_99 (sequence is synthesized)
tcagttgggcaattcttgtctgtaagcacgtttcccaagaactggttggagccagtcttcataggaggaacctattatgaaaccagctccgaggatatttactttgctcaagatctactg

SEQ ID NO: 817526 - DNA, 120 bp, Artificial Sequence
  ENSG00000248323_100 (sequence is synthesized)
aatgctacacttacttgaaaatgaaattgctttcttttggctctgacccaaccccttgaaaaccagcgacccttgggattcagttagaatgagatagaaaggggagatgatatgctgggc

SEQ ID NO: 817527 - DNA, 120 bp, Artificial Sequence
  ENSG00000248323_101 (sequence is synthesized)
ctgactgacatttttctgcaagcttttcttatcgtttaaactagtacttgcatagttgttgaatgtgtgtgtttcaagaagatcagctaaactgataacatattatcaagtaaataaggc

SEQ ID NO: 817528 - DNA, 120 bp, Artificial Sequence
  ENSG00000248323_102 (sequence is synthesized)
acccaagattgggaacttggaggacatagcacatattttttgaaggcccaccttttttcttaaaatttaatgtaaatttgtatctttctatttaacatatccaggtcttatttaagacaa

SEQ ID NO: 817529 - DNA, 120 bp, Artificial Sequence
  ENSG00000248323_103 (sequence is synthesized)
aaataactcatatagttgctttccagttaagttatttaatcatccaaatcctcacttaaataaatgctccagtgagaaacattgtcttatggctcctgatctaaaattatacctccctgg

SEQ ID NO: 817530 - DNA, 120 bp, Artificial Sequence
  ENSG00000248323_104 (sequence is synthesized)
aaatgtatgtatccaaatttgagaagcacaagcttggagaaatagtgaaggagagaatttagtcagagaaaatgagtgtgtactgatgatcaatccgtaggtaaggaggactagcgtaag

SEQ ID NO: 817531 - DNA, 120 bp, Artificial Sequence
  ENSG00000248323_105 (sequence is synthesized)
ttttgttgtagatgactttcataggagagtggcagtggcatttgatgttgagacctagtacatagttgtattgagataaacatgttaggattatctagatagagctagaaatgaagagaa

SEQ ID NO: 817532 - DNA, 120 bp, Artificial Sequence
  ENSG00000248323_106 (sequence is synthesized)
aataaactcagaatagggactcatcaagatggctgtgaaaaagccagaaatgtgataaacactaatgcagatttcttgggctccttacagacttaataggaattgtggatgcacaaagta

SEQ ID NO: 817533 - DNA, 120 bp, Artificial Sequence
  ENSG00000248323_107 (sequence is synthesized)
gggactacaggcgcccaccaccacacctgatatttgatgtgattcaccagtacagccatatgaagatgatattttgattttaggaatgtttcattacaaatgcaattccttcaacagagt

SEQ ID NO: 817534 - DNA, 120 bp, Artificial Sequence
  ENSG00000248323_108 (sequence is synthesized)
aatgtttcattacaaatgcaattccttcaacagagttcaaaatatctcataaagcagtggagacaacttgcaacatcaataatgcattttggcccaggagtggctaacatatgtacagag

SEQ ID NO: 817535 - DNA, 120 bp, Artificial Sequence
  ENSG00000248323_109 (sequence is synthesized)
gttcaagaagttttgcaaaggagacgacagccttgaagataagaagcctagtgggcagccatcggaagttgacaatgaccaagtgagagcaatcatcaaagctgatcctcttacaacaac

SEQ ID NO: 817536 - DNA, 120 bp, Artificial Sequence
  ENSG00000248323_110 (sequence is synthesized)
acaacaacacaagacgttgccaaagaacccaatgacgaccattctactgtcattgggcatttgaagcaaattggaaaggtgaaaaagctggataagtgggtgcctcatgagctgactgaa

SEQ ID NO: 817537 - DNA, 120 bp, Artificial Sequence
  ENSG00000248323_111 (sequence is synthesized)
agaaaattcaaaaaaaaaattgtcgttttgaagtgtcatcttctcgtattctatgcaacaacaatgaaccatttctcaatcggattgtgatgcgcgatgaaaagtggattttataggaca

SEQ ID NO: 817538 - DNA, 90 bp, Artificial Sequence
  ENSG00000248323_112 (sequence is synthesized)
cggattgtgatgcgcgatgaaaagtggattttataggacaactggcgatgaccagctcagtggttggaccgccaccaaaaaaaaggtcat

SEQ ID NO: 817539 - DNA, 120 bp, Artificial Sequence
  ENSG00000248323_113 (sequence is synthesized)
atgctcagcaaatcgatgagatgcactgaaaactgcaacgctgcagctggcattgggcaacagaaagggcccaattcttctctacaacaatgcccaaccacacgtcgcacaaccaacgct

SEQ ID NO: 817540 - DNA, 120 bp, Artificial Sequence
  ENSG00000248323_114 (sequence is synthesized)
tctacaacaatgcccaaccacacgtcgcacaaccaacgcttcaaaagttgaatgaattgggctctgaagttttgcctcatctgccatattcgcctaacctctcgccaaccgactaccatt

SEQ ID NO: 817541 - DNA, 61 bp, Artificial Sequence
  ENSG00000248323_115 (sequence is synthesized)
agttcatcaaatccagaagcacagatttttacactacaggaataaacaaacttatttcttg

SEQ ID NO: 817542 - DNA, 120 bp, Artificial Sequence
  ENSG00000248323_116 (sequence is synthesized)
ttggcaaaaatgtgttcattgtaatggattctattttgattaataaagatgtgtttagttataaaatgatttaaaattcatacttttgcaccaacctctaaattaaagacttgcttaaag

SEQ ID NO: 817543 - DNA, 120 bp, Artificial Sequence
  ENSG00000248323_117 (sequence is synthesized)
attctgttgcctgttgtcacatagaacagagactaatctcactgggttggattatgtgtggaaatacaccaaaactcaccactgtctgggtcattctgaagtgaagaaaagaacatgata

SEQ ID NO: 817544 - DNA, 120 bp, Artificial Sequence
  ENSG00000248323_118 (sequence is synthesized)
atttcacaaaacagtgagaaagtgaagagcttaccgatgtgaactctgaatcagatagccctggctttgagcaccagcactgctttttaatagctttgtgactatgggtgaaagaaatta

SEQ ID NO: 817545 - DNA, 120 bp, Artificial Sequence
  ENSG00000248323_119 (sequence is synthesized)
cctgtctgagcctcattagccttatttgtaaaatataaataaaatctattttttcccccataaatttgttgtgagggataaatgaggtaatcaaagtgcttagcatatacctagcatgtg

SEQ ID NO: 817546 - DNA, 120 bp, Artificial Sequence
  ENSG00000248323_120 (sequence is synthesized)
ataaggagtcagtaaaggacagccattattatcattaactttagtatgcaaattggtttaatttctttgctgtaacactgtaatgtctactcatgtatagaaatcatatatgacacttaa

SEQ ID NO: 817547 - DNA, 120 bp, Artificial Sequence
  ENSG00000248323_121 (sequence is synthesized)
ctgtattcatatttcattttacatgctattcaaatgtttggttaatatatatatatatatatatttgcaacagcaagcttatcagaggtcttaatccacaaagttgtcatcacctctaat

SEQ ID NO: 817548 - DNA, 120 bp, Artificial Sequence
  ENSG00000248323_122 (sequence is synthesized)
ccagtgtctaataccatttctcagaagagcaaacatttcctttagagcacttatagcagtgagttaaatgtgaaggctctgggttggtgctcagtcatttgaaagcaagaaaaacttaca

SEQ ID NO: 817549 - DNA, 120 bp, Artificial Sequence
  ENSG00000248323_123 (sequence is synthesized)
acctttttataatatgtgtttaaatgtttattcggttctgtcaaggtaactcaaaactgtctacagtaaatcctacgtgtaaaatcacagaaaggggaaatggtaattaagccttcatgt

SEQ ID NO: 817550 - DNA, 120 bp, Artificial Sequence
  ENSG00000248323_124 (sequence is synthesized)
tgggatgtagattacttacctactcagggatgtgttctttatggttgctgttttgataggtggggaagcacactcaatctcagtggcctcctctattgtgactttgaagatgaggcagtt

SEQ ID NO: 817551 - DNA, 120 bp, Artificial Sequence
  ENSG00000248322_0 (sequence is synthesized)
agcatcaaggagggaggcaggaccaggccccaggtggtcagcctgcccaacatgagggtgcagaagtgcagctgtgcctcggatggggcgctcgtgccaaggaggctccagccataggcg

SEQ ID NO: 817552 - DNA, 120 bp, Artificial Sequence
  ENSG00000248322_1 (sequence is synthesized)
ccccaacctctagggcgcaagactataatagttaaatttatatagatgaggctttcatttatgatatttctattttctcacacaactctcattccaaaaatattaaacaatcactcacgg

SEQ ID NO: 817553 - DNA, 120 bp, Artificial Sequence
  ENSG00000259907_0 (sequence is synthesized)
ggctaccagggaagaccacgctctgatgcacttaccctgaccacctcccacctcctgagctggggctgggtctgcaggggggcagatacctgaacaaaactggagttttgataacaacaa

SEQ ID NO: 817554 - DNA, 120 bp, Artificial Sequence
  ENSG00000259907_1 (sequence is synthesized)
agaaaatacaattttacttaaagtgatccaaggggacactgagtcagccattcatgaagctgaacatcatttcaagggacgctggctccggtatcatggtgaacgccaaggtgaagagca

SEQ ID NO: 817555 - DNA, 120 bp, Artificial Sequence
  ENSG00000259907_2 (sequence is synthesized)
cagcaaaccccctccaccgcctgcccttggctttggtcttgccagggaacagctgatgccgactagatgacgcaaccaggaagtgaatatcctgtctgctccttgttctgtgctgtctgt

SEQ ID NO: 817556 - DNA, 120 bp, Artificial Sequence
  ENSG00000259907_3 (sequence is synthesized)
gtgtcctagcttgccatcccaaatcaaggcatcccttgaaatcccctgggtccaagcatccagatgctcagtgaacgcagtgctctaactccatcttccactttccattaagaagtcaat

SEQ ID NO: 817557 - DNA, 120 bp, Artificial Sequence
  ENSG00000259907_4 (sequence is synthesized)
gactcttattcaatacaactccatcttctgctaacccctaaaaggaatttacattctgctcatttcacttcccattatattgtattaattttcccatcattaaaccttttaaacccaata

SEQ ID NO: 817558 - DNA, 120 bp, Artificial Sequence
  ENSG00000259906_0 (sequence is synthesized)
aggacaaactgcctggcaaaccagcagggccaggcaaatgaggccaattggcagcaagggctgggatggagatgtcagagatttagaggctctcagggttggaagggggacctcaaattt

SEQ ID NO: 817559 - DNA, 120 bp, Artificial Sequence
  ENSG00000259906_1 (sequence is synthesized)
catctaggtcaatgctgtgtccccttacctgagtcctgtctataatatccctcccaatagtgggctaacctcagcttgaatgctcccgatgatggagcactcattacctcctgggaccac

SEQ ID NO: 817560 - DNA, 120 bp, Artificial Sequence
  ENSG00000259906_2 (sequence is synthesized)
gaactcatcaatgggtggtgctgactgtgcaaaaaccctccttcattttgagcctaaatctgttttccaacatgaagagagaagacccccgcagtgggttcatccttcttctggctccag

SEQ ID NO: 817561 - DNA, 120 bp, Artificial Sequence
  ENSG00000259906_3 (sequence is synthesized)
ccctcagtgctgcgaaggagccgcaagtcactcttcatgaggaaacatgcccggtgtcttgggtgggggcagaggcaccactgatccacaaagatgtggtgtgattttttcctctcaggg

SEQ ID NO: 817562 - DNA, 120 bp, Artificial Sequence
  ENSG00000259906_4 (sequence is synthesized)
aaaccctgatgcaggctagctccgtctgtggggactgttacatgctggttctctgttgccagctccagggagtcagggtctaataggagccaccccaggtattccacttatagttatagc

SEQ ID NO: 817563 - DNA, 120 bp, Artificial Sequence
  ENSG00000259906_5 (sequence is synthesized)
tccaagcaggggtcatcagcagggtgactggaactccctgcggttccagagagccacagatgctcacccatgctggctttggtaggcagggagctcagtaagcctctccgaggctcagga

SEQ ID NO: 817564 - DNA, 120 bp, Artificial Sequence
  ENSG00000259906_6 (sequence is synthesized)
ttttgccagtttggaagagcactggatgatttggaagagcactggattccaagcttggaagagcacttggaagagcactggattccaagccagcttggaagagcacagtaaggcaggctt

SEQ ID NO: 817565 - DNA, 120 bp, Artificial Sequence
  ENSG00000259906_7 (sequence is synthesized)
cttactctgtcacttcggacaagtcccttcctctctctggctgtcagtttcctcagctgtgatatgtgctatgtgtggaccttcagaaatggtgcagggctgggccctgcagctgccgaa

SEQ ID NO: 817566 - DNA, 120 bp, Artificial Sequence
  ENSG00000259906_8 (sequence is synthesized)
ttgctccaaagtggaggtgtgcgtggactgaccaagaaggctcatcagacctcgcctcccaggaccaaatgttggactgaagcactggtgcaaaacataaagacaaacatttctccttaa

SEQ ID NO: 817567 - DNA, 120 bp, Artificial Sequence
  ENSG00000275088_0 (sequence is synthesized)
tggtcaggaggcccctggcctgcaggctttgtgtccgcccctcccgggagcagactccaggctggtgtggtgcccgctcagggccattcaccagagttaaacatctagccagcaagaggg

SEQ ID NO: 817568 - DNA, 120 bp, Artificial Sequence
  ENSG00000275088_1 (sequence is synthesized)
cgggggcctcggctacgctccagcttctgccctccccggccctgccccagtggctctgtccatccgtcctgggcagtgctcagcagcctcacttcctctctctgtggccccctcccctgc

SEQ ID NO: 817569 - DNA, 120 bp, Artificial Sequence
  ENSG00000275088_2 (sequence is synthesized)
acaggacccagggcaccccgtcggctcctccgtccccatctaatgccacctcacagtcacttgttcattcattcgacacgcattcattaagcgccctctgtggcttgcccaggtctctga

SEQ ID NO: 817570 - DNA, 120 bp, Artificial Sequence
  ENSG00000275088_3 (sequence is synthesized)
tccctcagctgtcatgtagctgttctcgggacaagctttactttctcgccttgtaaagtggtcttgggtgggtcatgtcaccttcttccccaggccccgctgggatggcccatgggacgt

SEQ ID NO: 817571 - DNA, 120 bp, Artificial Sequence
  ENSG00000275088_4 (sequence is synthesized)
tgccatcacaggttgagcacctaccatgtgccgggcactgtgtcatgcaggttacaaatatcctcccacagatgtccccgcaagccctggaaagccagggcctcttctgctccctgcccc

SEQ ID NO: 817572 - DNA, 120 bp, Artificial Sequence
  ENSG00000275088_5 (sequence is synthesized)
tcacttgcagaaagtgaagctcagagaggcagagtgacctgccccggggcgcacagctggtgagaggccaagccagggcttcttgctccaaagtctgggattcgcagggctccacaaccc

SEQ ID NO: 817573 - DNA, 120 bp, Artificial Sequence
  ENSG00000275088_6 (sequence is synthesized)
ctcgcctgttggtgttggctgcgtgtaacagccacatcctacgatgagattttctgtggcttctcagtcccctcaaacccctgtagatggcagctcggtcctgtccccgaccctgacctc

SEQ ID NO: 817574 - DNA, 120 bp, Artificial Sequence
  ENSG00000275088_7 (sequence is synthesized)
ggggtcctgaatctccagcccagaaatgttgaccttgacgtcaaccctgcaggctcaaacaatccccaaaggtgcccctcgtcctaacccctgcacctgcaactgtgttaacttgggtgg

SEQ ID NO: 817575 - DNA, 120 bp, Artificial Sequence
  ENSG00000275088_8 (sequence is synthesized)
ccaagggactctgcagacatgattcagtgaaggacctggatgtggggggcgggtgtgtgtcctggattagccagtgggcctgaggaaccccggggccctcacaggagggagccaggggca

SEQ ID NO: 817576 - DNA, 120 bp, Artificial Sequence
  ENSG00000275088_9 (sequence is synthesized)
tcacactcagagagaggaactggaagatgctccaatgatggatttggagaaagaggaaggggccaggagccaaggaattcgggtggcctggaagctgggagcacaaggaccagggcttcc

SEQ ID NO: 817577 - DNA, 120 bp, Artificial Sequence
  ENSG00000275088_10 (sequence is synthesized)
cagagcctctagaaggaaccagccctgtcgacatccggattttggcccagtgagagccatgtctgacttctgacctgcagaagcaggagagaagcagctgcgaggtttcagcctctaagc

SEQ ID NO: 817578 - DNA, 120 bp, Artificial Sequence
  ENSG00000275088_11 (sequence is synthesized)
ttgtggtgatttgtcagggcagccatgggacactcacacaacgccctggacaccccgctgctgtacgagtcctggccgtgcctgacctcctcccttccctacccccaggttgatgcaagg

SEQ ID NO: 817579 - DNA, 120 bp, Artificial Sequence
  ENSG00000275088_12 (sequence is synthesized)
cggcccccacccacacccagaccccaggcgtgaaggaggtcttggccgccccagcctctccggtctcgcagcctctgggctctgggccctgcctctggccctgctcgctttctgccctgg

SEQ ID NO: 817580 - DNA, 120 bp, Artificial Sequence
  ENSG00000275088_13 (sequence is synthesized)
aggaaacctggctcaggcgtcatcagggctcagatggtggacctgtggccttcctactgggtaaactgggtaaactgaggaactgacttttactgagtcgcacacctgcccactcttggc

SEQ ID NO: 817581 - DNA, 120 bp, Artificial Sequence
  ENSG00000275088_14 (sequence is synthesized)
taacctcctggggctgcttgatgctgtttcccgtggcccaggaagccctcaaagtcagcccatcttccctcccgctgtgtcctcctgcagggcctctgcccaggcagctctctctgcccg

SEQ ID NO: 817582 - DNA, 120 bp, Artificial Sequence
  ENSG00000275088_15 (sequence is synthesized)
taagctcagcccctctgggtgcagagctgctccgtcttgctcagggctcagcgcggcaggagtgagaagccacctcttcgagagctgccccgcacggcactcccttgctggaaatcactt

SEQ ID NO: 817583 - DNA, 120 bp, Artificial Sequence
  ENSG00000275088_16 (sequence is synthesized)
catttattgcttggccttttttttttcccctgaatcttctgaggggatcatggtgcctacaccactcccaggacctgtttcgaggcacggggtccacgtgtctctcacagatgggccacg

SEQ ID NO: 817584 - DNA, 120 bp, Artificial Sequence
  ENSG00000275088_17 (sequence is synthesized)
gcagctgttgcacaaaggtgttcctggctccagctgacctcaggcgagtcaagtctcctcctgggctgggggttgcacctggaacatggcaatacaaaggcaggtctggtaaggacataa

SEQ ID NO: 817585 - DNA, 120 bp, Artificial Sequence
  ENSG00000275088_18 (sequence is synthesized)
gacgcctgatggcacacacagtatgtgctcagctaacagcagctctttcccttgaccctccaatgatcgtcaaggtgcccccttgatccacaggccagggaggttattgattgataaaat

SEQ ID NO: 817586 - DNA, 120 bp, Artificial Sequence
  ENSG00000275088_19 (sequence is synthesized)
gtttcccctggcatggaatgcacagcccatgatgccctgtcctccttcaggcagagctgagggcacaggagacccacagctgtgcggactccccgctggtggggatggccacattccagg

SEQ ID NO: 817587 - DNA, 120 bp, Artificial Sequence
  ENSG00000275088_20 (sequence is synthesized)
tgggacaacagagctctgctcagggtcatacagctgacatgtcacagattcagacttccaacctgctctgtgtggctttgccgtggcccgaagaagaagagcaggactcagaggcatctc

SEQ ID NO: 817588 - DNA, 120 bp, Artificial Sequence
  ENSG00000275088_21 (sequence is synthesized)
acaggtggacaaagaccccaatctgcatgcagcggttaaagctccctgtacacctcctgctgtggacagagacccccgaatctgcgtgcagcggttaaaggtccctgtacccctcctgct

SEQ ID NO: 817589 - DNA, 120 bp, Artificial Sequence
  ENSG00000275088_22 (sequence is synthesized)
gtggacagagacccccgaatctgcgtgcagcggttaaaggtccctgtatgcctcctgctgtaaccagaaccccacgaacagctcgtgtcaaggttcccaggccggccaggcagggctggg

SEQ ID NO: 817590 - DNA, 120 bp, Artificial Sequence
  ENSG00000275088_23 (sequence is synthesized)
cagagtgaggtgctccagctcacggacagggggactaaaaaggcttgggggctcagagaacgttcattccagttccccagggacaggaatccgccccagcccaggttcctgccccagcga

SEQ ID NO: 817591 - DNA, 120 bp, Artificial Sequence
  ENSG00000275088_24 (sequence is synthesized)
ggccttctcatcggcgtgatcggggtctggtttgcagccaggccacacaaagccacacagagcagcctcggaagtttggtgacagaaaacgacgtgaccttggcggggtttggaggctgc

SEQ ID NO: 817592 - DNA, 120 bp, Artificial Sequence
  ENSG00000275088_25 (sequence is synthesized)
agcttttggcggggcaggtcagggccccggggtgttgtggccacagagccacgcaggggaggcgctaggttgtgggttaggggacggggaggccccttcatccctggccaggttgggcag

SEQ ID NO: 817593 - DNA, 120 bp, Artificial Sequence
  ENSG00000275088_26 (sequence is synthesized)
cagtgacgccttctttcctcccccactgcccccctacaaccccgacactcttcacggaacccctgtgtctgctaggcactgggtaggcactatttgtataaataaaactccttttgggcc

SEQ ID NO: 817594 - DNA, 120 bp, Artificial Sequence
  ENSG00000272736_0 (sequence is synthesized)
tgactcctgccgtagctgcggcaggcctggaggccgtactgggacctggccaaagacccagaagtccagctttgaagaaaacctggagaaagagagagtcacaaatcatctccatactgc

SEQ ID NO: 817595 - DNA, 120 bp, Artificial Sequence
  ENSG00000272736_1 (sequence is synthesized)
aggagatgcagaaatggcagaagaaccctctgcacctggcctgggttcgggtaatcagctgggccagcttgtcatctcgcatctcctctaggagccccagaagaccagctttgaaaaaga

SEQ ID NO: 817596 - DNA, 120 bp, Artificial Sequence
  ENSG00000272736_2 (sequence is synthesized)
agagttgcaaatcacaagctttaataaagttcaaagggacaggaatagcatcagaatacaccataatcaggagaaactgacctctgtttgaagtctgcataaaggattctgcttggaaat

SEQ ID NO: 817597 - DNA, 120 bp, Artificial Sequence
  ENSG00000272736_3 (sequence is synthesized)
cctttcctacagatgcggatgccttccagcacaccgttacacctcagctggtggaggacaagctcatgctccatggcacctaaaaatgcatatttatttcactgcagagctgttgaaaag

SEQ ID NO: 817598 - DNA, 120 bp, Artificial Sequence
  ENSG00000272736_4 (sequence is synthesized)
agttcaaagggacaggaatagcatcagaaatgcaaaaccaaccttctcgatgagctcgatgcaggcagccaggtccatcccgaagtcgatgaacgtccactcgatgccttccttcttgta

SEQ ID NO: 817599 - DNA, 120 bp, Artificial Sequence
  ENSG00000272736_5 (sequence is synthesized)
ctcctcctgctccagcacgaacatgtggtggttgaaaaactgttgcagtttctcattggtgaagttgatgcacagctgctccaggctgttgaactaaataaatagatatgtttacttctc

SEQ ID NO: 817600 - DNA, 120 bp, Artificial Sequence
  ENSG00000272735_0 (sequence is synthesized)
cgaacactcgctcagattgttgccctgcgctcgtgtgaatgtacggatccgggaggaattgggacctaaacagacaagccctcgaggcggtcccggcagccctgaggagggagccttcac

SEQ ID NO: 817601 - DNA, 120 bp, Artificial Sequence
  ENSG00000272735_1 (sequence is synthesized)
ctcttcctacccacccagtttacttcttgtggaggatatttgcagggacatagcccactgggagaactagcagatacggctttacaagttttttattgcctttcagcccccattccgctc

SEQ ID NO: 817602 - DNA, 120 bp, Artificial Sequence
  ENSG00000272735_2 (sequence is synthesized)
ttgcgctgcgtcgggaaagggaatgggatccctaggggtgcaaatacaggccaagtcagggagagctgtggctcctgagggcctcctctggctcctccgggaagttttgggccctcaagg

SEQ ID NO: 817603 - DNA, 120 bp, Artificial Sequence
  ENSG00000272735_3 (sequence is synthesized)
agcagcttcgcgggccaggagggcggttagctgcccttggcatctttttggggaaatcagttggcctgtcgcgggtcgaactctgtcccccttgactgcctgccatcttctggagaaacc

SEQ ID NO: 817604 - DNA, 120 bp, Artificial Sequence
  ENSG00000272735_4 (sequence is synthesized)
cctaataggctgctgtgtctggttatgctttagtgagaaaattaggctttttaagctttctcatttcctaccctaccacgttgtaattcacaaaagtaaaaagtaaatcactacatgata

SEQ ID NO: 817605 - DNA, 120 bp, Artificial Sequence
  ENSG00000272734_0 (sequence is synthesized)
cttagggacctgggcctgagtggagaagatcatccttgggtgcagcaaaacagcttgcaagatacattcccctggcacacaaggggtgtaggtcaggccccacccagctgggtatactcc

SEQ ID NO: 817606 - DNA, 120 bp, Artificial Sequence
  ENSG00000272734_1 (sequence is synthesized)
cactccagagtaggccttcaggacctggaggccagtgcacacccaccctgcctttctgggtctctctaccgcttcctgtccggggctgtttcttgcacctctgctggtgtctcccctatt

SEQ ID NO: 817607 - DNA, 120 bp, Artificial Sequence
  ENSG00000272734_2 (sequence is synthesized)
ctggagcgctgggaagcccctgccacacaggcttggtctgctggcacataccctgcttctagtgctgcggggtcagcccctagagggagttgtttggaagtgcacctgtacacacacaca

SEQ ID NO: 817608 - DNA, 120 bp, Artificial Sequence
  ENSG00000272734_3 (sequence is synthesized)
cacacacacacacacacacacacggtatggattaatggagatgaggtcaaccctgggcaaagggaagaggcaggtgatgagattaggtggaggaagggggagggagcaggtctcaggcaa

SEQ ID NO: 817609 - DNA, 120 bp, Artificial Sequence
  ENSG00000272734_4 (sequence is synthesized)
agcaggtctcaggcaaaacaaagcggcagcaacagtcctcccagccccccgcccctcctctcccagagcgaggccttgccctgggagcggccatatggatgccttggggactctggggag

SEQ ID NO: 817610 - DNA, 120 bp, Artificial Sequence
  ENSG00000272734_5 (sequence is synthesized)
cccatctcagccatgccctgcctggctggccacagccctgccagccctcctgaaatcccaccggtagtgcccaatagccaggcaggccttcgagtgttccagtttatcacaggctggtgg

SEQ ID NO: 817611 - DNA, 120 bp, Artificial Sequence
  ENSG00000272734_6 (sequence is synthesized)
tgccactgggctccaggccccatgggcaatgagctgtgagctggacaggaagggagcagcctctgtgggaagagacagccagcccccagcagatggtggtagagagagctccacgtggcc

SEQ ID NO: 817612 - DNA, 120 bp, Artificial Sequence
  ENSG00000272734_7 (sequence is synthesized)
ctagcggcaggcactacagtcaaacctcttgggttcagatattcttagagcaagcccctcacttctctgagcctcaacatccccatcacatcacagcgtctccccaaagtgtgtgtgtga

SEQ ID NO: 817613 - DNA, 120 bp, Artificial Sequence
  ENSG00000272734_8 (sequence is synthesized)
agattaaattggctgaagggtgcccaggactcagcagtggaccttgtgagagcgtgcagggcaccagggcttctcagacaaggagaggcagaaggagggagcgcattaccgcattaccgt

SEQ ID NO: 817614 - DNA, 120 bp, Artificial Sequence
  ENSG00000272734_9 (sequence is synthesized)
gctgagattacaggcatgagccaccacccccagctaatttgtgatttcgctttctgcagtttcagttactcattgttggggctcagaaaccaataccccgaaatatagtggtgtgacatt

SEQ ID NO: 817615 - DNA, 120 bp, Artificial Sequence
  ENSG00000272734_10 (sequence is synthesized)
gtgacattctgaactgaagaagccttaaggtctctccgaccagactcccacaggccccccaaccctttgtctcttccaaagcatacagtgaagttgttctctgaagttcctcatctgcct

SEQ ID NO: 817616 - DNA, 120 bp, Artificial Sequence
  ENSG00000272734_11 (sequence is synthesized)
taagtctggacccaccaaagaagaaaacaatgaccactggtcccttcccggagttttctctgactgaactgctgtcacaggaagaaagactgaagcctgctcacatacctggacagattt

SEQ ID NO: 817617 - DNA, 120 bp, Artificial Sequence
  ENSG00000272734_12 (sequence is synthesized)
tgcaaaccgttgtctgctctgtgagcccaacagactttgtcccaggccactgtatgttcttcaagcccactgaattcccctgaaaatcatttactagccccctgaaattacccacacttc

SEQ ID NO: 817618 - DNA, 120 bp, Artificial Sequence
  ENSG00000272734_13 (sequence is synthesized)
cccattgctcatctgtaccccatttcgtggtggggcagtcactctgatttccccttgcatgctaatgaatgtgtattccatttctattctgctttcatgagctgacttttcagtgaacct

SEQ ID NO: 817619 - DNA, 120 bp, Artificial Sequence
  ENSG00000272734_14 (sequence is synthesized)
tcagagggtaaaggggaagttttcccttggcccctgcaccgcaattggtaaggtccaaaatgttaaatggaaaattccagaaatagctggtcgtgatggctcctgcctgtaatcccagca

SEQ ID NO: 817620 - DNA, 120 bp, Artificial Sequence
  ENSG00000272734_15 (sequence is synthesized)
aggtgcaggaagaaccaacccagtggtctcctgacatctcccacgcccccaccgcagctgggtcacctccagaatacggaggagagagctggaggtggaggaactaaggaccttctttgc

SEQ ID NO: 817621 - DNA, 120 bp, Artificial Sequence
  ENSG00000272734_16 (sequence is synthesized)
gcagcgccccactcaacaaagcttcccgcgggccctgccccatgactcaccgctgggtggggcgggcacgcaggcaacccgcgggccgagacggggtagtgagggccggaagcccggctc

SEQ ID NO: 817622 - DNA, 120 bp, Artificial Sequence
  ENSG00000272734_17 (sequence is synthesized)
ccgactccgcttcgtccccacaacctccggccgcctgaagtcctgaggggccgtggccctgggtcgtctcccctgttcccagcctccagtcgcagctggcggagagaagttcccgaggcc

SEQ ID NO: 817623 - DNA, 120 bp, Artificial Sequence
  ENSG00000272734_18 (sequence is synthesized)
cccccgacttgcaaggtcccttgccccgcccagagctgagccttccgaggatctgaggaccgagtccagcccagctcccaggaggggccgggatcctggggcagggaataaggggcaggg

SEQ ID NO: 817624 - DNA, 120 bp, Artificial Sequence
  ENSG00000272734_19 (sequence is synthesized)
gctggctctaaagtcgggcgggagaggggcactaaccgagatgggggctgagcctccggtctgggagcttcgggaggcgcgtggcgggatggaaaacattcctgagaccgttggattgga

SEQ ID NO: 817625 - DNA, 120 bp, Artificial Sequence
  ENSG00000272734_20 (sequence is synthesized)
tttccgaatttgggaggctaggactccggctacggtggctctgctcttgggatgagaggactgggcccagcttgcgaggaatcatgaagtggacacagggtgggaacgtgaattttaatg

SEQ ID NO: 817626 - DNA, 120 bp, Artificial Sequence
  ENSG00000272734_21 (sequence is synthesized)
agggggcagaccgaggaggtggtggctgcccggagatcagggccaggctgtgctagatggcgcctggaaggggggtcacccaagtctccctgctgtcatttcaggaggccgacccaagtc

SEQ ID NO: 817627 - DNA, 120 bp, Artificial Sequence
  ENSG00000272734_22 (sequence is synthesized)
tccctgctgtcatttcaggaggccgaattttttcccaatcccagagaaggtgtcagaggcctggttagcagtcttgtcgatggtttcctgggtggtcttggccagctggtccatggctgg

SEQ ID NO: 817628 - DNA, 120 bp, Artificial Sequence
  ENSG00000272734_23 (sequence is synthesized)
ggaagggcgggagagagggcaggtcaggcagggcccgggaaccacagtgcctgtaggcttagcctggcctgggtctcccgggggacctgcttggggcattgtggacagagggctctgcag

SEQ ID NO: 817629 - DNA, 120 bp, Artificial Sequence
  ENSG00000272734_24 (sequence is synthesized)
aggagaggatgtgcctgggccccagccgggatggggcggggagtgggaggtgtgctggggttgcccgcctccctccagccccaccagacctttctgccccgcctctgtggcctggtccac

SEQ ID NO: 817630 - DNA, 120 bp, Artificial Sequence
  ENSG00000272734_25 (sequence is synthesized)
cacttgctgagctgccgctccggccgctgacactggaacagagagatgtggcttttagcccctgttgaggcaccaccgactacaggtgccccaccattgccatgcctctgtgtcctccag

SEQ ID NO: 817631 - DNA, 120 bp, Artificial Sequence
  ENSG00000272734_26 (sequence is synthesized)
agtattcggtggtacaggtccaagggatggatgccatggagataaagtccctggcccagggccccccagcccgaggggcaggagacctttccatgcctctgggatgtttttgtttatttc

SEQ ID NO: 817632 - DNA, 120 bp, Artificial Sequence
  ENSG00000272734_27 (sequence is synthesized)
taactctgagctccttctctgtgggggaggagcttccctttccatctccagggctactgagaaaatgttggacagaggaaggaaggcagggcagggccaggctgcagctagcatctggac

SEQ ID NO: 817633 - DNA, 120 bp, Artificial Sequence
  ENSG00000272734_28 (sequence is synthesized)
tgttggctaatgctggtgatggcgcagaagacccttgcccccttttacagcttctcccctagaagcctggcccagatgcctgaattcccacctttcatgcacttagccctggggcttgca

SEQ ID NO: 817634 - DNA, 120 bp, Artificial Sequence
  ENSG00000272734_29 (sequence is synthesized)
gttttgccaggtccttactgcctcctccctcctgtggcctgcccggaggggcacacaagcaaagccagtgcctctgtggacaggcagcttaagacattaggagacaaatgaaggaaggag

SEQ ID NO: 817635 - DNA, 120 bp, Artificial Sequence
  ENSG00000272734_30 (sequence is synthesized)
gcaaaacttccaaggccggactatctcctctggaccagagtttcggcctgctgggaatggagtcaccagccccgggggggctgacaggtggctcccgcctacagagctgtaactcatccc

SEQ ID NO: 817636 - DNA, 120 bp, Artificial Sequence
  ENSG00000272734_31 (sequence is synthesized)
cttccttggtagcatttcagtctcaagggaagaactgtgggcctcccctggagcactggtgaagtaaggggttggtttggatattgtctcctgactgggatatgggcaggactgacaggg

SEQ ID NO: 817637 - DNA, 120 bp, Artificial Sequence
  ENSG00000272734_32 (sequence is synthesized)
ggcgcgcgcgggtttaagtggtggcgggccgcgcccgatccctgtcctggaccttcaccctctcctgagggcctgggcgggccgcccagcgccagcatggcctccttggaggggctcccg

SEQ ID NO: 817638 - DNA, 120 bp, Artificial Sequence
  ENSG00000272734_33 (sequence is synthesized)
cagtgcccgcagcgcagctccggctcctccggagcctctgttccgctgcctccctgcgggcaccatctgtctgctcgccggggtgggcgttctgcctgccccctgcgtctcagtggagga

SEQ ID NO: 817639 - DNA, 120 bp, Artificial Sequence
  ENSG00000272734_34 (sequence is synthesized)
ccgagccttccgagccaagctgccggtccaggaacttgcggaccgcgccgacccgctgcttctgcctgcgcatccacgcaggtgcccctgcctgagccctaggtcgcgcgctatcctcac

SEQ ID NO: 817640 - DNA, 120 bp, Artificial Sequence
  ENSG00000272734_35 (sequence is synthesized)
cggcttcctgggcggtcccctccacctgttgcttcaggtcctgcaagcccttgcttgccatggcttcggggtatctgtggagtcgtcaagagcagctggagcgacgttggatcctgccca

SEQ ID NO: 817641 - DNA, 120 bp, Artificial Sequence
  ENSG00000272734_36 (sequence is synthesized)
gagtggcgatgccaagcgccagctccggtttttaaggcgccccagggctggcctgccccgcgtaggggagagggcgcggggcggttcccgtcatacaggctccggggagtggccgggccc

SEQ ID NO: 817642 - DNA, 120 bp, Artificial Sequence
  ENSG00000272734_37 (sequence is synthesized)
tgctccagagtccgcagggcagggagcacatcctggcctaagacgggccgcggtgggaaaggggcagaccgaaccagggaccgaagaggtgccaggacaggggtccagagaggagctgga

SEQ ID NO: 817643 - DNA, 120 bp, Artificial Sequence
  ENSG00000272734_38 (sequence is synthesized)
ggcaggagaagggcgcacaccacctcccagctcatcagccccagccctccctttctgatcctgggcgtgagcgctgggtcagctccagggcaggagctcagggctggtgttgaccttaat

SEQ ID NO: 817644 - DNA, 120 bp, Artificial Sequence
  ENSG00000272734_39 (sequence is synthesized)
gacagcagtggtcttttactgagcatttgtcttgtgccaggtgctgcctaacgctctgcagtctcttgtataatctttacaaccacctcctgaagtgggtatttttgttgatagcatcag

SEQ ID NO: 817645 - DNA, 120 bp, Artificial Sequence
  ENSG00000272734_40 (sequence is synthesized)
tgtataggaggaaactgaggcagtgaggtcggtctcacccaaacgcatgtggcagggacttggatcctcgaatctgcctaggtgcctgtaaaccctagggctctggcatcatcggagccc

SEQ ID NO: 817646 - DNA, 120 bp, Artificial Sequence
  ENSG00000272734_41 (sequence is synthesized)
ccagccccaaacagctgcaggggcactgctgactggctctctgcctgtagccagagacccagtggatgcagccggagagggcctggtaaatctttcccctgagagggcgagatacagcat

SEQ ID NO: 817647 - DNA, 120 bp, Artificial Sequence
  ENSG00000272734_42 (sequence is synthesized)
atcagaaagcagcccatcctttgcacccagctctcagatggaaaagtgaagcccagaaggaagggacctgacacggaggcttccttggtagcatttcagtctcaagggaagaactgtggg

SEQ ID NO: 817648 - DNA, 120 bp, Artificial Sequence
  ENSG00000272734_43 (sequence is synthesized)
cctcccctggagcactggtgaactgggtcacctccagaatacggaggagagagctggaggtggaggaactaaggaccttctttgccaggtggggacttaaagtttcagttactcattgtt

SEQ ID NO: 817649 - DNA, 120 bp, Artificial Sequence
  ENSG00000272733_0 (sequence is synthesized)
ggagcagcttcagcccagacccccagtgcaggtgctgctccagccctgaagcatcccacaaccatggctggcagatgccaaggggatgtgtgagatggcccagctccaggatgaaactca

SEQ ID NO: 817650 - DNA, 120 bp, Artificial Sequence
  ENSG00000272733_1 (sequence is synthesized)
actttagggaagctggggagagcctcacagcgctggacaagccatcagatggcactgcccccagggacacacccgggggcgtggacagggatatggaggacctaaggcaaagggtggctt

SEQ ID NO: 817651 - DNA, 120 bp, Artificial Sequence
  ENSG00000272733_2 (sequence is synthesized)
caaacgtgacagcagatcagccgctggggaaataccagaggggatttgacagctgggccaggtgttccaggacagcactttccaaaagattttccatccaaacttccagcaagaagtaga

SEQ ID NO: 817652 - DNA, 120 bp, Artificial Sequence
  ENSG00000272733_3 (sequence is synthesized)
tcttccatcgttatccagagcatatctacgcattcagatgaagaaaacaacactgacatgcattatctcccaacaccaacctcaacccagccctggagtgtgagcagagccagcagcatt

SEQ ID NO: 817653 - DNA, 120 bp, Artificial Sequence
  ENSG00000272733_4 (sequence is synthesized)
ccagccccgcctctggaggaaggagaggaacctgagactcttgggtgacctgaggcgtctctggcagcaccagcaaaagagcctggccctggccgcccagcacaggtgctcagtccctcc

SEQ ID NO: 817654 - DNA, 120 bp, Artificial Sequence
  ENSG00000272733_5 (sequence is synthesized)
tgactgccactgctccctcaacaccaaagcacagggtcgcgagatgttgggagagggtcggggatgctgggctgggagaggaccgggggcctgtcagaagccatgacatgatgcactcac

SEQ ID NO: 817655 - DNA, 120 bp, Artificial Sequence
  ENSG00000272733_6 (sequence is synthesized)
cgctcaggaggaagctactggcctttgagtgaaatctataagaatgaactctggagatgtatcgtacaacatggagtctacagttaaaaactgtattgtatactggaaaattgctaagat

SEQ ID NO: 817656 - DNA, 120 bp, Artificial Sequence
  ENSG00000272733_7 (sequence is synthesized)
tagatcttccatgttctcactacaaaagcataagtatgtgagatgacggacgtgtgtgtcagcttgatttaatcattttgcagtgtggcaaagcatcgcactgtaggtggtaaatatata

SEQ ID NO: 817657 - DNA, 120 bp, Artificial Sequence
  ENSG00000272733_8 (sequence is synthesized)
tacagttttgtcaattataccttcaggaagctggggtggttggtgtgtgtgtgtgtgtctgtgtgatgtgaggtcagtgaggtgctgaacatggtgcattaaacagcattttcattctta

SEQ ID NO: 817658 - DNA, 120 bp, Artificial Sequence
  ENSG00000272732_0 (sequence is synthesized)
ttttcacttctttgtgcctctttcaccatttatttgtgtgcatactcagcatatttgtttgtgtaacaggatgttaaaaatagaatttgttgcctgtagtttttgctaaagctctactag

SEQ ID NO: 817659 - DNA, 120 bp, Artificial Sequence
  ENSG00000272732_1 (sequence is synthesized)
actggaacagaacaataggtggtaaatactccattcctcagtgagatgctacctacctatgcagagctggaaaagattttgcaacctgaaaacccaatcctttctgagatataaaagaac

SEQ ID NO: 817660 - DNA, 120 bp, Artificial Sequence
  ENSG00000272732_2 (sequence is synthesized)
agaagagtctggaagtgatttcttcggagaaattcattttcttattccagagaagaaacttcaagctcagaatattggctactacctgtgataaacatttaaattattggaacgagagag

SEQ ID NO: 817661 - DNA, 120 bp, Artificial Sequence
  ENSG00000272732_3 (sequence is synthesized)
tttttataactaaatttgaaagaagcaattttttttatcaaagaccaacccgaagattcatgaccactacctgtgatttcatccatgttgcaaggaaaatcctgccccacttccccaata

SEQ ID NO: 817662 - DNA, 120 bp, Artificial Sequence
  ENSG00000272732_4 (sequence is synthesized)
ggaagagtggtgggggaataataaagttgttttatgatgcatcctgtggacttctactcgacagaatggtaacattcaactgtaatcaggatgagcaagccactttattaaactaaaatt

SEQ ID NO: 817663 - DNA, 120 bp, Artificial Sequence
  ENSG00000272732_5 (sequence is synthesized)
ttaaactttaataaatataatacaaactgaaaaataaaaataatttttcaactctacacaagtatgttaactgcataaacagtgagatgttacacagggctgaggcctatacttcttcag

SEQ ID NO: 817664 - DNA, 120 bp, Artificial Sequence
  ENSG00000272732_6 (sequence is synthesized)
aatctggggtaggaaaaggaatgataccatgtatcatgagaagtatttgcacatagtgtgtcaattaagcaagtgctcagactattaacaacattactatgtgatgaatgtttatacagt

SEQ ID NO: 817665 - DNA, 120 bp, Artificial Sequence
  ENSG00000272732_7 (sequence is synthesized)
ggattcaaaaataagcttctttccagaaagcagcttagttttcattaattattaccagcatcttggtaattatttatttaatggtttaaaagttaaagtttcaatctatatttgtttttt

SEQ ID NO: 817666 - DNA, 120 bp, Artificial Sequence
  ENSG00000272732_8 (sequence is synthesized)
taacatcagccaaggaaatacatgtctgttatactgcatctttggaagtatgcaataagtgtaactattgaatctatattgaagagccacaagacactgaatttaattggacgagactat

SEQ ID NO: 817667 - DNA, 120 bp, Artificial Sequence
  ENSG00000272732_9 (sequence is synthesized)
tttatttaggaagacaatcatctcctgtgatcagcttaaggtttttgttttgttttatctggaacaagctaagttcatatttagaaaataaagttagttttttgggtgcatgagttttag

SEQ ID NO: 817668 - DNA, 120 bp, Artificial Sequence
  ENSG00000272732_10 (sequence is synthesized)
agtaaattagtaatttagtaaactttgacatttccactttgtctccaaacacatttaaattctatctgtctgactgaagttctaaggcattctgtggttacttagaaatgattccttata

SEQ ID NO: 817669 - DNA, 120 bp, Artificial Sequence
  ENSG00000272732_11 (sequence is synthesized)
ttaatgtttacaaatgctaaattgtatttgttaaatacatgtcttattgcctaagagttttcctttcttataagtttaatataaatgtctaggaaataagactcccatttaatagcttat

SEQ ID NO: 817670 - DNA, 120 bp, Artificial Sequence
  ENSG00000272732_12 (sequence is synthesized)
aaagaatgctgatgtatcagcagtggccttgacattattggatacaagtaagatctacactgatgattaaatcaaattggctaagattattcgttctaataaaagcactgactccatgaa

SEQ ID NO: 817671 - DNA, 120 bp, Artificial Sequence
  ENSG00000244380_0 (sequence is synthesized)
acccggccccgcccggtgtttagaggtccacgggcgggattcggcaggtttgctgcaaggactcagtgcggcgcgacccgttaccggagaggcgggccggaggcgcaccagctccgccgc

SEQ ID NO: 817672 - DNA, 120 bp, Artificial Sequence
  ENSG00000244380_1 (sequence is synthesized)
gctggtggctttgcgctccctccctggcattccgtggaggagggccgcgcaggagcagcctgccctagcattcacgcgtgttgcgtttgagtcgagccaggcatcattcagggatgtggt

SEQ ID NO: 817673 - DNA, 65 bp, Artificial Sequence
  ENSG00000244380_2 (sequence is synthesized)
agacccacctcccacaaacccctaggctttcttgaggagagtggaatttgttggggtcttgactc

SEQ ID NO: 817674 - DNA, 120 bp, Artificial Sequence
  ENSG00000244380_3 (sequence is synthesized)
ctgggactacagaagtgcaccaccacacccagctaactcttcctaaggaatggaagcccagactgcctgggaggcaggagacctcgtttccagctcccggcccttactgccgctgcaaat

SEQ ID NO: 817675 - DNA, 120 bp, Artificial Sequence
  ENSG00000244380_4 (sequence is synthesized)
ccgccagacccacctcccacaaacccctaggctttcttgaggagagtggaatttgttgggtgaggagtatgaatagagctgtcgtgtgcagacatcttcgggtttagtgaatgtttcaca

SEQ ID NO: 817676 - DNA, 120 bp, Artificial Sequence
  ENSG00000244380_5 (sequence is synthesized)
tgggaggcaggagacctcgtttccagctcccggcccttactgccgctgcaaatcctagactggctagagaccattcgctgcagcggacgtcggaaaacgagacctcgcagttcaggaggc

SEQ ID NO: 817677 - DNA, 120 bp, Artificial Sequence
  ENSG00000244380_6 (sequence is synthesized)
aggaaaaagacatgcccgcgccctcatcccaataggtgctcatagcgtttggccagcttgagctccattcggcccccacttacccaagggccccttccccgcggccttcgcttttagctc

SEQ ID NO: 817678 - DNA, 120 bp, Artificial Sequence
  ENSG00000244380_7 (sequence is synthesized)
ctcgagtttcttctgctcctctttttgtttctgcttgaaagccttatcttcctggggagaggcagagcgtgttcaactcaggcctgtctcccagcgcccccgcacccgccagtgcctccg

SEQ ID NO: 817679 - DNA, 120 bp, Artificial Sequence
  ENSG00000244380_8 (sequence is synthesized)
cgcccgccctcacctcgtccatctccttggcctgcttcttgggctgtttcagtggcttcttcttgccacctgtgggcgacacgagcacgttcggcctgcccctgccgcccggtccccacc

SEQ ID NO: 817680 - DNA, 120 bp, Artificial Sequence
  ENSG00000275332_0 (sequence is synthesized)
aaggaggagggagggggcattcgtagcagggtctctggcaaggggggagccatgaaagcctgaagcgaggtgggttgtaagcagaggtaccttatctctcaggtttaagtcaaccccagc

SEQ ID NO: 817681 - DNA, 120 bp, Artificial Sequence
  ENSG00000275332_1 (sequence is synthesized)
gggagaagccaagggaataggtaagtgaaaagcatgtaggggtggcccactaccctaagtcagcccgcacaatgatcctagtatatttcttctagtcttttctttaatgcagaatgtttt

SEQ ID NO: 817682 - DNA, 120 bp, Artificial Sequence
  ENSG00000275332_2 (sequence is synthesized)
cagtttgttggttttacatacatgagatcatcttatatgtacattttacatcttaatttttttaccccaacatgacactttttgtgtactataaactctgataaacgccatttttgataa

SEQ ID NO: 817683 - DNA, 120 bp, Artificial Sequence
  ENSG00000271420_0 (sequence is synthesized)
caacattatccacagacgtgcagggggatgttgctgagaaacccagatgtttcttaaactttaatataggtgagaattcactgggcattgtgctgaaatgcagattccaattcaatgggt

SEQ ID NO: 817684 - DNA, 66 bp, Artificial Sequence
  ENSG00000271420_1 (sequence is synthesized)
ctgggcattgtgctgaaatgcagattccaattcaatgggtctggggtgggccttgagattgttcaa

SEQ ID NO: 817685 - DNA, 85 bp, Artificial Sequence
  ENSG00000271420_2 (sequence is synthesized)
ctcagctgctggagtagctgagacattttttatagagatggggtctccctatgtagtcgaggctggtctcaaactcctgggctca

SEQ ID NO: 817686 - DNA, 120 bp, Artificial Sequence
  ENSG00000271420_3 (sequence is synthesized)
taggcatgagccaccgcacccagctgatttttcatttctaaccccaatgcagctggtccacagaccacactttgagtaggaaggccttagatgtccagatttttctctgtattatgtaat

SEQ ID NO: 817687 - DNA, 120 bp, Artificial Sequence
  ENSG00000271420_4 (sequence is synthesized)
agatgtccagatttttctctgtattatgtaatcctccatccaaatgtctagaaaccaaaagcagaacaaaaagcaaccactgtcaatttaataaggccaataaaggttactttcgggtga

SEQ ID NO: 817688 - DNA, 120 bp, Artificial Sequence
  ENSG00000271427_0 (sequence is synthesized)
ataaatactgaactctgaatgaaatagcaagttatataaatcttgaaaaataaatattacctaggttaacactagacttaaccacaagagatttcaatcatgaaacctgacataacctag

SEQ ID NO: 817689 - DNA, 120 bp, Artificial Sequence
  ENSG00000271427_1 (sequence is synthesized)
ttgacaagtatagcttaagcaagtaagacctcattgctgatggagaagaccccttttcctttgcttgtctgttttgcaaaattcatttttccttcatgagagtaaaaacaatttaggggt

SEQ ID NO: 817690 - DNA, 120 bp, Artificial Sequence
  ENSG00000271427_2 (sequence is synthesized)
atagtattacatatatccactcttctaaaggcaagtctgagtttttaaagaatcatgttgtttaaaaaaaaaaaagttgcaaatgtatccattaattataattatatgcacttaaaaaca

SEQ ID NO: 817691 - DNA, 120 bp, Artificial Sequence
  ENSG00000271427_3 (sequence is synthesized)
tagaaaaagaatatttgaaaaagattgcaactattctgttaagatactggttttacgtatgattttctccattgtattctgttgcattatatttacaattaaataaaaattataaaggaa

SEQ ID NO: 817692 - DNA, 120 bp, Artificial Sequence
  ENSG00000236387_0 (sequence is synthesized)
tgactgccgagctgggaagaactccagtcctttcctaggctagggattttaacaacggaacaaaatcccagtgctcttcaaggtgacaaggggaaccactaaggtttcacaaggcacagt

SEQ ID NO: 817693 - DNA, 120 bp, Artificial Sequence
  ENSG00000236387_1 (sequence is synthesized)
agcaaccagcatggatctcaaaaacatagtaccaaacgaaataagacagactgaggtaatagaagattactatcttctttacctgaactatggtggccagaacacggcaatacatattct

SEQ ID NO: 817694 - DNA, 120 bp, Artificial Sequence
  ENSG00000236387_2 (sequence is synthesized)
gcaagaagacatctacacaaaagatacacactcaacagaaagggtgccgtggtggggagaagggggtgaggcagagacattaaagggagtgagttattaaaatgtatttaatcaatgaaa

SEQ ID NO: 817695 - DNA, 120 bp, Artificial Sequence
  ENSG00000236387_3 (sequence is synthesized)
catagtaccaaacgaaataagacagactgagattccgggggtacacatgcatgtttgttacatgggtatattgtgcaatggtagagattggacttctagtatgcatgtcacctgaatatt

SEQ ID NO: 817696 - DNA, 120 bp, Artificial Sequence
  ENSG00000236387_4 (sequence is synthesized)
gaacattgtatccagcaggagatgtccctgaggaaccctggtatctgagaaatcctacctggaaacttctggcctatgaaatccaaacagccaatcaaggtgctcatttgcttcaagatc

SEQ ID NO: 817697 - DNA, 120 bp, Artificial Sequence
  ENSG00000236387_5 (sequence is synthesized)
atggcattggtctaaacttcccaccaaactatctagtctcactcagctactcgtactcccagtcagcctagtcccaagggaccatgaagggaccatgccttcctcttgaccctaatgtcc

SEQ ID NO: 817698 - DNA, 120 bp, Artificial Sequence
  ENSG00000236387_6 (sequence is synthesized)
cttgtatttgtcagacaccctcccagagggcagggaacagactctggggagccctgaaaccagagaaacccaggacaagctatttccaactcagaatgttctggccacccacccaggctt

SEQ ID NO: 817699 - DNA, 120 bp, Artificial Sequence
  ENSG00000236387_7 (sequence is synthesized)
agaatgttctggccacccacccaggctttgtctgatttctgatgttctttagaatcttctcattacatcactaagaaaagcatgattaagtccatacacacacacacacacacacacgca

SEQ ID NO: 817700 - DNA, 120 bp, Artificial Sequence
  ENSG00000236387_8 (sequence is synthesized)
cgcacacacacatacatataaaagataaatgtgtatctttaataacttttattatgttttctgattacaaaagtaatatattgccacaatattagaagaactgtatcgaatacagaaaat

SEQ ID NO: 817701 - DNA, 120 bp, Artificial Sequence
  ENSG00000236387_9 (sequence is synthesized)
aattctataactataggttacatgtcattgaaaaattcttcaagaacaaaattttgaataactcaattatatttcttcgattggggtatacttgttcaataaacaataactcacatttat

SEQ ID NO: 817702 - DNA, 120 bp, Artificial Sequence
  ENSG00000236384_0 (sequence is synthesized)
gggaacgcagagcaggaatgcgtggcaggaaggaatctcccagggattcacagttcacccctaaatcaatccgtggggcccgaggggcaaagtatctgagtgacccagccctcagtcttg

SEQ ID NO: 817703 - DNA, 120 bp, Artificial Sequence
  ENSG00000236384_1 (sequence is synthesized)
aaattagggtccacgaggaagtcaggatccaccggcaatatttgcagtgttatgttgaatgtggcaactggctgcgtgaggatagagaagtaaacagcatgtccggtggcagtcggttac

SEQ ID NO: 817704 - DNA, 120 bp, Artificial Sequence
  ENSG00000236384_2 (sequence is synthesized)
tgtccgttcctgagaaggagctcagccttgcccctcaggagctgcatgtaccaaatagaccatggacggaggcagcctccgagccagcccagcagccatggacggaggagccttggagcc

SEQ ID NO: 817705 - DNA, 120 bp, Artificial Sequence
  ENSG00000236384_3 (sequence is synthesized)
tgcctaacacaggaaggtcctggaggggatggcctgggatgggctaggacccggttcccacctcaggaggcctctggccatggaagtgctaagggatgctgctacccacaagcctggatc

SEQ ID NO: 817706 - DNA, 120 bp, Artificial Sequence
  ENSG00000236384_4 (sequence is synthesized)
ctggcgtgctccgcggctctccttcaagccctggcctcatcagacctccaaggctccctagacagggttaattattcacgtggcctgggacccagggttcgtttgtttgtttttcccgac

SEQ ID NO: 817707 - DNA, 120 bp, Artificial Sequence
  ENSG00000236384_5 (sequence is synthesized)
acagtagggtccacgaggaagtcaggatccaccggcaatatttgcagtgttatgttgaatgtggcaactggctgcgtgaggatagagaagtaaacagcatgtccggtggcagtcggttac

SEQ ID NO: 817708 - DNA, 120 bp, Artificial Sequence
  ENSG00000236384_6 (sequence is synthesized)
gcccagtgaaatgcaaatgctaggtccccctcccctctgggtgagcctggatgccagcaccctgttccgcccgcccagcatgcagaacaaaagcacaacgcacagaaacacagccggtgc

SEQ ID NO: 817709 - DNA, 120 bp, Artificial Sequence
  ENSG00000236384_7 (sequence is synthesized)
gcgcagggcggcaggctggcttctccctccctcctgccgaggtctccggccccttcccccttccctccttccctcccctctcctcttctattagaaaatgggagtgttagggttgaattg

SEQ ID NO: 817710 - DNA, 120 bp, Artificial Sequence
  ENSG00000236384_8 (sequence is synthesized)
tgaaatgcaaatgctaggtaagtgacacgtaagtttttgatataagcatatcccaggcaacatttatttattggaaattgaaactcacatttaaccggccatattattttttttaaattt

SEQ ID NO: 817711 - DNA, 120 bp, Artificial Sequence
  ENSG00000236384_9 (sequence is synthesized)
ttttgttctctaaatctatcttttgtttgccgaatttctagcaaccttagatggagaggtggctctgagattagcatccccacaggcccacctctggctggagagacaaagggaggtggg

SEQ ID NO: 817712 - DNA, 120 bp, Artificial Sequence
  ENSG00000236384_10 (sequence is synthesized)
gctgtctgaaaatgctgtgcggattccccgattttctctcgcctggcaggtcacctggcccacactctcctcccctgatcccctgagtgctcccctccccctgcaggtccccctcccctc

SEQ ID NO: 817713 - DNA, 120 bp, Artificial Sequence
  ENSG00000236384_11 (sequence is synthesized)
cagtcccctagaatgtgaccgtgcttggagataagacctttacagagtaactgattaaaatgaggtcattagcagggaccctagtgcagcatgactggtgtcctttcaaaaaggagaaat

SEQ ID NO: 817714 - DNA, 120 bp, Artificial Sequence
  ENSG00000236384_12 (sequence is synthesized)
ttggatacagacatagacacacactgagggaaggtgaagtaaaggggcaaggagaagacggcctgcaacgggagtgacgcccttacaagccgagggacgcctggcagtgccagctgacac

SEQ ID NO: 817715 - DNA, 120 bp, Artificial Sequence
  ENSG00000236384_13 (sequence is synthesized)
caggagcagggagaggccaggaagcctggcagtgccagctgacaccaggagcagggagaggcctggaacggttctccctggagacatccgggacacaccttgatttcaggattccatgat

SEQ ID NO: 817716 - DNA, 120 bp, Artificial Sequence
  ENSG00000236384_14 (sequence is synthesized)
agcttccagaactgccaaagaacgcatttctgtgttttcagccacccagtctgtggtatcttgtgactgccgccctaggaaagtaaaacaaggagttaattcatgaagggtgggggaaat

SEQ ID NO: 817717 - DNA, 120 bp, Artificial Sequence
  ENSG00000236384_15 (sequence is synthesized)
acgtaccctttgaaataccacctagaggaaggggtaatagtacacccgatcatgtgctccagtttatgaaatagttgcacgtcactcggaattttgaaaaacaatatattttcaggactc

SEQ ID NO: 817718 - DNA, 86 bp, Artificial Sequence
  ENSG00000236385_0 (sequence is synthesized)
ttggaactgaagcaaacactgctattgccacctttttgcagaggaaggtactgaggtgaagcgacttgcccaaaccctacaaaaat

SEQ ID NO: 817719 - DNA, 120 bp, Artificial Sequence
  ENSG00000236385_1 (sequence is synthesized)
ggtactgaggtgaagcgacttgcccaaaccctacaaaaataactggccattgcatcaacagcagtgtcaagagcatcatagcatcggatgatgatggacagatgcctctgctgcagagtt

SEQ ID NO: 817720 - DNA, 120 bp, Artificial Sequence
  ENSG00000236385_2 (sequence is synthesized)
atgcccccgccccaacactcaattggcaatcatctggggaagtctgtcacaatggtccctgtccacctttcttttagtggtttcagcatctgtcaaaggttcttatttgaatttccatcc

SEQ ID NO: 817721 - DNA, 120 bp, Artificial Sequence
  ENSG00000236385_3 (sequence is synthesized)
caagggctgcaaaatggtgactttctgaccgtattattgcatctacattcacagctgacattcttcaataaagaaaagttttccttcatcaagtagaactatttagttatgctgaaattc

SEQ ID NO: 817722 - DNA, 120 bp, Artificial Sequence
  ENSG00000236385_4 (sequence is synthesized)
agtatcttctagaaagacattaaatctttaattatttttaattctcaattctcagaataaccaattcatgtaataatcacctccagtgatggcaaatgagttttgttttggaagacattc

SEQ ID NO: 817723 - DNA, 120 bp, Artificial Sequence
  ENSG00000236385_5 (sequence is synthesized)
tcttttctagttatgtacttgcggagttttatatattcatagtcatttttaaatgctcaggttgtctcacacttgccactgtatactcttcaactagaatgctacttaacccagattaaa

SEQ ID NO: 817724 - DNA, 120 bp, Artificial Sequence
  ENSG00000236388_0 (sequence is synthesized)
cacacagtgaattcaatttcttctatgcaagtatctgctctaggagaaaacatattcctgaagaggcttgaggtccgtctacctaggataccgaagtcactctcaatcagggtataatca

SEQ ID NO: 817725 - DNA, 88 bp, Artificial Sequence
  ENSG00000236388_1 (sequence is synthesized)
atcccaacactttgggaggctgagacgggagaatcactttaacctgggaggcagtggttgcagtaacaatagagtgagactccatctc

SEQ ID NO: 817726 - DNA, 120 bp, Artificial Sequence
  ENSG00000236389_0 (sequence is synthesized)
aagaggcacttgagagaacaaaaggcgagagggagagggagaagagaagagagtgggagagggaggaaaaaaaacagagagagaggcaaggatcatgggtgaggctgtgaaaacagagaa

SEQ ID NO: 817727 - DNA, 120 bp, Artificial Sequence
  ENSG00000236389_1 (sequence is synthesized)
accatgtgttatgtgacaggatgctcctctgaagactgacgatgttacttgggatttaaggtactaatcaagaagtctataaaggaaaaagatgagtgtatatacacatatgtatgtata

SEQ ID NO: 817728 - DNA, 120 bp, Artificial Sequence
  ENSG00000236389_2 (sequence is synthesized)
tatgtatttgtatatgtgcatatatataattttaaaaaacaaatactagagctgtagatgtttgcaggaaataatatagtttaggaagaaatgtttgaaatgcttgaaaatgcagtgtaa

SEQ ID NO: 817729 - DNA, 120 bp, Artificial Sequence
  ENSG00000236389_3 (sequence is synthesized)
ctttcttggttgaggagctcctgaagttgaggaagggaaaggagaaactgcagatcaccgttacacaaagcctggggttggagcgagcagtggaattagtcctcttccacattcagacag

SEQ ID NO: 817730 - DNA, 120 bp, Artificial Sequence
  ENSG00000236389_4 (sequence is synthesized)
ggacacaagccacagctctagctccctcccaggcagaagggagaacattctgggagcacagtgaggagagaagggataaggatgagtgaataaagtggagagggagcagcttcacagagc

SEQ ID NO: 817731 - DNA, 120 bp, Artificial Sequence
  ENSG00000236389_5 (sequence is synthesized)
attgttctaagtccccccatactgtgcctgtgattactgtgaattccttcactgctgatggtcacagcaagaagattgtcacgccactgaatatttgcatttggaccaatgcaaagatag

SEQ ID NO: 817732 - DNA, 120 bp, Artificial Sequence
  ENSG00000236389_6 (sequence is synthesized)
gatgtttccatctgaagattcactttttaatagataactttacatctagctctcagatctccatgtgtagcatcaaaaagcattaagtaaattgctgtggaatgtgtcttcaatgaaata

SEQ ID NO: 817733 - DNA, 120 bp, Artificial Sequence
  ENSG00000232600_0 (sequence is synthesized)
agctcctcgtcctcctccagctgcggggtcaggccatcggtgtcgtcctctggaacagagccaagcccaccccaggggagtccgtgggaggtgaaggaggccaaggccgccccaggctcc

SEQ ID NO: 817734 - DNA, 120 bp, Artificial Sequence
  ENSG00000232600_1 (sequence is synthesized)
ctgcgggtcaccaccttctctgtccagttccgggaaagcactggccgtcctgcctgcctgtggctgttcctgctacagccctaagcaggctccacagcagcacagcacacccctctccag

SEQ ID NO: 817735 - DNA, 120 bp, Artificial Sequence
  ENSG00000203706_0 (sequence is synthesized)
gaagaataagagctattattattctttatgtcttatccttttttttttttaaaaaaaaaaccaagtttccttctaagggaaataaacaccaaaggtaggattccaaggaaatgactcaca

SEQ ID NO: 817736 - DNA, 120 bp, Artificial Sequence
  ENSG00000203706_1 (sequence is synthesized)
gactcacagcggctggcagggctctggcggggctggcccgggcccccgcgctccagcccgcagcagatgtcggcccggccttccctccctcccttgccggccaaacccgctggaagcccg

SEQ ID NO: 817737 - DNA, 120 bp, Artificial Sequence
  ENSG00000203706_2 (sequence is synthesized)
ggagcgccctgcgcccgtgggacctggcggcgaggacgcctattccctgcttctgcgaccacagctgggcactcggaaagttgctagggccgaagaggcgggaggggaggaagggaagcg

SEQ ID NO: 817738 - DNA, 120 bp, Artificial Sequence
  ENSG00000203706_3 (sequence is synthesized)
ggaggcgtggaccaggcgggcagcagcctcagcccgccgaggagtgatcctccgactgtgaaaaaccagacctctggctgcctggctccctaggaatcaagaagacgcacagactgaaaa

SEQ ID NO: 817739 - DNA, 120 bp, Artificial Sequence
  ENSG00000203706_4 (sequence is synthesized)
tcaagggaggaaggaacaagatcaaggatgaggattagcatctgcaaattgaactctatctaatttgcatgtttatttcttagaattgtaattaaatttgtgtaataaatgttttccatt

SEQ ID NO: 817740 - DNA, 120 bp, Artificial Sequence
  ENSG00000203706_5 (sequence is synthesized)
tcatttgtacacttaaaacttgggtgactgacatgcagttaagtgaatttcctttttttaaaagcaaatgtagattattcaataaagcagcaaaccaatattaaacataattagaactaa

SEQ ID NO: 817741 - DNA, 120 bp, Artificial Sequence
  ENSG00000203706_6 (sequence is synthesized)
tctgaagaataagagctattattattctttatgtcttatccttttttttttttaaaaaaaaaaccaagtttccttctaagggaaataaacaccaaagtgatcctccgactgtgaaaaacc

SEQ ID NO: 817742 - DNA, 120 bp, Artificial Sequence
  ENSG00000203706_7 (sequence is synthesized)
gtcccgccgccgcgactggggcgctgcgccgccgtcgctgcagacggttatggtaatgagcggctctgtctagcgaggagcgtgtgaaacccgtcaatcctgtttgccatttccccgtgg

SEQ ID NO: 817743 - DNA, 120 bp, Artificial Sequence
  ENSG00000232606_0 (sequence is synthesized)
aggaccagagaagctcagaccgtccctaacatccctgctgcgagacccgcaggctgtggaatctcgcacgtcacctggccccagcagggcggccagctgaggggttgattttattttatt

SEQ ID NO: 817744 - DNA, 120 bp, Artificial Sequence
  ENSG00000232606_1 (sequence is synthesized)
tttttgaagtaaaggctgaatctcggcttcagggcttttgccaacgtctccactgacaggaaccagcaaacttcaggacccaaatgagcatcttaatttattgatgctaaacagaaagct

SEQ ID NO: 817745 - DNA, 120 bp, Artificial Sequence
  ENSG00000232606_2 (sequence is synthesized)
ccagagaattcaagagtttccaacacctaagagtggtatttggcaaatggtgggccaaaggaataaagaaggcatgcaaaactcttgacagaagacattcagaaattgatttgatatcag

SEQ ID NO: 817746 - DNA, 120 bp, Artificial Sequence
  ENSG00000232606_3 (sequence is synthesized)
atacaaggagaaaatatgccagtaagaaaatgcatttttcaagattaaattcggcatttgttacttaatagcatttgtcatattccaatttttcatatgtagtaaattcatttcaaatca

SEQ ID NO: 817747 - DNA, 120 bp, Artificial Sequence
  ENSG00000232604_0 (sequence is synthesized)
aaaatacctactctgaaagagactctctgtatagctctgccctcctgaattgcatgtccaaattgcattggaaaaaaatgaggaaaaattctggactcccaaggtagtagttggaaaagg

SEQ ID NO: 817748 - DNA, 120 bp, Artificial Sequence
  ENSG00000232604_1 (sequence is synthesized)
ctgtcaccctacagtaagggaggaaacaacagcagaacttcatgttagctcagaccagctgcagatgctcatctgaactttgagaatggtcaaataaaagtaaaacctgatggaacacca

SEQ ID NO: 817749 - DNA, 120 bp, Artificial Sequence
  ENSG00000203709_0 (sequence is synthesized)
ggatcccttgttctgggggaagccatctatcatgtcatggtaggctacagggagttccatgtggggaagaactgaaacctcctcccaacagccatgtgaggaagcttggaaaaccttaga

SEQ ID NO: 817750 - DNA, 120 bp, Artificial Sequence
  ENSG00000203709_1 (sequence is synthesized)
agagtatcctttaaaaaaaagttttaaattaaacacaaataaatacataaacagtacaactgcaatctcatgagacatcccaagcgagacaactcagggctcacaatctacttaaaaatt

SEQ ID NO: 817751 - DNA, 120 bp, Artificial Sequence
  ENSG00000203709_2 (sequence is synthesized)
tcgatatagtcactcatttattctacaaacatttaccaaagtcctttgatgtgtcagccataaaagacatactctcagaaaactgaggtcataaatgacattgctgattgggaaaatcag

SEQ ID NO: 817752 - DNA, 120 bp, Artificial Sequence
  ENSG00000203709_3 (sequence is synthesized)
agaggaagaggttttcgagttggccttaaaggacaggtggaatttctacaggcggaaatgtgaggttgggcgtccagtggagatatccctgaaggaggaaaaagcatgagataagatggc

SEQ ID NO: 817753 - DNA, 120 bp, Artificial Sequence
  ENSG00000203709_4 (sequence is synthesized)
caagtgctcctacattctgaggactcaggagagtgcagcttgctctgtgagtgggtgacaacctcttggcgactcaggctcagctgaggatggtgccagtgtgccggagacagccgtcat

SEQ ID NO: 817754 - DNA, 120 bp, Artificial Sequence
  ENSG00000203709_5 (sequence is synthesized)
actgccggatagagtggctcacttgcatgtatttggaacaaaaaaaggagatgcctggcagccccgctctctgcagtgctgttgagccaccaatttttgtggttttgtgaccacaagtgc

SEQ ID NO: 817755 - DNA, 120 bp, Artificial Sequence
  ENSG00000203709_6 (sequence is synthesized)
tgactgatgcgacatgaccccagtcttgtcagtgaatcatcaccaggctgcttactggaaactggatgcagcaaggaaataggatttaaccgctctctgcctcccaggagccctgaaatc

SEQ ID NO: 817756 - DNA, 120 bp, Artificial Sequence
  ENSG00000203709_7 (sequence is synthesized)
agcattcccagaggaaagaagatggccatctgggcttggcttccggctccccccatctggctggaacacacatcagtcacgtttcctgcccaagccctccgagcatttgaatgtgctgtg

SEQ ID NO: 817757 - DNA, 120 bp, Artificial Sequence
  ENSG00000203709_8 (sequence is synthesized)
agcagcctacctcagcctcctctctttacacatgaagacactgaggcccattcagggcaagtggcaggtccctgttctcagagttggggccaagcaggtattaaaaccattgtgttctga

SEQ ID NO: 817758 - DNA, 120 bp, Artificial Sequence
  ENSG00000203709_9 (sequence is synthesized)
agctttctaaaatctctttaggggtgtgcgtaggctcctgtgtctatgcctgcttttgactgcccagttgaagcctcttcctatgccttttaaaatttcacgcactataaggaggaagag

SEQ ID NO: 817759 - DNA, 120 bp, Artificial Sequence
  ENSG00000203709_10 (sequence is synthesized)
ctcagggctcccaaaactttttatttagagggaagaatgctagggagatgggtatgcagagggttgaccaaattggaagaaaatatttattctgtagtttggtgttggaaaagggaattt

SEQ ID NO: 817760 - DNA, 120 bp, Artificial Sequence
  ENSG00000203709_11 (sequence is synthesized)
tccaatcagccacacctcagtgttgcggcaaaataattcttggctcccctggaaacgcatgggcaaggtagggcagagctgctgctgctgatactgccaccaccctgggcttcctgctga

SEQ ID NO: 817761 - DNA, 120 bp, Artificial Sequence
  ENSG00000203709_12 (sequence is synthesized)
ctctgggctactccctggggacaacagatttgcattgacgtccggggctgtccagaggccctcaagagccagttgtgagctgagcccagtatgggaaagatctaccttctggaagctact

SEQ ID NO: 817762 - DNA, 120 bp, Artificial Sequence
  ENSG00000203709_13 (sequence is synthesized)
agctcttgggaacaggaacgtgcttctcccagcgagagcagccatgccgtcttaaagcactagctttcttgaaagcagttcagggacatgcccatccttctgtgccagagctgagccctt

SEQ ID NO: 817763 - DNA, 120 bp, Artificial Sequence
  ENSG00000203709_14 (sequence is synthesized)
ctactgggggaacatggagacacgcgagctccagtcttcattccactcctcctccttccctttgccctccactgtctcctgctgtccccccagctcatcccaggggcagggtaaccttgg

SEQ ID NO: 817764 - DNA, 120 bp, Artificial Sequence
  ENSG00000203709_15 (sequence is synthesized)
gtccagaattggtcatcagctggcttgagttctcccattctgcctgtgccttcccttagcaagggaaagaacaagatggaagagaaggaaaaggcttgattgaaccagccaatagataat

SEQ ID NO: 817765 - DNA, 120 bp, Artificial Sequence
  ENSG00000203709_16 (sequence is synthesized)
tagaagctgactattttgcaataatgcagcacaacagcaataaataaatcaatcacttggggggtggggaatgacttccctataatcagctattaaagacttgtaccactaattagtcta

SEQ ID NO: 817766 - DNA, 120 bp, Artificial Sequence
  ENSG00000203709_17 (sequence is synthesized)
aatctcccaaacgattgttctcttttttgcattcttctccttctggcttttctgtgtggggttagtaaccagcacagggttgggggcagaatgggcagctgaagtggtcgggctgtgcgg

SEQ ID NO: 817767 - DNA, 120 bp, Artificial Sequence
  ENSG00000203709_18 (sequence is synthesized)
acgtgtgggagatagctgggtagtgttgctgggtgtggcagttggcagagcatttgggcctcccacagtaatagaaactctctttggctccagcatccagcaggaggttctgggtttaac

SEQ ID NO: 817768 - DNA, 120 bp, Artificial Sequence
  ENSG00000203709_19 (sequence is synthesized)
ccctcggtaatcctgggagccttcctggtgcctggggattctctcccctgtgtagtctcagtggatggcctgtcttaactctagatacattttgccttgagggggcttagtctaggttgg

SEQ ID NO: 817769 - DNA, 120 bp, Artificial Sequence
  ENSG00000203709_20 (sequence is synthesized)
tggtctggagtttggactgggctgagcagtgagctttgggactctccctaattttggggtttctttgaatgagccactttcttcctctaggccttcattacctttgccttaaaaaacaaa

SEQ ID NO: 817770 - DNA, 120 bp, Artificial Sequence
  ENSG00000203709_21 (sequence is synthesized)
atccctggtccagtaagccattgcaaagcatctctaggaagttgacaaagaaatgcttttcttctgcctcacttgctgccgatcacagtaatagcaatggtgattaaaaatgaaaaatga

SEQ ID NO: 817771 - DNA, 120 bp, Artificial Sequence
  ENSG00000203709_22 (sequence is synthesized)
tagatgactacagcattcttggccagtaaagccagttggaattagccaacagcagattggtctgggctctaaagataaaaggaattatgttgggtaattttcggaggtacctatgggatc

SEQ ID NO: 817772 - DNA, 120 bp, Artificial Sequence
  ENSG00000203709_23 (sequence is synthesized)
ctacctctggccacacagtggtcgcctctctctgctcatatgtttcggtgggggtggggggttcctcttccccatgctgctcccgttgctatccagggaagattggccaattctgcttcc

SEQ ID NO: 817773 - DNA, 120 bp, Artificial Sequence
  ENSG00000203709_24 (sequence is synthesized)
tgttatttcttcttctcctctgtccatttgaggtgagtctctaggttggctgtgaacagcctgaggaacccagggctgtttggaagaatctgatgtctcttccttcaaggaccctgacag

SEQ ID NO: 817774 - DNA, 120 bp, Artificial Sequence
  ENSG00000203709_25 (sequence is synthesized)
gtctcagccctccagcagtactgcagtgagggatggcagggggtgttggagtggagagatatcgacttgggtgcagctggggagactaaaaggagtgagccaagtccctcaagaagtgtt

SEQ ID NO: 817775 - DNA, 120 bp, Artificial Sequence
  ENSG00000203709_26 (sequence is synthesized)
ggctagagtctggccagccctggctgtagggctggagccagacgtagctgctggctgtgcttgggagtctcagccctcatatgtgcagtgtgtccctgggcatggctcttcgtgatcccc

SEQ ID NO: 817776 - DNA, 120 bp, Artificial Sequence
  ENSG00000203709_27 (sequence is synthesized)
actcccacgaatagccctgtccttggttagattgggaaaaccagggtgggaagtaaaggggaggttggttttgctcgtggtcatgcagttatctctctggcctctgatgtttccagaatt

SEQ ID NO: 817777 - DNA, 120 bp, Artificial Sequence
  ENSG00000203709_28 (sequence is synthesized)
gggattggtgcttccctgctgattttcctatttttgtccctcatctggttcttttcctccttgctcaccagcctgggttctacacacatgacatggggcattgtgtgttcccaatgagga

SEQ ID NO: 817778 - DNA, 120 bp, Artificial Sequence
  ENSG00000203709_29 (sequence is synthesized)
tagcagaacagttggtatctcctgagagaggggccagcatatctggcacttttttcttgacctttgaatttctgaggtctgggagtcaggaggcagcatggggcctctccatccgggatc

SEQ ID NO: 817779 - DNA, 120 bp, Artificial Sequence
  ENSG00000203709_30 (sequence is synthesized)
cagcagaggttaacagagttggtggctctggagctgaggtggtgtggcttggctgggagttgtgggggagaggccctgccaggggccctgattggtcagtaccttctctattccattgaa

SEQ ID NO: 817780 - DNA, 120 bp, Artificial Sequence
  ENSG00000203709_31 (sequence is synthesized)
tcctggtccggtcagctctgtgaattgtttaatgcatatcttggctctgtcccctggctcgagtgtccctaaggctgcagccacagctttagagaggatctgtaccttgtgctggtcact

SEQ ID NO: 817781 - DNA, 120 bp, Artificial Sequence
  ENSG00000203709_32 (sequence is synthesized)
ttttttgggcgtgttacctccctctgagatatgtaagagataccaccctttcccaccagccggctgtctgtgggaggccctcattttgctttgcttttctgagacttggagtgactgtga

SEQ ID NO: 817782 - DNA, 120 bp, Artificial Sequence
  ENSG00000203709_33 (sequence is synthesized)
ggaaagcatggactgagtttgctttcttgctggttccttccacaagagctgctcatgggctgataaagccagagaacacctccagggccccatggcctgtgcggagcctggtaccatagt

SEQ ID NO: 817783 - DNA, 120 bp, Artificial Sequence
  ENSG00000203709_34 (sequence is synthesized)
gtcaagcctacagggatggactggggacatgggggcagatagagccacgtggggaggtggtatgtgtggttagatcacaggagcaagtccaggagggtgtgggaggacaagtccagtgct

SEQ ID NO: 817784 - DNA, 120 bp, Artificial Sequence
  ENSG00000203709_35 (sequence is synthesized)
ctacgtggtgcttggaaagatgactcagtgtatcgggagccgggagatggagctctcagcagagtggccaggatgttctgtcaacatgaaagctacaaaaacagctcggggctctgagct

SEQ ID NO: 817785 - DNA, 120 bp, Artificial Sequence
  ENSG00000203709_36 (sequence is synthesized)
agataacgaacacagacaaacctcaaaggtgagttagaagggaatatgtcgagacaggagaaccatgagcctgggatcttgagaatatgtcatggaagacagcctggaatacggtggcta

SEQ ID NO: 817786 - DNA, 120 bp, Artificial Sequence
  ENSG00000203709_37 (sequence is synthesized)
tgatattcttgaatcccttatgattgtggtgacccagcccgcttcctagctgggatgctccttcatctggttctgcctaactcacccctcagcccccactgccttggggctcacaatcta

SEQ ID NO: 817787 - DNA, 120 bp, Artificial Sequence
  ENSG00000203709_38 (sequence is synthesized)
ggagccggcgtccgcagcggctgcgcatctcgggcctgcagcggggcgcttggcgggcgggggccgggggagagcctgtttgcgcagtacccccggagggcggaaggccgccgagagaaa

SEQ ID NO: 817788 - DNA, 120 bp, Artificial Sequence
  ENSG00000203709_39 (sequence is synthesized)
catggcccaggatggatgtgtgcatctcctgtgaaggatttgcgtctgagtgcctggtactgaaggtaggatggtgccccgatcagggtctataatgaggcatgaaggtatgagatgggc

SEQ ID NO: 817789 - DNA, 120 bp, Artificial Sequence
  ENSG00000203709_40 (sequence is synthesized)
atcagagttgttggtccaagggaaactgacctttttaaagggctctcctctccttatctgatttcatcctcagaacaaccatatgacatagggatcacttcccttttatagttaaagaaa

SEQ ID NO: 817790 - DNA, 120 bp, Artificial Sequence
  ENSG00000203709_41 (sequence is synthesized)
cagattaagtgacttaacccaaggttatgcatttggtaagtgaggttgttgagatttaaatgcatgcacttcttattccaaagcctctacgttatctttactcttttgggctgaagtcag

SEQ ID NO: 817791 - DNA, 120 bp, Artificial Sequence
  ENSG00000203709_42 (sequence is synthesized)
acatttttgtgaactaagattctcagaggactgatgtgaaccagagtgaaaaggcagacacccgaaggaactttccagtcactggggacggttgtgccgcattcctttagggggaggcag

SEQ ID NO: 817792 - DNA, 120 bp, Artificial Sequence
  ENSG00000203709_43 (sequence is synthesized)
ggcagacccaaatgccctttggtagccatggacaggcagagctgagtaaggccagtacatggcgtctgctgctgtgtacggagcctctgctatgtgccagggactgtgccaggcgctaga

SEQ ID NO: 817793 - DNA, 120 bp, Artificial Sequence
  ENSG00000203709_44 (sequence is synthesized)
gatacagaacttgacaaagccaactttccactttcatggggcatacattctagtgtggagagacaccgctaataatgatttttaaaaagaatttaaaaatgtacagggtagacatatatg

SEQ ID NO: 817794 - DNA, 120 bp, Artificial Sequence
  ENSG00000203709_45 (sequence is synthesized)
gagattgtgtggggatgaaaagggggaccccccacacacataaggaggagaattcagatgatggtcagagggttctagagacttaggacctcagccatctgaagccacatcaattgagct

SEQ ID NO: 817795 - DNA, 120 bp, Artificial Sequence
  ENSG00000203709_46 (sequence is synthesized)
ttccttcagggagttaggactgacacaaactaaccccctcttttttcctaataacttgggaaatccatccaaggtccccatggcttacaggaacttgtcgtgagtcagggatcaaggtgg

SEQ ID NO: 817796 - DNA, 120 bp, Artificial Sequence
  ENSG00000203709_47 (sequence is synthesized)
agtagatgtcaagcctttggtctccggcagactggttctctcctgtctgccatggttgctgttggccttctgcctcacaccctcccaggcaccagctgacttctttcctcagcctggtca

SEQ ID NO: 817797 - DNA, 120 bp, Artificial Sequence
  ENSG00000203709_48 (sequence is synthesized)
ctgtgccccacacttgtccatgcagcacagggaaacgtgcaggttaggtctttgccgagccattggtcaaatgttcctgcaggaggctggttctgaactcagcctgtcctgccagaacga

SEQ ID NO: 817798 - DNA, 120 bp, Artificial Sequence
  ENSG00000203709_49 (sequence is synthesized)
gccgttcccagagctaatcgtctcacgatagggaagggatgggcaccaggcatagagaagtgacctgtgccagatgcttggttgagctgtgtcttgagaggcggaggcaggttggtggtg

SEQ ID NO: 817799 - DNA, 120 bp, Artificial Sequence
  ENSG00000203709_50 (sequence is synthesized)
ctggggacagggcaggcatgtgtcatgtgttcagcgcatgtagctccagggctcgggacttgtttacttggtggaagaggcagcggacctgcggagtcaggccatgtgattgttggctct

SEQ ID NO: 817800 - DNA, 120 bp, Artificial Sequence
  ENSG00000203709_51 (sequence is synthesized)
ttggctgatcatggacagctgacccgccggactgcacacactgccatctgctgccaggggtctgaagttgcacagggatgaggtagtgtagttgggggtgctcagggaggaggagggtca

SEQ ID NO: 817801 - DNA, 120 bp, Artificial Sequence
  ENSG00000203709_52 (sequence is synthesized)
ggaaagtggggtttgtgttgctctgtgttgagtcagccgaccctgattctggtcctagctcttgttggtaaaaactcactcactttcctcctttcagctccagtttcattatctatgaaa

SEQ ID NO: 817802 - DNA, 120 bp, Artificial Sequence
  ENSG00000203709_53 (sequence is synthesized)
tgaggggatggaaccagaatctctttggaggttccagctgtatcctggggcctccctgaatgttcatggagatgttccttagccagtaattcaagatgaggaaaactaggcccaggtttc

SEQ ID NO: 817803 - DNA, 120 bp, Artificial Sequence
  ENSG00000203709_54 (sequence is synthesized)
cacaagagaaggggagggatcttgatgacctgtctcagagcggctgaagtggtactgttggaattagggtgggtgggtgggaggaggtagtttttaaagacctcccagaagtggaagcag

SEQ ID NO: 817804 - DNA, 120 bp, Artificial Sequence
  ENSG00000203709_55 (sequence is synthesized)
agggctggaggtttcgtgaaggtgttgatgaggatccaccgggtggtaggggacatggctacgcgcttcccccgggaggcttgttggagatgggtttatgtgggagctgctgggggtgcc

SEQ ID NO: 817805 - DNA, 120 bp, Artificial Sequence
  ENSG00000203709_56 (sequence is synthesized)
tgctgtcctgcaaggggctgacccaagggaccctgctctaggaaagatgctccgtcctgtctggccctaaaccctggagagagaatgcagctgtggtttgagggagggtctgtgcccctt

SEQ ID NO: 817806 - DNA, 120 bp, Artificial Sequence
  ENSG00000203709_57 (sequence is synthesized)
gctgtcaggaagttttcctttatatttagccttctcttttcatgtattttttgaggccctcgactaaaaaattaaatttaattttaaaaaataacaatgaaaaaaataaaaaataaacaa

SEQ ID NO: 817807 - DNA, 120 bp, Artificial Sequence
  ENSG00000203709_58 (sequence is synthesized)
aaatatctcagagccactggttccattttggctttttagtcttgagtcactcttaaaaagatagcaaaataaaacacatgcaggaaagccgaaggtcccaggcccagccagatgggggct

SEQ ID NO: 817808 - DNA, 120 bp, Artificial Sequence
  ENSG00000203709_59 (sequence is synthesized)
aggagtggctgggactctggcctagcttctccatggcagcgttagtcccagacgtacaccacttctgcaaggctgtgtgggtaggagcccctggggctgagggggcacattgtgcaatct

SEQ ID NO: 817809 - DNA, 120 bp, Artificial Sequence
  ENSG00000203709_60 (sequence is synthesized)
gctaagcagaatgtagagttttaaaatagctacctttctccaagacactatctgcttgccgctttgtgggatgtttacctgggattaataatagctgagtgccaccccactgccagtatg

SEQ ID NO: 817810 - DNA, 120 bp, Artificial Sequence
  ENSG00000203709_61 (sequence is synthesized)
gaatagcaaacagcgatctgggctaggactcaggcaggagaggaatggagtaataaccatcgtatcagctcacatagttcttttcatacttgctggctcatttggtcctcacacaaccct

SEQ ID NO: 817811 - DNA, 120 bp, Artificial Sequence
  ENSG00000203709_62 (sequence is synthesized)
gagagggtaggtggtcttatccttgtcgttggtaaaactgaacctgagagtcaatcctgccaagatctgactgcttgtagccgcttctcgtgggtctcccatctaggtcctctgacttca

SEQ ID NO: 817812 - DNA, 120 bp, Artificial Sequence
  ENSG00000203709_63 (sequence is synthesized)
gctgttatttctctgggttctgactagtggggcagggacaggagtaggggagtggagtctttggcagtttccttaatttctgaaggccttagagggcctagagatgccttttctatgtgt

SEQ ID NO: 817813 - DNA, 120 bp, Artificial Sequence
  ENSG00000203709_64 (sequence is synthesized)
tgaatgggaaacggaacctcagcatgtccaggttctccaactctctgattcttcagacttcttggagctcttgtgagaactggcttgcactttttggctgggaagccagccactcaccat

SEQ ID NO: 817814 - DNA, 120 bp, Artificial Sequence
  ENSG00000203709_65 (sequence is synthesized)
gtgttcttggagaggtttcctgtatttggaagcttctggaatatgtgatgcatcaaaccactgtgacacatctgtatggcacctcatgcctatgcacacaggcatgcttctgctgagtgc

SEQ ID NO: 817815 - DNA, 120 bp, Artificial Sequence
  ENSG00000203709_66 (sequence is synthesized)
agctcacttagagatgaggcccagtgtagggtttttgaaatttttccaacacatttgtaagagatgccctgagccttgcccagcatgcatgttgtgtgtatgctacctgtttgctggcta

SEQ ID NO: 817816 - DNA, 120 bp, Artificial Sequence
  ENSG00000203709_67 (sequence is synthesized)
atgtacagcgcctgctggaagccttggctaatgtacaatgtaaagtaagggactagaaacactggctttagttctgagtgtctgcttcatgattgacttgaaaaagtagggcttacccac

SEQ ID NO: 817817 - DNA, 120 bp, Artificial Sequence
  ENSG00000203709_68 (sequence is synthesized)
agagagaaaggtgggtaagagaactcgtgggtgtcagttttccttaaaggcagagcataatcccccactctttataagggctggtaaggcagagtattggacagcaggacttcttggcca

SEQ ID NO: 817818 - DNA, 120 bp, Artificial Sequence
  ENSG00000203709_69 (sequence is synthesized)
gttagccctcttgagtgacctttgtttaaatagacccagaacttgtatgaaggaggaaataatggtttatctttatttacagcggatttagccatgatggtttaggctttttctgggggt

SEQ ID NO: 817819 - DNA, 120 bp, Artificial Sequence
  ENSG00000203709_70 (sequence is synthesized)
attcctttaggacagttgaggttggacaggggcagcatgcatatgtgtctctaaatgtctgtcctttggtatttcctgaatgcatccttggctcatactgaaaccctgtgatggggaatc

SEQ ID NO: 817820 - DNA, 120 bp, Artificial Sequence
  ENSG00000203709_71 (sequence is synthesized)
cacagcggaattgttttagtggataaagccttctgtagcttcatgtgtgaagatttgtcatgttggatccagttcattctgtccacttgaaggatggaaaagagagtgggcagaacttgc

SEQ ID NO: 817821 - DNA, 120 bp, Artificial Sequence
  ENSG00000203709_72 (sequence is synthesized)
agcaaggagagtgatttgggctagacttctgggagaactgtgcatcacctctgctgagggttcctgaggaaagatgaagcctctttatttgaggtaggagactcggtgtcctccacagga

SEQ ID NO: 817822 - DNA, 120 bp, Artificial Sequence
  ENSG00000203709_73 (sequence is synthesized)
tcctcccagtcccaagtctgtggcactttgagacagtccctggaacagcatgaggtttgggtgccaggatctagagcaggcatttctctccatctttcccatctgtcttcaagacaggcc

SEQ ID NO: 817823 - DNA, 120 bp, Artificial Sequence
  ENSG00000203709_74 (sequence is synthesized)
caagctggatgcaattgaggggatgcatgggcagggtacaccaatgtggtcatcgaatctggaactttgaccttgtttccctttgcagagagaacttctggcactgatcttataggaact

SEQ ID NO: 817824 - DNA, 120 bp, Artificial Sequence
  ENSG00000203709_75 (sequence is synthesized)
ggtgttatttgcatataaaaaaagagaaaggcatgttgtccctcatcttttccaggaaagagtgctgagctgctctaatcctatggtggggagggaggagggccgtgtagaggacgcaag

SEQ ID NO: 817825 - DNA, 120 bp, Artificial Sequence
  ENSG00000203709_76 (sequence is synthesized)
ggtaggaggtgggagaggaacatcccagggcaggcccacaactctgggagccacagacattgcctgctatactaaaggcaaagggatgtgttcaaataggcctactatttagcggtaacc

SEQ ID NO: 817826 - DNA, 120 bp, Artificial Sequence
  ENSG00000203709_77 (sequence is synthesized)
cacagtctgaaataaatcagttaatggctaaatgagagttgtattaaatatggaaaatcatattttttgtgtgtcatcaccacctacagatttagcatcaacaggcctgaaaggctgagg

SEQ ID NO: 817827 - DNA, 120 bp, Artificial Sequence
  ENSG00000203709_78 (sequence is synthesized)
atgctgaaatgggccctgtccgtaagatcatgcttattttataatgactttttgtctcttttcattactatttcccactcttattccttaggtctacgtgaatatttatttatgcagttg

SEQ ID NO: 817828 - DNA, 120 bp, Artificial Sequence
  ENSG00000203709_79 (sequence is synthesized)
tgttatttccttggggtacagttcttccagtgtcattggcatcaatgaatatgtgactttgatttcaagtgtaaacaaaccactggttcacggcagggacaagccatctctgagacaagg

SEQ ID NO: 817829 - DNA, 120 bp, Artificial Sequence
  ENSG00000203709_80 (sequence is synthesized)
gctccagcagctgcctacagatgcccttcccccaatagccctggactgtttcggccagacgcctgagacgagagtcaagggtgttcttgcagggacctgcccaacgctatgtcatgtgtc

SEQ ID NO: 817830 - DNA, 120 bp, Artificial Sequence
  ENSG00000203709_81 (sequence is synthesized)
ctgcctggagggtggtgctcacacatgcatcttccagccttattagctggtactgcttttcagcttgacccgaggagtggtattggaagtttgagaccgtacatcccttgctaggtgaga

SEQ ID NO: 817831 - DNA, 120 bp, Artificial Sequence
  ENSG00000203709_82 (sequence is synthesized)
agggggtcagagaggtcaggcacagacagagaagggaacgcaggctcctggccactagcctctctcaagacaggtgaactttgtgttaagcgaactcatttaatattttgggcctaatag

SEQ ID NO: 817832 - DNA, 120 bp, Artificial Sequence
  ENSG00000203709_83 (sequence is synthesized)
aagttatttgtattttctctcctctcttttccctcctctctctcactcaccctccccccactccccagcctccaaagaatttaatctgctggacaacaaacaatactgttataaaacttt

SEQ ID NO: 817833 - DNA, 120 bp, Artificial Sequence
  ENSG00000203709_84 (sequence is synthesized)
gaaaacaagagggcgcggcctccctgacaaggagaagggcatgttgggtaacggcctgagggagcgtgccaggcctgagatggagccgggcgagagcccagttggctgggtacctgggcg

SEQ ID NO: 817834 - DNA, 120 bp, Artificial Sequence
  ENSG00000203709_85 (sequence is synthesized)
cctgcccctgcatagcccactagccgcgccatccccaggccagaggggaaggaaccaaaacaaaatggggggcagagaaacgcttgaaaagggaagttgcacatgttcccctctctctga

SEQ ID NO: 817835 - DNA, 120 bp, Artificial Sequence
  ENSG00000203709_86 (sequence is synthesized)
tctgatgggaatgcactagactgtgaaacttcctcctccacctcttctcccgagtccctccctccctcttaccctccttcctcctctctcctccctcctttctcctccttcctcctcctg

SEQ ID NO: 817836 - DNA, 120 bp, Artificial Sequence
  ENSG00000203709_87 (sequence is synthesized)
ctactcactgttcttgagtctggcagacagaggtcctgatagcagaatgaggctggaatagcaccataggtgcagctaccagctgggccagccaaagaggaaggagagaaagtgggcttg

SEQ ID NO: 817837 - DNA, 120 bp, Artificial Sequence
  ENSG00000203709_88 (sequence is synthesized)
cagttggctttggattcaaatctaccctctgtctggcccagcctccctccattctattagggaagtggaactacatcacgccacagggtgtgcccagtccatgtgtgtggaccaggtgtg

SEQ ID NO: 817838 - DNA, 120 bp, Artificial Sequence
  ENSG00000203709_89 (sequence is synthesized)
tgcccaggtactggggagaactgccactcagagattagttcaggaagcaccctgggcttcctggtgccccccttgggctgtgctctgctctggggagagtgtttgacttgttgaaatgct

SEQ ID NO: 817839 - DNA, 120 bp, Artificial Sequence
  ENSG00000203709_90 (sequence is synthesized)
ctctcctttgagatgctgtgctctccctccagggaggagcagaggctgtgctgcaagaggctggggcatgtctctggaggagctcttgggaacaggaacgtgcttctcccagcgagagca

SEQ ID NO: 817840 - DNA, 120 bp, Artificial Sequence
  ENSG00000203709_91 (sequence is synthesized)
gccatgccgtcttgtgagtgtggtgcctggtaggatactgcatctgttagttacttcccagtggctgaaggaagtggtcaccagctctgcctgggggaggtgggggagctgggctttggg

SEQ ID NO: 817841 - DNA, 120 bp, Artificial Sequence
  ENSG00000203709_92 (sequence is synthesized)
gcgtctccctccctacctccagagttaggtttcacctgagactgtggtttcacttttgactccatcttcactgagtcaagcagatgatttaggaatgaccagggagcagcattggtggtt

SEQ ID NO: 817842 - DNA, 120 bp, Artificial Sequence
  ENSG00000203709_93 (sequence is synthesized)
tgcctttggatctgcattggtttggacccatgaactctgtggtgggcattgtgtttgtgtaatagaccattggtatgctcatttttcctcttgcagaaagcactagctttcttgaaagca

SEQ ID NO: 817843 - DNA, 120 bp, Artificial Sequence
  ENSG00000203709_94 (sequence is synthesized)
gttaagggagggatggaaaactgaacttttaggagtgcagctgcctaggaacatagacctccatacctctgacgcaggggaaaccagaaaaaccgatgctgggtccacgtaggcttggaa

SEQ ID NO: 817844 - DNA, 120 bp, Artificial Sequence
  ENSG00000203709_95 (sequence is synthesized)
ggctgttactttttgccttcttacctgaataggaatttgaggggcactgtgggtttggaggatgtgattcccacactggggctcagggcctgggaaatgcagtggtccctgggttctgag

SEQ ID NO: 817845 - DNA, 120 bp, Artificial Sequence
  ENSG00000203709_96 (sequence is synthesized)
tcctcctttgaaggccaccctgccagaaaggaagagcctgatggaggtttctggggactttgggccagccggtaactccatgctccctctgctccacccttggcccctcatgtgtatacc

SEQ ID NO: 817846 - DNA, 120 bp, Artificial Sequence
  ENSG00000203709_97 (sequence is synthesized)
attccttttatcacccttccctctgattcacagcccccaccctgacagctaaagacagaatgcccaggctgctgcctagaatgacaggaagctggactgccctttcagtttatacatgca

SEQ ID NO: 817847 - DNA, 120 bp, Artificial Sequence
  ENSG00000203709_98 (sequence is synthesized)
atggcctgggactgtctcttgagggcaagacattccccttttacaaaagagccttccccaggcccctctctcaccaagatgagctcttccttgctgccaggagccctgaaatcagcattc

SEQ ID NO: 817848 - DNA, 120 bp, Artificial Sequence
  ENSG00000203709_99 (sequence is synthesized)
ccagaggaaagaagatggccatctgggcttggcttccggctccccccatctggctggaacacacatcagtcacgtaagtagctgtgactcagcacccagcactgccttggcagaaccttc

SEQ ID NO: 817849 - DNA, 120 bp, Artificial Sequence
  ENSG00000203709_100 (sequence is synthesized)
ccacgttctggatttgcacacactgtggtagcgcagcacaagcaagcagggttaggtaactggggaccagtgtctgtttgttcagtgggtttgcctatggatttcagaaagaaggattcc

SEQ ID NO: 817850 - DNA, 120 bp, Artificial Sequence
  ENSG00000203709_101 (sequence is synthesized)
ctcaccttcccattttcctcccatgttattttttaggtaccatgctaggctttaaagacaaagcatcatttatagaatgaagtagaagctgtctttgcagtctccaaactatttttaacc

SEQ ID NO: 817851 - DNA, 120 bp, Artificial Sequence
  ENSG00000203709_102 (sequence is synthesized)
caaactatttttaaccaacagcctatagatggtatttaaccctcaggtgtgtttggcctgcacgggtttttgtttttgtttgagacagggtttcactctgtagcccaggctggagtgcag

SEQ ID NO: 817852 - DNA, 83 bp, Artificial Sequence
  ENSG00000203709_103 (sequence is synthesized)
cacacctggctagggttattttaatgtatctgattttgcatgcatttagacaaaatatggcctctccagttcactgtatttct

SEQ ID NO: 817853 - DNA, 120 bp, Artificial Sequence
  ENSG00000203709_104 (sequence is synthesized)
tgcccaagcagattaatgccctggtgtgaggtcgagaagcctccaggtagaatgtggggacagaagtggaccaggctagagtatagctcccacacctttcccatgcgtggcagcactcgt

SEQ ID NO: 817854 - DNA, 120 bp, Artificial Sequence
  ENSG00000203709_105 (sequence is synthesized)
aagactgacatgcccacccttctggatgggtggttttcctccccagacagccctgccaaccctttcaccttcagccagtttgtttggagtcattaggctgaggtgggtaaaacccatcac

SEQ ID NO: 817855 - DNA, 120 bp, Artificial Sequence
  ENSG00000203709_106 (sequence is synthesized)
cctccttggatggcagagctctcagcaggctgggattttcatgggctgccttcttacaggtctaggtggccttcaggcatggtgccagggaaagcaagccccttccagcccttaccaaac

SEQ ID NO: 817856 - DNA, 120 bp, Artificial Sequence
  ENSG00000203709_107 (sequence is synthesized)
taactggctgcttcctagtagggaacagccaccagcttgtttcagcgaagagtcattgctcagctgattctgagaggagaaaactggttctgttgggagggctgagacctgaaggacccc

SEQ ID NO: 817857 - DNA, 120 bp, Artificial Sequence
  ENSG00000203709_108 (sequence is synthesized)
ttttatccagtggaattggaaaggcaaaggatttcaatactaacatgatttttttctccacttcttttagagtgtttaattaaagtgatgcattgttaatggcttcttatctcttcttcc

SEQ ID NO: 817858 - DNA, 120 bp, Artificial Sequence
  ENSG00000203709_109 (sequence is synthesized)
agagagtaaagagttaaattttagaatccaggagtggggacccagactgtggcttctgttaactccctcagtggcagtggcgtcctgctatgcacagcccctctgctgtactccgaatgg

SEQ ID NO: 817859 - DNA, 120 bp, Artificial Sequence
  ENSG00000203709_110 (sequence is synthesized)
tcccttacgggtagcaggagagacattaaataatcacactgatgaccaagtgagataagtggtttttgaaggaaagaacttgaggctggcgaggaccacttaaccttctagcaagggctg

SEQ ID NO: 817860 - DNA, 120 bp, Artificial Sequence
  ENSG00000203709_111 (sequence is synthesized)
gactcagggaggctttcctgagctgcggggaggatgacaggttccctggagtggtggtgggtgggggcggggctgaggggtggtagccaagggagggtgaaggagagtattccagaagag

SEQ ID NO: 817861 - DNA, 120 bp, Artificial Sequence
  ENSG00000203709_112 (sequence is synthesized)
acaacagcttaggcaggcaggacctcgccatggaggaaggtgctttctgatcactgcgggacacctgtgtgatagctcatagggagggggtactggtaactaaaagttgataaggaagag

SEQ ID NO: 817862 - DNA, 120 bp, Artificial Sequence
  ENSG00000203709_113 (sequence is synthesized)
tggctaaaatgaaaagcagaaaagtgagaatctcatcaaatcccctcatttgacaggatttggactcccagtagtaactgtccttaaacactcactcctgaccttacaaccctggctgtt

SEQ ID NO: 817863 - DNA, 120 bp, Artificial Sequence
  ENSG00000203709_114 (sequence is synthesized)
acctggttaacaagccccaggtgttggctacaggtgtcatcactgagagcccttgtgtgcagatctgccccagctctcccacctgtgactgaggctagcaagtcccccgtgggctgtaga

SEQ ID NO: 817864 - DNA, 120 bp, Artificial Sequence
  ENSG00000203709_115 (sequence is synthesized)
gcctagcgctggtgtcagaatcgcttgttgcaggttcatcttcagtgtctttcccacagccacatgctggggaaagacggcaaaggcgctagaggagcaggagaacaaagcaagctgccc

SEQ ID NO: 817865 - DNA, 120 bp, Artificial Sequence
  ENSG00000203709_116 (sequence is synthesized)
cagaccacccggctttcgcagaacccagatgatgctcctgtctccccctaagtataacgtgttatgtagtcagtatgatcccattcagtgcagaagtatcgcctaggaatttcctgcccc

SEQ ID NO: 817866 - DNA, 120 bp, Artificial Sequence
  ENSG00000203709_117 (sequence is synthesized)
acccaccctgttttgttcttaatgaagttcaagaacaaaatgagatgatagtcaagttatggagcaggctgcagtggatacaagggcagaaacacagtctttggagttagacctgggatc

SEQ ID NO: 817867 - DNA, 120 bp, Artificial Sequence
  ENSG00000203709_118 (sequence is synthesized)
tgcattgattggttgtgtgactgcagacaagttatttagcctcattaaggatgaatttcttcgcaaaaattggaataatacctgccccatacgactgttgtgagaattaaacaccgcaac

SEQ ID NO: 817868 - DNA, 120 bp, Artificial Sequence
  ENSG00000203709_119 (sequence is synthesized)
ttttgatgttcaaattctatttcttctccttctagcaacacatactgttagtgccaggaaccataaaaattataaggctgtatctagaggcctgaaaggaagctaaaatatacagtgtct

SEQ ID NO: 817869 - DNA, 120 bp, Artificial Sequence
  ENSG00000203709_120 (sequence is synthesized)
actctgtctcttttctcttggttatggtatcagaggaaatacacatattttcttagcttcaaaccaccaaaaaagatgatgcagtaaggagatgggaaatctaatttggaatacagtgtg

SEQ ID NO: 817870 - DNA, 120 bp, Artificial Sequence
  ENSG00000203709_121 (sequence is synthesized)
caaatcttattttcaagcagactttgaaaataaaactcaattcttacgttagaggattatctgcttaatacaattatagggtaccagtttttgaagtcacatcggggttaaataagattg

SEQ ID NO: 817871 - DNA, 120 bp, Artificial Sequence
  ENSG00000203709_122 (sequence is synthesized)
caggttcatggggtcatatttgaatgttctgatacttacatatggggtgggaaggaggaatgcatgcttttctcaagttaagacacataaaagagttgtcctggcccaggtgagactcgc

SEQ ID NO: 817872 - DNA, 120 bp, Artificial Sequence
  ENSG00000203709_123 (sequence is synthesized)
ctttgtgtagcagctggagcttcattccacaggcagatagggtgcttgtgtcctgatgaagtaagagaatatatctggaaacactttgtgtactgtgaaatactatacaaatgcagggca

SEQ ID NO: 817873 - DNA, 120 bp, Artificial Sequence
  ENSG00000203709_124 (sequence is synthesized)
gcagggcagtacaaatgtaaatattaatgtattttagtaataattttagcttttatttcatcatatataataatttgtagtgactggtgtgaagttaaatagaattaacctagaattaat

SEQ ID NO: 817874 - DNA, 120 bp, Artificial Sequence
  ENSG00000203709_125 (sequence is synthesized)
tattgctctcatctatttgaagcatcagctgtgcctttcatgttgccttgtgcagccctgtgtaacctcctctgtgcctttcccatggagcactgtgtcatatcacaagtagaactacaa

SEQ ID NO: 817875 - DNA, 120 bp, Artificial Sequence
  ENSG00000203709_126 (sequence is synthesized)
gaagatatttctcctcagggcagaggctgggtcttccgattgaatctcccttctttcttcattgagatcctcttcttctggaagctggtttcacatggtggcttagatttttccatcttt

SEQ ID NO: 817876 - DNA, 120 bp, Artificial Sequence
  ENSG00000203709_127 (sequence is synthesized)
gtatctagcaccatttgaaatcagtgttttaggagtaagaattgcagcacagccaagggtggactgcagaggaactgctgctcatggaactggctcctctcctcttgccacttgagtctg

SEQ ID NO: 817877 - DNA, 120 bp, Artificial Sequence
  ENSG00000203709_128 (sequence is synthesized)
ttcgagaagtccagggaagaacttgaagagcaaaatacactcttgagtttgttgggttttgggagaggtgacagtagagaagggggttgtgtttaaaataaacacagtggcttgagcagg

SEQ ID NO: 817878 - DNA, 120 bp, Artificial Sequence
  ENSG00000203709_129 (sequence is synthesized)
ggcagaggttgtgatgctatttctgttgactcctagcagccatcaccagcatgaatgtgttcgtagggcctttgagtgtggcgattgtcatattctgttggataacaatgtattgggtgt

SEQ ID NO: 817879 - DNA, 120 bp, Artificial Sequence
  ENSG00000203709_130 (sequence is synthesized)
cgattgtcatggggcaggggagagggcagtacacctggaggaccattttgtccacatcgacaccatcagtctgctcttagaggatgccctggagtattcggcgttgattgcggggcaccc

SEQ ID NO: 817880 - DNA, 120 bp, Artificial Sequence
  ENSG00000203709_131 (sequence is synthesized)
gaaatcagacttgccacctggactgtcgaggtgcagaccctgggagcaccactggcccatctcttacacaggctgaccgatttctcctggtgttcagagtctgtttttgtctagcaccat

SEQ ID NO: 817881 - DNA, 120 bp, Artificial Sequence
  ENSG00000203709_132 (sequence is synthesized)
ttgaaatcggttatgatgtagggggaaaagcagcagcctcgaagcctcatgccaactctgggcagcagcagcctgtggtttcctggaagatggatgggcagagaatagggaaggaagatc

SEQ ID NO: 817882 - DNA, 120 bp, Artificial Sequence
  ENSG00000203709_133 (sequence is synthesized)
atgcttttccctactaacttctgtaactgcatgtatgatacattattgcagaggtaagagatagtttaatggatttttaaaaacaaattactataatttatctgatgttctctagttgca

SEQ ID NO: 817883 - DNA, 120 bp, Artificial Sequence
  ENSG00000203709_134 (sequence is synthesized)
ttttgctgaaatgtagtgctgttctaaattctgtaaattgattgctgttgaattatctttctgttgagaagagtctattcatgcatcctgaccttaataaatactatgttcagtttatca

SEQ ID NO: 817884 - DNA, 120 bp, Artificial Sequence
  ENSG00000224808_0 (sequence is synthesized)
tagagggaagcctggagcacagtgggggcccctgagaggaggatcccacctaagagtgaagctggcatagagccggacggggcatatatctgctgatgccgtgtgaaggtctgagtccag

SEQ ID NO: 817885 - DNA, 120 bp, Artificial Sequence
  ENSG00000224808_1 (sequence is synthesized)
aaacaagagacgagatgatatttcagcttgggaaggagtcagagaacgtgcagatggccgaagagatgacctggtccagcctgaaccacaggaaaggcagatgggaaaagtctcccccac

SEQ ID NO: 817886 - DNA, 120 bp, Artificial Sequence
  ENSG00000224808_2 (sequence is synthesized)
atatgaggccccccacttcagcaagtttaaagttctccctgcaacttatttgaaaatgtttaaatctatagaaaagttgtaaaaataaaataatgaacgcccatcacccttcgcttacaa

SEQ ID NO: 817887 - DNA, 120 bp, Artificial Sequence
  ENSG00000224805_0 (sequence is synthesized)
gccgcgcctgaagctcaacttccgaggctctcatcaatctacgcttcctttggagcgtgcagccaccaggtggcagccgaggccacgggcagacagaaaagctcccgaaactgaaggact

SEQ ID NO: 817888 - DNA, 120 bp, Artificial Sequence
  ENSG00000224805_1 (sequence is synthesized)
gccaggcagcagagttccggagggctcccaggaccttcaaccagaaagagacagagcatatgcgcatatccctgcaaggaatgtactatagagccaattttaccggcaaaggaatggaag

SEQ ID NO: 817889 - DNA, 120 bp, Artificial Sequence
  ENSG00000224805_2 (sequence is synthesized)
catgattcccaagctcaagcttttggccacccctgcactgccagggacaaaaaaaaaaaaaaaaaaaaaccctgggaggagagccaagctagggagtcaagaccctccagccaggtctgg

SEQ ID NO: 817890 - DNA, 120 bp, Artificial Sequence
  ENSG00000224805_3 (sequence is synthesized)
atgggaggcaggtgcctccaccctggtcccagagcaagttctgctggcttcagccacctgacttccctgtgaaggtgggtagaggccagagcagactgtgtgtgattctggccccagccc

SEQ ID NO: 817891 - DNA, 120 bp, Artificial Sequence
  ENSG00000224805_4 (sequence is synthesized)
cagcacctctacccccacctttactacccctaggctgcgggaagaggctttgcccagcaatagtcctgatctaatggatccttgaagcacaataaacagatagtatttctgcatgtgtca

SEQ ID NO: 817892 - DNA, 120 bp, Artificial Sequence
  ENSG00000270777_0 (sequence is synthesized)
tttatatgaggtgaatctctagtgtctgggttcttttcctgaaagctgtgtttatggaattcatccatatcattgtatgtggttatagattctcattgctgtgtagtagttcaatggcat

SEQ ID NO: 817893 - DNA, 120 bp, Artificial Sequence
  ENSG00000270777_1 (sequence is synthesized)
catatcttccagtgaacacatatacgcagttctcttgggaatattcctaagtgtggaattgctgggtcgtagatgtacatttttaaaaatcataatattagagtcgagtatgcagaattg

SEQ ID NO: 817894 - DNA, 120 bp, Artificial Sequence
  ENSG00000270777_2 (sequence is synthesized)
actgaattctaaaaccaaaagctaattttttgaagtgtgaatttctgtttggggaaagtgaataatgtgaagaaacataacatttttatttatggaaataaatttcatgtcctctgagct

SEQ ID NO: 817895 - DNA, 120 bp, Artificial Sequence
  ENSG00000272642_0 (sequence is synthesized)
gcactttgaatatcttggcaactgtcagaagaaaaaacatcaaactgactgttttctcctgctgcattctcaccatgatactctcaagactttacttctgtgatgtgtagtcctccctcc

SEQ ID NO: 817896 - DNA, 120 bp, Artificial Sequence
  ENSG00000272642_1 (sequence is synthesized)
ccaccccgacacaccaagcaattctctggcagacaccagcacggtgtcctaaatttaattcaactctgacactgtctatctggaattagagtcagatctcacggatcaagggctcagtcc

SEQ ID NO: 817897 - DNA, 120 bp, Artificial Sequence
  ENSG00000272642_2 (sequence is synthesized)
cacaagactgccctctacgtcagataccaatggcaagtctggggctctgaacttctgaccaactggagatgaattgtggcctcctataaagcccctcttctggctcaagcatttgttgga

SEQ ID NO: 817898 - DNA, 120 bp, Artificial Sequence
  ENSG00000272642_3 (sequence is synthesized)
atggctcacaaaactcaggaaggacccacgtgtgaagcctgtgagtttgattgcactgcaggaggaccccctaaagctactgctgcaaaatgctcctagagcaaaggcccttcagggtcc

SEQ ID NO: 817899 - DNA, 120 bp, Artificial Sequence
  ENSG00000272642_4 (sequence is synthesized)
aggtgaccatggtactgctggcttggagaccacactctgaggggccagaatagaggcaattgctcagctctccatttttgtgttaaacgcatttacaccctcactgattgtttggtgtta

SEQ ID NO: 817900 - DNA, 120 bp, Artificial Sequence
  ENSG00000272642_5 (sequence is synthesized)
cattatcttctttcaaggagaattcatttgcatgaggcatgtagtggaggtcaattgtcttttctgcagtttgcctcacttctcttatggaactgccatgaaaccccatccatgggcaat

SEQ ID NO: 817901 - DNA, 120 bp, Artificial Sequence
  ENSG00000272642_6 (sequence is synthesized)
gtattcaaggaaagagattatcttacactctgactgtaaagatgagaagacgtaagtcctataattaccagtcgccttgagttcagcctcatggagaaacacagcatgaagaattgaagg

SEQ ID NO: 817902 - DNA, 120 bp, Artificial Sequence
  ENSG00000272642_7 (sequence is synthesized)
tgacattcacaaagaagctagtgaggacaacagctgggtcagcattcagtctttggcacgttctatctgtggttttatcatgtgccaaaaccttccctatgctgcctaagcttgttatgt

SEQ ID NO: 817903 - DNA, 120 bp, Artificial Sequence
  ENSG00000272642_8 (sequence is synthesized)
tgaattccttgggaaacacaaaactttgacttattcatgctctgactcaacagtttcactccagccctaccagtacctcacttcccaagagtccacctcataccttgagtgtcagagaca

SEQ ID NO: 817904 - DNA, 120 bp, Artificial Sequence
  ENSG00000272642_9 (sequence is synthesized)
tggacctttttttcagttgaaaatgtgacaggaataagtattttatatcttttttatgaagacttgaattgtatcaagccttggatttaatggcatattatggagtctatgatagaacat

SEQ ID NO: 817905 - DNA, 120 bp, Artificial Sequence
  ENSG00000272642_10 (sequence is synthesized)
catttggctctttgataatttgtaaaacaatagaatatgagcaggaacattcttggatttggtttgtggaacatgagagaattaggctttgtagcttagaagataagttcctgagagcag

SEQ ID NO: 817906 - DNA, 120 bp, Artificial Sequence
  ENSG00000272642_11 (sequence is synthesized)
agaagcagacacatcaatatatttgattaccagtaaacagagaaaggagagcacaggacatttttagttgacattgaggagaagggaaaaggagagagcagaacttaaaaaaaaagaaaa

SEQ ID NO: 817907 - DNA, 120 bp, Artificial Sequence
  ENSG00000272642_12 (sequence is synthesized)
atttgcatgagggctttaaatagaatcctgtgggaataactccttttaaagggaagttgaaagcacttaactcagccagaactcggtatgcatcaaaggaggaaaaaagaatataaagaa

SEQ ID NO: 817908 - DNA, 120 bp, Artificial Sequence
  ENSG00000258086_0 (sequence is synthesized)
actgggggaggaagagaggtgacagagtggaggaggtgaatggggaaggaaccaacactccaagactgtctggagaggagaaaaaggtctctgagaacttcctagagcctcgtgaggtca

SEQ ID NO: 817909 - DNA, 120 bp, Artificial Sequence
  ENSG00000258086_1 (sequence is synthesized)
gaacgattgttatcccagtatacagagaagaagaaggctcagagaggttcagcaggaagcagagtatgaataaagagcagaatgattctgccagagctcctctccctctgagctggacag

SEQ ID NO: 817910 - DNA, 120 bp, Artificial Sequence
  ENSG00000258086_2 (sequence is synthesized)
ttgagctctagggcagcccctaccctcagcctggggatacccaacaaacgcttccaagccctgagactccatgactcgctgggagtgtggaattgagtcttattctgttgcccaggctgg

SEQ ID NO: 817911 - DNA, 120 bp, Artificial Sequence
  ENSG00000258086_3 (sequence is synthesized)
agtgaagtggcgcgatctcggcccactgcaaccttcacctcccgagttcgagcgattcttgtgcctcagcccccggagtagctgggacaaaaatctttaactgtgattaaaaacacatat

SEQ ID NO: 817912 - DNA, 120 bp, Artificial Sequence
  ENSG00000262905_0 (sequence is synthesized)
attccctcggtggctaaatttaagccatttatactttatactttaaaacactgaaggtaggcctggccttctgtgggtttaggtgggggcagatcagcaatggccaagggagaatgtctt

SEQ ID NO: 817913 - DNA, 120 bp, Artificial Sequence
  ENSG00000262905_1 (sequence is synthesized)
ctctgtggttattcttcacagtgagacaatgaagaccccataagctaaaagagcaactgcatctgaggaggtacaatggcagcccagttctgaagcttcttcttagtggccagtagggac

SEQ ID NO: 817914 - DNA, 120 bp, Artificial Sequence
  ENSG00000262905_2 (sequence is synthesized)
tatatacgtgccgcacgctgctgtgtagtggagaaagggcaggcagtgagcaagcgtgtacaaggtatatacgtgccacatgctgctgtgtagtggagaaagggcaggcagcgagcaagc

SEQ ID NO: 817915 - DNA, 120 bp, Artificial Sequence
  ENSG00000262905_3 (sequence is synthesized)
gtgtgcagggtacatacgtgctgcacgctgctgtgtagtggagaaagggcaggcagccagtaagtgtgtgcagggtacatacgtgctgaacgtgtccatctctccagtcagattgattcg

SEQ ID NO: 817916 - DNA, 120 bp, Artificial Sequence
  ENSG00000223469_0 (sequence is synthesized)
tggccaggcaccaatcatctgcctccttctgtgcctgcctggctgcccctaccctggggctccctcctagcccccacctcacctactggctcactgagacagagccaaacatgaaaggga

SEQ ID NO: 817917 - DNA, 120 bp, Artificial Sequence
  ENSG00000223469_1 (sequence is synthesized)
caggtatcattaacagcctggagcactgtggcctgtccactctcaaccctctgctgcccaccccttcctggaatagaccccaggccacatacagagggggcaagcccaagccaggattga

SEQ ID NO: 817918 - DNA, 120 bp, Artificial Sequence
  ENSG00000223469_2 (sequence is synthesized)
aggagatcccatcttgggtctaaaggaatgggggtgaagactgcatcttgtcgttccagttccaccccattctggcatgggaagcatgtgtgggcttctactctatgggagattcatagc

SEQ ID NO: 817919 - DNA, 120 bp, Artificial Sequence
  ENSG00000262903_0 (sequence is synthesized)
ctgcagccacgatcatggtgacaaatgcgaagagccacgcgagcaccaggaagccgatggcaggccaggacacgcgctggccaccgcgctgggggcgagaggagggcagagatgtggacc

SEQ ID NO: 817920 - DNA, 120 bp, Artificial Sequence
  ENSG00000262903_1 (sequence is synthesized)
cacacagaggccacgccggggctgagcaaggacggccccggatagggcgggcttagagaggggcacggaggctggaccctggccttgaaggagcccctgcaaggtgggggctgcactggg

SEQ ID NO: 817921 - DNA, 120 bp, Artificial Sequence
  ENSG00000262903_2 (sequence is synthesized)
gttgtggcaggggaacatgtggaccacagaaagcatcacacctgggctggtgctggacatccccagcaccaaccacaccttctcatcgccagggcctcctgttcaggctgcttggactct

SEQ ID NO: 817922 - DNA, 120 bp, Artificial Sequence
  ENSG00000262903_3 (sequence is synthesized)
ctgggcgcctctcagcactcacttggagacgtggggtcggaactctggtggcctggtgcctctcccagccagcacaggacctggatgaatgaacacacacccttcctttcccaggctctg

SEQ ID NO: 817923 - DNA, 120 bp, Artificial Sequence
  ENSG00000262903_4 (sequence is synthesized)
ccgtgtcttctgtcaaaggtccctcctgctaccaccacggatgccacctaatccctgccctcttgaagagctacttccctcctcccttcctcccctgcccaagatctccctgcccctcaa

SEQ ID NO: 817924 - DNA, 120 bp, Artificial Sequence
  ENSG00000262903_5 (sequence is synthesized)
gtcctggctccagaggggagtcaggaggcccccggaagaaagcgtctccctcccggctctctgcttgccatcacccaggaggccgacgtggccagggtgactgcaggacagcttgtgtct

SEQ ID NO: 817925 - DNA, 120 bp, Artificial Sequence
  ENSG00000262903_6 (sequence is synthesized)
ttgcaagtcaaggtgggacagcttcgtcccaaagaccgagactacaggacttgacgccgcaatcctccagggtcggatggacccagcgcagaggagattcacgatggactgccctccctc

SEQ ID NO: 817926 - DNA, 120 bp, Artificial Sequence
  ENSG00000223466_0 (sequence is synthesized)
tttttttttttcctatcgtaagagctctctgaagtcttgtttgcagaactgtctgcaaggctgcttgtcaccttcgaatatactccatcaacatgctgccacttcatcttgtttaggctc

SEQ ID NO: 817927 - DNA, 120 bp, Artificial Sequence
  ENSG00000223466_1 (sequence is synthesized)
ttcgactgctttatagaaggacactgaagtccacatctatctccttgagacaggcaaagaaacaaatcctttatcctgtctcaaaaagagctgacaagcttttagtagtgtttatcttca

SEQ ID NO: 817928 - DNA, 120 bp, Artificial Sequence
  ENSG00000223466_2 (sequence is synthesized)
ctgaagggtgataaccttgaaaatgaaagtgaaaagagactgatacaattagataaagaaaccaggactcaaagatgaagtaacttgttcaaagtctggcagctactaagtgacagagct

SEQ ID NO: 817929 - DNA, 120 bp, Artificial Sequence
  ENSG00000223466_3 (sequence is synthesized)
gaaattcaagccaccaactacaaggttcatattctgttcacttcatcaggctgtttactgtaggcaaaaatactattttacagccataattaaacaactttctagcaaacggcatttcta

SEQ ID NO: 817930 - DNA, 120 bp, Artificial Sequence
  ENSG00000223466_4 (sequence is synthesized)
tcattctagcaccactagcattatcgcctcttctcccattgacatatttttttaaggcactaacctggaatttcttcttccagtacagatggactaagggggcgcaaacccccctgggtg

SEQ ID NO: 817931 - DNA, 120 bp, Artificial Sequence
  ENSG00000223466_5 (sequence is synthesized)
aaacaacaaaaagaaaaacagataaaatatattaaacaacagctctcaagatactagcatcaggcaacaaaccaaagtgatccctgtgagatagtaaacaaatgaggtgaaccctatgac

SEQ ID NO: 817932 - DNA, 120 bp, Artificial Sequence
  ENSG00000223466_6 (sequence is synthesized)
aggtgcaacttactgctttgcagagtttccaggccatgacactaagaggagatatccaagcagagcccagtgaatgacccagattgaggagacagagctgaaagtccaagaagacccaag

SEQ ID NO: 817933 - DNA, 120 bp, Artificial Sequence
  ENSG00000223466_7 (sequence is synthesized)
gcagctggaatttgcaagaccgagtaccagagaaaagagggctgagcagagatagaattccagagatttgtaaagggtctcccttaagtatttagcagagtattaatcattgtaggcatt

SEQ ID NO: 817934 - DNA, 120 bp, Artificial Sequence
  ENSG00000223466_8 (sequence is synthesized)
tgaggcagttacctgtggccaggaaaaaaaccacccaagaggattaaaggaaacagtgttttagcactcacacaaggccagaaatagcctattttcccatccagattgacttaacttcgt

SEQ ID NO: 817935 - DNA, 120 bp, Artificial Sequence
  ENSG00000223466_9 (sequence is synthesized)
aatttgtggggctttgggtaaaaaagtctactcattagttagtcttacctcagtagtagggaataagtagatgtagactaaacactatactggtaccaccaaaaaagctttaaaaacaga

SEQ ID NO: 817936 - DNA, 120 bp, Artificial Sequence
  ENSG00000223466_10 (sequence is synthesized)
aatgcttttcaagtaatttaactgcatcctagaacaaaagacatgcaattggagtccctgaaaggaggatgtgagaaaaaatattacaggaaataatgactaaaattgtttcaaatttga

SEQ ID NO: 817937 - DNA, 120 bp, Artificial Sequence
  ENSG00000223466_11 (sequence is synthesized)
tttcaaatttgatgaaaggatagacacaagaaactcaacaaaactcaaagcgtacaagaaacatgaagaagccaggtgcagtggctcatacttgtagtcccagctgcttgggaggctgag

SEQ ID NO: 817938 - DNA, 90 bp, Artificial Sequence
  ENSG00000223466_12 (sequence is synthesized)
caccactgtatcaaaaaaaaaaggaagagacatgaagaaaactacactaaggcacacaataatcaaactgctcaaaatcagtgataaagt

SEQ ID NO: 817939 - DNA, 120 bp, Artificial Sequence
  ENSG00000223466_13 (sequence is synthesized)
ggcacacaataatcaaactgctcaaaatcagtgataaagtgaaaatcttaaatgcaaccagaaggaaaaagacattatatacagagaaacaacgataaggatgacattagatttaacttc

SEQ ID NO: 817940 - DNA, 120 bp, Artificial Sequence
  ENSG00000223466_14 (sequence is synthesized)
agtaataatgcaatccagaaaacagtggaacaacatttttaaagtgctgaaagaaaaaagctagaattctactctcagtaaaaatgtctttataagaatttttttcctttttttcttttt

SEQ ID NO: 817941 - DNA, 88 bp, Artificial Sequence
  ENSG00000223466_15 (sequence is synthesized)
atgaagtctcactctgttgcccaggctgttcttgaactcctgagctcaaacaactctctgccttggactcctaaagtgctgggcagga

SEQ ID NO: 817942 - DNA, 120 bp, Artificial Sequence
  ENSG00000223466_16 (sequence is synthesized)
ggccaggacatttttggacatacgaagctgaaagagttcatcaccagcaaatccatactacaaaaaatgttaaagaaattcttcaggcagaagaaaaataccctatatgaaaattttaat

SEQ ID NO: 817943 - DNA, 120 bp, Artificial Sequence
  ENSG00000223466_17 (sequence is synthesized)
ctgcacaaataaatgaagagaaccaaaaatggtaatacatggcatgattgttaattttatgtgccaacttagtggccatgaggtgcccagattaaacattattcctggatgtgtttgtga

SEQ ID NO: 817944 - DNA, 120 bp, Artificial Sequence
  ENSG00000223466_18 (sequence is synthesized)
gggtgtttctgaatgagattacatttgaatcagcggactcagtaaagtagattgccctcccagtgtggatgggcctcatccaatctgttaggagcctaaatggaataaagtgtggcagaa

SEQ ID NO: 817945 - DNA, 120 bp, Artificial Sequence
  ENSG00000223466_19 (sequence is synthesized)
aggaaaattcaccccttttgcttcctgcctgtctggttgaactgagacatctcatcccatcttccctagcactcagattgggatttacaacaccaggtcccttggttctcaggcctttgg

SEQ ID NO: 817946 - DNA, 120 bp, Artificial Sequence
  ENSG00000223466_20 (sequence is synthesized)
acttggactgaattacaccactgctttccgcggtctcccaactcgtggatggcagactgtgggacttcttagcctccataatcatcggagccaatttctcataataaacatatttactat

SEQ ID NO: 817947 - DNA, 120 bp, Artificial Sequence
  ENSG00000223466_21 (sequence is synthesized)
attcttttatagttttatataagtcgaagttttctgttgtccacactggtttttctaaaactaaatttaaagttacagtttatttacaaaatatcagtgcatcatgttgtgactattttg

SEQ ID NO: 817948 - DNA, 120 bp, Artificial Sequence
  ENSG00000223466_22 (sequence is synthesized)
gttaaaaatatttctttgaaatgttttatcctaccattcttcccatatcatctatgccatttttttctctcccttgacatttgactccatgttatgtcatattcagagagatttttctaa

SEQ ID NO: 817949 - DNA, 120 bp, Artificial Sequence
  ENSG00000223466_23 (sequence is synthesized)
aataaatttcccagattacaggcaaatcttagaattctaattatttacatcttatagagtcaaggacagtaaagggtagatttgacatttcattaataacttgtgtattcaaatttccat

SEQ ID NO: 817950 - DNA, 120 bp, Artificial Sequence
  ENSG00000223466_24 (sequence is synthesized)
ttgtgttaaattgtgcccactcccgaggttccaacaaatatagatatgcctggcaagctagtagcttggttatccacaggtcattttgtgtgaacaaccatgagtcccttagaaaagaat

SEQ ID NO: 817951 - DNA, 120 bp, Artificial Sequence
  ENSG00000223466_25 (sequence is synthesized)
tcatcctgctgtgagttggctgaaagcaaaaaatacaaaaaagaaaagaaaagaagaaaggaaaatagctcatcctatcagaacaagaagtcagacacaaagatttggccactagaggag

SEQ ID NO: 817952 - DNA, 120 bp, Artificial Sequence
  ENSG00000223466_26 (sequence is synthesized)
agtggtgtctctgagtccaatgtcatgtctgctttgtccccatgccagctccacaagttttcatgtctaagtcacaggggggaaagagtccacgagcaaaaaatctaagtgtaactcaaa

SEQ ID NO: 817953 - DNA, 120 bp, Artificial Sequence
  ENSG00000223461_0 (sequence is synthesized)
aaagcacggactcattcatcacatacacgcagcacggctaagggccccgcacagtggcgaggtctctgctcccgggacgctcgcgccggccacacaacgctaggctgactcctggtgcct

SEQ ID NO: 817954 - DNA, 120 bp, Artificial Sequence
  ENSG00000223461_1 (sequence is synthesized)
cctctaggcccggtgggacctgaggacttccttagcgcaacgtctcactgaatgacagccacaaccaccgctgtccaggcgaggagtttccaggactgagaggctggcactaggccactg

SEQ ID NO: 817955 - DNA, 120 bp, Artificial Sequence
  ENSG00000223461_2 (sequence is synthesized)
gccgccgccgctcccgggaagggcccagaggcaacatcctggacagcagagctgcacgaagtccgaggcgccgcgagcccagacagtagttggggtgtccccagcgggaaggagaaggag

SEQ ID NO: 817956 - DNA, 120 bp, Artificial Sequence
  ENSG00000223461_3 (sequence is synthesized)
gctgtctggaaggaggagaaccaagaatgcacaaaggcctggcagtgggcagtcagcgttagggaagaaggtgaaggagcagagaaaagggggaagggccacggcaggtggggacccaac

SEQ ID NO: 817957 - DNA, 120 bp, Artificial Sequence
  ENSG00000236963_0 (sequence is synthesized)
agaagcagaagttgtgttttcagcctcagggagctctagtggagagacaagattcgtgcatgaaataattacgactgttgtagaaaaaagaaaagcctgtaggtctcccttcctccctcc

SEQ ID NO: 817958 - DNA, 120 bp, Artificial Sequence
  ENSG00000236963_1 (sequence is synthesized)
ttctctctgtctacctcagcatttctggggttcactctgctctgggtactgtgtaaaggactccacagccatcaacttcccttcatccttgccgtgtctttgaaagagctgagatttctt

SEQ ID NO: 817959 - DNA, 120 bp, Artificial Sequence
  ENSG00000236963_2 (sequence is synthesized)
tacatcacagtggttcaaggagaaaaacacagccagatccttcctcatctcaacataaattaaacccagaggcagtcagcgccacagtccacactcgtaaccgttacactcacctggaaa

SEQ ID NO: 817960 - DNA, 120 bp, Artificial Sequence
  ENSG00000236963_3 (sequence is synthesized)
gaaactgaggctcagagagggtccgtggcatgtccaaggttactctgctgttaattgttttcttggcactctctcccttctcacctgtgactacctgagtgtccccagaggcaaggaact

SEQ ID NO: 817961 - DNA, 120 bp, Artificial Sequence
  ENSG00000236963_4 (sequence is synthesized)
atgtgagccactccagtgttcccagccccaaggccaggcacagtggacatttattgctgaatgaatgaatcaagagagaggatcagaaagctgcagaggatgatagatctgcaaaattct

SEQ ID NO: 817962 - DNA, 120 bp, Artificial Sequence
  ENSG00000236963_5 (sequence is synthesized)
ccctgggtgaggcccaggctcagcttccagaacagctccatctgtctcccactcactgagattgaactaatgtcccacagttggacagacctgaaattgagctctgtgattttggatacc

SEQ ID NO: 817963 - DNA, 120 bp, Artificial Sequence
  ENSG00000236963_6 (sequence is synthesized)
tgcccctctgctggagattctgcatgtctgaggtaccagccattgccagaaactgggctatgttctctcctttcattgtgccatttcattctcaccccaaaatgaaaacacacaaaaaaa

SEQ ID NO: 817964 - DNA, 120 bp, Artificial Sequence
  ENSG00000236963_7 (sequence is synthesized)
actgcaaggactaagcccggccgcactccgagtttctcctcctcacagactggatgatgagaggcacagctgagtccggagcagactgagccacctaagaggggaggaaccgctgcagag

SEQ ID NO: 817965 - DNA, 120 bp, Artificial Sequence
  ENSG00000236963_8 (sequence is synthesized)
aagttccagagggagaacaagagagcggaggctcctggtggctggtgacagctgctcttggctgggagagcagagaacaggggacaggagagaagccccgagagtactgaagctgaggct

SEQ ID NO: 817966 - DNA, 120 bp, Artificial Sequence
  ENSG00000236963_9 (sequence is synthesized)
ggggcggtcttcacttccctctttcctcggcccttttcctgttctcttgtcttgtctctctttctctactttccttctccctagcccagtctctcaccgctcttcagcctctgggccttt

SEQ ID NO: 817967 - DNA, 120 bp, Artificial Sequence
  ENSG00000236963_10 (sequence is synthesized)
ccttcttcctctcttgccctcattcttccttctctgtccctcttgtcttctcttttacctcttctcttcttccctccttcctacagctatgccctcttccctcctttctcttgtccccaa

SEQ ID NO: 817968 - DNA, 120 bp, Artificial Sequence
  ENSG00000236963_11 (sequence is synthesized)
ccagggcattagaaatgcattccagttacactgatctgatcactgcatattgtatgcatgcatcaaaatatcacatgtaccccagaaatatgtaaattactgcatatcaataaaaagaaa

SEQ ID NO: 817969 - DNA, 120 bp, Artificial Sequence
  ENSG00000236963_12 (sequence is synthesized)
ggaggaggacctaagtggacccggaggctgagctggcctcgcagcactggtggtgggggagggctgatggtcaggactctgggtctttggcactgctgcctaggccgtggccctcagtct

SEQ ID NO: 817970 - DNA, 120 bp, Artificial Sequence
  ENSG00000236963_13 (sequence is synthesized)
gcccatctgtgaaatgagggggagctggtcctgactgcctcccagggaccctgtgaaaagccgctctgaactccttgccagagaggaggtttgccggtgccacaatccagcatttctggg

SEQ ID NO: 817971 - DNA, 120 bp, Artificial Sequence
  ENSG00000236963_14 (sequence is synthesized)
ccaaaatgggatgtaggcgatgggaaggaccctcaagacacagtcctgggctcccaggcaggaccaacccccaaacctgtccccccaggagcctgcagagccactgccctgacaggggac

SEQ ID NO: 817972 - DNA, 120 bp, Artificial Sequence
  ENSG00000236963_15 (sequence is synthesized)
tgccttccacggtgattgtgaggcctctcaagccacgtggaactatggagtctcaatatgctgcccaggctggagtgtggtggtgccaacatagctcattgcagccttgaacacccaggc

SEQ ID NO: 817973 - DNA, 120 bp, Artificial Sequence
  ENSG00000236963_16 (sequence is synthesized)
tcccaagtagctgggactacaggtgctccattaaatcaggaaccttgttgcttctggtatctggggtgtcccaccgctacccccatgtgagtgcctggcacatatagatacttgatacct

SEQ ID NO: 817974 - DNA, 120 bp, Artificial Sequence
  ENSG00000236963_17 (sequence is synthesized)
ctggaggagacttccaagcatgattggagctcccaatccgatgggggagacaggacacacatacgtgtaataagagtgtcccctgtgaggctgctgctgagagaagctctgggaagtgtt

SEQ ID NO: 817975 - DNA, 120 bp, Artificial Sequence
  ENSG00000236963_18 (sequence is synthesized)
gggcctggaaggcagtgcacgcccacagcgccctctgctgaacggtatcagaacagcaggcttggagggcgaaggcaattcctgcaaaggatccctggtttcctacccatgggaaacccc

SEQ ID NO: 817976 - DNA, 120 bp, Artificial Sequence
  ENSG00000236963_19 (sequence is synthesized)
agattctgaagccaggaatgaagggtagatggagcctgggtcagcacccgagaggacccatatgtgcaacctggaggatcttggagcttgggagtagcgtagggggtggttagttcagtt

SEQ ID NO: 817977 - DNA, 120 bp, Artificial Sequence
  ENSG00000236963_20 (sequence is synthesized)
cgggatggctgaggaagccgttttaaacaactttcaccgagatcttactgagggctcaggaacttggcatggccaccatcctgggtatccagggcccctccttcccccaggctaggagag

SEQ ID NO: 817978 - DNA, 120 bp, Artificial Sequence
  ENSG00000236963_21 (sequence is synthesized)
gaacccctcccagcagatgccttcccagactacccttgtctcacttatcatagaggacgtgtgccgccttccttctcccaggccctggatctggggttgctggacttggtgcgtgggtgg

SEQ ID NO: 817979 - DNA, 120 bp, Artificial Sequence
  ENSG00000236963_22 (sequence is synthesized)
tctggatgcttctaggatgaattcataattgggagattctaggtgatgctcagatggaaatgagggcaactgctgcttgatggcagaacaacagagcttggcagagctaggctggactcg

SEQ ID NO: 817980 - DNA, 120 bp, Artificial Sequence
  ENSG00000236963_23 (sequence is synthesized)
acttggcattttctctccgtttcagaccaggatacggattaattgagcccagcggagctcaggtttcccggggcggggggcaagcagtgccttggagggagtggggtactgtgggacgga

SEQ ID NO: 817981 - DNA, 120 bp, Artificial Sequence
  ENSG00000236963_24 (sequence is synthesized)
ggacccaggagacccagaatcctgaactgtcgggctgacttcgtctcctacagagttctttaacccaggagccccgagaacctgctttcctcaatgtgttcttcacccgtgagggactag

SEQ ID NO: 817982 - DNA, 71 bp, Artificial Sequence
  ENSG00000236963_25 (sequence is synthesized)
gcctttacaggatgcacagtggaggaaaagaacaaagaagcacgtgtcttacaaagggagaggcagtgcca

SEQ ID NO: 817983 - DNA, 120 bp, Artificial Sequence
  ENSG00000236963_26 (sequence is synthesized)
acaaagaagcacgtgtcttacaaagggagaggcagtgccaggctcatagaagtcagtgaggtactacaaaggggacgtcaggtccccccagcagcctagagccatggtgagggccaggga

SEQ ID NO: 817984 - DNA, 120 bp, Artificial Sequence
  ENSG00000236963_27 (sequence is synthesized)
gagggcttgtctatcacagtgacagtccattatccagctgaacatcacctaggagggccatgcatgtgaacagggtttctgtttaccatgtcagcttcagcctgggggctcctccaattt

SEQ ID NO: 817985 - DNA, 120 bp, Artificial Sequence
  ENSG00000236963_28 (sequence is synthesized)
ttcccattaggagcccttagcacatcgctgcaatgtttctggcttattgggaattcctattatagtccattgtcctccctcaaatctgaaaagggatgattgattttgaggaaacaaggc

SEQ ID NO: 817986 - DNA, 120 bp, Artificial Sequence
  ENSG00000236963_29 (sequence is synthesized)
aagttgctgaaggatttctaaatgagccttatgtttgattttggggtcagtctgtgtgggttccaagacaagatggtggctggtaatgattttcaaataaatatattttgtgatcacgaa

SEQ ID NO: 817987 - DNA, 120 bp, Artificial Sequence
  ENSG00000236963_30 (sequence is synthesized)
taaaagtatttttgtgcggggactgcaaggactaagcccggccgcactccgagtttctcctcctcacagatgcggagataagagcccagagaggttaagtggcccagccaagatcacaca

SEQ ID NO: 817988 - DNA, 120 bp, Artificial Sequence
  ENSG00000236961_0 (sequence is synthesized)
caggagctcccaacccctttgcaggctggctggccagagagagaatttcggacaggatttaggcctggaatttccctccaaatgggcggtgtcgatcagggtaaaatgaatacgtggaca

SEQ ID NO: 817989 - DNA, 120 bp, Artificial Sequence
  ENSG00000236961_1 (sequence is synthesized)
aggagagcagagaccaagccctgcagacattgtccgggctgtgccaaagacagactcacccctggactcttcagtgatataagccaataaattacttttttgttgttgtttttgtcttaa

SEQ ID NO: 817990 - DNA, 120 bp, Artificial Sequence
  ENSG00000234520_0 (sequence is synthesized)
ataaactggcatgttctgaaagaatcactctggatgctgtgtggagaaaacactgaaaagacactatcctcagaaattagatttgaaaaatgagcttcattttcgaagaacatattgaat

SEQ ID NO: 817991 - DNA, 120 bp, Artificial Sequence
  ENSG00000234520_1 (sequence is synthesized)
catctgcaggatggagaaccagcatggcatggaaggaacatgctcaaatccatcatttaaaaaagagaactccagcagcaatatgaataatagattggaagggagattaaccagattcaa

SEQ ID NO: 817992 - DNA, 120 bp, Artificial Sequence
  ENSG00000234520_2 (sequence is synthesized)
agaggcttacctcattgatgctgaacatcctaaaaagcttctgctgctttgagtcactgaaaaagaccaagaaacatgaatttaaaaaaaaatttcaaatgttataaaataaataatatg

SEQ ID NO: 817993 - DNA, 120 bp, Artificial Sequence
  ENSG00000234520_3 (sequence is synthesized)
agttgcagaatgggttgtgaagcacaacatttcatctctttgattctagacactatcctcagaaattagatttgaaaaatgagcttcattttcgaagaacatattggggagaataattga

SEQ ID NO: 817994 - DNA, 120 bp, Artificial Sequence
  ENSG00000234520_4 (sequence is synthesized)
ctccattcaagtgttcgctcctgtttcaatcaactatggctgaagagtgaggagacatttggaataaatatggcttctgggggcccattcctatggatcagcagctggcttctggaggcc

SEQ ID NO: 817995 - DNA, 120 bp, Artificial Sequence
  ENSG00000234520_5 (sequence is synthesized)
ctaggcaatgccattcaggacataggcacggacaaagatttcatgacgaagacgccaaaaacaactgcaacaaaagcaaaaattgacagatgggatctcattaaactaaagagcttccat

SEQ ID NO: 817996 - DNA, 120 bp, Artificial Sequence
  ENSG00000234520_6 (sequence is synthesized)
ctcattaaactaaagagcttccatacagcaaaagaagctaccatgagagtgaacagacaacctatagaaagggagaaaaattttgcaatctgttcatctgacaaaggtctaatatccagc

SEQ ID NO: 817997 - DNA, 79 bp, Artificial Sequence
  ENSG00000234520_7 (sequence is synthesized)
cccattagaaaatgggcaaaggacatgaaaagatacttctcaaaagacatacatgtggccaacaatcatacaaaaaaaa

SEQ ID NO: 817998 - DNA, 120 bp, Artificial Sequence
  ENSG00000234520_8 (sequence is synthesized)
tggatgctgtgtggagaaaacactgaaaagaattctagagtgaaagtttcatgaatataagaagcaagacaaggaagtggcttatgcttaaggccttaaaggcaaccactgtgacaatcc

SEQ ID NO: 817999 - DNA, 120 bp, Artificial Sequence
  ENSG00000234520_9 (sequence is synthesized)
agccattctctggagaattcagcagaaagccagttggaatctgtttccttcttctccattccacatattataatgtggcaactacataactcataattatagtctttatagggggagaat

SEQ ID NO: 818000 - DNA, 120 bp, Artificial Sequence
  ENSG00000234520_10 (sequence is synthesized)
ctcattatacctacaatgaataatttaaattcttctttggtagtccaggtaaataacttctcaaatagatttttttaagcatctgtataagttcaagatgtacatcacttcatgtagaat

SEQ ID NO: 818001 - DNA, 120 bp, Artificial Sequence
  ENSG00000234520_11 (sequence is synthesized)
aacatctcctaaaaagaactgaaatgcctcagtatacaaccagctgacctggctatcaaacacttatttagcacatattacatgatggacactttgatgtagatacggaccttgggttgt

SEQ ID NO: 818002 - DNA, 120 bp, Artificial Sequence
  ENSG00000234520_12 (sequence is synthesized)
gtcctcaaggatcatacagtgggttgaggaaataggatatgctatccataggaaagtaaataataatatgacagcttattttcaatgagaagtgaatagtacaaagaataggagttgcca

SEQ ID NO: 818003 - DNA, 120 bp, Artificial Sequence
  ENSG00000234520_13 (sequence is synthesized)
tttttcatgaaggaagtgttctttgtgctggacctttgagaaagtatagaatgtagattagcaaaaaggcatggaaaaggcatgataggtaggagaggcaagttaggcaaaggtccatta

SEQ ID NO: 818004 - DNA, 120 bp, Artificial Sequence
  ENSG00000234520_14 (sequence is synthesized)
gaattgctcaagatataatagaccaacttggcctgaaaaaggcctggaagtatcctcttttgtgctctgtgagaagtttgccaccatgtaaaaagtctaactaccctaaggcaaccatgc

SEQ ID NO: 818005 - DNA, 120 bp, Artificial Sequence
  ENSG00000234520_15 (sequence is synthesized)
tctgagaagcccaacctatccaggtggagaggtcctgtagagaattgaggccactggccctgagctcccagttgaaatagacaatatcaacatgtcagcagggtgaatgagaccatcttg

SEQ ID NO: 818006 - DNA, 120 bp, Artificial Sequence
  ENSG00000234520_16 (sequence is synthesized)
gaagtgggtcctccaagagtagttgagccatcctgcctaaatttcagcattttgagcaaataaatgatttataccattttaaatcactatatttttgagtgaatcactgacttttttctc

SEQ ID NO: 818007 - DNA, 120 bp, Artificial Sequence
  ENSG00000234520_17 (sequence is synthesized)
cctggctataatgagaaacccaagaaaataagtctttccattgcaggacagctaaattgcacaagcattcaaatttctcccctttgactcatactctgtcatctctattttggcttccac

SEQ ID NO: 818008 - DNA, 120 bp, Artificial Sequence
  ENSG00000234520_18 (sequence is synthesized)
ttttggagaaggtctccaccccctaccccggccctctcctcactgccccatgctttgagtgcaaacactccagattttcaaccttctcccctccatttcccacttctctttcccaagaat

SEQ ID NO: 818009 - DNA, 120 bp, Artificial Sequence
  ENSG00000234520_19 (sequence is synthesized)
ttagaaaagcattcaatgcccaaacacaaaagtattcataaacttaaggtaagaatttcaggcactgtattttatccactagattaaggaaccaagcagtcctttttgcctttcaaatca

SEQ ID NO: 818010 - DNA, 120 bp, Artificial Sequence
  ENSG00000234520_20 (sequence is synthesized)
ttctaagtaatcagctgcttgttctgctatataaagaactatctctgctctttgtactatctctgctctttaaactcatgcagttattcattcaataactacttactaagcctgagccac

SEQ ID NO: 818011 - DNA, 120 bp, Artificial Sequence
  ENSG00000234520_21 (sequence is synthesized)
atacagagtactggcctggcaactgtcaacatttcttcaacagcccagcaggcagcttttcctacctctcactaaaataccaataaaaacacagaagaacggagctcactgcagcactga

SEQ ID NO: 818012 - DNA, 120 bp, Artificial Sequence
  ENSG00000234520_22 (sequence is synthesized)
caatcaagatggaagccagcctacctctggctgtgggaaagattgatgattctaaagcagagagagacatcttctcagatataagcacatagcatttcccaccttcaatctacaaaaaaa

SEQ ID NO: 818013 - DNA, 120 bp, Artificial Sequence
  ENSG00000234520_23 (sequence is synthesized)
accctcagagaaagagagagtctttggagagttgtgaggagataagtgacataaactggcatgttctgaaagaatcactctggatgctgtgtggagaaaacactgaaaagtctttatagg

SEQ ID NO: 818014 - DNA, 120 bp, Artificial Sequence
  ENSG00000234520_24 (sequence is synthesized)
gccattctctggagaattcagcagaaagccagttggaaggtttgaaatggaaattacaagcgcaatattacagaagtgtggattttagttacaatgtctctatgagaaagtctaaaagtt

SEQ ID NO: 818015 - DNA, 120 bp, Artificial Sequence
  ENSG00000234520_25 (sequence is synthesized)
tttctttgacacctaaaacgggatgcaaccttcaagcatgaccgatctgttatttttaaacagaggggaaaatctggcaatgtaaatagaaagtatctgtttacataggttttttagaat

SEQ ID NO: 818016 - DNA, 120 bp, Artificial Sequence
  ENSG00000234520_26 (sequence is synthesized)
agcacaacatttcatctctttgattctagacactatcctcagaaattagatttgaaaaatgagcttcattttcgaagaacatattagtgaggagacatttggaataaatatggcttctgg

SEQ ID NO: 818017 - DNA, 120 bp, Artificial Sequence
  ENSG00000234520_27 (sequence is synthesized)
agccattctctggagaattcagcagaaagccagttggaagaatttgttatctcgattatggagggcgacaagtcccacagtctgccatctgcaggatggagaaccagagtgaggagacat

SEQ ID NO: 818018 - DNA, 81 bp, Artificial Sequence
  ENSG00000234520_28 (sequence is synthesized)
atagactaagatttcagtgattgagtctcatggcatgtgataaagagttagtgataaagatttaaatggcacataacatca

SEQ ID NO: 818019 - DNA, 120 bp, Artificial Sequence
  ENSG00000234520_29 (sequence is synthesized)
agagaaagagagagtctttggagagttgtgaggagataagtgacataaactggcatgttctgaaagaatcactctggatgctgtgtggagaaaacactgaaaagacactatcctcagaaa

SEQ ID NO: 818020 - DNA, 120 bp, Artificial Sequence
  ENSG00000234520_30 (sequence is synthesized)
tgaggagataagtgacataaactggcatgttctgaaagaatcactctggatgctgtgtggagaaaacactgaaaaggaatttgttatctcgattatggagggcgacaagtcccacagtct

SEQ ID NO: 818021 - DNA, 120 bp, Artificial Sequence
  ENSG00000228005_0 (sequence is synthesized)
aagcaaaagaaaggcataaagtctaatgagtatagcttctgagctggggaagcagaaggcatgggcaatgagattggggccacacacatggctgaaaagatttgagttaagattccgtta

SEQ ID NO: 818022 - DNA, 120 bp, Artificial Sequence
  ENSG00000228005_1 (sequence is synthesized)
aaaattgaaagcgaatcaaaagaagaaactttgcaaccttggaggccctctagtgcccaaatcagaatgtatggaagaatccagcccactgactccttcctcaggacgaagcacagcacg

SEQ ID NO: 818023 - DNA, 83 bp, Artificial Sequence
  ENSG00000228005_2 (sequence is synthesized)
ccagcccactgactccttcctcaggacgaagcacagcacgacagccttcaagttcctatgtgtaaaagtgattcctctcggct

SEQ ID NO: 818024 - DNA, 120 bp, Artificial Sequence
  ENSG00000228005_3 (sequence is synthesized)
tctcaaaaaaaaaaaaaaaaaaaagtgattcctctctgttagtgatctgccgcgtctcagatactttacaaacattattgatccccccacgatcaccttgcttggtggcattttttttct

SEQ ID NO: 818025 - DNA, 120 bp, Artificial Sequence
  ENSG00000228005_4 (sequence is synthesized)
tcaccttgcttggtggcattttttttctcacaagtttcagatgaagaaactgaagtcacagagataaagtgacttgctcaagggccccaagtgagtcaatccccaaaatctcctttgtga

SEQ ID NO: 818026 - DNA, 120 bp, Artificial Sequence
  ENSG00000228008_0 (sequence is synthesized)
cgccgggctgggcgggcggagtcgggccgtgggggcggggccgcgaggaaggcttggcctagcccaggccctccgcccatccgactcttccggcccttggaggcctggctcctgtacctt

SEQ ID NO: 818027 - DNA, 120 bp, Artificial Sequence
  ENSG00000228008_1 (sequence is synthesized)
tggctcctgtaccttcacctggcgtcttggcgcctttttctcagcggcctgtgggtggatgtgcatggtgtggcctggagagagcctggagctccatgagcacctgaagactgaaagagg

SEQ ID NO: 818028 - DNA, 120 bp, Artificial Sequence
  ENSG00000228008_2 (sequence is synthesized)
aaatggaagtgggggcggccacacccagtgcagggttgatactgtgccctgaggtgacataaaagacactccttttccaaagcagaattggccaggaaatgaataaacacccggagaaaa

SEQ ID NO: 818029 - DNA, 120 bp, Artificial Sequence
  ENSG00000228008_3 (sequence is synthesized)
tcttccggcccttggaggcctggctcctgtaccttcacctggcgtcttggcgcctttttctcagcggcctgtgggtggatgtgcatggtgtggcctggagagagaagctccacgtgcaaa

SEQ ID NO: 818030 - DNA, 120 bp, Artificial Sequence
  ENSG00000228008_4 (sequence is synthesized)
cagatagggaagcagagcctgtatcctgacagctggcctggtggccactcctgcactgagcctgaaggaccgcagagcacatggagggttgggcaccactgccaacagcatcaccccaca

SEQ ID NO: 818031 - DNA, 120 bp, Artificial Sequence
  ENSG00000228008_5 (sequence is synthesized)
cagaataaaaccaaagaaagaaggttggggagataatctggggattttctaggcccccagtcccatccatcaggacaatcaagagtaatggttcccagcaagagtcagagcccagaagga

SEQ ID NO: 818032 - DNA, 120 bp, Artificial Sequence
  ENSG00000228008_6 (sequence is synthesized)
aaaggcgcaggctgccttgtcagacagtgggccagaggaactaagaggctgcatgccctcaacaggaacctgcggtagcatccacagaggtcccctctgagactgagactaagaggagca

SEQ ID NO: 818033 - DNA, 120 bp, Artificial Sequence
  ENSG00000228008_7 (sequence is synthesized)
atccaaaacaaccaccacaacaccacaaggcccaggatgctgaatgccaaggaaactagggcatgtctaagtcttgcgcaagaacacacaggccacgtaaatctcatagaccagtaattc

SEQ ID NO: 818034 - DNA, 120 bp, Artificial Sequence
  ENSG00000267344_0 (sequence is synthesized)
gtcctcctctttctcctgccagcttcccaagcgctcgctcgacccgaagtccactctgctgctctcgctctcctctgggggcagctctgcggactggattcccatagcctcagagaggcg

SEQ ID NO: 818035 - DNA, 120 bp, Artificial Sequence
  ENSG00000267344_1 (sequence is synthesized)
ctcttcccttaaccaggttaactctccttacctccaccagtgagcctgagaacattcacctcccttagctgcatggagcccttaagctcctctaactgggtcagcattcctcaatacgtg

SEQ ID NO: 818036 - DNA, 120 bp, Artificial Sequence
  ENSG00000267344_2 (sequence is synthesized)
gctcccagttctgagcctgcacctccagctgtggccggagcactgccaacaactgcaccaatatcacctctctggctctggattcctacctctattaatacagccaaaagcttcactcaa

SEQ ID NO: 818037 - DNA, 120 bp, Artificial Sequence
  ENSG00000267345_0 (sequence is synthesized)
gcgcgtgtccgctccggcatcccggacactcctaccttgacagaggtgcagttcagggtccaagatctggctcccgggttccaagcccaatttcgggttcgccagcccagcaggtgcgga

SEQ ID NO: 818038 - DNA, 120 bp, Artificial Sequence
  ENSG00000267345_1 (sequence is synthesized)
gccaagctcctccacagacgcggccctctccccacgcgaggcctccaaatctcgcaaactaacggaaatgaagctacgctccgggagcggtgcctctgggaaatgtagtccagcgctccg

SEQ ID NO: 818039 - DNA, 120 bp, Artificial Sequence
  ENSG00000267345_2 (sequence is synthesized)
ggctcggcctgtggaacctgcttgtcccgcctgcagcgccccggaggtttctgggagtgcccgcccgcccgcgctcagtgcgcaggcgtcagacgctcagggcctgcgagagcgagctga

SEQ ID NO: 818040 - DNA, 120 bp, Artificial Sequence
  ENSG00000267345_3 (sequence is synthesized)
gtggtcccagggtctacccctggcaggagagagggtgggacccgccggccaggcaggattagttatctcttcagcccagttactggattcagctccgttatagtgtctgaccctggacag

SEQ ID NO: 818041 - DNA, 120 bp, Artificial Sequence
  ENSG00000267342_0 (sequence is synthesized)
gagatccgcgcccgggaaggcggaggggggcggcaggcccttctctgacaccctcgacgagcgaccgccgcaggggcctaggccacccctgcccacctcggcctggcccgctcgaaggtt

SEQ ID NO: 818042 - DNA, 120 bp, Artificial Sequence
  ENSG00000267342_1 (sequence is synthesized)
ccgcgttcccgccttgcgcccctccctccgttagggtccacgccaccccggctgagagctgagttcggctctctagggtcccagcctggcgggtccatcccacccccctgggccttcagc

SEQ ID NO: 818043 - DNA, 120 bp, Artificial Sequence
  ENSG00000267342_2 (sequence is synthesized)
ccaggtcctggagaccagaggctcgaaaaccccgccaggactccgggcttctgaccacgggccgcgcggaacctcttctggactcatctgccagtcgcctaacagcatagacccccaccc

SEQ ID NO: 818044 - DNA, 120 bp, Artificial Sequence
  ENSG00000267342_3 (sequence is synthesized)
ccaacaatcccccggggcttggcgatgaaacgggctggcgggctccctgcagacccgagcactgctgcactttttcctggagctgggtttcggacacttgccagactggggtgtctccct

SEQ ID NO: 818045 - DNA, 120 bp, Artificial Sequence
  ENSG00000267342_4 (sequence is synthesized)
tctctgggctacacgtaattttggttcttttaaagtaaacagcgagatggaaatgtctggtcaccaagagacagggaccagttaactggtatttttcaaatggccctgaatgaatacaca

SEQ ID NO: 818046 - DNA, 120 bp, Artificial Sequence
  ENSG00000267342_5 (sequence is synthesized)
tacaggcactccagcatttcccctgaagctgagcaggcaaggcgggtctggggcctagcgcccacctacctgacagtgtgtatcaggccagggggaaccccaggagagtacggcctttct

SEQ ID NO: 818047 - DNA, 120 bp, Artificial Sequence
  ENSG00000267342_6 (sequence is synthesized)
aaccaagctgggctgatgttgaggcggcacgagctctcactgctgcagcaagcactgcgtcctctgtgcggccatagacgaagtttctttctggacaaagtgcacggatctaccctccac

SEQ ID NO: 818048 - DNA, 120 bp, Artificial Sequence
  ENSG00000267342_7 (sequence is synthesized)
ctactagttagccagacttctgcttttgaaatcaaaagtgcggaaggtccgctgggccagctgatagctatgagaagatagagagcgtatgagagtgtggagtggggcaccagagcccct

SEQ ID NO: 818049 - DNA, 120 bp, Artificial Sequence
  ENSG00000267342_8 (sequence is synthesized)
caccccgccaccccaacagaggaggcagccaagctctgtgaacgccgggacatgctgcaaatacgggaagcgggctggaggagctccgagtgggggacagggctccagagagcatcagct

SEQ ID NO: 818050 - DNA, 120 bp, Artificial Sequence
  ENSG00000267342_9 (sequence is synthesized)
tgacagcaaggccatgcagccgcttccaggccccgggagccggtgggtccgccacagtcactgaggctagaaagccaggccacttttggctgcttttccctctgcgtcctgaagtctcca

SEQ ID NO: 818051 - DNA, 120 bp, Artificial Sequence
  ENSG00000267342_10 (sequence is synthesized)
ggacctcgtcagggagtgtgtgcccagcctggcacaggggcggccaacgcctcaggcacaaatccccagagggtcctgccgcataggctggtaacagttgaataaaaatgacggaaacca

SEQ ID NO: 818052 - DNA, 120 bp, Artificial Sequence
  ENSG00000267349_0 (sequence is synthesized)
atcaagacagagctggtttgaagagaaggaggtttgaacacagttacaccaacaactccacggaagccagaattaaattacctggaaggtgatatctcagtggctgaattttgaagttaa

SEQ ID NO: 818053 - DNA, 120 bp, Artificial Sequence
  ENSG00000267349_1 (sequence is synthesized)
aacaaaaatcacgctcttaatttggcatgggagagactcaagctaactaatgcacagtataccaaacgtctacttagaactgatcctgcattcccaatacagaacattagatattgtggt

SEQ ID NO: 818054 - DNA, 120 bp, Artificial Sequence
  ENSG00000267349_2 (sequence is synthesized)
tacatattgtggttagattcctaggtcagatacaaattgtaaaattaactcttgatgctgctgaaacactctatacttggaaggaaaattaacagtaaaaatgcattgatagcaatttaa

SEQ ID NO: 818055 - DNA, 120 bp, Artificial Sequence
  ENSG00000231901_0 (sequence is synthesized)
ttaaaattacctggaagtggacagagtatatttgatgagtgccaatttacagtggaagaaaaataaacattcagcttcaagactaatcaatcgacgaagccatggctgtgacaaacctaa

SEQ ID NO: 818056 - DNA, 120 bp, Artificial Sequence
  ENSG00000231901_1 (sequence is synthesized)
acttcacatgtcttaacagatctgcatacataatgcttcgaaggaaaataaagaaaaccaacaaagacaataagctgctccttcttcatttagcccatctcactgttgacttctccagag

SEQ ID NO: 818057 - DNA, 120 bp, Artificial Sequence
  ENSG00000231901_2 (sequence is synthesized)
acaagatctttcttggaaatcaacacctgtgaaagcaagagggtataagcagaattgtgcagaggaagaaggaagaacatggagctgctctccctgaagtgaaagatgggacccggagcc

SEQ ID NO: 818058 - DNA, 120 bp, Artificial Sequence
  ENSG00000231901_3 (sequence is synthesized)
cttaaccccagaggttcctttgcatctgtcctctgactgcatggaacacggtgttttaagtcattggattggatgacttccagggtcacttttactcatacattttatgattccagggtc

SEQ ID NO: 818059 - DNA, 120 bp, Artificial Sequence
  ENSG00000231901_4 (sequence is synthesized)
caagaatgacggtattatatgtaagaactctgaagactcaaagagaagaacaactagaattcttctttctttcctattgttcataaacatggtattaaaatgaccactaaagagcagaaa

SEQ ID NO: 818060 - DNA, 120 bp, Artificial Sequence
  ENSG00000224116_0 (sequence is synthesized)
cctgcggaggggccggctggctccccgcggacagaggcgagccgggagcgctcgcgcaccagccaactgcccccttctgagtgcggagcgcggtcctccagcgactgcactagcaaagtg

SEQ ID NO: 818061 - DNA, 120 bp, Artificial Sequence
  ENSG00000224116_1 (sequence is synthesized)
gcccgctgccaccgcgttattcacctagtggaggcggcctgatttactggcgacttcacaaacccaactccacgctggagcatttgcatggctctgttctcgcctcgaggagcagccact

SEQ ID NO: 818062 - DNA, 120 bp, Artificial Sequence
  ENSG00000224116_2 (sequence is synthesized)
agcgaacccggtggagcagcttgctgcgagaaggagccgggagggaaactgtgagccttggaaagatgggcaaatgctctgtgacaagccaccagggtagactggtactgaaaagaccct

SEQ ID NO: 818063 - DNA, 120 bp, Artificial Sequence
  ENSG00000224116_3 (sequence is synthesized)
actacacacaggggctctgtccctggctggaaagttacaagtcagcctacctctctgtgatctggtttccacacctactactctttatcccatgaggagcttctggaaactaaaatagca

SEQ ID NO: 818064 - DNA, 120 bp, Artificial Sequence
  ENSG00000224116_4 (sequence is synthesized)
gctgcccaggtagaagagtgttgaccaaaggacacatcaccagcacagactgttaatcatgtgactagagaaaactctcatggtggcattcaaatttccatatccttcttctatggaaat

SEQ ID NO: 818065 - DNA, 120 bp, Artificial Sequence
  ENSG00000224116_5 (sequence is synthesized)
ttctgagagacccagaaaagaagcgtaacgacgagggaaagtgattcctgcagacctgaacattccagacttaccaggtgatccagctgtctgtcagcgggaagaggctgaggcgccccc

SEQ ID NO: 818066 - DNA, 120 bp, Artificial Sequence
  ENSG00000224116_6 (sequence is synthesized)
ttctggtgcatctgaatagtaagaaaccctgtgtagaaagaaaccctgtagcaattgggcaccttctccgtgatctgtctgcttccaataccaaaaattgttgctttttaaatgacatcc

SEQ ID NO: 818067 - DNA, 120 bp, Artificial Sequence
  ENSG00000224116_7 (sequence is synthesized)
atcctaagcttaaaaaagacgcatattatttgtataaaatgttgaagacgcagaacaaaaaatgtaaatcacatgtaatcatcccttccagaaataatcgttattaaaatttctgtgtat

SEQ ID NO: 818068 - DNA, 120 bp, Artificial Sequence
  ENSG00000224116_8 (sequence is synthesized)
ttttcaatagtcaaattatttcttgaaaatattaatgactggggagtaacctttcaaataggtgtgtctttatttttaaaccagtccacaattattgtatattgaagtcatttcccaaat

SEQ ID NO: 818069 - DNA, 120 bp, Artificial Sequence
  ENSG00000224116_9 (sequence is synthesized)
tttgtaagtataagtattgcatccatccttatatgtatttaaatgcatctcttattatttccttgagataagttcctagaagtggaatcactggatttaaaaatgtggacatatttatgc

SEQ ID NO: 818070 - DNA, 120 bp, Artificial Sequence
  ENSG00000224116_10 (sequence is synthesized)
ctgcgctccagtctgggcgacagagtaagacttcatctcaaaaataaataaataaaattaaaattaaataagataaataaaaaataaaaatgtggacatatttaaatcttcatatatatt

SEQ ID NO: 818071 - DNA, 120 bp, Artificial Sequence
  ENSG00000224116_11 (sequence is synthesized)
accaaatgccctcctgaaagtttttacctgttacattccaaccaatagtgtaagggcatgactctttccctgtgttttgggatggatgttatcaaagttctctcccacccaggccaagta

SEQ ID NO: 818072 - DNA, 120 bp, Artificial Sequence
  ENSG00000224116_12 (sequence is synthesized)
tggtatatgctttgatttaatttgaatttttaaattattatttaaaatggacattttgttgtccatttgaacaactttcttttgagtcactgttcatgttctttgcccattgtttctctt

SEQ ID NO: 818073 - DNA, 120 bp, Artificial Sequence
  ENSG00000224116_13 (sequence is synthesized)
agtcactgttcatgttctttgcccattgtttctcttttattagtaagaaccctattgtcatttttatattttaaataaaatttcattgtatatacatttatattatctatagtaaagtat

SEQ ID NO: 818074 - DNA, 120 bp, Artificial Sequence
  ENSG00000224116_14 (sequence is synthesized)
gcctccttctcctggtgtccatttctggaactgctatttgtatattgcatgatattttatcaggaaaaaatataaaacagatctaatttcatgaaaatgctgttgccataatgctcagga

SEQ ID NO: 818075 - DNA, 120 bp, Artificial Sequence
  ENSG00000224116_15 (sequence is synthesized)
acttcgaatttcattgttgcatcgagccagctgatttgggagttgagttcctggataggcatactatccacagtgttttaccagagtgaaatcacaggataggctcagctgtaacaaact

SEQ ID NO: 818076 - DNA, 120 bp, Artificial Sequence
  ENSG00000224116_16 (sequence is synthesized)
atatcaaatctcagaagcttcaaaagactaaggtttatttctcactcatgccacccgtctactgagggtcatgcggagttctgctgagtgatgttctccatccaggatcccagccaggat

SEQ ID NO: 818077 - DNA, 120 bp, Artificial Sequence
  ENSG00000224116_17 (sequence is synthesized)
cccagctggtagagcagcctccacctggaacattgcctaagatattggaagggtacaccaaggcaatggtgaagctcaaagtggctcctaatggctggccagaatcagcctttgtatctc

SEQ ID NO: 818078 - DNA, 120 bp, Artificial Sequence
  ENSG00000224116_18 (sequence is synthesized)
cttggccaaagcaagtctcatgaccacagctaattcccagcaggtgaagatgtgatttcttccatccagaaagacagaaagccagaacatcttgaacagctctggtgactatcatatcct

SEQ ID NO: 818079 - DNA, 120 bp, Artificial Sequence
  ENSG00000224116_19 (sequence is synthesized)
tttcttctaagccaaatatgagattcttttatagcagctatgacattcaaggagctcttacagatgtccccaatactgtcacagtggagtttatcttacagaattgggccactctaagtg

SEQ ID NO: 818080 - DNA, 120 bp, Artificial Sequence
  ENSG00000224116_20 (sequence is synthesized)
actacctgttgcctcaaagggtaacaggtctaacagaaagaactgtactccagaattgtaagtcttctagattctgcaactggaagagtaagtggataagaatagccaagaacatgtgaa

SEQ ID NO: 818081 - DNA, 120 bp, Artificial Sequence
  ENSG00000224116_21 (sequence is synthesized)
agaagaatttgtggaagttaatttgtaatgaggacaatcataaattcttcctgagttaggtctccttatctgcaaagttcccatctgccaaggggacaagatacaacatgggaatcccaa

SEQ ID NO: 818082 - DNA, 120 bp, Artificial Sequence
  ENSG00000224116_22 (sequence is synthesized)
tggatgcagaagggaagtagaggtaaatttgcctcttctagccacacaatatctggtagaagaaacggagaaaaaggcaggggcagacaaccagagggaggggtagtgattctggggaaa

SEQ ID NO: 818083 - DNA, 120 bp, Artificial Sequence
  ENSG00000224116_23 (sequence is synthesized)
acagaaggcagagtatattcattacaatttaataaaactataggaggtgaccctcttgaaggctgcctccacacccaccagtcaaggctccatcaatgtaaactagcaatccaacatggt

SEQ ID NO: 818084 - DNA, 120 bp, Artificial Sequence
  ENSG00000224116_24 (sequence is synthesized)
ccagagagccaagattatttatcatgttatggacagattggcataggccctgaggggtactcaaaggccagtgggactgcttcaaggcccttgtgttggggtggtatccagcatagcaga

SEQ ID NO: 818085 - DNA, 120 bp, Artificial Sequence
  ENSG00000224116_25 (sequence is synthesized)
ctcctctaggttgatatcctgggccagaggggacagctggacagtgtcacattggttctgacaggtgcatggcacttgcatgagccagactggggctaagtcagccaggcaggctgtcag

SEQ ID NO: 818086 - DNA, 120 bp, Artificial Sequence
  ENSG00000224116_26 (sequence is synthesized)
gccctaatcacatcaaggatggccaaatcatgttccactagggaccagcttgagctgcaaatgaccaataggacaaatgatgtcatccagaggacccaaccacccggatctgagacacag

SEQ ID NO: 818087 - DNA, 120 bp, Artificial Sequence
  ENSG00000224116_27 (sequence is synthesized)
taagcctccatcatccacccagacatacgttaggaaactgaaagaggaagacaggagcctccaaagattgggtttttgtgtagaaggaactgaataatttaaagaatgttcagtttatga

SEQ ID NO: 818088 - DNA, 120 bp, Artificial Sequence
  ENSG00000224116_28 (sequence is synthesized)
ggtcagactgagatgaatgaatggagataaggtgtcacgaggaagatcagctcactgagagcagtagttctcaaccctggctgtacattgcccaatgcccagagctttcagaaaatactc

SEQ ID NO: 818089 - DNA, 120 bp, Artificial Sequence
  ENSG00000224116_29 (sequence is synthesized)
ccccccaccccaaaccacaactattatgttgcaattgctggtggtgggcttagatctgggcgtaggtgcatatgtatgcaaggacacatatgtacgtaatttctccaatgtttataatgt

SEQ ID NO: 818090 - DNA, 120 bp, Artificial Sequence
  ENSG00000224116_30 (sequence is synthesized)
acaaatatgaattatctaatagaaataaacagtgtcactaaagggcatgccctggcagatcctcagggctggtggaattggctccagaacttttgctcttggctcccattccccactggg

SEQ ID NO: 818091 - DNA, 120 bp, Artificial Sequence
  ENSG00000224116_31 (sequence is synthesized)
agaagcctgatacctgactccctgaacctggcctttggcttcagactctgaagtcaaatcccttccttctccctctggctcagtctccatcgactcaactagtcctgccacctcttttct

SEQ ID NO: 818092 - DNA, 120 bp, Artificial Sequence
  ENSG00000224116_32 (sequence is synthesized)
gcttggcccagccctagcaccctactcactggtgtagccattataggcagctcaatgtagaccagtcagcgttttggctggaaaatagacagatgtagctgaaagaagctgatggatctt

SEQ ID NO: 818093 - DNA, 120 bp, Artificial Sequence
  ENSG00000224116_33 (sequence is synthesized)
tctcaggactggcagttacccgccatgaggatgaaggccacatggggtatagtcaaggggtgagcacacgtccagtgaactggctgattcctgctgtggcaggtgcaacctgcaggccca

SEQ ID NO: 818094 - DNA, 120 bp, Artificial Sequence
  ENSG00000224116_34 (sequence is synthesized)
cggatgtcagatcttctacagaagggaagccagaattctagatttttatctgaaatttaccaatatttaaataccagtaaggaattcattttttattacattgtatgtgccaaatgaaaa

SEQ ID NO: 818095 - DNA, 120 bp, Artificial Sequence
  ENSG00000224116_35 (sequence is synthesized)
ataaacctatttatgagttagtcccagccccaggctccggccttggcctctggaaagcctctgaaacagtagggattgcgggaagaagggtgtgtggaggccaaggatctgctgcgcctt

SEQ ID NO: 818096 - DNA, 120 bp, Artificial Sequence
  ENSG00000224116_36 (sequence is synthesized)
tccagtcaggtgggtcacaatgagatggttaagtgtttgagcagactgtgaccacactaaaagtgatgcttcccctggggcagttttacaataaagataataaaaaccaacaaaaaaaaa

SEQ ID NO: 818097 - DNA, 120 bp, Artificial Sequence
  ENSG00000224116_37 (sequence is synthesized)
acacacacacacacaaacacacacaccccacacacaaaagtagcatctccacaatgttgcatgcatcaggaaagcaaatgtttttaccacaggctggctatgcctcatcctcttaaacta

SEQ ID NO: 818098 - DNA, 120 bp, Artificial Sequence
  ENSG00000224116_38 (sequence is synthesized)
acaggctggctatgcctcatcctcttaaactagcatcttgaggtctttgcagaagccattttatagatgcctacactcatcccattacttgcattctcatcctgagggtattttaaggag

SEQ ID NO: 818099 - DNA, 120 bp, Artificial Sequence
  ENSG00000224116_39 (sequence is synthesized)
tcaaaataaagtttacttaggcgtgtgtgagagacagaatgatagaccaaaagagaaggctagggcttcgtaatatttagataatgatgaaactgaaatggctgatgcagagtgcagtaa

SEQ ID NO: 818100 - DNA, 120 bp, Artificial Sequence
  ENSG00000224116_40 (sequence is synthesized)
ttatataggatactttattatttgggttcacctttgctcagtagtgaattataagcactctactaggtgagaggtttggcttccaaaatgaacagctggcgcaggatggaactgtcagac

SEQ ID NO: 818101 - DNA, 120 bp, Artificial Sequence
  ENSG00000224116_41 (sequence is synthesized)
catgtcacatgataaataaaataatacatagaaactttaggatctcctaattggaagcttcctttagacaacaaaagatgccaggctatctgctgccccctaactggtaccatgaagaac

SEQ ID NO: 818102 - DNA, 120 bp, Artificial Sequence
  ENSG00000224116_42 (sequence is synthesized)
agcacataactttttaagaaacaaagtctgattcaggtacaattagttagtggctgagtcaacctcctaagttatagttgtgaatttggccatttccatgaacctgtttgttgcgattaa

SEQ ID NO: 818103 - DNA, 120 bp, Artificial Sequence
  ENSG00000287344_0 (sequence is synthesized)
agtcgtggggaatgatggcatattctatggatgctgaaagggagggatgagaaagattttggaagccgacttcagagaccctgatggcatattgaattttggtaatgatgggtgtgaaga

SEQ ID NO: 818104 - DNA, 120 bp, Artificial Sequence
  ENSG00000287344_1 (sequence is synthesized)
ggaagtgacctaagtttctgcctaagtaacagagtagatggggactttgaaggctgaaggaggagagagatttggcaggaaccaagtctagaggagctgacactatctgggacatgcaat

SEQ ID NO: 818105 - DNA, 120 bp, Artificial Sequence
  ENSG00000287344_2 (sequence is synthesized)
tctcaagtggatggatggaatatgagtgtttgaatgtgaatattgcagcaatcaagcttttgctatgcagagaaggaatatgaaaaggaattaaagatcaggtatgagacaacaaaaaat

SEQ ID NO: 818106 - DNA, 120 bp, Artificial Sequence
  ENSG00000287344_3 (sequence is synthesized)
gaaaaggaactggataactgagtaaacttttggattagagctctctgcaaactgaaatggccaaacttttagatgaaatagaaaacaacaaattaaataattcttgtaatatatttgtaa

SEQ ID NO: 818107 - DNA, 120 bp, Artificial Sequence
  ENSG00000287344_4 (sequence is synthesized)
tcaaattaaacttccaaattttaacacagttgtagattcacacgcagttataaacaattatacggtaagattctgcttataatatcacaatcacgatattaatattgacacagtcaatat

SEQ ID NO: 818108 - DNA, 120 bp, Artificial Sequence
  ENSG00000287344_5 (sequence is synthesized)
acaaaacattctatcaccaggagcattctgactgttgacctattatagccacactgaacttattttcaccataccacgtacccctcaacccttaattcccagtacttaactccaggaaat

SEQ ID NO: 818109 - DNA, 120 bp, Artificial Sequence
  ENSG00000287344_6 (sequence is synthesized)
cacttaatccattctctatttctatgatttgtaacttcaagaatgttatgtaaacgcaataatacattatgtagcctttttggatttgttttttcactcagcattattgtttagaaactc

SEQ ID NO: 818110 - DNA, 120 bp, Artificial Sequence
  ENSG00000287344_7 (sequence is synthesized)
acctacattggtacaaatatcaatagtttgcttcttttctttgttgcatagtgttccactatatagatgtacctaagttattttcctttgtttatttgcttgcttgtttttgaccattta

SEQ ID NO: 818111 - DNA, 120 bp, Artificial Sequence
  ENSG00000287344_8 (sequence is synthesized)
tcctttgaaggacatctgagttgtttccatttggggagtattatgaataaaacttccataaatttccatgtataagttcttgtgtgatcgtaactttttgtctacgataaatgcccagtg

SEQ ID NO: 818112 - DNA, 120 bp, Artificial Sequence
  ENSG00000287344_9 (sequence is synthesized)
ctgcatgtttagtgttttttgtttttgtttttgttttcacattggaaaactatttttcaaaatagctgcaatgctatattcccactagcaaattatgactgatctattatagtttcttca

SEQ ID NO: 818113 - DNA, 120 bp, Artificial Sequence
  ENSG00000287344_10 (sequence is synthesized)
tatatttgcaagaatttggcattgtgacttttaaaaaagtttagcctttacaatagatatgtagtaatttcttgtggttttaattttaatttctcttttggctaatggcgttgaatatct

SEQ ID NO: 818114 - DNA, 120 bp, Artificial Sequence
  ENSG00000287344_11 (sequence is synthesized)
tttcatgtattaatttgctccttatacaaatctgtgtatccacttctgtgaaatatctgtgtaagtcttttggaagttttcttattgaatttttttgttgttgttttgtttcgtgttact

SEQ ID NO: 818115 - DNA, 120 bp, Artificial Sequence
  ENSG00000287344_12 (sequence is synthesized)
gttgagttttgagaatcctttaggtattctaggtaaaagtcctctgttggatatgtggtttgcaaatatttggctcaatctatagtttgtctttttatctcttaaccaggtagttggtga

SEQ ID NO: 818116 - DNA, 120 bp, Artificial Sequence
  ENSG00000287344_13 (sequence is synthesized)
gctaaagttttaaattttgatgaacttcaatttatcaatgtttcctgtcatgcttttggtataaattctaacttcttatttatcccaaactctgaagattttctcctatataatttctaa

SEQ ID NO: 818117 - DNA, 120 bp, Artificial Sequence
  ENSG00000287344_14 (sequence is synthesized)
atttttcatgaatttatatcttatattcaagtcattgtcttagttcattttgtgttgctgtaacaaaataactgaaattgggcaatttacaaacaatagaggtttacttggctcaaagtt

SEQ ID NO: 818118 - DNA, 120 bp, Artificial Sequence
  ENSG00000287344_15 (sequence is synthesized)
cctcccattgggagctacctcctaacactgttgcactggggagtaagttccaacacatgaactttggaggacacatttaaacctcagcagtcattgatccattttaagttattttttgta

SEQ ID NO: 818119 - DNA, 120 bp, Artificial Sequence
  ENSG00000287344_16 (sequence is synthesized)
taacacataacacttaatataagttttaaatttaaaaagtttaagttttctacctattgatggtgaattgctctagtactgttttgttgaaaatgctattcttccactcctgtattgctt

SEQ ID NO: 818120 - DNA, 120 bp, Artificial Sequence
  ENSG00000287344_17 (sequence is synthesized)
ttgaacctttgtcaaaaatatgttgggcatatttctgtgataaatttttttgggctgatttccacaatgcctattttattccaatagatctatgtgtctgtccctcttgcactaccacag

SEQ ID NO: 818121 - DNA, 120 bp, Artificial Sequence
  ENSG00000287345_0 (sequence is synthesized)
gttgcaggctatcgtgtgttagcctctacttctcccgcagagtttggagaaagcggcagcagagtgtgctgccgcaggctggagcctggaacctggagccctggagccttgaatggtgtg

SEQ ID NO: 818122 - DNA, 120 bp, Artificial Sequence
  ENSG00000287345_1 (sequence is synthesized)
tggtggcaatggagagaggcagctggcagtgacagctgctccgtgcttggctacaggaaggaaagaaggagaaggcacctaccataggctgtaggctagagcctgcaggactgcggctgg

SEQ ID NO: 818123 - DNA, 120 bp, Artificial Sequence
  ENSG00000287345_2 (sequence is synthesized)
cctcgctggctcgcctccctggctggcctcgctgtggttggtggcagcgacggatactgcagctggccagagtgtagaaaggcaatggggagcgcagtcctggtgggcccagcggttcct

SEQ ID NO: 818124 - DNA, 120 bp, Artificial Sequence
  ENSG00000287345_3 (sequence is synthesized)
gtggattggagccaggcagtgtgatgttaccagtcaccactccaggtcccagttcctggcccgcttgagccaaaaggagaggctggactttggagggtggatatgagtgccttcactgag

SEQ ID NO: 818125 - DNA, 120 bp, Artificial Sequence
  ENSG00000287345_4 (sequence is synthesized)
actggcccctgccacccagtggccaggatgacaagggtggctcctggagcctggactcacatacatcaccatgactgagccatagaagaaagaaacaaccaagaaatgggaagcacatgt

SEQ ID NO: 818126 - DNA, 120 bp, Artificial Sequence
  ENSG00000287345_5 (sequence is synthesized)
agagaaagctttgttcctgcctgagccagctgggacccacagaacagctcgcaaaactaagatatgggacccaagaatgtagaggaaggtgatgaagatgatgagagagcttactgtagc

SEQ ID NO: 818127 - DNA, 120 bp, Artificial Sequence
  ENSG00000287345_6 (sequence is synthesized)
acaagtcagagtagttttgggaactggggcacaggacagtgccagcaatggtcccaggttacagaaaaaatggtcagtgatgttagggccacagaaaggcactcgggacataagcactgc

SEQ ID NO: 818128 - DNA, 120 bp, Artificial Sequence
  ENSG00000287345_7 (sequence is synthesized)
tgcaaaggtcgacagatggtaaggaaccgatcaaaggacatcacagacagaaagtagccctctgcagcacacatggagaagtagaagaactggagcaggcagccagcataggagatgctc

SEQ ID NO: 818129 - DNA, 120 bp, Artificial Sequence
  ENSG00000287345_8 (sequence is synthesized)
ttgatatgggagatgagattggccaacattttgggacatcagaactaatgcagcagatctccaggaaagagaaattagccaagaggatgtacataggtgtgtggagtttctggcttgacc

SEQ ID NO: 818130 - DNA, 120 bp, Artificial Sequence
  ENSG00000287345_9 (sequence is synthesized)
acacagcgcagatgatggatgtgttacccatgagggtcagaaggtagatgagggagaagaccacaaagaggaggatcttggtctccctgcagcaggcaggggaagcccaggaggataaat

SEQ ID NO: 818131 - DNA, 120 bp, Artificial Sequence
  ENSG00000287345_10 (sequence is synthesized)
tcactcacaggcccagaaatgttattggcttctacgacactcattcttctaatctatgaaggaaatgaacgatagggaccactacaatagccattttctctctcttaaagtgttatattt

SEQ ID NO: 818132 - DNA, 120 bp, Artificial Sequence
  ENSG00000287345_11 (sequence is synthesized)
atttcttttgactccaagacaatcttttaatgcacttttgtgaaaagttccatatagttctcaattcaataactcacctcccatctttgtcttagttcaatgaaatcagggttatgggag

SEQ ID NO: 818133 - DNA, 120 bp, Artificial Sequence
  ENSG00000287345_12 (sequence is synthesized)
aatgtggctcaacatgttactacgtgatcccacagcctccactatatcatatctctgtttttcagagtgtaagtttcattgacatcacataacatagggtccaaacgactttctctattt

SEQ ID NO: 818134 - DNA, 120 bp, Artificial Sequence
  ENSG00000287345_13 (sequence is synthesized)
acgactttctctatttgcatttaaattaattctgctttgatgtaatgttttgtaatacacatattcaaatatttatacatataatttctccctattagaaaattttgtattgtattttga

SEQ ID NO: 818135 - DNA, 120 bp, Artificial Sequence
  ENSG00000275857_0 (sequence is synthesized)
gattagctgggccttcttcgggccaatgcgctgaagactgcggagatctcgggctgagccttcgttcagcagatccagtattttttggcgcccatgagccagtagctccgggctgatctg

SEQ ID NO: 818136 - DNA, 120 bp, Artificial Sequence
  ENSG00000275857_1 (sequence is synthesized)
tagctcccagcagtcctcagccttctcctcaggctctagggcatccagggactccagctgggaggcaaagggagatgagtgacacgcagggcagccaagtgctttgggctcctctgccaa

SEQ ID NO: 818137 - DNA, 120 bp, Artificial Sequence
  ENSG00000275857_2 (sequence is synthesized)
gtcactctctgggttaattcttattatgcaactagtgaaagagaggtactactcagtacccagtggtaatattagcacccttctcatggagttgctgtggagatcaagtgagttaatgaa

SEQ ID NO: 818138 - DNA, 120 bp, Artificial Sequence
  ENSG00000275857_3 (sequence is synthesized)
tgtaaagcacaaaataagctcttaaatctggtccctcatctctaaaagggaaagaataagctgtctttcaaaaagtacatgggagaaagtaatatgaataaatgatacctcccccaacca

SEQ ID NO: 818139 - DNA, 120 bp, Artificial Sequence
  ENSG00000275854_0 (sequence is synthesized)
gaaaaatccaaatccaaaagcttcatttttatttttggtatttaataagattcttttctggcaaagaattcaaggtaaaagatttttatacacactttagtattacaactattttaatta

SEQ ID NO: 818140 - DNA, 120 bp, Artificial Sequence
  ENSG00000275854_1 (sequence is synthesized)
ttactagtaattaaaacctctgttctgtgcatactgttttttccaagaaaccctcttattataataaaatcttgagtcatttcagctatgtgcaaagttgataaagtcactgactgaatt

SEQ ID NO: 818141 - DNA, 120 bp, Artificial Sequence
  ENSG00000275854_2 (sequence is synthesized)
tttttaaaaagcttgatgcttaaatgcttaaataaatgcttaaatctacttttaagcatttatgtcagtgaattcaaaatactattatctttaaatcactcaaaacccattttaaacttg

SEQ ID NO: 818142 - DNA, 120 bp, Artificial Sequence
  ENSG00000275854_3 (sequence is synthesized)
tcagttagttccaatggagtgttaaagggaggaaaagaagaaaaaattactcctaggactgagtaatattctgagctcatcaatctatctttaggtattgggaatatgcattaaaaacat

SEQ ID NO: 818143 - DNA, 120 bp, Artificial Sequence
  ENSG00000275854_4 (sequence is synthesized)
ttttttaccttgtctcgtgatacagctgaaggtaattctctggctagcctgtttctcctttgttcctaagaaacacaagcaaaacaaaagtgattatccaagtattgagatatatgccta

SEQ ID NO: 818144 - DNA, 120 bp, Artificial Sequence
  ENSG00000275854_5 (sequence is synthesized)
ctaaaaaatgttcatgttaattgaaaagtgtggagtaacttacagatacatcctctcactgttgggactcatgccataattatcatattttaaaataaataagaaatcatttaacccaaa

SEQ ID NO: 818145 - DNA, 120 bp, Artificial Sequence
  ENSG00000275852_0 (sequence is synthesized)
taggcttcttagctatgaaggtcatggaagctcaaggctgctggagaccacccctgctgtcacttagaactcatcctgcctgatcatgaagccaactagcaaaaaggagagccaagagat

SEQ ID NO: 818146 - DNA, 120 bp, Artificial Sequence
  ENSG00000275852_1 (sequence is synthesized)
gtcaggaggaaaataagtcctactgttgtgcagtaaggccctagtcaaccaaggaacatcactgtgtgtcacgtgtccaccttcctttcccttgcctcgcatgccctgcctcatccaggc

SEQ ID NO: 818147 - DNA, 120 bp, Artificial Sequence
  ENSG00000275852_2 (sequence is synthesized)
agcacgcaggaagctttatggaacatccaacacctcaagactcagctcagacaccacctcctccaggaagcctcgcctggtgccctagtgtgccttctcaggctggttcatagcccatct

SEQ ID NO: 818148 - DNA, 120 bp, Artificial Sequence
  ENSG00000275852_3 (sequence is synthesized)
ctgctggtccacagcctttattgagggcagcaccatgcataagggctagactctggaacccagatgtccctgattggaatgtcagctcttgccagctgtgtgaccttgaacgtacgagta

SEQ ID NO: 818149 - DNA, 120 bp, Artificial Sequence
  ENSG00000275852_4 (sequence is synthesized)
acctatccgttccttggtttcatcacctataaaattaacatcagtctctctacctagtcctactttgttgtgagatttgtcactgagttagaacagaggccagcacatggctactcctca

SEQ ID NO: 818150 - DNA, 120 bp, Artificial Sequence
  ENSG00000225442_0 (sequence is synthesized)
aacacttggaagctcctcaggagcagaaacaacgtgtggttacctttttgtattcctgatggtgctcagcatagaatgcatcacatgacatgtgtcaatatttatttgatgaatgatctg

SEQ ID NO: 818151 - DNA, 120 bp, Artificial Sequence
  ENSG00000225442_1 (sequence is synthesized)
acatgacatggaataatccaggaatgccaaggcatggattcaccacttctgaaaaaacctgggaaactgctacaaaaggggttgttctgatgatccactggcaaagaggaggcacaaaaa

SEQ ID NO: 818152 - DNA, 120 bp, Artificial Sequence
  ENSG00000225442_2 (sequence is synthesized)
cagccaggctccagaattcactgaggtgaaatgagttaatgaaaatcaaaacagaggagcagcaagaccagtggaaataactccaatatccaaggagtgaccaactggcacagatcatcc

SEQ ID NO: 818153 - DNA, 120 bp, Artificial Sequence
  ENSG00000225442_3 (sequence is synthesized)
cccgctctactctccctccaaaagccagaccactgggaagtgtccacggcggtcagatgccatcaggagctgaaatgaaatggactatgcggtgtatgtcttcctttgtgtggggagaag

SEQ ID NO: 818154 - DNA, 70 bp, Artificial Sequence
  ENSG00000225442_4 (sequence is synthesized)
agccccaaatcatcacaagggtccatgacctattttcaacatttcaacaagcccaatccagcctgggcag

SEQ ID NO: 818155 - DNA, 120 bp, Artificial Sequence
  ENSG00000225442_5 (sequence is synthesized)
ggaagcaatttatagggtgcaagcggcagcactgtaagaaagtttgtgaggaaggagagttttgtaaccggagtcaaatccagaggggcttcctggcagagaaacaaaccacaggtcagg

SEQ ID NO: 818156 - DNA, 120 bp, Artificial Sequence
  ENSG00000225442_6 (sequence is synthesized)
ccaatgatggtcccagctctagcggggccctgccctgggcaatgcacattttagtaagaggtaagccaaggcctctgggcccccaacccttcactagtgctagtgtgctgaacccctggc

SEQ ID NO: 818157 - DNA, 120 bp, Artificial Sequence
  ENSG00000225442_7 (sequence is synthesized)
tcaggaagaagggaggtgctacaggggcaggccttggcatggaaggaattgggagctgctcggtataatgcaaacctttaactgctcttttgcctcttccattttactgttcctagagtc

SEQ ID NO: 818158 - DNA, 120 bp, Artificial Sequence
  ENSG00000225444_0 (sequence is synthesized)
acttcagacttctgcttatccattttggttcattcccaaggacatactgatttgtaaccatgttagaaatatacctacctgtcactaaaatacatgtcaagttacataatctgttaagtg

SEQ ID NO: 818159 - DNA, 120 bp, Artificial Sequence
  ENSG00000225444_1 (sequence is synthesized)
tgaatctttttgtgttcctttccaagtttggaagcagaagagagacaacggagtaggcagatggagaaacaaatattgactttattactaaataaatctggtattggaataggattccta

SEQ ID NO: 818160 - DNA, 120 bp, Artificial Sequence
  ENSG00000225444_2 (sequence is synthesized)
accaaagttgttcctgtcttgtactacagggctctctctactgactggagatctcaggagaaatcatgactcctttcgcctcacctggctgaaccacctggatgtctttccatcattctc

SEQ ID NO: 818161 - DNA, 120 bp, Artificial Sequence
  ENSG00000225444_3 (sequence is synthesized)
tgtctattattaccctatagaatgaccttctttcttatatgtgttcaggaagggcaaaaaaaaaaatctcctagatgtatttctctctttttaaaaactgtaagtactcagaacaatacc

SEQ ID NO: 818162 - DNA, 120 bp, Artificial Sequence
  ENSG00000225444_4 (sequence is synthesized)
aagaaaaatacaaaagcaaagctttttatagctaattagaaacttccttgcaattctgaagtgtatgtgatattgtgtattgttacaataatacacaatattattaaagtatatgtgata

SEQ ID NO: 818163 - DNA, 120 bp, Artificial Sequence
  ENSG00000225446_0 (sequence is synthesized)
cctgccccctccctccgctcctcaacgcccgccgggtgcaatctgctctctccgggagacgaacgcgaagcgacgtggaaacccttccaccaaaatgagctgtgatatccttttgatggc

SEQ ID NO: 818164 - DNA, 120 bp, Artificial Sequence
  ENSG00000225446_1 (sequence is synthesized)
tataatttattccaaatcgtccctggactgaaacgatcaattagcagcccgaaacgcactgtgaagtaaattgtcacactctctattacaggatggttatcatatatttataaggtgtgt

SEQ ID NO: 818165 - DNA, 120 bp, Artificial Sequence
  ENSG00000225446_2 (sequence is synthesized)
tttctgcaatcagaaccaacaaggtgttgagcgatcagtcataaacgcacttcttcaaaaagagagggagagaagctcagcattgtgtggcgggggaataatcctcatgacagttctctc

SEQ ID NO: 818166 - DNA, 120 bp, Artificial Sequence
  ENSG00000225446_3 (sequence is synthesized)
cccacccagtgatgttttgtcttggcacctgggaagtgcagtgagggctggagctctggacggactctcttcgccacgcgtgcccctggaagcagggtccctgtgaactacggagagacc

SEQ ID NO: 818167 - DNA, 120 bp, Artificial Sequence
  ENSG00000225446_4 (sequence is synthesized)
ccagaggagagatttccttattgtgtaaacacaaatcagtcagttacacctgccatctagcaaaacagacctcacccaaggtcaatgatggctgctaaccttggggttgatgggggaagg

SEQ ID NO: 818168 - DNA, 120 bp, Artificial Sequence
  ENSG00000225446_5 (sequence is synthesized)
tggatgcagcagaccccagggaaaacagagcaccgtgaggaggagccagaggaggccggaggcccttgtctcagacatccagctctgagagtgaaatgttgcttcctaatggactttaaa

SEQ ID NO: 818169 - DNA, 120 bp, Artificial Sequence
  ENSG00000225446_6 (sequence is synthesized)
gaaatactaattatctaatcacggcatgctgtataacgtacttgtctgcccaattagctaggacaattattaaaattcagaggcctaattatgtctcaatttaatgctggcaaacttgca

SEQ ID NO: 818170 - DNA, 120 bp, Artificial Sequence
  ENSG00000225446_7 (sequence is synthesized)
tacagagcagtaattaaaatcctctctttccctctgcctttagggcaggggatgattaggccctgtcagggggtgtactgaaccaaaccagtgaagcgtattgtgcaacatgaccctgca

SEQ ID NO: 818171 - DNA, 120 bp, Artificial Sequence
  ENSG00000225446_8 (sequence is synthesized)
ttgttaagtgtgtcaacatattaacctgaattcccttcagcccccacataatcacatttggtggaagaatgaaggagctaaaacatgaagcatttttttaaaaaaacataaattcatttt

SEQ ID NO: 818172 - DNA, 120 bp, Artificial Sequence
  ENSG00000225446_9 (sequence is synthesized)
aattaatgctgtgagagttctggtgaatttcacgtttccaagtgctggaagacgtaagactggttcatctaattactagcaaatttgttcttgtaaaaactactttttttactcatttaa

SEQ ID NO: 818173 - DNA, 120 bp, Artificial Sequence
  ENSG00000225446_10 (sequence is synthesized)
ataaaataatttttgggggtagcattaaaaaaaaaaagccctagttagcttccagtaatacagttgattaccagctttgatgatggaacacaagtgaatgttgacttccaaaagattcaa

SEQ ID NO: 818174 - DNA, 120 bp, Artificial Sequence
  ENSG00000225446_11 (sequence is synthesized)
acccaagactggaggcattgaggggaaaaaatactacaatttaatacttgaaagatgttaataaaagtcgaacattacaaatcataatattgaaataaattcaaaatatttatcttttga

SEQ ID NO: 818175 - DNA, 120 bp, Artificial Sequence
  ENSG00000225446_12 (sequence is synthesized)
ggcatcgcctggctgcgccgtcccggcgggccggccctctccacgccctctcctggggtttgcggtgggcacagctccctccagactgggtctctccactagcctcctccccaactgcaa

SEQ ID NO: 818176 - DNA, 120 bp, Artificial Sequence
  ENSG00000225446_13 (sequence is synthesized)
cgtgggaaccagagctatccgagtcacgagccccaagtgcacacaaagcccccaacggggccacggcgcctccacgcctcgctacctccagctccaggagcgcagaacgcagcgccctgg

SEQ ID NO: 818177 - DNA, 120 bp, Artificial Sequence
  ENSG00000259275_0 (sequence is synthesized)
aaggaaaatcgtttgggtaaacagccaagcttccaggcttaacgcccggctcccgcccccgcccctccatcccctcctgcctcccccactcgccttcaaccccacccgccacccacactc

SEQ ID NO: 818178 - DNA, 120 bp, Artificial Sequence
  ENSG00000259275_1 (sequence is synthesized)
ggctccgcagccgggccccgagcgagctccgcgagtcctggcgagagccgagggctccccgggttcaaagggccgcagccccgagggaacgccctccttgctgtgccccggggggcagaa

SEQ ID NO: 818179 - DNA, 120 bp, Artificial Sequence
  ENSG00000259275_2 (sequence is synthesized)
actactgcccagacatgtgaattcatgtgagagctggtatgagttgtggtcacaggacaaaggaggctaaccgggcatgattctcaactttggcttcaatcatgccattttctaccaact

SEQ ID NO: 818180 - DNA, 120 bp, Artificial Sequence
  ENSG00000259275_3 (sequence is synthesized)
aagcctctagagtcaaacttgaagaactatcacgtggaactcttgaagaatggactttctttccacagtgaatacttcattgattttcgctggttccctgaataaagcagcaacaaaccc

SEQ ID NO: 818181 - DNA, 120 bp, Artificial Sequence
  ENSG00000259275_4 (sequence is synthesized)
ccccgcccccggccccgggaccccggagcggagattgacaggtgtcgctcgttaggacaatgccttccaggcttagtaattctgacttttgaaatctcctgtcgtgaacaaatctacact

SEQ ID NO: 818182 - DNA, 120 bp, Artificial Sequence
  ENSG00000259275_5 (sequence is synthesized)
gcactttatttcttgccccgtcctggaattcagccactcctgcactacatttcttaaggtgaagaagtgaaagacgaagacaccaatccaagtgaacgtgtgttattctcttctataatg

SEQ ID NO: 818183 - DNA, 120 bp, Artificial Sequence
  ENSG00000259275_6 (sequence is synthesized)
aaattcttccaaagcaacggaaagtttccttgaaatacttttatctagtcacacttacatagtgtaatgtctctctcttacagcattgtacagtttgggatttgtttttaatcctgtgga

SEQ ID NO: 818184 - DNA, 120 bp, Artificial Sequence
  ENSG00000259275_7 (sequence is synthesized)
aaatgtcctaacagggctttggtgtatctttgttccaatttctacattgcttggggagggggagaagctttctttgtattaaatgaaatacaccactacttcattaaataaatagacacc

SEQ ID NO: 818185 - DNA, 120 bp, Artificial Sequence
  ENSG00000259275_8 (sequence is synthesized)
tcaaccattagttgctaatgaaacaaaaatctaagtaaaacatctaactatccaaatactacattttctctacctttgccccaaaatgtgcctcatctccctgcacctccaaataatatt

SEQ ID NO: 818186 - DNA, 120 bp, Artificial Sequence
  ENSG00000259275_9 (sequence is synthesized)
tctagtgttttcattttattagttttgcaatgtcactgtccagatagaattattcgatgacttaaaacaactttcgtaagattttcaagccctaaattaaaaaatcatatttcaatacaa

SEQ ID NO: 818187 - DNA, 120 bp, Artificial Sequence
  ENSG00000259275_10 (sequence is synthesized)
cagagtctattgatgcaaaccagaattttgaagcttggttcacaaagttgagacaactccagctttctttgttttgaagttcatggattcgaatgccaaagacacaatattggttttgat

SEQ ID NO: 818188 - DNA, 120 bp, Artificial Sequence
  ENSG00000259275_11 (sequence is synthesized)
gcacttgcagtagcacaaagtgaagtcctggcggccttatcctagtttcataaaagaaaaaaaagttaaagagatggggaagataatagctaaaaaacaacaacaaaaaagctgaattca

SEQ ID NO: 818189 - DNA, 120 bp, Artificial Sequence
  ENSG00000259275_12 (sequence is synthesized)
aactgcgatgactttatcaaaggactgtcctactgacattcaacataacatcaaaattaacatcaccttgccaatatttgtagtttagtcacaacttttcaactacactctactctcttt

SEQ ID NO: 818190 - DNA, 120 bp, Artificial Sequence
  ENSG00000259275_13 (sequence is synthesized)
tggggaaaagaaagttacgcatgctagctgttttcaagtttggcagatgcactttgaaaatactcgttggagagtgagattaaaaacaaaaacgctgtgtaatatttctattaccaggag

SEQ ID NO: 818191 - DNA, 120 bp, Artificial Sequence
  ENSG00000259275_14 (sequence is synthesized)
caaaattgtttctatgaaaaaatatttgaggaacatctttaatttgttgctggaattgatttgtgtgtgtttgttgcttaattctctgttctggtcaaaaagctgtcaagttggatcagg

SEQ ID NO: 818192 - DNA, 120 bp, Artificial Sequence
  ENSG00000259275_15 (sequence is synthesized)
ccgtttgatcctatcctatttccagtcttcttctaggacctgtgagcacgggcaaacactttttaattatcctgatcaagtgtgggggacatccttttgctgaccccacttgtaatcaac

SEQ ID NO: 818193 - DNA, 120 bp, Artificial Sequence
  ENSG00000259275_16 (sequence is synthesized)
tgtgatctcctagaagcaggcgaattgattgcttctgtcctccccaactaaccagaagagtaggtcttgcattatcctgggcctttgaaaaacccaactcagtgattgattttgtggctg

SEQ ID NO: 818194 - DNA, 120 bp, Artificial Sequence
  ENSG00000259275_17 (sequence is synthesized)
ttaaatttccttagcattaacttctctgagtggcccagtctcttatgggacaatgtaataaggatctatcggttttactgcctagtacatatctttaatgcctaagtaaatctctcttat

SEQ ID NO: 818195 - DNA, 120 bp, Artificial Sequence
  ENSG00000259275_18 (sequence is synthesized)
cctgggccacggtatgctactgctcataccggccttgctgggagaggatccttgatgactgggacctacatggatgccaggatgccaaggagtcaacgccttgttccctgggtagctggc

SEQ ID NO: 818196 - DNA, 120 bp, Artificial Sequence
  ENSG00000259275_19 (sequence is synthesized)
tcaggctggttctaacagagtctattgatgcaaaccagaattttgaagcttggttcacaaagttgagacaactccagctttctttgttttggcttagtaattctgacttttgaaatctcc

SEQ ID NO: 818197 - DNA, 120 bp, Artificial Sequence
  ENSG00000259275_20 (sequence is synthesized)
tctgcttcagccactatgtcaaatgtgttacactctttaactaacttaaatattgtctataaccctttgggtggtgttgtttctgtttcatggatgaagatgaagatattgacacttcga

SEQ ID NO: 818198 - DNA, 120 bp, Artificial Sequence
  ENSG00000259275_21 (sequence is synthesized)
ggttacaaaactatcaccatcattaacagcaacaatggtgcttagctctgattgagaacttactctgttcctaaaacatggaaagcatgtcacaaatcttcaaacaactgggtaagcatg

SEQ ID NO: 818199 - DNA, 120 bp, Artificial Sequence
  ENSG00000259275_22 (sequence is synthesized)
tcacaaatctgcaaacaagtttgtaaaataaagactattaacattcccattttacagatgaagaaactgaggcctagagaattaatgatgtgccccatgtcacagaatgcagtatagagg

SEQ ID NO: 818200 - DNA, 120 bp, Artificial Sequence
  ENSG00000259275_23 (sequence is synthesized)
ctaaaaattaatgtcaggtttatacaaattattttattaagaaaagaggccaagtgtggtggctcatgcctataatcccaccacttggggaggttgaagtgggtggatcacttgaggtca

SEQ ID NO: 818201 - DNA, 90 bp, Artificial Sequence
  ENSG00000259275_24 (sequence is synthesized)
gcagtgagccgagatagcgccactgcacgccagcctgggtgacgagcaaaaactccatctctgttaggacaaaggagaagaactctaaaa

SEQ ID NO: 818202 - DNA, 120 bp, Artificial Sequence
  ENSG00000259275_25 (sequence is synthesized)
gagaagaactctaaaatcttatgactggaagcttataaattataagtattgaaaaattaaacattcctaataactacagatatccataaaaagttgcccaaaattaagggcaaatttctt

SEQ ID NO: 818203 - DNA, 120 bp, Artificial Sequence
  ENSG00000259275_26 (sequence is synthesized)
cagtgtcagcaatactgacagcattagtttcatggtcacagagatttttgttattattgttaacatattccaaaatttaacacaaatttaatccatgtgaaagtagagcttagacaataa

SEQ ID NO: 818204 - DNA, 120 bp, Artificial Sequence
  ENSG00000259275_27 (sequence is synthesized)
aagatatcagaccttggggtattacaatgactttttaaaaaagcttattatcatatatttcattataataacaggacgccaaaaccattagcatgaataataacctgagattgtaaggat

SEQ ID NO: 818205 - DNA, 120 bp, Artificial Sequence
  ENSG00000259275_28 (sequence is synthesized)
tatgtgtaaatgtgaaagaagagataattatgtttatatatctaatggtcacccttaggtattatgtgataacatgtggccttatccactgaggacaagagggccatttcctaccttgga

SEQ ID NO: 818206 - DNA, 120 bp, Artificial Sequence
  ENSG00000259275_29 (sequence is synthesized)
ttaggcattcccagggcgattcttacagttacctcttctttctgttcagtatttaagcactgttagttcatctgagggaatgaaaataaagatactttcttcaagaaaaatgaatgaaaa

SEQ ID NO: 818207 - DNA, 120 bp, Artificial Sequence
  ENSG00000259275_30 (sequence is synthesized)
acggtggcaattactgtttcctcaagcctggagtgtatggttatgggacagccacttcctccttcaaatcacatccattaatctgtgtgggcaaagtccatcactatcatctattgatca

SEQ ID NO: 818208 - DNA, 120 bp, Artificial Sequence
  ENSG00000259275_31 (sequence is synthesized)
tatttggcttgggtggaacagattttcaactgtcacaagtaaaatactccctacagaccaggtaaattcatacaaacccaacagactatgcttttttttttttttttttgtgagacaggg

SEQ ID NO: 818209 - DNA, 120 bp, Artificial Sequence
  ENSG00000259275_32 (sequence is synthesized)
cagtggcgcgatcatggctcactgcatttttgacttccattgctcctcctacctcggcttcccaagtagctgggactacacgcatgtgccaccatgcctagtgaatcttttgtattttta

SEQ ID NO: 818210 - DNA, 85 bp, Artificial Sequence
  ENSG00000259275_33 (sequence is synthesized)
agacagggttttgccatgttgtccagtctggcctcaaagtcctgggctcaagcggtctgttctcctcagcctccccaaggcagac

SEQ ID NO: 818211 - DNA, 120 bp, Artificial Sequence
  ENSG00000259275_34 (sequence is synthesized)
tacaggtatgaaccactgtgcctggcccagactatgcttttaaataaaatttatcaaccgatatttgtatcacacgttcctgtttcctaacttctggcatgtaaaccgtctcacttatta

SEQ ID NO: 818212 - DNA, 120 bp, Artificial Sequence
  ENSG00000259275_35 (sequence is synthesized)
tcacggaagctttggaaggcaggtagggcagattatattattattctcatatcataggtgatgaaatagagatctagagagatgaggtgaactactcaagctgatatgagcaataattaa

SEQ ID NO: 818213 - DNA, 120 bp, Artificial Sequence
  ENSG00000259275_36 (sequence is synthesized)
tgtgagtcttcagattctagacctcaggtttttctcaaggtgcctgagtttgggtgagggtggcagtgttggctagaagtgagtgggaaaaactctggaatccaggtttgaagcctggtt

SEQ ID NO: 818214 - DNA, 120 bp, Artificial Sequence
  ENSG00000259275_37 (sequence is synthesized)
ctgctgattgctggttgtgtgacctcaggcagatttcttaatcacatagcctcaaattactcatctatatgttgttaaatcattttttgcctcataggattcttgtgatgattaaatgaa

SEQ ID NO: 818215 - DNA, 120 bp, Artificial Sequence
  ENSG00000259275_38 (sequence is synthesized)
gtaacgcatgaatggcacttggcagggcctcatatatctctcctgcttgaatatatcagttatgttattgttgttgtatatgtccaaatccagattcaacctgcattcacaaagagaaat

SEQ ID NO: 818216 - DNA, 120 bp, Artificial Sequence
  ENSG00000259275_39 (sequence is synthesized)
gaagaactgaatcattcgtctgtgctgtgccaagcttctgcctctatcaaccatatctttcaagcatgggtaggaggcaagggtgaattgccccaatcggttgtttaccttgctaagctt

SEQ ID NO: 818217 - DNA, 120 bp, Artificial Sequence
  ENSG00000259275_40 (sequence is synthesized)
gccttctgatagcttttcttcccattctgattgtccatcacaaagccaagtatatgttgtatatgttccaaagattgtaagagtaagagtatttggtatattctaagagagaaatgtaaa

SEQ ID NO: 818218 - DNA, 120 bp, Artificial Sequence
  ENSG00000259275_41 (sequence is synthesized)
ctctacaatttgattcaataattaagtatatagccatgttaaaaacagtgaaacaaaaacacccatctgagtctttcttcttagactaagtaagctccaatgaaagcatttctcctattt

SEQ ID NO: 818219 - DNA, 120 bp, Artificial Sequence
  ENSG00000259275_42 (sequence is synthesized)
tactttgttttgaactttcctcagttttagtgcattatgaatttttcccagtgttagttttattagagatgaaccaattatttccatatacctccaacattggttcttctgtaatgttgg

SEQ ID NO: 818220 - DNA, 120 bp, Artificial Sequence
  ENSG00000259275_43 (sequence is synthesized)
ctttgaatacagtagtggtcaaaacatcaatttcatttggatagaccctggcggttttgtagagtaaaggcaaatgaaaatagcatgttctgggaaggtgcagcctttcctgttgaactt

SEQ ID NO: 818221 - DNA, 120 bp, Artificial Sequence
  ENSG00000259275_44 (sequence is synthesized)
ggttgattcttgcattcattcaggaccattgaacagcctgtcagaaatgaaactcagcggaagagcaagacctaatccctgccaagtgagcttgctctctcatggtggatacagaaaagt

SEQ ID NO: 818222 - DNA, 120 bp, Artificial Sequence
  ENSG00000259275_45 (sequence is synthesized)
aaacaggcaatgaaggatggtgatggaagtatagagagaatgggagcacacgcatgaggagcactgaactcagactgtgggaactcttctcagagatggtgacatctaagcagagggctg

SEQ ID NO: 818223 - DNA, 120 bp, Artificial Sequence
  ENSG00000259275_46 (sequence is synthesized)
accaatgactgtggattagcaagtcagagtttgctgggaggagggaagaggcaactattccaggcccaaagagaagatgcaagggctgtgaggatggagtgaacttggctggtttatggc

SEQ ID NO: 818224 - DNA, 120 bp, Artificial Sequence
  ENSG00000259275_47 (sequence is synthesized)
gtgcagaattctaggagaaacctggcaggagagggacataagaagttagggccaaaatagggagagagtagaacagtgaaaacttctcccacgcctacccccaagtccatgaaagtgcaa

SEQ ID NO: 818225 - DNA, 120 bp, Artificial Sequence
  ENSG00000259275_48 (sequence is synthesized)
gtgaccccacagttcctctgtctcccagtggaaagataagttcctttagcactgggctttctggggactaaatgaaagcaacaatgactcagcacttcacaacgtgtcaggcacagttct

SEQ ID NO: 818226 - DNA, 120 bp, Artificial Sequence
  ENSG00000259275_49 (sequence is synthesized)
ctgcccattttacaggtgaggatattgagacaaggggaggtaaatgacttccacagggaaacccagccgatgagaggcagagccaggactggatcccaggtggtgtggctccagagagtc

SEQ ID NO: 818227 - DNA, 120 bp, Artificial Sequence
  ENSG00000259275_50 (sequence is synthesized)
cccctcgacaaaaaaggctgtagcggttaggtgtcctgtgagcagattcaggaatgccccgcagagcttccagcgcagtgccatggcaactagagagcactcccctgacatttgcatgaa

SEQ ID NO: 818228 - DNA, 120 bp, Artificial Sequence
  ENSG00000259275_51 (sequence is synthesized)
gagagcaactctttcatctcttttttgtggggtggggagggtggtggaaagccatggtgaagtagtcaggacaatgtttcactaaaacatgcttatcaaaataagcatgtctctaagcta

SEQ ID NO: 818229 - DNA, 120 bp, Artificial Sequence
  ENSG00000259275_52 (sequence is synthesized)
caaattataacagctattgcaaattatggtggtttaccatggaagagatttcagactccccttatctttacttttgctttctctttaacataggtaatgaaatcagacaggtcattgtcc

SEQ ID NO: 818230 - DNA, 120 bp, Artificial Sequence
  ENSG00000259275_53 (sequence is synthesized)
attaaagtctgtaacgcgtcctgattctcaagaaatgaaaacgaaacattttctttgcctttgcagcactgctacactttattcaaattcaaagactgctttttaccatgactcagtcag

SEQ ID NO: 818231 - DNA, 120 bp, Artificial Sequence
  ENSG00000259275_54 (sequence is synthesized)
cattttattttgttgtgtcatttttaaagcaaaatttctctttttagaagactatgtgacatgcttctgctcccaaatgaaaatgcaggctccagccatacctgacatggctttttggtt

SEQ ID NO: 818232 - DNA, 120 bp, Artificial Sequence
  ENSG00000259275_55 (sequence is synthesized)
taaaatactccctacagaccagattcaacctgcattcacaaagagaaatgaagaactgaatcattcgtctgtgctgtgccaagcttctgcctctatcaaccatatctttcaagcatgggc

SEQ ID NO: 818233 - DNA, 120 bp, Artificial Sequence
  ENSG00000229751_0 (sequence is synthesized)
aaatatgtgcacatatttacatggaatatgagggtaaactagaaaattaagggtaatctaaaatagaaaaaaagaagaaaacaataagttaaaagtatgaaaagacatccagaatgagca

SEQ ID NO: 818234 - DNA, 120 bp, Artificial Sequence
  ENSG00000229751_1 (sequence is synthesized)
agttactgaggttgtgcctcaactttagcttgagtttcctggcagcaaaggtaaaaaggtgatcttacagctggaaaatcagtgggtgaaaacggagatacagcaactctgtcttggact

SEQ ID NO: 818235 - DNA, 120 bp, Artificial Sequence
  ENSG00000229751_2 (sequence is synthesized)
caacagaaccaccatatactttgtgggtgtagggattctccctgcatgttgagcctgtcaccctaatgacaaccagctttgcattaactagagtcagccccaaaaatgcatctgttactc

SEQ ID NO: 818236 - DNA, 120 bp, Artificial Sequence
  ENSG00000229751_3 (sequence is synthesized)
cagagaaggacaaatccttattattactttataggattttctctactaggggcttccataaagtaaacatgctttcaggaaattaacagagtaattttaagccaaaatccatagcattaa

SEQ ID NO: 818237 - DNA, 120 bp, Artificial Sequence
  ENSG00000229750_0 (sequence is synthesized)
aagggctaaggagcacgtcaggagcacccgaggtcactagttcatgatcctttcggtcacccgcgagccctgagcacagccgtgtttacaaagcacccctggaggaaaaggctgaacggc

SEQ ID NO: 818238 - DNA, 120 bp, Artificial Sequence
  ENSG00000229750_1 (sequence is synthesized)
actttaaaggccacgggctcccacaggcttccgtcctctctcgcgagatcggactgacaacccccgcccgctcgccccgctcccggcatccccaccttccttctggcgcccctccccttc

SEQ ID NO: 818239 - DNA, 120 bp, Artificial Sequence
  ENSG00000229750_2 (sequence is synthesized)
tgccttccttctgagggagcgcctccgagtcaggtgattccgtcaggcttaaggagaagaaggcgggtcttcggcagggcgggtagaggggacgggcatcaaagagcactcgggcgctca

SEQ ID NO: 818240 - DNA, 120 bp, Artificial Sequence
  ENSG00000229750_3 (sequence is synthesized)
tgattggacaaggagcccgaagggcgggaagcagttctggagggggcgggaccagagggcccaaggagcgttacttctgtaaacccggagctgtggaagactgtgattggctgtcggctg

SEQ ID NO: 818241 - DNA, 120 bp, Artificial Sequence
  ENSG00000286439_0 (sequence is synthesized)
ccacaagatcaccaagttctggaagaagcacacaactttctctgcagcaagaagagctattatagagaacaagttgaacaaatactgcaactagaaaaggctgtttaaatgagcaacctc

SEQ ID NO: 818242 - DNA, 120 bp, Artificial Sequence
  ENSG00000286439_1 (sequence is synthesized)
aactgattttttgaaaatgatgctaaataacccattgtacccaaaaagggaaaagcaaacagataaaatcacaacctacaccgtgaaaaatatcccaaagtgaaaaagcagttatataaa

SEQ ID NO: 818243 - DNA, 120 bp, Artificial Sequence
  ENSG00000286439_2 (sequence is synthesized)
cagctagtgaaaaacctggaaacaagggatgcaacgacttttttttctcatcagggaatggaaagaaagcagatatggaatacaagagaagggtacaagaagcaggaaactgaacataca

SEQ ID NO: 818244 - DNA, 120 bp, Artificial Sequence
  ENSG00000286439_3 (sequence is synthesized)
tcccttgctaaatagaaacacagaatgactccagagataactagaaatgccaaggatgcaaagtaatggagagctcacaggacattctttccaaagaagcatgaaggagtattttggtga

SEQ ID NO: 818245 - DNA, 120 bp, Artificial Sequence
  ENSG00000286439_4 (sequence is synthesized)
gggaagcatcaccaccttggagacaccctctgcaggatggaaggatagtgggttctctcgggaaaacaacctgctatgctgtcatgaatgtatactgttaatcctccttctatcctttct

SEQ ID NO: 818246 - DNA, 120 bp, Artificial Sequence
  ENSG00000286439_5 (sequence is synthesized)
caaagggagctgaagtcatcaggtagagaaactgtgcctttcagaaaaggatgtaggctatttgtgatgactgactcctgactctgagccgacacaaatcctgagggagtcaagttgcct

SEQ ID NO: 818247 - DNA, 120 bp, Artificial Sequence
  ENSG00000286439_6 (sequence is synthesized)
gtccacaaatgtatctggatttcatttcccacttttgcatatgccattaggagagacagacttgacaagcggcagaatgcccttgttagataataggcccatacccttttctaaaactgc

SEQ ID NO: 818248 - DNA, 120 bp, Artificial Sequence
  ENSG00000286439_7 (sequence is synthesized)
ctggaaatgttcacgatctgtgttcaattgagttcacaatcacctttcttgttttcaaaaggaaaccatacctttcgcccattccaaatgtgattagagcatacttaactggcttataaa

SEQ ID NO: 818249 - DNA, 120 bp, Artificial Sequence
  ENSG00000286439_8 (sequence is synthesized)
attttgaacacccaagaagttgtatctgtggacactgtttaggtggggaaaagcttcaggatcctctaggtctttttgtcttcctccatcttgcaaatattcctaatgggagtgaagcta

SEQ ID NO: 818250 - DNA, 120 bp, Artificial Sequence
  ENSG00000286439_9 (sequence is synthesized)
agcacatgttaaatattctgaattttgaacaactgaagcagtagagtgacactgatttttctaaatataattaaaatgctctcatgggctacagggttttttctcccccagtttctcttc

SEQ ID NO: 818251 - DNA, 120 bp, Artificial Sequence
  ENSG00000286439_10 (sequence is synthesized)
atattgcagaaaaacaacaaacaaattttaatgtaatttctttcaaattgagtgtgcatgattcaataaacactaagacctagttaacacattgtgtcacagatattccaattatgaatc

SEQ ID NO: 818252 - DNA, 120 bp, Artificial Sequence
  ENSG00000286439_11 (sequence is synthesized)
catcattatatactatctcttaagaaaaaaataacttgtaaggctatatttgaaaaatttaaagatgtgtgagaacatacatagttttctagaattccaggactgagtaagcaagcagaa

SEQ ID NO: 818253 - DNA, 120 bp, Artificial Sequence
  ENSG00000286439_12 (sequence is synthesized)
cttttgctacttcagatcatatcgcagggagtatcagtacacggtagactgaaacgcacacaggacaggacatcaaattcgaaattcactccccagtctggtcattatggattcagtgac

SEQ ID NO: 818254 - DNA, 120 bp, Artificial Sequence
  ENSG00000286438_0 (sequence is synthesized)
agagcctttgcatctcttccaccaggaccacacgtggctggttacatattgttattcgattatcagctgaaatatcacctgtggtaattaatttgatgagtcaacttgggtaggctacag

SEQ ID NO: 818255 - DNA, 120 bp, Artificial Sequence
  ENSG00000286438_1 (sequence is synthesized)
tgctcacttgcctggtcaaataagagcaaaaccaacttgcttggtcttcattgccgtgaagataaattaggtgggattagcatttaagtcagtagactttgagtaaaacatctcatcctc

SEQ ID NO: 818256 - DNA, 120 bp, Artificial Sequence
  ENSG00000286438_2 (sequence is synthesized)
cataatatgagcgaggctcatccaacagttgaagaccttaagagaaaagactgaggtccccgaagaagaagaaattctgcctgcagactgatttcagatgcagtagtacaacatcaatcc

SEQ ID NO: 818257 - DNA, 120 bp, Artificial Sequence
  ENSG00000286438_3 (sequence is synthesized)
ttccttgggtttccagcctgctggtctgccctgcagatttcagacttgcctgctcccacagtcatgttttggacctttacctagcttccaactgccttcttccaccaacattactgtgct

SEQ ID NO: 818258 - DNA, 120 bp, Artificial Sequence
  ENSG00000286438_4 (sequence is synthesized)
gacctaggataaatggaagctaccaactgccaactgtgctgtcagctgtgtggccgggtcaaaggtgctggctgagcttgcaaattctgaaggtttgccagcagtgaaggtatttgcctt

SEQ ID NO: 818259 - DNA, 120 bp, Artificial Sequence
  ENSG00000286438_5 (sequence is synthesized)
agagggaaatgatgccttgtacatatctcatcccacagtgctgctgaatgcgtccatttcaggcaatgcccaatttggagaaaagaagaagtgcaaaaaaagatgtttctttgacctcac

SEQ ID NO: 818260 - DNA, 120 bp, Artificial Sequence
  ENSG00000286438_6 (sequence is synthesized)
cgcaaatacgtaaaaccacctgcagatccacagccactctaatctttgccttgggcacacccttttgctttaacagtagagaagaaacaagtttctgttccctccgagtgctgggaagtg

SEQ ID NO: 818261 - DNA, 120 bp, Artificial Sequence
  ENSG00000286438_7 (sequence is synthesized)
gcatgacagctggtttccatgagcagagcacatactccaaccctgcaaagaaaaaactccccacaatgctcttttatctattaaactaaagggggttttattacacttttgtacattcaa

SEQ ID NO: 818262 - DNA, 120 bp, Artificial Sequence
  ENSG00000286438_8 (sequence is synthesized)
tctaaatttttctcgcattgaattattgtcaagaaaaggctgttcttgcatatatatatgtgtgtgtatatatatatgtacttgtgatcatgcataacttaaatgctaaatttctgattt

SEQ ID NO: 818263 - DNA, 120 bp, Artificial Sequence
  ENSG00000286438_9 (sequence is synthesized)
ttttggagaggataacatttagaaaaaaatctattgactaaacaaaaatcatttgacacatgaggtcaaaccttaatttagctgtaggaatcattgtcgtatcaatgtggaagtagaaat

SEQ ID NO: 818264 - DNA, 120 bp, Artificial Sequence
  ENSG00000286438_10 (sequence is synthesized)
agcactaaaagaatgttctttttctcctgaaagatgcaccctctgacccactttgtgacacatagtgaggagttcagtaactataaatgttaccgatgactcttatccttggtttaactc

SEQ ID NO: 818265 - DNA, 120 bp, Artificial Sequence
  ENSG00000286438_11 (sequence is synthesized)
tgggttcttctaaatgcttatgtagagtacaaattatctgctgaagagtagccaaggttgccaagtgaacagcactgaagacgtcagaagggagtgaagtttggaagtgaaacagcagcc

SEQ ID NO: 818266 - DNA, 120 bp, Artificial Sequence
  ENSG00000286438_12 (sequence is synthesized)
tttaaatagcccgacaacacacatcatgagatgacttcagtggatctcccatcactacggattggctgtaaaggaaaaatcctcttaagtgtttaatccagaagataactttttattcaa

SEQ ID NO: 818267 - DNA, 120 bp, Artificial Sequence
  ENSG00000286438_13 (sequence is synthesized)
ttactaccagtataattactatactattgttcaagattttattcgttcttcctttttttgtccactttgtcttttcttcctctagaaattcagaacctgaatgatttctcatttgagtca

SEQ ID NO: 818268 - DNA, 120 bp, Artificial Sequence
  ENSG00000286438_14 (sequence is synthesized)
attttgatcactgcaatcattaaattagacataatttagaaacttctaatgaaaaaagaacataattaagccaaattatcagaagttttaaggattgaaaatattatcaaacaattttta

SEQ ID NO: 818269 - DNA, 120 bp, Artificial Sequence
  ENSG00000286438_15 (sequence is synthesized)
atagtattttttctaataaaaattctgagacattggatgaattaagatctattgatatgaaagaatgctcatgtaactatggaaaagaaattaacatttagttagtgttctaatatgcca

SEQ ID NO: 818270 - DNA, 120 bp, Artificial Sequence
  ENSG00000286438_16 (sequence is synthesized)
atattttttctcatttactcttttttactgccttacaaaatatgtgttattgtccccagtctacagggcagaaaactggaaattcacaaagattaaagtattcaagtttagaaagaaact

SEQ ID NO: 818271 - DNA, 120 bp, Artificial Sequence
  ENSG00000286438_17 (sequence is synthesized)
gtttttaagtgacagaatccggattaaaatccaggtctgctgaccccgaggctctttctctttccattttatcccataggattttccactcagccaaaaattgaactttaaatttttaca

SEQ ID NO: 818272 - DNA, 120 bp, Artificial Sequence
  ENSG00000286438_18 (sequence is synthesized)
tcctcattaacaacaaaaaaatggaaaagaagaattataattggtaacattgacatcaatttttaaaaatatttgtttcatgcaataataaaaattgtttttcttttaatagtaaatgat

SEQ ID NO: 818273 - DNA, 120 bp, Artificial Sequence
  ENSG00000286438_19 (sequence is synthesized)
gtttttcttttaatagtaaatgatttgagtgaaaaagttatcaccattgtaaataaaacatagcttaattgactttaatattgctagcaaaattaaatttgtactaggctcatagaataa

SEQ ID NO: 818274 - DNA, 120 bp, Artificial Sequence
  ENSG00000286438_20 (sequence is synthesized)
gaagtaaaaaggctgcccttccatggcatccatcagcattggttttggacctttacctagcttccaactgccttcttccaccaacattactgtgtgctgctgaatgcgtccatttcaggc

SEQ ID NO: 818275 - DNA, 120 bp, Artificial Sequence
  ENSG00000229755_0 (sequence is synthesized)
agcaccagatgccacctaggcttggctcaggattggcatgttgtctatgcttatgttccattggcctgaacaagctacttatccaagccctacttcagtgagatgagaggctgctccatc

SEQ ID NO: 818276 - DNA, 120 bp, Artificial Sequence
  ENSG00000229755_1 (sequence is synthesized)
cactttggaccctgaggaggaggcatcttacagcagcaagagcctggaatgggaagcagtggaatttcaactctgttcatcacttctcagccacgggacattgggcaagcctctgagccc

SEQ ID NO: 818277 - DNA, 120 bp, Artificial Sequence
  ENSG00000229755_2 (sequence is synthesized)
cagttgctgtggggtatgtgggagcacagccttggaagcctggaagacacgcatctgagttctggtatttgccacctgctggttgtacattcctcgatgttcagtttccttatcgtgaaa

SEQ ID NO: 818278 - DNA, 120 bp, Artificial Sequence
  ENSG00000229755_3 (sequence is synthesized)
tggggataaggccacctctcttccttgttggaagtccagtgcaactccctgttgggagcggggggagatatggcatagggactatcagatcaaataagcaaacaaaagtgaagtatgtaa

SEQ ID NO: 818279 - DNA, 120 bp, Artificial Sequence
  ENSG00000269352_0 (sequence is synthesized)
ttgctttcatgtaaaagcacctacacccaggccccccccacccacgaacagcttcgtggacagtttactcagactgagtcgaagatggagaaactgagcccgagagagagaagaggagtc

SEQ ID NO: 818280 - DNA, 120 bp, Artificial Sequence
  ENSG00000269352_1 (sequence is synthesized)
agctgagcctcccccagataagacaatcgccaaatattctgggaccttgctgggggcagacagccctccctgcccagcaatgggcctttgggatgtggcacaagctcccgggaaaccagg

SEQ ID NO: 818281 - DNA, 120 bp, Artificial Sequence
  ENSG00000269352_2 (sequence is synthesized)
ggtccttggtgaagtggaactggaccaggcgcgagttccggaacagcggcactagggaaacgtcatctccaccgctcaaccagcccaaccctggagtgctgtggaagccgctctcagatc

SEQ ID NO: 818282 - DNA, 120 bp, Artificial Sequence
  ENSG00000269352_3 (sequence is synthesized)
ccttggcagccccccaggggatgaggcccatgaagatcttcttcttggacgagtacaggagcatgagcacgcgcacctcacagggggagatgtgggggaacagcatgcagcccgcctgcg

SEQ ID NO: 818283 - DNA, 120 bp, Artificial Sequence
  ENSG00000269352_4 (sequence is synthesized)
gctttcatgtaaaagcacctacacccaggccccccccacccacgaacagcttcgtggacagtttactcagactgagtcgaaggtaattttaaggtagtttcgggatattacccaagtatg

SEQ ID NO: 818284 - DNA, 120 bp, Artificial Sequence
  ENSG00000269352_5 (sequence is synthesized)
cctgtccctgaggagtggagagcgcggagttggtgctgagtcagccctgatgtggcagaggaggagcaggcccccgcagaaccagggaaacgtcatctccaccgctcaaccagcccaacc

SEQ ID NO: 818285 - DNA, 120 bp, Artificial Sequence
  ENSG00000269352_6 (sequence is synthesized)
ctggagtgctgtggaagccgctctcagatcccttggcagccccccaggtgcaggtcgtggctgcccctgccccgctcagtccctgcacagccaccagctggctgcctgggaccccttgaa

SEQ ID NO: 818286 - DNA, 120 bp, Artificial Sequence
  ENSG00000269352_7 (sequence is synthesized)
gccaagcctgaggagctacccaccacacctgcttcagcaccctcagctccgctccctcacagccagctcaggccacctggggaggcgctcttgcccccagccccgccctctggaagagct

SEQ ID NO: 818287 - DNA, 120 bp, Artificial Sequence
  ENSG00000269352_8 (sequence is synthesized)
ggggacccccagctctggcttctcccaccacggcctcccggctcccagcccgctgagtcccccgggcccaggaccaaactgagactcccctgtcctccctacctcaggaaacgtcatctc

SEQ ID NO: 818288 - DNA, 120 bp, Artificial Sequence
  ENSG00000286433_0 (sequence is synthesized)
ggcactcagtcaagagttgggcgtaagttcgggccaaggcctcgaagcgctccggcgactggctaatcgctcaaaggggctgcctaagtgagcgcctttgagcccccaaccccgggtttc

SEQ ID NO: 818289 - DNA, 120 bp, Artificial Sequence
  ENSG00000286433_1 (sequence is synthesized)
ttcagttcctgggcctgggctccaggctctcggttcttcaacacgtcgcccggcccggtgcagcaaacagtttttcctcaaccattccggggtttctgagccgttcggctcgcagcagaa

SEQ ID NO: 818290 - DNA, 120 bp, Artificial Sequence
  ENSG00000286433_2 (sequence is synthesized)
aagtaaaaaaagagccgcccttccagcccaggctagctccggccgggccactctagccctggccgccccgccactcaccaggttgggcagtcgaacagcgggaggctagagccggagttc

SEQ ID NO: 818291 - DNA, 120 bp, Artificial Sequence
  ENSG00000286433_3 (sequence is synthesized)
gcggctgccgccatcttgcgtctccccctcccatttggcgcgccctaagcacgccgggaaactggaagaccgagaagggaaaagcggcatcccagcagcctacgcgttgggaggattatc

SEQ ID NO: 818292 - DNA, 120 bp, Artificial Sequence
  ENSG00000286433_4 (sequence is synthesized)
tgaccagtttttccttttttaaataaatcaattgctaagttcctgttcatccagaaagaggcactgctcagcaagttgaggaatctatgatgaaagtagttcttttcttgcttccatgct

SEQ ID NO: 818293 - DNA, 120 bp, Artificial Sequence
  ENSG00000286433_5 (sequence is synthesized)
actggttctgtagaaaatcagcctattcaaaagatttttgcccttgatgaagtctccagccctcaagatttaactgcaatataacttagaaggagtgagaagatcaaaaaagtaactgca

SEQ ID NO: 818294 - DNA, 120 bp, Artificial Sequence
  ENSG00000286433_6 (sequence is synthesized)
aactcttaggtagactggagaaacaccttttcctctggcctttaaagcacaataaacttatccagcaaggatggcgactaatcagatcacttatcaaatggcctgttaatatcctccttt

SEQ ID NO: 818295 - DNA, 120 bp, Artificial Sequence
  ENSG00000286433_7 (sequence is synthesized)
tcagccttgtgattccaaagtaagactaggctgattggaaaaattcaaattctaaacttggtttcaagaaaacagaaataatcctatgtccctctcttctgaatacagggcatgattttt

SEQ ID NO: 818296 - DNA, 120 bp, Artificial Sequence
  ENSG00000286433_8 (sequence is synthesized)
tagaaggaattagtcccaaaagtttttgagtctaacagaaaagaagaagatacttttacctacagaaattgtgtgggcctttgaggttctatgctccttttaggcataacatggtgttga

SEQ ID NO: 818297 - DNA, 120 bp, Artificial Sequence
  ENSG00000286433_9 (sequence is synthesized)
agccatttgcagttagcagtgacctgatagtatcttatggcaactttgtatttcaacttctcagcttgtgtgatccttctattgctgactatagacccaggaaacctaaaagctacatct

SEQ ID NO: 818298 - DNA, 120 bp, Artificial Sequence
  ENSG00000286433_10 (sequence is synthesized)
tacctttctaattctttactccttggccatgttctgtttctagcacagtagatattcacacgtggcaccttatgcttacctaggccctcataaagcaaaatgctctttgtttgggcacca

SEQ ID NO: 818299 - DNA, 120 bp, Artificial Sequence
  ENSG00000286433_11 (sequence is synthesized)
atgatgtcagtatagaccagcaaactagagggcagcaatctaggtccttaaccttttaaaatagactgatgtactagctgcctttggattttggtatctcaataaagagattagtatgtt

SEQ ID NO: 818300 - DNA, 120 bp, Artificial Sequence
  ENSG00000286432_0 (sequence is synthesized)
tcctacaaagaatgcagcaaccaagtatcttggaatcagagagcagccctgaccagataaccaaacacgccagtgccttgactttgaactttgcagcctccagaactcacatacaataaa

SEQ ID NO: 818301 - DNA, 120 bp, Artificial Sequence
  ENSG00000286432_1 (sequence is synthesized)
atttgcaatgtacagggaagattaactgacccgctgcacgaagatgacacacaaatttatgaagatggttctttttattttccttaaattttagggatggcttctcagtgtgttgcccag

SEQ ID NO: 818302 - DNA, 120 bp, Artificial Sequence
  ENSG00000286432_2 (sequence is synthesized)
gtcttgaactcctggcctcaagcaatgctcccaccttagcctccaaaaatgttgagatgacaggtgtgagccaccacactcaattgcttaatgtattttaatcataaaatgaaatcagta

SEQ ID NO: 818303 - DNA, 120 bp, Artificial Sequence
  ENSG00000286432_3 (sequence is synthesized)
agtaattttcacatctttgttatttaatatgtgaaagaaagggatttctgcagataagagtaatttttcaaaacaataataaatatgaattaaattatatcaatcatacagctgaaaata

SEQ ID NO: 818304 - DNA, 120 bp, Artificial Sequence
  ENSG00000286432_4 (sequence is synthesized)
ttaaatgtcagattatctaaaatcatcaatatattcagtgaatatcaatgattataagtgtttgttgattttaaaatctgagtgttatgtgtaaaatttaagaaaatacataatagtgcc

SEQ ID NO: 818305 - DNA, 120 bp, Artificial Sequence
  ENSG00000286432_5 (sequence is synthesized)
ttaagtattataaattctaatagcatattttgggaaataaagttaaaactattaattgctgagtttacagtatataacctcagtggatgataatgagagattagattattgtggaatatg

SEQ ID NO: 818306 - DNA, 120 bp, Artificial Sequence
  ENSG00000286432_6 (sequence is synthesized)
agaatatgtataaaagtcagaaagaaatatttttagctgatattcttaatagttaaggggtaggtttattattttccataagtggattagtggagatttttgcaaaaatataaaagtaaa

SEQ ID NO: 818307 - DNA, 120 bp, Artificial Sequence
  ENSG00000286432_7 (sequence is synthesized)
gatatcactactactgcaattattttgcatttctataatgtctttttattgaaacacttataaatcctataaaacaagtactggtacatgttctctataaaataaatgaatatggttcgt

SEQ ID NO: 818308 - DNA, 90 bp, Artificial Sequence
  ENSG00000286431_0 (sequence is synthesized)
tgcaaggcgggaggattgcttgagcccagaagttcgagactagcctgggcaacctagtgggactctgtttctacaaaaatcagtctggca

SEQ ID NO: 818309 - DNA, 120 bp, Artificial Sequence
  ENSG00000286431_1 (sequence is synthesized)
agggaggctgaggaggtaggatcacttgagtccaggagtttgaggttgctgtgagctgtgattgcaccagattgctacatggggatgagaggaaataagagggtgaacagatctcctgct

SEQ ID NO: 818310 - DNA, 120 bp, Artificial Sequence
  ENSG00000286431_2 (sequence is synthesized)
accgcacatgccacttttgaattcccagctggtgtttgaaggctgtgcaaggtgttggattgcaggatgatggagacccagatcattgtgaatccatgactgtgtggccgtttgcatcga

SEQ ID NO: 818311 - DNA, 120 bp, Artificial Sequence
  ENSG00000286431_3 (sequence is synthesized)
ctcagccttactgcagatactaaccttcattaccctctccagctatgcattggttttctgcataccacttggaatttatgttggctctgagtcatccgactctcacatgagaaagaacca

SEQ ID NO: 818312 - DNA, 120 bp, Artificial Sequence
  ENSG00000286431_4 (sequence is synthesized)
accaaataatgatgtgttcttttaaaagaatgtgtctgcatatggcttcttatctgccaagtgctgcaccttaggcatttatattgagagtttcaagatcgtgccactgcactccagcct

SEQ ID NO: 818313 - DNA, 120 bp, Artificial Sequence
  ENSG00000286431_5 (sequence is synthesized)
gacagagtgataccttgtcccaaaaaaacaaaaacaaaaacaagataggagcagacatttccaaacagctaaaatgtcctcaaagggagttattgatgtattagtctgttctcaatgctg

SEQ ID NO: 818314 - DNA, 89 bp, Artificial Sequence
  ENSG00000286431_6 (sequence is synthesized)
caaagggagttattgatgtattagtctgttctcaatgctgctaataaacacatacctaatacttccacagttccacatggctggggagg

SEQ ID NO: 818315 - DNA, 120 bp, Artificial Sequence
  ENSG00000286431_7 (sequence is synthesized)
cgtcttacatggtggtaggcagaagaatatgtgcagggggaactgccctttatagaaccatcttctgagactcattcacttatcacaagaacagcatgggaaaaacccacccccataatt

SEQ ID NO: 818316 - DNA, 120 bp, Artificial Sequence
  ENSG00000286431_8 (sequence is synthesized)
agcatgggaaaaacccacccccataattcagttagctcccaccagttcccttccaccacatgtgaggattattacaattcaaggtgagatctgggtggagacacagagccaaaccatatc

SEQ ID NO: 818317 - DNA, 120 bp, Artificial Sequence
  ENSG00000286431_9 (sequence is synthesized)
aaggcaaatctgttgactaagacagccttcacatttccctcagcttgactgttacacagttttcctcccgacctccttgtctattttttagttttaatttttttgatacataattgatgc

SEQ ID NO: 818318 - DNA, 120 bp, Artificial Sequence
  ENSG00000286431_10 (sequence is synthesized)
acatatgttgggggtacatgtgattactaaatacactcacaatttgtaaagatcacatcattgtgatcaagatattcatcaccctacatatttgccttttcgttaagctagaaacattta

SEQ ID NO: 818319 - DNA, 120 bp, Artificial Sequence
  ENSG00000286431_11 (sequence is synthesized)
aattcttatctttagctattttgaaatgtacaatagattactgtaaactacagtcaccctgctgatttattgaacagtaggtcttatttcttttatcaaactctgtatttgcaaggcggg

SEQ ID NO: 818320 - DNA, 70 bp, Artificial Sequence
  ENSG00000286431_12 (sequence is synthesized)
gaccctgtctctacaaaaaatacaaaaatcggccttaggatcacttgagctcaggagttccaggttacta

SEQ ID NO: 818321 - DNA, 120 bp, Artificial Sequence
  ENSG00000286431_13 (sequence is synthesized)
ggtggtaggatcacttgagctcaggagttccaggttactatgagctacgatcgtatcactgtactccagtctgggcaacagagcagaattctgtctccaaaaaaacaaaaacccctactt

SEQ ID NO: 818322 - DNA, 120 bp, Artificial Sequence
  ENSG00000286431_14 (sequence is synthesized)
atttgtacccattaatcaaactatttttatctcccttcccagcctctggtagctaccaatctactctctatcttcatgagatccaggttttaagctcccacatgtgagtgagaacatgca

SEQ ID NO: 818323 - DNA, 120 bp, Artificial Sequence
  ENSG00000286431_15 (sequence is synthesized)
taacataatgacctccagttccatccatcaggcctccttttttcacggaggatttattttaggaaacttgcaattgtgagttctttctctacctctttgagaggcaaatcttctcccaaa

SEQ ID NO: 818324 - DNA, 120 bp, Artificial Sequence
  ENSG00000286431_16 (sequence is synthesized)
ctacctctttgagaggcaaatcttctcccaaattttcttctagcctcctcctagttttgcaacccaggaatgcctttctcaagacttcagagccatccctttaaaatgcaattattgaag

SEQ ID NO: 818325 - DNA, 120 bp, Artificial Sequence
  ENSG00000286431_17 (sequence is synthesized)
gagatgatacatctgtgtctcagtttttgtagaagggcagattcccagttttgaaaaattccaatgagccaacgcagatagctttacggcatttcctaacctcttcctgatgtctccagt

SEQ ID NO: 818326 - DNA, 120 bp, Artificial Sequence
  ENSG00000286431_18 (sequence is synthesized)
tccttctcagcatctcaccccggcacttaaaaactccccagccttttgtttcaatgaagttaagctcctctcttccgtattgcagtagtcctgactgagtccttccttgaaggtttaact

SEQ ID NO: 818327 - DNA, 120 bp, Artificial Sequence
  ENSG00000286431_19 (sequence is synthesized)
tgtctggtgcaattttttctttgacaatgtccagatcaaatgatcccataaaaacatcgagtgtgattttagcctgagaagggggagggtgagaagatagattgggaggcagctgtgtag

SEQ ID NO: 818328 - DNA, 120 bp, Artificial Sequence
  ENSG00000286431_20 (sequence is synthesized)
gcaggggacttggccactccctaaacctctcccagtctcacctgtaaatggagtgcataggcagcagtgcttctcccccaaggctggggcgatggaatcagttagactattgagggcatc

SEQ ID NO: 818329 - DNA, 120 bp, Artificial Sequence
  ENSG00000286431_21 (sequence is synthesized)
tggaagggcatctgtgtcagggttagtcctcagggtatggtggccaatgggtttcttttggttgactgttgacaatgcgtttgttgaatggcagcctgcactaggtgacgctgaagccac

SEQ ID NO: 818330 - DNA, 120 bp, Artificial Sequence
  ENSG00000286431_22 (sequence is synthesized)
ccacagaagacactgcagtgggaaaaccagcatgagccgctgcccccaaggaacctcgaagcccaggcagaggaccagccatcccagcccgcagcaggggctgggcgcagtggctcacac

SEQ ID NO: 818331 - DNA, 120 bp, Artificial Sequence
  ENSG00000286430_0 (sequence is synthesized)
agagagagaaggagccagcacagctgagggatggagaggctctgtggcccagaccctgaaggccacctgcctgggctgtggggcccggtcaactgggcacctgggatagcgaagacacag

SEQ ID NO: 818332 - DNA, 120 bp, Artificial Sequence
  ENSG00000286430_1 (sequence is synthesized)
gggccctggcccccgcgtcctgagctgcaccagctcctctccgggaggtggccagcagggcagaggggtggcaagcctggtactcacatgatggcccagcccaggtagttggctgtgctt

SEQ ID NO: 818333 - DNA, 120 bp, Artificial Sequence
  ENSG00000286430_2 (sequence is synthesized)
ccccagtacatggggttgtccaggatgttgaaggggaacacggtcactctcgcctccttgaggatcccgaagtaatcacctgtggatgaggcaaggcagggtccctcggctattcatcag

SEQ ID NO: 818334 - DNA, 120 bp, Artificial Sequence
  ENSG00000286430_3 (sequence is synthesized)
tgggcgtctagccaggccagcactgggctcacagcctgaaagcacctcagccacaggcagagggaaatggagaagggataaggtgcctccacccctcacccctccccagacctacaccag

SEQ ID NO: 818335 - DNA, 120 bp, Artificial Sequence
  ENSG00000286430_4 (sequence is synthesized)
ccctgcctgcggccaaacacggcacaaaccacaatcctgcctggcctgagagccacgcgtgccgggagctgccagagaggtggctgactcaccaccacctcaggcttctgtgcaacaagg

SEQ ID NO: 818336 - DNA, 120 bp, Artificial Sequence
  ENSG00000286430_5 (sequence is synthesized)
cctgagagtcttctgcaagggggagctggtgctggagctggactcaaggagtcctgcacccagcccgggccgcagaacgggcattgagtgcatcttcattagctggagagaagcagcagg

SEQ ID NO: 818337 - DNA, 120 bp, Artificial Sequence
  ENSG00000286437_0 (sequence is synthesized)
gaggagacagaaaataaggtctcttacctaaccaagtccctcattcagtggctgtcattaaacaaactcaaccaattcctagatctctatttttacctctaaaatggggattgggagtga

SEQ ID NO: 818338 - DNA, 120 bp, Artificial Sequence
  ENSG00000286437_1 (sequence is synthesized)
ctgtcctaccctcctctctttaatgctgcaagggtaaaaagagacaaggcaggcaagtggcctatggggagaatgataaggatgaccagtgcaagggaggtatgaaatctgctcctttgc

SEQ ID NO: 818339 - DNA, 120 bp, Artificial Sequence
  ENSG00000286437_2 (sequence is synthesized)
tggttaaatcccagcagctgaagacatgctaccaaatgcctgacctaccattagctgttcccagggacctgggggtggaggaacccaggatccatcaggcttaccagttctgttcccatt

SEQ ID NO: 818340 - DNA, 120 bp, Artificial Sequence
  ENSG00000286437_3 (sequence is synthesized)
ctcacaggactcagctgagaagaagatgtaatctactgtcattccaagacccaatggcattgtagtgacctctgggcggccacgctggggcaggaagtgggtatatactgacgtcaggtg

SEQ ID NO: 818341 - DNA, 120 bp, Artificial Sequence
  ENSG00000286437_4 (sequence is synthesized)
gaggcagtgctggatggtacctacagtcctacagggatgaagggggaaacattagttaacaaaaattactaaattttccctagatcactttttctatgggttttatgaagattttttaaa

SEQ ID NO: 818342 - DNA, 120 bp, Artificial Sequence
  ENSG00000286437_5 (sequence is synthesized)
aggatgatctcagatgactcaatctcagccaattcctccccatgctaagaaggggctggcagtcttagctaaaattagcctagaaacacacatttgtactgagactccctaacactccta

SEQ ID NO: 818343 - DNA, 120 bp, Artificial Sequence
  ENSG00000286437_6 (sequence is synthesized)
gtgaggctttaccctctgaggaaagagtacatagccttttcacctgcagtaacatgggtgggtcacctctggcttctgcatacctacataaccctctataagtttagcagatattagggg

SEQ ID NO: 818344 - DNA, 120 bp, Artificial Sequence
  ENSG00000286437_7 (sequence is synthesized)
aaaaagagcttatcaaaaagtgctcccccaagtcaacctcaggacaaccaatgggaatctctctcttacacctaggcaagggctggattgaaaacagaagagaactggagaaggttacct

SEQ ID NO: 818345 - DNA, 120 bp, Artificial Sequence
  ENSG00000286437_8 (sequence is synthesized)
ggagaaggcaggctcaagctccgatgcatcttcctcaaggacagactcagcccaacccgcaggtcgctctgcagaggaccagagagaaaaacattttctcatccacagacagtgaagcag

SEQ ID NO: 818346 - DNA, 120 bp, Artificial Sequence
  ENSG00000286437_9 (sequence is synthesized)
gatcagaacctttcaccctaaaatccctctcagatccttgactggattgcttcagaaggatccagaaggagaaagggagaaacagtgaggaggagaagatgaccataaaccaaagtcaag

SEQ ID NO: 818347 - DNA, 120 bp, Artificial Sequence
  ENSG00000286437_10 (sequence is synthesized)
aacctcagaaagcagatacacggatatgatgatcctaaatttcatacgggaatgcaagagacccagaagagacaaaaatcatcttaaaaacaacaaagtcagaggacttactcgtcctta

SEQ ID NO: 818348 - DNA, 120 bp, Artificial Sequence
  ENSG00000286437_11 (sequence is synthesized)
tttcaaaagtacagtaatctatcttatccatgggggatacataccgagtcccccagcggatgcctgaaacaatggatactaccaaatcctaaatatactgtttttttcctaaacatacct

SEQ ID NO: 818349 - DNA, 120 bp, Artificial Sequence
  ENSG00000286436_0 (sequence is synthesized)
cacagttggaattgggaactacacatgggcacagcttacaggtggaatgatgactcacacctgaagatattttgacctttgtagtcttagggcaaaaactaaggtcctgtgtcttcaact

SEQ ID NO: 818350 - DNA, 120 bp, Artificial Sequence
  ENSG00000286436_1 (sequence is synthesized)
tgtaggatggtcacggaatattacaacttgcatgcacgttgaatgaagccctcaaatgctacaaagagtgccaaaatagagcccagctaaaactgtggtaaaactgtggctgttgtatgc

SEQ ID NO: 818351 - DNA, 120 bp, Artificial Sequence
  ENSG00000286436_2 (sequence is synthesized)
aaactcaaataaaagtaaggattatcagccttccacattaacagaacccactgttgaggttctgaatcgctcaccaagaggcaatcaagttggaattgtgactctcatgcatcaatccaa

SEQ ID NO: 818352 - DNA, 120 bp, Artificial Sequence
  ENSG00000286436_3 (sequence is synthesized)
tcgacagatgagatgataacaccaagtccaggatttagaacacctgggggctgtgcttcccctatcaaaacacagtctgttggtgagatttgggctctcgtgcattgatttagtccactg

SEQ ID NO: 818353 - DNA, 120 bp, Artificial Sequence
  ENSG00000286436_4 (sequence is synthesized)
tgctattgaccgggtccagctggatccaggtatgagagtcatcatctcacctgtgagctgtgaccatgtatatgtcgcaatttcacctgtcatcaggaagcagacatgagagtcctatca

SEQ ID NO: 818354 - DNA, 86 bp, Artificial Sequence
  ENSG00000286436_5 (sequence is synthesized)
tttcacctgtcatcaggaagcagacatgagagtcctatcacctgggtgctggacgaagtttcgctcttgtttcccaggccggagca

SEQ ID NO: 818355 - DNA, 120 bp, Artificial Sequence
  ENSG00000286436_6 (sequence is synthesized)
tagctgggattacagatgaaaaaagatgcaaagaagacatatttgctttttatccacacatcatttccaatcactatgctgagcaaagtcaatgtgagcagagctgagaatagcagtttt

SEQ ID NO: 818356 - DNA, 120 bp, Artificial Sequence
  ENSG00000286436_7 (sequence is synthesized)
ctggcaggacggccacttctgagcaaaaaatgacacaataaaagtataaatatttaatagtaagctaatatattttcagcaaattaagcatatgcattaataaaattattgtggtataat

SEQ ID NO: 818357 - DNA, 120 bp, Artificial Sequence
  ENSG00000286435_0 (sequence is synthesized)
ggcaatactcaggctaggagccgctgcactaggtgctagggacccactgaattttcaccagagcagtggcttggtcagatctctatttccagaaacatcgccctggaatcctttccttgg

SEQ ID NO: 818358 - DNA, 120 bp, Artificial Sequence
  ENSG00000286435_1 (sequence is synthesized)
cgtggaaggagaagttgaccccgaagagttactcagtcaagggcgactcattgctccactctaaggtttctctaagcacagggcggtggcgaaagggaagggctgcagggtggagtccgg

SEQ ID NO: 818359 - DNA, 120 bp, Artificial Sequence
  ENSG00000286435_2 (sequence is synthesized)
caccaagacctcccggcccggcttctagcagcacacggacgcttgagatgatttcttctgaaaacgggcagtggttgaaaaccactgcttcaaaacacagactggaggagtggtaaatac

SEQ ID NO: 818360 - DNA, 120 bp, Artificial Sequence
  ENSG00000286435_3 (sequence is synthesized)
taacgaggagttttagcaatggactctgttaacagagtctggtcgcctgagaagggcctcggaggactggccaggttggagaacgatttcaactgcgtactggacgacacacagaagact

SEQ ID NO: 818361 - DNA, 120 bp, Artificial Sequence
  ENSG00000286435_4 (sequence is synthesized)
gcggggagccttagcccctacccggcctgcagtgctctctggggcacacggcagccccacgacgcctttgggtttcttcgagcgctactcgcacgcaccagcgcccacacagctgcaacg

SEQ ID NO: 818362 - DNA, 120 bp, Artificial Sequence
  ENSG00000286435_5 (sequence is synthesized)
gtcccttccccaggcccgccccacacgccggccttttctgccgcttcccaagccggagccaatcagcgctcagcagcgaccggcagggacgaccaatcgacttatcctgcgttgtgctaa

SEQ ID NO: 818363 - DNA, 120 bp, Artificial Sequence
  ENSG00000286435_6 (sequence is synthesized)
agacctagaaatcgagcgtggtacattcgatcgacggaacgtctgggccctagtgctaagttgggtgactgttcggtggttgtctcggggggttgcaggaagatcctgtttccttggcgt

SEQ ID NO: 818364 - DNA, 120 bp, Artificial Sequence
  ENSG00000286435_7 (sequence is synthesized)
agaaggagaggttgaccccgaagagttaagattctcgaagcacactatttatccgtggccctcctcctccttcgcggggtagcttggggcaagtcatctattctctctagatctgtgttc

SEQ ID NO: 818365 - DNA, 120 bp, Artificial Sequence
  ENSG00000286435_8 (sequence is synthesized)
tgcctaaaaattaatgaatgggacaaaatggtctctacagtcccttgtttatcctggccctgcaaatccaggatcgctgccgttgtatctcagtctgatgtcggtggtcttgcgctggcc

SEQ ID NO: 818366 - DNA, 120 bp, Artificial Sequence
  ENSG00000286435_9 (sequence is synthesized)
ggtgttctgaaactttgtcggcagtaacatgcactccagtcagtctcttcagtccaggacaccatcgccggggaaactgaggcataagaaaaataaaaatgagcattgtccatccacaaa

SEQ ID NO: 818367 - DNA, 120 bp, Artificial Sequence
  ENSG00000286434_0 (sequence is synthesized)
gggagagaagctcttagcatgtcctgcttgataagtgtggctttgtgtaccccaggcctcagaccctaccagacagtgtatgctaacaatgctatttgtgaatgcctgtttttgctgtcc

SEQ ID NO: 818368 - DNA, 120 bp, Artificial Sequence
  ENSG00000286434_1 (sequence is synthesized)
tgagctccaggccactctgcattaatttgtcctctgaggatgtgagggatagagactgagtatctacggtcagctatatgggctctccacacctacagaactgatccccgataaaatccc

SEQ ID NO: 818369 - DNA, 120 bp, Artificial Sequence
  ENSG00000286434_2 (sequence is synthesized)
attggttcagggatgaaccaatcagaattcttccagggaatgagggggaaaaaaaactctcattcttcactaggattgctaagtggacttgaagagactttgccctagagatgacgagaa

SEQ ID NO: 818370 - DNA, 120 bp, Artificial Sequence
  ENSG00000286434_3 (sequence is synthesized)
gaagtggaccccagatgctgatgtttgggtacaaggatgcacactgagacctgatggaagtaaagcactgtacttctccagtctgcacaccaaaagattatctttttttaaacctaagac

SEQ ID NO: 818371 - DNA, 120 bp, Artificial Sequence
  ENSG00000260693_0 (sequence is synthesized)
acatacatgcctacctgggtccagttgtgtcctgtgactcctgctttcctgggacaggcaggctgctccgtgcctcctggccatcctactgggtgctggacgctgtaggctgctccatgc

SEQ ID NO: 818372 - DNA, 120 bp, Artificial Sequence
  ENSG00000260693_1 (sequence is synthesized)
ctgttggccattccctttggtgctggacagcactcacattgtgaaatccactggccctgtgaaaaacacctggaaatgttaccaggagaggggttagttctctttttggcaacccatgtt

SEQ ID NO: 818373 - DNA, 120 bp, Artificial Sequence
  ENSG00000260693_2 (sequence is synthesized)
gtggcatgtctccatgtcactttaagcatcaagcacacggagcccaataagatgctgaaaagtgtctgcctacaaggttacaaggtggtggagacattctgagccgggctgaagcagtgc

SEQ ID NO: 818374 - DNA, 120 bp, Artificial Sequence
  ENSG00000260693_3 (sequence is synthesized)
ctactcaataaaaccagtcatcgtgcaaagaaatgccacctgactcaaaggcaaagccagagtgcagcttggagcaaagaagtttgtgttgaaggagaaactaacaacgaaaatggactt

SEQ ID NO: 818375 - DNA, 120 bp, Artificial Sequence
  ENSG00000260693_4 (sequence is synthesized)
gttgacggaagaaaagtaggaatgcagcctctggtgctgtttgagtgatccctctgccccaggcctggctgcgcgctgctgtgttctggaaaggcgcattgtgccctcgctgtggcaggt

SEQ ID NO: 818376 - DNA, 120 bp, Artificial Sequence
  ENSG00000286384_0 (sequence is synthesized)
gggagagaaggcagggctgactatggccactagacaggaatcagcctttcactggtcatttaaagactacttctcactgagaggcagaaggaatcattccagccatcattgtctggatcc

SEQ ID NO: 818377 - DNA, 120 bp, Artificial Sequence
  ENSG00000286384_1 (sequence is synthesized)
tctgaacaacctccagcagcatcatgacctttaccaacatccgaggtgattctcagctctaagtattttttatttatttgaatcttcaggataaaagagggaaagctttggggttcttct

SEQ ID NO: 818378 - DNA, 120 bp, Artificial Sequence
  ENSG00000286384_2 (sequence is synthesized)
ccaggttgacattctgactccacctcttaacagacaagtgattttgagaaaattacttcacaagtcttcaacctcagtttcatggttttaaaactagaagcaatgctactacctagggga

SEQ ID NO: 818379 - DNA, 120 bp, Artificial Sequence
  ENSG00000286384_3 (sequence is synthesized)
aatttgttttaacaattacaagcaaaaatatgcacaaggaacctgggacaggtgccgagcactcttcactctgcaatgatcacccagaagacaacagagtgatgcttctctccacctgct

SEQ ID NO: 818380 - DNA, 120 bp, Artificial Sequence
  ENSG00000286384_4 (sequence is synthesized)
tctggacccaatgtagattgctgctgcttcagctgaccagattcctttcgattaacacagactttcttgagatatgttaacataccctttgcatcccacttaagtttggaagacatttcc

SEQ ID NO: 818381 - DNA, 120 bp, Artificial Sequence
  ENSG00000286384_5 (sequence is synthesized)
tctattataaatgatatgaaaatgtctgagagtttaggtgcatattttgaagtctaactcaaaacagtgattgtattttccctgtacacaaattcttcatgtacacccattggtgttctg

SEQ ID NO: 818382 - DNA, 120 bp, Artificial Sequence
  ENSG00000286384_6 (sequence is synthesized)
cagacagcttatactagttcaggggagctgcttgctaaatattcagaaattttgtgaattggctgtgaaacatagttgttattaaaagataaattacacaaacttacaactgatgaatca

SEQ ID NO: 818383 - DNA, 120 bp, Artificial Sequence
  ENSG00000286384_7 (sequence is synthesized)
tattaaaaacaaagacaatactcaactcatgattttctgtcctttgactgcatttcacaaatgtctgtgatcttgagattgtttatatctattgtaactgcaagtgctgtgctactgcac

SEQ ID NO: 818384 - DNA, 120 bp, Artificial Sequence
  ENSG00000286386_0 (sequence is synthesized)
ctggtggctggcgctgcccccaagacaactcttccccagaccccgccgccactctgccacgcccgaaccccaaaccgcgcccagcccacctgtgctttgctcccagctgcgccacgcctc

SEQ ID NO: 818385 - DNA, 120 bp, Artificial Sequence
  ENSG00000286386_1 (sequence is synthesized)
agatgcaggcggggaaagtgcgcccgcgggcagggaggggcctgcctgggagagtcccgctaggcccagagagaaaggctggaggcagagccgggcggctcctgcaagccttcgggaatt

SEQ ID NO: 818386 - DNA, 120 bp, Artificial Sequence
  ENSG00000286386_2 (sequence is synthesized)
cgctcctgcagtccctaaacttgactgtaaccacctctggttttcgccgtctgcggcgcagctctggagagttctggcccagatccgcgcgccacttcgctggaggctggaaggcgcgtt

SEQ ID NO: 818387 - DNA, 120 bp, Artificial Sequence
  ENSG00000286386_3 (sequence is synthesized)
ctccctgggatgtgcggatgcctggaattcgaaattagagctggagcccagaaccacaggactacaacaatcaattcaaggcaacctaagccttcgcttatacgctcctcaaaatcatct

SEQ ID NO: 818388 - DNA, 120 bp, Artificial Sequence
  ENSG00000286386_4 (sequence is synthesized)
cggcctctgcctgctcctcggttccaagcaatgctcatattcttatattctttatgattagcatctcacttccagaaactaacatattaatttttttattgcttcgtgaaaaattaccta

SEQ ID NO: 818389 - DNA, 120 bp, Artificial Sequence
  ENSG00000286386_5 (sequence is synthesized)
acatcataatggcttaagaaaacaacgatttgttattttatcatttccacgggaagtttaactggttgcctatggcccgagatcttcatcaaggctgcaatcaagttgttgctcagagct

SEQ ID NO: 818390 - DNA, 120 bp, Artificial Sequence
  ENSG00000286386_6 (sequence is synthesized)
gcagtcatcccaagacttgatcggaagggatctgctctctcactcacttgctctgagaaaatcaagctgccatgtgctaaccagcccaataaagaatcccatgttgcaagaaaatgatgt

SEQ ID NO: 818391 - DNA, 120 bp, Artificial Sequence
  ENSG00000286386_7 (sequence is synthesized)
ctctggccaacaaccatgaggacttgccaacagctgtgtgtaattacaagttggctggaaatagagtttgaaaccatatttggaggaagatacatcggtttggccaccggaaagaagtta

SEQ ID NO: 818392 - DNA, 120 bp, Artificial Sequence
  ENSG00000286386_8 (sequence is synthesized)
tgcctgagattttgttaacaaatgaaaagcaaacaaaagggcactgtgaaatgagataaaaacgatattcatcaggaagtgactgggtgactttatccaggagcaactcatgtgacatat

SEQ ID NO: 818393 - DNA, 120 bp, Artificial Sequence
  ENSG00000286386_9 (sequence is synthesized)
gccctttgtccgtggttcactaatcaacaccaactggcccgtaccatctactcaactggcacaagaataaacagttacttggaggtatcaaatagatacccacattacagtcacactgga

SEQ ID NO: 818394 - DNA, 120 bp, Artificial Sequence
  ENSG00000286386_10 (sequence is synthesized)
tgagtttatcacagaattttctttgtccttgggtctgcagaactgatactggacatcacattcctccttgtttcaatggaactcatcaaaatctccaaaattacgttcagagatgtcttc

SEQ ID NO: 818395 - DNA, 120 bp, Artificial Sequence
  ENSG00000286386_11 (sequence is synthesized)
cttagactggtgttcactgatgcgctcatgaaggtgatgtactgtgggcgtccaaggatcacctgctccaaagtctgatccaccattggctggccagtggccaatcagataatctcaatg

SEQ ID NO: 818396 - DNA, 120 bp, Artificial Sequence
  ENSG00000286386_12 (sequence is synthesized)
gcaggaaccaacagtgagctgtgggcactgcactgtgatgtcacagaacctgggacctgcggccatgctgggctaggacaagaggcagaggcagagagacagagaggagccaccctaaga

SEQ ID NO: 818397 - DNA, 120 bp, Artificial Sequence
  ENSG00000286386_13 (sequence is synthesized)
agagagaccaggtgggcttttctacgttggtgccttgcattttagctctttttttgctgtatgctcccagatcaaccccagatgaactgctatagctttcaaatacctgttgtttcttgg

SEQ ID NO: 818398 - DNA, 120 bp, Artificial Sequence
  ENSG00000286386_14 (sequence is synthesized)
gctttcctaagtaatcatctctccttcctgatacaagataactctccctggaagaccactccacaatcttctggtaactttgtgaacttagacaacttacttaacttctctgggcctcag

SEQ ID NO: 818399 - DNA, 120 bp, Artificial Sequence
  ENSG00000286386_15 (sequence is synthesized)
cttccccatctgtaaaacagcaacaataaccctccccctatcccacagagttgccctgagggccaaaataacaaattcatgtgagagatttgtgtgtattgcctgagacataaagcacac

SEQ ID NO: 818400 - DNA, 120 bp, Artificial Sequence
  ENSG00000286381_0 (sequence is synthesized)
gaaatctgtagcgtctgaagcatgggtctgtggttctcagcggaacacacggtcccaaaaggcccttcccaagatggccggggcttccgcctgccgccctccctcccgtggtgctgagcg

SEQ ID NO: 818401 - DNA, 120 bp, Artificial Sequence
  ENSG00000286381_1 (sequence is synthesized)
caggctgggcgcggccacatcaccctaagggcgtgggtgtcggagtcttgcaggctggggtcccaggtgagagatgccagcagggagctctagatggggaactgggtgagcctggctcgg

SEQ ID NO: 818402 - DNA, 120 bp, Artificial Sequence
  ENSG00000286381_2 (sequence is synthesized)
taagggcgtgctcagaacaccccatccccgaacacggtcttgtgtgataaaatgtcacgcaagaagaatctgaaaccgcgagaagaggaggacacggccagactgcaccgaaccccggca

SEQ ID NO: 818403 - DNA, 120 bp, Artificial Sequence
  ENSG00000286381_3 (sequence is synthesized)
cctctgtggggaaaagcaggtcaggctgagcggggccggcggggacacgcgctcctgggcttctccagagtctgccggggccgggcccgggaccgaggctgggacgcgctgtgcagtccc

SEQ ID NO: 818404 - DNA, 120 bp, Artificial Sequence
  ENSG00000286381_4 (sequence is synthesized)
acccctcacacccctcgcacgcctggaaacaccctcggggtaacacaagccggggttgagtttcttgaagagaagctggctgcatcctggagccagggaaagaggagcacaggggccaag

SEQ ID NO: 818405 - DNA, 120 bp, Artificial Sequence
  ENSG00000286381_5 (sequence is synthesized)
cggtccagggccacggaggagcaggacccctggggaaaggcccgggtctaggccggggccaggggaccgtggtggagacctcaaaaatggcagaacacggaagcagggcgagaaaagtaa

SEQ ID NO: 818406 - DNA, 120 bp, Artificial Sequence
  ENSG00000286381_6 (sequence is synthesized)
acgtagtccttgcggcagtttgaaatacacgcgggtaaacgctgggtgactccgcccggatgcagagtgggggtctgtgtctctccccacaggctgcagggaccgggctctgggtaacca

SEQ ID NO: 818407 - DNA, 120 bp, Artificial Sequence
  ENSG00000286381_7 (sequence is synthesized)
gcagaaggtaacagaacgaggctgcttttcctccaggctgttctggtgtccgcgcgtggcttgtgcgctgactcctgacttggagcgccgcgtggccagagaaatctgggtgcctccagg

SEQ ID NO: 818408 - DNA, 120 bp, Artificial Sequence
  ENSG00000286381_8 (sequence is synthesized)
ccaccatggtgagaggagaggccaccgcacgaacggaagaagcgatggagacggtctttacgacctaagaacagaaagagtttcttatacacaatccgaaaagtaaaaattgattgattg

SEQ ID NO: 818409 - DNA, 90 bp, Artificial Sequence
  ENSG00000286381_9 (sequence is synthesized)
tttcttatacacaatccgaaaagtaaaaattgattgattgattgattgagatggaatcccactctgtcgtccaggttagagtgcaatggc

SEQ ID NO: 818410 - DNA, 120 bp, Artificial Sequence
  ENSG00000286381_10 (sequence is synthesized)
attacaggcgtgagccaccgtgctgggccaaaaatcaattttaaaacgaccacatgaaaaataaatctcctgtatcacagagcatgttctgaggaaaatgaaagccacagatccagaaga

SEQ ID NO: 818411 - DNA, 120 bp, Artificial Sequence
  ENSG00000286381_11 (sequence is synthesized)
aaagccacagatccagaagatatttgtgacacatatgaaaaacaaaaactcatattcaaaacatacacagcattgctatgaatcattaagaaaaatgatttcgtctcctctacaggagcc

SEQ ID NO: 818412 - DNA, 120 bp, Artificial Sequence
  ENSG00000286381_12 (sequence is synthesized)
tgagtgaaggacaaggacagatcattataaaccagggagcttgaagagctagttaacaagcacagaaaatatgttcccccacactgttaatcaagaaaattaaaactgtaatgagatgcc

SEQ ID NO: 818413 - DNA, 120 bp, Artificial Sequence
  ENSG00000286381_13 (sequence is synthesized)
gcattgtatccatgggatttctaaaagtacaaagttccacaatacccgttgttgacggagcagggaaaccgcaggagcctgcaggagatgagattgtaaatgtgcaaggacattttggag

SEQ ID NO: 818414 - DNA, 120 bp, Artificial Sequence
  ENSG00000286381_14 (sequence is synthesized)
tggatgtagcttatccctccgatggaaagttacaaagaagttaaaatgaatgggctgcatctctgtgtaacaatttggatcaatatcaaagacacatttgttaaagcaaggtgtacaatg

SEQ ID NO: 818415 - DNA, 120 bp, Artificial Sequence
  ENSG00000286381_15 (sequence is synthesized)
aaacctgcaacatgatttgtctgtttagtaaaacacagaaaatctaactccgcctggcttacgaacacacacatgtgttagaatttgggaaaaggaaagggagggaggccggctacacgt

SEQ ID NO: 818416 - DNA, 120 bp, Artificial Sequence
  ENSG00000286381_16 (sequence is synthesized)
gaggccggctacacgtgaacttttggaaaatctcagagggtctggggcaccaggtggagaccatggcagccttcagggatatgagtgagttctcgtgagatctgatggttttataagggg

SEQ ID NO: 818417 - DNA, 120 bp, Artificial Sequence
  ENSG00000286381_17 (sequence is synthesized)
gtttgcttccccttctgccatgattggaagtttcctgagacccctccagccatgctgaactgatttcctgaagacaccatcccagtcaagtggtctgcctcatactgagccaccagacca

SEQ ID NO: 818418 - DNA, 120 bp, Artificial Sequence
  ENSG00000286381_18 (sequence is synthesized)
cccagtcaagtggtctgcctcatactgagccaccagaccacccagcatgtcctcacccgcgtggacagatgacagggggctctgagcatgccccagtgcaccttacgcacctgtgaaggt

SEQ ID NO: 818419 - DNA, 120 bp, Artificial Sequence
  ENSG00000286381_19 (sequence is synthesized)
tgggagcctgagtgcagctcctgtggcactgcccgtggccagggagatgcctcctcagtgctcctgaccctcggtggaggaccggccagcgtgtgtgccgacagtgtgtccacacaggtg

SEQ ID NO: 818420 - DNA, 120 bp, Artificial Sequence
  ENSG00000286381_20 (sequence is synthesized)
tgctgcgcccaatgggcaagtcggaaacaaaggaaaatgctctctgaaggaaaaggcaaagcaatttggatttctgcgagaaaatgagactgcatgtggcactgtaaatacccttgctgc

SEQ ID NO: 818421 - DNA, 120 bp, Artificial Sequence
  ENSG00000286381_21 (sequence is synthesized)
tgaacttctcgctccccccagatacacccttcatattgacatgtctagaaccttaaactgaaccaagttgaaaagtgagattaattagggctgagttaacagttaacacatacaatgaaa

SEQ ID NO: 818422 - DNA, 120 bp, Artificial Sequence
  ENSG00000286381_22 (sequence is synthesized)
tattgaataaggcttactgagcaaacaagaatatacagaagtggaggagacaaagaggatattaaaaatgcagacagtgatgaggcagatagctgggacaaataatgaaaaatagtaaag

SEQ ID NO: 818423 - DNA, 120 bp, Artificial Sequence
  ENSG00000286381_23 (sequence is synthesized)
gagataaggcagatattggaggagcaaagagtctctgaaatagatatcggtattgaaagatgctaaacacgcttctaaagagactttctagccgacacagggagctcactgatggatgaa

SEQ ID NO: 818424 - DNA, 120 bp, Artificial Sequence
  ENSG00000286381_24 (sequence is synthesized)
gtagaaacatttttaaatggaatcaaacagggcaaagcgggagaagaaaaagaagtaggtaaaccagtaaattaacttttctcgtgtgtgctgtgtactatttgtgagtgagcaatgaac

SEQ ID NO: 818425 - DNA, 120 bp, Artificial Sequence
  ENSG00000286381_25 (sequence is synthesized)
gctgtggctccctggaggggctgtggtgggaagtttcactgcgatcaagtagaggtggtgcctttggacctcttctcctgaacctgcagggagaggcgcagaatattcacaaggtgaaga

SEQ ID NO: 818426 - DNA, 120 bp, Artificial Sequence
  ENSG00000286381_26 (sequence is synthesized)
tgcaacaattcaaatgagtgtccaggttttcagggtggttgctaaaccccaaaagaccgatagcttcgggcaaaagactgcagaaagaacagctttacatttttacggaagcaatgggaa

SEQ ID NO: 818427 - DNA, 120 bp, Artificial Sequence
  ENSG00000286381_27 (sequence is synthesized)
atataccctgtaagccttgaaaaattcccgaagggattcctgttcattcctgtggatcctaatgggccagcatagacctgttagtcaaaagaggatttatctacattgcacactcattca

SEQ ID NO: 818428 - DNA, 120 bp, Artificial Sequence
  ENSG00000286381_28 (sequence is synthesized)
ggcaggcagggaagtcaacgccactttcagatgtttgtagagcatgaactctgtccgttcccacgccctccaaaggctgttacacagggatgcccgcttctggacagaagtgattcatgc

SEQ ID NO: 818429 - DNA, 120 bp, Artificial Sequence
  ENSG00000286381_29 (sequence is synthesized)
aggatgagaaccatgaccacagaagattttgtgcatgtggttatttcaatatttaatttaagtgtatgcatgagtgttcaggataaaaatgcttggagtgtactttaattccattaaaaa

SEQ ID NO: 818430 - DNA, 120 bp, Artificial Sequence
  ENSG00000286383_0 (sequence is synthesized)
agacatttcagacctcctctgggaaccaaatattccaatggcctttctgccttgtcaccaggaggggagtgggttgcttgaagcccaccctccctcaaggctctcttgcctttgggacat

SEQ ID NO: 818431 - DNA, 120 bp, Artificial Sequence
  ENSG00000286383_1 (sequence is synthesized)
cttgggtgccacttgggagaaggagaagcaggatggaactatgaggagcctgcttccagccatgtgaagatgcctgctgcagcctcgccttctgccttgaataaaagctccctcaggcct

SEQ ID NO: 818432 - DNA, 120 bp, Artificial Sequence
  ENSG00000286383_2 (sequence is synthesized)
ccccagaaaaagatgctgccatgcttcctgtacagcctgcagaacatgagaaggaagcatatgaatgttcagagaagataaagtctatgtacgccataaaggagacaatggaaaaggggc

SEQ ID NO: 818433 - DNA, 120 bp, Artificial Sequence
  ENSG00000286383_3 (sequence is synthesized)
ctggaaaatagtataaacaaagacagtcagttctgctctaagtcttgttttgaaaacatgaatttgttccaacccaattcatatattagggagcaatctaagtgtaatacagattttgca

SEQ ID NO: 818434 - DNA, 120 bp, Artificial Sequence
  ENSG00000286383_4 (sequence is synthesized)
tttgctggtgcatggtttttccctgagaaacaccagatgaatggagaaaactctactgagctgaaccaaacagggcagaagtacacaaaatgtacacaaggacacctctcaaattcctac

SEQ ID NO: 818435 - DNA, 120 bp, Artificial Sequence
  ENSG00000286383_5 (sequence is synthesized)
cacctgagtttacagggtgtgttagaaaccctctttccaccacttcataggaactcataagctgcaccccttccaacgaccagctccatatacaaaattaatgtctgtttcaggatactc

SEQ ID NO: 818436 - DNA, 120 bp, Artificial Sequence
  ENSG00000260694_0 (sequence is synthesized)
agacctagaaaaatactggagccacagactttatctgaatgtctgaaatgacctctcttcacattatgggcagcctgaaggccatcggctcccaagttttatgtcctagagctttcacca

SEQ ID NO: 818437 - DNA, 120 bp, Artificial Sequence
  ENSG00000260694_1 (sequence is synthesized)
cccaaggtagccacaagaggagcaggtaggaacagagtttcctggagaagaaggggtcagggatgggtgccaaaaaccaaccccacagctgcatgtttacagtttagaccatctctgtga

SEQ ID NO: 818438 - DNA, 120 bp, Artificial Sequence
  ENSG00000260694_2 (sequence is synthesized)
attgcatccttatgttctgtattttaaaaggccattttcagctcctacttagcttccactcagaaataccattcacatcaggtctctgtgcatgcatgtggttttttaatccacacattg

SEQ ID NO: 818439 - DNA, 120 bp, Artificial Sequence
  ENSG00000260698_0 (sequence is synthesized)
gtatttctgtgttgcatatgggctggggtccctcctgtccttctctcctacacgatcccagatctgatttctaatggtgttgtatttcctccctaaatcatttttcaatagtatttttgt

SEQ ID NO: 818440 - DNA, 120 bp, Artificial Sequence
  ENSG00000260698_1 (sequence is synthesized)
tcttctgtgggatacagaagaacttttttttcctattgcaataaggacaagtaaacaagtcagaagcctcagaagacctcaagagagaaatcacagccttcaattcctggtccctttctg

SEQ ID NO: 818441 - DNA, 120 bp, Artificial Sequence
  ENSG00000260698_2 (sequence is synthesized)
aaacctcagctcttgattcacttaatttcaaggagaattgttttatgactacgccaagctgacccaaagacccctgggaagcacgtggcccatcagagggaagggctaggccctggggct

SEQ ID NO: 818442 - DNA, 120 bp, Artificial Sequence
  ENSG00000260698_3 (sequence is synthesized)
ggaaaggatgcagagcctgttttcaacaattacgtctacattttccaagagattaaaccgattggaagccaagcattggagaagagatcttttgtcttccttggcaacatttctgaaatc

SEQ ID NO: 818443 - DNA, 120 bp, Artificial Sequence
  ENSG00000260698_4 (sequence is synthesized)
tacagatagggatgaggaagtgaggcacatttttcatctgttccaacaaactgccaatggaatggctgacatgccattttagtgtatgtcatctctcccgtgttccgtcatcactgaggg

SEQ ID NO: 818444 - DNA, 120 bp, Artificial Sequence
  ENSG00000260698_5 (sequence is synthesized)
tcagctgggccctgcccttgaatacagcacagggctggtgtcatggagccggccttccttacactaatgaaccgcaggagcctccccttgtcccttgcctggggggaactaatggcattg

SEQ ID NO: 818445 - DNA, 120 bp, Artificial Sequence
  ENSG00000260698_6 (sequence is synthesized)
cagggcaaaggctcagcagggaccctgtagatagaggatagatcggcacccaggcgtcttacagggtggaccccatgctggcagggtgggaagccagagaaaagaggcttggaagaagca

SEQ ID NO: 818446 - DNA, 120 bp, Artificial Sequence
  ENSG00000260698_7 (sequence is synthesized)
aagggaactctcaagagggtgcagagatgaacgtggcttgcacctggagaattcccagccaatgtgagcttgacgcccctctcctttccaccaatcagatggcactaccacctcctccta

SEQ ID NO: 818447 - DNA, 120 bp, Artificial Sequence
  ENSG00000260698_8 (sequence is synthesized)
attcctctaccaatgaaaactaggttcctttaccttatccaccaatcagggctttggacaaagaataatcttatcaaaccccacatggattcacacgcatctggtagcttggttgttggt

SEQ ID NO: 818448 - DNA, 120 bp, Artificial Sequence
  ENSG00000260698_9 (sequence is synthesized)
aagtctctgcatggcaagctgggtctccaagtctttattgttatgcttctatcgtttggaggcagaaggggagatgggagagctaaaagcccaggtccctttcttccctgaaaaccctga

SEQ ID NO: 818449 - DNA, 120 bp, Artificial Sequence
  ENSG00000260698_10 (sequence is synthesized)
aaaaagtttctgcctatgtgaaaaagaaggggtttagtggacagtcatcataagccaacagtgatatgtgggcgtcatgctaatgccgtggcttaggctgcactgatacacatttatcaa

SEQ ID NO: 818450 - DNA, 120 bp, Artificial Sequence
  ENSG00000260698_11 (sequence is synthesized)
accaatacattgccaacggaatggctgacacgccgctttaatgtatgtcatctctgtgttcggtgagcgcagtgatgtccttcaaggaaggacttgttgccttggctgctgcgctgccat

SEQ ID NO: 818451 - DNA, 120 bp, Artificial Sequence
  ENSG00000260698_12 (sequence is synthesized)
caagatagctctgtgtgtttgtttcataaataagctccatggcaaattcgcattgtttttccccaaataagcaattccgaaggctgggccttcactgagagcttgcatctctgcataaac

SEQ ID NO: 818452 - DNA, 120 bp, Artificial Sequence
  ENSG00000260698_13 (sequence is synthesized)
tgcctctgggctttgggacctgctttagcttccaggagctgctcttcaagaccacattcctccccagagcagccctgtcaacatccagggacagatgaaagcccgagtatgaagacctga

SEQ ID NO: 818453 - DNA, 120 bp, Artificial Sequence
  ENSG00000260698_14 (sequence is synthesized)
ccatctcccccgaaatcaggaaactctgaagagcattctagctccaaagattcctgtgggttggctggggctgtccttggacctgtagtacagcccaggtcctcccactgcccacacccg

SEQ ID NO: 818454 - DNA, 120 bp, Artificial Sequence
  ENSG00000260698_15 (sequence is synthesized)
ctcttgcctcctctcttacacaggtgttggtctgagggcacttgtacaggctaaactccatctgagtccgcttcccaggaaaaccagcctgcagggaaaccatgccagttctctgtgcta

SEQ ID NO: 818455 - DNA, 120 bp, Artificial Sequence
  ENSG00000260698_16 (sequence is synthesized)
cttgcatctcccttgcagagctgccttcagaatctggacaaagattttggtcaatttataaagtttattttatttatttatttattttttgaaatggaatctcactctgtcgcccaggct

SEQ ID NO: 818456 - DNA, 120 bp, Artificial Sequence
  ENSG00000260698_17 (sequence is synthesized)
ggctggagtacagtgacgcgatcttggctctctgcagcctgcgcctccagagttcaggtgattctcgtgcctcagcttccccagtagctggcactacaggcacgtgccaccacacccagc

SEQ ID NO: 818457 - DNA, 120 bp, Artificial Sequence
  ENSG00000260698_18 (sequence is synthesized)
cgtgagccaccacgcccagcctaatttataaagtttctgtttgtcacagctggctgaaatgtgatagacatcttctgaaggtgaggtcatcttctaaggaagatgttcaaaggaaaactg

SEQ ID NO: 818458 - DNA, 120 bp, Artificial Sequence
  ENSG00000260698_19 (sequence is synthesized)
actattggaaagataagggatgggtgaggggtgaaatcaggaatcttgcgggcagatggacgagatgccctctgtcagacctctgaggccaagctaagccgtcatatcccctgtgaccct

SEQ ID NO: 818459 - DNA, 88 bp, Artificial Sequence
  ENSG00000260698_20 (sequence is synthesized)
tggcctgaagcaactgaagatccacagaataagtgaaaatagccacttattagttcctgcctcaactgatgacattccaccattgtga

SEQ ID NO: 818460 - DNA, 120 bp, Artificial Sequence
  ENSG00000260698_21 (sequence is synthesized)
cctaactgatcaattgactttgtgacattccttctcctggacaatgaatctcaggagctccccaccagcaccttgtgacccccgcccctgcccgcaagagaacaccccctttcactgtaa

SEQ ID NO: 818461 - DNA, 120 bp, Artificial Sequence
  ENSG00000260698_22 (sequence is synthesized)
gtaattttccacgacctgcccgaatcctataaaactgcctcaccccgatctccctttgctgactccttttacggactcagtctgcctgcatccaggtgattaaaagctttattgctcaca

SEQ ID NO: 818462 - DNA, 120 bp, Artificial Sequence
  ENSG00000286389_0 (sequence is synthesized)
agaggaggggagatgcgggctcctccaggtagcgcaggagcccctccggctgccggagccccgcgagggcgcgagtggagggcaggagcccgggcggcggaggagcggaagggatgctgc

SEQ ID NO: 818463 - DNA, 120 bp, Artificial Sequence
  ENSG00000286389_1 (sequence is synthesized)
gttgccttggagtgtcagggtgggggaggaaagaccaagggacccacgtccttcgcccccgccgcggagtcccgggccggcgagacttccgcagcctgcccagcgccggggacctagggc

SEQ ID NO: 818464 - DNA, 120 bp, Artificial Sequence
  ENSG00000286389_2 (sequence is synthesized)
tttgcaggagtccgcccgggagctctatcagagcgggcgtcctccccgccgctccaaaggtggcttggggcaggtggggcgtcccggagggaatggagggaccctgcctagggaaggagg

SEQ ID NO: 818465 - DNA, 120 bp, Artificial Sequence
  ENSG00000286389_3 (sequence is synthesized)
gatttcgctgcctgtggggcttcagtgctgaaccaggcagccctgagcagaccaggaccgagcttcccaaacctgaccgggaaggagccctggttgcatctgggatccacgtggtcgaca

SEQ ID NO: 818466 - DNA, 120 bp, Artificial Sequence
  ENSG00000286389_4 (sequence is synthesized)
gagaatcagctcgcagctcaccaccccagtgacttcagggcagcccaccttcccctggcgctcctcaaacgagccagggagtggcccctgctcagactcccctcctgcctcccggaccct

SEQ ID NO: 818467 - DNA, 120 bp, Artificial Sequence
  ENSG00000286389_5 (sequence is synthesized)
gcaggcctacccgccccagttgccctttgccctcctgcagccttctgggggtgctacatgtctgaggcccggtcttctgtcctgctcctcctgatggggggtctgggcactctccctaat

SEQ ID NO: 818468 - DNA, 120 bp, Artificial Sequence
  ENSG00000286389_6 (sequence is synthesized)
tcatcgcgaagactctgacacccaatgcccgtcttcaggccccggcagatgcagagaagtgggcttcacacccacatctgcctgacctcaggtgctggctcctgcagtcacagccctgag

SEQ ID NO: 818469 - DNA, 120 bp, Artificial Sequence
  ENSG00000286389_7 (sequence is synthesized)
ccccggcccctccaggctgtctcctgcttgtccaggtgggcatgagctggtcagttcctggccactgcccttcagaccccatgccaggactttgggttgggctctgggcatggcactagc

SEQ ID NO: 818470 - DNA, 120 bp, Artificial Sequence
  ENSG00000286389_8 (sequence is synthesized)
caggcctgggtgcctccttgagcagctgagggctgggagggatgacaatgtaagcggctatctggcttcaggcccaggctggccatctggtggccatagctctcacaggctgggcccctg

SEQ ID NO: 818471 - DNA, 120 bp, Artificial Sequence
  ENSG00000286389_9 (sequence is synthesized)
cttctcctggctcccctcttaggggcaggagaccctcagtggcctcactgcggactgctggacaggccctgtgtggaggcaccatccgggtccgccatgcctcgtgggtcagaacatccc

SEQ ID NO: 818472 - DNA, 120 bp, Artificial Sequence
  ENSG00000286389_10 (sequence is synthesized)
tgtgaagtgcatggtgttttctgtggctgccacaggaggctctggccagggttgccccccactgtggctctcatttttttcaaagcccagctcacctccttcctgagcagccaatgcctg

SEQ ID NO: 818473 - DNA, 120 bp, Artificial Sequence
  ENSG00000286389_11 (sequence is synthesized)
cacagagcacagagccaggtggattaggaacccagttgatgagaagcagaggcccttggtttaagcctgatcttgtgacagacaggaagcagagaccctctaagggagctcaggctgccc

SEQ ID NO: 818474 - DNA, 120 bp, Artificial Sequence
  ENSG00000286389_12 (sequence is synthesized)
aaggccacctgcccagcaggccccacaaagttcttccactctaggagcactgcagcaaggttccctcttagaaaccaaaacagatggcttgaccccactcaggacctcgagtggtcaacc

SEQ ID NO: 818475 - DNA, 120 bp, Artificial Sequence
  ENSG00000286389_13 (sequence is synthesized)
cctgagtagccccactgggcaaaaccatctctgcccaaggaaggcgtccttaactcaatttttgcctttccaggtcttctctgaaagaggccaaacaagtttttaaaagtttaagaaaat

SEQ ID NO: 818476 - DNA, 120 bp, Artificial Sequence
  ENSG00000286389_14 (sequence is synthesized)
gagaaaaataaagccacaaatatggaatcatggaataatgattccgtaataatggcccaccataattgacgggccaatccctttatccaaggcatgtgttgtttgtttgtttgtttgttt

SEQ ID NO: 818477 - DNA, 120 bp, Artificial Sequence
  ENSG00000286389_15 (sequence is synthesized)
ggcatgagccaccgtgcccagccaagacatgtattcttacgcttgagatagaacaggtctaccagcattgaatagaaatcagggagtgctcactgtttggaagagaaggcagacaatgaa

SEQ ID NO: 818478 - DNA, 120 bp, Artificial Sequence
  ENSG00000286389_16 (sequence is synthesized)
aagagaaggcagacaatgaaactgggtagacaggcggctgtggagcacggctctggcctctgagatgcctggggccaaagccaagggtggatagatctgtgtttctgtgcctcacagcat

SEQ ID NO: 818479 - DNA, 120 bp, Artificial Sequence
  ENSG00000286389_17 (sequence is synthesized)
gaacctagataggtgatgcttcctgggagaagcaggtttaatccaggcactgctttctacaaagagctgttctcagagggcttctctgaggtcaaggcagggtcttctgccaaggcatgc

SEQ ID NO: 818480 - DNA, 120 bp, Artificial Sequence
  ENSG00000286389_18 (sequence is synthesized)
tgggtgggtggggtcccagacacccatggctgcaatgagatttgcaggagatgcagatcacctcagcccagtgttcttcataacctgtcccagtgtctaggagctccataacattcatcc

SEQ ID NO: 818481 - DNA, 120 bp, Artificial Sequence
  ENSG00000286389_19 (sequence is synthesized)
tgtgaccctaacactaaccctgatcctctacctaacactgaccctaccaataaccctgacactaaccctgaccctaacactgactttaatactgaccctaccagtgatcctgacatgaac

SEQ ID NO: 818482 - DNA, 120 bp, Artificial Sequence
  ENSG00000286389_20 (sequence is synthesized)
cctgaccctaaccctcactgtatcgctgactctcactgtgacactgtgaccaagaccctgaccctgaccctaagtctagccctaaacctgatcgtaacactaacactgaccatgaacttg

SEQ ID NO: 818483 - DNA, 120 bp, Artificial Sequence
  ENSG00000286389_21 (sequence is synthesized)
accctaactctaacccaggctctaaccctaacccagaacctgaccttatgatactgataccctgatgctgacgctgaccataaccctaaccaccgccccaaccctaaccctgaccttatg

SEQ ID NO: 818484 - DNA, 120 bp, Artificial Sequence
  ENSG00000286389_22 (sequence is synthesized)
accttatgaccttgatcctaaccctaactctgaacctaactatgacactgactctagtcctgaccataattctgatcctactgctaaccctaaccttgaccctgaccccccaactcacac

SEQ ID NO: 818485 - DNA, 120 bp, Artificial Sequence
  ENSG00000286389_23 (sequence is synthesized)
cctgaccaggaccctaaccctatgtttgaactaaatgtcttcacgtattagggatgttttaaggttcttgtaagtttggatgcatcttgctgacttgcattatttataattacaaacaca

SEQ ID NO: 818486 - DNA, 120 bp, Artificial Sequence
  ENSG00000286389_24 (sequence is synthesized)
agcagctatgattgagctttgcagcaaatgttttccttctcttgacttctgggtcagtttaattaaaatgtgctttgctgtagaagtcaagctttttaaaaaaccattgaatttattgga

SEQ ID NO: 818487 - DNA, 120 bp, Artificial Sequence
  ENSG00000286389_25 (sequence is synthesized)
caaaacacaatatgttgtagctgagaccacacggccattcagagtcccagattttgcatttttgtatgtatcaaaacagtcttgttatccttactgcctttagaagtattctgcttgaca

SEQ ID NO: 818488 - DNA, 120 bp, Artificial Sequence
  ENSG00000286389_26 (sequence is synthesized)
gccggattccgatccaaggcccagagtgtccgcgacagagccgggcttcaccgaaagcacacgctcagcggccttcccggcgagcgcgcagccccagtgaacctatggctcagcattttc

SEQ ID NO: 818489 - DNA, 120 bp, Artificial Sequence
  ENSG00000286389_27 (sequence is synthesized)
agaagaaagcctgtcggcatagactttccgtgatttcaaaggagacgcttccaaaaccaaggtcttgacctagatttggaagcgatccctccagagcttacatttggagaccggtagaga

SEQ ID NO: 818490 - DNA, 120 bp, Artificial Sequence
  ENSG00000286389_28 (sequence is synthesized)
ccgggcctgttgggacaacagctccgagggctacgctgcgtggactaggttccagacgcgctctgaggaggcgcctcccggctagttcctgagcgcgctcgagaggagcgtgccccgcag

SEQ ID NO: 818491 - DNA, 120 bp, Artificial Sequence
  ENSG00000286389_29 (sequence is synthesized)
gagagacgctgatactggcgtgtccccagaaaagccagggtgcccgacctccacagagtctctgggagccggagaagtctggcacattcctccccaaacaccggcgtcttcccatggcag

SEQ ID NO: 818492 - DNA, 120 bp, Artificial Sequence
  ENSG00000286389_30 (sequence is synthesized)
agaggggacgtcatagtttgcccactggtcacgaatacggaacgcttgatgggcacctcagtcccagggaggagaccgcgggagaggcggcgggaccagggtcccggccttcagcggctt

SEQ ID NO: 818493 - DNA, 120 bp, Artificial Sequence
  ENSG00000286389_31 (sequence is synthesized)
gctccgcacactcagggttccccggccctctggcgctgggggagttgggtcggttgtgcatgctgcatggccggaggctcggggccaaggccacccttccgcacccaccactctgggagg

SEQ ID NO: 818494 - DNA, 120 bp, Artificial Sequence
  ENSG00000286389_32 (sequence is synthesized)
ctccagagcgcggccctgagatagtgccacactcaccccctggaaaggaggcaaggccgccctggacggaggcgactcggagtcccgggaggaaggaacggacacaccggcctccctgcg

SEQ ID NO: 818495 - DNA, 120 bp, Artificial Sequence
  ENSG00000286923_0 (sequence is synthesized)
gccacacttccggcctttgtgggccgcagcgacggcggtctgcggctgtcggttctgtttgttgctgtcactgctgtttgttcttgccagcggctagggtctggctgttttgcccagaat

SEQ ID NO: 818496 - DNA, 120 bp, Artificial Sequence
  ENSG00000286923_1 (sequence is synthesized)
tgccagcggctagggtctggctgttttgcccagaatggagtgcagtggcgtgatggtctcggctgacagcagcctcgacctcctgggctcaagccttggcctcccaaagtgctgggatta

SEQ ID NO: 818497 - DNA, 120 bp, Artificial Sequence
  ENSG00000286923_2 (sequence is synthesized)
agcccacagccctaaattcatctgtgtccaatgccagaccctgcaactgctgatttacatgaatcaactccatcatgcaagcctcatgacatcccaatgagccaccatcctgtgaggaag

SEQ ID NO: 818498 - DNA, 120 bp, Artificial Sequence
  ENSG00000286923_3 (sequence is synthesized)
cccagagcacatgaagagaccacctgcacatgttcagatccactgccccagctaagatctccgctgacagccagaccaatcaccaatcttaggagctggcgagccttcagatggtccaac

SEQ ID NO: 818499 - DNA, 120 bp, Artificial Sequence
  ENSG00000286923_4 (sequence is synthesized)
ctttgaggccccccagaggagccaggtggagcatagatgagccatccatgtggatccctccaccaaatggaagatttaggagcaaaataaacaatgttgtcattgctttcacccacgaaa

SEQ ID NO: 818500 - DNA, 120 bp, Artificial Sequence
  ENSG00000260526_0 (sequence is synthesized)
cctggttcagccgcctctgcctgcgagacggttcaattcctgcgtgcggacgtttgttttgttggaccttgacctgactaggaaatttccctctctcattgcagtttcgggcatcctcgt

SEQ ID NO: 818501 - DNA, 120 bp, Artificial Sequence
  ENSG00000260526_1 (sequence is synthesized)
ccggagcacgctgggcgtggcatggctaaggctcagccttcgaactttgtatcaaaggcgtgtgaggagccagagtcccaggccggaagtcataagtgcgaaggggcgtttctctgcacg

SEQ ID NO: 818502 - DNA, 120 bp, Artificial Sequence
  ENSG00000260526_2 (sequence is synthesized)
gtgtgcttagtttttgttaatactgcaccataagcggaaaatagactcgggaactgattgaggttactttgaacgcaccaagatttttttccggtctctggtttgtgtcttaatttccat

SEQ ID NO: 818503 - DNA, 120 bp, Artificial Sequence
  ENSG00000260526_3 (sequence is synthesized)
actgttaatgttttagggaaacgtaataatggtgcattattgtcctcgttttgtttgaaaatcagatcttcacataattttgggttgggtagttggggttcagaggaaattggcaagagg

SEQ ID NO: 818504 - DNA, 120 bp, Artificial Sequence
  ENSG00000260526_4 (sequence is synthesized)
gctggggtttttcggggacgtcagcgttgccattccaagcatgctgcccagaactgctgtagatgggaagagaaagctgctctaatgtgtccgcagccctctcaagtgctaccatataat

SEQ ID NO: 818505 - DNA, 120 bp, Artificial Sequence
  ENSG00000260526_5 (sequence is synthesized)
tcgcgtcttgtttggcctcaagacagttggcctcacaatagatataagatgtggtttagtagacacctcgtccagtggataggaggatgctctcatggactggacacatcaagtttttag

SEQ ID NO: 818506 - DNA, 120 bp, Artificial Sequence
  ENSG00000260526_6 (sequence is synthesized)
cctgtttaattaaacctagaaaaattgttacattttagaaagtttttattgatgataaaatgttctctgaactcattttcttgcttctttaaatacgtatctggtttcaatcttagcact

SEQ ID NO: 818507 - DNA, 120 bp, Artificial Sequence
  ENSG00000260526_7 (sequence is synthesized)
gctacttactaatgtttattttatttgggttttagttgttttgtaatcagaagcataggataacatttgtcccaatggtttgctttcagtgaatgttgggatgaccgaatgacttcctag

SEQ ID NO: 818508 - DNA, 120 bp, Artificial Sequence
  ENSG00000260526_8 (sequence is synthesized)
tatttagtaacaaataggaacacagtattgatgaacacaccctgaaatgaatctgtaggaaattatggttaaagaaaaagccaatctcaaatgcttatatactgtgtaattccattatgt

SEQ ID NO: 818509 - DNA, 120 bp, Artificial Sequence
  ENSG00000260526_9 (sequence is synthesized)
aacatctcagaattgataaatttatgtaagtggacaacagaataattgattgccatgggtcagggaatggaaatcctgcatcttgtctatattaatgtcagtattctggttgtgatattg

SEQ ID NO: 818510 - DNA, 120 bp, Artificial Sequence
  ENSG00000260526_10 (sequence is synthesized)
caatagttttgtaacatgtcaccactgggggaaactagattaaagatatacacggtcatctgtatattatttcttaaaactgcatgtgacacaattgtctcaatataaaaagtttgatta

SEQ ID NO: 818511 - DNA, 120 bp, Artificial Sequence
  ENSG00000260526_11 (sequence is synthesized)
aaaaaatgcagctatagacttgacagcacttcctatagacattctataaaccgttattaaaactgaatctcacttaaaaataatttttttatagtaaatctgttctctcagttaaggata

SEQ ID NO: 818512 - DNA, 120 bp, Artificial Sequence
  ENSG00000260526_12 (sequence is synthesized)
tgaatgatcctcagaagcaatacaaatgaataagacatttaaaaacttcactaagcaaaataatgcaaattaaaatgcatgttttagtcatttgtattgattcacttgtcaagttaacaa

SEQ ID NO: 818513 - DNA, 120 bp, Artificial Sequence
  ENSG00000260526_13 (sequence is synthesized)
agctttacagttagaaatattcagtatttgcaaggatacaatgaaatggtactattctaaactgctgcagataatgaaactcattctgagaaattatttggaaataccaagagccagaaa

SEQ ID NO: 818514 - DNA, 120 bp, Artificial Sequence
  ENSG00000260526_14 (sequence is synthesized)
caaactaaatgctcaaaaattgaaggatgattaaatttgctggtgtattcttgttatatagacataataaatatattttttaaaacaatatggaaaaatgcttgctgaataatgtgtgaa

SEQ ID NO: 818515 - DNA, 120 bp, Artificial Sequence
  ENSG00000260526_15 (sequence is synthesized)
aaatcaggatagaaaattatatgtatgttccaaatgatgtttaaaacaaaacatatacattcttacattctttcttacacgtgtttcttgaaaataaaggctggatggtaaatatcaaaa

SEQ ID NO: 818516 - DNA, 120 bp, Artificial Sequence
  ENSG00000266598_0 (sequence is synthesized)
gacggtaaataatcaaatgctagttgaatgacagatataaaagccataattcagatatagtcaaaattaaggtgtcagttttataaaaagctatcgtgaacactttcctggaacttttaa

SEQ ID NO: 818517 - DNA, 120 bp, Artificial Sequence
  ENSG00000266598_1 (sequence is synthesized)
aaggcaagactgcttctaagtataaataataacagcaaggactgctggttgtacatcgctttgcagccacacccattaatgtggattaatgttggtgacatcatcaaacaacttcctaag

SEQ ID NO: 818518 - DNA, 120 bp, Artificial Sequence
  ENSG00000266598_2 (sequence is synthesized)
ttttggatagatacattaaattatggaagtcagtgaaaaaagtgtgctaaaatcagatacaggttgagtgtcccttatccgaatgcctgggaccagaagtgttttggattttgaattttt

SEQ ID NO: 818519 - DNA, 120 bp, Artificial Sequence
  ENSG00000266598_3 (sequence is synthesized)
tcagatttttgaaatatctgcatacatatgagatatgctgggaatgggactcaagtctaaactagaaattcatttatgtttcatatataccttaagatatgtagcctaaaggtaatttta

SEQ ID NO: 818520 - DNA, 120 bp, Artificial Sequence
  ENSG00000266599_0 (sequence is synthesized)
atgtgcgccccgcctcgctgcagggaaggccgagcaagccaggccaagagggcactggacgtcgagtctcacctccttttcctcccgtctcctccctctcaccaagtgacaccgctccct

SEQ ID NO: 818521 - DNA, 120 bp, Artificial Sequence
  ENSG00000266599_1 (sequence is synthesized)
tctggagctgcctgtgaccaaggtttcccctgtgtagaagcctactgtcggaaaaaatgaggccagcacacagagactgagaggagtggagaaagagagctgggttgggaggagaagaaa

SEQ ID NO: 818522 - DNA, 120 bp, Artificial Sequence
  ENSG00000266599_2 (sequence is synthesized)
aggatcttgatggtgatcacgtccttggttctagtgcttaaagtccccagggtcctgcaactctctgagttccttctaggacattcaattttgggattaaattggtcacttcatcagaaa

SEQ ID NO: 818523 - DNA, 120 bp, Artificial Sequence
  ENSG00000251635_0 (sequence is synthesized)
aagcgtctttgcctccaactctgtggtaggctgggaattatgcctgcgcactcaaatccactctatttcaataatttttcagctaagggggctcaactgagcatcgtgacaatggcctcc

SEQ ID NO: 818524 - DNA, 120 bp, Artificial Sequence
  ENSG00000251635_1 (sequence is synthesized)
atgagaccatggtctgtgtccgctgtgagactccaatataaacaggagtgggaaaggagatttgagagtagagacgtgtaggatgaaaagggaaaagggaagagagagaggtgcagaaag

SEQ ID NO: 818525 - DNA, 120 bp, Artificial Sequence
  ENSG00000251635_2 (sequence is synthesized)
aacaaacagcctattgaggatattggtagccatagaaggttttgatgcctgcaccaagtctcgaagggaacaagtagatgctactctcagtgtccactaaaccataagtcctttgaggat

SEQ ID NO: 818526 - DNA, 120 bp, Artificial Sequence
  ENSG00000251635_3 (sequence is synthesized)
acaggaagacatccaccaatctcaagatcaaaatgtgataagaggaagtctgcaagcaaagaagatgttacccaccaccacctcttacagaaatggcagaatctctgggaataatggttt

SEQ ID NO: 818527 - DNA, 120 bp, Artificial Sequence
  ENSG00000251635_4 (sequence is synthesized)
tcacaaagaaagcattcctaatcactcagggggaactaggtcaccaccacaaattgtcctccagttaaaagcatgaactcttctggacacgaattctcttctgagtgtgaggatgccatg

SEQ ID NO: 818528 - DNA, 120 bp, Artificial Sequence
  ENSG00000251635_5 (sequence is synthesized)
actgtgatacagggtaaagtgggatggagtgcttaatccccaagaaagtccatcaggaataggagaaggccagtttaagagcatttaatgttgtccaacaagtccaactgaaatcgggag

SEQ ID NO: 818529 - DNA, 120 bp, Artificial Sequence
  ENSG00000251635_6 (sequence is synthesized)
tggttaatcctcataaatataatatctatcattagttattcaggaaatatgggaagtcagtaccaagtcagatggtccaaaacacgcaagtcaattaagcagcctgaaagaggtgacacg

SEQ ID NO: 818530 - DNA, 120 bp, Artificial Sequence
  ENSG00000251635_7 (sequence is synthesized)
aggcatgagtgatgcccaaagaaggtgacacgcccagtgtagctggttacaaagcaagcctcctgatagctggatgtgttttgaaatacttgtaaagtccttggtaagcatctcctattc

SEQ ID NO: 818531 - DNA, 120 bp, Artificial Sequence
  ENSG00000251635_8 (sequence is synthesized)
gataaataaacactaccaaggaaaaagtactaaaccactcaactgaagtttgaattgataaagaatggtaatgtgcacaatactgaatgaccttggagcctctttgatctgtgcgtttct

SEQ ID NO: 818532 - DNA, 120 bp, Artificial Sequence
  ENSG00000251635_9 (sequence is synthesized)
atattcagctcaaggtcccattgaaaccaaggagtttatgtttgggccaataaatagagctaataaaagttcacccttggactgggactctttgaatggctggaacatgggtcatttatg

SEQ ID NO: 818533 - DNA, 120 bp, Artificial Sequence
  ENSG00000251635_10 (sequence is synthesized)
gtgtttgatgactgtgaatgccaacaaaactactactgagtatatatggcttcttttacaccctagatgagaaaagcctgcctgtagcatgtaggagagtaaaaaagagaataagcaacc

SEQ ID NO: 818534 - DNA, 120 bp, Artificial Sequence
  ENSG00000251635_11 (sequence is synthesized)
tgatgccacatattgaaatttcatttgacaaatatgcattgaatatctactatgtggcagacagccttcaagcaggagggatacacagatgaaccaaatgtaggccctgcctgtgagact

SEQ ID NO: 818535 - DNA, 120 bp, Artificial Sequence
  ENSG00000251635_12 (sequence is synthesized)
ccagactggacagaatgcacttaagtccacatagcagtaatacacgtcggactgtgaggatggctgagcagaaggaagagcaaggaattctctatgggaagactctggaaggctttaaca

SEQ ID NO: 818536 - DNA, 120 bp, Artificial Sequence
  ENSG00000251635_13 (sequence is synthesized)
aggatgtgctctttagctgaaccttaaagcatgagtgaaaaaaaagagcagaaaaaggtggtgttttgagcagagaacagacactgagcaagaagcagaagagcagaggagccgagaaag

SEQ ID NO: 818537 - DNA, 120 bp, Artificial Sequence
  ENSG00000251635_14 (sequence is synthesized)
ctggacagagttctagaaatgtggcatggaaggaatgaaaggtctgaggagggaaaggaggtcaggaccaactacgaatggtctggaatgacttgctacacgtggatttgactttatttg

SEQ ID NO: 818538 - DNA, 120 bp, Artificial Sequence
  ENSG00000251635_15 (sequence is synthesized)
taggccggggggttgtagaggttttatatttttatacatttattttttaattttcatatttcaacagagcttgtttcaagtaattcttatgtaaaacatgaatgtatacaacaaaaacaa

SEQ ID NO: 818539 - DNA, 120 bp, Artificial Sequence
  ENSG00000251635_16 (sequence is synthesized)
gcgggtgatgtttcattagtacaaacgtgcttttataatcttaactttattaagcttgcttattcttaagttaaccaatgagaacaattctaatcgtctgcacatgagtcaagattttgc

SEQ ID NO: 818540 - DNA, 120 bp, Artificial Sequence
  ENSG00000251635_17 (sequence is synthesized)
aagcgtctttgcctccaactctgtggtaggctgggaattatgcctgcgcactcaaatccactctatttcaataatttttcagctaagggggctcaactgagcatcgtgacaatggaacaa

SEQ ID NO: 818541 - DNA, 120 bp, Artificial Sequence
  ENSG00000251637_0 (sequence is synthesized)
ggggctacttcttcctgccacggtcatgattgagaggcaacgggtggcgagtctacaggggacgtcgtcgagcagacatgggataactttaagggagaagacagacaaggggaggggctc

SEQ ID NO: 818542 - DNA, 120 bp, Artificial Sequence
  ENSG00000251637_1 (sequence is synthesized)
ctgtgatgggatcagtcagatgcctgcctggccgctccccctgaggggacttgggctcctcttaacattggcaggctggtataaacttccggctcagatcaagctatgcctgatgctgcc

SEQ ID NO: 818543 - DNA, 120 bp, Artificial Sequence
  ENSG00000251637_2 (sequence is synthesized)
ggtcgccacggaaccgcaggagatcatgctgctgtgatgccgggttttcttaacagcataaggaagacttgccccttgccctatcaaagagaatagttttggagggccgaagtgggacca

SEQ ID NO: 818544 - DNA, 120 bp, Artificial Sequence
  ENSG00000251637_3 (sequence is synthesized)
aaaaagatgcagttttcatttctattgggaaatgtgaaaaaaaaattgtcaactcttttagttaaaaacaacaacaacaaaaaaggaaacgagatgtggggccgccgcacgcaatatcgt

SEQ ID NO: 818545 - DNA, 120 bp, Artificial Sequence
  ENSG00000251637_4 (sequence is synthesized)
gcattaaaaggatgttctactctggaggaaaatatctttgctgatgccagaccaacctaacacaaagaacttttggttttttaatgtgactgtgttttattttacactgtgtaattcact

SEQ ID NO: 818546 - DNA, 120 bp, Artificial Sequence
  ENSG00000251637_5 (sequence is synthesized)
ctgccttaagccttatgaggtcgccacggaaccgcagaaactcctggagggcagagctgtgtctgccatcttcatcattgcattaccaccaccaagcacagtgcctggcacaaaagagtt

SEQ ID NO: 818547 - DNA, 120 bp, Artificial Sequence
  ENSG00000251637_6 (sequence is synthesized)
aatcaggatgaatggataaatacatggataggcactttgagctacagatgagtttaaatactttgtgtttttcttagtcaaacatgtgcaattaagcatgtgataaatgatatgatgacc

SEQ ID NO: 818548 - DNA, 120 bp, Artificial Sequence
  ENSG00000251637_7 (sequence is synthesized)
ccgcaggtgagggtctacttgaactccgtagctttagccgtggagctacaaactggaggacaagcgcaagcccttgtcctcactcattcattattcacacagagtatataacagtttttt

SEQ ID NO: 818549 - DNA, 120 bp, Artificial Sequence
  ENSG00000251637_8 (sequence is synthesized)
taacagtttttttttttttctttcttggagattcttcaagaaacttgaacaagagaaagatgagagatagaaagagagagagagtgaccggtctgccagaaaccaggactcagtcctcca

SEQ ID NO: 818550 - DNA, 120 bp, Artificial Sequence
  ENSG00000251637_9 (sequence is synthesized)
gtggactgagtcaagggagggccgctgtcagagccacttccctcctagaaagagacacagaggtgcctaacagaaaaccagggctctaccttctagcgtcctagagaaacaggcagagtc

SEQ ID NO: 818551 - DNA, 120 bp, Artificial Sequence
  ENSG00000251637_10 (sequence is synthesized)
aaaagagggacaccctcatcagggccgcttccctcttactagaactgaagtcaaatctgacctacctgacctcagggtcagaagtcgaggactcagatgtggaatttttatggacaccca

SEQ ID NO: 818552 - DNA, 120 bp, Artificial Sequence
  ENSG00000251637_11 (sequence is synthesized)
cacggtagtcgatccgctctcctctgaaagacggtcacctttcggggacctaaaaattttttttcaggtggcaccccccctacaagccggccggccttctgggggagcccagagcgagcc

SEQ ID NO: 818553 - DNA, 120 bp, Artificial Sequence
  ENSG00000251637_12 (sequence is synthesized)
cggctcttgcctggtggcgtttcttgctggggcctccgaatgttgtacttgagcgagttagagaaaatgtcacactttgacatgaattaagagtctgtttatttagctgacggccaagaa

SEQ ID NO: 818554 - DNA, 120 bp, Artificial Sequence
  ENSG00000251637_13 (sequence is synthesized)
atggctaactcttaaagttctcttggccccgaagaaagggctagattttcttttatacttcagtttagacaggggaaacgggtctagttaaaagaattttacagaagtaaagtaggcaaa

SEQ ID NO: 818555 - DNA, 120 bp, Artificial Sequence
  ENSG00000251637_14 (sequence is synthesized)
ttacaggaaagtaaacagttctaggtgtaagggctttaagactattacaaagtgatagacgtggggctttaggcattatcaatcggacaaattcctaggaactgcggatattgctcgcca

SEQ ID NO: 818556 - DNA, 120 bp, Artificial Sequence
  ENSG00000251637_15 (sequence is synthesized)
ggctttaggcattatcaatcggacaaattcctaggaactgcggatattgctcgccacagtatcttatgagttaattgcattcttagatgtgctaagagtcagcttgcacaagttaagtcc

SEQ ID NO: 818557 - DNA, 120 bp, Artificial Sequence
  ENSG00000251637_16 (sequence is synthesized)
aatctatctagctctcttagctaaaagaaagtcaattcaggtagaaacaaggctaagtgattaaaagaaaaggaaagtctaagaacaaagttaataaaaacaaggttaggcattacagat

SEQ ID NO: 818558 - DNA, 120 bp, Artificial Sequence
  ENSG00000251637_17 (sequence is synthesized)
ggggtcatccttatattcagcacagcgtttgtcctgaaacttcaatggagtgctcctagtttgataacttggaccatgccaaataaattgaatttctctttcttaacaacagatgtttga

SEQ ID NO: 818559 - DNA, 120 bp, Artificial Sequence
  ENSG00000251637_18 (sequence is synthesized)
ttcctgccttcctcctctcctcttccttcccttccttttcaagagcagggtttgcaaactttttcttgaaagcatcagatagtaaatattttcgaattcgtgggccatacagtctcttat

SEQ ID NO: 818560 - DNA, 120 bp, Artificial Sequence
  ENSG00000251637_19 (sequence is synthesized)
agtagttgctcaactctgccacccatagcatgaaagcagctgatatagttgaatatgagtccccacccaaaactcatgttgcaatccccagtgttagaggtggggtctggtgggaagaga

SEQ ID NO: 818561 - DNA, 120 bp, Artificial Sequence
  ENSG00000251637_20 (sequence is synthesized)
ttggatcatgggggtggatttctcatgaatgatttagcctcatccctttggtcctgtccttgcaatagtgagtgagttcttgcaagatctggttgtttacgagtgtgtagcacctccctc

SEQ ID NO: 818562 - DNA, 120 bp, Artificial Sequence
  ENSG00000251637_21 (sequence is synthesized)
cttactctcttgctcccacttcaccttctgccatcattgtaagtaagtttcctgaggcctccacagaagctcagcagatgtcagtgtcatgctccctgtatagcctacaaaactgtgagc

SEQ ID NO: 818563 - DNA, 120 bp, Artificial Sequence
  ENSG00000251637_22 (sequence is synthesized)
ccagtctcaggtatttctttatagcatgagagaacagccaaatccagcagccatagacaatatgtagcaaatggacatgactgtgtttcaataaaactttattgacaaacacatgcacaa

SEQ ID NO: 818564 - DNA, 120 bp, Artificial Sequence
  ENSG00000251637_23 (sequence is synthesized)
caataaaactttattgacaaacacatgcacaagcaggtcagatttggcccatgggcattagtgtcccaacctctgctctggagtattctcttcagcaacctctgcctcctgggttcaagc

SEQ ID NO: 818565 - DNA, 64 bp, Artificial Sequence
  ENSG00000251637_24 (sequence is synthesized)
caccacacctggttaatttttgtattttttaatagaaaaccacctcagcctcccaaaatgctgg

SEQ ID NO: 818566 - DNA, 74 bp, Artificial Sequence
  ENSG00000251637_25 (sequence is synthesized)
ctagatttttttttttttgatcgttgcttatttggtttgactttcattttttcccccattgtggtagtcatttt

SEQ ID NO: 818567 - DNA, 120 bp, Artificial Sequence
  ENSG00000251637_26 (sequence is synthesized)
ttttttttgatcgttgcttatttggtttgactttcattttttcccccattgtggtagtcattttctgaacgcctgttagtttgtccatctctctcctctgtagtccctagagtcagatga

SEQ ID NO: 818568 - DNA, 120 bp, Artificial Sequence
  ENSG00000251637_27 (sequence is synthesized)
aacacactctagtgctgaattttgagcaggagaaagagagcaagagtgaccagtacccttggaaactctggcctcctgagaatttggtgtcttccctgcaaaggttgcaaacctgttaac

SEQ ID NO: 818569 - DNA, 120 bp, Artificial Sequence
  ENSG00000251637_28 (sequence is synthesized)
ccacaggccggagagagagagaagtcagaatcacgatctgttaagcttgagtttaatatttgatgcacagagatcactgagttttttgataagaattagagggggaagaaatagccagag

SEQ ID NO: 818570 - DNA, 120 bp, Artificial Sequence
  ENSG00000251637_29 (sequence is synthesized)
aacaatttctatctccaggtgaggattcaggagataattctgcgaaaagaacttcctgagaactaagatggggaaaatcactggtattagaagagtgaaaaggtcagtaattaaggctac

SEQ ID NO: 818571 - DNA, 63 bp, Artificial Sequence
  ENSG00000251637_30 (sequence is synthesized)
ctggtattagaagagtgaaaaggtcagtaattaaggctacaactgtgctcttagaggcaaaag

SEQ ID NO: 818572 - DNA, 120 bp, Artificial Sequence
  ENSG00000251636_0 (sequence is synthesized)
agattggaagttactagggaacattacacggttctcagaatcaccaggagaactggagaaacaggctactgaagaccaaggaaggatcaacttgaagaataaccataatttcaccaagaa

SEQ ID NO: 818573 - DNA, 120 bp, Artificial Sequence
  ENSG00000251636_1 (sequence is synthesized)
caatgtttaaaaaaaggcatttcagactgtgataataggggaagtaaaagtgtaaatttccagtggatgaagatggctgtgtctcctaatcaataaccagcaaaattaaacaacaaaaaa

SEQ ID NO: 818574 - DNA, 120 bp, Artificial Sequence
  ENSG00000251636_2 (sequence is synthesized)
gagcagatatgtagatattcttcaggccaggatgagggtaaatggcttgcccactgcatatggaagtgttgttctacagagactgctcttcatctactgaaaaccggtcctgtgctgttc

SEQ ID NO: 818575 - DNA, 120 bp, Artificial Sequence
  ENSG00000251636_3 (sequence is synthesized)
tttggatcactaagtgttgataattttgtacttctctgttcattcttgttgactccaccacctttgtgatactctacagaaattataatatggttagagaaggagaagataacatttgca

SEQ ID NO: 818576 - DNA, 120 bp, Artificial Sequence
  ENSG00000245384_0 (sequence is synthesized)
gatgagcctcttgcagggcacgcagaccccacaccttttcctcttcttcttggctgggttggctccgccagctccccctgaggaggacgaggaggaggaggaatgattctgcgggcagtc

SEQ ID NO: 818577 - DNA, 120 bp, Artificial Sequence
  ENSG00000245384_1 (sequence is synthesized)
tgccagattggcaatttgaaacgcactgtctgtgacggctgctgaggctgctgcgggggagtgaagggctgtcatgacgatgacccctggagcactctttttgctggggagaaagaagag

SEQ ID NO: 818578 - DNA, 120 bp, Artificial Sequence
  ENSG00000245384_2 (sequence is synthesized)
gggaaggatgattactcagagactgctcaagtcactctgaggttgacaaacctgaggaagtcatcacttctttatcctgtgccttggaataaagacatatgaaatgaaaccactccaact

SEQ ID NO: 818579 - DNA, 120 bp, Artificial Sequence
  ENSG00000245384_3 (sequence is synthesized)
ctaagcttggagtcaagtacgacccattcaaagtcaaacagacaagattaggaaaccaatgcgaacctacagaccaaagactagaagaaaaaaggattctgagctctgacttccctcctt

SEQ ID NO: 818580 - DNA, 120 bp, Artificial Sequence
  ENSG00000245384_4 (sequence is synthesized)
gtcatgttgcctgaggagaattgcagacagaccctcagacctcaaatagtctagattttgaagaccctgctttggctgagatgaggccagcattggagtagaaatgctgcttgcttcact

SEQ ID NO: 818581 - DNA, 120 bp, Artificial Sequence
  ENSG00000245384_5 (sequence is synthesized)
gaagctacaggtagaagctgactaccaaaggagaaggctgaggagaaattgctccatgagataaggcaagacatttatccctgaatgctgtctctccaaatgcacagaaacatgtcataa

SEQ ID NO: 818582 - DNA, 120 bp, Artificial Sequence
  ENSG00000245384_6 (sequence is synthesized)
agtgtgggactagggtctctaaaggacatgtaatacctcatttctggagatatggtctaacatgaaagggtcataatcgatggtcaagtcacaaaatttatttctagagtcattttacta

SEQ ID NO: 818583 - DNA, 120 bp, Artificial Sequence
  ENSG00000245384_7 (sequence is synthesized)
aatatggagagatctgcaaaaattgtatgcctggggaaaatcccaatcagaccaactgacccagaccaatcaatgacaactcagagtagtaatgaaaaattcatttagactaactcccat

SEQ ID NO: 818584 - DNA, 120 bp, Artificial Sequence
  ENSG00000245384_8 (sequence is synthesized)
aatttgctaagaggcactgtactaagtatataacacaatatctcattgtgtgatccttataatagctctatgaggtacatgtcattcttcctattttttagacagaaaagtctctgataa

SEQ ID NO: 818585 - DNA, 120 bp, Artificial Sequence
  ENSG00000245384_9 (sequence is synthesized)
ataacttgtccaaagtcacgtatttaccacatttaccagagttataacccaaatcggtctgactctaaatgctcttagccattcagtcctactgcaaaataagcacaccagtggagagca

SEQ ID NO: 818586 - DNA, 120 bp, Artificial Sequence
  ENSG00000245384_10 (sequence is synthesized)
atagagaatgggaacgcagtcacaatgggagcctgtcattggatctcatgtatgcagaggttccttcttccaggagagctttgcccttgtcctcatgaacttttatgtcaatacattcaa

SEQ ID NO: 818587 - DNA, 120 bp, Artificial Sequence
  ENSG00000245384_11 (sequence is synthesized)
tgcactgtattggatttctagattgggagctaaaaaaagaacagatttctaaatatcagctatcttattttaccagcttgccttaaaccagttacagaatatctctatttataattattt

SEQ ID NO: 818588 - DNA, 120 bp, Artificial Sequence
  ENSG00000245384_12 (sequence is synthesized)
ttacctaaaaataggaataaaactactcttcaatatgtgatttttaaaaaggatgataaaatcaaaggaatttagaataatccttgcacatagtgggcacttagaaacttttgcttcctt

SEQ ID NO: 818589 - DNA, 120 bp, Artificial Sequence
  ENSG00000245384_13 (sequence is synthesized)
attgactcccttctccttacatttcaatcttgttccatgtctcatggcctcttcagagcagagactatgtagtatttaccttcatatcttcagacaaaatgcttagcatatagtcggtgg

SEQ ID NO: 818590 - DNA, 120 bp, Artificial Sequence
  ENSG00000245384_14 (sequence is synthesized)
tcagttactggaaatgatttaaagacattgagaattacttcctttgaaattttaagaggtgtggtaaaactttggtttcagaatatatctttattgattttttaaatatgtatttttctt

SEQ ID NO: 818591 - DNA, 120 bp, Artificial Sequence
  ENSG00000245384_15 (sequence is synthesized)
atatattatggtcaacctcttgggatctttagaaaagaacattttccagtttttttgaatctcgggccaagagaattagaacactccataaaattacacaggtatatctgataaaggcca

SEQ ID NO: 818592 - DNA, 120 bp, Artificial Sequence
  ENSG00000245384_16 (sequence is synthesized)
taaaattacacaggtatatctgataaaggccatactctatttttccatataagtataaaactgttgtataaaaaattaccttctggccaggtgtagtggctcacacctgtaatttcagca

SEQ ID NO: 818593 - DNA, 63 bp, Artificial Sequence
  ENSG00000245384_17 (sequence is synthesized)
ctttgggaggccaaggcatctctactaaaatacaaatattagctgggcctggtggcacgtgcc

SEQ ID NO: 818594 - DNA, 120 bp, Artificial Sequence
  ENSG00000245384_18 (sequence is synthesized)
tattatcctcttccctcaaatatatacagtaaaagatgtctgtctaatattataatatattttgtttagcaaaaatacattagtcagttatttatcttaaatttcctttatcctcctgag

SEQ ID NO: 818595 - DNA, 120 bp, Artificial Sequence
  ENSG00000245384_19 (sequence is synthesized)
caacctaatcccaaaatagtgttttaacatttcttcaccatcgctgagttgtctggactcagctgaatggttgttctgcttcctatgatgtcagcgagggctatagtcatgtgaggtcat

SEQ ID NO: 818596 - DNA, 120 bp, Artificial Sequence
  ENSG00000245384_20 (sequence is synthesized)
acgtggcctacaacatccaagatggctgcctcctataactggcaacggatgtaagctgttggttgagaaatgctagtaagcaggtctcctaagttttcctccacatgacctctccatgtg

SEQ ID NO: 818597 - DNA, 120 bp, Artificial Sequence
  ENSG00000245384_21 (sequence is synthesized)
gctggtttctgagaaggagtacccaaagagtgaacatttcaagagaaggaagcagaagctaaaggtcccttaaggcctcctttctgtgcattcagttgctcaaaggccagcccagattca

SEQ ID NO: 818598 - DNA, 120 bp, Artificial Sequence
  ENSG00000245384_22 (sequence is synthesized)
aaggaggagaaataaacactcctgttgatctgatgtgcattaaagagaagaaattagtgagtcatttttaaagactgatcattaaatatagttaccctgttatattttttcataaatgat

SEQ ID NO: 818599 - DNA, 120 bp, Artificial Sequence
  ENSG00000245384_23 (sequence is synthesized)
ttccttctccattctacccctataaatttttctctatatgtgagaatttaaaatctgtggtttctttctatgtactaatctacacatagttgtgtttattatttgtctttgatgaatata

SEQ ID NO: 818600 - DNA, 120 bp, Artificial Sequence
  ENSG00000245384_24 (sequence is synthesized)
ttatatgatactgaaagcctgatatcctattaaacatttaaataaatatttcacattttagaattctgagctctaactccttctttatcctcagcattagaattagacaaaagcactcag

SEQ ID NO: 818601 - DNA, 120 bp, Artificial Sequence
  ENSG00000245384_25 (sequence is synthesized)
atgtaaaatataccaaatgaggcagtgggggaggtaggtggtaaaatagtttttttgttagtcttctttttctctttttgttcatatattttgagctctcaaaatggctgtaaaatgctt

SEQ ID NO: 818602 - DNA, 120 bp, Artificial Sequence
  ENSG00000245384_26 (sequence is synthesized)
tattacattgctaatatatgcttaatttaaaaaaatccaaactctaccaaatttagctaaatgaaataattatatgctgtattggtgtgtaagaggtggggagaaggagcacattctaaa

SEQ ID NO: 818603 - DNA, 120 bp, Artificial Sequence
  ENSG00000245384_27 (sequence is synthesized)
cttccttgctcttttctaaatttgtctgtgagagagcaccgattaagagtcagaatttctaactccagtgtggacttcaatggagtaactattaaacaagatgcataacaagggttacca

SEQ ID NO: 818604 - DNA, 120 bp, Artificial Sequence
  ENSG00000245384_28 (sequence is synthesized)
tgataatcaggtgaagttattaaatagaaaagaacatatttctgtcttttataagaagaaagacatcatttccatagagaaatgaaggaactctgaagcctggaaacccttgggagggga

SEQ ID NO: 818605 - DNA, 120 bp, Artificial Sequence
  ENSG00000245384_29 (sequence is synthesized)
gcacatgtattattctagattagaactaaacattccagcatgaaggatgacctcatatggcctccctgtcgaaaggtatgtaaaaacaaatgttataactatgaatttgacattaaccat

SEQ ID NO: 818606 - DNA, 120 bp, Artificial Sequence
  ENSG00000245384_30 (sequence is synthesized)
ggggaaatttaagacaaatggaagttatacattattgatgaatctctttgggaaacttgttgaagttatatggcaatttttcattcactaatcagacaataaggttattgggtcatgaat

SEQ ID NO: 818607 - DNA, 120 bp, Artificial Sequence
  ENSG00000245384_31 (sequence is synthesized)
ggtaggtagacttagcaaatagtattcctattgtgtaagttcttcttgtgccttttcttgttattaggtaaattatacctggatattctttaaatgggaaattgtctgtgttcgtgtaat

SEQ ID NO: 818608 - DNA, 120 bp, Artificial Sequence
  ENSG00000245384_32 (sequence is synthesized)
tgaagcaacatcacatctgttaatagagagtagaaggtataatcagaattttgttacaagtggaaaagaaggaaattaatattctttttgtttttagacatgcaacctatgtattaagta

SEQ ID NO: 818609 - DNA, 120 bp, Artificial Sequence
  ENSG00000245384_33 (sequence is synthesized)
agacattgttgatggtaagtacgtactgctcggcattgatttcttacttgctgcaaggaggtagacccaaggggaactcaaatatggaagacaggaaataagaagtcaatatagtgaaag

SEQ ID NO: 818610 - DNA, 120 bp, Artificial Sequence
  ENSG00000245384_34 (sequence is synthesized)
gcaagaacttgatttgatgaaactcatcattaaatgatgaaactgatcactcaacatatgctattactagagctttttagtagagatatgttactattggtgtgagccaatataaatttg

SEQ ID NO: 818611 - DNA, 120 bp, Artificial Sequence
  ENSG00000245384_35 (sequence is synthesized)
cattgtaataaagagcactggatctgaaatgagactagcaaatcacttactatctcagtgtttctttgaatgtctataagataggggtaaaaaccgaatataaggtaaggtacatgagaa

SEQ ID NO: 818612 - DNA, 120 bp, Artificial Sequence
  ENSG00000245384_36 (sequence is synthesized)
aaattgtcatgatatttaggagttttagtaataattatataaacattaatatttctgggtaagtttcacaaaagagaaaatcttctaagaagctaaaaggggtaagctttcctataaagg

SEQ ID NO: 818613 - DNA, 120 bp, Artificial Sequence
  ENSG00000245384_37 (sequence is synthesized)
aacgaggagagaattatagcaaaatttcatcagaaatcatgcaagcaagaagaaagtaaagtaaaatatttgaattgtttaaaaaaaacccacaccaacctaaacttctgtatccagtaa

SEQ ID NO: 818614 - DNA, 120 bp, Artificial Sequence
  ENSG00000245384_38 (sequence is synthesized)
aattaacctcccaaagtgaaaaagaaataactttctcagacaaacaaaaactgaggtactccattttcagtagacttccactacaagatgttaaaagatgttcttcagaaggaaagcgat

SEQ ID NO: 818615 - DNA, 120 bp, Artificial Sequence
  ENSG00000245384_39 (sequence is synthesized)
ctacagaccaaagactagaagaaaaaagattaactgctccttttcctccacattcttaaggccttctaagaaatttccttcccaattcacttgatgctgcttgcttcactgaagctacag

SEQ ID NO: 818616 - DNA, 120 bp, Artificial Sequence
  ENSG00000245384_40 (sequence is synthesized)
gtagaagctgactaccaaaggagaaggctgaggagaaattgctccatgagataagacatgcaacctatgtattaagtaagacattgttgatgatcctctccctagctcttacaacaaata

SEQ ID NO: 818617 - DNA, 120 bp, Artificial Sequence
  ENSG00000245384_41 (sequence is synthesized)
cccagttcctgtgggtttgtaacatctcgttattcctgaaggaacagatctggaagaaggcagacttttctgtaagcccaaaaattcttcagggttcctggtcgcccagcatggccaggg

SEQ ID NO: 818618 - DNA, 120 bp, Artificial Sequence
  ENSG00000245384_42 (sequence is synthesized)
tctcaaaccgtctaattcaatctgctctaatggagtcaagctgacagtaaagagaagatcagaaacagcgagtctaatctgcctatatgggagaaaattcagcaaacaggaaccagctca

SEQ ID NO: 818619 - DNA, 120 bp, Artificial Sequence
  ENSG00000245384_43 (sequence is synthesized)
gagaccaagaaaaccaaacaaggttattaacccacatcagaacaccagagagataacaagaagttggttccaagatgaaaaatgcaagagagaagcagattgtggaataaaagagaggat

SEQ ID NO: 818620 - DNA, 120 bp, Artificial Sequence
  ENSG00000245384_44 (sequence is synthesized)
gttccatgttcatatacacctgattgtagttagagcctcacccttcctttctatctcagcagggaccttctggaaaagcttttcattctgtgcacttttctttctctggctttctttgtc

SEQ ID NO: 818621 - DNA, 120 bp, Artificial Sequence
  ENSG00000245384_45 (sequence is synthesized)
tctagattttctttgttctgtgcctgatctgtcataatcctctgaggttttattctcattcctctgcatccccccctgaaaaaaatcttattttcttacaatttcaggtatcccataata

SEQ ID NO: 818622 - DNA, 120 bp, Artificial Sequence
  ENSG00000245384_46 (sequence is synthesized)
ctaattatggctaagcacctctttgtttctatgtggatcttttcttgaatccttgtttcataccattaactgcatacaaaatatctctatttagaaatgatattgcaatttcaaactcaa

SEQ ID NO: 818623 - DNA, 120 bp, Artificial Sequence
  ENSG00000245384_47 (sequence is synthesized)
ctgtatgaaagtatttttattggtatcttaaaaacacatttccactgataataccaatatttgagtactcctcaccttgtgttcagattactgcaatgcattcctatcaggtaattcttc

SEQ ID NO: 818624 - DNA, 120 bp, Artificial Sequence
  ENSG00000245384_48 (sequence is synthesized)
cttcaatctcctgcacctcaaatccaacttattaatatcttcaaatttaaaagaattaaattccatttttagcatattatccctctgattgaaaggaaaaaatcttaatttttttgttac

SEQ ID NO: 818625 - DNA, 120 bp, Artificial Sequence
  ENSG00000245384_49 (sequence is synthesized)
aataaaatttcttaacttaaaatcagctgagaactcttgctgtgtttgaggttacaaaagtgcttaactagagactgtaacaacactattcagccaacaacaggggttatttttagaatc

SEQ ID NO: 818626 - DNA, 120 bp, Artificial Sequence
  ENSG00000245384_50 (sequence is synthesized)
ctacttaccattagaattctaaatttgaacctggacttgcaggttactatgaggacatatttgtcaatgttggagaatgcaacatattatatttaacaatttgttttcctagtttgttat

SEQ ID NO: 818627 - DNA, 120 bp, Artificial Sequence
  ENSG00000245384_51 (sequence is synthesized)
tcatgtatgtaggtataatatgcaattgtactcctgccccacccttgaaaatctagtggatgagcctagaaagaaacctgaggaatctgataagacatgagcagaggcagaaacttcagc

SEQ ID NO: 818628 - DNA, 120 bp, Artificial Sequence
  ENSG00000245384_52 (sequence is synthesized)
aattgtggtggcaacagccacaagggagtgtatgaggtaaagtttgaagatctactaatacatttaagttagaagattgaggaataaagtctatattcattaacccatcattactaaccc

SEQ ID NO: 818629 - DNA, 120 bp, Artificial Sequence
  ENSG00000245384_53 (sequence is synthesized)
ttcatacagttcatcaaacattcttcgctcgtgcttttaaaatggaataccatgctctgcctcccctttcccacttcaccccacctgcacctcacataccctgactgctttgaatctttc

SEQ ID NO: 818630 - DNA, 120 bp, Artificial Sequence
  ENSG00000245384_54 (sequence is synthesized)
tgcaaacactgagtactcaaccttctataaactcctactctactccctatactacatttttctcctaactcctaaggcacatttttgtctatcttggtcatttggaaattagcattccca

SEQ ID NO: 818631 - DNA, 120 bp, Artificial Sequence
  ENSG00000245384_55 (sequence is synthesized)
attttattcagccttgtaaacttcttaatgttataaacaccatatacaaaagctcttctagattgtgatcttgttgagttaaagtaccatggcttactgatctctcttagtgaagaggga

SEQ ID NO: 818632 - DNA, 120 bp, Artificial Sequence
  ENSG00000245384_56 (sequence is synthesized)
atgtaccgaaccatgttaaatacccagatgaagtgagttaaagttattttcccaatgtttgtttcttacgggtgttccctgaaaaaggatttagcgttaaaataagtttgggcagttttt

SEQ ID NO: 818633 - DNA, 120 bp, Artificial Sequence
  ENSG00000245384_57 (sequence is synthesized)
acaaagttaagcatgtttctttacttcaatgcttatcagagcctttaatatactattaaatatgattaatatctaaaaacaaataatagtgaagagttgaccatatttattgaccttttt

SEQ ID NO: 818634 - DNA, 120 bp, Artificial Sequence
  ENSG00000245384_58 (sequence is synthesized)
ttcaagaatatcttacacagctagtgttacataatagatacttttgaaaagcctggcttaaaagctagtcctcaatcaactatctacatatgtattattcatatgtagtatataatacca

SEQ ID NO: 818635 - DNA, 120 bp, Artificial Sequence
  ENSG00000245384_59 (sequence is synthesized)
aattttcgtatgtattcaaaaggctactttttactttgacatccccattccaactctgggaaattgttcagactctacaaaactatctgatacgcacatttcctgctcactcagtcttta

SEQ ID NO: 818636 - DNA, 120 bp, Artificial Sequence
  ENSG00000245384_60 (sequence is synthesized)
gagataaaaattcaggtctcttttacaaaatatagtgatggactgatctccatgtccattgataaaagatccagagtgaatagctttatatcaaaacatgaaatattacgattctagtta

SEQ ID NO: 818637 - DNA, 120 bp, Artificial Sequence
  ENSG00000245384_61 (sequence is synthesized)
ttaactggaatgtgttaaggaggcagatgagagatagaatctttcgctctgaagagcatctgatttttcatggctaaaaatggttttgacatctgtgaggtggaccttatcaggatttct

SEQ ID NO: 818638 - DNA, 120 bp, Artificial Sequence
  ENSG00000245384_62 (sequence is synthesized)
tgggttgtaagcatcctgtggacagacacaacggctttcttagttttataaagtatcttaagagaacatcagctaagaatattgacagtaacaatgaacagaatgctttttgctccctcc

SEQ ID NO: 818639 - DNA, 120 bp, Artificial Sequence
  ENSG00000245384_63 (sequence is synthesized)
agtctgccagattggcaatttgaaacgcactgtctgtgacggctgctgaggctgctgcgggggagtgaagggctgtcatgacgatgacccctggaggattctgagctctgacttccctcc

SEQ ID NO: 818640 - DNA, 120 bp, Artificial Sequence
  ENSG00000245384_64 (sequence is synthesized)
actgtgcagaacttctggaagattggcacaaagcattttaaaaatcactttctagtctatattaaattcttcaagaatacttatgaagaaacaggaagtaactaactttctttacctttt

SEQ ID NO: 818641 - DNA, 120 bp, Artificial Sequence
  ENSG00000245384_65 (sequence is synthesized)
actaactttctttaccttttcaagaattggctcgtgagaaaaggatttccagtattatgttgaatagaagcggtgaaagtggacatcctttccagtgttccagttctcagagggaatgct

SEQ ID NO: 818642 - DNA, 120 bp, Artificial Sequence
  ENSG00000245384_66 (sequence is synthesized)
tatgatcttgacgagaaccttggcaatatcctgaatttagtactaaaagcaaaggataaggaaggtgttatgtggcctctgtataacagagaatgttctatactgaaaacttatgatata

SEQ ID NO: 818643 - DNA, 120 bp, Artificial Sequence
  ENSG00000245384_67 (sequence is synthesized)
ctttctaccttagacaaagccagacagatttttctagtttcaacttaccattatacttcctgaaagtattttcaaaagagtcatttgcttgatgaaatttctgagttcttgtttgcctga

SEQ ID NO: 818644 - DNA, 120 bp, Artificial Sequence
  ENSG00000245384_68 (sequence is synthesized)
gaatatccttccagtggccactaaagaagaaaccttcatctagtctacatcaccaagagagaacagtgacagctaacactgctccagcctctaccaccttcttgacgtggcacagccata

SEQ ID NO: 818645 - DNA, 120 bp, Artificial Sequence
  ENSG00000245384_69 (sequence is synthesized)
gaacacaggaagtcctcttagcttctaatgaaattggaaacatgggaacatgccctataatgaatggtctatatccaagagaatacactatattaaagtgtagtagaaattcaatattta

SEQ ID NO: 818646 - DNA, 120 bp, Artificial Sequence
  ENSG00000245384_70 (sequence is synthesized)
taaactataaacttccattatttaaaacaagtgtttgaaatagtaccagttccaagcttcgttttcttcttcaagtattatatttatgatacaaaaatggattttctattagtctaacca

SEQ ID NO: 818647 - DNA, 120 bp, Artificial Sequence
  ENSG00000245384_71 (sequence is synthesized)
tttttaaaattctcaaattgagtatttttctccagctctaatacttttcagatgcttctttgatgtcatttacagggagttgaggttttttaagtgtattatgaccttccaggctttctg

SEQ ID NO: 818648 - DNA, 120 bp, Artificial Sequence
  ENSG00000245384_72 (sequence is synthesized)
gcttcttgagggtagagataatgcatccctagcacttagcctgaagtctctgaaacagtacactttaatagatctgtacctctttaaagtattatacttatttatatttataccatttct

SEQ ID NO: 818649 - DNA, 120 bp, Artificial Sequence
  ENSG00000245384_73 (sequence is synthesized)
gtgactaggtatgttttccaactacatttatcattttgtgttattacaaacgtgacatagttaaaacagaaatgatgaaaatacagaaaaccacaaagaaataatcacttgtaattactg

SEQ ID NO: 818650 - DNA, 120 bp, Artificial Sequence
  ENSG00000245384_74 (sequence is synthesized)
cctatattatagatatatattgtatatttcccacattagcaagccaatttaccaattattatttattggttaattagcatttcatcatatggctgtccatacttatttatacatactata

SEQ ID NO: 818651 - DNA, 120 bp, Artificial Sequence
  ENSG00000245384_75 (sequence is synthesized)
tataacaatgtggtggcaaggaaggtgtatattattgcctatgatcttataggcaagataaacaatgcttcttagtaggtgttcatttagtgtaagtcctttataaaaatcattacatta

SEQ ID NO: 818652 - DNA, 120 bp, Artificial Sequence
  ENSG00000245384_76 (sequence is synthesized)
ctgattttaaattaaaaagggaataagccagtggatttatttattggtataacaaaactttgtaaattttataccgatattttctttcaccaaaagttcaattcaaatccaggcatggtg

SEQ ID NO: 818653 - DNA, 120 bp, Artificial Sequence
  ENSG00000245384_77 (sequence is synthesized)
gtgagactccatctcaaaaaaaaaaaagttcgattcaaaattattccattataaactatctgattatattatccagaatttttcaactcatatcgaaatgcaaatttttaaatatttttc

SEQ ID NO: 818654 - DNA, 120 bp, Artificial Sequence
  ENSG00000245384_78 (sequence is synthesized)
tttttaaatatttttcccaaatagagtcttaatagggttaaaggttgatagtctcacaataatacactattccacaatgtagagcacttagcagtatccataacaaccattattatttta

SEQ ID NO: 818655 - DNA, 120 bp, Artificial Sequence
  ENSG00000245384_79 (sequence is synthesized)
aaaatattttaatagtaatattctttgaaatagttgatgatttattgtgacagaatgaggagaacctaagaaagactatttatcgataaatgaatttctaaccatgctgacggaaaagca

SEQ ID NO: 818656 - DNA, 120 bp, Artificial Sequence
  ENSG00000245384_80 (sequence is synthesized)
gctttatattttacttttgaaagaaggtgatggttgtatctgaagaaaaaagagatacaagctactatttctaggctatccagttaaaggaaagcactatgtcaagcatttgaagtaaaa

SEQ ID NO: 818657 - DNA, 120 bp, Artificial Sequence
  ENSG00000245384_81 (sequence is synthesized)
gaatgttgtcttcagaacccaaacagttgtgtctcagaatacaaaggaatgtaatacatatattggtctatcagtcagaaaacaaaacactgtaaaaaattaaaatcatttcaaattagt

SEQ ID NO: 818658 - DNA, 120 bp, Artificial Sequence
  ENSG00000286926_0 (sequence is synthesized)
gccggataaaacacggctgcacctagctagaggagcctgggagattcctgcggagctctaccccagccaaacacctccttcccatcagtgttgggagcctacagacattcctttctcctc

SEQ ID NO: 818659 - DNA, 120 bp, Artificial Sequence
  ENSG00000286926_1 (sequence is synthesized)
ctgtttcctgcctgctgagagatgaaaacaacccactgctgattttccagatcttagtttttattcctccactggggctgctctcaccagtcttcctaggacgcaaacgctcagatttct

SEQ ID NO: 818660 - DNA, 120 bp, Artificial Sequence
  ENSG00000286926_2 (sequence is synthesized)
atggggcctgtgaggggccacttggcaaagcactacaagggctccccaggacctgagagcagcccctagctgacaagcagcaagggaacagggacatcagtcctgcagttacaagtcaat

SEQ ID NO: 818661 - DNA, 120 bp, Artificial Sequence
  ENSG00000286926_3 (sequence is synthesized)
gaattctgccagcaacatgaatgagcctggaggtggattcttccatactcaaacctgcagatgggaacacagcctggccaacaccttgactacagcctgaccagagaaccaactaagcca

SEQ ID NO: 818662 - DNA, 120 bp, Artificial Sequence
  ENSG00000227591_0 (sequence is synthesized)
ccacgcgctgagcacgctccgactgtctggaccctgggtacctggctgaagactttggactttaacctggagatgatggagagtatgcaggataaagtccataccaaatccaacgcctag

SEQ ID NO: 818663 - DNA, 120 bp, Artificial Sequence
  ENSG00000227591_1 (sequence is synthesized)
ctaacaagataaaatgtagcaggaaaaagtgcaaagagctgaagtgtggaataagtgggagaggtctgccatgccctatctgaccttgctgccatgatctttaaggctgtgtgtcctggt

SEQ ID NO: 818664 - DNA, 120 bp, Artificial Sequence
  ENSG00000227591_2 (sequence is synthesized)
tggtgcagctacaagatggcagaaatgcctaagtgatggtatggaacagaggatccctcttctcaccattgtcttgcatgtttccttgtgtgaaccacaaataaacttttgttatgttaa

SEQ ID NO: 818665 - DNA, 120 bp, Artificial Sequence
  ENSG00000227591_3 (sequence is synthesized)
cacactctgctcaccaccctgtgggccttgtcccaggactcatcccttctcttctggagccatttccaattctgcccaaaaggacagcctgaagtgctggaccctgggtacctggctgaa

SEQ ID NO: 818666 - DNA, 120 bp, Artificial Sequence
  ENSG00000227599_0 (sequence is synthesized)
atcagctgaagtctcacagccagcgaatggcaggccagggcaccagggcctaggtctgcctgcctcttccatccaccttctgtcatcacaagccttctgatctccagccctctgatctgc

SEQ ID NO: 818667 - DNA, 120 bp, Artificial Sequence
  ENSG00000227599_1 (sequence is synthesized)
cccagtgggaccctcctgcgtctctgctctagttgtagaggacccatcaggcacttagagagaaatgagtggtgttgtgaacattcgactgtgtccatgtggaatccacacacacagttt

SEQ ID NO: 818668 - DNA, 120 bp, Artificial Sequence
  ENSG00000227599_2 (sequence is synthesized)
gcctgaaaatgactgataggatggaaactgacaagtcatcatccgcttcgggcaccagcgatgactggttaacatgaatattgtgttgatttccgctagatagaagaagatgtcacttgt

SEQ ID NO: 818669 - DNA, 120 bp, Artificial Sequence
  ENSG00000227599_3 (sequence is synthesized)
cgttaatggggtgtcacacgtacacttgcctaaaggaaaatgctcttttggtgattgttctcaattttcacctcattttatagccataaaaaagaaaagattcagcagaaaggatgaatc

SEQ ID NO: 818670 - DNA, 120 bp, Artificial Sequence
  ENSG00000227599_4 (sequence is synthesized)
cacctaggggtaggatggaaaggcattcttctcatttatttccttctttctttaccagaacaaccaaaacccagtgaaaatgctggtgcaagtcagaagagggggacctgggttctaaga

SEQ ID NO: 818671 - DNA, 120 bp, Artificial Sequence
  ENSG00000227599_5 (sequence is synthesized)
gcagccaggtactctgggcttcagatcagagcctcagaatccagcagttatgcccacaaggtagccaaagtccagccagtaccaccggtctctcggccagctatacttgcctctgctcaa

SEQ ID NO: 818672 - DNA, 120 bp, Artificial Sequence
  ENSG00000227599_6 (sequence is synthesized)
aaataataacagataacattactgagcactttactatgaactatggaatgtgctaggtaaagacgttactccacgtaagccataaaatcaacctatggggcaggtgcagatccacaaacc

SEQ ID NO: 818673 - DNA, 120 bp, Artificial Sequence
  ENSG00000227599_7 (sequence is synthesized)
ctgatttaagaattctgaatcctcaaaagctttgaaaaccaaaacattttttcatacgtggtaatatggtaaaatactttggaggaactggatgtatttttcctctggtctccagagaag

SEQ ID NO: 818674 - DNA, 120 bp, Artificial Sequence
  ENSG00000227599_8 (sequence is synthesized)
aaactgagacgacagcaagtcacagattcaagctgtgttcataatgtgtttccacgtggaggtcacactttcatgttcatgggcagatgaattctaacaccaaacaccaggctgaatagg

SEQ ID NO: 818675 - DNA, 120 bp, Artificial Sequence
  ENSG00000227599_9 (sequence is synthesized)
tgttcccattgcaagagaagtgctgtgcacaatttttatttgcatttcaaaaccctaacaaatggccacaatcaactactacaaatttctcctaattagttttagtctgcacttctgtca

SEQ ID NO: 818676 - DNA, 120 bp, Artificial Sequence
  ENSG00000227599_10 (sequence is synthesized)
cctttaggagagagccaaagattttaaccttcaaaattatcagcaatgcatgtcagaaagcatttcaaagaagagtcaaagtgcatgtagaaactaattgctgtatctgaaagtgctgtt

SEQ ID NO: 818677 - DNA, 120 bp, Artificial Sequence
  ENSG00000227599_11 (sequence is synthesized)
tgaagaatttttcagtcttcagagaagcaagttccccaccccttgggaaaactagtcttcaaactaaaagtttccccaaatcatatacctgagaaaaatgttaaaacagacttacccaaa

SEQ ID NO: 818678 - DNA, 120 bp, Artificial Sequence
  ENSG00000227599_12 (sequence is synthesized)
aaggcaaagaaataaaactgtaagaataaataaatcagaaatcagatgtctctcccctgtttaaaatcctccaacagcttcctactttacttggaataaaacgcaattcctttaccatca

SEQ ID NO: 818679 - DNA, 120 bp, Artificial Sequence
  ENSG00000227598_0 (sequence is synthesized)
gcggtgaggaggaggcgccctcgcgtgtggagagcggactccgcctggactccaccgcccacggccgcatcccatcgccgcacaagatcgccggagtcatattatcgacgtagttaaagc

SEQ ID NO: 818680 - DNA, 120 bp, Artificial Sequence
  ENSG00000227598_1 (sequence is synthesized)
gcggtgtggtccctgatccctacggtggtggtggtaactcacacttgtttcagttctgaaactgctcttcctgctgctggagcccccacccctgctccattttgaagtagctgatccgga

SEQ ID NO: 818681 - DNA, 120 bp, Artificial Sequence
  ENSG00000227598_2 (sequence is synthesized)
tcagcttagattgtgccaagtttcaagaaaaagatgaaatatgagttgcattttgacaaatgaagaggatgtgaagggcagaaggagcagaaactaccagcagagatgctaagatgaaag

SEQ ID NO: 818682 - DNA, 120 bp, Artificial Sequence
  ENSG00000223874_0 (sequence is synthesized)
gctgccacctctcttgactcccttgtgaggagatcggctcttgctcctcctcatgccatgactctttaatttgcggctggtcgacatgccattgtgacaaggcaccatcaatcatcatgt

SEQ ID NO: 818683 - DNA, 120 bp, Artificial Sequence
  ENSG00000223874_1 (sequence is synthesized)
ccctttaccaggagggcccgtgtcataagccactatataaagggaatgatgggtggactgctttggacaaatggacctgcggtaggagagagggacaacagtaggagcaggcagatcttg

SEQ ID NO: 818684 - DNA, 120 bp, Artificial Sequence
  ENSG00000223874_2 (sequence is synthesized)
cacagaggcaaaaagaaaggaaattatctctgaaaaggaatgggaggacaagtcagcagaatatgtcaatgttttggttgaagaagctgcttgaatctgggcttttctgtgccatgtgtt

SEQ ID NO: 818685 - DNA, 120 bp, Artificial Sequence
  ENSG00000223874_3 (sequence is synthesized)
ctcccagggccagcacaaagaagggcttttggtgcaggcccaagaccaccataatcatcattgattattcctctccacgccagtgtctctaaataaactttctcttctttctctgacaaa

SEQ ID NO: 818686 - DNA, 120 bp, Artificial Sequence
  ENSG00000223872_0 (sequence is synthesized)
cggggcatgacgggcacctcggctggcacgtactccaccctccggggctcggggcctgaggagcagaaggtggccctgggcagatgctctgcgtgcgggaggctgcgctttcagtcatta

SEQ ID NO: 818687 - DNA, 120 bp, Artificial Sequence
  ENSG00000223872_1 (sequence is synthesized)
tttggatttcgttttccacatgaaaatatttagagatccagctcttggaagccaaggagaaactggcttttaagtaccatggctactgtgacgtatcctgactaatgccgacagcacagg

SEQ ID NO: 818688 - DNA, 120 bp, Artificial Sequence
  ENSG00000223872_2 (sequence is synthesized)
ttaggacagcttggacgtagtttgttccagggaagtgctgctgaaccaggtaaacccagccccccatctccaggagcagaggctgcaaggacaggaagacaatgaggcaatggtgtgctg

SEQ ID NO: 818689 - DNA, 120 bp, Artificial Sequence
  ENSG00000223872_3 (sequence is synthesized)
ggggaatcgtgctaaagtgaaagcatccttcgatcatttttaagtcattctaggatcttcagggcatcaaagttttgcctgtgagcctcaattggtctaatacaaaaatacagactgtgg

SEQ ID NO: 818690 - DNA, 120 bp, Artificial Sequence
  ENSG00000223872_4 (sequence is synthesized)
gctctgcgtgcgggaggctgcgctttcagtcattatttggatttcgttttccacatgaaaatatttagagatccagctcttggaagccaaggagaaactggcttttaaggtaaaggaagg

SEQ ID NO: 818691 - DNA, 120 bp, Artificial Sequence
  ENSG00000223872_5 (sequence is synthesized)
caagtttgccgaggtgatgggaagacaccttgcaactgcgaaacctccaaatttaccggtagaacctggcacacagcttttgccgtcgtttggagaattactgcgtgcactgccgttcgc

SEQ ID NO: 818692 - DNA, 120 bp, Artificial Sequence
  ENSG00000223872_6 (sequence is synthesized)
tcagagccattgtgcacgtttgtttctctgatcactaacagcctgcacgtttccagcgtttccagtttccagcgttgtatggggatttccacgtgtttcagtcgcttattagcttttgtg

SEQ ID NO: 818693 - DNA, 120 bp, Artificial Sequence
  ENSG00000223872_7 (sequence is synthesized)
gggcggggcattgaagacaggtctgaaaacgttccagctcttgctggaagggacgtcatttctgaacacgtgaggggtctgagtttctttacgacagcagcttctattgagcgaaatgta

SEQ ID NO: 818694 - DNA, 120 bp, Artificial Sequence
  ENSG00000223872_8 (sequence is synthesized)
gattcccaggccggctcctagaaacccttaatagtagaaaaccatagggggaaacaccagtaattagacagaacagaatacaattgcttttttaaaagttattttgatccctggtggtca

SEQ ID NO: 818695 - DNA, 120 bp, Artificial Sequence
  ENSG00000223872_9 (sequence is synthesized)
aatgaaaaacatgatcatgggaggccatggaaggtgagccgtcgatattccgaagggaagccgggatccgtccaagggcgttcgagataaaagcaggagcaaaggccacgtcggggacat

SEQ ID NO: 818696 - DNA, 120 bp, Artificial Sequence
  ENSG00000223872_10 (sequence is synthesized)
gatacatcacaacatgcaggcagcatggccctgagtcaccacgtggagacaagcctcaagaggactccacttcccagtggacgttgcacgagcaagcaggaaacctcttctgtgagcccc

SEQ ID NO: 818697 - DNA, 120 bp, Artificial Sequence
  ENSG00000223872_11 (sequence is synthesized)
tcgtgcacttcctgttgctgttttaggacagcttgggtgagtccagcattaaaaatcagaatgggaaaaaggagaggaaacccggaagggtctacatgggaaagccagggtctgcggaag

SEQ ID NO: 818698 - DNA, 120 bp, Artificial Sequence
  ENSG00000223872_12 (sequence is synthesized)
acagcttgcaagacagaaatcatgctttctacctcccaaagctgctgtgggcatgaaacagcccacgtgcatgaggtgcccagcatagcgcctggaaatcacacacaatcacagaatcat

SEQ ID NO: 818699 - DNA, 120 bp, Artificial Sequence
  ENSG00000223872_13 (sequence is synthesized)
ggggccagaggaggcccttgaagttttatctgatttactcctcccatgagatgctttaattctccaacttctcctcaatggcacctataaagaaatgggttctccctctgttgttctctc

SEQ ID NO: 818700 - DNA, 120 bp, Artificial Sequence
  ENSG00000223870_0 (sequence is synthesized)
cactgatgcagggaattaagataaacctcctgctgaagatgatcatcaggagaaagtgattctgacaaatcagtgaaatgcataaagaaaggacaaagagacaggacatgtcacaaaaga

SEQ ID NO: 818701 - DNA, 120 bp, Artificial Sequence
  ENSG00000223870_1 (sequence is synthesized)
gatattcttagaccacattcttgaggcgttattagtataagaacctgcctatgggagaagtggacctaccatgaaagaagaaagctgaaattctgtctgttggagaacatggggaggaaa

SEQ ID NO: 818702 - DNA, 120 bp, Artificial Sequence
  ENSG00000257771_0 (sequence is synthesized)
agacaaagccatatatgattgaaggttatcagtactgtgcttttggaggattcagaagaagttatatctgattgggagattgaaaaggattggcctgaaggagaggtggtttttgaactg

SEQ ID NO: 818703 - DNA, 120 bp, Artificial Sequence
  ENSG00000257771_1 (sequence is synthesized)
catcttaaaggatgaggaaactgaggctgagagggtagagaactttgcctgaggtcactcagcagggacccacccatcacagtaaatgccagcactgctgatgccaaaacaatgttattt

SEQ ID NO: 818704 - DNA, 120 bp, Artificial Sequence
  ENSG00000257771_2 (sequence is synthesized)
gtaggccctcggaatttgtgacctgaaggaagaagagcagggccgtgggaagtatgtaaccagtgtcatgcccctggtcccaaggaagcagtggcttggtaaagaggggacccccgtcaa

SEQ ID NO: 818705 - DNA, 120 bp, Artificial Sequence
  ENSG00000257771_3 (sequence is synthesized)
taactccctgtaattactgggcacccactctgagctcctcagtggaatcctaaggttaataagactgtctctagccactggggctcccagcctggagtgaggattgcagagttcagctgg

SEQ ID NO: 818706 - DNA, 120 bp, Artificial Sequence
  ENSG00000257771_4 (sequence is synthesized)
ccatcatccaccagccgggggactgtgcacatcagttaacctctcctctcaggccttgaaaagcaccaggcttagtacacgtttgttaaatgaatgcactgcagtttttttgcttgttaa

SEQ ID NO: 818707 - DNA, 120 bp, Artificial Sequence
  ENSG00000257771_5 (sequence is synthesized)
aggcaggtaataataatgatattgctgactaagggctcccatccactcccagtgagcccggtgcccccccgggcctcctcagtgagctgaggaggctcagcagtgcctgcacgtcccctc

SEQ ID NO: 818708 - DNA, 120 bp, Artificial Sequence
  ENSG00000257771_6 (sequence is synthesized)
taagtgttcacaaatgcctgaacaccctgtcctacctggtcctacctggatgctggcctcagtaagctcctgggctcattgaagatgaacctagcagtagtatttacaccacttgttgtg

SEQ ID NO: 818709 - DNA, 120 bp, Artificial Sequence
  ENSG00000257771_7 (sequence is synthesized)
tgcccactgtgggcccggcgccatgccgagtgctctatggatgtgagttttccatccttccttcagtgctgggagagaaaagcatacgacatagacagggaggtcaagctccaccacgca

SEQ ID NO: 818710 - DNA, 120 bp, Artificial Sequence
  ENSG00000257771_8 (sequence is synthesized)
gatgaggtgcaggccaccagtcttcctctgccacatctctttctgaaaaggacttcacattcacccttgcaatccatgtggggacactgttggataggaggcgtggtcccagcgtggtct

SEQ ID NO: 818711 - DNA, 120 bp, Artificial Sequence
  ENSG00000257771_9 (sequence is synthesized)
ccctgtctgggcctctgcctatgccaaatgtttgccttacgctgcacactcaagaggttccatgtatacagatgggaattccagagctacagaaaaggcagcaagcaccatgatttaagc

SEQ ID NO: 818712 - DNA, 120 bp, Artificial Sequence
  ENSG00000257771_10 (sequence is synthesized)
taaccagtgtggattcacaccttcctctctctctatcagtggcagaactaccagctagagtaagaagtggttgatccaggacctaaacattctggaaactcttgcccacttctgggagaa

SEQ ID NO: 818713 - DNA, 120 bp, Artificial Sequence
  ENSG00000257771_11 (sequence is synthesized)
atgacccaatccatagtactaagcacaccttaactttcgtaggacgcaggcaagttgtcataccgtgtgcctaaatatagaaaaatgatccactggactaataaagtgttaaataaaata

SEQ ID NO: 818714 - DNA, 120 bp, Artificial Sequence
  ENSG00000257771_12 (sequence is synthesized)
gggagagggggaggggctgctgaggaaggccacaggggctaaggaggatttcctcagagcttttgggaagctatacgttcctggccccgaggtaaagctcccacaggctgcttgacccaa

SEQ ID NO: 818715 - DNA, 120 bp, Artificial Sequence
  ENSG00000257771_13 (sequence is synthesized)
cagagcagctcctacccactgggattctcggtctgcaggaatctggcatccacctggggagcatctggctgaggcagcctggagacaggcacgcaccagaagacttctggttccatccag

SEQ ID NO: 818716 - DNA, 120 bp, Artificial Sequence
  ENSG00000257771_14 (sequence is synthesized)
gcccaaggaccactgaactggagcggtcttctccatcccccagcaagcctgtgcgtgagctggggacaaggggcagaggaggcagaggtccccctcacaccaggaagggaacagcgccac

SEQ ID NO: 818717 - DNA, 120 bp, Artificial Sequence
  ENSG00000257771_15 (sequence is synthesized)
cacttgaggccaggaattcaagaccagcatggccaacatgtgctgggagagaaaagcatacgacatagacagggaggtcaagctccaccacgcagatgaggtgcaggccaccagtcttcc

SEQ ID NO: 818718 - DNA, 120 bp, Artificial Sequence
  ENSG00000257771_16 (sequence is synthesized)
tcagtaccaggcaggctgtggagtaaggaaggaccacagcagagtaaagcaatggagaccgaggtctcagaaaccctcagggaagttggcattttaactggtctttgaagaccagatgag

SEQ ID NO: 818719 - DNA, 120 bp, Artificial Sequence
  ENSG00000257771_17 (sequence is synthesized)
attttagatttgggggatatatgtgcaggtttgttataaggctatactgcaggatgctgggatttggggtacaatcaaacccatcacccacatagcatagtgggaaggcttttctaatca

SEQ ID NO: 818720 - DNA, 120 bp, Artificial Sequence
  ENSG00000257771_18 (sequence is synthesized)
ggatggaaaacccagagtcatacaggaaaagactaatacattcaaccacataaaaaaattttaaacttctgtatggaaaaccaccatagaaatgtttttccaataactgaggaaaatatg

SEQ ID NO: 818721 - DNA, 120 bp, Artificial Sequence
  ENSG00000257771_19 (sequence is synthesized)
ggggatatttccttaatttgcaaagaaactcatactaattaatatgaaaaaacaattattttaattgctaatacttaatgatcatttactatatgctagacactattttaagtatatgga

SEQ ID NO: 818722 - DNA, 120 bp, Artificial Sequence
  ENSG00000257771_20 (sequence is synthesized)
tggattatttcatttaattctcacagtaagtaaccctataaggtaagtgctattattactatctccattttatagatgagaacactgaagcagttttttctaaagatagctgcctggcac

SEQ ID NO: 818723 - DNA, 61 bp, Artificial Sequence
  ENSG00000257771_21 (sequence is synthesized)
ctgggcaacagagcaagactccgtcttggggaaaaaaatgcaaaaattagccaggcatgat

SEQ ID NO: 818724 - DNA, 120 bp, Artificial Sequence
  ENSG00000257771_22 (sequence is synthesized)
tgcaaaagtaattgcagtttttgccaatacaagtagtttacagaaagagaaatatcagtggcccataaacatgtagaaagatgtttaatagcactcataattcaagaaatgcaaaataaa

SEQ ID NO: 818725 - DNA, 120 bp, Artificial Sequence
  ENSG00000257771_23 (sequence is synthesized)
actaaaattaaacatcactttttcacctttctgcttggcaaaaatgaaaacatttgccaatactcagggatggtgagaaaaactacttatataacttatataactgttcctctgtagatt

SEQ ID NO: 818726 - DNA, 120 bp, Artificial Sequence
  ENSG00000257771_24 (sequence is synthesized)
ctgagttctatcctagtaacagttcatgtcaccaaaaaactacacattagaaccaccttagcttagctgcccaggaaaaatgccttcagccaagttccattttaatgttatacgcttggc

SEQ ID NO: 818727 - DNA, 120 bp, Artificial Sequence
  ENSG00000257771_25 (sequence is synthesized)
atctcttgatggttggcagaagaaatgaccacatgaaaagctgcatttttttgtcctggaaaaaccaccactaaaggcattgtaatctacattgagtatataaggaagggcccacacaat

SEQ ID NO: 818728 - DNA, 120 bp, Artificial Sequence
  ENSG00000257771_26 (sequence is synthesized)
aaattatctgcagtatttactaccaggaaagatttactttctcctgaagacctgatgtgttattttgccatacgatggtaatcatataaacctctgtttctcgtttctccttggctgcta

SEQ ID NO: 818729 - DNA, 120 bp, Artificial Sequence
  ENSG00000257771_27 (sequence is synthesized)
agaagctcaaaaatcacatctgatgatccactctagtgacaacatagccagggcgattggcatctgacttctcaacccaacctgacctcatattagcttttttcttttgtctcctctccc

SEQ ID NO: 818730 - DNA, 120 bp, Artificial Sequence
  ENSG00000257771_28 (sequence is synthesized)
agttttctaattctagcttaacaaaattattataaatgtgtgtttttggaagctatttcaaaatcttttggaagtagataggatatgttacaaatagtcaaactcccttagtttatagat

SEQ ID NO: 818731 - DNA, 120 bp, Artificial Sequence
  ENSG00000257771_29 (sequence is synthesized)
gagaaaactcaagttctttagaagttaaatgacttattccagtgttaatcagcttatatctgtgtgcacatgtgactctcactttattgtaagtgtcttagaattatatttatctctgag

SEQ ID NO: 818732 - DNA, 120 bp, Artificial Sequence
  ENSG00000257771_30 (sequence is synthesized)
actctggtggccagctttgagccaagtacatggtaaattgtcaatgtatatatattggttgaaaaaattctaagtgctgtgaggaaagggacatttttgcaggggataaggtcgtagtag

SEQ ID NO: 818733 - DNA, 120 bp, Artificial Sequence
  ENSG00000257771_31 (sequence is synthesized)
gtgctcatgagaactgaattcacaacagggcgtggcctcagcctctggcctcaccccaccacaccctagcatctccaccacccaggagtctcagggctgggcttcatgcaacccatctgc

SEQ ID NO: 818734 - DNA, 120 bp, Artificial Sequence
  ENSG00000257771_32 (sequence is synthesized)
caacccatctgccctacacctgcccgcactctgcctttgtctccactattccactttggccctcttgccttgtccagtgagtttccaaatatttctctttttttttgagacggagtcttg

SEQ ID NO: 818735 - DNA, 120 bp, Artificial Sequence
  ENSG00000257771_33 (sequence is synthesized)
gagccaccgtacccagctgagtttccaaatatttctgatttcaccagcgggggaagactggcaggctcctatatcctcgaagtatcctgccatgagatgcctgcagagtggggaatggca

SEQ ID NO: 818736 - DNA, 120 bp, Artificial Sequence
  ENSG00000257771_34 (sequence is synthesized)
tcacctttccaaccctgtgcagcacccagtgcgagctgcttattagtgggaactggagaggaagaggaggaaaaggaggacccatggccatggctttttctgtccttgtaaccctcaact

SEQ ID NO: 818737 - DNA, 120 bp, Artificial Sequence
  ENSG00000257771_35 (sequence is synthesized)
gacagaacaggaaggtgttgcagaggctggcgatgctgcgattctctgggtagcaaagggaggggacattcccagcagaaggaacggtttgtgtaaaggtgtggaggtgtgatacggtgt

SEQ ID NO: 818738 - DNA, 120 bp, Artificial Sequence
  ENSG00000257771_36 (sequence is synthesized)
ggcctgttcagggtggtgactaacagtggccagagtgaagggtgtgtagagaggagtgccagcagatgaggcaaggggctggggactggggccaaggtggaagaacttcaggttccaggc

SEQ ID NO: 818739 - DNA, 120 bp, Artificial Sequence
  ENSG00000257771_37 (sequence is synthesized)
caaggaaatgaactttgtccttgggtagaggggtgccacaggaggcattgaacaagagtgcaaccttgggtttgtatggtgagcctccagcaataccttggcaggtgggatcctcatgtc

SEQ ID NO: 818740 - DNA, 120 bp, Artificial Sequence
  ENSG00000257771_38 (sequence is synthesized)
caccccgggtgccagccacattttacaggctgggaaacagaatggttatgagaccggctcagaccacacagcaatagacaactggccccaagccagttctctcgttgtcacaggacgttg

SEQ ID NO: 818741 - DNA, 120 bp, Artificial Sequence
  ENSG00000257771_39 (sequence is synthesized)
cttcgaaactcaggtcatagtgagaaaggcaggggcatccttccgttcctcacttctccagccctgtgcctgctcagctcactggagaacgtgaaatgaagatcaactggaccgaggccc

SEQ ID NO: 818742 - DNA, 120 bp, Artificial Sequence
  ENSG00000257771_40 (sequence is synthesized)
aggcatatctgctcaccaagaataagacagaaaacaataaaagcaaatcatggagctccagctatgtgctaggcactgggctgggaggaaactaaacagagaacaacagtgccaggcact

SEQ ID NO: 818743 - DNA, 120 bp, Artificial Sequence
  ENSG00000257771_41 (sequence is synthesized)
ctctctgataatgagtgttctggactgagggtcccccagactggcctaggaggtgctgtccaatccgcctgaagagctggaatgggctccaagtggagagaactgtgggattgctggctc

SEQ ID NO: 818744 - DNA, 120 bp, Artificial Sequence
  ENSG00000257771_42 (sequence is synthesized)
agcccccaactatgcagtgaccttggacggagcgggccctctgggagccttggcaagccagttgctaagaggggagactgcaccagagaagggatttttaatatatgaaaccttggggag

SEQ ID NO: 818745 - DNA, 120 bp, Artificial Sequence
  ENSG00000257771_43 (sequence is synthesized)
ctcctcaagctgactcgggaggtctggggtagggactctgattggggtgttttgacaagttccaccggaaactcggaaagcacacctggttagaaataactagatgatcaaggtccttcc

SEQ ID NO: 818746 - DNA, 120 bp, Artificial Sequence
  ENSG00000257771_44 (sequence is synthesized)
agattcagttcaacaaattcaacacaacacatgtttactgagcacacaccatgccaggtgccattctgcaatgttaggatacatcagtgagcaaaataacaaaaagttctagaagttaga

SEQ ID NO: 818747 - DNA, 120 bp, Artificial Sequence
  ENSG00000257771_45 (sequence is synthesized)
gatactgtggacaggggaaagcggtgctaggcaaggtggtgaggagggcagggatgtggcagttccaggactcagcaggatgggcagggctggccttgttgagaaggagactggaaaaag

SEQ ID NO: 818748 - DNA, 120 bp, Artificial Sequence
  ENSG00000257771_46 (sequence is synthesized)
ttccaagcagtcaacagcaagagcaaaggccctgacagggagcacgcaggcagggtggccagcgtggctggagcggagtggccaagggctggggtggggtgaggggcaggggccagctgt

SEQ ID NO: 818749 - DNA, 120 bp, Artificial Sequence
  ENSG00000257771_47 (sequence is synthesized)
ggaatgctgctcctacgtgctagtgttctaagactcattcagcactgccctgagtatcttgactctgaacctgtccctgccctgaccccttccccaatcaactttaattttagggaccca

SEQ ID NO: 818750 - DNA, 120 bp, Artificial Sequence
  ENSG00000257771_48 (sequence is synthesized)
tcacaaaaatcctgcaaagttcattctcgaggacgctctggaatttaaataccttgccaagatcatacagattaagtggtggagcagggatttgaacggagagaaacggaggcccagaaa

SEQ ID NO: 818751 - DNA, 120 bp, Artificial Sequence
  ENSG00000257771_49 (sequence is synthesized)
gcagaaatgatgtgttaagatcactcatcaagctgatggtacagaggttagagcctctgctccctgctctacctctttcccttactccacatccatgcctgtctcttccaatgggtcggc

SEQ ID NO: 818752 - DNA, 120 bp, Artificial Sequence
  ENSG00000257771_50 (sequence is synthesized)
atccaccctgacacattaaagccaaaaggaaccttaagctagggaaggggctccagaactttagtgaaagattcaaacatgtccactcaactcaatggagaaaatacaatattcaatcaa

SEQ ID NO: 818753 - DNA, 120 bp, Artificial Sequence
  ENSG00000257771_51 (sequence is synthesized)
gtaagccaagctttgttggccgcacctgccaagccacagggtgcctcaggcttggagcatcccggagccagttacaacccaagacttcagccttctggaaggtgttgggtcagccaccct

SEQ ID NO: 818754 - DNA, 120 bp, Artificial Sequence
  ENSG00000257771_52 (sequence is synthesized)
cgcctcagcctccgaaagtgctgggattagagtgctgggagagaaaagcatacgacatagacagggaggtcaagctccaccacgcagatgaggtgcaggccaccagtcttcctctgccac

SEQ ID NO: 818755 - DNA, 120 bp, Artificial Sequence
  ENSG00000257771_53 (sequence is synthesized)
cagaaagcagaaatgatgtgttaagatcactcatcaagctgatggtacagagatgagaacactgaagcagttttttctaaagatagctgcctggcacagtggctcacatctgtagtccca

SEQ ID NO: 818756 - DNA, 120 bp, Artificial Sequence
  ENSG00000257771_54 (sequence is synthesized)
aggggaccagaatggtgtgcaaatgaaggcgtggaggaaggaaaacatgaggcgccaactttgagctgaatcctaggaagaaggtggcctagcccagagtgaggttggaggctgatccag

SEQ ID NO: 818757 - DNA, 120 bp, Artificial Sequence
  ENSG00000257771_55 (sequence is synthesized)
cagttaaatttgaatttcagataagaatttcttagcataagtatgccctatgcaatatttgggacacatttatatcaaaaaaaactcaatatttatctgaaattcaaatgtaactgtgtg

SEQ ID NO: 818758 - DNA, 120 bp, Artificial Sequence
  ENSG00000257771_56 (sequence is synthesized)
tcctagattttatctggcagccttattgatggtggcttattgactggctgggaatgacaggggtgtaggccaggaaatggctctgtgaaggctgcctagaactgaatcgaacatgaggat

SEQ ID NO: 818759 - DNA, 120 bp, Artificial Sequence
  ENSG00000257771_57 (sequence is synthesized)
atcagtactgtgcttttggaggattcagaagaagttatatctgattgggagattgaaaaggattggcctgaaggagaggtggtttttgaactgcatcttaaaggatggagtcttgctctg

SEQ ID NO: 818760 - DNA, 120 bp, Artificial Sequence
  ENSG00000257771_58 (sequence is synthesized)
cagccagttaggatattttttaaaaattgtttttccagcttaagtttagggagtaagggtgattacaagggacaacatagaaaaattgagagaactctggctttggaggcaaacaacccg

SEQ ID NO: 818761 - DNA, 120 bp, Artificial Sequence
  ENSG00000257771_59 (sequence is synthesized)
tgggtggaatcctggctccaccacttacaagctggatggctttggtcaagttacttcacttctctttccttctatttccccaccccccgataaggaaatgattaataataactaacattt

SEQ ID NO: 818762 - DNA, 120 bp, Artificial Sequence
  ENSG00000257771_60 (sequence is synthesized)
cccgaacccacctctgcatagccaggctcttccttgccaggcacttctcttgaaggaacattgaggtttgaaccagaagagctggatttgagccacagctttgtacggactagctatgtg

SEQ ID NO: 818763 - DNA, 120 bp, Artificial Sequence
  ENSG00000257771_61 (sequence is synthesized)
actttggaaataataacaacagctgacatttatcaagctttactacatgtcagtcactgtgctaagcttttgcatgcttcattgcgtgtaaaattcagaaatgcctttcgacctctcaaa

SEQ ID NO: 818764 - DNA, 120 bp, Artificial Sequence
  ENSG00000257771_62 (sequence is synthesized)
acatacacagaagattcagacacacttgcaatgtattgctggggattctccagcattggcatgatggagagggtggagaatcatttgaccgcctccgcctaggattgcagagttcagctg

SEQ ID NO: 818765 - DNA, 120 bp, Artificial Sequence
  ENSG00000257771_63 (sequence is synthesized)
gagggatcataaaaatggaaccaaaacaattccatttgggtcaaagatttaagtgtcataaagccatgtaaattctataaggaagtatgggtaaattgatttacattttggaataggaaa

SEQ ID NO: 818766 - DNA, 120 bp, Artificial Sequence
  ENSG00000258719_0 (sequence is synthesized)
agatgactgcgtataggggcaacctcttgtaatgtcaagcccactaatttatacaaaatacacgtggaccagtgctgtacggcttcctgatggctcaacaaccgccaaaggagatctgcc

SEQ ID NO: 818767 - DNA, 120 bp, Artificial Sequence
  ENSG00000258719_1 (sequence is synthesized)
cgtcagaagcaattacaaagtatttcttgcctggcctgtgaagcacttctgcttctagcctaatgaaggctttaatcaggtggcttttcaaagtgctccaaagagcccctctgcaatcag

SEQ ID NO: 818768 - DNA, 120 bp, Artificial Sequence
  ENSG00000258719_2 (sequence is synthesized)
acaacagccagacagtggaaactgattgtcactgattccttgtccagaactcagaccagctcttccagttacttatcagctcctcaataagtattaattaatggcttattttcctaatgg

SEQ ID NO: 818769 - DNA, 120 bp, Artificial Sequence
  ENSG00000258719_3 (sequence is synthesized)
gagttgggaatgttgccatatacatctgttcagtggcattaggctgacctaaattagacctttcctgacagcagccccaggctttttttcaacggaccatcagtttggaagtcatttact

SEQ ID NO: 818770 - DNA, 120 bp, Artificial Sequence
  ENSG00000258719_4 (sequence is synthesized)
cctgaaatatgtctgtaagcaaacaatgttcttagaagatcaagcactttgaatctacaaaaagagaaaggtatctctgtagtaggctgaataatgttccccaaagatatatcctaatcc

SEQ ID NO: 818771 - DNA, 120 bp, Artificial Sequence
  ENSG00000258718_0 (sequence is synthesized)
gaagtcactgtccatcatacagtgctttaatttgagatgcctcttctgggaacccagccaccatgttgtaaggacgctcagaacacataaaaacgtgacatttagatataccagccaata

SEQ ID NO: 818772 - DNA, 120 bp, Artificial Sequence
  ENSG00000258718_1 (sequence is synthesized)
taatgctgactggagtagagatgactgtcctcacaggttcctgcccaaattgcagatttgcaggcaaagtatgtgctgttaatattataagccacaaaattttggggtggtttgttacat

SEQ ID NO: 818773 - DNA, 120 bp, Artificial Sequence
  ENSG00000258718_2 (sequence is synthesized)
aatagataaccagaacacggaatctcagaaattaaatgcaatgctaccaattttagaatcaaaaaaggttttcaaaggatgtcatctgagattttcaaaatacaaagctgaaatgtgtcc

SEQ ID NO: 818774 - DNA, 120 bp, Artificial Sequence
  ENSG00000258718_3 (sequence is synthesized)
gtacatatatatgaatatatatagcaatatatatatatacttcctaccttcaatgacctcgaagtacagcaaataattattatgtgctaaatgatggaaacacaaagatatactatgaag

SEQ ID NO: 818775 - DNA, 120 bp, Artificial Sequence
  ENSG00000258718_4 (sequence is synthesized)
agaagtaggagttggaggaccaactgtgtacagagacgagatcatggaagatcaactgagcgcctctggcaaaacatcaagagcaaagagaagatggcccatcataagccaaagcaatta

SEQ ID NO: 818776 - DNA, 120 bp, Artificial Sequence
  ENSG00000258718_5 (sequence is synthesized)
catgcatcatggtctcaggtcaagagtatattcaatagttgacagtgatgtggcctctagctttccagaagagaggaagtcactgtccatcatacagtgctttaatttgagtgtgagcac

SEQ ID NO: 818777 - DNA, 120 bp, Artificial Sequence
  ENSG00000258718_6 (sequence is synthesized)
ctgaaatttggatttcttaaatatctctgtctcaggacttagcatgatgcctgaggctgaactgatgtctgtggagaaaagaacacgaaggaataatgtaatatgaaactccctaacatg

SEQ ID NO: 818778 - DNA, 120 bp, Artificial Sequence
  ENSG00000258718_7 (sequence is synthesized)
atacatatacaaagactattgagaaatcaatgtggaaaatgcaaaactaagggagaaagcattttgaaccactcatctaagaatatggtcagtattaaaaagacaagaatatcagaaaaa

SEQ ID NO: 818779 - DNA, 120 bp, Artificial Sequence
  ENSG00000258718_8 (sequence is synthesized)
agtatgctatgacaatataccataaactgagtggcttataaacaacagaaaaatctcacagtcgtggaggctgggaagttcaaggtcaaagtaccagcagattaagatgtctgagaggaa

SEQ ID NO: 818780 - DNA, 120 bp, Artificial Sequence
  ENSG00000258718_9 (sequence is synthesized)
tttagttctgacaattgaagaagctggagaatttccactaagccaacatacttagtatcttccagcacctacaaatttgaaagttatccagttcttaagtattgccatttggcctgagaa

SEQ ID NO: 818781 - DNA, 120 bp, Artificial Sequence
  ENSG00000258718_10 (sequence is synthesized)
gatattgacttctggccatgtttcaaagaagtgcacatatataaatatctattcaatcctttatcttccaatatcctataacatggaaatgtatattgctaggtcctctttattcaacag

SEQ ID NO: 818782 - DNA, 120 bp, Artificial Sequence
  ENSG00000258718_11 (sequence is synthesized)
caactgagtagaacccattaatcccttcactggtgcattcattcaggaaatacattttgagtgccttgaaactatctccaatgcccagcatagcccatagcatctagactaatatatgtg

SEQ ID NO: 818783 - DNA, 120 bp, Artificial Sequence
  ENSG00000258718_12 (sequence is synthesized)
ctcccaagttatgttcataggcttagcagaataaaggtaaggcttactagttaaatgaatgagagaggagaattttttctaaatcttagaaaatgttcaggctctcccatctttctccac

SEQ ID NO: 818784 - DNA, 120 bp, Artificial Sequence
  ENSG00000258718_13 (sequence is synthesized)
ccacacccctcatgagcatctctgtaaaaactgccatcaggaccaaagacagcagctctcagtttaacgtaggtgccagtgaccaaactaccgctcaaggaaataagagaggatacaaac

SEQ ID NO: 818785 - DNA, 65 bp, Artificial Sequence
  ENSG00000258718_14 (sequence is synthesized)
aagctaccattgactttcttgatagaattagaaaaaaccactttaaatttcatatggaaccaaaa

SEQ ID NO: 818786 - DNA, 80 bp, Artificial Sequence
  ENSG00000258718_15 (sequence is synthesized)
ctttcttgatagaattagaaaaaacccaaagacaatcctaagcaaaaagaacaaaacatcacgctacctgacttcaaact

SEQ ID NO: 818787 - DNA, 80 bp, Artificial Sequence
  ENSG00000258718_16 (sequence is synthesized)
tgacaaacctgacaaacacaagcaatgggaaaagaataccctatttgataaatgctgttgggaaaactggttaaccgtat

SEQ ID NO: 818788 - DNA, 120 bp, Artificial Sequence
  ENSG00000258718_17 (sequence is synthesized)
tggattaaagatttaaatataagacctaaaatcataaaaatcctttgtatcccaagtgctcagcacacagtctctgacactaaacatttgttgaactaattaaatagaggaaagagaatt

SEQ ID NO: 818789 - DNA, 120 bp, Artificial Sequence
  ENSG00000258718_18 (sequence is synthesized)
aattaaaatgccatggtgaaaaagaagcagcatctctgctgtctacccaacagtgatctgtatctgtttctcacttctgcatcttatgaagtcataaaattaaaagttttgggaaccctg

SEQ ID NO: 818790 - DNA, 120 bp, Artificial Sequence
  ENSG00000258717_0 (sequence is synthesized)
acgcggtcagctgtgtgagaccttggcccccaggcctctggatgcactggattccctggaacagttagcaggacacagggcaaaggcctttctccttctgtcgtgtgagatgcaggtgag

SEQ ID NO: 818791 - DNA, 120 bp, Artificial Sequence
  ENSG00000258717_1 (sequence is synthesized)
tgctgcaggcctggagtaggggagtgtctccgtcagagaaaccatggaaggcttcccagaggaagcagcgctggagctttgaggaaaagtggggagtaaccagggagcctcttcagagtc

SEQ ID NO: 818792 - DNA, 120 bp, Artificial Sequence
  ENSG00000258717_2 (sequence is synthesized)
caagtcactcttcagaatgacccgggcgcaaaagactacacccaaagaaaagctggctgcgttcccagccagctgaactgcgggccgcctgcctcctcatctgcgttcctgcctccccac

SEQ ID NO: 818793 - DNA, 120 bp, Artificial Sequence
  ENSG00000258717_3 (sequence is synthesized)
ttgtttaggccattcccccacccagaatgcctttccaggacagagcttctccaaccttagttctgactttctaagtcacagagaaccacagagaggcctcctccagggacaccacctgag

SEQ ID NO: 818794 - DNA, 120 bp, Artificial Sequence
  ENSG00000258717_4 (sequence is synthesized)
cctcagcactttgtagctgcctcttcatctcaggccagtgtgagccggggtgagggctccagcccccttggagcgcccggcatcaaccccgtgtgccgggcaagctccagaagtgtgttg

SEQ ID NO: 818795 - DNA, 120 bp, Artificial Sequence
  ENSG00000258717_5 (sequence is synthesized)
gaaggcagggtcgatattgccggctttggggggatgagtcgataacgattgaaagtgagcaaaatattctcctttctctccctgtaaggggaatttgaaaatcggatttactggttaaat

SEQ ID NO: 818796 - DNA, 120 bp, Artificial Sequence
  ENSG00000258716_0 (sequence is synthesized)
aacagaatctggtccgttatgacacagaagtgaagggcctgctcaagctcacaggcccagtgagagagtgagctgggagctttctaccgtactctgttaccttcctgggtacacataagc

SEQ ID NO: 818797 - DNA, 120 bp, Artificial Sequence
  ENSG00000258716_1 (sequence is synthesized)
tctaaaacagaagtgtaactctagaggaaggaacaaaatatgaatccaagagttcaggtctatgttttgcatcattaatatgcaaattacttcatatatttataacataaattctgtgtg

SEQ ID NO: 818798 - DNA, 120 bp, Artificial Sequence
  ENSG00000258716_2 (sequence is synthesized)
tcccagtgatgacagctaataagatactcattactggtccaaaactggaaagaaaatccgttggcccaggtgaagaagtccagtgaatgcgggaccgaggccctctggtggaggaacgga

SEQ ID NO: 818799 - DNA, 120 bp, Artificial Sequence
  ENSG00000258716_3 (sequence is synthesized)
ggaagtctccgccccgaaggaggccaggcaggatgaggcaacaccagccactgggtgcgtattcccaattaagcctttgaagcaaatacaagtttttctcaaactgtttccagtttattc

SEQ ID NO: 818800 - DNA, 120 bp, Artificial Sequence
  ENSG00000258716_4 (sequence is synthesized)
ctggagagagtttaagattcagaagcaaattcttcctcaatctgggaagcatctgcttgtaaacaaagaagccacagtaaccacagagctgagaaggcctgaagctacaacccattgcaa

SEQ ID NO: 818801 - DNA, 120 bp, Artificial Sequence
  ENSG00000258716_5 (sequence is synthesized)
tgaatgcggcacccagaagggtgcccgccccaccacagatcaatcggacagcaagaagaggtgaaacaggcacatcttaaagtgcccaaatgtaaaagcatgattcccaggaaatcctgt

SEQ ID NO: 818802 - DNA, 120 bp, Artificial Sequence
  ENSG00000258716_6 (sequence is synthesized)
cttccaaacatgtttaaatcacataatcataattttattcaactaatcgcttccactgttgccatgagagcagaaaaggaaaaatgttcaagtacacggataatcagaacaaaaaaaaga

SEQ ID NO: 818803 - DNA, 120 bp, Artificial Sequence
  ENSG00000258716_7 (sequence is synthesized)
ggaagttaacttgcaagaattctattccaaatgctatgagataacccaatttgagagaggcaaacaaaacccacacgattgctttcatatcttcaaactgttagttaattcttaaaatgt

SEQ ID NO: 818804 - DNA, 120 bp, Artificial Sequence
  ENSG00000258716_8 (sequence is synthesized)
cttaaaactccactcaaaatgaagataagagagccaaggaatctcccaatctccctgttttgagggtttccacaaatccctgacattaggtcatttattccatttcaacacccttgcctg

SEQ ID NO: 818805 - DNA, 120 bp, Artificial Sequence
  ENSG00000258716_9 (sequence is synthesized)
agagagtgcaatgatgtcagaattcattatggtaaactattctcaaaacaaatgttcctgccagcattcactcagcgggcactctggcaagctgtcagaacttggggttcatctcctgca

SEQ ID NO: 818806 - DNA, 120 bp, Artificial Sequence
  ENSG00000258716_10 (sequence is synthesized)
ctttacttcacaagcttcctgagctgggtgcatttccttccacttggaatcgttcccaacagctcggctgggaccaaggaggaaagggcctgcaggtccccggagcaccagctgctcgtt

SEQ ID NO: 818807 - DNA, 120 bp, Artificial Sequence
  ENSG00000258716_11 (sequence is synthesized)
ccgcctgacaggcaaagctctgcttccgctcaccaacatcactgtcctcagcccattatggagagctcaggccagagtcccacagccttgctctcattcaaatccttgtttttccactgg

SEQ ID NO: 818808 - DNA, 120 bp, Artificial Sequence
  ENSG00000258716_12 (sequence is synthesized)
caggaaagcctaccacttttcatggggacatagtctactcttcccttgacctacttccatcttttcttctctcctatcttttctatctggttttatcctcctcctgctgaacctccttcc

SEQ ID NO: 818809 - DNA, 120 bp, Artificial Sequence
  ENSG00000258716_13 (sequence is synthesized)
agggcttgtctgctgattcgccagcattcaaccctccctctcgaccctctgtcctggcgataggttccagttcccccttgggccccatggcagcacctttccaggctctgaaatgtacat

SEQ ID NO: 818810 - DNA, 120 bp, Artificial Sequence
  ENSG00000258716_14 (sequence is synthesized)
tctaacgtacaagcttaccgcacctggtttcgtcctgttctatgactctgaaccacattctcggctctttaatattgccatctgtccctctgtgatcaaaccaaggaggaaatgtaaatg

SEQ ID NO: 818811 - DNA, 120 bp, Artificial Sequence
  ENSG00000258716_15 (sequence is synthesized)
ggaagaaggccagagctccaaaatcaaaatggaaaaccaaggctagagaaatttggggacatgagaatcatttcagcttgtaatgagtggctacttcaataataagctcaatacattttt

SEQ ID NO: 818812 - DNA, 120 bp, Artificial Sequence
  ENSG00000258710_0 (sequence is synthesized)
gttgcaggctatcgtgtgttaacctgtacttctgccgcagagtttggagaaagcggcagcagattgtgctgccgcaggctggagcctggaacctggagccctggagccttgaatggtgtg

SEQ ID NO: 818813 - DNA, 120 bp, Artificial Sequence
  ENSG00000258710_1 (sequence is synthesized)
tggtggcaatggagagaggcagctggcagtgacagctgctccgtgcttggctacaggaaggaaagaaggagaaagcacctaccataggctggaggctagagcctgcaggactgcggctgg

SEQ ID NO: 818814 - DNA, 120 bp, Artificial Sequence; identical to SEQ ID NO: 818123
  ENSG00000258710_2 (sequence is synthesized)

SEQ ID NO: 818815 - DNA, 120 bp, Artificial Sequence; identical to SEQ ID NO: 818124
  ENSG00000258710_3 (sequence is synthesized)

SEQ ID NO: 818816 - DNA, 120 bp, Artificial Sequence
  ENSG00000258710_4 (sequence is synthesized)
actggcccctgccacccagtggccaggatgacaaggcagaggagaatgaccctgtggccaccaccatcacaggcctatgctcagcatgatgtaaactccactgcggacagatgcagccaa

SEQ ID NO: 818817 - DNA, 120 bp, Artificial Sequence
  ENSG00000258710_5 (sequence is synthesized)
gaagacaggtcaccttctaccaactcccaccagaggaaactcttccccaggacccagtacgttggccctctgaccctgcacacagcacatgatgctgaggttcagtgctgaacaagagct

SEQ ID NO: 818818 - DNA, 120 bp, Artificial Sequence
  ENSG00000258710_6 (sequence is synthesized)
actgagagccagagattcacttcttccatggagccccactcatggatggaggctctgtcccgggtccagtgccactgggaacactgggtctctggtttctagctctgtcctatggcagag

SEQ ID NO: 818819 - DNA, 120 bp, Artificial Sequence
  ENSG00000258710_7 (sequence is synthesized)
gttccaccccacaataaccgaagtgctgagaaggtgggaagctcctgcccgaccctccactgagagctcagctcctaggctgaggaataaaacagctcaactttgtctacacctgcagaa

SEQ ID NO: 818820 - DNA, 120 bp, Artificial Sequence
  ENSG00000258710_8 (sequence is synthesized)
aaaatcctaacttcagtaacagcagattgtggacaaattgaaagcctgccagtgctctcaaaaacagtggatggtgtggtggaaagcccttggaaggagacgggtggatgcatgggagat

SEQ ID NO: 818821 - DNA, 120 bp, Artificial Sequence
  ENSG00000258710_9 (sequence is synthesized)
gcaggctacactgcagggctgctggcttgcaggagagaaccgaggacaagggagagctggggaaagttctcttgtggttgaaataaatgccagacactcttcaatggagcccatgtttgt

SEQ ID NO: 818822 - DNA, 120 bp, Artificial Sequence
  ENSG00000258710_10 (sequence is synthesized)
ttggttcagtctgtgaagtaattcaaacctcagtgcatgattgaaaatagtacaattttccatctgcaagtggcagagctcaacatctgggtctggtcaggagagagacagagagagccc

SEQ ID NO: 818823 - DNA, 120 bp, Artificial Sequence
  ENSG00000258710_11 (sequence is synthesized)
agcccaaaccactgacacctggggttgacagtgctgcttacagatgtgttcctttgatctttgagactggtttctctcacttagcataatgcctggagttcaactgtaatggtttgtgaa

SEQ ID NO: 818824 - DNA, 120 bp, Artificial Sequence
  ENSG00000258710_12 (sequence is synthesized)
tcgatcatttgatattttttattgctgatggattcaatttatagatgcttcctagttttttcacctactcaaattttgagacatttatgttatttttcatttctaacacacacacatgta

SEQ ID NO: 818825 - DNA, 120 bp, Artificial Sequence
  ENSG00000258710_13 (sequence is synthesized)
atatcttgaatatttgaatagaggttttgtgtgaaaataagattgtatttctctgaagcaaaattcaagagtgggatatttaggtcatgtgttaagggcatgtttgattgcagaaaaaac

SEQ ID NO: 818826 - DNA, 120 bp, Artificial Sequence
  ENSG00000258710_14 (sequence is synthesized)
taaaaattattttcccgagtagctgtttcattttgcattcccattaacaatgtcgtagacactaggaacttggtatgctcatcagcattggtattacctgtatttcttcttaatttcagc

SEQ ID NO: 818827 - DNA, 120 bp, Artificial Sequence
  ENSG00000258710_15 (sequence is synthesized)
cattctaaaaagtgtatagtggtgtctcattgtgggcttgatttgaattcctttaatggaaaatcctgttaacagcctgtttatatgcttatgtgtcatctgcacatctcatttgatgaa

SEQ ID NO: 818828 - DNA, 120 bp, Artificial Sequence
  ENSG00000258710_16 (sequence is synthesized)
atgtctgcacaaacctttgcctattttatccatgggttgtttctttcttatttctttttcacagttgagtcttgagagttcttattctaattaaattggtggttatgtgatttgaaaata

SEQ ID NO: 818829 - DNA, 120 bp, Artificial Sequence
  ENSG00000258710_17 (sequence is synthesized)
agtaacactctgggagggctcaggccacatcacgaaatgtgacaggatagccttgaactcatcaattgctgggtaagaaagaattttaatgcaatggcaaacaaccaatcaaacaagcaa

SEQ ID NO: 818830 - DNA, 120 bp, Artificial Sequence
  ENSG00000258710_18 (sequence is synthesized)
acaaaaacaataaacccttccttgaggaccaagaagacattgattagctaacctaagagctccaggtggagacctaggtcctgattgggtttctgaatttgaccactaggcagaaaacta

SEQ ID NO: 818831 - DNA, 120 bp, Artificial Sequence
  ENSG00000258710_19 (sequence is synthesized)
gcacccaaaaccagttggaataaaattacccacctacagtggagccaaggcccccagatcctttttgtcaggggcacctcaaactcaactccaaaattgatctaatgaactttcccaaac

SEQ ID NO: 818832 - DNA, 120 bp, Artificial Sequence
  ENSG00000258710_20 (sequence is synthesized)
cacattcccttcttgcatttctgagagaatggattcccattcatctgactacagtgctaccctgaaagcagatccagagactaagattcacctgcaggtgattcatttgctcagcatgat

SEQ ID NO: 818833 - DNA, 120 bp, Artificial Sequence
  ENSG00000258710_21 (sequence is synthesized)
agtaacactctgggagggctcaggccacatcacgaaatgtgacaggatagccttgaactcatcaattgctggcaaggtaagctgtcatcagttggaggtaagcagaagacagtagagagt

SEQ ID NO: 818834 - DNA, 120 bp, Artificial Sequence
  ENSG00000258710_22 (sequence is synthesized)
acagagccctggactgtgactcagaggatgagcaccagatccagtttgctgtgccacagtggggattttgtatctctgtggacatgtggtacaatgctgcatatccatcggcatatggcc

SEQ ID NO: 818835 - DNA, 120 bp, Artificial Sequence
  ENSG00000258710_23 (sequence is synthesized)
ttccagcctatccatgcacgatgaagcttacttaagggatgaagccggaatgctgggtgtgccagtgccgacagccgaaagaatcaactgcctggtgtatgatgcttttatgaaaacaag

SEQ ID NO: 818836 - DNA, 120 bp, Artificial Sequence
  ENSG00000258710_24 (sequence is synthesized)
cccagggcctcttgctttcttctgtattagattctctggtgaatatttttattcatctctgccagaaattgccacatataattacctagaagcattacaataaactgatttggaagttaa

SEQ ID NO: 818837 - DNA, 120 bp, Artificial Sequence
  ENSG00000258710_25 (sequence is synthesized)
gcccagacccttcaggaatgaaggtttgcatcactccactaggagaaaaaactctacctgctgtgatgcttgctgaaggcaaagggaatacagaatcggtagtagaagaagtagtcatca

SEQ ID NO: 818838 - DNA, 120 bp, Artificial Sequence
  ENSG00000258710_26 (sequence is synthesized)
aaagggaatacagaatcggtagtagaagaagtagtcatcaataccagctacaaccacgtgatctgttgcagaaatgaggactgtaattgtcatcagtatttccttcttcttttgttaaaa

SEQ ID NO: 818839 - DNA, 120 bp, Artificial Sequence
  ENSG00000258710_27 (sequence is synthesized)
agtaacactctgggagggctcaggccacatcacgaaatgtgacaggatagccttgaactcatcaattgctgggggcacctcaaactcaactccaaaattgatctaatgaactttcccaaa

SEQ ID NO: 818840 - DNA, 120 bp, Artificial Sequence
  ENSG00000258710_28 (sequence is synthesized)
gagtacagagccctggactgtgactcagaggatgagcaccagatccagtttgctgtgccacagtgggcctgtgatattttgaagcaggaagctgacctgagaccttcagaataaactgat

SEQ ID NO: 818841 - DNA, 120 bp, Artificial Sequence
  ENSG00000258710_29 (sequence is synthesized)
cactgtggataatgaaaaggccccacccaggacattgattgagcacccctgcctgtctcattccttcttctctttctttttattatgtgcttaccataataaaaatttttattgtcttta

SEQ ID NO: 818842 - DNA, 120 bp, Artificial Sequence
  ENSG00000258710_30 (sequence is synthesized)
gtcactcacagaaggcatcccactcaacctcaccttggggtaaatcaaaatagtcctccttctgaagctaccgggtaaaacggtggtagctgtgcagctgctgctgatcaacaggctcca

SEQ ID NO: 818843 - DNA, 120 bp, Artificial Sequence
  ENSG00000258710_31 (sequence is synthesized)
gaaacagcagcaggagaaaaagctggttctgagtgaaatagaaggactagggtgccaaattaactcctctccacaaagtgaccccacatggaaaagtacttgagaagctctgtaaagaca

SEQ ID NO: 818844 - DNA, 120 bp, Artificial Sequence
  ENSG00000258710_32 (sequence is synthesized)
tggtaaaagcttaccaaagacagtagcattatcctttcccttacacacaaagtggaggggaagtgtggggcctgtgatattttgaagcaggaagctgacctgagaccttcagaataaact

SEQ ID NO: 818845 - DNA, 120 bp, Artificial Sequence
  ENSG00000258710_33 (sequence is synthesized)
ccacagtgggtagaatattgctcttgaaccactttggaaggaattttaccagggcctgtgatattttgaagcaggaagctgacctgagaccttcagaataaactgatcactgtggataat

SEQ ID NO: 818846 - DNA, 120 bp, Artificial Sequence
  ENSG00000258710_34 (sequence is synthesized)
tctttcatggtaaagcctccagttgcctattatgaaatcagcaataatcatgtgtcccctgtctgggtccctgaaaagatggaaagaggcagatcaggctggtgctctgagaatgacaga

SEQ ID NO: 818847 - DNA, 120 bp, Artificial Sequence
  ENSG00000258710_35 (sequence is synthesized)
catcaaacaagaatgaaaagtgtcaccctccttggacttattcagtaactcatgcccttgagcaaaggaggattttctatcaaaggacatggatttctgtgtctttctcttgagataaca

SEQ ID NO: 818848 - DNA, 120 bp, Artificial Sequence
  ENSG00000258710_36 (sequence is synthesized)
ttgctgggtgaccacagaaagctggctctggaagcacagaagctgcctttccttgagtaataatgtctcttcaaagggagctggagcatgagtagtgtacatgcctcagatttcagtgaa

SEQ ID NO: 818849 - DNA, 120 bp, Artificial Sequence
  ENSG00000258710_37 (sequence is synthesized)
aagttcagaggaggcctgagaagaaggtcctgggaatgaatcatctagatgactcaaccttgcaaagccatccacctcattgtggatatcattcaatacatttggtgctccatcatccta

SEQ ID NO: 818850 - DNA, 120 bp, Artificial Sequence
  ENSG00000258710_38 (sequence is synthesized)
ttccatgccaggaggaggaggagttacatgctggaagcttgcagatagcctggggctgctgctcgccttgctgcggttggtggcagctaccgagactacctcgcaccagagcgctcagca

SEQ ID NO: 818851 - DNA, 120 bp, Artificial Sequence
  ENSG00000258710_39 (sequence is synthesized)
ggccgcatatcagtgatgcatctggctcagcttatttgggtggcagagtcagctccaaggctgcaggcagaggcaccgctcctgaagcactgctaggcccagctcccatgtcaaaggcct

SEQ ID NO: 818852 - DNA, 120 bp, Artificial Sequence
  ENSG00000258710_40 (sequence is synthesized)
catgcagccctacacacagggctggctggttgctcccaagcccaagcctctgttgggtggtttcttcctcaagattttagaaacaggctttctggtctgttgaaataaaggcagtggtct

SEQ ID NO: 818853 - DNA, 120 bp, Artificial Sequence
  ENSG00000258710_41 (sequence is synthesized)
gatagtttctaaataaatttaaagcttattttttctcccttccagaagtatcatgtacatttgctgccaagtagctctattattccaggccattaaatctgaaaaatctaacagttttca

SEQ ID NO: 818854 - DNA, 120 bp, Artificial Sequence
  ENSG00000258710_42 (sequence is synthesized)
ctttatgtgcttggattcctcatatgtaatacaggatcacaactattgttctcactcatgcaatactactattgtgagaacctcatgaattagagaaactctgaatttgcaatttagctt

SEQ ID NO: 818855 - DNA, 120 bp, Artificial Sequence
  ENSG00000258710_43 (sequence is synthesized)
tagaacactgacaagtagctcattgattcttgcctcattcctctggaataaagtagctttttatcaaacaagtgaacacattgctttcagtggaggcagaaggaattcattttgaaaaat

SEQ ID NO: 818856 - DNA, 120 bp, Artificial Sequence
  ENSG00000258710_44 (sequence is synthesized)
gcacatagcattctccaacccatttttgcatattcttttttaagggaatgccttgtgtgagaggactagcagggtatcagaactgttttttgaaagaactttgtttgcaggtgctttcaa

SEQ ID NO: 818857 - DNA, 120 bp, Artificial Sequence
  ENSG00000258710_45 (sequence is synthesized)
atatgttgtcttcaactatcattttcagtgtaaaaagcgggcttggagtaagcactgcctgcagaccacttttgtgagccctcctttcagtgatgtgatggcaatccaggcccctgctgg

SEQ ID NO: 818858 - DNA, 120 bp, Artificial Sequence
  ENSG00000258710_46 (sequence is synthesized)
agatttcagaggctggggtaaatctcagaccaagaagacgcaatggttttgaggtagagatcctaggaatatagaattctgagctatgcagtggtcctttgctttcaggaaatcaagttt

SEQ ID NO: 818859 - DNA, 120 bp, Artificial Sequence
  ENSG00000258710_47 (sequence is synthesized)
gatagtatcacctgaagcatacttacattatccacaaatgacagctccttacttgagcagttaaattgtggcaagtcttaacacacagattcctcttaaatgccacctaatccctgcctg

SEQ ID NO: 818860 - DNA, 120 bp, Artificial Sequence
  ENSG00000258710_48 (sequence is synthesized)
gcttcaagcctctggcttcccttggagaggggcagagtctctctgtgtgagagattcttcatttctgctttctgccctgtcagtttctacttacttgctcttccaccttgtccacaaggc

SEQ ID NO: 818861 - DNA, 120 bp, Artificial Sequence
  ENSG00000258710_49 (sequence is synthesized)
ttatctagcggctgtttacctctgagcagagaaaatggaagtcagcagagacaaggttgaaatttctcaggaaggattttttttttccactttatcgtgcagcaagagtaaagccttttt

SEQ ID NO: 818862 - DNA, 120 bp, Artificial Sequence
  ENSG00000258710_50 (sequence is synthesized)
ttcggtgattctttcctccacaatggccattggctgccctctgtcacacacaggtgtgactcccttgttattaactgtcaggtgggaatttctagggaagaaggagagtgctttgttaac

SEQ ID NO: 818863 - DNA, 120 bp, Artificial Sequence
  ENSG00000258710_51 (sequence is synthesized)
ctcttaacatctccccaaattgcatcatattctctccctttcccctcccagttaccttttctatttttgatttcccctttttcagtctgatttggggatttcagttcccactaactttgt

SEQ ID NO: 818864 - DNA, 120 bp, Artificial Sequence
  ENSG00000258710_52 (sequence is synthesized)
ataatatcctcctatctctgaaagaacaagttccatctccattttccaggagagtttttttccttgcagtaagagcaccccatcatctctccatttctacctccccatcccagtgctccc

SEQ ID NO: 818865 - DNA, 120 bp, Artificial Sequence
  ENSG00000258710_53 (sequence is synthesized)
tttatggcagtacaattgaagagggacccacagtcttgctgaaggaacatgaccttcctactgaagttgggattacggaatagagggagaagaggaaagatggatgtttatctgaatggt

SEQ ID NO: 818866 - DNA, 120 bp, Artificial Sequence
  ENSG00000258710_54 (sequence is synthesized)
cggatcttgttttccagaggacacaggccaatgggaaacttttgggaaggaagtcaaaaaatcaaagccagaactgggttttggtaatttaatctcccaaagagagaaaagtccccatac

SEQ ID NO: 818867 - DNA, 120 bp, Artificial Sequence
  ENSG00000258710_55 (sequence is synthesized)
tctaattcatattttgtttgacttgactgaagcccttttgaatattttttctgcttctgttctgttcttgcaataacaatgacataagtttgcctttggagacattaaaatagttttctc

SEQ ID NO: 818868 - DNA, 120 bp, Artificial Sequence
  ENSG00000258710_56 (sequence is synthesized)
tccattgaatcatgttaggccttaatgtacctttcctttataacacttactgaatgattaatttggcatttatttacctggctattttattcagtgtttaggatttatactagattgtaa

SEQ ID NO: 818869 - DNA, 120 bp, Artificial Sequence
  ENSG00000258710_57 (sequence is synthesized)
gctcctcaagagtgttccaggtctagtttaggtcaccatgtatccctgattagtaccacacatcccagtgcaccatggttctcaacaaataacatgttatataaatcaataaatgacagg

SEQ ID NO: 818870 - DNA, 120 bp, Artificial Sequence
  ENSG00000255608_0 (sequence is synthesized)
agcatgtgagttttgaggaaacacaaacattggtccataatacatatccttaaagatattctcctgctctgactgctttcataggctctcaggagttcaggcataatatgcacaaaaaag

SEQ ID NO: 818871 - DNA, 120 bp, Artificial Sequence
  ENSG00000255608_1 (sequence is synthesized)
caggcaaactctgcttatgcatagaataataaagtttgtgcattgaactcaaaagcttaaggaagacttggtttaaagatttataatcttaataaattgaatgtagttgacctgtaaaca

SEQ ID NO: 818872 - DNA, 120 bp, Artificial Sequence
  ENSG00000255608_2 (sequence is synthesized)
ttcctcttcctcctctcctcagcctactcggtgtgaagacaatgaggatgaagacctttacgatgatacacttccacttaataaccagctatacaggaaacatgactggagaggcttcag

SEQ ID NO: 818873 - DNA, 120 bp, Artificial Sequence
  ENSG00000255608_3 (sequence is synthesized)
gaaacttacagtcatggtgaaagggtgaatgagaagcaaccatgtcttcacgtggcggcaggacagagagagagcaaaaggggaagtgctacacactttcaaacaatcagatctcatgag

SEQ ID NO: 818874 - DNA, 120 bp, Artificial Sequence
  ENSG00000255605_0 (sequence is synthesized)
ggcaggggtatgacatggcaaaagaaattattccagcagcagctgtctgcaaggcagattggagccgagagactcgggaagttaccacagttgtccaggcatgaagcaaaaagggaaatt

SEQ ID NO: 818875 - DNA, 120 bp, Artificial Sequence
  ENSG00000255605_1 (sequence is synthesized)
ttacggacttaacattttatacccattgtcttatcttctccatggattgcaaaccttgtgcaagaccatgtagctattctgcaggaaagctgggccacaaactgaaatttccagcacgcc

SEQ ID NO: 818876 - DNA, 120 bp, Artificial Sequence
  ENSG00000255605_2 (sequence is synthesized)
aaacacagtgtttcatgaggaaattcagctacttcttaaaagatcagcatatcaatcaagtgtcactatggcatgcctgggtccatcaagtgtcgttatttgtcccagaaaaagttactt

SEQ ID NO: 818877 - DNA, 120 bp, Artificial Sequence
  ENSG00000255605_3 (sequence is synthesized)
cctccttcctgagacctagctgagttgtcaccttccttgtttgcgaagattcctgggaacccttaaggggaagactcaagaaaaataaagatacccagggtaattccaaaccagacttga

SEQ ID NO: 818878 - DNA, 120 bp, Artificial Sequence
  ENSG00000255606_0 (sequence is synthesized)
gacagcctcagagaggcttgcgaaacacttgctgtgaagaaatctttccattgagaaaaagttccctggtgctcatgctcccagtggctcaggcctggtctgcactcagcggctgccagg

SEQ ID NO: 818879 - DNA, 120 bp, Artificial Sequence
  ENSG00000255606_1 (sequence is synthesized)
acctcccgggagcgcccacacaccccacagcccgcctgtcctgggaatacctctccaggccctgaatacctgtcccccactccctgcctaggacaacgggggctgtcagggccatgggca

SEQ ID NO: 818880 - DNA, 120 bp, Artificial Sequence
  ENSG00000255606_2 (sequence is synthesized)
gggacggttgaggttttcacaccgggccacacctgagccactaggagccgggaggctctgatcgtctctccgcctgtctctctctggcatcgccagggctgacttcattccacgtccgcg

SEQ ID NO: 818881 - DNA, 120 bp, Artificial Sequence
  ENSG00000255606_3 (sequence is synthesized)
cggaaacagcagggctatctcagtgcaatcctggttttgtattcagagcctcctctgagtgagtgccagggcgcaccgtgcaaggagcctggctttgcccactgcaatcccgtgccctca

SEQ ID NO: 818882 - DNA, 120 bp, Artificial Sequence
  ENSG00000283265_0 (sequence is synthesized)
agacataacaatgactctattgaactggaagttaagactgccactaggccactttgggctccttatgcctgggtcaacaggccaaggagggagttatagtgttggctgcatggctgatct

SEQ ID NO: 818883 - DNA, 120 bp, Artificial Sequence
  ENSG00000283265_1 (sequence is synthesized)
gactactaaggggaaattggactactgctcaacaatggagattctctctggactatttcatggctcaggaaccacatcctccttccccacttcctgagtgtatgggatggccacatatac

SEQ ID NO: 818884 - DNA, 120 bp, Artificial Sequence
  ENSG00000283265_2 (sequence is synthesized)
tgaagctcaatcttatgaaaagagcatttcagaggcaggaggatctggatttgaattccggcttgatcctgggctgaacaggaccagttctgctttctgccctggggcaagttacccaac

SEQ ID NO: 818885 - DNA, 120 bp, Artificial Sequence
  ENSG00000283265_3 (sequence is synthesized)
atcgctgagcatctgtttccttcactataaaatgaggatgatgataccacgtgggattgttgagaagataaaaagagaaagcacttgaaaagcttctaaacatgacctctcacaaagctg

SEQ ID NO: 818886 - DNA, 120 bp, Artificial Sequence
  ENSG00000283265_4 (sequence is synthesized)
ccagaaagaacaatgggaggcccagaagcccacctccaaccactccaaccagatacaccaaggactctggctcagaccagatacagccaccttggtgatccagagaggcctcctgctggg

SEQ ID NO: 818887 - DNA, 80 bp, Artificial Sequence
  ENSG00000283265_5 (sequence is synthesized)
atacagccaccttggtgatccagagaggcctcctgctgggtgcagtggctcaagcctgtaatcccaccactttgagaagc

SEQ ID NO: 818888 - DNA, 120 bp, Artificial Sequence
  ENSG00000283265_6 (sequence is synthesized)
aaaagagagagagagtgagagaggcctcctatcaggaatcatgctcaagttccaattcaatttcaatgagagataagggagtaaacagcaggaaggagggagattccagaagaccccaag

SEQ ID NO: 818889 - DNA, 120 bp, Artificial Sequence
  ENSG00000283265_7 (sequence is synthesized)
actgcattgttgggctgtcattgttcatgggaattactcacccatgggtctccatcgggtttcacccacaggtctgtgcaccatgtcttgctctctaggaaccagaacatctctatggtt

SEQ ID NO: 818890 - DNA, 120 bp, Artificial Sequence
  ENSG00000283265_8 (sequence is synthesized)
ctttggatagaagtactctatttcagtgactcttagatttttgtttatttttaaaaagggatagttgtggtgaattgcattaggattactaaaataaaagcattaagaaactccccaaaa

SEQ ID NO: 818891 - DNA, 120 bp, Artificial Sequence
  ENSG00000250274_0 (sequence is synthesized)
atgtgttctgctttcccagggtccatggcaggagggctgcagcggcctcatttattcatttgtgccaggcaccctgttaatcatggagataccacgctgacctgccttcaaggagaccat

SEQ ID NO: 818892 - DNA, 120 bp, Artificial Sequence
  ENSG00000250274_1 (sequence is synthesized)
attctagtaggagagctgagcagcgagatggccatgtgtagatggtgctatatgaaagatcaccctgatgtagaagccaggtggggcatcttggcttcctgctccttttctttcatatga

SEQ ID NO: 818893 - DNA, 120 bp, Artificial Sequence
  ENSG00000250274_2 (sequence is synthesized)
caccgaaaagtctctggatattgcagttgggccagacctgcagaaaaagagaacattcagttaaacagaagaacatattctggagaaaatggggaagagagtgaagacacagctggttca

SEQ ID NO: 818894 - DNA, 120 bp, Artificial Sequence
  ENSG00000250274_3 (sequence is synthesized)
agggaaaaatgccaactgagcacagagagaaaaatgcctgctgagagctccacaaataaagaaaaaacttacataaagtggtgagaagcacaggagaggacagggccggggctgagaggc

SEQ ID NO: 818895 - DNA, 120 bp, Artificial Sequence
  ENSG00000250274_4 (sequence is synthesized)
tgaagttccaggaccggttctgcatttgctgctgtgtgacatggggccagtgacttcccatctctgggcttcagttttctcaattatcatctattctcctgctttctctataacattcat

SEQ ID NO: 818896 - DNA, 120 bp, Artificial Sequence
  ENSG00000250274_5 (sequence is synthesized)
ttattgattccttgattcaagaatatttcttaagcacccagtttgtgccaggtacagctgtcagtgctagtgattcagcaatgaacaaagtggacaaaaagcacatccttatgtgagccc

SEQ ID NO: 818897 - DNA, 120 bp, Artificial Sequence
  ENSG00000250274_6 (sequence is synthesized)
tcatgcatgcagcaaacacaatcagtgaaatatggtgcagattcatttgtaataaggagaaaacagaaagcacagaaggggtcaggcagtctaatctggaagggtgacctctgagtcaag

SEQ ID NO: 818898 - DNA, 120 bp, Artificial Sequence
  ENSG00000250274_7 (sequence is synthesized)
acataaggaggtgagggagtgagccaggaggacatctgggcaaagcctgctccaggcagaggggacagccagtgtgagagctgccctgaatgcaaagcctacccactgccccttcttttg

SEQ ID NO: 818899 - DNA, 120 bp, Artificial Sequence
  ENSG00000250274_8 (sequence is synthesized)
gtgtctccactggcctgctggctgcagcagccttctatcagacctcccagcctccatctcctcccctggggtcttctagccccacatggccagccagggtgactctaaaatataagtcag

SEQ ID NO: 818900 - DNA, 120 bp, Artificial Sequence
  ENSG00000250274_9 (sequence is synthesized)
aacccaccaggtgctcccaccacattcaatgcagtgcaagtcctcaccatggtcctctagcatctctccaagcccatctgcctcctctctccctcacttgctcctttccagctacactgg

SEQ ID NO: 818901 - DNA, 120 bp, Artificial Sequence
  ENSG00000250274_10 (sequence is synthesized)
cctctgctgtacctgggacatgccaagcaagacccagccttggggtctttgctcacggcctctgcctggatgttcttcccccagttatccacaggtctggcttcctgactttattcagag

SEQ ID NO: 818902 - DNA, 120 bp, Artificial Sequence
  ENSG00000250274_11 (sequence is synthesized)
gccaccctctcaagaagacacccttgactgtttcgtctaagcaagaccctgtcacatccaaccactcgcctcgctttattttcccttacagcatttatcatgacctcccatcattttata

SEQ ID NO: 818903 - DNA, 120 bp, Artificial Sequence
  ENSG00000250274_12 (sequence is synthesized)
tatttataatagtagatatgatcaatggatcagatgtttattatgtgatggacactgttctaaacatcctagaattaattcatcttctcccaaactccttgagattggtattgccattga

SEQ ID NO: 818904 - DNA, 120 bp, Artificial Sequence
  ENSG00000250274_13 (sequence is synthesized)
ccacattttatatatcaataacccaagatagagagaggttaagaaatttgctcaaggtctcccatctggtgagtgtcagatcaggattcaaaccctggagcttccattatgagccacaac

SEQ ID NO: 818905 - DNA, 120 bp, Artificial Sequence
  ENSG00000250274_14 (sequence is synthesized)
actctagaccagggctgcccagtagaactttgcaatgatgaaaatgttctgtgtctgcactgcccgaagtgactgccactggatatgtgtaagtgttgagcatttgaaatatgtgtgacc

SEQ ID NO: 818906 - DNA, 120 bp, Artificial Sequence
  ENSG00000250274_15 (sequence is synthesized)
aaggaactgaattttgaattttattgcatttccatgactttagatttaaatagccaggctagtggctaccaaattgtacatagagccctcgcacctcttatttgctcctttgttaatttc

SEQ ID NO: 818907 - DNA, 120 bp, Artificial Sequence
  ENSG00000250274_16 (sequence is synthesized)
tgtctgccacataaggatgaaacttgcctatgcattagtttcctcattttacagtaagggaaacacccctggtacaaagtaaatactcaatgctcattaatcaccatcatcatcaccatt

SEQ ID NO: 818908 - DNA, 120 bp, Artificial Sequence
  ENSG00000250274_17 (sequence is synthesized)
attataacattatcattattagtctccatgagatcgatgactttatgtttgttcactcctgaatcccattacattctttagcacatagcaggtgttcaataaatatattatgaatgaatg

SEQ ID NO: 818909 - DNA, 120 bp, Artificial Sequence
  ENSG00000287776_0 (sequence is synthesized)
agaagccagactgagaaagaaaagcataaaggacacgcaacagcatgatgcctgagcaaggaatgtggatggagaagggaatattggacaaggtcaggaccgccacttctagagaaatgt

SEQ ID NO: 818910 - DNA, 120 bp, Artificial Sequence
  ENSG00000287776_1 (sequence is synthesized)
gataccgggacaagatatgactaaaaatgtctgcagagcagcagagagtgcctacctcaagtagaagtatgatagttgaactttattgtgctctagaaaaagcaataaacccttctgcaa

SEQ ID NO: 818911 - DNA, 120 bp, Artificial Sequence
  ENSG00000287776_2 (sequence is synthesized)
acttcataagatagcacagtaaaaggaactctacaccaagaggacattttcccttcaaaataacaaagcagaacacaaagtaaatcaaagcatataaacggagaaaggaattccgttgcc

SEQ ID NO: 818912 - DNA, 120 bp, Artificial Sequence
  ENSG00000287776_3 (sequence is synthesized)
tttgaaattgaactccagaaataatttacttaaaaagagttcctcagatatagcttgaagtctaaagacaatcattgatcatcaactggtattctcttactccatcagcactccagatac

SEQ ID NO: 818913 - DNA, 120 bp, Artificial Sequence
  ENSG00000287776_4 (sequence is synthesized)
aaagcaagagaaaacccagagtaaaaaatttaaatggacaatatttcatctgcaacctggaaagtcttctatgcttgctgttgtattgactttcctacttatctcagaaaattgtgcatt

SEQ ID NO: 818914 - DNA, 120 bp, Artificial Sequence
  ENSG00000287776_5 (sequence is synthesized)
ttgactcttttccagtgagagagtataagattgtttacctaaagacctcgaagtctagcaagataggaagcaagttgttacttaagcaggttgggggggcattatgggcacaatgaaaat

SEQ ID NO: 818915 - DNA, 120 bp, Artificial Sequence
  ENSG00000287776_6 (sequence is synthesized)
taatcattggttctctttgcctatcaaaatacatcgttcacataggacccctttccccaataaatttagatcatgcctactctagaaaaggaatcacagcattgtcacttcttgatgttg

SEQ ID NO: 818916 - DNA, 120 bp, Artificial Sequence
  ENSG00000287776_7 (sequence is synthesized)
tgaagtaatttgtaatgcgcagaaatgatttgaatacatgtcccaacagagctttgtgaaggaaactcaaagctattctgacataatagcaaatgatagcagagaagggactgaagcact

SEQ ID NO: 818917 - DNA, 120 bp, Artificial Sequence
  ENSG00000287776_8 (sequence is synthesized)
gcagcaaacccaaaattgttccaatattcagctgctagaacaaaaaagaaaagcctcactactgaacctttttcatttcgtatagctgctcaaaatttagaaaactcatagaccataatc

SEQ ID NO: 818918 - DNA, 120 bp, Artificial Sequence
  ENSG00000287776_9 (sequence is synthesized)
cattaaaacagcatctattacatcaagttctaattgctaaacttgctggtaaatccttggggtaaagagattggaactcttccattttcaataaagattatttgtaaaactaaaaaaaaa

SEQ ID NO: 818919 - DNA, 120 bp, Artificial Sequence; identical to SEQ ID NO: 57841
  ENSG00000218510_0 (sequence is synthesized)

SEQ ID NO: 818920 - DNA, 120 bp, Artificial Sequence
  ENSG00000218510_1 (sequence is synthesized)
ggcagctgcatcgggggtcatactacacatcgatcgggaccttagtcatgttgtgatatggacagctttcttaccagtactcataagcctgcttcattttttacgtggcggcaccactga

SEQ ID NO: 818921 - DNA, 120 bp, Artificial Sequence
  ENSG00000218510_2 (sequence is synthesized)
tgtactcccaagaatatccaagaagtctggaacgttttttcttagagttccagaattgagactgaagtgtacccagagacacaaagaaatacagaagtccagaatgatcaaatgagatca

SEQ ID NO: 818922 - DNA, 120 bp, Artificial Sequence
  ENSG00000218510_3 (sequence is synthesized)
ctacccaatgaaatgatgggccgaggagccagaagttgtcctactacctgctttccaggtccagattccacgagagccttctgggctcccaccagagaccctcagtgaagactctgttga

SEQ ID NO: 818923 - DNA, 120 bp, Artificial Sequence
  ENSG00000218510_4 (sequence is synthesized)
agactttaagaccatgctagaaagcctcccggcagaggttcaggaagttctgctatgaggatgcagctggccccagggatgtcctcaggcatctctaggaccttgctggacggtggtggc

SEQ ID NO: 818924 - DNA, 120 bp, Artificial Sequence
  ENSG00000218510_5 (sequence is synthesized)
ctgcctttggggtagggaaatgactgaaatgtgggacctgcgggctcctcgggctgacttggacctcactgcagctctggaggtggacctcgtcctgggaccctagaagcccatttccgc

SEQ ID NO: 818925 - DNA, 120 bp, Artificial Sequence
  ENSG00000218510_6 (sequence is synthesized)
agacctgatatccacacaaaggagcagactgtggaaatgctggtgcaggagcaattccaggctgtcctgcccgaggagctcagagctcaagcacagagatgtcagcctggaatcagaatc

SEQ ID NO: 818926 - DNA, 120 bp, Artificial Sequence
  ENSG00000218510_7 (sequence is synthesized)
actggctaagtcttgctgcttgcttcttgctcagcctgcatatgagaagtcaaccaagcattctcttggatgcaagatccaactgcacccatgggaaatctgaacttccactttctttga

SEQ ID NO: 818927 - DNA, 120 bp, Artificial Sequence
  ENSG00000218510_8 (sequence is synthesized)
gcttgtctttggttgtaataagaatccatcaaaacccatgtctggatctctctttggctgaggcagctttatttcctacagaaagagtttctctgtcctcttgttaggacaatcagcctg

SEQ ID NO: 818928 - DNA, 83 bp, Artificial Sequence
  ENSG00000218510_9 (sequence is synthesized)
ggtgacatgctttaatatatatattttttatgtatccaaagaggtaatcaactttaactttcagaattcatgaatcttggttt

SEQ ID NO: 818929 - DNA, 120 bp, Artificial Sequence
  ENSG00000218510_10 (sequence is synthesized)
gtaatcaactttaactttcagaattcatgaatcttggtttggtggcatgaatgaaaggttatgtaaccccaccagtaactcatttggggtgcccttgaaatattaaagtttggtcctcaa

SEQ ID NO: 818930 - DNA, 120 bp, Artificial Sequence
  ENSG00000218510_11 (sequence is synthesized)
ggagtcgggctcagctcccccccaccacaaccgggattatttttatcggttgagtcatcgcactacctttcatccttgtggctttgggcaagtccccgccctccgagcctcactttgctt

SEQ ID NO: 818931 - DNA, 120 bp, Artificial Sequence
  ENSG00000218510_12 (sequence is synthesized)
atctgtgaatggaaataacagtgcctaccccatgggctatcgggaggatcagttgtgagggaatgcagtgtggggtgtctggccggcagaattccacaaatggtagcagcggttgatgtc

SEQ ID NO: 818932 - DNA, 120 bp, Artificial Sequence
  ENSG00000218510_13 (sequence is synthesized)
actggaggttcctggggcagtaatttatcaagagtttatgatcctgaactaaggatcatacggaggaggatctgtgtataacgttcggcacaatgttagataggaagtaagggcgcagtg

SEQ ID NO: 818933 - DNA, 87 bp, Artificial Sequence
  ENSG00000218510_14 (sequence is synthesized)
gagtctcgctctgtcgcccaggccggagttgcagtgccgcgttgtcgcctcactgcaaccttctctgccatcgagtaactgggatta

SEQ ID NO: 818934 - DNA, 120 bp, Artificial Sequence
  ENSG00000218510_15 (sequence is synthesized)
ttcaagcgattctcctgcctcagccactcgagtaactgggattacagtcgcacatcaccacgcctggctaatgttttgcatttttaatagagacggtttcaccatgttggccagcctggt

SEQ ID NO: 818935 - DNA, 120 bp, Artificial Sequence
  ENSG00000218510_16 (sequence is synthesized)
ccacccgcctcggccttccaaagtgctagaagtataggcatgagccactgtgcctggcctggagttattttttctcactgggtttttgagcaaagaaaaggagttattaactggtgagga

SEQ ID NO: 818936 - DNA, 120 bp, Artificial Sequence
  ENSG00000218510_17 (sequence is synthesized)
ggctgtgtcattgaacctgtgtgatcagacgcaaaccagatcagtatgacttcaaagcttcatctttgagatggagtcttgctccctcgtccgggctggagtgcaatggcgcaatctcgg

SEQ ID NO: 818937 - DNA, 72 bp, Artificial Sequence
  ENSG00000218510_18 (sequence is synthesized)
aagcaattctcctgtctcagtctcccgagcagctgggactattgagtttcaccttgttggtcaagctggtct

SEQ ID NO: 818938 - DNA, 65 bp, Artificial Sequence
  ENSG00000218510_19 (sequence is synthesized)
ctcaggtgatccacaaagcttcagttcttaaccatcaggcgacattgggcaaactgcggctcaga

SEQ ID NO: 818939 - DNA, 120 bp, Artificial Sequence
  ENSG00000218510_20 (sequence is synthesized)
tcttaaccatcaggcgacattgggcaaactgcggctcagaaagataaagaacttctccggagcgaaaaagctgctaagaatgtatccaaaactccgcacgaagtctggaacgttttttct

SEQ ID NO: 818940 - DNA, 120 bp, Artificial Sequence
  ENSG00000218510_21 (sequence is synthesized)
agctcggggagtggtggtctccctttcctggagtcatttgtgggagttagggtcttatcctgatctttcctcgtcccccgctcccccgtcctccgaggtggcagctgcgtaggtatttaa
